United States Patent Application Publication US 2024/0327476 A1 - sequence listing, part 120

SEQ ID NO: 228730 - DNA, 1839 bp, synthetic construct
  misc_feature 1..1839: note = Description of Artificial Sequence: Synthetic coding sequence
  source 1..1839: mol_type = other DNA
atgagccacccatcgtggcttccccctaaatcaactggggagcctttgggccacgtcccagccagaatggaaaccacacattctttcggcaacccctccatctctgttagcacgcaacagcccccaaagaaattcgctcccgtggttgcacccaagccgaaatataacccgtacaaacagccaggtggggagggcgattttttgccacccccaccaccacccctggacgatagttcagctttacctagtatctcgggcaactttccccctccgccaccactagatgaggaagcgtttaaagtacagggaaatcctgggggaaaaaccttagaagaacgcaggtccagcctcgatgcagagatagactctctgacaagcattctggccgatctggaatgctcatccccttataagcctcgcccaccccagtccagcacaggttcgacagcctccccacccgtgtccacacctgttaccgggcataaacgcatggttattccaaatcagccccctctgacggcgactaagaagtctacactcaaaccccagccagcccctcaggccggacctatccctgtggcgccaattggcactcttaaaccgcagccccagcccgtgcccgctagctacacaacagcctcaacgtccagccgcccaacatttaacgtgcaggtgaagtctgcccaaccatccccccattacatggctgctccctctagcggccagatctacggatctggcccacagggttataatacccagcctgtgccagtctctggacagtgcccacctcccagtacacggggagggatggactatgcttacatcccccctcccggactccagcctgagcccggatacggatacgcacctaatcaaggcagatattatgaaggttattacgccgcaggtccgggatacgggggaagaaacgacagcgaccctacgtatggacagcaggggcacccgaatacgtggaagcgtgagccaggctatacgcccccaggggctggcaaccaaaatccaccaggcatgtacccagtgacgggtcccaagaaaacttacatcaccgaccctgttagtgctccgtgtgcccctccgctgcagcccaagggaggccactccggacagttgggcccatccagtgtagctccttcatttcgccctgaggacgaactggaacatcttaccaagaagatgctctacgacatggagaacccacctgctgatgaatacttcgggaggtgtgcgagatgtggggagaatgttgttggggaaggtacggggtgtacagccatggatcaggtgtttcacgtcgactgtttcacttgtattatatgtaacaacaagctgcggggtcagcccttctatgcggtggagaaaaaggcttactgcgagccttgttatattaatactttggaacaatgcaatgtgtgctctaaacctattatggaacgtatcctgcgtgcaacggggaaggcttaccacccacattgttttacctgtgtcatgtgccaccggagtctcgacggcattccttttactgtggacgcgggtggactgatacattgcatcgaagactttcacaagaaatttgcacccaggtgttcggtgtgcaaagagccgatcatgcctgctcctggccaagaggaaaccgtacggatcgtcgcactcgaccgggactttcatgttcattgttacaggtgcgaagactgtggtggcctgttgtccgagggagacaaccagggctgctatcccctggacggccacatcttatgtaaaacttgcaacagtgcgagaatcagggtgctcacagccaaggcctctactgacctttag

SEQ ID NO: 228731 - DNA, 471 bp, synthetic construct
  misc_feature 1..471: note = Description of Artificial Sequence: Synthetic coding sequence
  source 1..471: mol_type = other DNA
atgcagaagaaggagaaatcatttggcattcagatgttgtctgttcaaccagatacaaagccgaagggctgcgccggatgtaataggaagatcaaagaccgatacttgctcaaggctttggacaaatactggcacgaagactgcctgaaatgcgcctgctgcgattgtcgcttaggggaggtgggttccactctatataccaaggctaacttgattctctgcaggagggactatcttcggctgttcggagtgacggggaattgtgctgcttgcagcaagcttattcccgcttttgaaatggtgatgagggccaaggacaatgtgtaccacctcgattgcttcgcctgtcagttgtgcaaccagaggttttgcgtgggggataagttctttcttaagaataacatgattctgtgtcagaccgattacgaagaggggttaatgaaggaagggtatgcccctcaggtacggtag

SEQ ID NO: 228732 - DNA, 438 bp, synthetic construct
  misc_feature 1..438: note = Description of Artificial Sequence: Synthetic coding sequence
  source 1..438: mol_type = other DNA
atgctatcggtgcaacctgataccaagcctaaagggtgcgcgggttgcaatcggaaaattaaagacaggtacctcctgaaggcgcttgataaatactggcatgaggattgtctcaagtgcgcttgctgtgactgtcggctgggcgaagttgggtctacgctttataccaaggctaatctcattctgtgccgtcgggattacctcaggctctttggcgtcaccggcaattgtgccgcttgctctaagttgatacccgctttcgaaatggttatgagagctaaagacaatgtataccatctcgactgttttgcctgtcagctatgcaaccagcggttctgtgtgggcgacaaattcttcttgaagaacaatatgattctgtgtcagaccgattacgaagagggtctgatgaaagagggctatgctccacaggtgaggtag

SEQ ID NO: 228733 - DNA, 438 bp, synthetic construct
  misc_feature 1..438: note = Description of Artificial Sequence: Synthetic coding sequence
  source 1..438: mol_type = other DNA
atgctgtcagtgcaaccagataccaagcctaaaggctgtgctggctgcaataggaaaattaaagatagatacctgctcaaagcccttgacaagtactggcatgaggattgtctgaagtgtgcttgttgcgattgccgcctgggcgaggtagggtccaccttgtacacgaaggcgaatcttattctatgccgccgagactatctaaggctgtttggcgtcacagggaactgtgcagcctgttccaaattgattccagcatttgaaatggtaatgcgggctaaggacaacgtgtaccacctcgattgtttcgcatgccagctatgcaatcagcgtttctgcgtgggcgataagtttttcctcaaaaacaatatgatcctgtgccagacggactatgaggaaggtctaatgaaagaggggtacgccccacaggttcggtag

SEQ ID NO: 228734 - DNA, 438 bp, synthetic construct
  misc_feature 1..438: note = Description of Artificial Sequence: Synthetic coding sequence
  source 1..438: mol_type = other DNA
atgctgagtgtccagccagacaccaagccaaaggggtgtgcagggtgcaaccggaaaattaaggatcggtatcttctcaaggcgttagacaagtactggcatgaagactgtttgaagtgtgcttgttgtgattgccgcctgggggaagtaggatccactctgtatacaaaggctaatctgatactgtgccgaagagactacttgcggcttttcggcgttacaggaaattgcgccgcatgcagcaaactgatccctgccttcgaaatggtaatgagagccaaggacaacgtctatcatttggattgcttcgcttgtcagctgtgcaaccaacgattctgcgtgggcgacaaattttttctcaaaaacaatatgatactctgtcaaactgactacgaagagggccttatgaaggagggttacgcaccccaagtgaggtag

SEQ ID NO: 228735 - DNA, 438 bp, synthetic construct
  misc_feature 1..438: note = Description of Artificial Sequence: Synthetic coding sequence
  source 1..438: mol_type = other DNA
atgcttagcgtgcagcccgacacaaaacctaagggctgtgcaggctgtaacagaaagatcaaggacagatatctgctgaaagcactggataagtactggcatgaagattgtctgaaatgcgcctgttgcgattgccgactgggcgaggtgggctctaccctctataccaaggctaatctgattttatgccgccgagactacctgcgcctgtttggggtaaccggaaactgcgccgcttgctctaaactgatacccgctttcgaaatggttatgagagccaaggacaacgtttaccacctagattgttttgcatgtcaactgtgcaaccaacggttctgcgtgggagacaaattctttttaaagaacaatatgattctctgccaaacagattacgaggagggactgatgaaagaaggctatgccccacaagtcagatag

SEQ ID NO: 228736 - DNA, 438 bp, synthetic construct
  misc_feature 1..438: note = Description of Artificial Sequence: Synthetic coding sequence
  source 1..438: mol_type = other DNA
atgctgagtgtgcaacccgacacaaagccaaaggggtgcgcaggatgtaaccgcaaaatcaaagatcgctacttactgaaggcactcgacaagtactggcacgaggattgtttgaagtgcgcttgctgtgattgtcgtctgggagaggtaggatctaccttatataccaaggcgaatcttattctgtgtaggagagattatctccgcctgtttggcgtgacggggaactgcgcggcttgttcgaaactcattcccgctttcgaaatggtgatgcgggcaaaagataacgtgtaccacttagattgcttcgcttgtcagctgtgcaaccagaggttttgcgtgggagacaaattctttctaaagaataatatgattttgtgccagaccgactacgaggaaggtctgatgaaggagggttacgctccccaggtgagatag

SEQ ID NO: 228737 - DNA, 438 bp, synthetic construct
  misc_feature 1..438: note = Description of Artificial Sequence: Synthetic coding sequence
  source 1..438: mol_type = other DNA
atgctgtctgtgcagcctgataccaagccgaagggctgcgcaggatgcaaccggaaaataaaggaccgctacctgctaaaggctctagacaagtattggcacgaggactgcctgaagtgcgcatgttgtgattgtagactcggtgaagttggatctacattatatactaaagctaacctaatactgtgccgacgagactatctccgcctgtttggcgtaacaggtaattgcgcagcgtgttcaaaactgatccctgcattcgagatggtgatgcgagcaaaagacaacgtgtaccatctggactgcttcgcgtgccagctgtgcaatcaaaggttctgcgtcggcgataagttctttctcaagaacaatatgattctgtgtcaaaccgactacgaggagggcttgatgaaagaaggatatgcaccccaggtgcgctag

SEQ ID NO: 228738 - DNA, 438 bp, synthetic construct
  misc_feature 1..438: note = Description of Artificial Sequence: Synthetic coding sequence
  source 1..438: mol_type = other DNA
atgttgtccgtgcaacctgatacaaagcccaaaggttgtgcaggctgcaaccgaaaaattaaagatcgctatctattaaaggcactagataagtactggcacgaagattgcctgaagtgcgcttgctgcgactgtagactgggcgaagtggggagcacgctgtacactaaggccaacctgatactgtgccggcgagactatctcaggctcttcggtgttaccggaaattgtgccgcatgctccaaactgatacctgcctttgaaatggtaatgcgggctaaggataatgtctatcatctagactgtttcgcatgccagctgtgcaatcaacgattctgtgttggggataaattcttcctcaagaacaacatgatcctgtgccagaccgactatgaggagggactgatgaaggagggctatgccccacaagtgcgctag

SEQ ID NO: 228739 - DNA, 357 bp, synthetic construct
  misc_feature 1..357: note = Description of Artificial Sequence: Synthetic coding sequence
  source 1..357: mol_type = other DNA
atgttatccgtgcagcctgatactaagcctaaaggctgcgcgggatgcaatcggaagatcaaagatcgatatttactcaaggcgctggacaagtattggcatgaagattgtttgaagtgtgcctgctgtgactgtcgccttggagaggtgggctcgactctctacactaaagccaacctgatcctgtgccggagagattacctccgactgtttggcgtgaccggtaattgtgctgcatgtagcaagttaatccctgccttcgagatggtgatgagggcaaaagataacgtttaccacctcgattgtttcgcttgtcagctatgcaaccagaggttctgtgttggagacaagttttag

SEQ ID NO: 228740 - DNA, 177 bp, synthetic construct
  misc_feature 1..177: note = Description of Artificial Sequence: Synthetic coding sequence
  source 1..177: mol_type = other DNA
atgctttccgtgcaaccagacacaaaaccaaaggggtgtgcgggttgcaacaggaagatcaaggaccggtacctattaaaagcattggataagtattggcacgaggactgccttaagtgcgcatgttgtgactgtcgcctgggtgaagtggggtccactttgtacacaaaggcctag

SEQ ID NO: 228741 - DNA, 294 bp, synthetic construct
  misc_feature 1..294: note = Description of Artificial Sequence: Synthetic coding sequence
  source 1..294: mol_type = other DNA
atgctgagcgtccagccggataccaagcctaagggctgcgccggatgtaacaggaagatcaaggatagatatcttttgaaggcacttgacaagtattggcatgaggattgtctcaagtgcgcttgttgtgactgccgtcttggcgaggtgggatctacgctgtatacaaaagcgaatttaatactgtgtagaagggattatctaagactgttcggagtcacaggaaattgtgctgcatgctccaagctcattcctgctttcgaaatggtgatgagggccaaggacaatgtctag

SEQ ID NO: 228742 - DNA, 357 bp, synthetic construct
  misc_feature 1..357: note = Description of Artificial Sequence: Synthetic coding sequence
  source 1..357: mol_type = other DNA
atgctgtcagttcagccagataccaagcccaagggctgcgctggatgcaataggaaaattaaggatcgatacctccttaaggccttggacaaatactggcatgaggattgcctgaaatgtgcctgttgtgactgtaggctgggggaggtgggttctaccctgtacacaaaggccaacttgattctatgtaggagggattacttgcggttattcggagtaaccggaaactgcgcagcctgtagcaagttaatcccggcatttgagatggtcatgagggccaaggacaatgtatatcacctggattgcttcgcatgtcaactctgcaatcagagattttgcgttggagacaagttctag

SEQ ID NO: 228743 - DNA, 255 bp, synthetic construct
  misc_feature 1..255: note = Description of Artificial Sequence: Synthetic coding sequence
  source 1..255: mol_type = other DNA
atgctgtccgttcagcctgatacgaagcccaaaggctgtgccggatgtaacaggaaaatcaaggaccggtatctcctgaaagccctggacaagtattggcacgaggactgtcttaaatgcgcatgttgtgactgccggctaggggaagtaggcagcaccctctatactaaggccaacttgattctgtgtaggcgagactatctgcgtcttttcggagtgacaggtaactgtgctgcttgttctaaattaatctag

SEQ ID NO: 228744 - DNA, 438 bp, synthetic construct
  misc_feature 1..438: note = Description of Artificial Sequence: Synthetic coding sequence
  source 1..438: mol_type = other DNA
atgctgtccgtccagcccgataccaagccaaaaggctgcgccggatgcaatagaaaaattaaggaccgttacctcctgaaggcactggacaagtattggcacgaagattgcctgaaatgtgcgtgttgcgattgccggctcggggaagttggatcgaccttatacacgaaagctaacctgatcttgtgtcggagagattatctacggctatttggagtaaccggtaattgtgctgcatgttctaaattgattcctgcctttgagatggtgatgcgagccaaggacaacgtgtaccacctggactgttttgcatgtcagctgtgcaatcagcgattctgcgtgggcgacaagttcttcttgaaaaacaatatgatactttgccagaccgattatgaagaggggctgatgaaagaggggtacgcacctcaggtgcggtag

SEQ ID NO: 228745 - DNA, 492 bp, synthetic construct
  misc_feature 1..492: note = Description of Artificial Sequence: Synthetic coding sequence
  source 1..492: mol_type = other DNA
atgcttatggagggcggacgcgcagcagcagcccgtaacgtctcaagtatccagatgctgagtgtgcaaccagacacgaagcccaagggctgtgccggatgtaaccggaagatcaaggataggtacctattgaaagcgctcgacaagtactggcacgaagactgtctgaagtgcgcctgttgcgattgccgtctgggcgaagtgggctcaaccctctacaccaaagccaatctgatcctgtgtagacgcgattatctgcggctgttcggggtgaccgggaactgcgctgcctgctccaagcttatcccggctttcgagatggtgatgagggcaaaagataacgtgtatcacctcgattgcttcgcttgccaattatgtaatcagcgcttctgcgtgggcgacaagttcttcctcaaaaacaacatgatcctctgccagaccgactatgaagaggggcttatgaaagaaggctatgctccccaggtccgatag

SEQ ID NO: 228746 - DNA, 438 bp, synthetic construct
  misc_feature 1..438: note = Description of Artificial Sequence: Synthetic coding sequence
  source 1..438: mol_type = other DNA
atgctgagcgtccaaccggacacaaagccaaagggatgtgcaggatgcaaccggaaaatcaaggaccgatacttgctgaaggccctggacaagtattggcacgaggactgcctgaagtgcgcatgctgtgactgtaggcttggggaggtcgggtcgaccctctacaccaaagcaaatctgatcctgtgccgccgtgattacctcaggctgttcggcgtgaccggtaattgcgcagcatgctcaaaattaattcctgccttcgagatggtgatgcgggctaaggataacgtgtaccaccttgactgtttcgcttgtcagctttgcaaccaacgcttttgcgtcggcgacaaatttttcttgaaaaacaacatgattctgtgccaaacggactatgaggagggcttaatgaaagagggctatgctccacaggtcaggtag

SEQ ID NO: 228747 - DNA, 378 bp, synthetic construct
  misc_feature 1..378: note = Description of Artificial Sequence: Synthetic coding sequence
  source 1..378: mol_type = other DNA
atgcttagtgtgcagccggacaccaagccaaaggggtgtgctggctgcaaccgcaagattaaggacagatatttattaaaagcattagacaagtactggcatgaagactgtctgaagtgcgcgtgctgcgattgtaggtgggaaaggctgtttggcgtaaccgggaattgtgcagcttgctccaagttaattccagcattcgagatggtgatgcgggctaaggacaacgtttaccatctagactgcttcgcttgccagctgtgcaaccagagattctgtgttggagataagttctttctcaagaacaatatgatcctctgccagactgattatgaggaagggctaatgaaggagggttacgctccgcaggttcgttag

SEQ ID NO: 228748 - DNA, 267 bp, synthetic construct
  misc_feature 1..267: note = Description of Artificial Sequence: Synthetic coding sequence
  source 1..267: mol_type = other DNA
atgttgtcagtccagcccgatacaaagccaaaagggtgcgcgggatgtaacaggaagataaaagatagatacctgctgaaggcactcgacaaatattggcacgaagattgtcttaagtgtgcctgttgtgattgtaggttgggagaggtgggctctactctgtatactaaagcgaatctgatactgtgtcgtcgggactatctgcgattattcggggtgactgggaactgtgctgcatgtagcaaattaatacctgcttttgaatag

SEQ ID NO: 228749 - DNA, 333 bp, synthetic construct
  misc_feature 1..333: note = Description of Artificial Sequence: Synthetic coding sequence
  source 1..333: mol_type = other DNA
atgctatcagtgcagcctgatacgaagcctaaaggatgcgcaggctgtaatcggaagatcaaagacaggtacctcctgaaggccctggataaatactggcacgaggattgcctgaagtgcgcatgctgtgactgtaggcttggtgaggtgggatccactctttacacgaaagccaatctgattttgtgccgtcgcgattacctcagacttttcggggtgaccggtaactgtgcagcgtgctctaaacttatcccagccttcgagatggttatgcgcgctaaggacaacgtctaccacttggattgtttcgcttgccagttgtgtaatcagtag

SEQ ID NO: 228750 - DNA, 357 bp, synthetic construct
  misc_feature 1..357: note = Description of Artificial Sequence: Synthetic coding sequence
  source 1..357: mol_type = other DNA
atgcttagcgtgcagcctgatacaaagccaaaaggatgtgccggttgcaataggaaaattaaggataggtatctcctgaaagctttagacaagtattggcacgaggattgcctcaagtgcgcctgttgtgattgcagattgggcgaggttggctctaccctctatacgaaggctaacctgatcctatgtagaagagactacctgcgcctcttcggagtgaccggcaattgtgcagcttgctccaagcttattcccgcttttgagatggtgatgagggccaaggacaacgtgtatcatctcgactgctttgcatgccaactttgtaaccagcggttctgcgttggagataagttttag

SEQ ID NO: 228751 - DNA, 498 bp, synthetic construct
  misc_feature 1..498: note = Description of Artificial Sequence: Synthetic coding sequence
  source 1..498: mol_type = other DNA
atggttaatccaggatcttcctcccaaccccctccggtgactgctggttctttaagctggaagagatgcgcaggctgcggcggtaagatcgctgaccggttcttgctatacgccatggattcttactggcactcccgctgtctgaaatgctcgtgttgccaagcacagctgggggacatcggtacatcttgctataccaaatccgggatgatcctctgccggaacgattacattagactgttcggcaactccggcgcatgttccgcctgcgggcagtctattcctgcctccgagctcgtgatgcgcgctcagggaaatgtgtatcacttaaaatgtttcacatgctccacctgtcgaaatcgcttagtgcccggtgaccgcttccactacatcaatgggagtctgttctgtgaacatgatagacccactgccctgataaacggccacctgaattcactgcagtccaacccactgctgccagaccaaaaggtgtgctag

SEQ ID NO: 228752 - DNA, 498 bp, synthetic construct
  misc_feature 1..498: note = Description of Artificial Sequence: Synthetic coding sequence
  source 1..498: mol_type = other DNA
atggtgaatcctggctcatcaagtcaaccgccaccagtcaccgctggcagccttagttggaagcgctgcgcgggatgtggcggaaaaatcgctgaccgctttctgctctacgccatggactcttactggcactccagatgtttaaagtgtagctgttgccaggcccagctcggcgatattgggactagttgttataccaagagcgggatgatcctgtgccgcaacgactatatccgtctttttggcaactcaggtgcctgcagtgcctgcggccagagcatcccagccagcgaactcgttatgcgggctcagggaaacgtgtatcatttgaaatgcttcacctgtagtacctgccgcaacagactggtgccaggcgacagatttcattatatcaacggatcgctgttttgtgagcatgaccgtccaacagcactgatcaatggccacctcaattcgctgcaaagtaacccccttttaccggatcagaaggtgtgctag

SEQ ID NO: 228753 - DNA, 2031 bp, synthetic construct
  misc_feature 1..2031: note = Description of Artificial Sequence: Synthetic coding sequence
  source 1..2031: mol_type = other DNA
atggacaaatatgacgacctgggtcttgaggcttctaagttcattgaagaccttaacatgtatgaagcaagcaaggacggactgttccgtgtcgataagggcgctggcaataatcccgagtttgaagaaactcgcagagtgttcgcaacaaagatggctaaaattcacctgcagcagcagcaacagcagcttctccaggaggaaactctgccaaggggatcccgcggtccagtcaatgggggaggacggctgggccctcaggcaaggtgggaggtggtaggatctaaactcactgtggatggagcggctaaacccccattggccgcatccaccggagcaccaggggcagtgaccacgcttgccgctggtcagccaccctatcccccacaagagcagcggtccagaccttacctgcacggaacccgacacgggtcccaagattgtggatcgagagaaagtctcgcgacaagcgagatgagcgctttccaccagccaggcccatgcgaggacccctcatgcctgacgcacggtgactattatgacaacctctccctagctagccctaagtggggcgacaagccgggagtctctccctcaatagggctatctgtagggtcaggatggccgagtagtcccggaagtgacccaccactcccaaaaccatgcggagatcacccactcaaccaccggcagttgagtctgagcagctctcgctctagcgagggaagcttaggtggccagaatagcggtatcggcggacgaagctcagaaaagcctacgggactttggagtaccgcaagtagtcaaagggtcagccccggattgccttcccccaatttagagaacggtgccccagccgttggacctgtgcaaccccgtactcctagtgtgagtgcaccactggccctcagttgtcctcgccagggaggacttccaagaagcaattccggattgggcggtgaagtctccggagtcatgtccaaacctaatgtggatccgcagccatggtttcaagacggccctaagtcttacctgagctcctctgctccttcgtcttctccagcgggattggatgggagtcagcagggagccgtgccgggtcttggtcctaaaccgggatgcactgatctgggtacgggccctaagctctcgcccacttcattggtacaccctgtaatgtcaaccctccccgaactgtcttgtaaggaaggccctctcggatggagcagtgacggcagcctgggcagcgtcctgctggacagtcccagctctccgagggtccgtctcccgtgtcagccattggttcccggaccggagctgcgaccatctgctgccgaacttaaactggaagccctgacacaaaggttggaaagagaaatggacgcgcaccctaaggccgactatttcggagcctgtgtcaagtgctccaagggggtcttcggggctggccaagcttgccaagccatgggcaacttataccatgacacatgtttcacatgcgccgcttgtagcaggaagcttcgaggaaaagctttctactttgtgaacggtaaggtgttctgcgaggaagattttctgtattccggttttcagcaaagcgcagatcggtgttttttatgtggccatctcattatggacatgatactacaggctctgggtaagtcttatcacccaggttgtttcaggtgcgttatctgcaacgaatgtcttgacggggtaccattcactgtcgattctgaaaataagatctactgtgtgagggactatcataaggtactggcccctaagtgcgccgcttgtgggcttcctattctccctccagagggcagcgatgaaaccatacgggtggtttccatggacagggattatcacgtggagtgttaccattgcgaggactgcgggctcgagctcaatgacgaggatgggcatagatgttatccccttgaagatcaccttttttgtcactcctgccacgttaagagactcgagaaaagacccagtagtactgccctgcaccagcaccacttctag

SEQ ID NO: 228754 - DNA, 1221 bp, synthetic construct
  misc_feature 1..1221: note = Description of Artificial Sequence: Synthetic coding sequence
  source 1..1221: mol_type = other DNA
atggtccactgcgccggttgtaagagaccgatactggaccggttccttttgaacgtcctggatcgcgcatggcatgtgaaatgcgtgcaatgttgcgagtgtaagtgtaacctcactgagaaatgtttctcccgagaaggtaagctttactgcaaaaatgacttttttaggtgctttggaactaagtgcgccggttgcgcacagggaatcagtccttctgatctggtgcgcagagcacgctctaaagtgttccatctcaactgtttcacctgcatgatgtgcaataagcagctgtcaaccggggaggagctgtacatcatcgacgagaacaaatttgtatgcaaggaggattatcttagtaactcaagtgttgccaaagaaaactctctccattcagcaactacaggcagtgacccctctctgagcccagactctcaggacccctcacaagatgacgcgaaagactccgaatctgctaacgtaagtgacaaggaggccggaagtaatgagaacgatgatcagaacttgggcgctaagcggcgtggcccaaggacaacaattaaggccaagcagctagagaccctcaaggccgcatttgcagcaaccccaaagccaactagacatatacgagagcagctggcccaagagactggcttgaatatgagagtgattcaagtttggtttcagaacaggagaagcaaggaaaggcggatgaagcagctgtccgctctgggcgcacgtcgacatgcttttttccggagtccaaggcgaatgcgcccactggttgaccggctggaaccaggcgagctcattccaaatgggcctttctctttttatggagattaccagtctgagtactacgggccaggcggtaattatgacttcttccctcaagggcctccttcatcccaggcgcaaacacccgtggatctaccatttgtaccttcatctgggccatcaggcaccccactcgggggtctggagcatcctctccccggtcaccatccatcctcagaggctcagagattcaccgatatcctcgctcacccacccggagactctccctcccccgagccgagcttgccgggtcctctccactccatgagtgccgaggtctttggcccaagtcccccattttcaagtctttcagtaaatggcggtgcctcatacgggaaccacctctctcatcctcccgagatgaacgaagcagccgtctggtag

SEQ ID NO: 228755 - DNA, 1221 bp, synthetic construct
  misc_feature 1..1221: note = Description of Artificial Sequence: Synthetic coding sequence
  source 1..1221: mol_type = other DNA
atgcttttccattccctctctgggcctgaggtacacggcgtgatcgatgagatggatcggcgtgcaaagtctgaggctcccgctatatcttctgcaatcgacaggggcgataccgaaacaaccatgccgtcaatatcatctgatcgcgcagctttatgcgctgggtgtgggggtaagatctccgatcggtactacctgctcgctgtagacaagcagtggcacatgaggtgcctgaaatgctgcgagtgcaaactgaacttggagtcggagctgacttgtttctcaaaagatggctctatatactgcaaggaggattactatcggaggttctcggtgcagcggtgtgctagatgccacctcggaatctcagcctccgagatggttatgagagccagagacctagtttaccatcttaattgttttacctgcactacatgcaacaaaatgctcacaacaggcgaccatttcggcatgaaagatagccttgtgtattgtaggctgcactttgaggcgttgctgcaaggcgagtatccagctcactttaatcacgcagatgtcgctgccgctgcagctgccgcagcggcagctaagagtgccggactgggggcagctggggctaacccactgggtttgccgtattataacggagtgggaacggtccaaaaaggtcgcccacggaagcgcaagagccctggccctggagcagatctcgccgcttacaacgcagctctgagctgcaatgagaatgacgcagagcacttggaccgggaccagccctacccatcttctcaaaagacaaagcggatgcgcacgagtttcaaacatcaccagcttcgcacaatgaagtcatattttgctataaaccacaaccccgatgcaaaagatctcaagcagctcgcacagaaaaccgggctcactaaaagagtcctgcaggtctggtttcagaatgcaagggccaaatttcggcgtaacctgctacgtcaagaaaataccggggtggataaatcaacagacgccgctcttcagacagggacgccgagtggccctgcctccgagctcagcaatgctagcctgagcccttccagcacaccaaccacacttaccgatctgacatccccaactctgcccaccgttacctccgtgcttacctcagtaccagggaacctggagggacacgagcctcacagtccaagccagaccactctgaccaatctgttttag

SEQ ID NO: 228756 - DNA, 1194 bp, synthetic construct
  misc_feature 1..1194: note = Description of Artificial Sequence: Synthetic coding sequence
  source 1..1194: mol_type = other DNA
atggaggccaggggtgagctcggacccgctcgagaaagcgctgggggagaccttttactcgcactactggcacggcgagcggatctccgcagggaaataccactgtgcgcaggctgtgatcagcacattctcgataggttcattctgaaggccactgccaccggcacggcctccgtgagttcagcagccacagctacccctcttgccgaacggtgtttttccaggggggagagcgtctattgcaaagatgatttctttaagagatttggaacaaagtgtgccgcatgtcagctgggcatacctcccactcaagtggttagacgggcacaggactttgtttaccatctgcattgtttcgcttgtgtggtgtgcaaaaggcagcttgcgacgggcgacgagttctatctgatggaggactctcgactggtatgtaaagcagattatgagactgctaagcagcgtgaggccgaagcaactgctaaaagacccagaactaccatcaccgctaaacagctcgaaactctcaagtcagcgtataacacatctccaaaacctgcgaggcatgtgagagaacaattatcttctgaaacggggctggacatgcgggtcgtacaagtgtggtttcagaatcgcagggcaaaggaaaagcgcctgaaaaaggacgccggaagacagaggtggggacagtattttaggaatatgaagcgctccaggggaggatcaaaaagtgacaaggattcggtgcaggaggggcaagactccgatgccgaagtgtctttcccagtaagcctgccctggcgcaaatgggcccgacctatggcaagtaccggcgcttggggacaccccggactgggccctgccctggggtcacccggtcagctgcttcccggtgcatggaggcccggacggccaagagcagtgccaagagctgcatccagacaaccactgcggtgtccccctatcccccgaagaccagccgaaccgccttggcccccactcctgtcttcacttgtctatcctgacacgtctctgggcttagtaccttccggagcaccagggggtcctccaccaatgcgggtgctggcaggaaatggtccctcttctgacttatccaccggtagctccgggggataccccgattttcccgcaagcccggctagctggctggacgaagtcgaccatgcccagttctag

SEQ ID NO: 228757 - DNA, 1209 bp, synthetic construct
  misc_feature 1..1209: note = Description of Artificial Sequence: Synthetic coding sequence
  source 1..1209: mol_type = other DNA
atggaagctagaggcgaactgggccctgccagggaatccgcaggcggtgatctgcttcttgcgctgctggcacgcagagccgacttaagaagggaaatacccctctgcgccggatgcgaccagcatatactggatagatttattctcaaggcactggaccgtcactggcacagtaaatgcctcaagtgctccgactgtcacacacctcttgcggaaaggtgtttttctcgcggtgaatcagtgtactgcaaagacgattttttcaaacgcttcggaacgaagtgcgccgcatgccaactgggtattccgccaactcaagtcgtgagaagggcccaagactttgtctatcatctgcattgcttcgcttgcgtcgtgtgcaaaaggcagcttgccaccggtgacgagttctacctcatggaggactcgaggttggtgtgcaaggccgactatgaaacagctaaacagcgggaggccgaagcaaccgcaaagcgaccacgtaccaccattacggctaagcagctggaaactctcaaaagtgcctataataccagcccaaagccagcaagacatgtacgggagcagttgagcagtgagactgggctggatatgcgtgtggtgcaggtgtggtttcagaaccgccgagctaaggagaaacgactgaaaaaggatgccggaaggcagagatgggggcagtacttcagaaatatgaaaagaagccgcggtgggagtaagagcgataaggacagtgtgcaagagggccaagattccgacgcagaggtgtccttcccggacgagcccagtctggcagaaatgggtcccgcaaacggcttgtatggctcattaggcgagcccactcaggccctcggccgaccctccggggcactcgggaacttctctcttgaacatggaggattggcaggtcctgagcagtacagggaactgcgccctggatcaccctatggcgtcccaccctctcccgcagcccctcaatctctaccagggcctcagccgctcctgtcatcgctggtgtatccagatacttccctcggactagtgccttctggcgctcctggaggtcctccaccaatgcgggtactagccggaaatggcccatctagcgatctctcgaccggctcctctggcggatatcctgactttccagcctcccctgccagttggctcgacgaggtagatcacgctcagttctag

SEQ ID NO: 228758 - DNA, 1194 bp, synthetic construct
  misc_feature 1..1194: note = Description of Artificial Sequence: Synthetic coding sequence
  source 1..1194: mol_type = other DNA
atgttactggaaacagggttagaacgcgacagagcccgacctggcgctgcggctgtctgcaccctgggaggaacaagggaaatccccctgtgcgctggatgcgaccaacacatattagaccgttttattcttaaagcgctcgatagacattggcacagtaaatgccttaagtgcagcgactgccataccccgctggcagagcggtgtttcagtagaggtgaatcagtgtattgtaaagatgatttcttcaaacgattcggtaccaaatgtgccgcttgccagctgggcattccacctacgcaggtcgttagacgcgcacaggattttgtttatcacctccattgttttgcatgtgtggtgtgtaagcgccagctggctacaggtgatgagttttatctcatggaggactcccgtctggtctgcaaagctgattacgagaccgccaaacagcgagaagccgaagcaaccgccaagcggccacgaacaacaatcaccgcgaagcagctggaaactttaaaaagcgcgtataacaccagtcccaagcccgcaagacatgtgcgagagcaattaagcagcgaaactggcctcgatatgagggtagtacaagtgtggttccagaacagaagagccaaagagaaacggcttaagaaggatgccggacgccagaggtggggccaatacttccggaatatgaaacggagccgcggaggcagcaagtctgacaaggactcagtccaagaggggcaggacagtgacgcagaggtcagcttcccagatgagccaagtctggctgaaatgggtcccgctaatggcctgtatggcagtctcggcgagccgacacaggctctgggtaggccatccggcgctctgggaaactttagtcttgaacatggcggactagccggacctgagcaatacagggagctcaggcctggctccccatacggtgtgccaccctctccagccgcaccacaaagcctcccgggacctcagccactgctgagttcactagtgtatccagatacctcactgggcttagtaccttctggcgcacctggtggaccacctcctatgcgtgtcttagctggcaacggtccttcctccgatctgtctaccggctcctccgggggataccctgatttccccgctagtccagcgtcttggcttgacgaagtcgaccatgcccaattctag

SEQ ID NO: 228759 - DNA, 1173 bp, synthetic construct
  misc_feature 1..1173: note = Description of Artificial Sequence: Synthetic coding sequence
  source 1..1173: mol_type = other DNA
atgatgcagtcagccactgtgcccgctgagggggcagtaaagggattaccagagatgctgggggtccccatgcaacagataccccagtgtgccggatgcaaccagcatattcttgacaagttcattttgaaggtcttagacagacactggcattccagttgcctcaaatgcgctgattgccaaatgcagctcgcagatcgatgtttttcaagagcaggcagtgtgtactgtaaagaagatttcttcaaaagatttgggaccaagtgtactgcctgccagcagggtatcccccctacacaggtggtgcggaaagcccaggactttgtgtatcaccttcactgcttcgcctgcatcatttgtaatagacagcttgccaccggagatgagttctatctgatggaggacgggcgactggtctgtaaagaggattacgaaacagccaagcagaatgatgacagcgaagcgggtgctaagagacctcgcacaaccattacagctaagcagctcgagacactcaaaaatgcctataaaaactctcccaaaccggcaaggcacgttcgagaacagctctcaagtgagactggtctggatatgagggtcgttcaggtgtggttccaaaataggagagcaaaggaaaagcgactgaaaaaggacgctggccgacatcgatgggggcaattttataagagcgttaaacgcagccggggatctagcaaacaagagaaggaatcgtcggccgaggattgcggggtgtctgatagcgaactgtcctttagagaggatcaaattctgagcgagctgggtcataccaacaggatttacgggaatgtaggcgatgtgaccggcggacagctaatgaacggctcattctctatggacggcacaggacagtcatatcaggacctgcgggacggctcgccatacggaatcccacagtccccatctagcatctcaagcctgccaagtcacgctccgctgcttaacgggctggactatacggttgacagcaatctgggtatcatcgcccacgccggtcagggcgtctcccaaaccctcagagctatggccggaggccctacctcagatatcagtacaggatcgagtgtcggatatcccgactttcccacctctcctggctcatggctggatgagatggaccaccctccattttag

SEQ ID NO: 228760 - DNA, 1209 bp, synthetic construct
  misc_feature 1..1209: note = Description of Artificial Sequence: Synthetic coding sequence
  source 1..1209: mol_type = other DNA
atgatggtccactgtgccggatgcgagcggcctatccttgacaggttcctgctgaacgttctcgatagagcctggcacattaagtgcgtgcagtgctgcgaatgcaagactaatttgagcgagaagtgtttctctcgcgagggcaagctgtattgcaagaatgacttctttcgcagattcgggactaaatgcgccggttgtgcccaggggatatcaccatctgacctagtgcggaaagcgagatctaaagtctttcacctgaactgttttacatgtatggtgtgtaacaagcagctctccaccggcgaagaattgtacgtcatagacgaaaacaagttcgtctgtaaggacgactacctgtcatcatcatcactgaaggagggtagtctgaacagtgtgtcatcctgtaccgaccgtagtctgagcccggatctgcaggacgccctccaagatgaccccaaggaaactgataattcaacttcctcagataaagaaactgctaacaatgagaacgaggaacagaactccggcaccaaaaggcgaggccctcggaccacaatcaaggctaagcagcttgagaccctgaaggccgctttcgcagctacccccaagcccactcgacacatcagagagcagctcgcacaagagactggcttgaatatgcgagtgattcaggtgtggttccagaatcgcagaagcaaggaacgccgaatgaaacagttgtctgccctcggtgcgagaaggcatgccttttttcggagcccccgtcgcatgcgtcccctcgggggacggttggacgaatctgaaatgctgggaagcaccccatacacttattacggggactatcagggggactattacgcacctgggagcaactatgacttcttcgcccatggacccccatcccaagcacagagtccagccgatagctcttttttagcagcctccggtccagggtctacccctctgggtgctctcgagcctccgctggctggacctcatgctgccgacaatcccagattcacagacatgatctcgcatcctgatacaccttcccccgagccaggtctacctggcaccctgcaccccatgccaggggaagtgttcagcggagggcctagtccacccttcccgatgtccggaactagtgggtacagcggcccactctcacacccaaaccctgaactaaatgaagctgcagtgtggtag

SEQ ID NO: 228761 - DNA, 1071 bp, synthetic construct
  misc_feature 1..1071: note = Description of Artificial Sequence: Synthetic coding sequence
  source 1..1071: mol_type = other DNA
atgcaaattctgtccaggtgccaaggcctcatgtcagaggagtgtggcagaactaccgcgttggcagctgggagaacccgtaagggagcaggcgaagaaggattggtgagccctgaaggcgctggtgatgaggacagctgtagctcgtctgcccctctttcaccgagctccagtcccaggagtatggcctccggttcaggctgtcccccaggaaagtgtgtgtgtaactcatgcggcctggaaatcgtcgacaaatacctattgaaggtgaacgacttatgttggcacgtcagatgcctaagctgcagcgtatgcaggacaagcctcggaagacatactagctgttacatcaaagataaggatattttttgcaagctcgactactttcgtcgatacggcactagatgctcacgatgtggcagacacatacattctactgactgggtcaggcgcgcaaagggcaatgtctatcatctggcttgttttgcttgcttttcttgtaaaaggcagttgtctacgggggaagaatttgcgctggtagaggagaaagtcttgtgcagagtgcattacgactgtatgctggacaacttgaagagagaagtcgagaatgggaacggaatatctgtcgaaggcgctctgctaaccgagcaggacgtgaaccatcccaaacctgccaagagagccaggacgtcctttacagccgaccaattgcaagtgatgcaggcccagtttgctcaggacaataaccctgacgcccagacgcttcagaagttggctgagcgcacgggactctccaggcgtgtgattcaagtgtggttccagaactgccgggctagacataagaagcacgtctcacctaaccactcatccagtacgcctgttaccgcagtgcccccatctcgtctgtccccacctatgctggaggaaatggcctattccgcatacgtacctcaagatgggactatgctgaccgccctgcatagctatatggacgcccacagccccacaactctgggcctccagccactgttgccgcactccatgacacagcttccaatcagccacacatag

SEQ ID NO: 228762 - DNA, 1041 bp, synthetic construct
  misc_feature 1..1041: note = Description of Artificial Sequence: Synthetic coding sequence
  source 1..1041: mol_type = other DNA
atgtcagaggaatgtggcagaactactgcactggccgcaggcaggaccaggaaaggagcgggagaggagggtcttgtaagccccgagggcgctggtgacgaagactcttgctcaagctccgcccctctttcaccctctagttctcccaggtccatggcttcaggatccggttgccctcccggaaagtgcgtgtgtaattcgtgcggtctcgaaatagtggacaagtatctgctgaaggtaaatgacctatgctggcatgtgagatgtctttcttgtagtgtgtgtcggacatccctgggacgccacacatcatgctacattaaggacaaggacatcttttgtaaactggattatttccgcagatacggaacacgctgctctcgctgcggaaggcacattcacagtactgattgggtccgacgggctaaagggaatgtctaccatcttgcctgcttcgcttgcttttcatgcaagaggcagctgtccactggcgaggaattcgcgcttgtcgaagaaaaggtgctgtgccgggtgcactacgactgtatgttagataaccttaagcgggaggtcgagaacggcaacggcatcagtgtggagggagcgctcctgaccgagcaggatgtcaatcaccccaaacccgcaaaacgcgctcggaccagtttcaccgcggatcagctgcaggttatgcaggctcaattcgcccaggataacaaccccgatgcacagaccctgcaaaaacttgcggaacggactggtctgtcccggcgagtaatacaagtttggttccagaactgtcgagccagacacaagaaacatgtttcgcccaaccacagctcaagcactcctgtaacagccgtccctccgtctcgacttagcccaccaatgctcgaggagatggcttactccgcctacgtcccacaggatgggaccatgctgacagctttgcattcgtatatggatgctcactctccaacaacgctgggtctgcagccactcctccctcactctatgactcagttaccaatcagccacacttag

SEQ ID NO: 228763 - DNA, 1194 bp, synthetic construct
  misc_feature 1..1194: note = Description of Artificial Sequence: Synthetic coding sequence
  source 1..1194: mol_type = other DNA
atggagatcgtgggatgtcgggctgaggacaattcatgcccattccgcccaccagccatgctgttccatggcatttccggagggcacattcagggcatcatggaagaaatggagaggcgaagcaagacagaagccagactggcaaagggggctcagctgaatgggagggacgctggtatgccccctctgtccccagaaaagcccgcactctgcgcaggctgcggtgggaaaatctcagatcggtattatctgttggccgtcgacaaacaatggcacctgagatgtctgaaatgctgcgagtgcaagctcgccctggagtcggagctgacctgcttcgcaaaggatggctcaatttactgtaaagaggactactatcgacggttctctgtacaacggtgcgctcggtgtcatttaggaatcagtgcctccgagatggtaatgcgagctcgggacagtgtctaccacctctcatgctttacctgcagtacgtgtaataagaccttaaccaccggtgatcactttggtatgaaagactctctggtgtactgtcgcgcacattttgagacccttctgcaaggggaatacccaccacagcttagctacactgagcttgctgccaaatcagggggactcgcgctgccatatttcaatggtaccggaacagttcagaagggcaggccgaggaagcgaaagagccctgccttgggcgtagatatagtcaattacaactccggatgtaacgagaacgaggcggatcaccttgacagagaccagcaaccatatccaccgtctcagaaaacgaagcgaatgcgtaccagcttcaaacatcaccagctccgaaccatgaagtcatattttgccatcaatcacaatcctgatgccaaggacctgaagcagcttgcccaaaagaccggcttgactaagcgcgttctccaggtttggttccagaacgcaagggctaagttcagacgcaatcttctcagacaagaaaacgggggtgtggacaaggcggatggtaccagcctccctgccccaccctccgctgattccggggctttgaccccacctggaaccgcaactacattaaccgacctgacaaatcccacaattacagtcgtaacatctgtaacttcaaatatggattctcacgagtctggtagcccttctcaaaccacacttacaaacctgttctag

SEQ ID NO: 228764 - DNA, 1167 bp, synthetic construct
  misc_feature 1..1167: note = Description of Artificial Sequence: Synthetic coding sequence
  source 1..1167: mol_type = other DNA
atgctgaatggaactacactggaagccgctatgctttttcatgggatctccggtgggcatatacaggggatcatggaggagatggagcgccgaagtaagacggaagctaggctggccaaaggagctcagctgaacgggagagatgcaggaatgccaccactgagcccggagaaaccagccctgtgtgctgggtgtggtggaaaaatttcagataggtattacctcctcgcagttgacaagcagtggcacctgagatgcctgaagtgttgcgagtgcaagctggccctggagtcagagctgacctgctttgccaaagatgggagtatttactgcaaggaagactattatagacgtttttccgtgcagaggtgtgcacggtgtcacctaggaatttccgcaagcgaaatggtgatgcgggctagggactcagtttatcatctctcatgcttcacttgttcaacatgcaataaaactttgacaactggggatcacttcggaatgaaggacagcctggtgtactgccgagctcatttcgaaactctgctgcagggggagtaccctcctcagctctcatataccgaactggcggcaaagtctggcggactcgcattgccctattttaacgggacaggaaccgtgcaaaagggaaggccgaggaagaggaagagcccagcactgggcgtcgacattgtcaattacaactcaggatgtaacgagaatgaagctgaccacctggatcgtgatcaacaaccttatcctccctcgcagaagactaaaaggatgagaaccagcttcaaacatcaccagctgaggacgatgaaaagctacttcgccattaaccacaatccagacgctaaagatttgaaacagcttgctcagaagactggcctgaccaagagagtgcttcaggtgtggttccaaaacgctcgagcaaaattcaggcgcaatctgttaaggcaggagaacgggggtgtggataaagccgacggtaccagcttgccagccccaccaagcgccgattcaggcgctctgactcctcctggtacagccacaaccctaaccgatctcactaatccaaccatcacggtcgttacatccgtcacaagtaatatggactcccacgaatcgggcagtcctagccagaccactcttacgaatttgttttag

SEQ ID NO: 228765 - DNA, 1149 bp, synthetic construct
  misc_feature 1..1149: note = Description of Artificial Sequence: Synthetic coding sequence
  source 1..1149: mol_type = other DNA
atgctggatggcttaaaaatggaagaaaacttccagagtgctattgacacttccgccagtttttcctcgctgctggggagagctgtctcccccaagtctgtgtgcgaaggctgccaacgcgtaatcctagaccgatttctccttcgcctgaatgattcgttttggcacgagcagtgcgtgcagtgtgcctcttgcaaggagccgctggaaaccacttgtttctatcgtgataagaagctgtactgcaaatacgactatgagaaactttttgccgttaagtgcggaggttgctttgaagccatcgctccaaatgaattcgtcatgagggctcaaaagtcggtctatcatctttcgtgtttctgttgttgcgtctgcgaacggcagcttcagaagggcgacgagttcgttctgaaggaaggtcaacttttgtgcaagggtgactatgagaaggagagagaattgctcagtttggtttctcctgctgcctcagacagtgggaaaagcgacgacgaggagtctttgtgtaaaagtgcgcacggagccggtaagggtaccgcagaggaggggaaggatcacaaaagaccaaagaggccccgaacgatactcaccacgcagcagcggcgagcctttaaagcctcgttcgaagtgtcaagtaagccatgcaggaaagttagagagaccttagctgccgagacaggcctgtctgtgcgggtggtgcaagtgtggtttcagaatcagcgggctaagatgaaaaaactggctaggagacagcagcagcagcagcaagatcagcagaacacacagcggctgagctcagcccagacaaacggaggcggatccgcagggatggagggcatcatgaacccctataccgccttaccgacaccccagcaactattggccatcgagcagtcagtatacagctcggaccccttcagacagggacttactccgccacagatgccaggggatcacatgcacccctatggagcagaacccttgttccacgacctagattcggatgacactagcctgagcaatctcggagactgtttcctcgcaacgtctgaagccggaccactgcagagcagggttggcaaccctatagaccatctgtactccatgcagaactcttactttactagctag

SEQ ID NO: 228766 - DNA, 1149 bp, synthetic construct
  misc_feature 1..1149: note = Description of Artificial Sequence: Synthetic coding sequence
  source 1..1149: mol_type = other DNA
atgttggatgggctgaagatggaagagaattttcagtcagctatcgacacgtctgctagtttttcctccctattgggtcgtgccgtgagccccaaatccgtatgcgaagggtgtcaacgcgtgattttggataggtttcttctaaggctcaatgactctttctggcatgagcagtgcgtgcagtgcgccagttgtaaagaacccctggaaacgacatgcttctatcgcgacaaaaaattgtactgcaagtatgattacgaaaaactctttgctgttaagtgcgggggttgcttcgaagccattgctccaaacgagttcgtgatgagagctcagaaaagtgtgtatcaccttagctgcttctgttgttgtgtctgtgaaaggcaactgcagaagggggacgaattcgtactcaaagaggggcaactcttatgtaaaggagattacgagaaagaacgcgaactgttatcactggtgtcaccagcagcctccgacagcgggaaatcagacgatgaagagagtctatgtaagagcgcccacggcgctgggaagggcacggccgaggaagggaaggatcacaaacgtccaaagcgaccacggaccattctcacaacacagcagcgccgagctttcaaagcctcatttgaagtctcatctaagccatgccggaaggtacgagagacactggccgcagagacaggtttgtcggtccgcgtcgtccaggtttggtttcagaaccagagggccaaaatgaagaagctcgcacggagacagcagcagcaacaacaggaccagcaaaatactcagagactttcatctgcgcagactaacggcggaggctcagccggtatggaaggtattatgaacccctatactgcgctcccaacccctcaacagcttctcgccattgagcaatcagtctactcttcagacccatttcgacaaggcctgacccctccacaaatgccaggggaccacatgcatccttatggggctgagcctctatttcacgatctcgattctgacgacacctctctttcaaatctgggagactgctttctggctacttcggaggcgggaccacttcagtcacgggtcgggaatcctatcgaccatctttactcgatgcaaaactcttactttactagctag

SEQ ID NO: 228767 - DNA, 1149 bp, synthetic construct
  misc_feature 1..1149: note = Description of Artificial Sequence: Synthetic coding sequence
  source 1..1149: mol_type = other DNA
atgctggatggactgaagatggaggagaactttcagagcgctattgacacatctgcctcctttagctccctgcttggacgagcggtcagccctaaatctgtttgcgagggttgtcagagggtcatcctcgacaggttcctgttgcggcttaacgattctttctggcacgaacaatgtgtacagtgtgcatcttgcaaagaaccactcgaaactacttgcttttatcgtgacaaaaagctttactgcaaatacgactacgaaaagctctttgccgtgaaatgcggaggatgttttgaggctatcgcccctaacgaatttgtaatgcgggcacagaaatcagtataccacctttcgtgcttttgttgctgtgtatgcgagcgccagctgcagaagggagatgagttcgtgttaaaggaaggacagctcctgtgtaaaggcgactatgagaaagaacgcgaacttttatccctggtgtcaccagccgctagcgactctggaaagtcagacgacgaagaaagtctgtgtaagagtgcgcacggtgccggaaagggcaccgcagaagagggcaaagaccacaagcggcctaagagaccaagaacaatcctgacaacgcagcaacggagggctttcaaagcctccttcgaagtctcctctaagccgtgtaggaaggtgcgagaaacgctggccgcagaaacgggacttagtgtgagagtggtgcaggtttggttccagaaccagcgggctaagatgaaaaaactcgctaggagacagcagcagcagcagcaagaccagcaaaacacccaacggctgtcctccgcccaaaccaatggtggagggtccgcaggaatggagggtattatgaacccctacacggccttgcccacccctcagcaacttctagccatcgaacaatcagtctactcaagcgatccattcaggcagggtttaactccacctcagatgccaggtgaccacatgcatccctatggggctgagcctctgtttcacgatctggacagcgacgatacaagtctttcaaatcttggagattgctttctcgcaacctcagaagccggacctctgcaatcgcgtgtgggaaatccaatcgaccatctttactcaatgcagaacagctattttacttcatag

SEQ ID NO: 228768 - DNA, 1221 bp, synthetic construct
  misc_feature 1..1221: note = Description of Artificial Sequence: Synthetic coding sequence
  source 1..1221: mol_type = other DNA
atggacatagccaccggcccagaaagtttggaaagatgttttcctaggggacagacagactgcgcaaagatgttggatggcataaaaatggaagaacatgcactgagaccaggcccagcgacactaggggtactcttagggtcagattgtccccatcccgctgtgtgtgagggttgccagcgaccaatttctgacagattcctcatgagagtcaacgaatcttcctggcacgaagaatgtctgcagtgcgccgcatgtcagcaggccctcacaacatcctgctattttcgtgatagaaaactgtattgtaagcaagattaccagcagctattcgccgcaaaatgctctggatgtatggagaagattgcgccaacggagtttgtcatgcgggctctggaatgcgtgtatcatcttggttgtttttgttgctgtgtgtgcgaacggcagctgaggaaaggcgacgaattcgtgctcaaggaggggcagcttctgtgcaaaggcgactacgaaaaagaaaaggatctgctctcatctgtatcaccagacgagagcgattctgtaaagtctgaagacgaggatggtgacatgaaaccagccaagggacagggctctcaaagtaagggatctggtgatgacggaaaagatccgaggcggcctaagcgcccacgcaccatacttaccacccagcagcgacgtgccttcaaggcgtcgttcgaggtcagttccaaaccgtgccgaaaagtccgggagacccttgccgctgagacaggcctgagcgtgagggtggtgcaagtatggttccagaatcaaagagcaaaaatgaagaaactcgctagaaggcaccagcaacagcaggagcaacagaacagccagaggctgggacaaggagagcccggacctggccagggacttggccaagaagtgctgagttctagaatggaagggatgatggcctcctacactccactcgctccccctcaacagcagattgtcgcaatggagcagagcccgtacggatcctcggaccctttccagcaagggctgactccaccccagatgcctggtaacgatagcatattccatgacatagattctgatacaagcctgacttcgctgtctgactgctttctgggctcgagcgatgtgggttccttgcaagccagggtgggaaaccccatagataggctgtatagcatgcaatcgtcttactttgcgagttag

SEQ ID NO: 228769 - DNA, 1209 bp, synthetic construct
  misc_feature 1..1209: note = Description of Artificial Sequence: Synthetic coding sequence
  source 1..1209: mol_type = other DNA
atggatatagcgacagggccagaaagtctcgagcgctgcttcccccgtggccagaccgattgcgctaaaatgctggatgggatcaaaatggaagagcacgccctgaggccaggacctgcgactttgggtgtcctccttggctcagactgtccgcatccggcagtctgtgagggatgccaacgaccaatctcagaccggttcctcatgcgagtcaatgagtcatcttggcacgaggagtgccttcagtgcgcagcgtgtcagcaagctctcacaacatcatgctatttccgggatcgcaagttatactgtaagcaagactaccagcagctgttcgccgctaaatgctcgggctgtatggagaagattgcgccaacggaatttgttatgcgtgcactggaatgcgtttatcatctgggatgcttctgttgttgcgtttgcgagcggcagctgcggaaaggagacgagttcgtattgaaggaaggacagttgctctgtaaaggcgattacgagaaggagaaggatctcctgagctccgtgagtccagatgagagcgactccgtcaaaagcgaagatgaggatggtgatatgaagcctgccaagggacagggatctcagagcaagggcagcggagatgacggaaaggacccccgtcgaccaaaaagaccccgtactatcctgaccacccagcaacgcagagcctttaaggcttcatttgaggtctcttctaagccttgtcgcaaggtccgagaaaccctcgctgccgagactgggcttagcgtgcgtgtggtacaggtctggttccagaaccagcgcgcaaaaatgaaaaagctcgccagaagacatcagcagcagcaggaacagcaaaatagccagaggctgggtcaggaagttctgtctagccggatggaaggaatgatggccagttatactcccctagctccaccacagcaacagatcgtcgctatggagcagagcccttacgggagcagtgaccccttccagcagggtctgaccccacctcaaatgccaggcgatcatatgaatccttacggcaatgacagcatttttcacgatattgactcagacacgtccctcacaagcctgagcgactgctttcttgggagttcagacgtgggatccctgcaggcacgtgtgggtaatccgatcgaccgcctctacagcatgcagtccagttacttcgccagttag

SEQ ID NO: 228770 - DNA, 1119 bp, synthetic construct
  misc_feature 1..1119: note = Description of Artificial Sequence: Synthetic coding sequence
  source 1..1119: mol_type = other DNA
atgctcgacggtatcaaaatggaggaacacgcactgcgccctgggcctgcgactctgggcgttctgctcggctctgactgccctcacccagccgtgtgcgagggctgtcagcgcccaatttcagaccgcttcctcatgcgggtcaacgagtcgagctggcatgaagaatgcctccagtgtgcagcttgccagcaggccctcaccaccagctgctactttcgagaccgcaagctgtactgtaagcaggactatcaacagctgtttgctgcaaagtgcagtggttgcatggagaagatcgcccctacggaattcgtgatgagggctctggagtgtgtttatcacctggggtgtttttgttgttgcgtatgcgagaggcaacttaggaagggcgacgaattcgtactcaaagaaggccaactcctgtgtaagggggattatgaaaaagagaaagatctactaagctcggtgtcccccgacgaatccgacagcgtcaagagtgaggacgaagacggggacatgaagccagctaaaggtcagggtagtcagagcaaaggcagtggcgatgacggcaaggacccgagacgcccaaaaagaccgagaacaatcttaaccacccaacagcggagagctttcaaggcgtctttcgaggtttctagtaaaccatgtcgtaaagtcagagaaactctggcggctgaaacaggtctgtccgttagggtcgtacaggtgtggttccagaaccagcgcgctaaaatgaaaaaacttgccaggaggcaccaacagcagcaggagcagcagaacagccagcgattaggccaggaggtgctgtccagtcgcatggaaggaatgatggcctcatacacacccctcgctccgcctcagcagcagattgtggccatggagcagtctccctacgggagtagtgatccattccagcagggcctgacaccaccccagatgcccggtaacgacagcatctttcacgacattgatagtgacaccagcctaacctctctgtcggattgtttcctgggtagttccgacgtaggcagcctgcaagccagagtcggcaatccaattgatcgactgtatagtatgcaatcaagctactttgcaagttag

SEQ ID NO: 228771 - DNA, 1188 bp, synthetic construct
  misc_feature 1..1188: note = Description of Artificial Sequence: Synthetic coding sequence
  source 1..1188: mol_type = other DNA
atggacatcgccaccggccctgagtctctcgagcgttgcttccccaggggccagaccgactgcgccaagatgctcgacgggatcaaaatggaggagcatgctttacgcccagggccagccactctgggtgtgctgctagggtcagactgtccccacccagccgtttgtgaggggtgccagcgacccattagtgacagattcctgatgcgcgtcaatgaaagttcctggcatgaggaatgtctgcagtgtgccgcatgccagcaggctctaaccacttcctgctacttccgcgacagaaaactgtattgcaaacaagactaccagcagctctttgctgccaagtgttcaggctgcatggaaaaaatagcaccaacagagtttgtcatgcgagctctggaatgtgtataccacctgggctgtttttgttgttgtgtttgcgagcgccaactccgcaagggagacgagttcgtgctgaaggaaggccagcttctgtgcaaaggagattatgagaaggaaaaggaccttctctcttctgtgtctcctgatgaaagcgactcagtcaagagcgaagacgaggatggggacatgaagcccgctaaaggccagggctctcagtcaaaaggatcaggcgacgatgggaaggatcccaggcgaccaaaacgacctcgaacaatcctcactactcagcaacggagagcttttaaggcttcatttgaggtgtccagcaagccatgcaggaaggttcgggaaacattggctgccgagactgggctcagtgtccgcgtggtgcaagtgtggtttcagaaccagcgggcaaaaatgaagaagttggcaaggagacatcagcagcaacaggaacaacagaacagccagcgactgggacaagaagtcctatcctcccgcatggagggcatgatggcaagctatacgcctctggccccacctcaacagcaaattgtagccatggagcagagcccctatggcagtagcgacccctttcagcagggtctgacgccaccgcagatgcctggtaatgatagcattttccatgatatcgattccgacactagcctgacatctctgagtgattgctttttgggaagcagtgacgtgggctctttgcaggccagggtcggcaatcccattgatagactgtactcaatgcagtccagctatttcgcatcatag

SEQ ID NO: 228772 - DNA, 318 bp, synthetic construct
  misc_feature 1..318: note = Description of Artificial Sequence: Synthetic coding sequence
  source 1..318: mol_type = other DNA
atgtccatatacttcccaatccactgtcccgactaccttagaagcgcaaaaatgaccgaagttatgatgaatacccagcctatggaagagattgggctttctccgaggaaggatggcctctcctaccagatcttccctgacccctcagatttcgatcgttgttgcaaactcaaggatcgtcttccaagcatcgtggtagaacccacagagggggaggtagagtccggcgagctccggtggccgcctgaggagtttttggtccaggaggacgagcaggataattgcgaagaaacagccaaagaaaataaggagcagtag

SEQ ID NO: 228773 - DNA, 264 bp, synthetic construct
  misc_feature 1..264: note = Description of Artificial Sequence: Synthetic coding sequence
  source 1..264: mol_type = other DNA
atggtgagtagcgtggtcggcttttattctttgaggttcttcggcaactttacacccaagaaagacgatacaacaatgacaaagataatcggcaactgcgtgtctatacttgttctgagttccgcccttccggttatgagtagaacactcggccttcacaaactgcacctcccaaacacttcacgggatagtgagacagctagtgtgatgacttcctccgcacgggacacaggattccatcacctacaggctttaatgtgctag

SEQ ID NO: 228774 - DNA, 687 bp, synthetic construct
  misc_feature 1..687: note = Description of Artificial Sequence: Synthetic coding sequence
  source 1..687: mol_type = other DNA
atggaagggcaggacgaggtgtccgctcgcgagcagcacttccactcacaggttcgagagagtaccatctgctttcttttgttcgctatcctctacgtggttagctacttcatcattacccggtataagagaaagtctgacgagcaagaagacgaagacgcaatcgtaaacaggataagcctattcttgtctacctttaccctggccgtgagcgctggcgctgttctgctcctgccatttagcataatttctaatgagatccttctgagtttcccccagaactattatattcagtggctaaacggctcacttattcacggactctggaatttggccagtttgttctctaacctttgtctcttcgtgctaatgccctttgcatttttctttctggagtcagaaggcttcgcgggactgaagaagggaataagggcccgaatcctggaaacgttagtgatgttgctattgctggccttgctgattctcggcatcgtgtgggtcgcaagtgcattgatcgacaatgacgccgcttcaatggaatctctatatgacctatgggagttttacctaccatacctctatagttgcatctccttgatgggctgcctattgctccacctgccgaatacaagtagggatagtgaaactgcaaagccctctgttaacggccaccagaaagcgctgtag

SEQ ID NO: 228775 - DNA, 1473 bp, synthetic construct
  misc_feature 1..1473: note = Description of Artificial Sequence: Synthetic coding sequence
  source 1..1473: mol_type = other DNA
atggaaggtcaagatgaagtgtcagcaagggagcagcatttccattctcaagtgcgagagtctaccatctgcttcctgctgttcgctatcctttatgttgtctcctactttatcattacacggtataagagaaagtctgacgagcaggaggacgaggatgccatcgtgaataggattagtctgttcctgtccacatttacgctcgcagtgagcgcaggagcagtgctcctgctgcctttctcaattatctccaacgaaattttgctgtcattcccgcaaaactactatattcaatggctgaacgggagcctcattcatggcttatggaatctggcttccctattcagcaatctttgcctgtttgtgctgatgcctttcgcttttttcttccttgagtccgagggatttgccggtttgaaaaaaggtatcagggcaaggatcttggaaactttagttatgcttctgctgctcgcactcctgattcttggaattgtttgggttgctagcgcccttatagacaatgatgccgcaagcatggaatcactttacgatttgtgggagttttatcttccgtatttgtactcctgtatctctctgatgggatgtctattgctccttctatgcactcccgtgggcctatcccgcatgttcaccgtgatgggacagctcttggttaaaccgactatccttgaagacttagatgagcagatttatataataaccctcgaggaggaggctctccaacgccgactcaatggcctctcttcctctgtggagtataacatcatggaactggagcaggaacttgaaaatgtcaaaacattgaagacaaagctggagaggagaaagaaggcaagcgcatgggagaggaatctcgtctacccggctgtcatggtcctgctgctgattgaaacatcgatctccgtactattagtggcttgcaatattctctgtctgctggtagatgaaactgcaatgccgaaaggaactcgcggacctggcattggcaatgctagcctgtctacctttggctttgttggagccgctctggagattatcctcatcttttatctgatggtgtctagtgtcgttgggttctactccctccggtttttcggaaattttacacccaagaaagacgatacaactatgacgaagattattggcaattgcgtgtctatcctggtgctgtcgagcgctctgcccgttatgtcgcggaccctcggcatcacgcgctttgacctgttaggggatttcggtaggtttaactggctcgggaacttctatatcgtgttatcttacaatctcctctttgcaatcgtaactacgctatgcctggtgcgaaaattcacttccgctgtgcgggaagagctatttaaagcactcgggctacacaagctacacctacccaatacaagtcgggacagcgaaaccgccaaaccgagtgtgaatgggcaccagaaggccctatag

SEQ ID NO: 228776 - DNA, 1596 bp, synthetic construct
  misc_feature 1..1596: note = Description of Artificial Sequence: Synthetic coding sequence
  source 1..1596: mol_type = other DNA
atggaaggtcaggacgaggtgagcgcgagagagcagcacttccattcacaggtgagagagagcacaatttgttttctcctgttcgctatactgtacgtcgtcagctacttcatcattacaagatacaagcggaagtccgatgaacaggaggacgaagatgccattgtgaaccggatcagtctgtttctgtctaccttcacattggctgtgtctgctggagcagtgctgctgctgcctttctcgatcatttcgaatgaaattctgctgtccttccctcaaaattattacatccagtggttaaacgggtctctgatccacgggctgtggaatcttgcttcgctcttttccaacctttgcctcttcgtgctaatgccttttgcctttttcttcttagaatctgaaggattcgccggattgaagaaaggaatcagagccagaattttagaaacactggtgatgttgctcctactcgccctcctaatcctcggaatcgtttgggtggcatccgccctgatagacaacgacgctgccagtatggagtcattatatgacctctgggagttttacctgccttacttgtatagttgcatctccctcatgggctgcttactgctcctgctatgcacgcccgtgggtctgagccgcatgttcaccgtcatggggcagctgttggtcaaacctactatcttggaagatctggatgagcagatctacataataacactggaagaggaggctctgcagaggagactcaatgtggggatgctgtgtgctggcaaccccgaagtcgcaacggggaggcaggtcccggaagagcaggccggtcaattgctgctcgggaagtggattcaagagggcggagatatgatagccaatccaagattgtcttcctccgtggaatacaatattatggagctggagcaggagctggaaaatgtgaagactctgaaaacaaaactggaacgcagaaaaaaggcctccgcctgggaacgaaacctggtgtacccggctgtgatggtgttattactgatcgaaacgtcaatatcagtcctacttgtggcttgcaacatcctttgtctgctggtcgatgagacagctatgccgaagggcacgcgcggaccgggaatcggcaacgcgagccttagcaccttcggcttcgtaggggcagccttagaaattattctgattttttatctgatggtgtcttctgtggtcggtttctattcccttagattttttgggaactttactcccaaaaaggacgacaccactatgaccaaaatcataggcaattgcgtcagcatattggtactgtcttccgcactgccagtgatgagtagaacgctggggatcacccgattcgatctgctcggggatttcggtcgatttaattggttgggcaacttctatatcgtcctgtcgtataatctgctctttgctatcgtgaccacactgtgcttggtcagaaagtttacgagcgccgtgagggaagaactgtttaaagccctgggcctacataagctgcatctgcccaatactagcagagattcagagactgcaaaacccagcgtgaatgggcaccaaaaggcgttgtag

SEQ ID NO: 228777 - DNA, 855 bp, synthetic construct
  misc_feature 1..855: note = Description of Artificial Sequence: Synthetic coding sequence
  source 1..855: mol_type = other DNA
atgctgctgttgttagcactgttgattctagggattgtgtgggtggcatcggccctgattgacaacgacgccgcttctatggagagtctgtatgacctgtgggagttttatttgccatatctgtactcatgtatcagtctgatgggctgtttactcttgctcctttgtactccggtcgggctctctagaatgttcacggttatgggacagctgctcgtgaaacctacaatcctagaggatttggacgagcaaatctacataatcacactcgaagaggaggctctgcaaaggcgcctcaatggtctctcatcaagtgtcgaatacaatatcatggagctcgagcaggagctggagaacgtgaagaccttgaagactaagttggagaggaggaaaaaagcctctgcttgggagaggaacctcgtttatccggctgtcatggtcctgctccttatcgagacaagcatctctgttttgctggtagcatgtaatatcctgtgcttactggtagacgaaacagccatgcccaagggcacaagagggcctggcataggaaatgccagcctaagcactttcggctttgtgggcgctgctctcgaaatcatcttaatcttctatttgatggtgtctagtgtcgttggcttttacagcctgcgcttttttggaaacttcactcccaaaaaggatgacacgacaatgactaaaatcataggcaactgcgtcagtattctcgtcttgtccagcgccctgcctgtgatgagccgcacattaggcctccataagctgcaccttcccaatactagtcgggatagcgaaaccgccaagcccagtgttaacggacatcagaaggcgctttag

SEQ ID NO: 228778 - DNA, 1590 bp, synthetic construct
  misc_feature 1..1590: note = Description of Artificial Sequence: Synthetic coding sequence
  source 1..1590: mol_type = other DNA
ggccaggacgaagtcagtgctagagagcaacatttccattctcaggtgcgggagagcacaatttgctttctgcttttcgccatcctttacgtagtcagttatttcattatcaccagatacaaacgcaagagtgacgagcaagaggacgaagacgcgattgtaaacagaataagcctgttcctgagtactttcacactggccgtctcggctggcgctgtgcttttgttaccattcagcattatctctaacgagatactcctgtctttcccacagaactactacattcaatggctgaacgggtcactgatccacgggttatggaatctggcctctctcttctctaatctttgcctatttgttctgatgcccttcgcatttttttttttggagagcgaaggcttcgctggattgaagaaaggaattagggcccgaatcctagagacactcgtaatgttactcctccttgcgctgttgatactggggatcgtctgggtcgcttccgccctgatcgataatgatgccgcttctatggaatcactgtacgatctgtgggagttttatctcccctacctctacagctgtatttcactgatgggttgtctgctcctactgctgtgcacgccggtaggcttaagtcgtatgtttaccgttatgggtcagctcttggtaaagccaaccatactggaagatctcgacgaacagatctacataattacacttgaggaagaggcacttcagagacgcctcaatgttggaatgttgtgcgccggtaatccggaagttgccacaggacgccaagtccctgaagagcaggccggacaattgttgctggggaagtggatccaggaaggaggcgatatgatcgccaacccccgactgtctagctctgtggagtacaacatcatggagctggaacaagaactcgagaacgtgaagactcttaagacaaagttggagcggcgtaagaaggcctccgcctgggagcggaaccttgtgtatcccgctgtgatggtgttgcttctgatcgagaccagtatcagcgttctgctcgtggcgtgcaacatcctatgcctgctggtcgacgaaaccgccatgcccaagggcactaggggacctggcatagggaatgccagtttgtctaccttcggattcgtcggcgctgcattagagatcatactcatattttaccttatggtgtcatccgtcgtcggcttttattctctgaggttcttcggtaatttcacacccaagaaggatgatactacaatgacaaaaattatcggcaactgtgtgtccatactggtgctgagttctgcgttgcccgtgatgagtcgcacgctgggaatcactagattcgatctgctgggggactttggacggtttaattggctgggaaatttttacatcgtgctctcttacaatctcctgtttgcaatcgtcaccactctctgcctggtaaggaaatttacctctgcagtgagagaagaactgtttaaagctctcgggttgcacaaactccacctgccgaatacatctcgcgactcagagacagcgaagccttcggtgaacggccatcagaaggcgctgtag

SEQ ID NO: 228779 - DNA, 1248 bp, synthetic construct
  misc_feature 1..1248: note = Description of Artificial Sequence: Synthetic coding sequence
  source 1..1248: mol_type = other DNA
atgaaggaagacgggcgtgcgggtaggggagtgggcgcaggcgcagctttgccccagccaagtgcaggggtccacgacgagcaggaagatgaagacgctatagtgaataggatatcattgttcttatcgacgtttacactggctgtgagcgcaggagcggtcctcttacttccttttagcataatcagcaacgaaattcttttatcgtttccacagaattactatatccaatggctcaatgggtctctgattcacgggctgtggaatctcgccagtctgttcagcaacctgtgtctgttcgtcttaatgccattcgcctttttcttccttgagagcgagggttttgctggactcaaaaaggggatccgagctagaatcttagaaacgctggtgatgctgcttttgctggctcttctcattttggggattgtctgggtggcaagtgcactgattgacaacgacgccgcttccatggagtccctgtacgatctatgggaattttacctgccatacttgtatagttgcatctctctgatggggtgcctgctgctgttgctctgtacccccgttgggctcagcagaatgttcaccgtcatggggcagctactggtcaagccaaccatcctggaagatttggacgaacagatttacatcatcaccctcgaagaggaggccttgcagcggagactcaacggactgtcctccagtgtggagtacaacattatggaactggagcaggaactggagaacgtgaaaacactgaaaacaaagctggagaggaggaagaaagccagcgcttgggagcgcaacttagtctatcccgcagtgatggtgctgctcctcattgagacaagcatttcagtcctcctggtggcatgtaatatattgtgcctgctggtggacgagaccgccatgccaaaaggcacacgtggtccagggatcggaaacgctagcctgtctaccttcggctttgtgggagcggcactggagatcatcctgatcttctatttaatggtgtcctcagtggtgggattctattccctaaggttttttgggaacttcactccaaaaaaggacgataccacgatgacaaaaattataggaaactgtgtctctattctagtcctctcctccgctctccccgttatgtcccggaccttaggtttacacaagctgcacttgcccaacacctcacgcgacagcgaaactgctaaaccctcagtgaacggacaccagaaggctttgtag

SEQ ID NO: 228780 - DNA, 1470 bp, synthetic construct
  misc_feature 1..1470: note = Description of Artificial Sequence: Synthetic coding sequence
  source 1..1470: mol_type = other DNA
atggaggccccagactacgaagtgttgtcggtgcgcgaacaattgttccacgagcgcataagggagtgcatcatctccaccctgctgtttgcaaccctatacattctgtgccacatatttctgacccggtttaaaaaacctgccgaattcactaccgtcgacgacgaggatgctacggtgaataagatcgctttggagctttgcacatttacgctcgccattgccctcggtgctgtccttctgttacctttctccatcatctctaacgaggtactcctgtcactgccccgaaattattacatccagtggttgaacgggagtctgatccatgggctgtggaacttagtattcctgttcagcaacctctcacttatcttcttgatgcccttcgcttacttctttactgaaagcgaaggcttcgcagggtctagaaagggcgtgttgggcagagtgtacgaaactgtggtgatgttgatgctgctgacgctgctggtgttaggaatggtctgggttgcgtcagctatcgtggacaaaaataaggccaaccgggagtccctatacgatttctgggagtactacctgccctatctgtacagttgcatttcctttctgggtgtgctgttgctgctcgtgtgtacaccactgggactcgccaggatgtttagcgtgaccggcaagcttttggtcaaacctcgcctgctggaagacctagaagaacagttgtactgtagcgccttcgaggaggccgcactgacacggcgaatttgcaaccctacttcctgttggcttcccctcgatatggagctgctgcatcggcaagtgttagctctgcagacgcagcgggtgcttctcgagaagagacgtaaggcttcagcttggcaaaggaatttggggtaccccctggctatgctctgcctgcttgttctgacaggcctgagcgtgttaatcgttgccattcatattctagagctgttgatagatgaagctgctatgcccagagggatgcagggcactagcctgggtcaggtctccttttcaaaactagggtccttcggtgccgtgattcaggtggtcctcattttttatctgatggtgagttctgtcgtgggtttttattcttctcccttgtttcggtccctgcggcctcgttggcacgacactgccatgacgcagattatcggcaattgtgtctgtctcctcgttctgtcttcagctctccccgtcttttcacgtactcttggccttacacgatttgatctgctgggagacttcggaaggttcaactggctcggaaacttttatatcgtgttcctatacaatgcggcattcgccggtctgaccactctctgtctcgttaagacatttacggctgccgtgagagcagagctgatcagagcgttcggcctggaccgtctccccttgccagtatccggcttcccacaggctagccgcaaaacccagcaccagtag

SEQ ID NO: 228781 - DNA, 1455 bp, synthetic construct
  misc_feature 1..1455: note = Description of Artificial Sequence: Synthetic coding sequence
  source 1..1455: mol_type = other DNA
atggtgaacgtgaaagccctctgcgaacccgaagtgtctaactgctggatgaatgtaatcacgggcaccggcagcgtatcatctcctctcctggtccttcctcaacctggcccagagaccagcctcatgacgggcgaacccgtggacgacgaggacgccactgtgaataagatagctctggagctttgtactttcactctggctatagcactaggcgcagtcttattgttacctttttccatcatcagtaacgaggttctgctttcgctgccacggaattattacattcaatggttaaatggctctttgatacacggcctttggaacctcgtcttcctcttttcgaatctgtcactcatcttccttatgccgttcgcctatttttttactgagtctgagggatttgccggatccagaaaaggagtgcttgggagggtgtatgaaacggtggtaatgttaatgctgctgaccctcttggtcctgggcatggtgtgggtagcatcagctatagtcgataaaaataaagcaaacagggagtccctctatgacttttgggaatactacttaccctatctttactcctgcattagtttcctgggcgtactcctgctgctggtttgtaccccactcgggctcgctcgcatgttctctgtcaccggaaaactgctggtcaaacctagacttcttgaagacctggaagaacagttgtattgctcagcttttgaggaagccgcactgactaggcgtatctgtaatccgactagctgttggcttcctttagatatggaactgttacacaggcaggtgttggctttgcaaacccagagagtgcttctcgagaaaagacgaaaagcaagcgcatggcagcggaacttgggttacccgctcgctatgctgtgcctactggtactcaccggcctcagtgtgctgattgtggcaatacacatcttagaattgctgatcgatgaagccgcaatgccaaggggcatgcagggcacgagccttggacaggtctcatttagcaaattgggttctttcggcgcagtgattcaggtcgtgttgattttctacctgatggtctcaagtgtggtagggttttactcatccccgctatttcgaagcctccgccctcgttggcatgatacggccatgacgcagatcatcggaaattgcgtgtgcctgcttgttctgtcttctgcattgccagtgttttctcgaacgttaggcctgactcggtttgacctcctgggcgactttggcaggttcaactggctgggcaatttctacatcgtgtttctctataatgcagcattcgcaggactcacaactttatgcctggtgaagacgttcaccgccgctgttcgtgcggagctcattcgcgcattcggtcttgaccgcttaccgctccccgtgagtgggttcccccaagcaagcaggaagactcagcatcagtag

SEQ ID NO: 228782 - DNA, 1410 bp, synthetic construct
  misc_feature 1..1410: note = Description of Artificial Sequence: Synthetic coding sequence
  source 1..1410: mol_type = other DNA
atggaagccccagattacgaggtgctctccgttcgtgaacagctttttcacgagcgaatccgcgaatgtattatcagcactctgttgttcgcgaccctatacatcttgtgtcacatatttctcacccggttcaagaaaccagcagagttcaccacagttgacgacgaagatgcgacggttaataagatcgctctagagctttgcacattcacgctggcgattgcccttggggcagtactccttctgcctttttctattatctccaatgaagtcttgttatctttaccaagaaattattacattcagtggctaaacggaagtctgatacacggcctctggaatctggtctttttattctccaatctcagtctcatctttctcatgccttttgcctactttttcacggaaagcgagggattcgcgggaagccgaaaaggagtgctcggacgcgtctacgagacggtggtcatgctgatgctcctcacactattagtgcttggcatggtgtgggtcgcctctgcaattgtggacaagaacaaagctaatagggaatctttgtatgacttttgggagtactatctgccatacctgtatagctgcatcagcttccttggagtgttactgctcctagtatgcacccccctgggcctcgccaggatgttttctgtgaccgggaagctgcttgtaaaaccgcgactgctagaggacctggaagaacagttgtactgctccgcatttgaagaggccgcactcacaaggaggatctgtaaccccacctcgtgctggctgcccctagatatggagcttctacaccgtcaggtgctcgctctgcagacccagcgagtgctcttggaaaagcggagaaaggcctccgcctggcaacgtaaccttggctatcctttagcgatgttgtgtctgcttgtgctaaccggcctgtccgtcctgatcgtcgccatccacatcctagagctcctgattgacgaagccgcaatgccacggggtatgcaggttgtactcattttctatcttatggtctcaagtgtcgttggattctattctagccctctttttcggtccctccggccaaggtggcatgatacggcaatgacccagattattggcaactgcgtctgcttactcgttctcagtagcgcgttacctgtgttttcaaggaccctgggattgacaagatttgacttactgggtgatttcgggaggtttaattggctcggcaacttctacattgtgttcctgtataatgcagccttcgccggactcaccacactgtgtcttgtcaagacttttacagctgctgtgagagccgaactgattagagccttcggcctcgatcgcctgcctctgcccgttagcggatttcctcaggccagccggaagacacagcatcaatag

SEQ ID NO: 228783 - DNA, 384 bp, synthetic construct
  misc_feature 1..384: note = Description of Artificial Sequence: Synthetic coding sequence
  source 1..384: mol_type = other DNA
atggaagcacccgattacgaagtactgtcagtgagggaacagctcttccacgaacggattagggagtgtattatcagtacacttctgttcgcaaccctgtatattctttgccacatattccttacccgcttcaagaagcctgccgagttcacaacagtagacgatgaagacgccaccgtgaacaagatagcattagaactctgcacgttcaccctggcaatcgctttgggggctgtgcttcttctcccatttagtatcatctctaatgaagtcctgttatcgctgccgaggaattactatatccagtggctcaatggcagcctgatacacgggctctggaacctggtattcttattctctaatctgtctttgatctttttgtag

SEQ ID NO: 228784 - DNA, 1017 bp, synthetic construct
  misc_feature 1..1017: note = Description of Artificial Sequence: Synthetic coding sequence
  source 1..1017: mol_type = other DNA
atggtccgcagagtgcagcctgataggaaacagctgcccttggtcttactgcggctgttatgccttctgcccactggtcttcccgtgcgttcagtagatttcaatcggggaaccgataacatcacagtgcggcaaggcgacactgcaatcctgcggtgtgtggtcgaggataaaaatagtaaagtcgcttggctaaacaggtcaggaattatattcgccggtcacgacaagtggtccctggacccccgtgtagaattagagaaacgccattccctggagtactcacttcggatacaaaaggtggacgtttacgatgaaggttcctacacctgttccgtgcagactcagcacgaacccaagacaagccaggtatatctcatagtgcaggttcctccgaagatttccaacatctcctccgacgttacagttaacgagggctccaatgtgacactggtatgcatggcgaatggccgaccggaaccagttattacctggaggcatcttacacctactgggcgtgaatttgagggtgaggaggagtatctggagattttggggatcaccagggaacagagcgggaaatacgagtgcaaagccgctaatgaagtgtccagtgccgacgtgaaacaggttaaggtcacggtgaactatccccctacgatcactgaatctaagtcaaacgaagccactacaggaaggcaggcatccctgaaatgcgaagcaagtgctgttcctgctccagactttgaatggtaccgagacgacacccgaatcaattcggctaatggactggaaataaaatctactgaaggccagtcaagcctgaccgttactaacgttaccgaggaacactacggtaattatacatgtgtcgcagcgaataagttgggcgtgacaaatgcaagcttagttttgttcaggcccggtagcgtacggggaataaacggctcaatcagtctggccgtccccttatggttacttgctgcctccttgttgtgcctgcttagcaagtgttag

SEQ ID NO: 228785 - DNA, 1077 bp, synthetic construct
  misc_feature 1..1077: note = Description of Artificial Sequence: Synthetic coding sequence
  source 1..1077: mol_type = other DNA
atgcgaacctattggttgcactcggtttgggtactgggctttttcctgtctctgttcagtctgcagggacttcctgttaggtccgtcgatttcaatcgtgggacggataacatcactgtccgtcaaggtgacacagccatcctccgatgcgtggtggaggataaaaactcaaaagtagcatggctgaaccgatcggggatcatcttcgcaggccacgataagtggtccctcgatccacgggtggaactagaaaagaggcactcacttgagtattcactgaggatccaaaaggtggatgtttacgacgaagggagctacacctgcagcgttcagacccagcatgaacctaagacttctcaggtatacctcatcgtccaggtccctccaaagatatcaaacatctcaagcgatgtcacggtgaatgaaggctctaatgtaaccctggtgtgtatggctaacggcaggcctgaacccgtgatcacctggcgacacttgactcctacaggaagggaatttgagggtgaggaagaatacttagagatcctgggcataacccgggaacagtccgggaaatacgagtgtaaggctgcgaacgaggtttcaagcgctgacgtgaaacaggtgaaggtcacggtaaattatccacctacaattacagagtctaaatcaaacgaggccaccacaggcaggcaagcatctttgaagtgcgaagctagcgccgtgccggctccagactttgaatggtatcgggacgatactcgaattaacagcgccaacggattagaaatcaagtccaccgagggacagtcatcactcacagtcactaacgtgacagaggaacattacggtaactatacgtgcgtggctgccaacaaactgggcgttacaaatgctagcctggtgctcttcaaacgtgtccttcccaccataccccaccctattcaggagatcggaaccaccgttcactttaaacagaaagggcctggtagcgtacggggtatcaacggttccatctccctcgctgtgcccctatggctgttagccgcttcattattgtgcctgctttccaagtgctag

SEQ ID NO: 228786 - DNA, 753 bp, synthetic construct
  misc_feature 1..753: note = Description of Artificial Sequence: Synthetic coding sequence
  source 1..753: mol_type = other DNA
atggcggaaggaggagcatctaaggggggaggcgaagagcctggaaagcttccagaacctgcagaagaagagagtcaggttctgaggggaacaggtcactgtaagtggttcaatgtgagaatgggattcggttttatatcgatgatcaacagggaggggagtccactcgatatccctgtggacgtgtttgtacaccaatcaaaactgtttatggaaggattcagatcgctaaaggagggagagcccgtggaattcactttcaaaaaatcttctaaaggtttagaatcaattagggtgacagggcctggagggtctccatgcctcggcagcgagaggaggcctaaaggaaaaaccctgcaaaaaaggaagcctaaaggagacaggtgttacaattgtggcggactcgatcaccacgctaaagaatgctccctacccccacaacctaagaaatgtcactactgccagagcattatgcatatggtcgccaattgccctcataaaaacgtagcacagccacccgcttcatctcaaggcaggcaggaagcggagtcccaaccctgtacctcaacgctcccccgtgaagttggtggaggccacggatgcacatcgcccccttttcctcaggaggcaagggccgagatctcggagaggagcggaaggagcccacaagaagcctccagcacaaagagttcaatcgctcccgaggagcagagcaaaaagggcccatccgtgcagaagcggaagaaaacatag

SEQ ID NO: 228787 - DNA, 2250 bp, synthetic construct
  misc_feature 1..2250: note = Description of Artificial Sequence: Synthetic coding sequence
  source 1..2250: mol_type = other DNA
atggaagtggtccctgccgaggtgaatagcttgctccccgaagagattatggacactgggatcacactcgtggacgacgattctattgaggctgtgatcgttagttcgcccattccaatggaaacagagcttgaagaaatcgtcaacatcaactcaacaggagactccactgctacaccaatttctaccgagcctatcactgtatacagcaaccacaccaatcaagtggcagtcaatacaacgatcaccaaagcagactccaatactaccgtcaaacctgccttcccctctgggttgcagaagctgggcgctcagacccctgtgacaatcagtgctaaccagattattctcaacaaggtgagccagacatccgacttgaagctgggcaatcagacactgaagcccgatggtcaaaagctcatactgaccactctcggcaagtcagggtcgcccatagtgcttgccctaccccacagccagctaccacaagcacagaaggttactacacaggctcaatcgggggacgccaaactgccccctcagcagatcaaagtggtcacaatcggaggtaggcctgaggtgaagcccgtgattggtgtgagcgccctgacacccggtagccagctcataaacaccaccacacaaccctcagttctgcagacccaacagctcaaaactgtgcagattgcaaaaaagcctaggactcctacgagcggccctgtcattacaaagctgatttttgccaagccaatcaatagcaaggcagtgaccggtcagactacccaggtgtccccaccagttattgctggccgtgttcttagtcagtctacccccggaacgcccagtaaaacgattacaatttcggagagcggcgtcatcggcagcaccctgaactctacaacccagacccctaataaaattgccattagccccctcaaatccccaaacaaggccgttaagagtaccgttcagacaattacagttggtggcgtgagcacaagccagttcaagacgattattcccttagccacggcacctaacgttcaacagatccaggtccctggttccaagtttcactacgtacgcctcgtcactgccacctctgcctcgtcaagtacccaacccgtctctcagaatcccagcaccaacacccaacccctgcagcaggcaaagcctgtagtggtgaacactacaccagtgaggatgtccgtacccatagtgagcgcccaggctgtgaagcaggttgtgcccaagcctattaacccaacctctcagatagtgacaaccagtcagcctcagcagcggctgatcatgccagcaactccccttccgcaaattcagcccaacctcacgaacttacccccaggaactgttctcgctccggcaccaggcacaggaaacgtgggctacgctgtgctgccagcgcagtacgttacccagctgcagcaaagctcctacgtctcaatcgcatccaatagcacttttaccggtacgagcggaatccagacgcaggctcgcctccccttcaacggaatcatcccctctgaaagcgcctctcgcccaagaaaaccttgtaactgtacaaagtcgctctgtctgaaactgtattgcgactgtttcgccaacggagaattctgtaataattgtaattgtaccaactgttacaataatttggaacatgagaatgaacgtcagaaagcaatcaaagcttgcttggataggaatcctgaagcattcaagcctaagattgggaaagggaaagaaggagaatcagacagacgacatagcaaggggtgtaactgtaagcgtagcggatgcctgaaaaactactgcgagtgttatgaagcgaagattatgtgctccagcatctgtaaatgtattggctgtaagaatttcgaggagtccccagagagaaaaacgctgatgcacttagcggacgcggctgaggtaagggtgcagcagcaaacagccgctaagaccaaactttcgtctcaaatcagtgaccttctgacaaggcctaccccggctctcaattccggaggaggcaagctgccgtttacctttgtgaccaaggaggtagctgaggctacttgcaactgcctcctggcacaagccgagcaagcagacaagaaaggtaagtcgaaagccgcagcggagagaatgattctggaagaatttggacgatgcctgatgagtgtcattaatagtgctggcaaggctaaatcagatccttgcgccatgaattgttag

SEQ ID NO: 228788 - DNA, 732 bp, synthetic construct
  misc_feature 1..732: note = Description of Artificial Sequence: Synthetic coding sequence
  source 1..732: mol_type = other DNA
atggaggtcgtaccagccgaagttaattctttactccccgaggaaatcatggacacggggattacattagtcgatgatgattccatcgaggcggtgattgtttctagtcccattccaatggaaaccgagctggaggaaatcgtcaacataaattccaccggcgacagcacggctacccccatttccacggagccgataaccgtctattccaaccacactaatcaagtcgccgtcaacactactataacaaaggccgactcaaacacaaccgtgaagcccgcatttccctcaggccttcagaaattaggagctcagacccctgtgacaatcagtgctaaccagatcatattgaacaaggtaagccagacgtctgatttgaagctagggaaccagacgttgaaaccagatgggcaaaaactcatactgacaactctgggaaagtctggctcacctattgtcctggctctgccgcactctcaattacctcaggcccaaaaagtcacgacacaggctcagtcaggcgatgctaaacttcctccacagcagattaaggtagtgaccattggcggacgtccggaggtcaaacctgtgattggcgtgtctgctttgactccgggttcccagctcattaataccacgacccagccgagcgtgctccagacccaacagctgaagacagtgcaggttggcttcttccacagtcttctcccagagttgcaccagcgtccttag

SEQ ID NO: 228789 - DNA, 1983 bp, synthetic construct
  misc_feature 1..1983: note = Description of Artificial Sequence: Synthetic coding sequence
  source 1..1983: mol_type = other DNA
atggaggtcgtgcccgctgaggtaaacagccttctgccggaggagatcatggatacgggcatcaccctcgtcgatgatgactccatcgaggccgtcattgttagctcacccatacctatggagaccgagttggaggaaattgttaatattaacagcactggcgattccactgccactcctattagcaccgagcctataacagtctacagtaaccacaccaaccaagttgccgttaacactaccataacaaaagctgactccaacaccactgtgaagccagcttttccttcaggcctccagaagctgggggcacagacgcccgtgaccataagcgcaaatcaaattatcctaaacaaggtctctcagaccagtgatttgaaactggggaatcagacactcaaacctgacggccaaaagcttattctgacgaccctgggaaagagcggctcccctattgtcctcgccctgccgcatagccagttaccacaggcgcagaaggtgacaactcaggcccaatctggggatgctaagctaccaccccaacagattaaagtcgtaaccatcgggggacgtccggaagtgaagcctgtcatcggggtcagcgccctgacaccaggtagccagctcataaacaccaccactcagcctagtgtgctacagacacaacaactcaaaactgttcaggccgtgaagtcaaccgtccagactataacagtgggaggggtcagtacatcccagtttaagaccattatacccttggctaccgcgcctaatgtccagcagatacaggtcccagggtctaagttccattatgtgagattggtgacggcaacctcagcctcctctagtactcagcctgtgtctcaaaacccttcaacgaatacccaaccactacaacaagccaagcccgtggtggtgaatactactcctgtccgaatgtctgtcccaattgtatctgctcaggctgtaaagcaggtggtcccaaagccaattaaccccactagccagatcgtgaccacatcacagccgcagcagcgcttaatcatgccggctaccccgttgccccagatccagcccaacctaacgaaccttcctccgggtaccgtcctcgctcccgctccgggaacagggaatgtcggatacgctgtgctcccagcccagtatgtgacccagctgcagcagtccagctacgtctctatcgccagcaactcaaccttcacaggcacttcaggcattcaaacacaagcgaggcttccgttcaatggcatcatccctagcgagtccgcgagccggccaaggaagccttgtaactgtacaaaaagcctttgtctcaagctgtattgtgactgcttcgctaatggggagttctgcaataactgcaattgcactaactgttacaacaatctggagcatgagaacgagcgtcagaaagcgattaaagcgtgcctcgataggaacccggaggcgtttaaaccaaagatcggcaaaggaaaagaaggggaatcagaccgtagacactcaaaggggtgtaattgtaagaggagtggctgccttaaaaattactgcgaatgctacgaggcaaagattatgtgctcttctatttgtaaatgcataggatgcaagaactttgaggagagtcccgagaggaaaacactgatgcacctggctgacgccgctgaagtccgcgtgcagcagcagacagctgccaagacaaagctctcctctcaaatttctgacctgcttacccgcccaacccccgctctgaactcaggagggggaaagctcccgtttaccttcgtgaccaaggaggtggccgaagcaacatgcaattgtctgctcgctcaggccgagcaggcggataaaaagggaaaatcaaaagccgcagctgaacggatgatactagaagaattcggacggtgcctcatgagtgtaattaacagcgccggaaaggccaaaagtgatccctgcgcaatgaactgctag

SEQ ID NO: 228790 - DNA, 1587 bp, synthetic construct
  misc_feature 1..1587: note = Description of Artificial Sequence: Synthetic coding sequence
  source 1..1587: mol_type = other DNA
atggaggtggtgccagccgagattgccaagaaacctcgcaccccaacctctggcccagtcattactaaactgattttcgccaagcccatcaactcaaaagcagtgactggccaaacaacacaggtctcccctcctgtgattgctggcagagtactcagtcagtcgaccccgggaactcctagcaaaactattaccatatcagaatcgggcgtgatcggttccactttgaacagcaccacacaaactccaaataaaattgctatttcgcctctgaagtcacctaacaaagctgtgaaatcaaccgtgcagacaatcactgtagggggagtatccacatcacagtttaaaacgatcatcccactggctaccgccccaaacgtccaacagatccaggtgccaggatcaaaatttcactatgtacgcctcgtaaccgccacatctgcatccagctctacgcaaccggttagtcaaaatcccagcactaatacccaacccctgcaacaggcaaagccagtggtagtgaataccacaccagttagaatgagtgtcccaattgtaagcgcacaagcggtgaaacaagttgtcccaaagccgattaaccctacttcccagatagtcactaccagccagcctcaacagcgcttaattatgccagctactccactgccacagattcagccaaacctgactaacttacctcccggtacagtgctcgcgcctgctccgggaacagggaacgttggctacgctgtgctgccggctcagtatgtgacccagctccagcagtctagctacgtctctattgcgtccaacagtacgttcacgggaacgagtggtattcaaacacaagcaagactaccctttaacggcattatcccatctgagtctgcatctcgcccacgcaagccttgtaactgtactaaaagtctgtgcctcaaactgtactgcgactgtttcgcaaatggcgagttctgcaacaactgcaactgcaccaattgctacaataacttggaacacgaaaatgaaaggcagaaggccataaaagcctgtctggatcgcaacccagaggcgttcaagccaaagattggaaagggtaaggaaggtgaatctgataggagacactcaaagggctgtaactgcaagcggtcagggtgccttaagaattactgtgagtgctacgaggccaaaatcatgtgcagctccatctgcaaatgtattggatgcaaaaactttgaggagtcccccgagcgaaaaacactgatgcatctggccgacgcagccgaggtcagagtgcagcaacaaaccgccgctaaaaccaagttgtcatcacagatatccgacctccttacaaggcctacaccggcattaaattccggcggtggaaagttgcctttcacattcgtaactaaggaggtggcagaagcaacatgcaactgccttctagcccaggcggagcaagccgacaagaaaggaaaatcaaaagctgccgctgagcggatgatacttgaggaattcggtcggtgcctgatgtccgtgattaattccgccggaaaggcaaaatctgacccatgtgcgatgaactgttag

SEQ ID NO: 228791 - DNA, 1587 bp, synthetic construct
  misc_feature 1..1587: note = Description of Artificial Sequence: Synthetic coding sequence
  source 1..1587: mol_type = other DNA
atggaagtggtgcccgcagaaatcgcaaagaagccgaggacaccaacttccggacccgtgatcacaaagcttatattcgccaagccaatcaactcaaaagctgtgacgggacagacgactcaggtatcacctccagtaattgccggacgggttctttcccaatctaccccgggtacaccgtccaagacaataacaatttcagagagtggtgtcatcggaagtacgctgaatagcactacccagactcccaataaaattgcaatttcacccctcaagtctccgaacaaagctgtgaaatcgacggttcagaccatcaccgtagggggtgtttctacctctcagtttaagaccattattcccctggccacggcacctaacgtgcaacagatccaggtaccaggctcgaagtttcattatgtcagactggtcacagctaccagtgcttcaagtagtactcagcctgtctcccagaacccctcaaccaatacgcagcccctacagcaggccaaaccagtcgtggtcaatacaactccggtccgcatgagtgtgcctatagtcagcgctcaggccgtaaagcaggtggtgcccaagccgattaaccctacttctcagattgtaaccacatcacagccgcagcaacgactgattatgcccgcaactcctctgccacagatccagcccaatctgacaaacctgccacctgggacagtccttgctcccgcacctgggacggggaatgtgggatatgctgtgctgcctgctcagtacgtgacccagctgcagcagagcagctacgtgtccatcgcgagtaactcaaccttcacggggacctctgggattcagacacaggctcggttgccattcaacggcatcatccctagcgagtccgcaagccgtcctcgaaagccatgtaactgcaccaagtctttgtgtctgaaactatattgtgattgtttcgcaaacggagaattttgcaacaactgtaactgtacaaactgttataacaatctggagcacgaaaatgaacgacaaaaggctattaaggcttgtctcgatcgaaatccagaagcttttaaacctaaaataggcaaggggaaagagggtgaaagcgatcgcaggcatagtaaagggtgtaactgcaaaagaagcggatgcttgaagaattactgtgagtgttatgaggcaaagatcatgtgctcgtctatttgcaagtgcattggatgcaagaattttgaggaatccccggagcggaagacactcatgcatctcgccgacgctgccgaagtgagggtgcagcagcagactgctgccaaaaccaaattatcctctcagatatcggacctgctgactcggcctactcctgcactgaatagtgggggaggcaagctgcccttcacattcgtgactaaagaggtggccgaggccacttgtaactgtctgttggcccaggctgaacaggctgataaaaaaggcaagtcgaaagctgctgcagaacggatgatcttggaagaatttggaagatgtctcatgtcagttatcaacagcgctgggaaggccaagagcgacccttgcgccatgaactgctag

SEQ ID NO: 228792 - DNA, 2250 bp, synthetic construct
  misc_feature 1..2250: note = Description of Artificial Sequence: Synthetic coding sequence
  source 1..2250: mol_type = other DNA
atggaggtggtcccggcagaagtcaacagtctgttaccagaagaaataatggacaccggcatcactttagtggacgacgactcaatagaagccgttatcgttagctctcccatccccatggagaccgagttagaggaaatcgtaaacatcaactccacgggcgactccactgccacccctatcagtacagagcctattactgtatattcgaatcatactaatcaggttgccgtgaacactaccataactaaggccgactctaatactacggtaaagcctgccttcccttccggtctccagaagctaggcgcacagacacccgtgacaatctccgccaaccagatcatcttgaacaaagtgagccagacttcggacttgaagcttggtaaccagacactgaaacctgatgggcagaagctgattctgacgacactcgggaagtctggtagcccaattgtcctggccttaccccacagccagctgcctcaggcacagaaagtgaccacacaagctcagtcaggggacgccaaattgcctccccagcagattaaagttgttacaatcgggggacgaccagaggtcaagccagttatcggcgtgagtgcactgactccgggaagtcagttgataaatactacaacccagccttctgtcctacaaacacagcagctgaagaccgtgcagatcgcaaagaagcctaggacccctaccagcggccctgtcatcactaaacttattttcgcaaagcccatcaactccaaagcggttactggccagactacacaggtgtcccctccggtgattgccggtagggtgctcagtcagagcacgcccggaacccctagtaaaacaataactatctccgagagcggagttatcggttccaccttaaacagtaccacccaaacacctaacaaaatagccatttcacccttgaaatctcccaacaaggccgtgaaatcaactgtgcagacgataaccgtcgggggtgtgagcacttcacaatttaaaacaatcatccctctggcaaccgcgcctaatgtccaacagatccaggtccctggatcaaagtttcattatgttagactcgtgaccgcaacttctgcctccagttctacacaaccagtatcccaaaacccctcgactaatacccaaccgctccaacaggccaagccagtggtggtcaacaccactccggtgcgaatgagcgtccctatcgtgtcggcccaagccgttaaacaggtcgtgcccaagcctatcaatccgacgagtcagatagttacaacttctcagccacagcagagattgatcatgccagcaaccccactgccacagattcaacctaacctcacaaacctccctcccggaacagtcttggctccagctcccggtacagggaatgtgggatacgccgtgcttcccgctcagtatgtaactcaactgcaacaatctagctatgtttcaatagcgtccaactccacgttcaccgggacttcaggtatccaaacacaagcaaggttgcctttcaatggcataatcccctccgaaagcgcatccaggccgagaaagccgtgcaactgtacaaagtccctgtgccttaagctctattgcgactgctttgcgaatggagaattctgtaacaactgtaactgtaccaactgctataataacctggaacacgaaaacgagcgacagaaggctattaaggcatgccttgataggaatcctgaagcgtttaaaccaaagattggcaaagggaaggagggcgagagtgaccgccgacacagcaaagggtgcaactgtaagaggtctggatgtctgaagaactactgcgagtgctacgaagccaaaattatgtgctccagtatatgtaagtgcattgggtgcaagaactttgaggagtctcccgagcgcaaaacactgatgcacctggcagatgccgctgaggtgcgggtgcagcaacagaccgccgcaaaaactaaactttctagccaaatatccgacttgcttacaaggcccacccctgcattgaacagcgggggtggcaaactccccttcaccttcgtaacaaaagaagtggccgaggccacctgtaactgcttgctggcccaggctgagcaagccgataagaagggcaagtccaaggccgctgcggagcgcatgattctcgaggagttcgggcgttgtttgatgtctgtgatcaactccgctgggaaggctaaaagtgacccttgtgccatgaactgctag

SEQ ID NO: 228793 - DNA, 1587 bp, synthetic construct
  misc_feature 1..1587: note = Description of Artificial Sequence: Synthetic coding sequence
  source 1..1587: mol_type = other DNA
atggaggtagtacctgccgagatcgccaagaagcccagaaccccaacgagcggacccgtgatcaccaagctgatttttgcaaaacctattaactctaaagcagttactgggcagaccacccaggttagtccgccagtgattgcaggacgggttttatctcaatcaacacctggtacgccctccaaaacaatcacaatctcagaatccggggtgatcggaagcaccctgaattctacaactcaaacaccaaacaaaatcgccatcagcccgctaaagtcgcctaataaagccgtgaaatcgaccgtccagaccatcaccgtcggcggtgtaagtacgagccaattcaaaactatcattccactcgcgaccgctcctaatgtgcagcagatacaagtgcctggcagtaaattccactatgtgagactggtcactgccactagcgcgtccagctcaactcagccggtctcgcagaatccttcgacaaacacgcaacccctccagcaagccaagccggtcgtcgtaaatacaacgccggtgaggatgtctgtgcctattgtcagcgcccaggccgtcaaacaggtggtaccaaagccaattaaccccacttcccagatagtgactacctcccagcctcagcagcgcttgataatgcctgcgacacccctgccccagatccagcccaatctgaccaacctgccccctggcacagtgctggcccctgcgccagggacgggaaatgtaggctacgctgtgctgcccgctcagtatgtgacgcaattgcagcagagctcctacgtttcaatcgctagtaacagcacattcaccggcacctcgggaatacagactcaggcacgactgccgttcaatggcatcattccttctgaatcggcaagtaggcctagaaagccatgcaattgtaccaaatccctgtgcctgaaactctactgcgactgcttcgcaaacggcgaattttgcaataactgtaactgtactaactgctacaataatcttgagcacgagaacgaaagacagaaagctattaaggcctgtctggaccggaaccccgaagctttcaagcctaagataggtaagggtaaagagggcgaaagtgataggcgccattctaagggatgtaactgtaaaagatctggctgtttaaagaattactgcgaatgttacgaagccaaaataatgtgttccagcatctgcaaatgcatcggctgcaagaactttgaagagagcccagaaaggaagacactgatgcatttagctgatgccgctgaggttagggtccagcaacaaacagcagcaaagactaaattgtcttcacaaatctctgacctgctgacccgaccaactcccgctttgaactccgggggaggaaagctgccctttaccttcgttacaaaggaagtggccgaagccacctgtaactgtcttctggcccaggcagagcaggctgataaaaaaggaaagtcaaaagctgctgcggaaagaatgattctcgaggagtttggcagatgccttatgagcgtgattaacagtgctggaaaggccaagtccgatccatgcgccatgaactgttag

SEQ ID NO: 228794 - DNA, 2025 bp, synthetic construct
  misc_feature 1..2025: note = Description of Artificial Sequence: Synthetic coding sequence
  source 1..2025: mol_type = other DNA
atgtggcacgaggcccgtaaacatgaacgtaaactcagaggcatgatggtggattacaaaaaaagagcagagaggcgcagggagtactatgagaagattaagaaggatcccgcacagttcctccaggttcatggaagggcatgtaaggttcacctcgactcagctgtagcgctagccgctgagtcacctgtgaacatgatgccctggcagggcgataccaacaatatgatcgacagatttgacgtacgggcacacctggatcacataccggattatacgcctccactccttacaaccatctcccccgaacaggaaagtgacgaacgtaaatgcaactacgaacggtataggggtctggtgcaaaacgactttgccggaatctccgaggaacagtgcctttaccagatctacattgacgaactttacggaggccttcagaggccctcggaagacgaaaaaaaaaagttagctgaaaagaaagcttcaattgggtatacatatgaagactccaccgtggctaaagtcgagaaagccgcagagaagccagaggaagaagaatcagccgcagaggaggagagcaactcagatgaggacgaagtcatcccggacatcgatgtcgaggtggacgtcgatgagcttaatcaggaacaggtcgccgacctgaataagcaggccacaacctatgggatggctgatggtgattttgttaggatgctcagaaaggataaagaggaagcagaagcgatcaagcacgccaaagctcttgaggaagagaaagccatgtactccggccgtcgctcgagacgacagagacgggagttccgtgaaaaaaggttgagagggaggaagatctcgcctcctagttacgccaggcgggacagcccaacatatgacccttacaagcgctcaccttctgagtctagctctgaatcacggagcaggtcacgtagcccaacacccggacgggaagaaaagatcacatttatcacttcattcggcggttctgacgaagaagctgcagccgcagccgcagccgcagccgcttcgggcgtgaccaccggaaagccgcctgcgccaccacagccagggggtcctgctccgggacgcaacgcttcggctcgacgcaggagcagtagcagcagttcatctagcagcgcatcccgtaccagcagcagtcgtagttcatcgagaagtagctcacggtctaggagagggggtggctattacagatctggtagacacgcccgttccagatctcgctcttggtcaagaagccggtctcgaagcagacggtattctcgatcaagatctcgtggacggagacactccggaggcggtagtagagatgggcatcgatacagcagatctcccgcacggaggggcggatacggacccaggcgcagatctcgaagccgtagccactctggcgatcgatacaggagagggggtcgaggtctgcgccatcacagctccagccgtagtcgctcaagctggtccctcagccccagcagatcacgatccctgactaggtcccggagccactcgccctccccctctcagagtcggtcaagatcacggagcaggtcccagtcccctagtcctagtcctgccagagagaaactgacacgacctgcagcctcccccgctgtcggggagaagctcaagaaaaccgaacccgcagctgggaaagagacaggcgctgccaagccaaagctgactccccaagagaaattgaagcttcgcatgcagaaagccctgaatcgacagtttaaagccgataagaaggctgcccaagagaaaatgattcagcaggagcatgagcgacaagaaagggaggatgagttacgggctatggccaggaagatccgtatgaaagaacgggagcgcagggagaaagagcgggaggaatgggagcggcagtactcacgtcagtcgaggtctccatcgcctagatatagccgggagtactcgagttcaagaagacggtccaggtctaggtcccgctcacctcactataggcactag

SEQ ID NO: 228795 - DNA, 594 bp, synthetic construct
  misc_feature 1..594: note = Description of Artificial Sequence: Synthetic coding sequence
  source 1..594: mol_type = other DNA
atggccgctctcggtgagccagtacgcctggaacgcgacatctgccgggctatcgagctgttagagaagctgcaaaggagcggcgaagttcctccccagaagctgcaagccctgcagagagtccttcaatcagaattttgtaacgcagtgcgcgaggtttatgaacatgtgtatgagactgttgatattagctcaagcccggaagtgagggccaacgccacagccaaggccaccgtggccgcatttgcagcaagcgagggacactcccacccccgtgttgttgagctgcctaagaccgaggaaggcctaggctttaatattatgggaggaaaagagcaaaactcaccaatttatatctcacgcataatcccaggcggaatcgcagacaggcacggcggactgaaacgaggggatcagctgttgtccgttaatggggtgtccgtggagggcgagcaccacgagaaagctgtagaactcttgaaagccgctcaaggcaaggtcaagctggtggtgcgctacacacctaaggtgctggaagagatggagagcaggtttgaaaaaatgcgttccgctaaaaggaggcaacaaacttag

SEQ ID NO: 228796 - DNA, 759 bp, synthetic construct
  misc_feature 1..759: note = Description of Artificial Sequence: Synthetic coding sequence
  source 1..759: mol_type = other DNA
atggaagaggcgatcctagtcccatgtgttctgggacttctgcttcttcctatcctggcgatgctgatggctttatgcgttcattgtcaccggttaccgggaagctacgattcaacgtcatccgactcgctatatccacggggaatccagtttaagcggcctcacaccgtagcaccctggcctcctgcttatccccctgtgactagctacccccctctgtcacaacccgacttgctgcctattcccaggtcaccacagccccgacgggactctgacggagcgaacagtgttgcctcttacgaaaacgaaggagcctctggtattcgcggtgctcaggctggatggggcgtctggggcccttcttggacgagactcacccccgtctctctcccgccagagcccgcttgcgaagatgcagacgaggatgaggacgactaccataaccccggttacctggtggtgctccccgattccacacccgctacttcgacggctgccccttctgccccagcgttatctacccccggtattcgggactcagccttctcaatggagagcattgacgactacgttaatgtaccggaatccggggagtccgccgaagccagtctcgacgggtcccgggaatacgtgaacgtttcacaggaacttcatccaggagctgccaagactgagcctgctgctctcagttcccaagaagcagaggaggtggaggaagaaggcgcacccgactacgaaaacctgcaggaactgaattag

SEQ ID NO: 228797 - DNA, 789 bp, synthetic construct
  misc_feature 1..789: note = Description of Artificial Sequence: Synthetic coding sequence
  source 1..789: mol_type = other DNA
atggaagaggctatcctggtaccgtgcgtcctgggactccttctgctgccaatcttagcgatgctgatggcactgtgtgtccactgtcatcgcctaccaggctcttacgattctacctcttctgacagtctgtaccctagaggtattcagttcaagcggccacataccgtggccccatggcctccagcataccccccagttacaagctatccaccgctctcccaacctgacctgctgcccatacccaggagtccgcaacctcttggtggcagccatagaaccccctctagcagacgagacagcgatggcgcaaactccgtcgctagctacgaaaacgaaggagcttctgggatcaggggcgcacaggctggatggggcgtgtgggggccatcctggaccagactaaccccggtgtcactaccaccggagccagcttgcgaggatgctgatgaggacgaggacgactatcacaatccaggatatcttgtggttctaccagactcaacacccgcaacgtccactgcggctccaagtgccccagctctttctacgccaggaatccgcgatagtgccttcagcatggagagcatcgacgattatgtgaacgtgccggagagcggtgaatctgccgaggcgtccttggacggaagccgcgagtatgtcaacgtgtcacaagaactgcatccaggcgcagcaaaaaccgagcctgctgcccttagcagccaggaagccgaagaagtcgaagaggagggcgctccagattatgaaaacctgcaggagttgaactag

SEQ ID NO: 228798 - DNA, 702 bp, synthetic construct
  misc_feature 1..702: note = Description of Artificial Sequence: Synthetic coding sequence
  source 1..702: mol_type = other DNA
atggaagaagctatactggtgccatgcgtgctcgggctgctgctgttacccattctggctatgttgatggctttatgcgtccactgccacaggctgcccggaagttacgacagcacttccagcgactccctgtacccccgaggtatccaattcaagagaccgcacaccgtcgctccatggcctcccgcataccccccagtgacctcttacccgcctttgagtcagcctgacttgttacctattccaagatccccacagcccctgggcggatcacacagaacaccgtcctctagacgcgattctgatggggcaaatagcgtggcctcttatgagaatgaagaacctgcatgcgaggatgctgatgaggatgaggatgattaccataaccccggatatctcgttgtgctgccagatagcacccccgcaactagcacagccgctccatccgcacccgcactctccacacccggaattcgagatagcgccttttccatggagtctattgatgactacgtcaacgttccagagagtggtgagagcgctgaagcgagtctagacggcagcagagaatacgtaaacgtgtcgcaagaactgcaccctggagccgctaaaactgaacccgcagccctgtctagccaggaggccgaggaggtggaggaagaaggcgctcccgattatgaaaatctgcaggagctgaactag

SEQ ID NO: 228799 - DNA, 810 bp, synthetic construct
  misc_feature 1..810: note = Description of Artificial Sequence: Synthetic coding sequence
  source 1..810: mol_type = other DNA
atggaggctaccgctgcgtcctggcaagtggctgtgcctgtcctgggtggtgccagccgccctctgggcccacgaggggctgccagtttgcttagggcaccattgcagatggaagaggccattctggtgccatgtgtcttaggactcctgttgctacctatcctggccatgctgatggccctgtgtgtccactgccaccgcctgcccggatcctacgactcaactagctccgacagtctttacccaagaggtatacaattcaagaggccgcatacggttgcgccatggccaccagcctatccgccagtgacctcataccccccactaagtcagcctgatctgctgcctatcccaagatcgccgcagccgctgggagggtcccacagaactcccagctccaggcgggattcggatggcgctaacagcgtggcatcttatgagaacgaagaacctgcttgcgaggacgctgatgaggacgaggatgactatcataatcctgggtacttggtcgtcttgccagactccacgccggcaacaagcactgccgctccaagtgctcccgctctgagcacacccggaattcgggactcagccttttctatggagagcattgacgactacgttaacgttcctgagtcaggagagtcagcagaagccagtctggacgggtccagggaatacgtgaatgtttcacaggagttgcaccccggagccgctaaaactgagccggctgccctatcctctcaggaagcagaagaggtcgaggaggagggcgctccagactacgaaaacttacaagagctgaactag

SEQ ID NO: 228800 - DNA, 699 bp, synthetic construct
  misc_feature 1..699: note = Description of Artificial Sequence: Synthetic coding sequence
  source 1..699: mol_type = other DNA
atggaagaagctatactcgtcccttgcgtgctcggcctcctgctgctgccgatactcgccatgcttatggccctgtgcgttcattgtcaccgactccctggatcctatgatagcacatccagtgactcgctgtacccacggggaattcagttcaagagaccccacaccgtcgctccgtggccccctgcctacccacccgttacgtcatacccccctcttagccagcctgatctcctccccatcccaagccctcagcctctggggggatctcatcgcacaccttcaagcaggcgcgactccgatggagcgaacagcgttgctagctacgagaacgaggaacctgcttgtgaggatgccgatgaggatgaagatgattaccataaccccggataccttgtcgtgctgcctgatagtactcccgctacttccacagctgcaccctcagcaccggctctgtcaactcctggaatacgagatagcgccttcagtatggagagtatcgatgattacgtcaatgttcctgaatctggagagagcgcagaggcaagtctcgacggttcgagggagtatgtcaatgttagccaagaacttcaccccggtgctgccaaaaccgaacctgcggcactgagttcacaagaggccgaagaagttgaggaggaaggcgctcccgactatgagaacctccaggaactgaactag

SEQ ID NO: 228801 - DNA, 732 bp, synthetic construct
  misc_feature 1..732: note = Description of Artificial Sequence: Synthetic coding sequence
  source 1..732: mol_type = other DNA
atgagttcaggcacagagcttctgtggcctggtgccgctttgctggtgttattaggcgtggccgcttcactgtgtgtccgatgttcgaggcctggggctaaacgcagcgaaaagatttaccagcaacggtccctgcgggaggatcagcagtcattcaccgggtccaggacctactcattggtgggacaggcctggcccggacctctggccgatatggcacccaccagaaaagacaagcttcttcaattctatccaagcttggaggacccagccagctctaggtaccagaacttcagtaaggggtccaggcacggctctgaagaagcctacatcgacccaattgccatggaatactacaactggggcaggttttctaagcctcccgaagacgacgatgccaacagttatgagaacgttctgatttgtaagcaaaagaccactgagactggcgctcagcaggaaggcataggtggattatgccgcggagacctgtccctgtctcttgcactcaagactggacccacaagcgggctgtgtccgtctgcctcccctgaagaagatgaggagtctgaagattatcagaattctgcctccatccatcagtggcgggaaagtcgaaaggtcatgggtcagcttcagcgagaggcatcacctgggcctgtggggagcccggatgaggaggatggcgaaccagattatgtcaatggggaggttgctgcgaccgaagcctag

SEQ ID NO: 228802 - DNA, 732 bp, synthetic construct
  misc_feature 1..732: note = Description of Artificial Sequence: Synthetic coding sequence
  source 1..732: mol_type = other DNA
atgtctagtgggacagagctcctctggcctggggctgcactcctcgtcctacttggggtggcagcatcactgtgcgttaggtgtagtagacctggagccaagcgctccgaaaagatctaccagcaaagatcactgcgggaagaccaacagtccttcacggggtctcgtacatatagcttagtgggccaggcctggcctggacccttggcagatatggctcctactcgcaaggataaattgctgcagttttaccctagcctggaggatccggcatcctctagataccagaattttagcaaaggcagccgccacggttccgaggaggcctatattgaccccattgccatggagtattataactgggggaggttcagtaaaccgccagaggatgatgacgcaaattcctatgagaacgtgctgatttgcaagcagaaaacaaccgagacgggtgctcaacaggagggcatcggcggactttgtagaggcgacttgtccctatcactggcattgaaaactggacctacaagtggcctatgcccctcagcaagtcccgaagaggacgaagagagcgaagattaccaaaattccgcttctatccatcagtggagagagtccagaaaagtgatgggccagctgcagcgggaagctagtcccggaccggtgggctctcctgatgaggaggacggggaacccgattacgtcaacggcgaagtcgcagctaccgaggcctag

SEQ ID NO: 228803 - DNA, 195 bp, synthetic construct
  misc_feature 1..195: note = Description of Artificial Sequence: Synthetic coding sequence
  source 1..195: mol_type = other DNA
atgagttcgggcactgagctgctctggcccggtgccgcacttctcgtgttgcttggggtcgctgcgtccctctgcgtcaggtgttccagaccaggggctaaacggtcagagaagatctatcaacagcggagtcttcgcgaggatcagcaatccttcaccggcagccgaacctactccctcgtagggcaggcttag

SEQ ID NO: 228804 - DNA, 732 bp, synthetic construct
  misc_feature 1..732: note = Description of Artificial Sequence: Synthetic coding sequence
  source 1..732: mol_type = other DNA
atgtcgtccgggactgaattgttgtggcctggggctgctctgttggtgctgctgggagtagcagcttctctctgtgtccggtgcagtcggcctggcgcaaaacgctcagaaaagatctatcaacagcgctccttgagggaggatcagcagtcctttaccgggagccgcacatattctttggtaggacaagcctggcccggaccactggcggatatggctccaacccggaaagataagcttcttcagttctatcccagcctcgaagaccctgcaagctctcgttaccagaattttagcaaaggaagtagacatgggtcagaggaagcttatatcgacccaatcgccatggaatactacaactggggtagattctctaagccccctgaagacgacgatgctaacagctatgagaacgtgttaatttgcaaacagaagacgacggagaccggagcacaacaggagggaattggcggactgtgccggggagacctcagtttgtcccttgccctgaaaactggacctaccagtggactctgcccctctgcctctcccgaggaggatgaagaatccgaggactatcagaattctgcgtctatccatcagtggagggaatctagaaaagtgatgggccaactgcaacgggaggcctctcccggaccagtgggatctcccgacgaggaagatggcgagcccgactatgtgaatggtgaggtggccgcaactgaggcctag

SEQ ID NO: 228805 - DNA, 732 bp, synthetic construct
  misc_feature 1..732: note = Description of Artificial Sequence: Synthetic coding sequence
  source 1..732: mol_type = other DNA
atgagctctgggacagaactcctatggcctggggctgcactcctcgtcctgttaggggtggcagcgtccctttgcgttcgctgctcaaggcccggtgctaagaggtcggaaaaaatttaccagcagcgcagccttagggaggatcagcagtcctttactgggtctaggacttattccctggtgggacaggcttggccgggtccactggccgacatggctcctacccgcaaagacaagctgctgcaattctacccttccctcgaggaccccgcttctagtcggtaccaaaacttcagcaaggggtctaggcatggcagcgaagaagcctacatagacccaattgccatggagtattacaattggggccgattctccaagccaccggaggacgacgacgctaattcttacgaaaacgtgctgatttgtaagcagaagactacagagacaggcgcacaacaggagggcattgggggtctttgccgaggcgatctatcgttgtctctcgccctgaaaacaggtccaacttccgggctttgcccctctgcatcacccgaggaggatgaagaaagcgaagattatcagaactcagcctctatccatcaatggcgtgaatctagaaaggtaatgggccagttgcagagagaagcatctcctggtcccgtaggctcgcccgatgaggaggacggtgagccagattacgtaaacggggaggtcgcagcaactgaagcatag

SEQ ID NO: 228806 - DNA, 177 bp, synthetic construct
  misc_feature 1..177: note = Description of Artificial Sequence: Synthetic coding sequence
  source 1..177: mol_type = other DNA
atgtcttccggaaccgaactcctgtggccaggagcagctcttctcgttctgttgggagtcgctgccagtctctgcgtaaggtgttccaggcctggggctaagagatctgaaaagatctatcaacagcggtctttaagagaggatcagcagtcattcacaggcagtagaacctactag

SEQ ID NO: 228807 - DNA, 303 bp, synthetic construct
  misc_feature 1..303: note = Description of Artificial Sequence: Synthetic coding sequence
  source 1..303: mol_type = other DNA
atgtcctccggtactgagctcctgtggccaggtgcagctctgctggttctgctgggcgtcgccgcttcactctgcgtccgatgcagcagaccaggagcgaagaggagcgagaagatttatcaacagcggagtctgagagaggaccaacaaagcttcacaggcagtaggacatactctttagtgggccaggcctggcctggacctttggctgacatggctcctacaaggaaagacaaacttcttcagttctacccatcactcgaggatcccgcaagcagccgttaccaaaacttcagtaagtag

SEQ ID NO: 228808 - DNA, 1704 bp, synthetic construct
  misc_feature 1..1704: note = Description of Artificial Sequence: Synthetic coding sequence
  source 1..1704: mol_type = other DNA
atgaggcctgattctcctacaatggccgctcccgctgaatcccttagaagaaggaaaacaggctatagcgacccggagcccgagtcgcccccagcgccaggccgaggcccagccggatccccagcacaccttcatacaggaacattctggctgactcggatcgttctcttgaaggccctggcattcgtgtatttcgtggcattcctcgtggcttttcaccagaataagcagctaatcggtgataggggacttttgccttgccgggtgttcctcaaaaattttcagcaatacttccaagaccggacctcctgggaagtgtttagctatatgcccactatcctctggcttatggactggtccgacatgaatagcaatctggacctgctggcattattgggactgggaataagctccttcgtccttattaccgggtgtgctaatatgcttttgatggctgccctatgggggctttacatgtccctagtaaatgtaggccatgtttggtatagtttcgggtgggagagtcagttgttggagactggatttttaggcatcttcctgtgtccattatggactttgagcaggctgccccagcacacccctactagccggatcgtgctgtggggcttcaggtggctgatttttcgtatcatgttgggcgcaggcttaatcaaaattcgcggtgataggtgctggcgtgacctgacgtgcatggactttcactatgaaactcagccaatgcccaatccagtggcgtactatcttcatcacagtccgtggtggttccaccgcttcgagactctgagcaatcacttcatcgaactattagtgccgtttttcctattcctaggtcgcagggcttgcattattcacggtgtactccaaatcctttttcaggctgtgcttatcgtgtctggtaatctgagcttcctcaactggctcaccatggtgccatccctcgcgtgcttcgacgatgcaacactgggcttcctcttcccctctggccctggcagcctgaaagaccgagtcctccagatgcagagggatatcagaggtgcccgtcccgaaccacgcttcggtagcgtggtgagacgagcagctaatgtttcactcggcgtactgttggcatggctctccgtccctgtcgtactgaatctcttgagtagccgccaagtgatgaatacacattttaattcgttgcacatcgtcaatacctatggagcgttcggttcaatcactaaagaaagagccgaagtgattctgcaaggcacagcatccagtaatgctagcgcacccgacgcaatgtgggaggattacgagtttaagtgcaagcctggcgatccgtcccgtcgaccctgcctgatcagtccgtaccactacaggttggattggttaatgtggttcgccgcttttcagacttacgagcataatgactggatcatccatcttgcgggtaagttgctagccagcgatgcggaggcactgagccttctcgcccacaatccctttgcaggcagaccgccaccacgctgggttcgcggagagcactatcgctacaaattctcacgtccaggtggacggcatgctgctgaggggaaatggtgggtgcggaaaaggatcggcgcatactttccgcctttaagtctggaagagctgcgcccttactttagggatcggggttggccacttcccggaccgttgtag

SEQ ID NO: 228809 - DNA, 1704 bp, synthetic construct
  misc_feature 1..1704: note = Description of Artificial Sequence: Synthetic coding sequence
  source 1..1704: mol_type = other DNA
atgagacccgacagtccaaccatggctgcaccagcagagagcctgaggaggagaaaaaccggatactccgatcccgaacccgagagcccaccagctccaggacgtgggcctgctggaagccccgcacaccttcacaccggcactttctggttaaccaggatcgtactactgaaggcgctagcctttgtgtacttcgtggcctttctcgtggcattccaccaaaataagcagctaattggagatcgagggctgttgccgtgccgcgtctttctcaagaatttccagcaatactttcaggaccggacgtcctgggaagtgttctcttacatgcccacgattctctggcttatggattggtccgacatgaactccaaccttgaccttctcgcgctcctgggcctgggaatcagctcctttgtgttgatcaccggatgcgctaatatgcttctgatggctgccctgtggggattgtatatgagtctcgtaaacgtgggtcacgtttggtactcttttagatgggagagccaactgttggagaccgggttccttgggatctttctgtgtcctctgtggacactgtccagattgcctcagcacacccctacctcgcgcatcgtgctgtggggcttcaggtggctgatttttcgaatcatgctaggggcagggctgataaaaatccgcggagaccgctgctggagggatctcacgtgcatggacttccactatgagacacaacccatgcccaatccggttgcctattatctacaccactcaccatggtggttccatcggtttgaaactctgtcgaaccatttcatcgaactgctcgttcccttctttctgtttttaggcaggcgcgcttgcataattcacggcgtgctgcagatcctgtttcaggccgtcctgattgtgtcaggcaatttgtccttcctaaactggctgacaatggtacctagtctggcatgttttgacgacgccaccttgggcttcctgtttccctcaggtccaggcagcttaaaagaccgggtgcttcagatgcagagggatattaggggggcacgtcccgaacctcgattcggcagcgtggtacggagagccgctaatgtctctttgggcgtgcttctggcctggctctctgtgcccgtggtgctgaacctcctgagcagtcgccaggtgatgaatacacatttcaattctttgcatatcgtcaacacctatggcgcattcggatccattacgaaggagagagctgaggtgattctgcagggcacagcttcctctaatgcttccgcacccgatgccatgtgggaagattacgaatttaagtgcaaacctggcgaccctagtagacgcccatgtttgatttccccgtaccactatagactggactggttgatgtggttcgctgccttccagacatacgagcacaatgattggatcatccatctggctggcaagcttcttgccagtgatgctgaggcactgtcactcctggctcacaaccccttcgcaggcaggcctccgcctaggtgggtgagaggtgagcattaccggtacaaattctcccgtccaggcggtcgccacgccgctgagggaaagtggtgggtgcggaagcggattggggcttatttcccacctttgtcactcgaggaactgcgcccatactttcgcgaccggggatggcctctaccgggtccactatag

SEQ ID NO: 228810 - DNA, 558 bp, synthetic construct
  misc_feature 1..558: note = Description of Artificial Sequence: Synthetic coding sequence
  source 1..558: mol_type = other DNA
atgcgccctgattctccaacaatggccgcacctgccgagtccctccggagaagaaaaacaggatacagtgaccctgagcccgaaagcccgccagctccaggcaggggtccggcaggtagtcccgcacaccttcataccggcacattttggctgacacgcatcgtgcttctcaaggcacttgcctttgtctactttgtagcgtttctggtggccttccaccagaataaacagctaatcggcgatcgagggctactcccttgccgtgtctttctcaaaaattttcaacagtatttccaggatcggaccagttgggaagtgttctcttatatgcccactattctgtggctgatggactggtctgacatgaactcaaacttggacttgcttgctctactgggtctggggatctccagcttcgtcctgatcactggctgtgccaacatgctccttatggcggcactgtggggattatacatgtcactggtgaatgtgggccacgtgtggtgcccatccctggcgtcggctataagtcttccttcaatgcacggcggtcagtag

SEQ ID NO: 228811 - DNA, 501 bp, synthetic construct
  misc_feature 1..501: note = Description of Artificial Sequence: Synthetic coding sequence
  source 1..501: mol_type = other DNA
atggcagcacccgcagagtcccttcgcagacgaaaaaccgggtactccgaccctgagcccgagtccccacccgctccagggagagggccagcaggttctcctgcacacctgcataccggaaccttctggttgacgaggattgtcctgctgaaggcattagcttttgtgtattttgtggcatttctggtcgcctttcatcagaataaacagttaatcggggatcgcggtctgttaccatgcagagtctttttgaaaaatttccagcaatattttcaggatcggacctcttgggaagtctttagttacatgccaactatcctgtggctcatggattggtccgacatgaatagcaacctcgacctgttagcccttctgggacttggaatcagcagctttgttcttatcacagggtgcgccaacatgcttctcatggccgctctttgggggctatacatgtcactcgtaaatgtcggccatgtctggtattctttcggcaagtag

SEQ ID NO: 228812 - DNA, 1053 bp, synthetic construct
  misc_feature 1..1053: note = Description of Artificial Sequence: Synthetic coding sequence
  source 1..1053: mol_type = other DNA
atgcgaggggctgggctgatcaagatcagaggcgatagatgttggcgggatttgacgtgcatggattttcactacgagacacagcctatgcccaatcctgtggcttattacttgcaccatagtccctggtggttccaccggtttgaaacccttagtaatcacttcatcgaattgctcgtccccttcttccttttcctgggacgcagggcttgtattatccatggagtcctgcagatcctgtttcaagcagtgctcatagtttcaggcaatctgagctttctgaactggctaaccatggtgccaagcctggcctgttttgatgatgccactctggggtttctgtttcccagtggcccaggttccttgaaggacagggttctgcagatgcaaagagacatccggggagctcgacctgagccaagatttggctccgtggtgcgcagggccgcaaacgtttctctgggcgtgctcttggcttggctgtccgtccctgtggtattgaatttgctcagctctcggcaggtgatgaacacacacttcaactcactccacatcgttaatacttatggagccttcggctccatcaccaaagaacgagccgaggttattttacaaggcacggccagcagtaatgctagcgcaccagatgcgatgtgggaggattacgagtttaagtgtaaacctggagacccaagccgcagaccatgcttaatatccccttatcattaccgactcgactggctgatgtggtttgccgcatttcagacctacgaacacaacgattggattattcacctcgctggtaagctcctggcaagcgatgcagaggccctcagtttactcgcgcacaacccattcgcgggacggccaccaccgagatgggtgcggggagagcactatcggtacaagttctcacgccctgggggacgccacgctgcagaaggcaaatggtgggttagaaagaggatcggcgcatattttccacccctgtctctggaggaactcagaccttattttcgagaccgtggttggcccctgccaggtcccctttag

SEQ ID NO: 228813 - DNA, 993 bp, synthetic construct
  misc_feature 1..993: note = Description of Artificial Sequence: Synthetic coding sequence
  source 1..993: mol_type = other DNA
atggactttcattacgagacacaacccatgcctaaccccgtggcgtactatctgcaccattctccgtggtggttccacagatttgaaacactctcaaatcacttcatcgagctgttggttccattcttcctgttcctaggaaggcgcgcatgcatcattcatggggttctgcagattctgtttcaggctgtgctcatcgtgagtggaaacctgagttttcttaactggttgacaatggtgccttccttggcctgctttgatgatgccactctgggctttctattccccagcggaccaggaagcttgaaggacagagtactccagatgcagcgtgatattaggggcgctcgcccagagccacgcttcggaagtgtcgtcagacgcgctgcgaacgtgtctttaggggtgctgttggcgtggttgtcagtgcccgtcgttttaaacctattatcatcaaggcaggtgatgaacacacatttcaattctctccatatcgtgaacacctacggtgcattcggcagcatcacgaaggagcgcgcagaggtgattttgcagggcaccgcaagttccaacgcttcggctcccgatgccatgtgggaggactacgagtttaaatgtaaaccaggagatcccagtagaaggccctgcctcatatctccataccactatcgcctagattggttgatgtggtttgctgcattccagacatacgagcacaatgactggattatccacctagctgggaagctcttggcatccgatgccgaagccctctctctgctcgcccataatccatttgctgggagacctccacctcggtgggtcagaggagagcactatcgctacaaattttcacgccctggcggaaggcatgcagctgaggggaaatggtgggtgaggaaaagaattggagcgtactttccaccattgagcctggaggaacttcggccttacttcagagatcgcggatggccacttcccggacccctatag

SEQ ID NO: 228814 - DNA, 792 bp, synthetic construct
  misc_feature 1..792: note = Description of Artificial Sequence: Synthetic coding sequence
  source 1..792: mol_type = other DNA
atgcctaacccagtggcctattatctgcaccactctccttggtggttccataggttcgagaccctcagcaatcattttattgagctgctggtgccttttttcttgtttctcgggcgacgagcctgtatcatacacggagtcctacaaattttattccaggccgttctgatcgtgtcagggaatttgtccttccttaattggttgacaatggtgccatccctagcctgctttgacgatgccacattgggcttcttatttccaagcggccctggcagtctaaaggatcgagtcctgcaaatgcagcgcgatatcagaggcgctagacccgagccaaggtttggttcggtagtgagacgcgctgccaatgtctcgctcggcgttcttctcgcctggctctcagtcccggtagtcctaaatctgctgtcttctcggcaggtcatgaatactcattttaacagcctccacatcgtgaacacatacggggcattcgggtcgatcaccaaggagcgcgctgaagtgatactgcagggcaccgcctccagtaatgctagtgctccagatgccatgtgggaggactatgaatttaaatgcaagcccggagacccaagtagaaggccatgcctcatcagcccttatcactatagacttgactggctgatgtggttcgccgcattccagacctatgagcataacgactggattatccacctggccggtaaactgctggcatcagatgctgaagccctctccctgttggcgcataacccctttgccggaaggcccccaccttag

SEQ ID NO: 228815 - DNA, 1503 bp, synthetic construct
  misc_feature 1..1503: note = Description of Artificial Sequence: Synthetic coding sequence
  source 1..1503: mol_type = other DNA
atgtccaacagtgtgcctcttctctgtttctggagcctgtgctattgtttcgccgcaggcagtccggttccttttgggccagagggtcggctggaggataagctgcacaagccaaaggccacacagaccgaagtcaaaccttcagtccgattcaacctgagaacatctaaagatccagagcatgagggttgctatctctccgtaggccattctcagcctttggaagactgtagttttaacatgaccgccaagaccttttttattatccacggctggacaatgagtggaatttttgaaaactggcttcacaaactggtctccgccttacacactagggagaaggatgccaacgtggtagtggtcgactggctccctctcgcccaccagctctataccgacgccgttaacaacacacgagtggtaggccacagtattgccaggatgttggattggctgcaggagaaggacgatttctccctggggaacgtccatctcatcggctactcactaggagcccacgtggcagggtatgccggaaacttcgtgaagggtacagtggggagaatcaccggtctcgacccagccggaccaatgtttgagggggcagacatccacaaacggctgagccctgacgacgccgacttcgtggacgtcctacacacttatacccgatctttcggcctgtctattggaatccagatgcctgtgggacacattgacatttacccgaatgggggagattttcagcctgggtgtgggctcaatgacgtattgggatctattgcttatggcactataacagaggtcgtcaagtgtgagcacgaacgcgctgtacatttgtttgtcgatagtctcgtcaatcaagataagccatctttcgcttttcagtgcactgattcaaaccgctttaagaaaggcatctgcctcagctgccgtaaaaataggtgtaactctataggatacaatgccaagaagatgagaaacaaacgcaacagtaagatgtatctgaaaactagggcgggaatgcctttcagagtttatcactaccagatgaaaattcacgttttttcctataagaacatgggggagatcgaacccacattttacgtgaccctttatggtactaatgcggactcacagacccttcctttagaaattgtagagaggatcgaacagaatgctacaaatactttcctcgtgtacacagaggaagacctgggcgatcttctgaagatccagctgacttgggagggcgcttcccaatcatggtacaacctgtggaaggaattccgaagttatctctcacagccccgaaatccagggcgtgagctcaatattagaagaatccgcgtcaaatccggcgaaacccagaggaagctgactttttgtacggaagacccggaaaatacttccatttccccaggacgagagctctggtttcggaagtgtagggatgggtggcgcatgaaaaatgaaacaagccctaccgtggagctcccctag

SEQ ID NO: 228816 - DNA, 1281 bp, synthetic construct
  misc_feature 1..1281: note = Description of Artificial Sequence: Synthetic coding sequence
  source 1..1281: mol_type = other DNA
atgagcaactctgtcccacttctgtgtttctggagcttatgctattgcttcgccgctggctcaccggttcctttcgggcctgaggggaggctggaagataagctgcacaaaccaaaggccacccagacagaggtgaagccctctgtccgctttaacttgaggacctctaaagatccagagcacgaggggtgttacctcagtgtcggccattctcagcctctcgaggattgcagttttaatatgacagctaaaactttctttattatccatggttggaccatgagtgggatctttgaaaattggttacataagctcgtctccgccctgcacacccgcgagaaggacgccaatgtcgtagtggttgattggctgcctctcgcgcaccagctgtatacagatgcggtgaataacacaagagtggtgggccacagcatcgcgaggatgcttgactggctgcaagaaaaggacgatttttctcttggcaacgtgcacctcatcggatattctctgggcgctcacgtggctggttatgcagggaactttgtcaagggaaccgttggtcggatcaccgctatcacggaggtcgttaaatgcgaacacgaaagggccgtacatctctttgtggatagcctggtgaatcaggataaaccgagttttgccttccagtgtacagattccaaccggtttaaaaaaggcatttgccttagctgccggaagaatcgttgcaattccatcgggtataatgcgaagaagatgcgcaacaagaggaactccaaaatgtatttgaaaacccgagcgggtatgccgtttagagtttaccattatcagatgaagattcatgtgttttcttacaagaacatgggggaaatcgagcctacattttacgtgactctctacggcacgaatgccgattctcagacgctgccgctggaaatagttgagaggattgagcaaaacgccactaatacattcctggtctatactgaggaagacttaggggacctactcaaaattcagctgacctgggagggcgcttctcagtcttggtataacctctggaaagagtttaggagttacttaagccagccaaggaatcccggacgcgagctgaacatcagaaggatcagggtaaaaagtggagaaacccagagaaagcttaccttctgtactgaagatcctgaaaacacaagcatatcaccagggagagaactgtggtttaggaaatgtagagatgggtggcggatgaaaaacgagacctctcccacagtggagctaccgtag

SEQ ID NO: 228817 - DNA, 1101 bp, synthetic construct
  misc_feature 1..1101: note = Description of Artificial Sequence: Synthetic coding sequence
  source 1..1101: mol_type = other DNA
atgaatatctcacagatcatctcctattggggctacccggatgaggagtacgatattgtgacagaggatgggtatattcttggactgtaccgcattccttactggcggacggacaacaacaagaaccttgcgcaaagagtggtggtgtacttgcagcacggactgctcaccagtgctagttcctggatttctaacctgcccaataattcattaggctttatcttggcagacgccggttacgatgtgtggatgggcaactcccggggaaacacgtggtctagaaagcacctctacctggagacttcttccaaggaattttgggccttttccttcgacgaaatggctaaatatgatcttcctgcatccattgatttcacagtaaaacagacgcgtcaggaggaaatcttctacgtcgggcactcccagggcaccacaataggatttataacgttctccaccatctctaaaatcgccgaacggatcaagatcttttttgccttagctccggtgttcagtacgaaatatctgaagtctcccctgattcgtatgacctacaagtggaagtcgatagtgatggctttttctgggaataaggacttcctacctaagacttctttcaaaaagttcatcggatctaaactctgcccgcttcagatcttcgataaaatttgtctgaacattctgttcatgatgttcgggtacgatccaaaaaacctgaacatgtctcgtctggacgtctatttcagccacaatccagcaggaacaagtgtgcagaacatgctgcactggtcgcagttgctcaactcaacccacttaaaggcctatgattggggtagccccgatcttaatctggtacattacaaccaaaccacctctccgctgtacaatatgacgaatatgaacgtcgctacagctatttggaacggtaagtctgacctgttagcagacccagaggatgtcaatattctgcattcagagatcaccaaccacatatactacaaaacaatttcctactataatcatatcgattctttgtttgggctcgatgtttatgaccaggtgtaccacgagataatagatatcatccaggacaacctttag

SEQ ID NO: 228818 - DNA, 1200 bp, synthetic construct
  misc_feature 1..1200: note = Description of Artificial Sequence: Synthetic coding sequence
  source 1..1200: mol_type = other DNA
atgtggcagctgctggcagccgcttgttggatgctgctgctggggtcgatgtacggctatgataagaaaggcaataacgccaacccagaagctaatatgaacatcagtcagatcatatcctactggggatatccctatgaagagtacgatgtcacaacgaaagatggatatattcttggcatatatcgcatccctcatggtaggggatgtcctggcaggaccgcacccaaaccagccgtgtacctgcaacacggtctcattgcttcagcttcgaactggatatgcaatctgcccaacaactccctggcttttctgttggctgactccggctacgacgtgtggctgggaaactctaggggcaatacttggtcccggaaacacttgaaactgtctccaaagagccctgagtattgggcctttagtttggacgaaatggcgaagtacgacctgccagcaaccataaattttataattgagaagacgggtcagaaaagactatattacgtgggacactcccagggtactacgatcgcctttattgctttctccaccaaccctgagttggccaagaagataaagatatttttcgcactcgcacccgtggtaacagtgaagtacacccagtctcccatgaagaaactgacaaccttgagcaggcgcgtggtcaaggtgctatttggggataaaatgttccatcctcacacactgtttgaccagtttatagcgacgaaggtctgcaatcggaagttatttagaagaatatgttctaacttcctgttcaccctctctggatttgatccccagaatctgaatatgtctcgactggacgtctatttgtcacataaccccgcagggacttccgtccagaatatgcttcactgggcgcaggccgtcaactcaggccagctacaggcgtttgattgggggaacagtgatcagaacatgatgcatttccatcagctcactccacccctgtacaacatcaccaaaatggaggtcccgaccgccatctggaacggtgggcaggacatcgtagcagatcccaaggatgttgagaacctgcttccacaaatcgctaatctgatctactacaaattgatccctcactacaatcacgtggatttctacctcggagaggatgcacctcaggaaatctatcaggatctcattatcctcatggaagagtacctgcagaactag

SEQ ID NO: 228819 - DNA, 1272 bp, synthetic construct
  misc_feature 1..1272: note = Description of Artificial Sequence: Synthetic coding sequence
  source 1..1272: mol_type = other DNA
atgctcgagacactgagtcgtcaatggattgtgagccatcgaatggaaatgtggttactgattttagtcgcatatatgttccagaggaacgtgaacagcgtgcacatgccgacaaaggccgttgacccagaagctttcatgaatattagcgagatcatacagcaccaggggtatccgtgcgaggaatatgaggttgcaacagaagatggctacattttgtccgtgaaccggatccctcgaggactggtacaacctaaaaagacgggtagccgccctgtggtgttactgcagcatggtttggttggcggagcttccaactggatttccaacctacccaacaatagtcttgggttcatcctcgccgatgccggatttgacgtatggatgggtaactccaggggtaacgcttggtctcggaagcacaaaaccctgtctattgaccaggacgagttttgggccttctcgtacgatgaaatggctagatttgatctgcccgctgttataaactttatccttcagaagactggacaagagaagatctattacgtaggatattcccaggggaccacgatgggcttcattgcattctccactatgcccgagctggctcagaaaatcaaaatgtactttgcacttgcgcctatagccacagtgaaacacgccaagagtccagggaccaaattcctcctgctgccggatatgatgatcaaggggctatttgggaagaaagaatttctgtatcagacacggttcctgcgtcaactggtgatctacttatgtgggcaggttatcttggaccagatctgtagtaacatcatgctcctgctgggcggtttcaataccaataacatgaatatgtcaagggcaagcgtttacgccgctcatacgctggccggaacgtccgtccagaacattctccattggtctcaggctgtgaacagcggagagttgagggcctttgattggggaagcgaaacaaaaaacctggagaagtgtaaccagccaacccccgtgcgctatagagtcagagacatgacggtgccaactgcaatgtggaccgggggtcaggactggttatcaaaccccgaggacgttaaaatgcttctgagcgaagtgaccaacctcatctatcacaaaaacattcccgaatgggcgcatgtagactttatttggggtctagacgcccctcaccggatgtacaacgaaatcatacatctcatgcagcaggaggagacaaacctgtcacagggcagatgcgaggcagtgctgtag

SEQ ID NO: 228820 - DNA, 1152 bp, synthetic construct
  misc_feature 1..1152: note = Description of Artificial Sequence: Synthetic coding sequence
  source 1..1152: mol_type = other DNA
atgacacggcctctggaccgtaaacagtcagaaatcatccaacaccagggctatccatgtgaggaatatgaagttgccactgaggatggttatatcctcagcgtgaacagaattcctagaggtctggtccaaccaaaaaagacggggagcaggcccgttgtgctgctgcagcacgggctagtggggggagcctctaattggataagcaaccttcccaacaacagtctcggcttcattctggccgatgctggatttgacgtgtggatggggaatagtagaggcaacgcctggagtcggaaacacaagacattgagcatcgatcaggatgaattctgggccttctcatatgacgagatggctcgctttgaccttcccgctgttataaattttatcttgcagaagaccggccaagagaaaatctattatgttggctatagccaagggaccacaatgggctttattgccttcagcaccatgccagaactagcacagaaaattaagatgtatttcgccctggccccaatagcaacagtaaagcatgccaagtctccaggcaccaaatttctgttgcttccggatatgatgatcaaggggctgtttgggaaaaaggagtttttataccaaacgcgatttctgaggcagctggtaatctatctatgtggccaggtgatcctggaccaaatttgttccaacatcatgttactcctgggaggtttcaataccaataatatgaatatgagccgcgcaagtgtctacgccgctcatacactggccggaacctctgtccagaatatcctgcactggagccaagccgttaatagcggagagttgcgcgcatttgattggggtagtgaaacaaagaatctggaaaaatgcaaccagccgacccccgtaaggtatcgggtgcgggatatgactgttccgaccgcaatgtggacaggcggacaagattggctgtccaaccccgaagatgttaagatgctgctgtcggaggtgacaaatctaatctaccacaagaatatccctgagtgggcccacgtcgattttatatggggtctggatgctccccaccggatgtataacgaaatcatccatctcatgcaacaagaggaaaccaatctatcacagggtaggtgtgaagcagttctctag

SEQ ID NO: 228821 - DNA, 1197 bp, synthetic construct
  misc_feature 1..1197: note = Description of Artificial Sequence: Synthetic coding sequence
  source 1..1197: mol_type = other DNA
atgatgtggttgctcctgacaaccacatgtttgatttgtggcaccctaaacgccggtggtttcttggatctggaaaatgaagtcaatccagaggtctggatgaatacaagcgagattataatatataatgggtatcctagtgaggagtatgaggtgacaacagaagacggatatatactacttgtcaatcgaattccttacgggcgtacacacgctaggtccactggtccgcgtccagtggtgtacatgcagcacgccctgttcgctgacaatgcttactggctggaaaattacgccaacgggagtctgggatttctcctggccgacgcaggctatgacgtttggatgggcaattctcggggaaacacatggagtaggcgacataagactctatctgaaactgacgaaaaattttgggcgtttagttttgatgagatggctaagtacgatctccctggtgtaatcgactttattgtcaataagaccgggcaggagaaactctactttatcggtcactccctaggcacaaccattggattcgttgccttttcgaccatgcctgagctggctcaacggattaaaatgaacttcgccctggggcctacaattagctttaaataccccaccgggatctttactaggttcttcctcctccccaattctattattaaagcggttttcggcacaaaaggattctttctggaagataaaaagacaaaaatcgcaagtacaaaaatttgcaataataagattctctggctgatttgctcggagttcatgagcttgtgggccggtagcaacaagaaaaacatgaatcagtctcgcatggatgtgtatatgtctcacgccccaacgggctcttctgtgcataacatactccatattaaacaactgtatcactctgacgagttcagggcctatgactggggcaacgacgcagacaatatgaagcattacaaccagagccaccccccaatttatgacctgaccgccatgaaggtgcccactgccatatgggccggaggccacgacgtgttggtgacacctcaagatgttgccaggattctgccccagatcaaatccttgcactacttcaagcttcttcctgattggaatcatttcgacttcgtatggggactagacgcaccccagcgcatgtactcggaaatcattgccctgatgaaggcgtacagctag

SEQ ID NO: 228822 - DNA, 1500 bp, synthetic construct
  misc_feature 1..1500: note = Description of Artificial Sequence: Synthetic coding sequence
  source 1..1500: mol_type = other DNA
atggacacatctcccctgtgtttcagcatcctgttggttctgtgtatttttatccagagttctgccttgggacaaagcttgaaacccgagccctttgggcgaagggcacaggcagtggaaacaaataaaaccctgcatgagatgaaaacccgctttctgctgtttggggaaaccaaccaggggtgtcagatcagaattaaccaccccgacactctccaagaatgcggattcaatagctccctgccattggtgatgataatacacggctggtccgtggacggtgttctcgagaattggatatggcaaatggtggctgccctgaagagccagcctgcccagcccgttaacgtgggcctggtggactggataaccttggcccacgaccattacactattgctgtacggaatacacgtctcgtggggaaggaggtggctgccttgttgcgctggctggaagagtcagtccaactgtcccgaagccacgtgcacttgataggttattccctcggggctcacgtgtctggcttcgcgggatcttccatcggcggtacccacaagataggaagaatcaccggattggacgcagctggtccacttttcgagggatctgcaccatccaataggctgagcccagacgatgccaactttgtagacgccatacatactttcaccagggagcacatggggttgagtgtgggcattaaacagcctatcggacactacgatttttacccaaatggcggatctttccagcctgggtgtcatttcctggaactgtatcggcatattgctcagcatgggttcaatgcaatcacacagactataaaatgttcacatgagcgtagcgtgcaccttttcatcgacagcctgttgcacgccggaacacagagcatggcgtacccatgcggcgacatgaacagcttcagccagggcctttgcttgagctgcaagaaggggcgatgcaacaccctgggatatcatgttcgacaggaaccacgcagcaagtcaaagcgcctcttccttgttactagggcccagtccccttttaaggtctaccactaccagtttaagatccaattcatcaaccagacagagacacctatccagaccaccttcaccatgtcactcctgggcaccaaggaaaaaatgcagaaaattcctataacattagggaaaggaattgctagcaacaagacttacagttttcttattactctggacgtggacattggcgaactgattatgatcaagtttaagtgggaaaattccgctgtatgggccaacgtgtgggacacagtgcagaccatcatcccctggagtacggggcctcgtcattctggccttgtcttaaaaactatacgggtgaaggccggtgagacccaacagcgcatgaccttttgcagcgaaaatacagatgatctactcttgcgccctacccaggaaaaaattttcgtgaaatgcgagatcaaatctaagacttctaagcgaaagatccggtag

SEQ ID NO: 228823 - DNA, 1500 bp, synthetic construct
  misc_feature 1..1500: note = Description of Artificial Sequence: Synthetic coding sequence
  source 1..1500: mol_type = other DNA
atggacaccagcccactgtgcttcagtatacttctggtcttgtgtatttttattcagtcttctgccctgggccaatccctcaagcccgaaccattcggacgtagggcgcaagccgttgaaaccaacaaaacactgcacgagatgaagactcgctttctactgttcggcgagaccaaccagggatgccagatacgtattaaccaccccgacaccctccaggaatgtggattcaattcatcccttcctttagtgatgatcatccacggctggtccgtggacggggttctggagaattggatatggcagatggtggctgcactgaagagccagcccgctcagcctgttaacgtcggcctggtagactggattacactcgcgcacgaccattacacaattgctgtgaggaataccagactggtcggcaaagaggtggccgctctgctgcgatggttagaggaaagtgttcagctgtctaggagccacgtacacttgatcgggtattcactgggagcccatgtgagcggatttgctggatcttctattggcggtacacacaagatcggcaggattacaggactcgacgccgcaggtcctctcttcgaggggagtgcccctagcaaccgcctctctcccgacgatgccaattttgtggatgcgatccacacctttacgcgagaacacatggggcttagcgtgggaattaaacagccaatcggccactatgacttctacccaaatggagggagcttccaacctgggtgccattttttggaattatacaggcatatcgctcagcacggcttcaatgctattacacagactataaagtgctctcacgaacggtcagtgcacttgtttattgattccctccttcatgcaggaactcagtccatggcctacccttgcggcgatatgaattctttttcccagggcctatgcctatcctgcaagaagggccgttgtaataccctcggctaccacgtacgccaggagccaagatcaaaaagtaagaggctgttcttggttactcgggcacagagccccttcaaggtgtatcactaccagttcaagatacagtttataaatcaaaccgaaacacccatccaaactacattcaccatgtccctgcttggaaccaaagagaaaatgcagaagatccctattacattggggaagggtatcgcttctaacaagacctacagtttcctcatcaccctcgacgtcgacatcggggagctgatcatgattaagttcaagtgggaaaactctgccgtttgggcaaacgtgtgggatactgtgcagactatcataccctggtctacaggcccaaggcatagtggccttgtcctgaaaacaattcgcgtcaaagccggagagacacagcaacgcatgacattttgttccgaaaacaccgacgatctcctgctgagacccacccaggaaaaaatcttcgttaaatgcgagattaaaagtaagacttcaaagcggaagatccggtag

SEQ ID NO: 228824 - DNA, 3231 bp, synthetic construct
  misc_feature 1..3231: note = Description of Artificial Sequence: Synthetic coding sequence
  source 1..3231: mol_type = other DNA
atggaacccggtagcaaatcagtatcccgaagcgattggcagccagaaccccatcagcgccctatcacacctttagagccagggcctgaaaagacaccgatagcccagcctgagagtaagaccctccagggctctaacacacagcagaagccggcatctaaccagcggccacttacacagcaggaaacgcccgctcagcatgacgccgagagtcagaaggaacctagagcccagcagaaaagcgcttcacaggaagaatttctcgcaccccaaaaaccagccccacagcaaagcccttacatacaacgagttctgttgacccaacaagaagccgcatctcagcagggccctgggctgggcaaagaatccatcactcagcaggagcccgctcttagacagcgccacgtggcccagccaggaccaggtccgggtgaacccccaccagcacagcaagaagctgagtctacgcctgcagcccaagctaaacccggagccaaaagggagccatctgccccaacagagtccacctctcaagagacccccgagcagagtgacaagcaaactaccccagtgcaaggggctaagagcaagcagggcagcctgacggagctgggatttttaaccaagctgcaggagctcagtatccagagatctgctttggagtggaaggccctgtcagagtgggtgactgactctgaatcggaaagcgacgtgggctcctcttcagacaccgattcccccgctacaatgggcggaatggtagcccaaggtgtcaaactgggtttcaagggcaaatcaggatacaaagtaatgagcgggtacagtggaacttctccccacgagaagacatcggctcgaaatcatagacattatcaggatacagcttctcgtctgattcacaacatggatttaagaacaatgacacagagtctcgtaactttggcagaggataatatcgctttcttttcttctcagggcccaggggagaccgcacagaggcttagcggcgttttcgcaggggtcagggagcaggctctggggcttgaacccgctctcggtcgcttactcggcgtggctcacttattcgatctggatccggaaacaccagccaacgggtacagatcattggtccacacagcccgatgttgcctggctcatctacttcataagagccggtacgttgcctctaaccgtagaagcatcttcttcagaactagccacaacctcgcagagctggaggcctacctcgctgctctgacccagctccgcgcactggtgtattacgcacagagacttctggtgaccaataggcccggagtgttgtttttcgagggtgacgaggggctgaccgccgactttctgcgggagtatgtcactttacataaaggatgcttttacggacgctgtctgggattccaattcacaccagccatccgcccttttctgcagacgataagcattgggttggtctctttcggggaacactacaagcggaatgagaccgggctctcagtggcggctagttcgctctttacttcagggcgattcgccattgatcctgaacttcgcggtgctgagttcgagcgtataacccagaacctcgacgtacacttctggaaagccttctggaatataacggaaatggaggtgctatctagcctcgctaacatggcatcagctactgttcgggtaagccggcttctcagcctgcctccggaagcgttcgagatgcccctgaccgcggaccccactttgaccgtcactattagcccccctctggcccacaccgggccaggcccagtgcttgtgagactgatatcatacgacttaagagagggccaggactctgaggagctttcttctctgatcaagtcaaatgggcagcggtcgctggagttatggccaagaccccagcaggcaccacgctctcgctctctgatagtgcactttcatgggggaggcttcgttgctcaaacaagtcgttctcacgagccgtatctgaaatcatgggctcaggagctgggcgcacctattatctctatagattattctttggctccggaggcacccttccctcgcgctctcgaggaatgcttcttcgcatactgttgggctatcaaacactgtgctctcttggggtccactggtgaacggatttgtctggctggagactcagccggagggaatctgtgcttcacagttgcactgcgggctgctgcctatggtgtccgagtgcccgatggtatcatggcagcgtatcctgccaccatgctgcaacccgcagcttcaccttccagattattatccctgatggatccattactgcccttaagtgttctctcaaaatgcgtttctgcatatgccggagccaagaccgaggatcatagcaactccgaccagaaagccctgggtatgatggggcttgtgcgacgcgacaccgctctgctattgcgggacttccgactaggcgcttcctcatggctcaactccttcctcgagttgagtggtaggaagagccagaagatgtctgaacccatagccgaacctatgagaagatccgtctcggaagctgctctggctcaaccccagggccctctgggcaccgattcattaaagaatctgactctgcgagatttgagcctaagaggcaacagcgaaaccagcagcgacacccccgagatgtctttgtccgccgagacgctgtcaccttcaacgccatcagatgtgaattttctgttgcctccagaagatgctggagaggaggcagaggcaaagaacgaactttcaccgatggacagaggcctcggagtgcgagcagcctttcccgaaggatttcacccacgcaggtctagccagggggctactcagatgcctctgtacagtagccctatcgtgaaaaacccctttatgagcccacttctggcaccagacagtatgttgaagagtttaccaccagttcacatcgtcgcatgcgcactagatcctatgctggacgacagcgtgatgttagccagaagactgcgcaacttgggccagccagtcactctgagggtggtagaggatctccctcacgggtttctgaccctcgcagcactatgtagagagactcgccaagccgctgagctgtgcgttgagcggatacgccttgttctgactcccccagctggagccggaccatccggggaaacaggagccgcaggcgtggatggcggatgtggcggtcgccactag

SEQ ID NO: 228825 - DNA, 1356 bp, synthetic construct
  misc_feature 1..1356: note = Description of Artificial Sequence: Synthetic coding sequence
  source 1..1356: mol_type = other DNA
atgttacgattttacctgtttatatccttactctgcctgagtcgctccgacgcggaagagacctgcccttcctttaccaggcttagtttccactccgccgttgttggtacgggcttaaatgtgaggcttatgctgtacactaggaaaaaccttacctgcgcccaaactatcaactctagcgcattcggaaatctgaatgtgaccaaaaagacaaccttcattgtccatggctttcgccctactggctctcccccagtttggatggacgacctcgtaaaaggcctcctgtcagttgaagacatgaatgtggttgtcgtcgactggaatcgtggggcaaccaccttaatctacacccacgcgtccagcaagactcgcaaggtggccatggtcctcaaagaatttattgaccagatgctcgcagagggagcctctctggatgacatttacatgatcggggtttctctgggtgcgcatatttccgggtttgtgggcgagatgtacgatgggtggctcggcagaatcactggccttgatcccgcaggcccattgtttaacggaaaaccccatcaggacagactggacccttcagacgcccagtttgttgacgtgatccacagcgatacagacgcccttgggtacaaggagcctctggggaacattgacttttatcccaacgggggacttgaccagcctggatgcccaaagacaatcctgggcggtttccaatacttcaaatgcgatcaccagagatcagtgtacctttatttgagctccctacgcgaatcctgtaccattaccgcatacccttgcgatagttaccaggattatcgcaatggtaaatgcgtcagctgtggtacaagccaaaaagaaagctgcccccttcttggttactacgccgacaattggaaagaccatttacgcggaaaggatccccctatgaccaaagccttttttgatactgccgaggagtctcctttctgcatgtaccattacttcgtcgacattatcacctggaacaaaaacgtgaggaggggcgacatcacaatcaagctgagagacaaagctggcaacaccactgaatcgaagattaatcacgagccgaccactttccagaagtaccaccaggtgagcctgctagccagattcaaccaagacctggataaagtggcggctatttctctcatgtttagtactggcagtctgatcgggcctcggtacaaactgaggatattacgcatgaaattgagaagtttggcccaccccgagagacctcagttgtgtaggtacgacttggtactgatggaaaacgtcgagactgtcttccagccgattctatgtccagagctgcagctttag

SEQ ID NO: 228826 - DNA, 1446 bp, synthetic construct
  misc_feature 1..1446: note = Description of Artificial Sequence: Synthetic coding sequence
  source 1..1446: mol_type = other DNA
atgctactgaaatgtctgcataacaacctttgtcagaagtatagcgcccacgcgtttcaattctccccgaggaacgtgctatggctgctggtggtttgtctaagaagcgacaacaagagaccatgcctggagttttctcagctgtcagtgaaagattccttcagagatctctttataccccgtatcgaaaccatcctgatgatgtacacacgcaacaatctaaactgtgcggaacccctgtttgaacaaaataactccctgaatgtaaattttaacacgcagaagaagacggtgtggctcattcacggctataggccggtgggatccattccactgtggctgcagaattttgtgaggatcctcctgaatgaggaggacatgaatgtcatagtggtcgattggtctagaggcgctacgaccttcatctataaccgcgctgtcaagaacacccgcaaggttgccgtgtctctctcagtccacatcaagaaccttcttaaacacggagcctcgctggacaacttccatttcatcggggtatctctcggcgctcacatctccgggtttgtgggtaaaattttccatggtcaattgggcaggatcaccggacttgatccagctggccctcgcttcagccgaaaaccaccatacagtagactcgactacacagatgctaaattcgtggatgtaatccattccgactctaatggcctgggcattcaagagcctctgggtcacatcgatttttacccaaatggagggaataagcaacctggctgtccgaagtctatcttctcaggcatccaatttataaagtgcaaccatcaaagagccgtacacctcttcatggcatcattagagactaactgcaacttcatcagttttccctgccggagctataaagactacaagacttctctttgtgtggactgtgactgtttcaaagaaaaatcctgtcccaggttggggtatcaggcgaaactgtttaaaggagtgcttaaggagcggatggaaggtaggcccctgcgcactacggttttcttagataccagtggcacatacccgttttgtacatattatttcgttctctctattattgtgccagacaagacaatgatggacggaagcttttcgttcaagttgctgaaccagctaggtatgatcgaagagcctcgcctgtacgaaaagaataagcctttctataaactccaggaagttaaaatcctggcgcagttttacaacgatttcgtgaacatttctagcatcggcctcacatactttcagagctcaaaccttcagtgctcaacatgtacatacaaaatccagcgcctcatgcttaaatcactgacgtacccagagagaccaccactgtgtaggtataatatagtcctgaaggacagggaggaggtcttccttaatcctaatacttgcacgcccaagaatacctag

SEQ ID NO: 228827 - DNA, 471 bp, synthetic construct
  misc_feature 1..471: note = Description of Artificial Sequence: Synthetic coding sequence
  source 1..471: mol_type = other DNA
atgaacgtgattgtagtcgattggagccggggagcaaccacctttatctacaacagggccgttaaaaacactcgaaaggtggctgtgagcctgagtgttcacatcaagaatcttctgaagcacggggcaagcctggataattttcactttattggggtctctctcggagctcacatttccgggttcgtgggcaagatattccatggtcagcttggcaggatcactgggctggaccccgcagggccacggttctctcgaaaacccccttatagtcggctcgactacaccgatgccaagttcgtggacgtgattcatagtgactctaacggcatacaattcattaaatgtaatcaccaacgcgctgtccacttgtttatggcgtccttggagactaactgtaactttatttcctttccatgtcggagctacaaggactacaagacgagtttatgtgtggactgcgactgctag

SEQ ID NO: 228828 - DNA, 426 bp, synthetic construct
  misc_feature 1..426: note = Description of Artificial Sequence: Synthetic coding sequence
  source 1..426: mol_type = other DNA
taatataaccgtgctgttaaaaatacccgcaaggtagccgtgagtctttcagttcatatcaaaaatctcctcaaacacggagcatcactggacaattttcacttcataggcgtcagtctgggtgcgcacatttcagggttcgtcgggaagatatttcatgggcagttagggcgtatcaccgggctggacccagctggccctcgattttcccgaaagcccccttattcacgcctggactacactgacgcaaagttcgtggacgttatacattcagattctaatgggattcagttcatcaaatgtaaccatcaacgagctgttcatcttttcatggcgtcactggaaacgaactgtaacttcatcagctttccttgtagaagctacaaagactataagaccagtctgtgcgtggactgtgactgctag

SEQ ID NO: 228829 - DNA, 1383 bp, synthetic construct
  misc_feature 1..1383: note = Description of Artificial Sequence: Synthetic coding sequence
  source 1..1383: mol_type = other DNA
atgcgggtctacatcttcctgtgtctcatgtgttgggtgcgttcagacaacaaacgcccttgtctggagttttcacagctttctgtcaaggactcatttcgagacctgttcattccccgtatagagacaatactgatgatgtacacacgaaataatcttaattgtgcagagcctttgtttgaacaaaataacagtctcaatgtgaattttaatacacagaaaaaaacagtttggctcatccacggatacaggcccgtaggctcaatacctctatggctgcagaactttgtccgcatcctgctgaacgaggaagatatgaacgtgattgtagtggattggtcccggggagccacaacttttatttataatcgcgctgtgaaaaacaccagaaaggtcgcagtctctctgagcgtccacataaaaaatctcctgaagcatggcgcttccttagataacttccacttcatcggtgttagcctcggagcgcatatctctggtttcgttgggaaaatctttcatggccagttgggccgaattacaggcctagacccggcaggccctaggttctcgcggaaaccgccttactccaggctggactatacagatgctaagttcgtggatgtaatacacagtgactccaacggattaggcatccaggaaccactgggtcatattgacttctaccccaatgggggaaacaaacaacctggctgtccaaagagcatctttagcggaattcagtttattaagtgtaaccaccagagggccgtgcacctgttcatggctagcctagaaactaactgtaatttcattagttttccctgtaggagctacaaagactacaagacatcgctgtgcgtggattgtgattgcttcaaggagaagagctgtcccaggctcggctaccaagccaaactgtttaaaggagtcctcaaggagaggatggagggtcggccactaagaacgacagtgtttttggatacgagtgggacctatccattttgtacctactatttcgttctctctatcattgtgccagacaagacgatgatggatggttctttttctttcaaactcctgaaccagctcgggatgattgaggaacctaggctgtatgagaagaacaaaccattttacaagttgcaggaagtcaagatccttgcccagttctacaacgattttgtgaacatctcctcgattggcctgacttacttccagtccagcaacctccagtgctcaacttgtacttacaagatacagcgccttatgctgaagagtttaacatacccggaaaggccacctctgtgtcggtataatattgtcctgaaagatcgcgaagaggtgttcctcaatcccaatacatgtacacctaagaacacctag

SEQ ID NO: 228830 - DNA, 2673 bp, synthetic construct
  misc_feature 1..2673: note = Description of Artificial Sequence: Synthetic coding sequence
  source 1..2673: mol_type = other DNA
atgaactacgtggggcagttggcgggtcaggtgtttgttactgttaaagagctgtacaagggcctgaatccagcaacactgtccgggtgcatcgacatcatcgtcataaggcaaccaaacggtaatctccaatgtagcccatttcacgtgagattcggtaagatgggtgtcctaaggagtagggaaaaagtggttgatatagaaattaacggagagtcagtcgacctccatatgaaactgggcgacaacggggaggctttcttcgtgcaagagacggacaacgaccaagaggtgatccctatgcacttggcgacttctcctatcctcagcgagggcgcatcccggatggagtgccaactgaaacggggtagcgtggacagaatgcgtgggctggatccctccacgccggcacaagtgattgcccctagcgagacaccttcttcttctagcgtggtcaaaaagcgcaggaagaggagacgaaagagtcaactggactcactcaagagagatgacaacatgaatacgtccgaggacgaggacatgtttcccatcgagatgtcatcggacgaagccatggagcttctggaaagttctcggaccctcccaaacgacattcctcctttccaagatgacatccccgaagaaaacctgagccttgcagttatctatccgcagtctgcttcttacccgaactccgaccgagagtggtcacccactccctcaccttctggcagcagaccttcaactcctaaaagtgactcagagctcgtgtcgaaatctactgaacgcacgggacagaagaaccctgagatgctctggctgtggggagagttgccccaggctgccaagtcatcctcaccacataaaatgaaagaaagctccccactgtcatcacggaaaatctgcgataagtcccacttccaggccattcactctgagtcctccgataccttttcagaccaatctcctacactggtaggtggcgcattgctggaccagaacaagcctcagaccgagatgcaatttgtgaacgaagaggatctcgaaaccctgggggctgcagctcccttgctgcctatgattgaagagcttaagccaccatccgcgtctgtcgtgcagaccgccaataaaacagactcaccgtctcgaaagcgagataagcggtcgagacatttaggagccgatggcgtgtacctggacgatctcacagatatggaccctgaggtggctgctctgtatttccccaaaaatggtgacccttctggactggcaaaacatgccagcgacaatggagccagaagtgctaaccaaagtcctcagagcgtaggatcgtcaggtgtggattccggggtggagtccactagtgacggactacgggaccttccatctatagccatctccctatgcggcggactgtcagaccatcgcgaaatcacaaaagacgcatttctggagcaagccgtgtcatatcagcagtttgtggataatccagcgataattgacgatccaaacctggtcgtgaagataggatcaaagtactacaactggaccacagctgcaccattgttgcttgctatgcaggcatttcagaagccactccccaaagccaccgtcgaatcgatcatgcgtgataagatgccaaagaagggcggacgctggtggtttagctggcggggaaggaataccaccatcaaagaggaatcaaaaccagaacaatgcctcgcaggcaaggcacatagcaccggggagcagccaccccagctatcactggccacccgagttaagcatgagtcctctagctccgacgaggagcgggcagctgcgaagcccagtaacgccggacatctgccactgttgcctaatgtcagttataagaaaactctgcgccttacgtccgagcagttaaagagcttgaaactgaaaaacggcccaaatgacgttgtgttcagcgtcacaacacaataccagggtacatgccgctgtgaggggactatttacttgtggaactgggatgataaggtgatcatttctgacattgacgggaccataacccgcagtgacacattgggccacatcctccccacgctcgggaaagactggacacatcaagggattgccaagctgtaccataaggtgtcgcaaaacggttataagttcttatactgctcagcacgcgcaatcgggatggctgacatgactcgaggatatctgcattgggtaaacgagaggggcacagtgctgccacaggggccactcctgctatccccgtcttcacttttcagtgcattgcatagggaagtcatcgagaagaaacctgagaagtttaaagttcagtgccttactgatataaagaatctgttttttccaaatacggagcccttctacgccgcattcggcaaccgtcccgctgacgtctattcctacaagcaggtgggcgtcagcttgaatcggattttcacagtaaatcccaagggggaattggtccaagaacatgccaagaccaatatcagttcctacgtccgcctgtgtgaggtagtggaccatgtgtttcctcttttgaagaggtcacacagttcagacttcccttgtagcgatacattctcgaattttacattttggcgggagccgctgccaccctttgagaaccaagatatccacagtgcttccgcctag

SEQ ID NO: 228831 - DNA, 1863 bp, synthetic construct
  misc_feature 1..1863: note = Description of Artificial Sequence: Synthetic coding sequence
  source 1..1863: mol_type = other DNA
atgttatggttgtggggagagcttccacaggcagcaaagtcatctagtccccacaagatgaaggagtcatctcctctcagctcccgaaaaatctgtgacaagtcacacttccaagctattcactctgaaagcagtgacaccttctcagatcagagtcctacccttgttggcggtgcactcctggaccaaaacaaacctcaaactgagatgcagtttgtgaatgaggaggatctggagacactgggggcagcagctcccctcctccctatgattgaggagctgaaacctccttctgctagcgtcgtacaaactgctaacaaaaccgacagccccagccgtaagagagacaagcggtctaggcacttgggcgctgatggcgtctacttggatgacctgacagacatggacccagaagtcgccgctctctacttccccaagaacggcgatccctcaggccttgcgaagcacgctagcgacaatggcgcacgctccgcaaaccagagccctcagtccgtaggctcttctggagtggacagtggagtagaatctacgtcagacggccttagggatctgccctccattgcaatttccttgtgtggcggtctgagcgatcaccgggaaatcacaaaagacgcattcctggagcaagcagtctcctaccagcagttcgtggacaatcccgctatcatcgatgacccgaacttggtcgttaagattggatcgaaatactataattggacaaccgcagccccactgcttctggccatgcaggctttccagaaaccacttcccaaagcaactgtagagtctatcatgcgggacaaaatgcccaagaaggggggtcggtggtggttctcttggcgcggacgcaatactacaatcaaagaggaaagcaagccggaacagtgtttagccggaaaggcccacagcaccggcgaacagcctccccagctgagcctggcgacacgcgtcaagcacgagtcatcaagctcagatgaagaaagagcggcagccaaaccctccaacgcgggtcatctgcctttgcttcctaatgttagctacaagaaaacactacgcttgacttcagagcaattaaaatcccttaagcttaaaaacggacccaatgacgtggtattttctgtgacgacccagtaccagggtacctgtaggtgtgagggtaccatctacctgtggaattgggacgacaaggtgatcatttccgatattgacggtactattacacgttctgacaccctgggtcatattctgcccacactcggaaaagactggactcaccagggaatcgctaaactctaccacaaggtcagtcagaacggttataagttcctgtactgtagcgcacgggctattggaatggccgacatgaccaggggttatcttcactgggtgaatgaaaggggtacagtgctaccacagggccctctgttattatctccttcttctcttttctccgcactccacagagaggtaatcgagaagaaacccgagaagtttaaggttcagtgcttgacggatattaagaatctgttcttccctaatacagagccattttacgcagcgttcggtaacaggcctgccgacgtttactcctacaagcaggtgggagtgtcactaaaccgcatctttacagtgaaccccaaaggcgagcttgtgcaggaacacgcaaagactaatatttcctcatacgtgcggctatgcgaagtcgtcgaccatgtattccccctcctgaaacggagccattcttctgacttcccatgttctgatactttttccaacttcaccttttggcgcgaaccactacctccattcgagaaccaggatattcacagcgctagcgcctag

SEQ ID NO: 228832 - DNA, 2799 bp, synthetic construct
  misc_feature 1..2799: note = Description of Artificial Sequence: Synthetic coding sequence
  source 1..2799: mol_type = other DNA
atgtcacgggtccagaccatgaactatgtcggacaactagccggtcaggtcttcgtcacagttaaggaactgtataagggcctgaaccctgctaccctttcagggtgcatcgacatcatcgtgatccgtcagcctaacggcaacctccagtgttcaccttttcacgtccggtttgggaaaatgggagtattacgttcccgagaaaaggtggtcgacattgaaattaatggcgaatccgtggatctgcacatgaagttaggtgataatggagaagcattcttcgtgcaggagacagataatgatcaggaagtgattcccatgcacctggccacgtcacctattttgtctgagggtgctagccgaatggagtgtcaactgaagcggggatcagtggacagaatgagaggacttgaccctagtacccctgcacaggttatagcgccatccgagactccaagctctagctccgtggttaaaaagcggagaaagaggagacgtaagtcccagctggacagcctcaagcgcgacgataacatgaacacctccgaagacgaggatatgttccctattgaaatgagttcagatgaagcgatggagcttcttgagagtagcaggactctaccgaatgacatacccccattccaagacgacatccccgaggaaaatctgagcctcgctgtgatctacccacagtcagcttcttaccctaacagtgatcgagagtggtcacccacacccagcagcctcgtggattgtaaaagaacggccccacacctggcagttgctgccgaagggggactgtcctcttcgtgcccccctcagtccagtctgtttcatccatcagaatccccatcgggctcaaggccatccacccccaaatccgactccgagctggtgtctaagtccaccgagaggaccggccagaagaatcctgagatgctctggctctggggcgaactgcctcaagctgccaagtccagctctccccataaaatgaaagaatcatcccccttgagctctagaaagatctgcgataagtctcactttcaggccatacactccgaatcatccgatacattctcagaccagtcgcccaccttggtcgggggtgcccttcttgatcaaaataagccacagactgagatgcagttcgtgaacgaggaagatctggagacgcttggagctgctgccccattgctgccaatgattgaagagcttaaaccacctagtgcaagtgtggttcagaccgccaataagacagacagcccctcccggaaaagggacaagcggtcacgccaccttggtgctgacggcgtttatctagacgacctcaccgacatggacccagaagttgcagctctgtactttccaaaaaacggggatcccagcgggctcgccaaacatgccagtgataatggggctagaagcgctaatcaatctccacagtctgtgggtagctctggagtcgactccggggtggaaagcacaagcgacgggctgcgggatctccccagcatcgcaatttccctatgtggaggcctcagcgaccatcgcgagatcactaaagacgcgttcctggagcaagcagttagctaccagcagttcgtggacaatccagcaatcattgatgatccgaatttggtcgtaaagatcggttcaaagtactataactggaccactgcagcccctctcctactcgccatgcaggctttccagaagccactacctaaggcgaccgtcgagtccatcatgcgggacaagatgccaaaaaagggcggtagatggtggttctcctggcgtggcaggaacactacaattaaggaggagtctaaaccagagcagtgccttgcgggaaaggcccattcaactggcgaacaacctccccaactgtctcttgcaactcgggtgaaacatgaaagtagctcatctgacgaggagagagcagccgctaaaccgtctaacgcaggccacctccccttactgcctaatgtaagttataagaaaacattgcgactaacgagcgaacagttgaagtctttgaagcttaaaaatggacccaatgatgtcgtattctccgttaccacgcagtatcaggggacatgtcgctgtgaggggaccatttatctgtggaattgggatgataaagttattatctccgacatagacggcactataacaagatccgacacactagggcacatcctgccaacattaggcaaagattggacgcatcaggggatagcaaagctataccacaaggtgagtcagaacggctacaagttcctctactgttctgctcgcgctatcgggatggcagacatgacacgcggatatttacattgggtcaacgagcgcggaaccgtacttcctcagggcccactgcttctgtcaccttcttccttgtttagtgccctacacagagaagtaattgaaaaaaaacccgagaaatttaaggtgcaatgtctgactgacatcaaaaacctgttttttcccaatactgagcctttctatgctgccttcgggaatagacccgcagatgtttattcttataagcaggttggagttagcctgaacagaattttcacagtcaatcctaagggcgagttggtgcaagaacatgccaaaaccaatatatctagctacgtcaggttgtgcgaggttgtggatcatgtgttccctttgctgaaacgatcacacagcagcgactttccttgcagcgatacatttagcaacttcacattttggcgggagccgttaccaccctttgagaaccaggatatccattcagcgtcggcgtag

SEQ ID NO: 228833 - DNA, 1176 bp, synthetic construct
  misc_feature 1..1176: note = Description of Artificial Sequence: Synthetic coding sequence
  source 1..1176: mol_type = other DNA
atgcaagccttccagaagcctctgccaaagtcctcttgcttgtcttacctgcacgtgattcttgacgctattcgattttgtttttctaagatctttaatgcgcagattgcaaccgtggaaagtattatgcgggacaaaatgccaaaaaaagggggtcgatggtggttcagttggaggggaagaaacacaactataaaggaagagagcaagcccgagcagtgtctcgcgggaaaagctcattcaacgggcgaacagccgccacagctgagtctcgcaactcgtgttaagcacgaatctagttcctccgacgaggagcgggcagctgcaaagcctagcaacgcgggtcatctgccactgttgccaaatgtgtcatacaagaagactctgcgcctcacatctgaacagctcaagtctctgaagctgaaaaatggtccaaacgatgtggtgttcagcgtgactacccagtaccaggggacttgcaggtgcgaaggaactatctatctgtggaactgggacgataaggtcattattagcgacatcgatggcaccattacacgatcagacacgctgggacacatcctccccaccctaggcaaggactggacccatcaagggatagccaaactctaccataaggtgagccagaacggctacaagttcctctactgtagcgccagagcgattggaatggctgacatgaccagaggctacctgcactgggtgaacgagcgaggcacagtcctgccccaaggcccattactgctgagcccttcatcactattttctgcactgcaccgcgaagtcatcgaaaagaagcctgaaaagttcaaagtgcaatgcctcaccgacatcaagaatctgtttttccccaacaccgaacccttctatgctgcttttggcaatagaccggctgacgtgtattcctacaagcaggtgggagtcagtttaaatcgtatcttcacagtaaatcctaagggagagttggtgcaggaacatgccaagaccaacatttcatcttacgtcagactctgcgaggtggtcgaccacgtctttcccctgcttaagcggtcccacagcagcgactttccgtgctccgacactttcagtaactttactttttggagggagcccttaccaccctttgagaatcaggacatccactccgccagtgcttag

SEQ ID NO: 228834 - DNA, 87 bp, synthetic construct
  misc_feature 1..87: note = Description of Artificial Sequence: Synthetic coding sequence
  source 1..87: mol_type = other DNA
atgaactatgttggccagctggccggtcaggtcttcgtcactgttaaagagttgtacaagggcttgaatccagctaccttgtcctag

SEQ ID NO: 228835 - DNA, 2691 bp, synthetic construct
  misc_feature 1..2691: note = Description of Artificial Sequence: Synthetic coding sequence
  source 1..2691: mol_type = other DNA
atgagccgagtgcaaactatgaactatgtagggcagttagccggacaggtgttcgtcacagtgaaggaactttacaagggactgaacccagctaccctctctgggtgtattgacatcattgttatccgacaacctaacggaaatctccagtgctccccctttcatgtacgctttggcaaaatgggagtgctgcgctcccgggagaaagtcgtcgacatcgagattaacggcgaaagcgttgacctacatatgaaactgggtgacaacggtgaggccttcttcgttcaggaaacagacaacgatcaggaggtcattccaatgcatctggcgacttcgcccatattaagtgagggcgcaagccgcatggagtgccagctaaagcgcggttctgtggatcgcatgagaggcttagatccatctactccagcccaagtgattgctcccagcgagacccccagttcatcatccgtggttaagaagagacgaaagagacgaaggaagtcacagctggacagcctcaaaagggacgacaacatgaacacgtcagaggatgaggatatgttcccgatcgaaatgagttcggacgaggcgatggagctgttggaaagcagtcgcacgttacccaatgacatcccgccatttcaagatgacatccctgaagaaaatctatctctcgccgtgatatacccccagtccgctagctacccgaattccgatcgggagtggagccccacgcccagtccaagtggcagtcgcccatccacacccaagtcagacagcgaacttgtgtctaagagtactgaaagaactggacagaagaatcctgagatgctatggctttggggcgagctgccccaggccgctaagagctcatccccccacaagatgaaagaatcctccccccttagttctcggaaaatatgtgataagtcccatttccaggcgatccactccgaatcttccgatactttttcggaccagagtccaactttagtgggaggcgcactcctggatcagaacaaaccccagacggaaatgcaatttgttaatgaggaggatctcgagacattgggcgctgccgctccactccttcctatgattgaggaactgaaaccaccttctgcctccgtggtgcaaaccgccaacaagacggatagtccctctaggaaacgtgacaaaaggagtcggcatttaggagctgacggtgtctatttagacgatctcaccgacatggatcccgaagtggccgctctgtatttcccgaaaaacggcgacccatccggattggccaagcacgcatccgacaatggcgctcggagtgcaaaccagagcccccagtccgttggctctagcggggtggactccggcgtggaatccacgagcgatggtttgagggaccttcccagcattgctatcagcctatgtgggggactttcagatcatcgagaaattacaaaggacgcctttctggagcaggctgtgtcataccagcagttcgtagacaaccccgcaattatcgacgacccgaacctcgtggtcaaaattgggtccaagtattacaactggacaacagccgctcctctgctgttagcaatgcaggcctttcaaaagcctctacctaaggcgacagtcgaatcaatcatgcgcgacaaaatgccaaaaaaagggggacggtggtggttctcttggcggggacgcaacacgacaataaaggaggagagcaagcccgaacagtgcctagctggcaaggcccactcaaccggcgagcagcccccacagcttagtcttgctacaagagtgaagcatgagtcatcaagctcagacgaggagcgcgcagccgctaagccaagtaacgcgggacacctcccgctactgcccaacgtgtcctataaaaaaacattacgacttacctccgaacagcttaaatccctgaagctgaagaacgggccaaacgacgtcgtattttccgtcactacccagtaccagggcacttgcaggtgtgaaggcacaatatacctatggaactgggacgacaaggtcatcatatctgatatcgatggcacgatcacgcggagcgacacactgggccacatactgcctacattgggtaaggactggacacaccaaggcatcgctaagctataccataaagtctctcagaacggttacaaattcctatactgtagtgcgagggcaatcggcatggctgacatgacaaggggttatcttcattgggtcaacgagcgaggaacagtgctcccacaggggcctcttcttctgtcaccatcgagcctttttagtgcgctacacagagaggtgatcgagaagaaacccgaaaagttcaaggtacagtgtctgacagacattaaaaacctctttttcccgaatacggaaccgttctacgcagcctttggaaatcgcccagccgacgtgtattcatataagcaggtgggggtcagtttgaaccggatcttcaccgtgaatcctaaaggagagcttgtgcaggaacatgcaaaaaccaacattagttcctatgttcggctatgtgaagtggtggatcacgtgttcccactgctcaagcgcagccattcttctgatttcccctgttctgatacgttttccaatttcaccttctggagggaacccctgccgccatttgagaaccaagatatccatagtgcctctgcgtag

SEQ ID NO: 228836 - DNA, 291 bp, synthetic construct
  misc_feature 1..291: note = Description of Artificial Sequence: Synthetic coding sequence
  source 1..291: mol_type = other DNA
atgaattacgtggggcaactcgcaggccaagtgttcgtaactgtcaaggagctttacaaaggtttaaacccggctactcttagcggttgtattgacattatcgtcattcgccagcctaacggaaacctgcagtgtagtccctttcacgttagatttgggaagatgggcgtgttacgtagccgggagaaggtcgtggatattgagattaacggagagagcgttgacttgcatatgaaactgggcgataacggcgaggctttcttcgttcaggaaacagacaacgaccagtag

SEQ ID NO: 228837 - DNA, 2928 bp, synthetic construct
  misc_feature 1..2928: note = Description of Artificial Sequence: Synthetic coding sequence
  source 1..2928: mol_type = other DNA
atgggagagcaagatggtattagaagttccagctgggaaacaagccagggaaagagttctcccgacagtgcttggagctggatccccatcatgagagatcctgggtggatcaggaatgtgtggagctcaaatatcaatgtccagacaatgaattacgtcggccagcttgcaggtcaagtgtttgtgactgtgaaagaactgtacaaggggctcaaccccgctacactgtctggatgcattgatattatcgtaatccgacaacctaacggaaatttgcaatgttcccctttccacgtgcgcttcggtaaaatgggagtacttcgatcgcgtgagaaggtcgttgacatagagatcaacggagaaagtgttgatctacacatgaaactcggcgacaatggagaagccttctttgtgcaggagaccgacaatgaccaagaagtaattcctatgcacctggctacctcccccattctaagcgagggcgctagccgcatggaatgccagctcaaacgcggatcagtagaccggatgcgtggattggacccctcaacacctgcgcaggtgatcgccccttcagagacaccctcatcgtcttctgttgtcaaaaagagacgcaaacgcagaagaaagtctcagctcgacagcctgaagagagacgacaacatgaataccagtgaggatgaagacatgttccccatcgagatgtcttctgatgaagctatggaacttctcgaatcaagcaggactctgcccaacgacattccaccttttcaggacgacatacctgaagagaatctctcattagccgttatttatccccagtccgctagctaccccaattcagaccgcgagtggtcacccaccccaagttctttagtggactgtaagcgaaccgcccctcaccttgctgttgctgccgagggcggactgagtagtagttgtccaccccaatccagtctgtttcacccgtccgagtcaccctcaggcagccgaccctctactccaaagagcgacagcgaattggtctctaagtccaccgaaaggactggtcagaaaaatcctgaaatgttgtggctttggggagagttgccccaagccgcaaagagctcttctccgcacaaaatgaaagaaagctcccctctctcgtcacgaaagatctgcgataaaagccatttccaggccattcattctgagtcttcagacactttctctgatcaatcccccactctggtcggtggcgctttgctcgaccagaacaagccccaaaccgaaatgcagttcgttaatgaagaagatctggagacactaggagccgctgcccctcttttgccaatgatcgaggagctgaagcccccatccgcttcagtggtgcaaaccgctaataagacagactctcctagccgcaagcgggataaacggtctcgtcatttaggagccgatggagtttacctggatgaccttaccgatatggaccctgaagtggctgccctgtattttccaaaaaacggcgacccttccggtctagccaagcatgctagtgataatggcgcacgcagtgcaaaccagtctcctcagtctgttggaagctccggagtggactcgggggtcgaaagcacctctgatgggctcagggacctgccatcaattgccatcagcctctgcggaggactcagcgatcaccgagagattactaaagacgcatttttggagcaggccgtaagctaccaacagtttgttgataatccagcaatcatcgatgacccgaatctggtggtcaaaatcggaagtaaatattataattggacaaccgcagctcccctgctgctcgccatgcaggctttccagaagcctctgccaaaagccaccgtcgagagcattatgagggacaaaatgcctaaaaaaggtgggcgatggtggttcagctggcggggtaggaatacgacaattaaggaggaatcaaaaccagaacaatgtctggccggaaaggcgcactcaaccggggaacagccccctcagttgagtttggcaacccgagtgaaacacgaatcttcttcctcggatgaagagcgggcagctgctaagcccagcaatgccggacatctgcctctgcttcccaacgtgtcatacaagaagaccctgcgattaacatccgagcagctgaaaagcttaaagctaaaaaatggcccaaatgatgtggtctttagtgtgacaacacagtatcagggcacatgccgctgcgagggaaccatctatctctggaactgggatgacaaggtgatcattagcgatattgacgggaccatcacgagaagtgacaccctgggtcacattctaccgaccctgggtaaagactggacacaccagggtatcgccaagctctaccacaaggtctctcaaaatggctataaattcctgtactgtagcgctagagcgatcggtatggcagatatgacccggggatacctgcattgggtgaatgagcggggtacagtgctgccgcagggccctctgttactttctccgagtagcctattttccgcgttacacagagaagtgattgagaagaaaccggagaagtttaaagtgcagtgtctgacagacatcaagaacctgttttttcctaatacagaacctttttatgcagcatttggaaatcgccctgccgacgtgtatagttacaaacaggtgggtgtaagcctcaaccgcatcttcactgtgaatccgaaaggcgaattagtccaggagcacgccaaaactaatatttcaagctacgtcagattgtgtgaggtcgtggaccatgtctttcctctgctcaaaaggtcacatagctccgacttcccatgttccgatacattctccaactttaccttctggcgggagccactgccaccttttgaaaatcaggacatccatagcgcctcagcttag

SEQ ID NO: 228838 - DNA, 1380 bp, synthetic construct
  misc_feature 1..1380: note = Description of Artificial Sequence: Synthetic coding sequence
  source 1..1380: mol_type = other DNA
atgtcccgcgtccagaccatgaactatgtgggccagctggccggtcaggtcttcgtcacagtgaaggaactgtataaaggcctgaacccagccacccttagcgggtgcatcgatatcattgtgatacggcagcccaacgggaatttgcaatgcagtccattccatgtgcgcttcgggaaaatgggcgttctgcgctccagagagaaggtggttgacatcgagatcaacggtgagtctgtggacctccacatgaagttaggtgacaacggagaagctttctttgttcaggagacagacaatgatcaagaggtgatcccaatgcatctggccacttcccccatcctctccgaaggagcctcccgcatggagtgccagctaaaacgaggttctgtcgaccggatgcgtgggctggatcccagcacccctgctcaagtgattgccccaagcgaaacaccctcgtcttctagcgttgtaaagaagaggcggaagagacggcgtaagtcccagttggattccctgaagagggatgacaatatgaataccagcgaggacgaggacatgttccctattgagatgagcagcgacgaagccatggaattattagagagctcgcgcaccctccccaacgatatccccccatttcaggacgatattccagaggagaatctatccttagctgtcatctatccccagagtgcctcctaccctaactccgatcgggagtggtcaccaacaccttcttctctggtcgactgtaagcggacggcacctcaccttgcagtcgccgctgagggaggcctttcctcttcttgtccaccacagagttctttattccacccctctgaatctccctcaggttccaggccatcgactccgaaatccgattccgagctcgtttctaagtccactgagcgtacagggcagaagaatcctgagatgctgtggctctggggtgaactgccccaggcggctaagtccagctccccgcataagatgaaggagtcttccccattgtcttctcgcaagatttgcgacaagtcccattttcaagcgattcacagtgagagcagtgataccttctctgatcaaagtcctacactggttggcggtgcccttctggaccaaaataagccacaaaccgagatgcagtttgttaacgaagaggacctggaaacacttggcgctgccgcaccactgctgcccatgatcgaagagctgaagcccccttccgcatctgtggtgcagactgctaacaaaacagatagcccctcaagaaagcgagacaagcgtagtagacacctgggtgccgatggagtgtatctggatgatctcactgatatggacccggaagttgctgccttgtacttccccaagaagtag

SEQ ID NO: 228839 - DNA, 2691 bp, synthetic construct
  misc_feature 1..2691: note = Description of Artificial Sequence: Synthetic coding sequence
  source 1..2691: mol_type = other DNA
atgaactatgttgggcagctcgctggccaagtgatcgtgaccgtgaaggagctgtataaaggaataaatcaggcgaccctgagcggatgcatcgatgtgatagtcgtgcagcagcaggatggttcttatcagtgttcgccattccacgttaggttcggaaagctgggggtccttcgctcaaaagagaaggtcatcgacatagaaatcaatgggagtgccgttgatctgcacatgaaacttggggataatggcgaggccttctttgtagaggagaccgaagaagaatatgaaaaactgccagcctacttagccactagtcctatcccaaccgaggatcagttctttaaagacatagatacaccattggtcaagtctgggggtgatgagacccccagtcaatcctccgatatttcgcatgtcttagagactgagaccatcttcacaccctcgagcgtgaaaaagaagaaaaggagaaggaagaagtacaaacaggatagcaagaaggaggagcaggccgctagcgccgctgcagaggatacatgcgatgtaggcgtgtcttccgacgatgataaaggcgcacaggccgctcgcggttcctctaatgcaagcctaaaggaagaagaatgtaaggaaccactgttgttccattcaggggatcattatccgttgagcgacggggattggtctcctctagagaccacataccctcaaaccgcatgcccaaagagtgactctgaactcgaggtcaagcccgctgaaagcttgctccggagtgagtcacacatggagtggacatggggcggattcccagaaagtacaaaggtctccaaaagagaaagaagcgaccaccatcctagaacagccacaattacaccctctgaaaatacccactttcgggtgattccctctgaggacaatctgattagtgaggtcgagaaggacgcctctatggaggacacggtatgtacaatcgttaagccaaaaccacgggcactgggaactcaaatgtccgaccccacaagtgtagctgagctgctggagcctcctctcgaatctactcagataagcagtatgctggatgccgaccatctccccaatgcagcactcgccgaggccccttcagaatcaaagcctgcggcaaaggtagacagcccaagcaaaaagaagggtgtccacaagagatcacagcaccagggtcccgatgatatctatctagacgacctaaaggggttggagcctgaggtcgcagccctttatttcccgaagagtgaatccgaaccagggtctcgacagtggcccgaatcagataccttaagtgggagtcagtccccccagtccgtaggatcggctgccgctgacagtggtacagaatgtttgagcgattcagcaatggacctgccagacgtgaccctcagtctttgcggtggccttagcgagaacggagaaattagtaaagaaaagtttatggagcacattataacctaccatgagttcgctgagaacccagggcttattgataacccaaatctcgtgatccgaatttacaatcgatattacaattgggccctggccgcaccaatgatactgagcctgcaggttttccagaaaagtctgccgaaagcaactgtggaatcatgggttaaggacaagatgcccaaaaagtccggcagatggtggttctggaggaagcgggagtccatgaccaagcaactaccagagtctaaggaggggaaaagtgaggccccacccgctagcgacctgccaagctcttctaaggaacctgccggtgcacgccctgccgagaatgatagctcttccgatgaaggttcccaggaactagaggaatccattaccgtggacccgatcccaactgaaccattgagccacggcagcaccaccagctataaaaagagtttacgtctctcctcagaccaaattgctaagctgaaattgcacgacggcccaaacgacgtagtgttcagcattactacccagtatcaggggacgtgcaggtgtgccggtactatatatctctggaattggaatgataaaattatcatctccgatattgacggaaccatcacgaagagcgatgctctcgggcaaattctaccccagttgggtaaggattggacacaccagggaattgccaaactataccattctattaatgaaaacggctataaattcttgtattgttccgcacgagccatcggaatggcggacatgacaagaggatatctgcattgggtgaacgacaagggcacaatcctccccagaggcccactcatgctctctcccagcagcctattttctgccttccaccgcgaagttatcgagaaaaagcccgagaaatttaagatagaatgcctgaacgacatcaaaaatctctttgcgccttctaaacaaccattctacgccgcttttgggaacagacccaacgatgtatacgcgtacacccaggtgggtgttcctgactgtcggatcttcactgttaaccccaaaggcgagcttatccaagaacgcaccaaaggcaataaaagtagttaccaccgactgtctgaactggtagagcacgtttttcctcttcttagcaaagagcagaactcagcgttcccatgccccgagtttagcagtttctgctactggagggacccgatccctgaggttgatctggatgacttgtcctag

SEQ ID NO: 228840 - DNA, 702 bp, synthetic construct
  misc_feature 1..702: note = Description of Artificial Sequence: Synthetic coding sequence
  source 1..702: mol_type = other DNA
atgaattacgtgggacagctggcaggccaggttattgtgacagtgaaagagctgtataagggcatcaatcaagccactctgtcaggttgcattgatgtgattgtggtgcagcagcaagatgggagctaccagtgctctcctttccatgttcggttcggcaagctgggagtgctcagatctaaagaaaaagtgatcgacattgaaattaacggcagcgccgtcgacttgcacatgaagctgggagataacggcgaggcattctttgtcgaggaaactgaagaagagtacgaaaagctccctgcctacttagccacttcacccattcccaccgaggatcaattttttaaagatatcgataccccccttgtcaagtccggcggagatgaaaccccttcacagagctccgacatttcccacgtcttggagaccgaaacaattttcactccctcctccgtgaaaaaaaagaaacgacgtaggaagaaatataagcaagactccaagaaggaagagcaggccgcttctgcggcagctgaagacacttgtgatgtaggcgtttcctctgacgatgacaaaggagctcaggctgccaggggcagcagcaacgcttccctgaaagaagaagagtgtaaggaacctctgctgttccactccggcgaccactatccactgtccgacggagattggagtcctctggaaacttag

SEQ ID NO: 228841 - DNA, 2556 bp, synthetic construct
  misc_feature 1..2556: note = Description of Artificial Sequence: Synthetic coding sequence
  source 1..2556: mol_type = other DNA
atgaactacgtaggacagctggccgagacagtgtttggcacagtcaaagagctttatcgcggactgaatccggctaccttaagcgggggaatcgacgtgttggtagtgaagcaggtggacggctcgtttcgttgctctccgttccacgttcggttcggcaagctgggtgtccttagatccagagagaaggtagttgatatcgaactgaatggagagcctgtggacttgcatatgaaactgggagattctggcgaggcctttttcgttcaggaactggagagtgatgacgaacacgtacctccagggttgtgtacctctccaatcccatggggtggcctgtctggtttcccctccgattcgcagctgggaaccgccagtgagcccgaaggcctggttatggccggtaccgcctcaactggacggagaaaaagacgtagaagaagaaagccaaagcagaaggaagatgccgttgctacagactcgtccccggaggaactggaagccggagccgagtccgaactgagcctgccggagaagctccgacctgaaccccctggggttcagctggaggagaaatcttccctgcagcccaaggatatttatccatatagtgatggagagtggccaccacaggcttccctctccgcaggcgagctcacatctccgaaatcagactctgaacttgaggttcgcacccctgaaccttctcctctccgagctgaatcgcatatgcaatgggcatggggcagactgcccaaggtcgctagagcagagcggcctgaatcgtctgtggttctggaggggcgagcaggcgcaacctctccacctcggggtgggccttctaccccttctactagtgtggccggaggggtggaccccttggggctaccaattcaacaaacggaggctggagcagaccttcagcctgatacagaagaccctacgctggtgggaccacctttgcatacccctgaaaccgaggagagcaaaacccagtcatcgggcgacatgggcctgcccccagcatccaagagttggtcttgggccacattggaggtgcctgtgccgacaggccagcccgaaagagtctcccgagggaaggggagcccaaaaagaagccagcacctggggccatctgacatctacttggatgaccttccttcacttgattctgaaaatgccgcactgtactttccacaatctgatagtggtctaggagccagacggtggtctgaaccttcctctcagaagagtctgcgagacccgaaccctgagcacgaacctgagccaactctcgacaccgtggatacaatagctttgtcactgtgcggtggcctggcagatagtcgcgacatcagtttggagaaatttaaccagcattccgtgagctatcaggacttgacaaagaatccgggtctgctggatgaccctaatctagtagtcaaaataaatgggaagcactataactgggccgtcgctgcccctatgatcctgagcctgcaggcattccagaaaaacttgccaaagagtaccatggataagctggagcgagaaaaaatgccgagaaagggagggcgatggtggttctcttggagaaggcgcgacttcctagccgaagagcggtccgcccaaaaggagaaaacagccgctaaggaacagcagggcgagaagacagaagtcctgagttctgatgatgacgcccctgacagccccgtcatcctggagatcccaagtctccctcccagtactccccctagcactcctacatataaaaagtcgctgcggttatcctccgatcagatcagaaggctgaacctgcaggaaggggctaacgatgtagtgttctccgtgacaactcagtatcaagggacatgccgctgcaaggcaaccatttacttgtggaaatgggacgataaagtcgtaatctcagatattgacgggacaattactaagtccgatgcactgggtcatattcttccacagcttggtaaggattggacgcatcagggcataaccagtctatatcacaaaatacagctgaacggctataaattcctttactgttctgcccgagccattggaatggccgacctgaccaaaggatacctccagtgggtgtcagaaggtggctgtagcctgccaaagggcccaatattgctgtccccatcaagtcttttctccgctctgcaccgcgaagtgatcgagaaaaagcctgaagtgtttaaagtggcatgcctgagcgatatccagcagctgtttctcccccacggtcagcccttttacgctgctttcggcaaccggcctaacgatgtgttcgcctatcgacaggtcggcctgcctgagtccagaatcttcaccgtcaatcccagaggagaactaatccaggaattgattaagaaccacaaaagcacttatgagcggctcggtgaagtggtggagttgctattccccccagtggctcgcggtcctagcactgatcttgcaaatccagagtattccaacttctgctactggcgagagcctctgccagctgtagacctcgatactctcgattag

SEQ ID NO: 228842 - DNA, 1242 bp, synthetic construct
  misc_feature 1..1242: note = Description of Artificial Sequence: Synthetic coding sequence
  source 1..1242: mol_type = other DNA
atgggtctcccaccggcttccaaaagttggtcatgggccaccttggaagtcccagtgcccaccggccagccggaaagggtatctagaggcaagggcagcccgaaaagatcccagcacctaggaccatctgatatatacctggatgacctgccgtccctggactctgagaatgcggctttgtatttcccacagagtgactctgggctgggcgctcgacggtggagtgagccttcaagtcaaaaatccctcagggaccctaaccccgagcatgagccagagcctacgctcgacacagtggacaccattgcactcagtctctgtgggggactcgcggattctagggacatctccctggagaaattcaaccagcactcagtgtcataccaggatctaactaagaaccctggactgctggacgatcccaatttagtggtgaaaattaatggcaagcattataattgggcggtcgccgctccgatgattctaagtctgcaggcctttcagaagaacctgcccaagcgtagcgcgcaaaaggagaagaccgccgcaaaggagcagcagggggagaaaacagaggtcttaagttccgatgatgacgcgccagattcccccgtgattctggagatacccagcctgcctccaagtactccaccttcaacccctacatacaagaaatcacttagactctcttctgaccagattcggcgactgaatctgcaggagggggctaatgatgtcgtcttttcggtcacaacacaataccagggcacctgtcgatgtaaggcaaccatctacctctggaagtgggacgataaagtggtcatctccgatatcgacggcacaataacaaaaagtgacgcccttggccacatattacctcaactggggaaggattggacgcatcaggggattactagcctgtaccacaagatccaattgaacggatataagttcctctactgtagtgccagggctattggcatggcagatctgacaaaggggtacctccagtgggtttctgagggtgggtgcagtctccctaagggcccaatcctgttgtcgccgtcttctctctttagcgccctccaccgagaggtcatcgagaaaaaacctgaggtgttcaaggttgcatgcctgtccgacattcaacagttattcctcccccacggccaacctttctatgcagcattcgggaaccggcctaacgatgtctttgcatataggcaggtcgggctaccttag

SEQ ID NO: 228843 - DNA, 813 bp, synthetic construct
  misc_feature 1..813: note = Description of Artificial Sequence: Synthetic coding sequence
  source 1..813: mol_type = other DNA
tgagtcaagatcaacgggaaacattacaactgggctgtagccgcaccaatgattttgagcttgcaggcattccagaagaatttacctaaaaggtcagctcagaaagagaagaccgctgccaaggagcagcaaggagaaaaaaccgaggtgctgagctctgacgatgacgcacccgactctcccgtaatcctcgaaattccttcactaccccctagcactccaccgtccactcctacatacaagaagtcccttaggctgagctccgaccaaatacggaggctgaatttgcaagagggagcgaatgacgtggttttcagcgtgaccacccaatatcagggaacttgcaggtgtaaggctaccatttacctctggaaatgggatgacaaagtcgtaatcagcgacatcgatgggactattaccaagagcgacgcattgggtcacattcttcctcaattgggcaaggactggacccatcaaggtattaccagtttataccacaaaattcagctcaacggatacaaattcctctactgttccgcccgagcaattggaatggctgacctcaccaaagggtacctccagtgggtctcagaagggggttgctccttgccaaaaggcccaatcctactgtctccgagttcactcttcagcgcgttacatcgcgaagtgatagagaaaaagcctgaagtgtttaaagttgcatgtctgtctgacattcagcagcttttccttcctcatggacagcccttctatgcagcttttggtaataggccaaatgatgtgttcgcttaccgccaggttggtcttccatag

SEQ ID NO: 228844 - DNA, 531 bp, synthetic construct
  misc_feature 1..531: note = Description of Artificial Sequence: Synthetic coding sequence
  source 1..531: mol_type = other DNA
atgaaacccttgttgctagccgtcagccttgggttgatcgcagcgctgcaagcccaccatctactcgcctcggacgaagagatccaagatgtgagcggcacctggtatctaaaggccatgacagttgatcgagagttcccagaaatgaatttggagtctgtcacccccatgaccctgacaactctcgagggcggaaatcttgaggccaaagttactatgcttattagcggtcgttgtcaggaagtaaaagcggtcttagaaaagaccgacgaaccaggtaagtacaccgcggatggaggaaaacacgtggcctatattatcagaagtcacgtcaaggaccactacattttttactgtgagggagagcttcatggaaagccagttaggggagtaaaattggtgggacgagaccccaaaaataatctggaggccctggaggattttgagaaagccgctggtgctcgcggtttgtctacagagtcaatccttattcccagacaaagcgaaacgtgttccccgggatccgattag

SEQ ID NO: 228845 - DNA, 531 bp, synthetic construct
  misc_feature 1..531: note = Description of Artificial Sequence: Synthetic coding sequence
  source 1..531: mol_type = other DNA
atgaagcctctattgttggccgtctcgttgggactcatcgccgcactccaggcgcatcaccttctggcctccgacgaagaaatccaggacgtgtccggcacttggtatctgaaagctatgaccgtggatagggagtttcctgaaatgaatctggagtccgtgacccctatgacattaacaacactggaaggaggcaaccttgaggcaaaagttaccatgctgatcagcggaaggtgtcaggaggttaaggcggtgctggaaaagacagatgagcctgggaagtacaccgccgatggcggaaagcatgttgcatatataattagaagccacgtcaaagatcactatattttctactgcgaaggggaactccacggtaagcctgtgcggggagtgaaactggtcggacgagatcccaagaataacctggaggccctggaagattttgaaaaggccgctggggctcgaggattatccacggaatctatcctgatacccaggcaaagtgagacctgtagcccaggatccgattag

SEQ ID NO: 228846 - DNA, 564 bp, synthetic construct
  misc_feature 1..564: note = Description of Artificial Sequence: Synthetic coding sequence
  source 1..564: mol_type = other DNA
atgaggcagggcctgctcgtactggccttagtcctcgttcttgtcttggttctcgccgctgggtcacaagtgcaggaatggtatcccagagaaagccacgcacttaattggaataagttcagtgggttctggtatattttagccaccgcgactgacgctcagggcttcctaccagcaagagataaaagaaagcttggcgcatcagtcgtgaaggtaaataaggtgggacagctgcgagtcttgttggcctttaggcggggacagggatgtggccgagctcagcctcgccaccccggaacctctggtcatctgtgggcaagcttatctgtgaaaggggtgaaagcttttcatgtgttgagcaccgattactcctatggtctggtgtatttacgactgggacgtgctacccagaactacaagaatttgctgttgtttcatcggcagaacgttagttcatttcagtccctgaaagagttcatggacgcttgtgacatcctgggcctgagcaaagcagccgtcattctaccaaaggatgccagtaggacccacactatcctaccctag

SEQ ID NO: 228847 - DNA, 603 bp, synthetic construct
  misc_feature 1..603: note = Description of Artificial Sequence: Synthetic coding sequence
  source 1..603: mol_type = other DNA
atgcgccagggcctactggttctggctctcgtgctggttctggtgctggtcctcgccgcaggctcgcaggtgcaggaatggtacccacgcgagtcccacgcgctgaactggaataaattttcaggcttctggtatattctcgcaactgccaccgacgcacagggctttctgccagccagagataagcgcaagctcggtgccagcgtcgtcaaagtcaacaaggtgggacaacttagggtgctgctggcctttcggcgactgaagggctgccagtcacaggaagtcatcctgaggaaagatggcaaaaaacctgttttcggcaacgcatgtgcatatgccgctggacctcgagagggacaggagggcgtgaaaggggtgaaggcattccacgtgctctcgactgattacagctacggcctagtttatctgagactgggaagagcaacacagaattacaagaacctgctcctattccacaggcagaacgtgtcaagctttcaatccctcaaggagtttatggacgcttgcgatatactcggtttgtccaaagccgctgtgatacttccaaaggatgcctctagaacacacactattctcccttag

SEQ ID NO: 228848 - DNA, 273 bp, synthetic construct
  misc_feature 1..273: note = Description of Artificial Sequence: Synthetic coding sequence
  source 1..273: mol_type = other DNA
acgttcgagctttccgatgacggcagattcgaagtttggaatgccatgacgcgcggacaacactgcgatacctggagctacgtgctgatacccgcagcccagcccggtcagtttaccgtagatcatggagttgatactagagctggttggccctcaagtggctctgcgtgctgggccggagctggttgctgtctccctggcagatggactagttcgtcagcctgggctgagttacgagccagtcggatgacaaccagctcgtcccagatgtag

SEQ ID NO: 228849 - DNA, 579 bp, synthetic construct
  misc_feature 1..579: note = Description of Artificial Sequence: Synthetic coding sequence
  source 1..579: mol_type = other DNA
atgagacttttatgtgggctctggctctggctgagtctgctgaaagtcttacaggcacagacacctactcccctcccccttccgccacctatgcagtcttttcaaggcaaccagttccagggagaatggtttgtattgggcttagccggtaatagctttcggccagagcacagggctctgctgaatgctttcacggcaactttcgagctctcagatgacggaaggttcgaagtctggaacgctatgacccgtggtcagcattgtgatacctggtcttatgtgcttatcccagcagcacaacccggacagttcaccgtagatcacggcgtggagcctggcgcagatagggaagaaacccgggtcgtggactcagactatactcagttcgctctcatgcttagtagaagacacacaagccgcttagctgttctgcgcatatctctcctgggaagatcatggttattgcccccaggaaccctggaccagttcatttgtctggggcgagcgcagggattgagcgatgataacatcgtgtttccagatgtgacaggatggagcccccaagccagtgtttgctag

SEQ ID NO: 228850 - DNA, 597 bp, synthetic construct
  misc_feature 1..597: note = Description of Artificial Sequence: Synthetic coding sequence
  source 1..597: mol_type = other DNA
atgccccttggtctcctgtggctaggactcgctttgctcggagctctccacgcccaggcccaggactctacttctgacctcatccccgctcctccgttatctaaggtcccactccagcagaatttccaggataaccaatttcagggcaaatggtatgtggtggggctggccggtaatgctattctgagggaagacaaagaccctcagaaaatgtatgcaaccatctacgaattaaaggaggataagagctataacgtgacctctgtcctgttccgcaagaaaaagtgtgattattggattcggaccttcgtccctggctgccagcccggagaatttaccttaggcaacatcaagtcgtaccctggactgacatcatacctggtgcgggtcgtgtccacgaattataatcagcacgccatggtgttcttcaaaaaagtctctcagaaccgagaatatttcaagatcaccctgtatggcagaaccaaggaattgaccagtgaactgaaggaaaatttcatccggttcagcaagtcgcttggtctgccagagaatcacatagtatttccagtacccattgaccaatgcattgatggctag

SEQ ID NO: 228851 - DNA, 603 bp, synthetic construct
  misc_feature 1..603: note = Description of Artificial Sequence: Synthetic coding sequence
  source 1..603: mol_type = other DNA
atgccgctcggcctattatggctgggactggcgctcctgggcgcactacatgcccaggcacaagactctactagcgacctgatccctgctccgccattgtccaaggttccactgcagcaaaatttccaggacaatcagttccaaggaaagtggtacgtagtcggcctggccggaaatgccattctgagggaagacaaggaccctcaaaagatgtatgccacaatctacgaactgaaagaggacaagagttataacgtgacttctgtactgttccgcgagaaggcacagaaatgcgattattggatccgcacgttcgtccctgggtgccagcccggagagtttactctcggcaacatcaagagctacccaggcttaacctcttacctggtgcgagtggtgtccacaaattataatcagcacgccatggtgttcttcaaaaaagtatcgcaaaaccgcgaatacttcaagattactctatatggcagaactaaagaactgacatctgagttaaaggaaaattttattcgctttagtaagagcctcggcttacccgagaaccatattgtttttcctgtaccaatagatcagtgcatcgacggctag

SEQ ID NO: 228852 - DNA, 603 bp, synthetic construct
  misc_feature 1..603: note = Description of Artificial Sequence: Synthetic coding sequence
  source 1..603: mol_type = other DNA
atgccactggggcttctgtggctggggttggcactccttggcgcactacacgctcaggcgcaagacagtacctccgacttgattccagccccacctctcagcaaagtgcccttgcagcagaacttccaggacaaccaatttcaaggcaaatggtacgtggtagggttggcgggtaacgctatcctgcgagaagacaaggatcctcagaagatgtacgctacaatttatgagctgaaagaagataaatcatacaatgttacttctgttttgtttcggcagtggaagaagaagtgcgactattggatccgtacctttgtccccggatgccagcctggcgagttcacgttgggaaacatcaagtcttacccgggactcacaagttacctggttcgcgtggtctccacaaattataaccagcacgccatggtttttttcaagaaggttagtcagaatagggagtatttcaagataaccttgtacggtcgcacaaaggagctgacatccgaactcaaggagaacttcataagattttccaagtcgctggggctgcccgagaaccatatcgtgtttcccgttcccattgatcaatgtatagacggctag

SEQ ID NO: 228853 - DNA, 597 bp, synthetic construct
  misc_feature 1..597: note = Description of Artificial Sequence: Synthetic coding sequence
  source 1..597: mol_type = other DNA
atgcccctgggtctcctgtggcttggcctggcattgttgggcgctcttcacgcccaggctcaggacagcacctccgatctgatccctgccccacccctgtcgaaggtgccactgcagcaaaactttcaggataatcaatttcagggcaagtggtatgtggtagggctggccggtaacgccatccttagggaagataaggatccccagaaaatgtacgcaactatctacgaactcaaggaagacaagtcttacaacgtgacttcagtgctgtttcgcaagaaaaaatgtgactattggatccgaacctttgtgcctggctgccagcccggtgaatttactcttggtaatatcaagtcttacccaggcctcacatcataccttgtcagggtcgtctccacgaactataatcagcacgccatggttttttttaagaaggtgagtcagaaccgagaatacttcaagattactttatacggtcggacaaaggagctcacaagtgaactgaaagagaactttatccggttcagcaaaagcctgggccttccagaaaaccacattgtgttcccggtgccaattgaccagtgtatagacggttag

SEQ ID NO: 228854 - DNA, 597 bp, synthetic construct
  misc_feature 1..597: note = Description of Artificial Sequence: Synthetic coding sequence
  source 1..597: mol_type = other DNA
atgccactgggcctgctttggcttggcctcgccctgctgggagcactgcatgcgcaggcgcaggactccacctctgacctgattcctgcaccgcctctctcaaaagtacctctccagcagaactttcaagacaatcagttccaagggaagtggtacgtggtgggactcgcaggcaatgcgattctgagagaggataaagacccccagaaaatgtacgctactatctatgaactcaaggaagacaagagctacaacgtgacttccgtcctgttcaggaagaaaaagtgcgattattggatcagaacattcgtcccaggatgtcagcccggtgagttcacgctggggaacatcaaaagttatccaggcctgacctcttacctggtgagggttgttagtactaattataatcagcacgccatggtgttttttaaaaaggttagtcaaaatcgtgaatattttaagattactctgtacggaagaactaaggaactcaccagcgagcttaaggaaaactttatccggttttccaagagcctaggtttgcctgagaatcacattgtattcccagtacccatcggaaacgggcagtctggctag

SEQ ID NO: 228855 - DNA, 492 bp, synthetic construct
  misc_feature 1..492: note = Description of Artificial Sequence: Synthetic coding sequence
  source 1..492: mol_type = other DNA
atgggcggactgctgcttgctgcctttcttgctctggtctccgttcccagagcccaggcagtctggttggggaggctggaccctgaacagctgttaggcccttggtacgtcttggcagtagcatcgagagagaaaggctttgccatggagaaagatatgaaaaacgtggttggcgtggtagtcacgctgacccctgaaaataatctgagaacactgagcagtcagcatggcctgggaggatgtgaccaatcagtgatggacctgatcaagcgcaattctggctgggtctttgagaacccaagtattggtgtgctggagctgtgggtccttgctacgaactttagggactatgcaattatctttacacaattagaattcggagatgaacccttcaacactgtggagttgtattctctgaccgagaccgcatcccaggaagctatggggctcttcaccaagtggtcccgaagtctggggttcctctctcagtag

SEQ ID NO: 228856 - DNA, 459 bp, synthetic construct
  misc_feature 1..459: note = Description of Artificial Sequence: Synthetic coding sequence
  source 1..459: mol_type = other DNA
atggaggagctggacaggcaaaaaataggtggtttttggcgcgaagttggagttgcgtccgatcagtctctggtgctgacagctccaaagcgcgtggagggtctgtttctcacgctgagtggttccaatctgacagttaaggtggcgtacaatagttctggcagctgtgagatagagaagatcgtcggttccgagatcgattccaccggaaagtttgccttcccaggtcaccgagagatacacgtgctcgacaccgattacgaggggtatgcgatacttagagtcagtctgatgtggcgaggtcggaatttcagggtcttgaaatacttcactcgatctctcgaagataaggatcggttgggcttttggaagttccgcgagctcaccgccgacaccgggctgtatctggccgctcggccaggacggtgcgccgaactgctgaaggaggaactgatctag

SEQ ID NO: 228857 - DNA, 531 bp, synthetic construct
  misc_feature 1..531: note = Description of Artificial Sequence: Synthetic coding sequence
  source 1..531: mol_type = other DNA
atggccttactcctgctgagcctaggcctttccctcattgcggctcaggagtttgatccccataccgtcatgcagaggaactataacgtcgctagagtgtcaggcgtttggtacagtatcttcatggctagtgacgacctcaatagaattaaggaaaatggggatctcagagtttttgtccgtaatatcgaacatcttaaaaatggcagccttatttttgatttcgagtacatggtgcaaggtgaatgcgtcgctgtcgtagtggtttgtgagaagacagagaagaatggcgaatatagtatcaactatgaaggacagaataccgtggctgtgagtgaaacggattatagactcttcattacttttcacctgcagaacttcaggaatggcactgagacacacacactggcactatatgaaacctgcgaaaagtacggcttggggtcgcagaacatcatcgacctgaccaataaagacccctgttactccaaacactatcggtctccgccacgtccccctatgcggtggtag

SEQ ID NO: 228858 - DNA, 1119 bp, synthetic construct
  misc_feature 1..1119: note = Description of Artificial Sequence: Synthetic coding sequence
  source 1..1119: mol_type = other DNA
atgagtcttcgctgcggcgacgcagcacgaaccctcggacctcgggttttcgggcgttatttctgtagccctgtgaggccactgtcttctctccctgacaaaaaaaaagagcttttgcagaacgggcctgatctgcaagatttcgtgtcgggtgatcttgccgaccgatccacgtgggacgagtacaaggggaacctgaaacgtcagaagggggagcggttgcgcttgcctccatggctcaagacggaaatacccatggggaaaaactacaacaaacttaaaaatacgctacgaaacttaaacttgcacaccgtgtgtgaggaagcgcgttgccccaatattggagagtgttggggcggaggcgagtacgccacggcaactgccaccatcatgctgatgggagatacatgtacgaggggctgtagattttgttcagtcaaaaccgctcgcaatccacctccactcgacgcctctgagccctataatacagccaaagcaatcgccgaatggggactcgactacgtcgttctgacttctgttgacagagacgatatgcctgacggcggtgcggaacacatcgccaaaaccgtgtcatatcttaaggaacggaatcctaaaatactggtggagtgtcttacaccggacttccgaggggatctaaaggccattgaaaaggtggctctcagcggcctagatgtttatgcacataacgtcgaaacagtccccgagctgcagtccaaagttcgggaccctcgcgctaactttgatcagtccctccgagtccttaagcacgcaaagaaagttcaacctgatgtgatcagcaagacatctattatgctcggcctgggtgagaatgatgagcaggtgtacgccaccatgaaagctctccgcgaggccgacgtggactgcctgactttgggacaatacatgcagcctacaagacgtcacctgaaagttgaggaatacataacccccgagaagttcaaatactgggaaaaagtgggtaacgagctcggattccattatacagcctctggccctctggtgagatcatcgtacaaagccggagagttttttttgaagaatctcgtggccaagagaaaaaccaaagatctgtag

SEQ ID NO: 228859 - DNA, 969 bp, synthetic construct
  misc_feature 1..969: note = Description of Artificial Sequence: Synthetic coding sequence
  source 1..969: mol_type = other DNA
atgtccctcagatgtggggatgctgccaggactctgggcccacgcgtcttcggcaggtacttctgctcacctgtacgcccactaagttctctacctgataaaaaaaaggagttgttacagaacggtcctgatctccaggacttcgtttctggtgacctcgcggatagatctacttgggacgagtataaagggaatcttaaacggcagaaaggcgagaggctaaggctcccgccatggttgaagaccgaaattccaatgggaaagaactacaacaaactgaagaataccctacgcaacctgaacctgcacaccgtctgcgaggaggcccgttgcccgaatatcggagagtgttggggcggtggcgaatacgccaccgcaactgccacaatcatgctgatgggtgatacctgtactcgaggctgtaggttctgctctgtgaaaacggcaagaaatcccccacccttggatgcctcagaaccgtacaacacggccaaagcgatcgcggagtggggcctggactacgtggtgctgacttccgtggaccgtgacgatatgcccgatgggggtgccgagcacatcgccaaaactgtgtcctatctgaaggaaagaaacccaaaaattctggtggagtgtttgaccccagacttccgcggagatctgaaggccatcgaaaaagtggctctgagcgggctggacgtctacgcgcacaacgtggaaactgtgcccgaactccagtccaaggtacgagatccccgagcgaattttgaccagagcctgagggttctcaaacacgccaagaaggtccaacctgacgtaatctccaagacctcaattatgctcggcctgggggaaaatgatgagcaggtgtatgctacaatgaaggccctcagggaggcagatgtggactgcctgaccctcggacagtacatgcagccaacaagacgacatttgaaggtgaatttcagctag

SEQ ID NO: 228860 - DNA, 603 bp, synthetic construct
  misc_feature 1..603: note = Description of Artificial Sequence: Synthetic coding sequence
  source 1..603: mol_type = other DNA
atggccagtagcctcacctgcacaggtgtcatatgggccctcctctcattcctgtgtgcagccacaagttgtgtcggattctttatgccatactggctctggggttcgcagttaggcaagcctgtgagctttgggacctttcgcagatgtagctatcccgtacacgatgaatctcggcagatgatggtgatggtggaagagtgcggcaggtacgcgtctttccagggcatccccagtgctgaatggcgaatctgtaccatcgttactgggctgggatgtggcctcctgttgctggtagcgctgaccgccctcatgggatgctgcgtgtctgatctgatctcccgcacggtcggcagagtggccggtgggatccagtttctgggtgggctcttgattggggctgggtgtgctctgtatcctttaggatgggattctgaggaggtgcgccaaacttgcgggtacacctcaggccagttcgatttgggtaaatgcgagattgggtgggcctactattgtacaggcgcaggggctaccgcggcaatgcttttgtgtacatggctggcatgtttcagcggcaagaagcagaagcactacccttactag

SEQ ID NO: 228861 - DNA, 663 bp, synthetic construct
  misc_feature 1..663: note = Description of Artificial Sequence: Synthetic coding sequence
  source 1..663: mol_type = other DNA
atgaggtcatctttaacaatggttggcactctatgggcgtttctgagcctggtaaccgcggtcacctcatccacctcctatttcctcccttactggctgtttggctcacagatgggaaagccggtctccttctcgacctttcgcagatgcaattatcccgtgagaggcgaaggccatagcttgatcatggtggaagagtgtggtaggtacgcgtcctttaacgctatccccagcctcgcctggcaaatgtgtactgtggtcaccggtgccggatgcgccctgctgctgctggtggcccttgcagcggtcctcgggtgttgcatggaggagctgatcagccgaatgatgggtcgatgcatgggagccgctcaatttgtcgggggtctgttgattagttccggctgtgctctgtaccctctgggttggaattctccggaaatcatgcaaacatgcggaaatgtgtcaaaccagtttcagctgggaacgtgccgcctgggatgggcctactactgtgcagggggaggcgcagctgccgctatgctgatttgtacatggctgtcttgtttcgccggtaggaatccaaaacctgtgattttagtggaatcaattatgcgcaatacaaacagctacgccatggaattggatcattgtttaaaaccttag

SEQ ID NO: 228862 - DNA, 564 bp, synthetic construct
  misc_feature 1..564: note = Description of Artificial Sequence: Synthetic coding sequence
  source 1..564: mol_type = other DNA
atgcgctcctccctaacaatggtcgggactctctgggccttcctgagtttggtcactgctgttacgagtagtacctcctattttctgccatactggttatttgggagtcagatgggaaagcccgtgagtttctctacatttcggaggtgcaactaccctgtgaggggcgaggggcactcgctgataatggtggaggagtgcggcagatatgcatcttttaacgcaatccccagcttagcatggcagatgtgcaccgtggttacaggtgctggatgtgccttgctcctgcttgtggctttagcagctgttttaggatgctgcatggaggagctcatcagtaggatgatggggagatgtatgggagctgcgcagttcgtgggtggaacctgccggctcgggtgggcctactattgcgctggtggaggcgcagctgcggctatgttgatctgtacttggctgagctgctttgccggacgcaaccctaaacccgtcattctcgtggagtccatcatgagaaacaccaacagttacgccatggaactcgatcactgcttgaaaccctag

SEQ ID NO: 228863 - DNA, 687 bp, synthetic construct
  misc_feature 1..687: note = Description of Artificial Sequence: Synthetic coding sequence
  source 1..687: mol_type = other DNA
atgtgtcacgtcattgtaacttgcagaagtatgctgtggaccctgcttagtatagttgtcgcttttgcagagctcatcgcatttatgagcgctgattggctcatcggaaaggccagatcccgcggtggggtggaaccggctgggcctgggggtgggtctcccgagccgtaccacccaacccttggaatttacgcacggtgtatacgtaaccccggtgttcagcacttccagagggacaccttgtgcggaccatacgccgaaagcttcggcgagatcgccagtggcttttggcaggccacggctatttttctggcggtgggcattttcattctgtgcatggttgccttggtgtctgtgttcacaatgtgcgtgcaatctatcatgaaaaagtccatattcaatgtttgcggcctcctgcagggaatcgccggtctctttctaatcttgggtctgattctgtaccctgccggttggggctgtcaaaaggcgatcgactactgtgggcattatgcctcagcttacaaacctggcgattgttccctaggttgggcgttttacactgcaatcggcggaactgtgctaacatttatctgtgccgtgttctctgctcaggccgaaatcgcaacgtccagtgacaaggtgcaagaggaaattgaagaagggaagaacctgatatgcctactgtag

SEQ ID NO: 228864 - DNA, 687 bp, synthetic construct
  misc_feature 1..687: note = Description of Artificial Sequence: Synthetic coding sequence
  source 1..687: mol_type = other DNA
atgtgccacgttatcgtgacgtgcaggtctatgttgtggaccttgctcagcatagtggtggcctttgccgagcttatcgccttcatgtccgcagattggctcatcggaaaggctagaagccggggtggggtcgagccagcaggaccgggaggtggctctcctgagccttaccatcccacattagggatttacgcgaggtgcatacgaaaccctggagtgcagcacttccagcgggatacgttatgtggcccttacgccgagagttttggagaaattgcttccggattctggcaagccacagccatctttttagcggtgggcatctttatcctgtgcatggttgccctggtgagcgtatttacaatgtgcgttcagagcatcatgaagaagagcatcttcaatgtgtgtggcttacttcaagggattgcaggactgttcctcatacttggtcttatcctttaccctgcaggatggggctgccaaaaagccatcgattattgtgggcactatgcctccgcctacaagcccggagactgcagtctgggttgggccttttacaccgccattgggggaaccgtgctgaccttcatctgcgccgtgttctccgcgcaggctgaaatcgctacgagttctgacaaggtgcaagaggaaatcgaagagggaaaaaatctgatatgtctgctttag

SEQ ID NO: 228865 - DNA, 669 bp, synthetic construct
  misc_feature 1..669: note = Description of Artificial Sequence: Synthetic coding sequence
  source 1..669: mol_type = other DNA
atgctgccggctcaagaagctgccaagctctatcacacgaattacgtgaggaactctagggctattggcgttttgtgggccatattcacgatttgttttgcgatcgtcaatgtggtgtgctttatccaaccctattggatcggcgatggcgtggacacaccccaggccggatactttggcttgttccactattgcatagggaatggcttttctcgcgaactgacttgccgcggaagttttactgatttctcaactctgccttcaggcgctttcaaggcggctagctttttcatcggacttagcatgatgcttattattgcgtgcattatttgcttcaccctcttctttttttgtaacactgcaactgtatacaagatttgtgcatggatgcagctgacttcagccgcttgcctcgttctgggatgtatgatattccccgacggatgggattcagatgaggtcaagagaatgtgtggcgaaaaaactgacaaatacactctgggcgcatgttctgttcggtgggcatacatcctggccattataggtattctggatgctctgattctgtctttcctcgctttcgtgctcggcaacagacaggactcactaatggccgaggagctcaaggccgaaaacaaagttcttctgtctcaatactccctggaatag

SEQ ID NO: 228866 - DNA, 711 bp, synthetic construct
  misc_feature 1..711: note = Description of Artificial Sequence: Synthetic coding sequence
  source 1..711: mol_type = other DNA
atgccaggggctgccgcagccgctgccgcagccgctgctgccatgttgcccgctcaggaggcagcgaaactgtaccatactaactacgttcggaactctcgcgcaatcggcgtactttgggccatatttaccatctgctttgccattgtgaatgtggtttgcttcatccagccatattggattggagatggggtggacacccctcaagccggttattttgggctcttccactactgcataggcaacggcttttccagagagctcacttgccggggatcattcaccgactttagcaccctgccttctggagcctttaaggctgccagtttcttcatcggattgtccatgatgctgatcatcgcgtgtatcatttgcttcacccttttttttttctgcaacacagcaactgtgtataagatttgcgcatggatgcagctcacctctggagactgcctggtactgttcgatctgcacttccccgatggctgggattccgatgaagtcaaaagaatgtgtggggaaaagaccgataagtacaccttaggtgcctgctccgtccggtgggcctatattttggcaatcattggaatcctggacgccttgatactgagctttttggcctttgtgttaggcaaccgccaggatagcctaatggccgaggagctgaaggcagagaacaaggtgcttctgtcccagtactcactggaatag

SEQ ID NO: 228867 - DNA, 699 bp, synthetic construct
  misc_feature 1..699: note = Description of Artificial Sequence: Synthetic coding sequence
  source 1..699: mol_type = other DNA
atgcctggggctgccgcagccgcagccgctgccgctgccgcaatgctgcccgcacaggaggctgcaaaactgtatcacactaattacgtaagaaactcacgcgctattggtgtgctctgggctattttcaccatttgctttgcaatcgtcaatgtggtgtgtttcatccagccatactggatcggagacggagtcgacacaccccaggccggatatttcgggctgttccactactgcatcggcaacgggttttctcgagagcttacatgtcggggaagcttcacagactttagcaccttaccgtcgggggcttttaaggcagccagtttcttcatcggcttgtccatgatgctgataatagcctgcatcatttgtttcacactatttttcttttgcaatacagccactgtttataaaatttgtgcgtggatgcaactgacctctggcgactgtcttgtactgttcgatctgcacttccctgacggctgggatagcgacgaggttaagcgaatgtgcggcgagaagacggacaaatacaccctcggagcctgttcagttaggtgggcttatatcctggccattataggtattctggacgccctgattctcagctttctcgcattcgtgctcgggaatcgccaggacagtttgatggccgaagaattaaaggcagagaataaggatgacgggaacgcatag

SEQ ID NO: 228868 - DNA, 660 bp, synthetic construct
  misc_feature 1..660: note = Description of Artificial Sequence: Synthetic coding sequence
  source 1..660: mol_type = other DNA
atggttaaactcctgcctgcacaggaggccgctaagatttaccacaccaactatgtgcggaattcccgcgcagtgggtgttatgtggggtaccctcacaatatgcttcagcgtgctcgtgatggcactctttatccagccgtactggatcggcgacagtgtgaataccccccaagcaggctactttggtttattttcctactgcgtgggcaacgtcttgagctcggaattgatatgcaagggagggcctctggactttagctccattccctctagagccttcaagacagcaatgttcttcgtggccctaggcatgttcctgatcatcggatcaatcatctgtttcagccttttttttatttgtaacaccgcaacagtgtataagatctgcgcctggatgcagcttgccgctgccacaggactcatgattgggtgtttagtctacccagacggctgggacagttcggaggttcgaagaatgtgtggcgagcagacaggcaaatacactctaggccactgcactatcagatgggcctttatgctcgccatattgtctataggcgatgcgcttatcctatcattcttggcatttgttctcggataccgacaggataaacttttgcctgacgattataaagccgacgggactgaagaagtctag

SEQ ID NO: 228869 - DNA, 660 bp, synthetic construct
  misc_feature 1..660: note = Description of Artificial Sequence: Synthetic coding sequence
  source 1..660: mol_type = other DNA
atggttaagttgttgccggcacaggaggccgcaaagatctatcacactaattatgtacgaaacagccgggctgtgggggtaatgtggggaacactgacaatatgcttctctgtgctcgttatggcactgttcattcagccgtactggattggtgacagcgtaaatacaccacaagccggatacttcgggttgtttagctactgtgttggtaacgtcttgtctagtgaactgatttgcaaaggcggaccccttgacttcagtagcattccctctagggcctttaagacagccatgttttttgtggcacttggaatgtttcttattattggatccataatctgcttctccctgtttttcatctgtaatactgctaccgtgtataaaatctgtgcctggatgcaattggctgcagccacgggcctaatgatcggatgcctagtatatcccgacggctgggactcctccgaggtcagaaggatgtgcggggaacaaactgggaagtatacccttggacattgtactatccgatgggccttcatgcttgccattctttctataggcgacgctctcatcctttcttttcttgcctttgtcttagggtacaggcaggacaagctgctgcccgacgactacaaggcggatggcacagaagaagtgtag

SEQ ID NO: 228870 - DNA, 675 bp, synthetic construct
  misc_feature 1..675: note = Description of Artificial Sequence: Synthetic coding sequence
  source 1..675: mol_type = other DNA
atgagcgtgtttggcaagctgttcggtgccggaggaggcaaggcaggaaaggggggtccgacacctcaagaggcaatacagcggctgcgggataccgaggagatgctttcaaagaagcaggagttcttggagaagaagattgagcaggagctgaccgccgctaagaaacatgggactaaaaacaaacgcgcagccctgcaggcactgaaaagaaaaaagcggtacgagaagcagctcgcgcagattgacggcaccctcagcactatcgagttccagcgtgaggccttagaaaacgcaaataccaatacagaggttctaaagaatatgggatacgctgcaaaagcaatgaaagcagcccacgacaatatggatatcgacaaagtggatgagttaatgcaagacatcgctgatcaacaggagctcgctgaagagatttctacagccatctcaaagcctgttggattcggggaggagtttgacgaggacgagctgatggccgaactggaggagctggagcaagaagaactggacaaaaacctcctagaaattagcggaccggaaaccgttccgctcccaaatgtgccctccatcgctctaccatcaaagccagccaagaaaaaagaggaggaggacgatgatatgaaagagttggagaactgggcaggcagcatgtag

SEQ ID NO: 228871 - DNA, 1434 bp, synthetic construct
  misc_feature 1..1434: note = Description of Artificial Sequence: Synthetic coding sequence
  source 1..1434: mol_type = other DNA
atgggagccctggccagggctctccccagtattctcctggcgctcttactgacgagtacccccgaagctctgggagctaaccccggtctagtggccaggattacggacaaaggtttgcagtacgctgcccaggagggtttattggcgctgcaatccgagctgctgcgcattaccctccccgatttcacaggagatctgagaatcccccatgttggcaggggcaggtatgaattccactcgctgaacatccactcctgtgaactgctgcattctgcattgaggccggtccctggccagggcctgagtttgtcaatttccgacagctcaatcagagtgcaggggcgatggaaggtccgcaagagtttctttaagttgcagggtagctttgatgtctcggtgaaaggaattagcatctccgtgaatcttctgcttgggagcgagtcctctgggagaccaacagtcaccgccagctcctgctcctcagatatcgctgacgtggaggtcgatatgagtggcgatctgggttggctcctgaatctcttccacaaccagattgaatcaaaattccagaaggtcctggagagtagaatctgtgaaatgattcagaagtccgtttcaagtgatcttcagccttacctgcagacgctaccggtcacaactgaaattgattctttcgccgatatcgattattcactcgtggaagccccacgagccaccgcccagatgttggaggtcatgttcaaaggtgaaattttccatcgcaaccaccgttctcccgtcacgctgctcgcagccgtcatgtctttgccagaggagcacaataaaatggtgtactttgcaatatcagattacgtgtttaacacagcctcgttagtgtatcacgaggaaggctaccttaatttttccattactgatgatatgatcccccctgactccaatatccgactcacgacaaaaagctttagaccgtttgtccctagactggctcggttgtacccgaacatgaacctggagctgcaggggtccgtgccctctgccccactgctgaacttctcacctggcaatttgtctgtggatccttatatggagattgatgctttcgtgcttttaccgtcctcatccaaggagccggtgttcaggctgtcggtggcaacaaacgttagcgccacccttacatttaacacttctaagattactggcttcttgaaacccggtaaggtcaaggtagaactaaaagagagcaaggtcggactatttaacgcggaattgttggaggccctgttgaactactatattcttaacaccttctacccaaagtttaatgacaagctggctgagggcttcccactgcctttactgaagcgtgttcaactatacgacctgggactgcagattcacaaggactttcccagcagaagggatcaccctccatag

SEQ ID NO: 228872 - DNA, 486 bp, synthetic construct
  misc_feature 1..486: note = Description of Artificial Sequence: Synthetic coding sequence
  source 1..486: mol_type = other DNA
atgtcagtcccaggaccctaccaggccgcaaccggcccatcgtctgccccatccgcccctccatcctatgaagagactgtggcggttaactcctactacccgaccccacctgctcctatgccaggtcctaccacggggttggtcaccgggccagatgggaagggaatgaatcctcccagttattatacacagcccgcaccaattcctaacaacaatccaattaccgtgcaaaccgtgtacgtgcaacatcctataacctttctggataggcctatccagatgtgttgcccttcttgcaacaaaatgatcgtcagccagctgagctataatgccggtgcgcttacctggctgtcttgtggttccctgtgtttgctgggttgcattgccggatgctgcttcatcccattttgtgtagatgcactccaagatgtcgaccattactgtccaaactgcagggcactgcttggtacatacaagcgcctgtag

SEQ ID NO: 228873 - DNA, 687 bp, synthetic construct
  misc_feature 1..687: note = Description of Artificial Sequence: Synthetic coding sequence
  source 1..687: mol_type = other DNA
atgtctgttcccggtccttaccaggccgctaccggcccaagttcagccccaagcgcccctccgagttatgaagagaccgtggctgttaactcctattatcccactccacccgcacctatgcctggccctactaccggtctagttacggggcctgatggcaaaggcatgaaccccccatcgtattatacccagcccgcacccattcccaataacaacccaattactgtgcagacggtgtacgtgcaacacccaattactttcttggacagacccattcagatgtgttgcccgtcctgcaacaagatgatcgtgtctcagctcagctacaatgctggagctctcacctggctcagttgtggcagcttatgtctgctgggggtccactctggcctcctgctccaccccctcctgagaggttgtcccgctggtagaggcccactgctcagtcagttgcagtcctcacctgggcacttgcaggcattcgttggattaagtcagacatggagagaacctggtgcagccggatcccccttccatctctcgtcctcctttactcccggtgggggttctgcattggtggtgtctcccttgcagggtgcacacctgcacgtttttttctggggggaatacgtggccaaactcaccaatctgcagactccagagatagcagcctggagcagagcttag

SEQ ID NO: 228874 - DNA, 459 bp, synthetic construct
  misc_feature 1..459: note = Description of Artificial Sequence: Synthetic coding sequence
  source 1..459: mol_type = other DNA
atgtccgtgcccggtccctatcaagcagctactggaccctcttccgcccctagcgctccccctagttacgaagagacagttgcagtgaattcttattaccccacgccccctgctcccatgccaggccctactaccggcctggtgaccggacctgatggcaaagggatgaacccccctagctattacacacagccggctccaatccccaataacaatcccataaccgtgcagacagtttatgtgcagcaccccataacgttcctcgataggccgatccagatgtgctgccctagttgtaacaagatgattgtttcacagctaagctataatgcgggtgctctcacttggctctcctgcggctctctttgtttgctgggccaggaatgcagtggaactattgtcgcccttaggtcgttcgacttactgggctcatgcaacccaccttcaagtgcatcctag

SEQ ID NO: 228875 - DNA, 486 bp, synthetic construct
  misc_feature 1..486: note = Description of Artificial Sequence: Synthetic coding sequence
  source 1..486: mol_type = other DNA
atgagtgtgcctgggccatatcaggcagctaccgggccatcatcagcaccatcagcccctccctcctatgaggaaaccgtggcagtgaactcatattatcccacaccgccagcacctatgccaggaccaaccaccggcctggtcaccggcccagatgggaaaggtatgaaccctccctcgtattatacccagcctgcacccatccctaacaacaatcccatcaccgtccagactgtctatgttcaacaccccattacattcctggaccgcccaatacaaatgtgctgcccttcatgcaacaaaatgatagtgtcccaattgagctacaatgcgggagccttgacttggctgagctgcggaagcctgtgtttgttgggctgcatcgccggatgttgttttatccctttctgcgtggacgcactccaggatgtcgaccactattgcccgaactgccgtgcactcctcggaacctacaagaggctgtag

SEQ ID NO: 228876 - DNA, 6122 bp, synthetic construct
  misc_feature 1..6122: note = Description of Artificial Sequence: Synthetic coding sequence
  source 1..6122: mol_type = other DNA
atggagcacaaggaggtggtactgctgcttttgctgtttctaaagtccgcagccccagaacagtcgcacgtggtgcaagactgttatcatggcgacggccagtcgtatcggggtacctactccaccacagtgaccgggcgtacctgccaagcctggagtagcatgacgccccatcaacacaatcgcaccaccgaaaattatcctaatgccggacttatcatgaactactgtcggaaccccgacgcggtggctgcaccttattgttatacaagagaccccggagtgagatgggaatattgcaacttgacccaatgctctgacgcagagggaactgctgtcgcgccacctacggtgacacctgtccccagcctggaagctcctagcgaacaggcccctacagaacaacgccctggagttcaggagtgctatcatgggaatggacaatcttataggggtacctactctactactgttaccggtaggacctgtcaggcatggtcaagtatgacgccccattcccattcaaggactccggaatactaccctaatgccggactgatcatgaactactgccggaatccagacgctgtcgcggctccttactgttatactcgcgaccccggagtgagatgggagtattgtaacctcacccagtgttccgatgccgagggaacagccgttgcaccacccaccgtgacccccgtgccgagcctagaagcccctagtgagcaagcacccaccgagcagcgcccaggggttcaagagtgttaccatggaaatggacaatcctaccgtggaacatattccacaacagtgactgggcgaacatgtcaggcctggtcctcaatgactccacatagtcactcccgtacccccgaatattacccgaacgctggcttgataatgaactattgcaggaaccctgatgcagttgccgcaccttactgctatactcgggaccccggagtgcggtgggaatactgtaacctcactcagtgctctgacgccgaagggacagctgtagcaccaccgacagttaccccggtgccctctctcgaagctccctccgagcaggcaccaaccgagcagcgcccaggcgtgcaggagtgttatcatggaaacggccagtcgtatcgcggaacttacagcacaactgtcacaggtcgtacctgccaagcctggagttccatgacgccacatagccattcccgaacccctgaatattatccaaacgccggtcttattatgaactactgcaggaatccagacgcggtcgccgcaccatactgttacacaagagatcctggagtgagatgggaatactgtaacttgacccagtgttccgatgcggaagggacagccgttgcgccacccaccgttaccccagttccaagcctggaggcgccatcagagcaggcccctactgagcagcgtccaggtgtccaggaatgctaccacggtaatggccaatcatatcggggaacttattcaaccaccgtgactggaagaacatgccaggcctggagctcgatgacacctcacagccacagccgtacccctgaatattatcccaacgccggtctcatcatgaattactgtagaaatccagatgccgtcgcagccccatactgctatactagggatccgggagtgaggtgggagtactgtaacctgacacaatgtagcgatgctgagggaactgccgtggcccctcccactgtgacacccgttccctcccttgaggcccctagcgaacaagccccaacagagcagcgccctggtgtacaagaatgctatcatgggaatgggcagtcgtacagagggacgtacagcaccacagtcaccgggaggacgtgccaggcatggtcttctatgacaccccattcacattcaagaacgcctgaatactacccaaacgcgggacttattatgaactactgcaggaaccccgacgcagttgctgcgccttattgctacactagagatccaggcgttaggtgggagtattgcaatctgactcaatgctctgacgccgaggggacggctgtggcgccacccaccgtgacccccgtgccatcgctggaggctccatccgagcaggcaccaactgagcaaaggcccggagtccaggagtgttatcatggtaacggacagagctatcgaggtacctattctacaactgtgaccggacgaacctgtcaggcctggtcctctatgacacctcactcccactcacgcaccccggagtattatccgaacgcaggcctcattatgaattactgtagaaaccccgatgctgtagcagcgccatactgctacacacgggacccaggggtgcggtgggagtactgcaacttgacgcagtgctcggacgccgagggcacagctgtcgccccacctactgtgactcctgtgccctcgttggaggctcccagcgagcaagcacccaccgagcaacggccaggagtccaggaatgctaccatggcaacggccagtcgtatcggggaacctattccaccaccgttactggccgtacgtgtcaagcctggtcaagtatgacaccccacagccactctagaacaccagagtactatccgaatgccggactgataatgaactactgcagaaatccagaccccgtggcagcaccatactgttacactcgcgatccaagcgtgcgctgggaatactgtaatctgactcagtgttcagatgctgaagggacagctgtcgcgcctccgacaataaccccaatcccctcactggaggctccttctgaacaggcacctacagagcagcgcccaggtgtgcaggaatgctaccacggtaatggacagtcttaccaagggacctactttatcaccgtgaccgggaggacgtgtcaggcctggtcgagtatgacgcctcactctcattcacggacgccagcatattatcctaatgccggactgattaaaaattactgtcgcaatcccgatcctgtagccgcaccctggtgctatactactgacccctccgtacgctgggagtactgtaacctcacacgctgttccgatgccgagtggactgcattcgtgccccctaatgtcatcctcgcgccttctctggaagcatttttcgaacaggcccttactgaagagacccctggggtgcaggactgctactaccattatggccagagctatcgaggaacctacagcacaacagtgacaggtcggacctgccaggcttggtcttctatgacgccgcaccaacacagcaggacacccgagaattatcccaacgctggcttgactcgaaactactgtcgaaatcccgatgccgagattcgcccttggtgctacaccatggacccatctgtacgctgggagtattgtaacctaacccagtgcttggtgaccgaatcgtccgttctcgctacactgactgtggtacccgacccgtccaccgaagcctcgtcagaagaagcaccaactgaacagtcccctggggtgcaggactgctatcatggtgacggacaatcctatcggggttcattctcaaccaccgtgacaggccgaacctgccagtcatggtccagtatgacaccccactggcatcagagaactaccgagtattaccccaacggaggtctcacacgtaattattgccgtaaccctgacgccgaaatcagtccatggtgttacacaatggaccctaacgtgcgttgggagtactgtaacttgactcagtgcccagtgacagaatctagcgtgcttgcgacatctacagctgtttccgagcaagccccaaccgaacaatcacccactgtacaggattgctaccacggtgatggacaaagttaccggggttcgtttagtactacggtaacgggcagaacatgccagagctggtcttcaatgactcctcattggcatcagaggacaacggagtattaccctaacggcggactgacgaggaactactgccgcaatcccgacgccgagattaggccatggtgttacacaatggatccttctgtgagatgggagtactgcaacctgacacagtgcccagtgatggaaagcacacttctgacaacaccaactgtcgttcctgttccaagtacggaattgcctagcgaggaagcgccaaccgagaacagcacaggcgttcaagattgctacaggggtgacggtcagagttaccgtgggaccctctccaccactataacagggcgtacgtgtcaatcctggagtagtatgactccgcactggcacaggaggattccgctctactatccaaatgcgggtctgactcgcaattactgtcggaacccggatgccgaaattcgtccttggtgctacacgatggaccccagcgtccgctgggaatattgtaatctcaccaggtgccccgtcactgaatcttccgtgctcaccaccccgacagttgccccagttccttcaaccgaagccccaagcgagcaagcgccacctgaaaagtccccagtcgtgcaggactgctatcacggagatggtaggtcttatagagggatttccagcactacagtgaccggaaggacctgccaatcctggtcatctatgatacctcactggcatcagcggactccggagaactatccaaacgcaggactcaccgagaattactgcaggaacccagattccggaaagcagccctggtgttacacaacggatccttgcgtgaggtgggagtactgcaacctgacccagtgtagcgaaacagagagcggcgtactcgagactcccaccgtcgtccctgttccttctatggaggctcatagtgaggcagcaccaaccgagcagactcctgttgtccgccaatgctatcatggcaatggacagtcatataggggcaccttttcgaccacagtcacaggcaggacttgtcagtcttggtccagtatgacaccccaccggcatcaacggacccccgaaaattatcctaatgacgggctgaccatgaattactgccgaaatcccgacgccgacacaggtccctggtgttttaccatggatccatctatacgctgggagtactgtaacctgacccggtgctccgacaccgaaggcaccgtcgtggctccgcctacagttattcaggttccaagtctcggcccaccaagcgagcaagactgtatgtttgggaatggtaaaggctacagagggaagaaggcaaccaccgttaccggtacaccttgccaagagtgggccgctcaggaaccacaccggcattctactttcatccctggaactaataaatgggctgggctggagaagaattactgtcgcaaccctgacggcgacatcaatggtccatggtgttataccatgaacccacgcaagttgttcgattattgtgacattcccctatgcgcaagcagcagctttgactgcggaaagccacaggtggaaccaaaaaaatgccctgggtctatagtgggtggctgtgtggctcatcctcacagttggccctggcaggtaagtttaagaacccggttcggtaaacacttctgtggtggaacactgatctctcctgagtgggtgctgacagctgcccactgtcttaagaaatcttcccggccaagctcatataaagtgattctcggggcacaccaagaagttaatctggagtcacacgtccaggaaatcgaggttagccgactattcctcgagccaacccaggccgacatcgccttgctcaaacttagtagacccgcagtcataaccgataaagtcatgcccgcatgcctccctagcccagattatatggttacagcgaggactgaatgttatatcaccggttggggggaaacacaggggacatttggtactggcctcttgaaagaagcccagcttctggtgatcgaaaatgaagtttgtaatcattacaagtatatatgcgccgagcatctcgcccgtggcaccgatagctgccagggcgattccgggggaccattagtctgttttgagaaggacaagtacatactccagggagtcactagctgggggttgggatgtgccaggcctaacaagccgggagtgtacgcacgggtgagccgctttgtgacatggattgaggggatgatgcgcaataacta

SEQ ID NO: 228877 - DNA, 6122 bp, synthetic construct
  misc_feature 1..6122: note = Description of Artificial Sequence: Synthetic coding sequence
  source 1..6122: mol_type = other DNA
atggaacacaaggaagtcgtgttgctgttgctgctcttcctcaaaagtgctgccccagagcagtcacatgtggtccaggattgttaccacggcgatggccagtcctaccggggaacatatagcacaactgttaccggaaggacatgtcaggcttggtcgtccatgacacctcaccagcacaatagaactaccgaaaattacccaaatgccggactgatcatgaactactgtaggaatccagatgccgtcgctgccccttattgttacacccgggatcccggagttcggtgggaatactgcaacctcacgcagtgttcagacgcagagggtaccgctgttgcccctcccacggtgacgcctgtcccctcattggaggctccaagtgagcaggcgccaacagaacagaggcccggtgtccaggaatgctaccacggaaacggccagtcataccgaggcacatactcaacgactgtcacgggacgcacctgccaagcctggagttccatgactccacactcccatagccgaacacctgagtactaccccaacgctgggttgatcatgaattactgccgtaatccagacgctgtggccgctccatattgttatactcgggaccccggagtccggtgggagtattgtaacctcacgcagtgctccgacgcagagggaacggccgtagccccaccgacagtgacaccagttccatcactggaggccccatcagaacaggcaccaactgagcagagacccggagtacaggagtgctatcatggaaacgggcagtcttaccggggaacttacagtacaactgttacaggaaggacatgccaagcctggagttccatgactccccactcccactctagaacacctgagtattacccgaatgcgggactgataatgaactactgtcggaaccctgatgccgttgccgcaccctactgctatacaagggatcccggtgtacgctgggagtactgcaatttaacgcagtgttccgacgcggaagggacagcagtcgccccaccaactgtgaccccggtcccttcactcgaagccccttcagaacaggcacctacagagcaacggcctggtgtgcaggagtgctatcacggaaatggccaaagctaccggggaacctactccaccactgtcacagggagaacttgccaggcttggtccagtatgactccacattctcatagccgaacacccgagtattatcccaacgccggtctgattatgaattattgccggaacccagacgctgtggccgctccatactgctatacacgtgacccaggagtccggtgggagtattgtaacctgacacagtgtagcgacgcagaaggaacggccgtggctcccccaacagtgacacctgtgccctcactggaggctcctagcgagcaagcccctaccgaacagcggccaggagtccaggagtgctatcacggaaatggacaaagttatagaggaacttacagcacgacggtgactgggaggacttgccaagcctggagttcaatgactccacattcccacagcagaacccccgagtactacccaaacgccggactgatcatgaattattgtcggaatcctgacgctgtggcagccccatattgttacactagggacccgggagtgcggtgggagtactgcaacctgacacagtgtagcgacgcagaaggcaccgccgtagcccctcccaccgtgacccctgtcccatctctggaagctccatccgaacaggctccaactgaacagaggcccggagtacaggagtgctaccacggtaacggacagtcttacagaggtacgtactccaccacagtgaccggcaggacttgccaggcttggtcctccatgactcctcactctcattcccgcaccccagagtactacccaaacgctggcctgatcatgaattactgccgcaatcctgacgccgtggctgctccatattgttacacaagagatcctggggtgcgatgggagtactgtaacctgacccagtgctctgatgccgagggtactgccgtggcacccccaacagtgacccccgttccaagcctggaagcacccagcgagcaggcccctacagagcagcgacctggggtgcaggagtgctatcacgggaatgggcagagctacagaggaacctatagtactaccgtaactggccgtacctgccaggcctggagtagcatgacaccccacagccatagtcggaccccagagtactaccccaacgccggactaattatgaactactgtagaaatccagatgccgtggcggctccttactgttacacacgggacccaggtgtgcggtgggagtactgcaatctcacgcaatgctcagatgccgaaggtaccgctgtggcccctcctacagtaacaccagtgccctctctggaagctccatctgaacaggctcccactgaacagagacccggagttcaggaatgttatcatggtaacgggcagagttacagaggcacctatagtactactgtcacagggagaacctgccaggcttggagctccatgaccccacactctcactcacgcacgcccgagtactaccctaatgccggtcttattatgaactactgcagaaatcccgacccagtggcggcaccatattgctacacccgcgaccctagcgtccggtgggaatactgtaacttaacacagtgttctgatgccgaaggtaccgcagttgcccctcctacaatcaccccgattcccagtctggaggccccttcggagcaggcccctactgagcaacgccctggcgttcaggaatgctaccacggaaacggccaatcctaccaggggacctactttatcacagtcaccggaagaacatgccaggcatggagctcaatgactccgcattcccactcccgcacgccggcatactaccccaacgcgggtctgattaaaaactactgtagaaatccagacccagtcgcagcaccttggtgttacacaactgacccttccgtcagatgggagtactgcaatttgactaggtgttctgatgcagaatggactgcgttcgtgcctcctaacgtgattttggctccttcacttgaggccttctttgaacaggcccttacggaagaaacccctggagttcaggattgctactatcattacggtcaatcttaccgcggtacatacagcactactgtcactggaagaacttgtcaagcatggtcatccatgacccctcaccaacactcccggacccctgagaactacccaaacgctgggctgacccgaaattattgccgcaaccccgatgctgaaatccgaccctggtgctacaccatggatcctagtgtaaggtgggaatattgcaacctgacgcagtgcctggttactgagtcgtccgtactggctacattgactgttgtacccgatccgtcgactgaggctagttcggaagaggctccaactgaacagagcccaggggttcaggattgttatcatggtgatggccaaagctatcgaggctccttctccacaactgtcaccggcaggacttgtcaatcgtggtctagcatgaccccccactggcatcagaggacgaccgagtactacccaaatggcggactgacccgcaattattgtcgtaacccagacgcggagatcagcccttggtgctacactatggaccccaatgtgcggtgggaatactgcaacctgactcagtgtcctgtgactgaatcgagtgtgcttgcaacatccactgctgtgtctgaacaagctcccacagagcagagtccaaccgtccaggattgttatcatggagatggacaaagctacagaggcagcttctccactactgttactggcagaacgtgtcagagctggtcctccatgacaccacattggcaccagcgaacgactgaatattacccaaatggaggcctcaccaggaactactgcagaaacccggatgccgaaatccggccttggtgctacacaatggaccccagcgtgaggtgggaatactgtaacctgacacagtgtcccgtaatggagtcaacgctgcttactacgccaaccgttgtgccagtccctagcactgaactgccaagcgaggaggcgccaaccgaaaactctaccggggttcaggactgttaccgtggagacggacagagttataggggaaccctctccaccactatcacagggcgtacatgccagagctggtctagtatgactccccattggcatcgcaggattcccctctactacccgaacgccggactgaccagaaattactgtcgcaaccccgatgctgagatccgcccatggtgttacaccatggacccttcggtcagatgggagtactgcaatctcacccgctgtcctgtgacagagtcttcggttcttaccacacccaccgtggctcccgtgccttctacggaggccccatcggaacaggctcccccagagaagtcacctgttgttcaggattgctatcatggggatggaagatcctatcggggtatctcctctactaccgtaaccggtcgcacctgccaaagttggtcatccatgattccccactggcaccagagaacacccgaaaactatcctaatgccggtttgactgagaactattgccgcaatcccgacagcgggaagcagccctggtgctacactacagacccctgtgtgcgttgggaatattgcaacctgacgcagtgttctgagaccgagagcggagttttggagacgcctactgtcgtccccgtgccatctatggaggcacattctgaagcggcaccaacagagcaaacaccagtggttcggcagtgctaccatggcaatggacagtcatacagaggtacattttcaactactgtgaccggccgaacctgccaatcttggagctcaatgaccccacatagacaccaaaggacccctgaaaattatccgaacgatggtcttaccatgaattactgcaggaatcctgatgcggacacaggaccatggtgtttcactatggaccctagtattcggtgggaatattgtaatctgacgcgctgctccgataccgagggcaccgtcgtggcaccacccaccgtgattcaggtaccctccttaggacctccatccgagcaggattgtatgtttggcaacggaaaaggatatcggggaaagaaggctacaacggtgacaggcaccccgtgtcaggagtgggccgcacaggaaccacaccgacatagtacctttatccctggcacaaacaagtgggccggactcgagaagaactattgtcgaaatccagatggggacattaatggaccttggtgttataccatgaaccctaggaaactcttcgattactgtgacatacccttgtgtgctagctccagttttgactgcggaaaaccccaggttgagcctaaaaaatgtccaggctccattgtgggcggatgcgtggcccacccccattcctggccctggcaggtgagcttacggactcgcttcggtaagcatttttgcggtggcaccttgatatccccagaatgggtgctcacagcggcacactgtctcaagaaatctagtcgacccagctcatacaaggtgatcttgggagcccatcaggaagtcaacctcgaatctcacgttcaagaaatagaggtgagcaggctgtttctcgagcccacccaggccgatatcgcattgctcaagctgagcaggccagcagtaattacagacaaggtgatgccagcttgtctgccatccccagactacatggtcactgcgagaaccgaatgttacattacgggttggggcgagacccagggcacgttcggaactgggctactcaaggaggcacagctgctggtcatcgagaacgaggtgtgtaatcattacaaatatatttgcgctgagcatctggccagagggacagactcgtgccagggcgactctgggggaccactggtctgctttgagaaggataaatacatactgcaaggcgtgacatcctggggcctggggtgtgctcgtcctaataaaccaggagtttatgccagggtgtcccggttcgtaacgtggatcgagggaatgatgcgcaacaacta

SEQ ID NO: 228878 - DNA, 4602 bp, synthetic construct
  misc_feature 1..4602: note = Description of Artificial Sequence: Synthetic coding sequence
  source 1..4602: mol_type = other DNA
atgatgcagcttactctcaatactttattccctgtcgtctcaactccagccatcacctacattgtgaccgttttcaccggtgacgttcgcggtgccggaaccaaaagcaaaatataccttgtaatgtatggcgctcggggaaacaagaactccggcaagatatttctcgagggtggcgtatttgatcgcggaagaactgacatttttcatattgaattggccgttcttctgtcccctttgtctcgcgtgtctgtcggccatgggaacgtcggcgtcaaccggggttggttttgcgaaaaggtggtcattctgtgtccgtttacgggcattcaacagacatttccttgctccaattggctcgatgaaaagaaagcggacggactcattgagcgacagctgtacgaaatggtttctcttcgtaagaaacgcctgaaaaagttcccctggtccctgtgggtgtggaccactgaccttaagaaggctggtactaattccccaatattcatccaaatctacggtcagaaaggcagaaccgatgagatattgctcaatccaaataacaagtggttcaagcccggtatcatcgagaaattccgaattgagctccccgatctgggcagattctataaaattcgcgtctggcacgataagcggtcaagcggcagtgggtggcaccttgagaggatgacactgatgaacactctgaataaggacaaatataacttcaactgcaaccgctggctggatgcaaacgaggacgataatgagattgtcagggaaatgaccgctgagggccctaccgtgagaaggatcatgggaatggcacgctatcacgttacggtttgtaccggtgaactcgaaggcgcaggcaccgatgctaacgtctacctgtgccttttcggcgacgtcggggacaccggagaaaggctcctgtacaactgcaggaataacactgacctcttcgaaaaagggaatgccgatgagtttacaatcgagtccgtcaccatgcgcaatgtgcgtcgagtacgtatccgacacgacgggaagggttctgggtctggttggtacctcgatcgcgttctggtgagagaggaagggcagcccgagtccgacaatgtggagtttccgtgcttgaggtggctggacaaggacaaggatgatgggcaactggtgcgggaacttctgccttcggatagtagcgccaccctgaaaaactttcgatatcatatcagtctgaagaccggtgacgttagcggagcctcgaccgatagccgcgtctatatcaagctgtacggggataaatcagacaccatcaagcaagtgctcctcgttagcgataacaacctgaaggactatttcgagaggggtcgggttgacgagttcaccctggagacacttaatatcgggaacatcaacaggctggtcatcggtcatgactcaacaggcatgcacgcttcgtggttcctggggtccgtccagattcgggtaccaagacaaggaaaacagtacacatttccagccaatcgatggctcgacaagaatcaggccgacggcagattagaggtggaactatacccctctgaggtggtggagattcagaagctcgttcattacgaggtggagatctggacaggagatgtgggtggcgctggtacaagcgccagggtgtacatgcagatttacggtgagaaggggaagaccgaggtgctattccttagttcccggagcaaggtgtttgagcgcgcatcaaaggacacatttcaactggaggcggctgacgtaggggaagtgtacaagctacgcctggggcacacaggtgagggcttcggcccaagctggttcgttgataccgtctggttgcggcatctggtagttcgtgaagtggatttgacccctgaagaggaggccagaaagaaaaaagaaaaagacaagctcagacagctccttaagaaagagcggctgaaagctaaactccaaagaaagaaaaaaaagcgcaaaggttcagatgaggaagacgagggagaggaggaggaatcctctagtagtgaagagagctcttctgaagaggaagaaatggaggaggaagaagaggaggaagagttcggccctggaatgcaggaagttattgagcagcataaattcgaggcccataggtggctagctagggggaaggaggacaatgagttggtggtcgaactggtacccgctggaaaaccaggcccagagcggaacacgtacgaggtacaagtggtcaccggcaacgtgccaaaggctggaacggacgcaaacgtgtatctgacaatttacggcgaagagtatggggacacaggggagcgcccactgaaaaagagcgacaaatcaaataagtttgaacagggacagactgacacgttcaccatttacgctatcgatctgggcgcactgaccaagattcggatccgacatgacaataccggtaaccgtgccggatggttcctagaccgaatcgatatcactgacatgaacaacgaaatcacttattacttcccatgccagcgatggctagcagtggaggaagatgacgggcagctgtcgcgagaactccttccggtggatgagagctatgtgctcccccaaagcgaagaaggcaggggaggcggtgacaacaaccccctcgataatcttgctctggagcaaaaggataagagcacgacattttccgtgactataaaaacgggtgtgaagaagaacgctggcacggatgctaatgtgttcatcactctgttcggcacacaagatgacacaggcatgaccctgctaaaatcttccaagacaaatagcgacaaattcgaaagagactccattgagatattcactgtggaaaccctggatctgggagacctctggaaagtacgtctgggacacgacaacactggcaaggcacctggctggttcgttgactgggtggaagttgatgccccttcgctgggtaaatgtatgaccttcccctgtggtcgatggcttgccaagaacgaggacgatgggagcataattcgtgatctcttccatgccgagctgcagacccgtctctacacaccctttgtcccgtatgagatcacgctgtacacctcagacgtgtttgccgcagggactgatgctaatatttttatcatcatttatggttgtgatgctgtgtgcacgcagcagaagtacctttgcacaaataagagggagcaaaaacagttcttcgagaggaaatctgcatcccgattcatcgtcgagctggaggacgtcggcgagattatagagaagatcagaatcggacacaataatactggaatgaaccctgggtggcattgcagccatgtagatatcagaaggctgctcccggacaaggatggtgctgagaccctcacttttccgtgtgatagatggctggccacctccgaagacgataaaaagactatccgggaactggtaccttacgatatctttacggagaaatacatgaaggatggatcactcaggcaagtatacaaagaggtggaggaaccacttgatattgtcttgtattccgtccagatctttacagggaacatccctggcgctggaaccgatgctaaggtgtacataacgatttatggggatctcggagatacaggagaaagatatctggggaaaagtgagaacagaaccaacaaattcgagcgcggaaccgcagatacctttatcatcgaggcagcggatttaggagtgatctataaaattaagctacggcatgacaactccaaatggtgcgccgactggtacgttgagaaggtggagatctggaacgacacgaatgaggatgagttcctgttcctgtgtgggaggtggctgagcctgaagaaagaagacggtaggctggaacgcctcttttacgaaaaggagtatactggcgatcggtcttccaactgtagctcaccagcagatttttgggagatagctctgtcttctaagatggctgatgtggacatcagcaccgtgactgggccaatggctgattacgtgcaagaaggacccatcattccctactacgtttctgtgactacagggaagcacaaagacgcagcaacagattcacgggcttttatattcttaattggggaggatgatgagagatctaagcgcatttggctggattaccccagaggaaagcgagggttcagccggggatccgttgaagagttctacgtagctggcttagacgtaggcatcatcaaaaaaatcgaagtgctgtatgagatgaccgtctggacaggcgatgtcgtggggggtggaactgactcaaacatcttcatgactctatatggcatcaacgggtcaacagaagagatgcagctggataaaaagaaggccagattcgaacgcgagcagaatgacacattcatcatggagatcctggacattgccccattcactaaaatgcgaattcggattgatggtttaggaagcaggcccgagtggtttctggagcgagtcaaatgcctcgatccgcactcctcattccagccacctcccactccctctccagggtcctcgggactgtcaatggacctggttaaggcacagatgagtttgtag

SEQ ID NO: 228879 - DNA, 5843 bp, synthetic construct
  misc_feature 1..5843: note = Description of Artificial Sequence: Synthetic coding sequence
  source 1..5843: mol_type = other DNA
atgatgcagttaacccttaatactctgtttccggtggtcagcaccccagcaatcacttatatcgtaacagtctttaccggagacgtgaggggggctggcaccaagtcaaaaatttacctggtgatgtacggtgccagagggaataagaacagcgggaagatatttttagaaggcggtgtgttcgatcgtgggagaacggatatcttccacatcgagctggcagtcctgctcagtcctttatcccgcgtctcagttggccatgggaacgtaggtgtgaataggggttggttttgcgagaaggtagtgatactatgtccctttactggcatacagcagacttttccctgctccaactggttggacgaaaagaaggctgacggattaattgaacggcagctttacgaaatggtgagtctgaggaaaaaaagacttaagaaatttccctggtccctttgggtttggacaactgatctgaagaaagcaggaactaacagtccaattttcattcaaatatacgggcaaaagggtagaactgatgagatattgttgaaccctaacaacaagtggttcaagcctggaattatcgagaaattcagaattgagctccctgacctggggaggttctataagatccgcgtgtggcatgacaagaggagctctggcagcgggtggcatttggagagaatgaccttgatgaacactttgaacaaggacaaatataacttcaactgcaatcgctggcttgacgctaatgaggatgataatgagatagttcgtgagatgactgccgagggcccaaccgtcagaaggataatgggtatggccaggtaccacgtcactgtgtgcaccggggaactagaaggagctggcactgacgccaacgtgtatctctgcctctttggagatgtcggcgacaccggagagcgcctgctgtacaattgtaggaacaacaccgacctgtttgaaaagggtaatgcggatgagttcactattgaaagcgtgaccatgcgcaacgttaggagagtgagaatccgacatgacggcaagggctctgggtccggctggtacttagaccgcgtactggtgcgcgaggagggacagccagagtcggataacgtggagttcccctgcttacgctggctcgataaggataaggacgacggacagctggtgagagagttgcttccaagcgacagctccgctaccctaaaaaattttaggtaccatattagcttgaagaccggggacgtttccggagcaagcaccgacagcagagtgtacattaagttgtacggggataagtccgacacgatcaagcaggttctcctggttagtgataacaatcttaaggactactttgaacgtggcagagtcgacgagttcactctggagacattaaacattggaaatatcaaccgactggttattggacatgatagcaccggcatgcatgccagttggtttttagggtcagtacagattagagtccctcgccaaggcaagcaatacaccttccctgctaacagatggctcgataagaatcaggcagacggtcggctggaggtggagctgtatcctagcgaagtcgtggaaatccaaaagttggtgcactacgaagtcgaaatctggacgggggacgtggggggagccggtacatcggccagagtatatatgcagatttatggcgagaagggcaaaactgaggtgctttttttgtcgagtcgaagcaaagtcttcgaacgtgcctctaaagacaccttccagctggaagcagccgatgtcggtgaagtgtataagttgcgactgggccataccggcgagggattcggtcctagttggtttgtggacaccgtgtggttaaggcatctggttgtgcgggaagtggacctcaccccggaggaggaggctaggaagaagaaagagaaagacaagctgaggcaactgctgaagaaggagcgattgaaggccaaactgcagaggaagaagaaaaaaagaaagggaagcgatgaggaagacgagggagaagaggaggagtcctcgtcttccgaagaaagttcctccgaagaagaggagatggaggaggaggaggaagaagaagagttcgggcctggaatgcaagaagttatagagcaacacaagtttgaggcccacagatggcttgccagaggtaaggaggataatgagctggtggtagaactcgtgcccgctggcaagcctggacccgagagaaatacctacgaagttcaagtggtcaccggtaacgtgccaaaggctggcacggacgccaacgtttatctgacgatttacggcgaagaatacggggataccggagagagacctcttaaaaaaagtgataaaagtaataaattcgagcagggacaaacagacacatttaccatctacgcaatcgatctgggagcactgacaaagatcaggatccgtcacgacaatacaggtaaccgagccggttggttcttggatagaatcgacatcactgacatgaataacgaaattacctattatttcccttgccagcgctggcttgccgttgaggaggacgatggccagttatcacgagaactgctgcctgtcgacgaaagttatgttctgccacaatcagaggaaggccgaggcggaggggataacaatccgctggataatcttgccctggaacagaaggacaagtccaccacattctccgtgacaattaagactggagtgaagaaaaatgcgggtacagacgcaaacgtctttatcactttgttcggcacgcaagacgatactgggatgactctgctgaaaagctccaagacaaactcagataaatttgagcgcgacagcatagaaatcttcaccgttgagacgctcgacctgggcgatttgtggaaggttagactcggccacgacaacacagggaaggcacccggatggtttgtcgattgggtcgaagtggatgcccctagtctggggaagtgtatgacgtttccttgtggacgttggctggcaaaaaacgaagacgatggctctatcattcgagatctgttccacgcggagctccagacccgattgtatacaccattcgttccatacgagattacactgtacactagtgatgtgtttgcagcgggaactgatgcaaacattttcatcattatttatggctgtgacgcggtttgcacccagcagaaatacttgtgcactaacaaaagggaacaaaagcaattttttgaacgcaaatccgctagccgatttatcgttgaactggaggatgtcggagagatcattgaaaagatccggatcggtcataataacaccggcatgaaccccggatggcactgttcacacgttgacataagacgacttctaccagacaaggatggcgcagagaccctgactttcccatgcgatcgatggttagccacatccgaggatgataaaaagacaatcagggaattagtaccatatgacatcttcacagagaaatatatgaaagacggttcgttaaggcaggtgtacaaagaggtggaggaaccgctcgatattgtactatactccgtgcaaattttcacaggtaacatccctggcgctggaactgatgctaaagtgtacatcacaatctatggcgatttgggagatacaggtgaaagatacctgggaaagagtgagaacagaactaacaagttcgagagagggaccgccgacacattcatcatcgaggctgccgatttgggcgtcatatacaagatcaaactgaggcatgataacagcaagtggtgtgcggattggtatgttgagaaagtggagatatggaatgacacaaatgaagacgaattcctttttctgtgtggcaggtggctgtcactcaagaaagaggatggacgtctcgagagacttttttatgaaaaagagtacaccggcgatcggtcaagcaactgctcttccccagccgatttttgggagatcgctctgtccagtaagatggcagacgtggacatctctacggtcactggccctatggccgactacgtgcaggaagggccaatcataccatactacgtgagtgtcaccaccgggaagcataaagatgcagccactgactctcgtgctttcatatttctcattggggaagacgatgaacggagcaagaggatctggctggattacccccgaggaaagcgcggatttagccggggatccgttgaagagttttatgtggccggtctggacgtcggcattataaaaaaaatcgagctcgggcatgatggtgcctcacctgaaagctgttggcttgtggaagaactctgccttgccgtgccgacgcaaggcactaagtacatgctgaactgcaattgttggcttgctaaagaccggggtgatggcatcacctctcgggttttcgatctgctcgacgctatggtggttaatattggagtcaaggtcttgtacgagatgacggtttggaccggagatgtggtgggcggaggcacagactcgaacatctttatgaccttatacggcattaacgggtcgacagaggagatgcagttggacaaaaagaaggctcgttttgaaagggagcagaatgacacattcattatggagattctcgacattgcaccctttactaaaatgagaattcgaattgacgggctcggaagcaggccagaatggtttctggaacgtattctcctcaagaacatgaacactggggatctgaccatgttctattatggcgactggttgtcacagagaaaggggaagaagaccctggtgtgcgaaatgtgcgcagtgatcgacgaagaagagatgatggaatggaccagttatacagtagccgtgaaaacttccgacatattgggagcaggcacagatgccaacgtgttcatcatcattttcggcgaaaacggcgactccggcacactcgcactcaagcagtccgcgaattggaacaagtttgagaggaataatacggatacgtttaactttccggatatgctgagcctggggcacttgtgtaagttgagggtgtggcatgacaacaaaggcatcttcccaggatggcacctgtcatacgttgacgttaaagataatagcagagacgagacatttcactttcagtgtgactgctggctcagtaaaagcgaaggagacggtcaaacagtgcgagacttcgcctgtgccaacaataaaatctgcgacgaactggaagaaacaacatatgagatcgtaatcgagaccggcaacggtggcgagacaagagagaacgtctggctgatcctagagggaagaaaaaatcggtcaaaggagtttttgatggaaaatagcagccgacagagagcatttagaaagggcaccaccgatacattcgagttcgactccatatacctgggggacattgcaagcttatgtgttggccatctcgccagggaggataggttcatccctaagcgagagctcgcctggcacgttaagactattactataacagagatggaatatggtaatgtgtactttttcaactgcgactgcttaattcccctgaaacgcaaacgtaagtactttaaagtcttcgaagtgacgaagacaacagaaagtttcgcttctaaggttcaaagcctcgtgcccgttaaatatgaggtgattgtgacaacaggctacgaacccggagctggtacagacgccaatgtgtttgtcacaatcttcggagctaacggcgacacgggcaaacgcgagctgaagcagaaaatgcgtaatctttttgagcggggatccacagaccgcttcttcttggagacactggagttggtcgtgacacgactgggtctggccgcagagtgtggcta

SEQ ID NO: 228880 - DNA, 3435 bp, synthetic construct
  misc_feature 1..3435: note = Description of Artificial Sequence: Synthetic coding sequence
  source 1..3435: mol_type = other DNA
atgctgagacacctgacagatactttcactatttatgccatcgacctgggcgctctcaccaagattaggatcaggcacgataacaccgggaaccgcgcaggctggttcctggaccgaattgacataacagacatgaataatgaaatcacttactacttcccctgccaacggtggctggctgtggaggaggatgacggacaactatcgcgcgagctccttccagtcgacgagtcctacgttctgccacagtctgaagaaggcaggggcggtggagacaataacccattagacaatctcgccttggagcagaaagacaaaagcaccaccttctccgtcaccattaagacgggcgttaagaagaacgccggaacggacgccaacgttttcatcacccttttcggcacacaggatgacactggaatgacactcctgaagagcagcaaaaccaacagcgacaagttcgaaagagattcaatcgaaatcttcaccgttgagaccctagaccttggcgatctgtggaaagtgcggcttgggcacgacaacacaggtaaggctccaggatggttcgtggattgggtggaagtcgatgcaccctctttggggaagtgtatgaccttcccttgtggccgttggctggctaaaaatgaagacgatggctctattattagggatttattccacgccgaactccagaccagactttatacccctttcgtcccctatgagataactctatacacttctgatgtctttgccgcagggactgatgccaacatttttattatcatttacggctgcgacgcagtctgcacccaacagaaatacctctgcacgaacaagcgggagcaaaaacagttcttcgaaaggaagtcagcgtctcgctttatagtagagctggaggacgtgggggagataatcgaaaagattagaattggccacaacaataccggtatgaaccctggatggcactgctcacacgtggacattaggcggctgctgcctgacaaggatggagccgaaactctaactttcccctgcgatcgctggttggccaccagcgaagatgacaagaaaaccatccgcgaattggtgccctatgatatattcacggaaaaatacatgaaagatgggtccctcagacaggtgtacaaggaagtggaggaaccactggatattgtcttgtatagtgttcagatttttaccggaaacattccaggagccggaaccgatgcaaaggtgtacattacaatctatggggacctgggcgacactggtgaacggtacctgggaaagtcagagaacagaacaaataaattcgaaagggggacggccgatactttcattattgaggcagctgacctgggcgttatctataagatcaagctgaggcatgataactcaaagtggtgcgctgactggtatgtagaaaaggtagaaatctggaacgacacgaacgaggacgagttcctgtttttgtgtggaaggtggttgtcactcaagaaagaagacggcaggctggaacgtctgttctacgagaaagaatatactggggataggtcgagtaactgtagctcccctgccgatttctgggagatcgccttgtcaagcaaaatggccgatgtagatatatcgacagtcactggccctatggcagactacgtgcaggaaggcccaattatcccatattacgtgtccgtgactaccggaaaacataaggacgccgctacagattctcgcgctttcattttcttaatcggagaggacgatgagaggagtaagcgaatatggcttgactacccgcgaggaaaaagagggttctctcgcggtagtgttgaggagttttacgtcgcagggttagatgtcggcatcataaagaaaatcgaggtcctctatgagatgacagtctggaccggagacgtggtgggtggaggtacagatagcaatatattcatgacactgtatggcataaatggatcaaccgaggaaatgcagctggataagaagaaggccagatttgagagggagcagaatgatacttttatcatggaaatcctggacattgcaccattcacgaagatgagaattaggattgacgggctgggctcccgccctgagtggtttcttgaaaggatcctattaaagaacatgaatactggagatctcacaatgttctactacggcgattggctttcacagcggaaaggtaagaagacccttgtgtgcgaaatgtgtgctgtgattgacgaggaggaaatgatggaatggacctcttacacggtggccgtaaagacttccgacattctgggggcagggactgacgctaacgttttcattattatctttggggaaaacggcgattccggaaccctggcattgaagcaatcggcaaactggaataagttcgagaggaacaacaccgatacctttaattttccagatatgctgagtctcggccacttatgtaaactgagggtgtggcacgataacaaggggatcttcccagggtggcacctgtcgtacgtcgacgttaaggataattctcgcgacgaaactttccactttcagtgcgattgttggctcagtaagagcgagggagacggccagactgttagggatttcgcttgcgcaaataataagatctgcgacgaacttgaagaaaccacttacgagattgtcatcgaaaccgggaacggcggtgagacgagggagaatgtctggctgatcctcgagggacgtaaaaaccggtctaaggaatttctcatggagaacagttcccggcaaagggcctttaggaaaggtactaccgatacatttgagttcgactccatatatctaggcgatatagcatcgctgtgcgtcggacatctggcacgggaagacaggttcattcctaaaagggaacttgcttggcatgtgaaaacaataaccatcactgagatggagtacgggaatgtatacttttttaattgtgattgtctcatcccacttaagcggaagcgcaaatactttaaggtgtttgaggtcaccaagacaacagaatctttcgcctcaaaggtgcagtccctcgtgcccgtcaagtacgaggtcatcgtcacaactggatacgaaccaggtgcaggcaccgacgctaatgttttcgtcaccatttttggcgcaaatggcgacaccggaaagcgtgagttgaaacagaagatgcgaaacctcttcgaacgtggatctaccgatcgcttttttctggagacactggagctaggcgaactccggaaagtgcgactggaacatgatagctccggttactgtagcgggtggcttgtcgagaaagttgaggttacaaatacttcgaccggcgtggcaacaatctttaattgcggccgatggctggacaagaagagaggcgacggtctgacctggcgcgacctctttccctctgtctag

SEQ ID NO: 228881 - DNA, 921 bp, synthetic construct
  misc_feature 1..921: note = Description of Artificial Sequence: Synthetic coding sequence
  source 1..921: mol_type = other DNA
atgcgactcgggactaattgcgagcatcctcaactgccactagcagctccctccggctattacttcccctgccagcgttggctggctgtcgaggaggacgacggacagctgtcaagggaactgttgcctgtcgacgaaagctacgtgctaccccagagtgaggagggcaggggcggtggagacaataacccccttgacaatctggctctggagcaaaaggataagagcaccactttttccgttaccataaagacgggggttaagaagaacgcgggaaccgatgcaaacgtgtttattactttgttcggtacacaggatgacacaggaatgaccttgcttaaatcgtcgaagaccaactcagataaattcgagcgcgactccatcgaaatcttcaccgtcgaaactctggatctgggagacctttggaaggtccgcttgggtcacgacaacactgggaaggctcctggttggtttgtggactgggttgaagttgatgcccctagtcttggcaagtgcatgacattcccctgcggcaggtggctggctaagaatgaagacgacggctcaattattagggacttatttcatgccgaattacaaacccgactttataccccgtttgtcccgtacgaaattaccctttatacttcagatgtcttcgcagccggaaccgacgctaatatcttcattataatttacgggtgtgacgccgtctgcactcagcagaagtatctctgtaccaataaacgtgagcagaaacaattttttgaaaggaagtctgctagcaggttcattgtcgagttggaggatgtgggcgagattatcgagaaaatccgcattggccataataatacagggatgaatcccggttggcactgctcccacgtagacatcaggaggttactgccagacaaggattag

SEQ ID NO: 228882 - DNA, 6635 bp, synthetic construct
  misc_feature 1..6635: note = Description of Artificial Sequence: Synthetic coding sequence
  source 1..6635: mol_type = other DNA
atgatgccccaaaagaaacgtcgacggaaaaaggacatagacttcctcgctctttatgaagccgagttgttaaactacgcatcagaggatgacgaaggtgagctggagcacgagtattacaaagctcgagtgtatgaggtcgtgaccgcaactggcgacgtgcggggagcgggaacggatgcaaacgtgtttattaccctgtttggggagaatgggctttcacctaagctccaactaactagtaagagtaagtctgcattcgaaaaaggaaacgttgacgtgttcagggtgagaacaaacaacgtgggcctcatatataaggtgcggattgaacatgacaacaccggcctcaatgcttcctggtacctggatcacgtcatcgtcaccgacatgaaacgaccccacctgagatattactttaattgcaacaactggttatcaaaagtcgagggcgatagacaatggtgtagggatctgttggcttcctttaacccaatggatatgccccgaggcaacaaatatgaagtgaaagtatacaccggcgatgtcatcggcgctggaactgacgccgacgtatttatcaacatatttggtgagtacggcgacacaggggagagacgccttgaaaacgagaaagataatttcgagaagggagcagaagaccgcttcattctggacgctccagatctggggcagcttatgaagattaacgtggggcataacaacaaagggggttccgccggttggtttctcagccaaatcgtgattgaggatatcggcaacaagcgaaagtatgacttcccgctgaataggtggctggccttggatgaagacgacggtaagatccaacgggacatactcgtaggcggtgctgagacaacggccattacgtatattgttacagtctttaccggtgacgtacgcggagctggcacaaagagcaaaatctatctggtaatgtatggcgctcgcggaaataagaacagcggtaaaatcttcctcgaagggggagtttttgatcgagggcgtacggatatttttcacattgagcttgccgtcctcctcagccccctatcccgcgtcagcgttggacatggcaacgttggcgtaaacagagggtggttctgcgaaaaagtggtcattctctgcccttttacgggcatccagcaaacttttccatgtagcaattggctcgatgaaaagaaggctgatggattaatcgagcgccagttgtacgagatggtttcactgagaaaaaagcgattaaaaaaattcccatggtccctgtgggtgtggaccaccgacctgaagaaagcaggaacgaatagtcccatattcatacagatatacgggcaaaagggaaggacagatgagatcctgctgaacccaaataacaagtggtttaaaccaggtataatcgagaagtttcgcatcgaactgccggatctcggacgattctataaaatccgcgtctggcatgataaaagatcatcggggtctgggtggcatctcgagcggatgactctaatgaacaccctgaacaaggataaatacaactttaactgtaatcgatggttagacgcaaatgaagatgacaatgaaatcgttcgtgagatgaccgcagagggccctactgttagaaggatcatgggaatggcacgttatcacgtgactgtgtgcacaggagaactcgagggcgctggcaccgacgcgaacgtgtacctgtgtctattcggggatgtgggtgatacaggggaaagactcttgtacaattgccggaataataccgacctcttcgagaaagggaatgccgacgagtttaccatcgaatcagttaccatgcgaaatgttcggagggttagaattaggcatgacggtaaaggctcaggatcggggtggtacctcgatcgtgttctggtgagggaggaaggacagcccgagtctgacaatgttgaattcccctgtctgcggtggctggataaagataaggacgatggccagctcgtcagagagctgcttcccagcgattcctctgccactctcaagaatttccgctaccacatatccctcaaaaccggcgatgtgtccggcgcttcaaccgattccagggtgtatataaagttgtacggcgacaaatcagacactatcaaacaggttctgctggtatccgacaataatctaaaggactatttcgaaagaggtcgcgtggacgagtttacgcttgagaccttgaatataggtaacattaataggctggtaataggtcatgattccaccggcatgcacgcaagctggttcttgggttccgtacaaatcagggtgcctcgccagggcaagcaatacacctttcctgcaaaccgctggcttgacaaaaaccaggctgatggccgactagaggtggagctttatccttccgaggtggtagagatacagaaactggtgcactacgaagtcgagatttggaccggggacgtgggcggagccggaaccagcgccagagtctacatgcagatctacggcgaaaaggggaaaaccgaggtgctatttctgtcttcccggtcgaaggtcttcgaacgggctagtaaagacacctttcagcttgaggcggctgacgttggtgaggtgtacaaactgcggctaggtcacacaggcgaaggattcggcccttcttggtttgtggataccgtctggctgcgccacctcgtggttcgcgaggtagaccttacccccgaggaggaggcgcgtaagaagaaggaaaaagataagcttcgccagcttctcaagaaggagcgcctgaaggcgaagctccagcgaaaaaaaaaaaagagaaaaggctcagacgaagaggacgagggcgaggaagaagaaagttcaagtagcgaggaatcctcctccgaagaagaggagatggaagaggaagaggaagaagaagagttcgggccaggcatgcaggaggtgatagagcagcataagttcgaagcgcaccgatggctggcgagagggaaagaggataatgagctcgttgttgaactcgttcctgctggtaagccagggcctgagcggaatacctacgaagtgcaggtggtgacaggaaatgtgcccaaggcaggcacagatgcgaacgtgtacctgaccatctatggtgaggaatacggcgacacaggggagcgccctttgaagaagtctgacaaatcgaacaaattcgaacagggccagacggacacattcaccatctatgctatcgacctcggtgccctcaccaaaatacgtatccgccacgataacaccggtaatagggccggatggtttttggacaggattgatatcaccgacatgaacaacgagatcacctattacttcccttgtcaacggtggctagccgtagaagaggacgacgggcagttgtctagggaacttctaccggtggacgagtcttatgttttaccgcagtccgaggaggggagaggcggtggggacaacaacccactcgataacctggcactggagcaaaaagacaagagtactacgttcagcgtgaccattaagaccggggtcaagaaaaatgccggtacagatgccaatgtattcattacgctcttcgggacccaggatgacacaggtatgacacttcttaaatccagtaagaccaatagcgataagttcgaacgggactcgattgagattttcactgtagaaacacttgaccttggcgacttgtggaaggtgagactcggccacgacaatacaggaaaggcacccggttggttcgtagattgggtagaggtcgatgctccatcactcggcaaatgcatgacctttccatgcggcaggtggttggcgaaaaatgaagatgatgggtccatcatccgggatctgtttcacgctgagctgcaaacgcgcctgtacacccctttcgtgccctacgaaatcaccctctacacttctgacgtttttgctgccggaacggatgctaacatcttcatcatcatatatggatgcgatgcggtttgtactcagcaaaaatacctgtgcactaacaaacgcgaacaaaagcagttctttgagaggaagagcgcctccagattcattgtcgagcttgaggacgtgggggagatcatcgaaaagattcgaatcggacataacaacactggcatgaatcctggatggcattgcagccacgtggatatccggagactactccccgataaggatggcgctgagacactgacttttccctgcgatagatggttggccacttcggaggacgacaagaagaccattagagaactggtgccatatgacattttcacagagaaatacatgaaggacgggtcactccggcaggtgtacaaggaggtggaagaacccttggacattgttctgtatagcgtccagatatttaccggcaacataccaggtgccggaaccgacgctaaggtttacattaccatttacggagatctgggagacacaggagagcgatatctaggtaagagcgaaaaccgcacaaacaagttcgaaagggggacagctgacactttcatcattgaggccgcagaccttggggtgatttacaaaatcaaactccggcatgacaattccaaatggtgtgccgactggtatgtggagaaagttgaaatttggaacgataccaatgaggacgagttcctgttcttgtgcggtcgttggctctcgttaaaaaaggaggacggtagactggagcggctattctatgaaaaggaatataccggcgaccggtcctctaattgtagttcacccgcagacttttgggagatcgccctttctagtaaaatggccgacgtggacatttcgacagtgactgggccaatggccgattacgtgcaggagggccctatcatcccttactatgtgtccgtcacaaccggaaaacataaagacgctgcgaccgactcccgcgctttcatttttcttattggagaagatgatgaacggtctaagaggatctggcttgactacccgcgtgggaagcggggattctcccgaggaagcgtggaggagttttatgtggcgggtttggatgtggggatcatcaagaagattgaagtgttgtacgagatgacagtgtggactggcgacgtcgtaggaggcggtactgactctaacatcttcatgacgctgtacggaatcaacggcagcaccgaagagatgcaactagacaaaaagaaagctagatttgaaagagaacagaacgatacctttattatggagattctcgacatcgcgcctttcactaaaatgagaatcaggatcgacggactcggctcccgccctgaatggttcctggaacgcatattgctgaaaaatatgaacaccggcgatctgactatgttttattatggcgattggctcagccagagaaagggaaaaaagacactggtctgcgaaatgtgcgctgtgatcgatgaagaggagatgatggagtggactagttataccgtggcagtgaaaactagtgatatcctgggggctgggactgacgccaatgtgtttatcattattttcggcgaaaacggcgacagcggaaccctagcccttaaacaatcagcaaattggaataagtttgagaggaacaataccgatacattcaacttcccggacatgctgtccctgggtcatttgtgcaagctgagggtctggcacgacaataagggaattttccccggatggcatttatcatacgtggacgtcaaagataactctcgtgatgagactttccattttcagtgtgactgttggctgtccaaaagtgagggtgatggacagacagtgcgggacttcgcatgcgcgaataacaagatttgcgacgaactagaggagacgacctacgagatcgtgattgaaaccggaaacggtggagagacacgagagaacgtatggttgattttggagggtagaaagaaccgatccaaggaattcctcatggagaattcttccagacaaagagccttccgaaagggaacaactgatacattcgagtttgatagcatatacctgggcgacattgcgagcctctgcgtgggtcacttggccagggaggatcggtttattcctaagcgagaactggcctggcacgtgaagactatcactatcacagaaatggagtacggaaatgtttacttctttaactgcgactgcctcatccctctcaaaaggaaacggaaatacttcaaagtctttgaggtgaccaaaactacagagtccttcgcttcaaaagtccaatctctggtcccggtgaagtatgaagttattgtcactacaggttatgaacctggggctggaactgatgccaacgtcttcgtcaccatcttcggtgcaaacggggacacagggaagagggagctgaaacagaagatgcggaatctcttcgagaggggcagcaccgatcggttctttctggaaaccctggaactaggcgaacttagaaaggtgaggctcgagcacgacagctctgggtactgctccgggtggcttgtagagaaagtggaggtcaccaatacatctactggcgttgcgactattttcaattgtgggagatggctggataagaagcggggagatggcctaacatggcgggatctctttccctccgtgta

SEQ ID NO: 228883 - DNA, 3345 bp, synthetic construct
  misc_feature 1..3345: note = Description of Artificial Sequence: Synthetic coding sequence
  source 1..3345: mol_type = other DNA
atgaacaacgagatcacatattatttcccatgccagcgctggctcgccgtggaagaggatgacggtcagctctccagggaactgctccccgtcgacgagagttacgtgctccctcaatccgaagagggtaggggagggggtgataacaacccactcgataatctggcattggagcagaaagataaaagcaccacatttagcgttacgattaagacaggagtcaagaagaatgcagggaccgatgccaatgtcttcatcaccctgttcggcacccaggacgatacgggcatgacattgcttaaaagctccaagactaatagcgataaatttgaaagggacagcatcgaaatctttacggttgagacactcgatctcggcgacctatggaaggtccgccttggacatgacaacactggaaaagccccaggttggttcgtagactgggtcgaggtcgatgctcctagcctgggtaaatgtatgacatttccctgcgggagatggttggctaaaaacgaagacgatggctcaataatcagagatctctttcacgccgagctgcagactaggctttatactcctttcgtaccttacgagattactctgtacacctctgatgtcttcgccgcaggtacagatgcaaacatttttatcattatctatgggtgcgacgccgtttgtacacaacagaagtacctgtgtaccaataagcgggaacagaagcagttcttcgagaggaagtctgccagcaggttcatcgtagaattggaagacgtgggcgagatcatagagaaaatacgcattggccataacaacactggcatgaatccaggttggcattgcagtcatgtcgacattcggaggctcctgcctgataaggatggggctgagaccctgactttcccctgcgaccggtggttagctacctctgaggacgataaaaaaactatcagagaactggtcccctacgatattttcactgagaaatatatgaaagatggctctctcaggcaagtatacaaggaggtggaggaaccattggatatagtgctgtacagtgttcagatatttacaggcaacattcctggagctggaacggatgccaaagtttatattaccatctatggagacctcggggacaccggcgaacggtacctgggcaagtccgagaatcggaccaataagttcgaaaggggtactgcggatactttcatcattgaagctgccgatctgggcgtcatttacaaaatcaagctcagacatgataacagtaagtggtgcgcagactggtatgtggagaaggtggagatctggaacgacaccaatgaggatgagtttttatttctctgtggtcggtggctctccctgaagaaggaggacggcagactcgagcgtctgttttacgagaaggagtacacaggagacagatcttcaaactgttccagtccagcagacttctgggagattgcactttcaagtaagatggccgacgtggacatctccactgtcactgggcctatggcagactacgtacaggagggcccaattatcccctattacgtgtctgtaacaaccggcaaacataaggatgccgctaccgatagccgcgctttcattttcctgattggggaggatgatgagagatcgaaacgcatttggttggactacccacgaggtaagcgagggttctctcggggatcagtggaggaattttacgttgctggcctcgacgtgggcattattaagaagattgaattgggccatgatggtgctagtcctgaatcctgctggttagttgaggagctgtgcctggctgtgcctactcagggtactaaatacatgttaaattgcaattgctggttggctaaggatagaggggacggcatcacaagcagggtatttgaccttctggacgcaatggtagtgaacatcggagttaaggtgttgtacgagatgaccgtgtggacgggggacgtggttggagggggaaccgatagtaacatttttatgactctctatggcatcaacgggagcactgaagaaatgcagctcgataagaagaaggcacgcttcgagcgcgagcagaacgatactttcattatggagattctggatatcgccccatttacaaaaatgcgcataaggattgacggcctcgggtctcggcctgagtggttcttggagcggatattgctgaagaatatgaacacaggcgatttgactatgttctactatggcgactggttgtcacagcgaaaaggtaaaaagacacttgtgtgcgagatgtgcgccgtcatagatgaagaagagatgatggagtggacgagttacacagtcgcggtcaagaccagcgacatcctgggtgccggaacggacgcaaacgtgtttatcatcatattcggcgaaaacggcgatagtggcacgctagccctcaaacagagcgccaattggaacaaattcgaaagaaacaacacagacacatttaatttcccagacatgttatccctaggacacctctgcaaacttcgtgtttggcatgacaacaaaggcatttttccgggttggcatctctcctatgttgacgtgaaggacaattcgcgagacgaaacatttcatttccagtgtgattgctggttgtcaaaatcagagggagacggacagactgtaagagactttgcatgtgccaacaacaagatttgtgacgagctagaggaaaccacttatgagatagtgatcgaaaccggtaatggtggtgagaccagggagaacgtatggctcatcctcgagggcaggaaaaacaggtccaaggaattcctcatggagaactctagtagacagagggcatttagaaaggggacgacagatacattcgagtttgacagcatctatctcggcgatatagcaagcctgtgcgtaggtcaccttgccagggaagatcgtttcatcccaaagagggaactcgcatggcatgtcaaaactataacaattactgaaatggagtatggaaacgtgtacttttttaattgtgactgccttattcctctgaagagaaagcgtaagtactttaaggtttttgaggttaccaaaaccacggaatcatttgcctccaaagtgcagtccctggttcccgtgaaatatgaggtaatcgtcaccactggttatgaacccggagccggaaccgatgccaatgtgtttgtgaccattttcggtgccaacggcgacaccggcaagagagagttgaaacaaaagatgcggaatctgtttgagagaggaagtacggaccgttttttcttggagactttagagctagtagtgacacggctcggtcttgctgcagaatgcggttag

SEQ ID NO: 228884 - DNA, 1539 bp, synthetic construct
  misc_feature 1..1539: note = Description of Artificial Sequence: Synthetic coding sequence
  source 1..1539: mol_type = other DNA
atgactgtctggacgggagacgttgtcggcggaggcacagactccaacattttcatgactctctacggaattaatgggtcgacggaggaaatgcagcttgacaagaagaaagcgcgattcgaaagggagcagaacgatactttcattatggaaatcctggacatcgcacccttcaccaagatgcgcattagaatagacggactggggtctcgcccagagtggttcctcgaacgaatcctcctgaaaaatatgaataccggagacctcacaatgttctactacggtgactggctgtcacaacgtaaaggaaaaaagacactcgtctgtgagatgtgcgcagtgatagacgaggaagaaatgatggaatggacttcctacacggtcgctgtgaaaacatccgatatcctgggtgccggtacagacgcgaacgtgttcatcattatatttggagagaacggcgattcgggcaccctagccctgaagcagagtgcaaattggaacaaatttgaacgaaataacactgatactttcaacttcccagatatgctgtcactggggcacctgtgcaagctaagagtttggcacgataataaggggatctttcccggttggcatttaagctacgtggacgtgaaggataattccagggacgaaacctttcactttcaatgcgattgctggctctcgaagtcagagggcgacggtcagaccgttcgggactttgcttgtgccaacaataaaatctgcgatgagctagaagagacgacatatgagatagtgatagagacagggaacggcggtgagacaagagaaaatgtgtggctgattctggaaggtaggaagaacagaagcaaagagttcctgatggaaaactctagcaggcagagagcttttagaaagggtaccacagacacgttcgaattcgactccatatacctgggagacatcgctagtctatgcgtggggcatctcgccagagaggatcgctttatccccaaaagggagctggcttggcacgtgaagaccatcaccatcaccgaaatggagtacggaaacgtctatttttttaattgcgactgtctgatacctcttaaaaggaaacgaaagtattttaaagtgtttgaggtcacaaagaccaccgagtcttttgcttctaaggtccagtctctggtgcctgtgaaatacgaagtgatcgtgacaaccggatatgaaccaggcgcaggtacagacgccaacgtgttcgttaccatctttggggctaatggcgacacagggaagcgcgagttaaagcagaagatgcggaatctgtttgaaagggggtctactgatcggttcttccttgaaactctggagcttggggaactgaggaaggttcgccttgaacatgactcttcaggatattgctcgggttggctcgtggaaaaggtggaagtgactaacactagtacaggcgtagcgacgatttttaactgcggcagatggctagataaaaaaaggggggacggtctgacttggcgcgatttgttcccctctgtgtag

SEQ ID NO: 228885 - DNA, 1374 bp, synthetic construct
  misc_feature 1..1374: note = Description of Artificial Sequence: Synthetic coding sequence
  source 1..1374: mol_type = other DNA
atgaccgtgtggacaggcgacgttgtgggcggtggaaccgattctaatatcttcatgacattgtatggcataaatggaagcacagaagaaatgcagttagataagaaaaaggcgagattcgaacgcgagcagaatgataccttcatcatggagattttggatatcgcacctttcaccaaaatgaggattcggattgatggactcggctcccggccagaatggtttctggagagaatcctgctgaagaacatgaacactggtgacctcaccatgttctattatggcgattggctctctcagcgaaaaggcaaaaagaccctcgtgtgtgaaatgtgtgctgttattgatgaggaagaaatgatggagtggaccagttacaccgtcgccgtcaagacgagtgacattctcggagccggaacagacgctaatgtctttattataatctttggcgagaatggggattcaggcaccttggccttgaaacagtctgccaactggaataagtttgaacgaaataacactgatacgttcaattttccagacatgctgagcctcggccacctgtgcaaactgcgagtctggcacgataacaagggaatctttccaggctggcacctatcctacgttgacgtgaaagataactcacgcgatgaaacatttcatttccagtgcgattgctggctgagcaaaagcgagggggacggacaaactgtgcgcgatttcgcatgtgcaaacaacaagatttgtgatgagctggaagagacaacttacgagatcgtaattgagaccgggaatggtggcgagactcgcgagaatgtttggctgattctggaagggcgaaagaacagaagtaaagagttcctcatggagaactcctcacgccagagggccttcagaaaagggaccaccgatactttcgagttcgacagcatctatctgggggacatcgcgtcattgtgtgtcggccacctggcccgagaagaccgatttataccaaagagagaactggcatggcacgtgaaaacaattaccattactgagatggaatatggcaatgtctatttctttaattgtgattgcctgatacctctcaagaggaagcgcaagtatttcaaggtgtttgaggttaccaagactactgaaagctttgcctctaaggtccagtccctcgtcccagtaaagtatgaagtcatagtcacaactggttacgagccaggggctggcacggatgcgaatgtgtttgtgaccatttttggcgctaacggggacacagggaagcgcgaactgaagcagaagatgcggaatttgtttgagaggggcagcactgatcgcttttttctggagactctcgagctcggggagttacgcaagtag

SEQ ID NO: 228886 - DNA, 1122 bp, synthetic construct
  misc_feature 1..1122: note = Description of Artificial Sequence: Synthetic coding sequence
  source 1..1122: mol_type = other DNA
atgctcattcccttttcaatgaagaactgctttcagctactctgtaattgtcaagttcctgctgcaggcttcaaaaagaccgtcaagaatgggctcatcttgcagagcattagcaacgacgtttaccaaaatcttgccgtagaagattggatccacgaccacatgaacctggagggaaaaccaatccttttcttctggcagaattccccatctgttgtaattggcagacatcaaaacccatggcaagaatgtaatctcaatctcatgagggaggaaggaatcaagttggccaggagacggtccgggggtggtacggtgtatcatgatatgggcaatatcaatttaacgttctttaccactaaaaaaaagtatgatcgaatggaaaacctcaaactgatcgtccgggctctgaatgccgtgcagccccagctcgacgtacaggctacaaaacggttcgatttgcttctggacggccagttcaagattagcggcacagcatctaaaatcgggaggacgaccgcctatcaccactgcacactgctgtgtagcactgatggaacctttctctcaagtctgttaaaatctccgtaccaagggataaggtcaaatgctactgcaagtataccctcactcgtgaagaatttactcgagaaagacccaaccctcacatgtgaagtcctaatgaacgccgtcgccactgagtacgccgcatatcaccagatcgataaccacatccatctgatcaatcccaccgatgagaccctgtttccgggtatcaatagcaaggccaaagagctgcagacttgggaatggatttacggaaaaactccaaaattcagcatcaataccagcttccacgtcctgtacgagcaatctcacctggaaataaaagttttcatcgatatcaaaaacggacgcattgagatctgtaatattgaggcacccgaccattggctcccgttagagataagggacaaactcaattctagtttgataggtagcaagttctgtcccactgagactactatgctaacaaacatcctgctcagaacatgccctcaagaccacaagctgaattcaaaatggaacatactgtgtgaaaaaatcaaagggatcatgtag

SEQ ID NO: 228887 - DNA, 1122 bp, synthetic construct
  misc_feature 1..1122: note = Description of Artificial Sequence: Synthetic coding sequence
  source 1..1122: mol_type = other DNA
atgttgatcccattttctatgaaaaattgttttcagctactctgcaactgccaggtacctgccgcaggtttcaagaagaccgttaagaacgggttgatcctgcagtccataagcaatgacgtctaccagaacctcgctgtcgaagactggattcacgaccatatgaacctggagggcaaaccaatcctgttcttttggcaaaacagccccagcgttgtcatcggtagacaccagaatccgtggcaggagtgcaacctcaaccttatgcgcgaagaaggcatcaagctcgcgaggaggcggtcaggcggaggaaccgtgtatcacgacatgggtaacatcaacttaacctttttcacaacaaagaagaagtacgatcgcatggagaatcttaaactcatagttcgagccctcaacgccgtgcagcctcagctggacgtgcaagccaccaagcgcttcgacttgctcttagacggtcaattcaaaatctcggggacagcatccaagatcggacgcacaactgcctaccaccactgcaccctcctctgcagcaccgacggcacgttcctcagctctttgttaaaaagcccctatcagggcatccgatccaacgctacagcctccataccgtctctggtaaaaaacttactggaaaaggatcccactctcacatgcgaagttcttatgaatgcagtcgccaccgagtacgctgcctaccaccagatcgataatcatattcacctcatcaatccaaccgacgagaccctgttccccggaatcaattcgaaggctaaagagctgcagacttgggaatggatctatgggaaaaccccgaaatttagcatcaacacaagcttccatgtactctacgagcagtcacatctcgagatcaaggtcttcatcgatatcaagaatgggagaatcgaaatatgtaacatcgaggctcctgatcattggctgcccctcgagattagggacaaattgaacagctcgctcatcggcagtaagttctgtcctactgagacaactatgctgaccaacatcctcctcagaacctgcccacaggatcataagctgaattcaaaatggaacattctgtgcgagaagattaagggcatcatgtag

SEQ ID NO: 228888 - DNA, 1122 bp, synthetic construct
  misc_feature 1..1122: note = Description of Artificial Sequence: Synthetic coding sequence
  source 1..1122: mol_type = other DNA
atgttgatcccgttcagtatgaagaactgttttcagctattgtgcaactgtcaagtaccggctgcagggttcaagaagaccgtgaagaacggcctcatcctccagagcattagcaatgatgtgtatcaaaacctcgccgtcgaggactggatccatgaccatatgaatctcgaaggaaaacctattttgtttttttggcagaattccccgagcgtcgtgattgggagacatcaaaatccatggcaggaatgtaatttgaatctcatgcgtgaggaaggcattaaacttgcccgaagaaggtctggcggaggcacagtgtatcacgatatgggcaacatcaacctgacatttttcaccaccaagaaaaaatacgacagaatggaaaatctgaagctgatcgtacgggcactgaatgccgttcagccccaactggacgtacaggctaccaagcgatttgacctgcttctcgatgggcagtttaagatcagtggcaccgcaagcaagatcggcaggacaacagcctatcaccattgcacactcttgtgcagcacagacgggaccttcctaagttcgctcctgaagagcccctaccaaggtattcgttccaatgctactgcttccatccccagcctcgtgaaaaacctattggagaaggatcctactctgacctgtgaagtcctgatgaacgccgttgctactgaatatgccgcataccatcaaatcgataaccacatccacctgattaatcccactgacgagactctgttcccaggtatcaattcaaaagcaaaggagttacagacatgggagtggatatatggcaagacccctaagttcagtattaatacatctttccatgtgctctatgaacagtcccacctggagattaaggtgttcatagatattaagaacggcagaattgaaatatgcaatatcgaggcccctgaccactggctgcccctcgagatccgggacaagttaaattcatcactgatcggctccaaattttgcccaaccgagactaccatgctcaccaacattctcctacgaacctgcccacaggatcataagctcaactctaaatggaacatattgtgcgagaaaatcaagggcatcatgtag

SEQ ID NO: 228889 - DNA, 1122 bp, synthetic construct
  misc_feature 1..1122: note = Description of Artificial Sequence: Synthetic coding sequence
  source 1..1122: mol_type = other DNA
atgctgattccgttttctatgaagaactgtttccaactcttgtgtaactgccaggtgccggcagcaggcttcaagaaaacggtaaagaatggactaatactgcagtcaatttccaacgatgtgtatcagaacctggctgtggaggactggatacacgaccacatgaaccttgaaggtaagcctattctgtttttttggcagaatagcccaagtgtagtgatcggcagacaccagaatccttggcaggaatgcaatctgaacctcatgagagaagaaggcatcaagctcgctcggaggcgttccggaggcggaaccgtttatcacgacatgggcaacatcaatctgacattctttaccactaaaaagaagtatgacagaatggaaaacctgaaactgattgtcagagcactcaacgcggttcaaccccagttagatgtgcaggctactaaaagatttgatcttctcttggacggccagttcaagatttcaggaacagcttctaaaattggcaggactacagcctaccaccattgcacactgctttgcagcactgacggaaccttcctgtcatctctactaaaaagtccctatcaggggattcgctccaacgcgacagcaagcataccctccctggtaaaaaatctactggagaaggaccctactttaacatgtgaagtcctgatgaatgctgtcgctacagagtatgccgcttaccaccagatcgacaaccacatccacctgatcaaccccactgacgagacactctttcctggaatcaatagtaaagccaaagaattgcaaacatgggaatggatctatgggaagacacctaagttctccatcaacactagcttccatgtgctctacgagcagtcacatctggagattaaggtgttcattgacattaaaaacggccgaatcgagatctgtaacattgaggcacccgaccactggctgccgctcgagattcgcgacaaactaaactcctcgttgataggctcaaagttctgcccaacagaaactactatgctcacgaacattctcttaaggacatgtcctcaggaccacaagctgaactcaaaatggaacatcctgtgtgaaaaaatcaagggcataatgtag

SEQ ID NO: 228890 - DNA, 1122 bp, synthetic construct
  misc_feature 1..1122: note = Description of Artificial Sequence: Synthetic coding sequence
  source 1..1122: mol_type = other DNA
atgctcatccctttttccatgaagaactgtttccagctgctgtgtaactgtcaggtgcccgctgctggctttaagaagacagtcaaaaacgggctgattctccagtctatctctaacgatgtataccagaacctggctgtcgaggactggattcacgatcatatgaatctggagggaaagcctatcctctttttctggcagaactcacccagcgtcgtcattggcagacatcagaatccctggcaggaatgtaacttgaacttgatgcgtgaagagggaattaagcttgcaagacgccgttccggcggtggcacggtctatcatgatatgggaaacataaatctgaccttttttactactaaaaaaaagtatgataggatggaaaaccttaaactcattgtacgtgccctgaacgcggttcaaccacagctggatgtgcaggctacaaagaggtttgatctgcttctcgatggacagttcaaaattagcggcaccgcctctaagattgggaggaccaccgcctatcaccactgcactctgctttgcagcacggacggcactttcctgtcttcactgttgaaatccccgtatcaaggcattcgtagcaatgctacagcttccattccatctcttgtgaagaatctcttggaaaaggacccaaccctgacttgtgaagtccttatgaatgccgtcgccaccgagtatgccgcataccatcagattgacaaccacatccaccttatcaaccccactgatgaaaccttgttcccagggatcaattccaaagccaaagaactgcagacgtgggagtggatttacggtaaaaccccaaaattttctattaatacatctttccatgtgctgtacgaacagtcacatcttgaaatcaaggtgtttatcgacatcaaaaacggccgaatagagatatgcaatatcgaagcccctgaccactggttaccactcgagatcagagataaattgaattcgagtttaattgggtccaagttctgcccaacagaaaccaccatgcttactaatatcttactccgaacctgtccacaggatcacaagcttaatagcaagtggaacatactatgtgagaagatcaagggcatcatgtag

SEQ ID NO: 228891 - DNA, 321 bp, synthetic construct
  misc_feature 1..321: note = Description of Artificial Sequence: Synthetic coding sequence
  source 1..321: mol_type = other DNA
atgcttattccatttagtatgaaaaattgtttccaactcctttgcaactgtcaagttcctgccgcagggttcaaaaagacggttaaaaacggccttattttgcaatctatctctaacgacgtctatcagaacctcgctgtggaagattggattcacgaccacatgaatctggaggggaagcccattctatttttctggcagaactctcccagtgtagtcattggtaggcaccaaaacccatggcaagagtgcaaccttaatcttatgcgggaggaggggatcaaattggcacgcagacgcagcggaggcggaacagtttag

SEQ ID NO: 228892 - DNA, 756 bp, synthetic construct
  misc_feature 1..756: note = Description of Artificial Sequence: Synthetic coding sequence
  source 1..756: mol_type = other DNA
atgcttatacctttttctatgaagaattgcttccagttgctgtgcaactgccaggttcctgccgctggctttaagaagaccgtgaaaaacggcctgattctgcagagtatctccaatgacgtgtatcagaacctagccgttgaggattggatacatgatcacatgaacttggagggcaagccaatcctttttttttggcaaaattctccctccgtggtgataggtaggcatcagaacccatggcaggagtgtaacctgaacctgatgcgagaagaaggcataaagctagctagacgacgctccggtggcggtaccgtgtaccatgatatgggcaatataaacttaacattttttactactaaaaagaagtatgaccgcatggagaatctgaagcttatcgtccgggcactcaacgcagtgcaacctcagcttgacgtgcaggccacgaaacgttttgatctcctcctggacgggcagtttaaaatttcaggcacagcctccaagattggacgcaccactgcttaccatcactgtaccttattgtgcagcactgacggaacatttttgtccagtctgctgaaatctccataccaaggcatcagatcgaatgcgactgccagcattccttccctggtgaagaacctgctggaaaaggatcccacactcacatgcgaggtgttgatgaacgccgtggccaccgagtacgccgcatatcaccagattgacaatcacattcatcttattaacccgacatag

SEQ ID NO: 228893 - DNA, 120 bp, synthetic construct
  misc_feature 1..120: note = Description of Artificial Sequence: Synthetic coding sequence
  source 1..120: mol_type = other DNA
atgctcatacccttcagcatgaaaaactgtttccagctcctttgcaattgccaggtccctgcagccggttttaaaaaaactgtcaagaatggactcatattacaaagtatttcgaattag

SEQ ID NO: 228894 - DNA, 408 bp, synthetic construct
  misc_feature 1..408: note = Description of Artificial Sequence: Synthetic coding sequence
  source 1..408: mol_type = other DNA
atgctcattccgttttcaatgaaaaattgcttccagctgttgtgtaattgccaggtcccagccgcaggcttcaagaagacggtaaaaaacgggctgattcttcagtcgatttcgaatgatgtctaccagaatctggctgtggaggattggatacatgatcacatgaacttggaggggaaacccattttgttcttctggcaaaacagcccatcagtggttatcggaaggcaccagaacccgtggcaggagtgcaatctaaatctgatgcgtgaggaaggcattaaactggcaagaagacgcagcggtggtggcacagtgtatcacgatatgggtaacatcaacctcacctttttcacaaccaagaaaaaatacgatcgtatggagaatctcaagctgatcgtgaggtag

SEQ ID NO: 228895 - DNA, 5300 bp, synthetic construct
  misc_feature 1..5300: note = Description of Artificial Sequence: Synthetic coding sequence
  source 1..5300: mol_type = other DNA
atgggaggcaaaaataaacagcggaccaaaggtaacctacgtccatccaattctgggcgagccgctgaactgctggctaaggaacagggtaccgtgcccggattcatcggtttcggcacctctcagtcagatctcggatatgtccccgctatacagggcgcagaggagattgacagcctggtggattcagactttcgaatggtgctcaggaagctgtcaaagaaagacgtgacaactaagctgaaggcaatgcaggagttcggtaccatgtgtactgagcgcgataccgaaactgttaaaggggttctcccgtattggccaagaatcttctgcaaaatcagcttagatcatgacagacgtgtgcgggaagcaacgcagcaagcctttgaaaaattaattctcaaggtaaagaagcagctggcaccgtacttgaagtcattgatgggctactggctgatggcacagtgtgatacgtacactcccgctgcattcgctgcaaaggacgcattcgaggcagcgtttcctccctctaaacagccagaggcaatcgcgttttgcaaagatgagataacctcggtgctccaggatcacctcatcaaagaaacgcctgataccctgagtgaccctcaaaccgttccagaggaggaaagggaagcaaagttttatcgcgtggtcacgtgctcactccttgctctgaagcgcctcctctgtcttctcccggataatgaactggacagtctggaagagaaatttaagtccttactaagccagaataaattctggaaatatgggaagcacagtgtcccccaaatccgctctgcatattttgagttggtcagcgccttatgccagcggatcccacagcttatgaaagaagaagcgagcaaagtgtcccctagcgtcttgttatccatcgatgacagcgatcctatcgtgtgccctgcgctctgggaggcagtgctgtacacattgactactatcgaggactgttggctgcatgtcaacgctaagaagagcgtgtttccaaagctgagcactgtgattcgtgaaggcggaaggggactggccacggtcatctacccataccttctgccttttatatctaagctgccccaatcaatcaccaacccgaagctcgattttttcaagaactttctgacatctcttgtcgcaggcctcagcaccgagcgaactaagacttcatcactggagagcagtgcggtcatctctgcattttttgagtgcctgagatttattatgcagcagaatttaggcgaagaagaaatcgagcagatgcttgtcaacgatcagcttatcccctttatcgacgcagtgctcaaggaccccggtcttcagcatgggcaattgtttaaccacttagcggagaccctgagcagctgggaggcgaaggccgatactgaaaaagatgaaaaaactgcccacaatctggaaaatgtactcattcacttctgggaacgtctttccgaaatctgtgtggccaaaatttctgagcctgaagctgacgtcgagtccgtcttgggcgtctccaacctactgcaggtgcttcagaaacctaagtcgtctctgaaaagcagcaagaagaagaacggcaaggtgcgattcgcagacgagattctcgagtcaaataaggagaatgagaagtgtgtgtcatctgagggtgagaagatagaaggctgggagctgaccacggaaccaagcctgacacataactcaagcggcctgctgtctccccttcggaaaaaacctctcgaggatctggtctgtaagctggctgatatttccatcaattacgtcaatgagaggaaatctgaacaacacctccgattcttatctaccctgttggattccttctcttcctctcgcgtgtttaaaatgctgctgggcgatgaaaagcaatctattgtgcaggctaagccactggaaatcgcaaaactggttcaaaaaaaccccgctgtacagttcctctatcagaagctgatcggctggttaaacgaggaccagagaaaagatttcggattcttagtggacattctctattctgctctccgctgctgcgataatgacatggaaaggaagaaggtgctggatgatctgactaaagtggatcttaaatggaattccctgctgaagattattgaaaaagcatgtccgagctctgacaaacatgcattggtaacaccgtggctaaagggggacatcttgggcgagaagctggtgaacctggccgattgtctatgcaacgaagacttggagtcgagggtgagttcggaatcacacttctctgagagatggaccctcctcagcctggtgttatcccagcacgtcaagaacgactatctgatcggagacgtctacgtggaacgcattatagttaggttgcacgaaactctgttcaagaccaagaagctgagtgaggccgagtcttcagatagctccgttagttttatctgtgacgtggcttacaactattttagcagtgctaaaggctgtcttctgatgcccagctccgaagacctgctgttgacactatttcagttatgcgctcagtccaaggaaaaaacccacctacccgatttcctgatttgcaagttgaagaatacttggctgtctggcgtgaacctgctggtgcaccaaaccgattcgtcttataaggaatccaccttcctgcacttgtccgcgttatggttaaagaaccaggtgcaagcctccagtctggacattaatagtctgcaggtactgctttctgcagttgatgacctgcttaatacactcctggaatctgaggactcttaccttatgggagtttacatcggcagtgtcatgccaaatgatagcgagtgggagaagatgcgccagagtctgccaatgcagtggctgcacagaccattgctagaaggccgtctcagcttgaattacgagtgcttcaaaactgattttaaagagcaggatattaaaaccctccccagtcatctgtgtacgtccgctctgcttagcaaaatggtgctcatcgctcttcggaaagagacagtgttagagaataatgagctcgaaaaaatcatcgccgagctcctatactcactccagtggtgcgaagaactggacaaccctcccattttccttattggtttttgcgagattctgcagaagatgaacattacttacgataacctgagggtactaggaaatactagcggacttctccagctgttgttcaacaggtcccgggaacatgggacgctctggtcactcatcattgccaagctaattctcagcagatcaatctcgtccgacgaagtaaaaccccactacaaaagaaaggagtcattcttccccttaaccgagggcaacctgcacacgattcagtctttgtgccccttcttgtcaaaggaggaaaagaaggagttctctgctcagtgcattccggctctcttgggttggaccaaaaaggacctctgtagcactaatgggggatttgggcacctggcaatcttcaactcctgtctacaaaccaagtccatagatgacggagaactgttgcatggcatcctgaaaatcatcatttcatggaagaaggagcacgaagacatcttcctcttttcctgcaatctctctgaggccagtcctgaggttctcggggtgaatatcgagattattcgtttcctctctctcttcttgaaatactgttcgtctcccctggcggagtctgagtgggactttatcatgtgtagtatgctcgcctggctggagacaaccagcgagaatcaggcgttgtatagtattcccctggtccagttgtttgcctgcgtctcttgcgacttagcttgcgacctcagtgcctttttcgacagtacaaccctggataccattgggaatctgcctgtgaatcttattagtgagtggaaagagtttttttcccagggtatccattccctgctccttccgatccttgtcaccgttactggcgagaacaaagacgtgtccgagacttcgttccagaacgctatgctcaagccgatgtgcgaaacattgacctacatttccaaggaacaactgctgagtcataaattaccagcacgtctcgttgcagaccagaagacaaatttgcctgagtacctccagacactccttaacaccctagccccactgttgctctttcgtgcaagaccagttcagatagccgtgtatcacatgctgtataaactcatgcccgaactgcctcagtacgaccaggataatttgaaaagttatggcgacgaggaggaggaaccagctctcagcccacccgcagccctaatgagcctgctctcaatacaggaggatctgctggagaacgtgctcggatgcatcccggtgggacagattgtgaccatcaaacctctctctgaggatttctgttatgtgttaggttatttgctcacttggaaactcatcctgacattttttaaggccgcttcttcccagttgcgcgcactgtatagcatgtatttgcggaagaccaagagcctaaacaaactgctttaccatctcttccggcttatgcccgagaaccctacatacgctgagaccgctgttgaggttccaaacaaggatcccaaaacattctttaccgaggaactgcaactgtccatcagggagactactatgcttccctatcacatcccacatctggcctgtagtgtgtatcacatgaccctgaaagacttaccagccatggtcagactttggtggaactcatcagagaaaagagtattcaacattgtcgaccgctttacctctaaatacgtctctagtgtgctgagcttccaagagatatcaagcgtccagaccagcactcagctcttcaacggaatgaccgtcaaggctcgtgccacaacaagggaagtaatggcaacgtacaccattgaagacatcgtgatagaactgatcattcaattaccctctaactatccactcggaagcataatcgtggagagcggaaagcgtgttggcgtcgctgtccagcagtggcgcaactggatgctgcagctttctacataccttacccatcaaaacggttcaattatggagggccttgccctgtggaaaaacaatgtagacaagcgtttcgagggggttgaggactgcatgatctgctttagcgtgatccatgggtttaactatagcctccccaagaaagcctgcagaacttgcaagaaaaagtttcactccgcctgcttgtataagtggttcaccagctcgaacaaatccacctgtccactgtgtcgcgagacattctttta

SEQ ID NO: 228896 - DNA, 1443 bp, synthetic construct
  misc_feature 1..1443: note = Description of Artificial Sequence: Synthetic coding sequence
  source 1..1443: mol_type = other DNA
atgggaggcaagaacaaacagagaactaaagggaatctcaggccctccaactcaggcagggccgctgagctgttggccaaagagcaggggaccgtcccagggtttataggtttcgggacctcacagtcagaccttggatatgtgccggcaatccagggtgctgaagaaattgattcactagttgacagtgacttcagaatggtgctgcggaagctgagcaaaaaagacgtaactactaaactcaaagcaaacgcaatgcaggagttcgggacaatgtgcacagaacgcgacacagagaccgtaaaaggtgttctgccctattggccgaggatcttctgtaagattagcctggaccatgacaggagggttagagaagctacccagcaggcgtttgaaaaattgatcctaaaagtgaagaagcagctggccccttacctaaagagtctgatggggtattggctgatggcccagtgtgacacgtacaccccggcagcatttgcggctaaggatgccttcgaagccgctttccccccttcaaagcagccagaggctattgctttctgcaaggacgagattacatctgttctgcaggaccacctgatcaaggagacgcccgacactcttagcgacccacaaacagtacctgaagaagagcgtgaggcaaagttctaccgcgtcgtgacatgtagtttgctggctctgaagcgattgctctgtctgctccccgacaatgaactggacagcctggaagaaaagtttaaaagcttactttcccagaacaagttttggaaatacgggaaacatagcgtgccgcaaattaggtcagcgtacttcgagctcgtgtccgcattgtgtcagagaattcctcagctgatgaaggaggaggccagcaaggtatctcccagcgtcctcctgagtattgatgactctgacccgattgtgtgtcctgcactgtgggaggcagttctatacaccctcaccaccattgaggattgttggcttcacgttaacgccaagaagtctgtgtttcctaagctgtctacagtgataagagagggaggcaggggccttgctacagttatctacccctacctgctgccgtttatctcaaagctgccacagagtatcacgaatccaaaacttgactttttcaagaatttccttacgtccctcgtggcaggacttagcaccgagagaacaaaaacctcctccctggagtcatctgccgtgatttccgcatttttcgagtgcttgaggttcatcatgcagcagaacctcggtgaagaggagatcgaacagatgctggtaaatgaccagctaatcccattcattgacgccgtgctgaaggatcccggactgcagcacggtcagctatttaaccatctggcagagacactgagcagctgggaggctaaagccgacaccgaaaaggacgaaaagtag

SEQ ID NO: 228897 - DNA, 5438 bp, synthetic construct
  misc_feature 1..5438: note = Description of Artificial Sequence: Synthetic coding sequence
  source 1..5438: mol_type = other DNA
atggaccgggtaggaggcggtaagggcccaggcggatcctactatagagtcagctccagcgcagccagaagtagaaagctctgccctggcagagtcaatcgcggactgagtgctcagtccacagccgctacagccacaatgggcggaaagaacaaacagcgcacaaagggtaatttgagacctagcaacagcgggagggcagctgaattactagccaaggagcaagggactgtgccgggattcattggatttggcacaagtcagtcagacctggggtatgttcctgctatccagggagctgaggagatcgattccctggtggacagtgatttccgcatggtgttgaggaagctgtccaagaaagatgtgaccacgaagctgaaagctatgcaggagttcggcaccatgtgtactgagagggacactgaaacagttaaaggggtgctaccctactggccaaggatcttctgcaagattagccttgatcacgatcggagagtgcgcgaggcgacgcagcaggcctttgagaaactcattctcaaggtcaagaaacagttggcaccttacctgaagtctttaatgggctactggttgatggctcagtgcgatacctacactcctgcagcattcgcagccaaggacgcattcgaggcggcttttcctccctctaaacagcctgaagctattgcattctgtaaagatgaaatcacatccgtactgcaggaccacttgattaaagaaactcctgacaccctgtcagacccccaaaccgtgcctgaggaggaaagagaggccaagttctaccgcgtagttacgtgctccctgcttgcattgaaaagactgctgtgcctgctgcctgacaacgaattagattcactcgaagagaagttcaagtctctgctgtctcagaacaaattctggaagtacgggaagcacagtgtgccacagatccgttccgcgtatttcgagctcgtgtcagctctgtgtcagcgaattccgcagctgatgaaagaggaggcctccaaagtgagcccttccgtgctgctgagtattgatgactcagaccccattgtgtgccctgctctgtgggaggcggtactgtacacacttactaccatcgaggactgttggcttcacgtgaacgcgaaaaaatctgtgttcccgaagttgagtaccgttattcgcgaagggggtaggggccttgccacagtcatttacccttaccttttacctttcattagcaagctcccacaaagcatcactaaccccaaactggatttttttaagaattttcttacttctctcgtggcaggcctcagcaccgagcgcaccaagacaagctccttagagtcttctgcagtcattagtgctttttttgagtgtctacggtttataatgcagcagaatttgggcgaagaggagatcgaacaaatgttggtcaatgaccagttaatcccttttatcgatgcagtgcttaaagaccccggactgcaacacggccagctgttcaatcacctggcagagaccctgtctagctgggaggcaaaggccgacacagaaaaggacgaaaagaccgctcacaacctggaaaacgtgctcatacacttctgggaacggttatcagaaatctgtgtagccaagatctctgagcccgaagctgacgtggaatcagtcctgggcgtttccaacctgctgcaagtgcttcagaagccaaagagcagcctaaagagcagcaagaaaaaaaatggcaaggtgcgctttgctgacgagattctggagtccaacaaagaaaatgagaaatgtgtgagctcagaaggggagaagattgaaggttgggaactcacaacagaaccgtctttgacacataactccagtggcctgctctcacccctgcggaaaaaacccctcgaagatctggtgtgcaagctggctgacatctctatcaactacgtcaatgaacgcaagagcgaacaacatctgcgttttctgtcaactttgctggactctttctctagtagccgggtgtttaagatgctcctcggcgatgagaaacagtcaatcgttcaggcgaagcccctggagatcgccaaactggtgcagaaaaacccagccgttcagtttctctatcagaaactcattggttggttgaacgaggaccaacgcaaggatttcgggttccttgttgatatactgtacagtgccctcagatgctgtgataacgacatggaaagaaaaaaagtcctggacgacttgacaaaggttgacctaaaatggaacagcctgttgaaaattattgagaaggcttgccccagcagcgacaaacatgcactggttaccccctggcttaagggcgacatattaggggagaaactggtgaacctggccgactgtctgtgtaatgaagatctggaatcccgcgtttcatcggaaagccacttctccgaacgctggacgctcctctcgcttgtcctgagccaacatgtgaaaaatgactacctgataggtgatgtctacgtcgagcggataatcgtccgtctgcacgagaccttgttcaaaactaagaagctgtcagaagcagagtccagtgacagtagcgtctccttcatctgcgatgtggcgtataactacttttcaagtgccaaggggtgtctgctgatgccctcctccgaggacctgttgttgacgctgttccagctgtgcgcccaatctaaagagaagacacacctccccgacttccttatttgcaagttgaagaatacctggctgtctggggtcaacctgttggtacatcagactgattcgagttacaaagagtccaccttcctccacctgtctgccctgtggctcaagaaccaggtccaggcttcctcactagacatcaatagcttgcaagtgttattatccgctgtcgatgacctgctcaatacacttctggaaagtgaagactcctacctaatgggggtctacatcggaagcgtcatgccgaacgactcagagtgggaaaaaatgaggcagtctctgcccatgcaatggctgcaccgacccctgctagagggaaggctcagcctcaactacgagtgttttaagaccgactttaaggagcaggacatcaagacccttccttcgcatctgtgtacgagcgctttacttagtaagatggtgctgatcgctttgagaaaagagacagtcctggagaataacgagctggagaaaatcattgcggagttgctatacagcctgcagtggtgcgaggaactggacaacccccctatcttccttattgggttctgcgaaatactacagaagatgaatattacttatgacaatctgcgcgtccttggcaatacctccggcttgctgcagctgctcttcaataggagccgggagcacggaaccttatggtccctcattattgcaaagctgattctgagcaggagcatctcttctgacgaggtcaaaccccattataagagaaaggaatcctttttccccttgactgaagggaatctccatacaatccagagtttgtgtccctttttgagtaaggaagaaaaaaaggagttttccgcgcagtgcatcccagcgctactgggttggaccaaaaaagatttatgcagtacgaatggtggttttggtcatctcgcaatatttaactcatgcctccagaccaagtcaatagacgacggagaactgttgcacggcattctgaagatcatcatatcttggaaaaaggaacatgaagatatctttttgttctcatgcaacctgtctgaggcctctccagaggtgctcggcgtgaacattgaaatcatccgtttcttgtccctgtttctgaaatactgcagcagtccgctcgccgagagcgagtgggatttcatcatgtgcagcatgctggcatggctcgagaccacgtccgagaatcaggccctttactccataccgttggtgcagctgttcgcatgcgtttcctgtgatcttgcctgtgacctatcggcgttcttcgactctaccaccctggataccataggcaacctccccgtgaatttaatttccgaatggaaggagttttttagccagggcatccatagcctcttactgccgattttggtgacggttaccggggagaacaaagacgtgagtgaaacaagctttcaaaatgctatgttaaagcctatgtgcgaaaccctgacttacatcagcaaagagcaacttctttctcataagttgccagccagattggtcgcagatcagaagactaacctgcctgagtatttacaaacactgctgaacaccctggccccattgctgctcttcagggctcggccagttcagattgccgtgtatcacatgctttacaagttgatgcccgaactcccccaatatgaccaagataacctgaagagttatggagacgaggaagaagaacccgctttgagtccccctgctgctctgatgagtctcctgtctatccaggaggatttgctagaaaatgtcttgggctgtatccccgtgggccagatcgtgacaatcaagcctctctccgaggacttttgctacgttttgggttacttgctcacctggaagctgatcctcactttttttaaggcagctagctctcagttgcgcgcactttattctatgtacttaaggaagactaagagtctgaacaagctcttgtatcatctttttaggttaatgcccgagaaccccacctacgcagagactgcagtggaggtcccgaacaaagatccaaaaaccttttttaccgaggagcttcagctgtctattagggaaaccaccatgcttccctaccacattcctcatttagcatgtagtgtttaccatatgaccttgaaagatcttcccgcaatggtcagattgtggtggaatagtagtgagaaacgcgtgtttaacattgtggatcggtttacaagtaaatacgtgtcgagcgtcctgagcttccaagagatttcctctgtgcaaacatccacgcaactattcaatgggatgacagtcaaggccagagctacgacacgcgaagtgatggcaacatacactattgaggacattgtcatcgagttaatcatccaactcccatctaattacccccttgggtctatcatcgtcgagagtgggaaaagggttggcgtcgcagtccagcaatggcggaattggatgttgcagttaagcacttacctgacgcatcagaatggtagcatcatggaaggcctcgcgctttggaagaacaatgtggataaacgatttgaaggcgtagaagactgcatgatatgcttcagcgtgatccacggattcaactactcactccccaagaaagcctgcaggacttgcaagaagaagtttcattccgcttgtttatataagtggttcactagctccaacaagtcaacttgcccgctgtgccgcgagacctttttcta

SEQ ID NO: 228898 - DNA, 1404 bp, synthetic construct
  misc_feature 1..1404: note = Description of Artificial Sequence: Synthetic coding sequence
  source 1..1404: mol_type = other DNA
atgaaaaatcagaacggcaccttcaaggactgggctaatgccaatgtatcaaggcaaatcgaagacacagtgttgtacggatactatacgctttactccgtgatcctgttctgcgtgttcttttggatcccttttgtatatttttactacgaggagaaagacgatgacgacacttctaagtgcacccagatcaaaaccgccctgaagtatactctgggcttcgtggtgatttgtgcacttctcctcttagttggcgctttcgtccctttaaatgtgcccaataacaagaactcgaccgaatgggagaaggtcaagtccttgtttgaggagctggggagctcacacggcctggccgctctatcttttagcatctccagcctgacacttatcgggatgctggctgctatcacatacactgcttacggtatgtcagccctcccgctaaacctcatcaaaggcacccgctccgccgcatacgagcgtctagaaaacactgaggacatcgaggaagtagagcagcatattcagaccataaaaagcaagagcaaggacggcagacctctccccgcacgagataagagggcgctaaaacagttcgaagagcgcctcagaactcttaaaaagcgggagagacatctggagttcatcgaaaattcttggtggacgaaattctgtggggcactgcgccctctcaagatcgtctggggcattttttttatactagtggctcttttgtttgtaatttccctcttcctgtcaaatttagacaaagctctacactccgccggaatcgattctggcttcataattttcggtgccaatctgtccaacccactgaacatgctcctgccactgctccagactgtgttcccactggactacattctcatcactatcataattatgtatttcatatttacatctatggctggcatccggaatattgggatctggtttttttggattaggctctacaagataaggaggggacgaactcggccacaagcgctgctgtttctgtgcatgattttgctcctaatagtcctgcatacgagctacatgatttacagcctcgccccacaatacgtgatgtacgggagccagaactatctgatcgagactaacatcacatcagacaatcataaaggcaattcaacactgtcggttccaaagcgctgcgacgccgatgccccagaagatcagtgtactgtcactcggacttaccttttcttgcataaattttggttttttagcgcagcttactatttcgggaattgggcttttctgggcgttttcctcatcggtctaattgtttcctgctgcaaggggaaaaagagtgtaattgagggggttgatgaggatagtgacatttcagatgacgagcccagtgtgtactctgcctag

SEQ ID NO: 228899 - DNA, 1623 bp, synthetic construct
  misc_feature 1..1623: note = Description of Artificial Sequence: Synthetic coding sequence
  source 1..1623: mol_type = other DNA
atggccacatcaggggcagcaagcgcagagctggtcattgggtggtgtatctttggattactccttctggccatcttagcattctgttggatctacgtcaggaagtaccagagtcggagagaatcagaggtcgtgtcaacaattaccgctatctttagccttgcaatcgccctcattacatccgctctcttgccagtggacatctttctcgtgagctatatgaagaatcaaaatggcacctttaaggactgggctaatgcgaacgtcagcaggcagattgaggacacagtactctacggttactacaccttgtattcagtgatcctgttttgcgttttcttctggatccccttcgtgtacttctattacgaggagaaggatgatgacgacactagcaaatgcactcagattaagacagccctcaagtataccctgggcttcgtggtgatatgtgccctgctccttctggtgggggctttcgtgcctttaaacgttccaaacaataaaaattcaacagaatgggagaaggttaaaagcttattcgaggagctggggagcagccatggcctggctgccttgtcattctccatttctagtcttactctcattggtatgctcgcggcaattacctacacagcatacggaatgtcagctctgcctctcaacctcatcaaggggacacgatccgcagcttacgagcgtctggaaaacactgaagacatcgaagaggtggagcagcacattcagaccattaagtccaagtcaaaagacgggcgtcctcttcctgcgagagacaaaagggcacttaaacagttcgaggagagactccgcacattgaaaaagagagagcgccacctggaattcattgagaatagctggtggactaaattctgcggggcactacgacccttgaaaattgtgtggggcatcttcttcatcctggttgcgctactgttcgtaatctccctgttcctttccaacctagacaaagcactgcactctgccggaatagactctgggtttattattttcggcgcaaatctgtccaatcctctgaatatgctgctgccactgctgcagaccgtattccccttagactacatacttatcaccatcataatcatgtatttcatcttcacaagcatggccggtattaggaacatcgggatttggttcttttggatcaggttatataagatccggagaggcagaacacgcccacaggcacttctttttctgtgtatgatcctcttgctgatcgtgctgcatacatcctatatgatatactcactggcgcctcagtacgtaatgtacgggagtcagaattatcttatcgagaccaatataacatcagataatcataaaggcaattcaacactctcagtccccaagagatgcgacgccgacgctccggaggaccagtgcacagtcacaaggacctacttatttctccacaaattctggtttttttcggcagcttattatttcgggaactgggcctttttaggtgtgttcctaataggccttatagtgtcttgttgcaaggggaagaagagcgtgatcgagggcgtagatgaagacagcgacatttccgacgatgagccatcagtgtatagtgcatag

SEQ ID NO: 228900 - DNA, 939 bp, synthetic construct
  misc_feature 1..939: note = Description of Artificial Sequence: Synthetic coding sequence
  source 1..939: mol_type = other DNA
atgtcgtaccagaagaaacagcccactccacagccacccgtggactgcgtcaagacatcgggcggtgggggaggcggaggtggatctgggggaggcggttgtggtttcttcgggggaggcggatctggcggtggttcctcaggctcagggtgtggttatagtggaggaggcggttatagcggcggaggttgcggcggtggctcatcagggggaggtggcggaggtggcatcggcggttgcggcggagggtcaggtgggtctgtgaagtattccggcggaggcggtagctccggtggaggttctggatgcttcagtagtgggggaggaggttctggctgttttagctctggcggaggcggatcatcaggcggtggatccggctgcttttccagcggcggtgggggaagctccggcggtggatctgggtgttttagttctggcggaggaggcttttcaggccaggctgtacaatgccagtcatatgggggtgtctcttccggtggatcatctggtgggggatcgggctgtttcagtagcggcggtggaggcggatccgtatgtggctatagcggtgggggtagcgggtgtggtggaggctcctctgggggttcgggaagtgggtacgtgtcatcacagcaggtgacacaaactagttgcgctccacagccttcatacgggggtggtagctccggaggtggtggcagtggagggtcgggctgcttttctagcggaggtggcggaggttcttccggatgcggcggtggctcgagtggcatcggcagcggatgtattatctccggaggaggttccgtgtgcggcggaggatctagtggtggtggcggaggtggtagttctgtcggaggaagcggtagtggtaagggggtaccgatctgtcaccaaacacagcaaaagcaggctccaacatggccctcaaagtag

SEQ ID NO: 228901 - DNA, 1002 bp, synthetic construct
  misc_feature 1..1002: note = Description of Artificial Sequence: Synthetic coding sequence
  source 1..1002: mol_type = other DNA
atgtcttatcaaaagaaacagcccacaccccagcccccagtcgattgcgtgaaaaccagtggcggagggggaggtggaggcggttctggcggaggaggttgcggtttttttggtggcggtggaagtggcggagggtcaagcgggtccggctgcggttactctgggggaggtggatacagcggtggaggctgcggtgggggatcttccggaggcggtggaggcggtggcatagggggatgtggcggtggttctgggggaagcgtgaaatactcgggcggtggcggttcctccggcggaggatcaggttgcttctcttctggtgggggtgggagtggatgtttctctagtgggggtggcggaagctctggcggtgggagcggatgtttttcgagcggcggaggtggctcgagtggtggcggttctggttgcttttctagcgggggagggggattctctggtcaggccgtgcagtgccaatcctatggcggagtgtccagcggcggtagcagcggcggtggctcaggatgtttcagcagcggagggggaggtggtagtgtttgtgggtactccgggggagggagcgggtgtgggggaggttcgtctggcggatcaggcagcggttacgtatcctcccagcaggttacccaaacaagctgcgctccacagccttcctatggaggaggggtgcggcgtagaagacagcgtaggaaacgcctcttgttgcaacggagggggagacgcgagcttaggttacgtcggcgtttgttaagggactggcagcgacttcaccatcagtggcgcggtttacggctacggagatggttcctttggcgtcggagaaggcggttactacgtggatggctgcgcgaatggcagggtcggcctgatttgcctccagaccccgcagaagcaggggcttacttagcagtgcaaatcgatcccccaggctatcacggaggtgagggcgtggggggtgttttccagggccatagatgggcctag

SEQ ID NO: 228902 - DNA, 927 bp, synthetic construct
  misc_feature 1..927: note = Description of Artificial Sequence: Synthetic coding sequence
  source 1..927: mol_type = other DNA
atggacgctctgaaatctgcgggtagagccctcatacggtcaccatccctcgctaaacagtcttggggagggggagggcgacatcggaagttgcctgagaattggacggatactagagaaacgctattagaaggcatgctgttcagtctgaagtacctcgggatgacactggtggagcagccaaagggggaagaactgagcgccgctgcgattaagaggattgttgcaaccgcgaaagcctctggcaaaaagcttcagaaggtcacccttaaggttagtcctagaggcataatcctgaccgataacttaacgaatcagctgatcgagaatgtctccatctataggatcagttattgcactgctgacaaaatgcacgataaagtcttcgcctacatcgctcagagccagcacaatcagtccctggaatgccacgctttcctgtgtaccaagcgaaaaatggcccaagctgtgactctcacagtcgcccaggcatttaaggtggctttcgagttttggcaggtgtctaaggaggagaaagagaagcgagataaggcttctcaggaggggggtgacgtcctgggggcaagacaggactgtactccctccctaaagagcctggtggcgaccgggaacctgctggacctggaagagacggccaaggccccattatctaccgtgtctgcgaacactacgaacatggacgaggtgccgcgacctcaggccttgtctggctcatccgtggtgtgggagctggatgatggactggatgaggcttttagccggctggcacagagccggacaaatcctcaagtgctcgacaccggactgacagcacaggatatgcattacgcccagtgcctgtcccctgtggattgggacaagccagatagctctggcactgagcaggacgatttgttttctttctag

SEQ ID NO: 228903 - DNA, 810 bp, synthetic construct
  misc_feature 1..810: note = Description of Artificial Sequence: Synthetic coding sequence
  source 1..810: mol_type = other DNA
atgtcatctgatcatttaaacaactccaccctgaaagaagcacagttcaaggatttgttcctgaaaaaggccgagcttgagtttgctcagatcattattattgtggtagtggtgacagtcatggtggtggtaattgtatgtttactcaatcactataaagtgtccacacgatctttcatcaatcgccctaaccagtctcgccgtcgcgaggacggacttccccaggagggctgtctctggccgtctgacagcgctgcaccacggctgggcgctagcgagataatgcacgccccacggtccagggaccgttttaccgctcccagctttatccaaagagaccgattcagcaggttccagccaacatacccctatgtacagcacgaaattgacctgccgcctacaattagcctctcggacggcgaggaaccccctccataccaagggccatgtacgctccaattgcgggacccggagcagcagatggagctcaatcgtgaaagcgttagagcccctccaaaccgaaccatattcgactccgatctcattgacatcgctatgtatagtggtggaccctgtccaccctcctcgaattcaggcatctccgccagcacatgctcatcaaatgggagaatggagggaccaccaccaacgtacagcgaggtgatgggccatcaccccggagcatcttttctgcatcatcagcgcagtaacgcacaccgcggatcccgtcttcagttccaacagaataatgcagaatctaccattgtgccaattaagggaaaagatagaaaacctggaaatctcgtgtag

SEQ ID NO: 228904 - DNA, 13635 bp, synthetic construct
  misc_feature 1..13635: note = Description of Artificial Sequence: Synthetic coding sequence
  source 1..13635: mol_type = other DNA
atgctgactcctccattacttttactgctaccattgctctccgccctggtggctgcagcgattgacgcacccaagacatgttcaccgaagcagttcgcctgtcgtgatcaaataacttgtatcagcaagggttggcggtgcgatggcgaacgcgattgcccggacggctcagatgaggctcccgaaatttgtccccagagtaaggcccagagatgtcagccaaacgagcacaactgcttgggtaccgagctgtgtgtgcccatgtctaggttgtgcaacggagtacaggattgtatggatggatctgacgaaggacctcattgccgtgagctccaggggaattgtagtaggctggggtgccaacatcactgtgtgccgacacttgacggcccaacctgttactgtaattccagctttcagttacaagcagacggcaaaacatgtaaggatttcgatgagtgtagcgtgtatggtacctgcagccagctgtgtaccaatacagatgggtcattcatttgcgggtgcgtggagggatacttactgcaacccgataatcgatcttgtaaggctaagaatgaacctgtggacagacccccagtgctcctcatagcaaattcacagaacattctcgctacctatctatcaggggcacaagtcagcacaataacccccacctctacccggcagacaacagcgatggacttcagctatgcaaatgagacagtatgttgggtccatgttggggacagtgccgctcagacacagcttaagtgcgcccgaatgcctggcctgaaaggctttgttgacgaacatactatcaatatctctttgtccctgcaccatgttgagcagatggcaatcgattggctgaccggcaacttctactttgtggacgatatcgacgaccgcatttttgtctgcaatcgcaacggagacacctgcgtaaccctcctggatctagaactttataatcctaagggcattgcgttagatccagctatgggaaaggtgttctttaccgactatggacagatccccaaggtggaacgctgcgatatggacggacaaaaccggaccaaattagtcgactcaaagatcgtattcccccatggaattactcttgacctcgtttctaggctggtctactgggcggacgcctacctcgactatattgaagtggtggattacgaggggaagggccgacagaccatcattcaaggaatccttatcgaacacctctatgggctcacggtgttcgagaattacctctacgccaccaacagcgacaatgcaaatgcgcagcaaaagacttctgtgatccgcgtgaataggttcaatagtaccgagtaccaagtcgtgacacgggttgataaaggaggggcattacacatttaccatcagcgcaggcagcccagggtccggtctcatgcgtgcgaaaatgatcagtacggcaagccgggagggtgctcagacatctgccttctcgcgaactcccacaaggcacggacctgtagatgccgaagtggtttcagtctgggctccgacggcaaaagctgcaagaagccagagcacgagctgtttttggtatacggtaaaggccgtcccggtataatccggggaatggacatgggggctaaagtcccagatgagcatatgattcccattgaaaacctgatgaacccccgtgcccttgactttcacgccgagactggttttatttatttcgctgacaccacatcttatctcatagggagacagaaaatcgacggcacagagagggaaacaatcctgaaggacggtatccacaatgtcgaaggggtcgccgtggactggatgggtgataatttgtactggaccgacgacggtcccaagaaaacaatctccgttgcccgactagagaaagcggctcagacaagaaaaacacttatcgaaggcaagatgactcacccgagggcaatcgtagtagacccccttaacggctggatgtactggaccgactgggaagaggatccaaaagactcgagacgaggtaggctggaacgtgcttggatggacggatctcatcgggatatctttgttactagtaagactgtgctttggcctaatggcctgagcctcgatatccccgctggcaggttgtactgggtggacgccttttacgacagaattgagactatacttcttaatggtaccgaccgaaaaattgtctacgaaggacccgagcttaaccacgcatttgggctctgccaccacgggaactatctcttttggacagagtatcgttctgggtcagtttatcggctggagaggggcgtaggcggagctccacctactgtgacgctacttcgtagcgagcgcccacccatcttcgaaattaggatgtacgatgcgcagcagcagcaggtcggaaccaacaagtgcagggtgaacaatggcggatgcagcagcctgtgtctggctaccccaggaagcaggcagtgcgcatgcgccgaagaccaagtgctggacgccgatggcgtcacatgcctcgcgaaccccagctacgtcccgcctccgcagtgccagccaggggagttcgcctgcgccaatagcaggtgcattcaggaaaggtggaaatgcgatggagacaacgattgcctggacaacagcgacgaagctcctgccctctgtcaccagcacacctgcccttcagatagatttaagtgtgaaaataatcggtgcataccaaacaggtggttgtgcgatggggataatgattgcggcaactctgaagacgagagcaacgccacatgcagtgctcgcacttgtccccctaaccagttctcctgtgcgtctggacggtgcatacccatctcctggacttgcgacctcgatgatgattgtggcgataggtctgacgaatcagcttcttgcgcctatccgacctgctttccactgacgcaattcacctgcaataacggcagatgcatcaatatcaactggaggtgcgataacgataatgactgcggagataactccgatgaagctggttgttcacactcatgttcttcaacccagttcaagtgcaattccggcaggtgtatccctgagcactggacctgtgatggggataacgattgtggggactattcagatgagacccacgcaaattgtacaaaccaggctacacggccacctgggggttgccacacagatgagtttcaatgtagacttgacggcctgtgcataccattgagatggaggtgtgatggcgataccgattgcatggattctagtgatgagaagtcctgcgagggcgttactcacgtgtgtgatccaagcgttaaattcgggtgcaaggattcagcccgatgcatttccaaagcctgggtttgcgacggagataatgattgcgaggataactcagacgaggagaactgcgagagcctcgcgtgtcggccaccctcccacccatgtgccaacaacaccagcgtgtgcctgccccctgacaaactctgcgatgggaatgatgattgtggcgatggcagcgacgaaggagagttatgtgaccaatgctcacttaataacgggggttgctcacacaattgctctgtcgcacccggagaagggattgtgtgcagttgtcctcttgggatggaattaggtcctgacaaccacacatgtcagattcagtcttattgcgccaaacatctgaagtgcagccagaagtgtgaccagaataagttttccgtgaaatgcagctgctacgaggggtgggtcttggaaccagatggtgaatcatgtagatctctcgatcctttcaagcccttcatcattttcagcaacagacatgagattagaaggatcgacctgcataagggtgattactcagttctggtgccagggctacgcaataccatagcactggacttccacttgtcgcagagcgcgttgtactggaccgatgtcgtggaggacaagatttatcgcggtaaactcctcgataacggggctctcactagcttcgaagttgtcatacaatacgggttagccacccctgagggtcttgcagtggactggattgccggtaacatatattgggtggagtcaaatctggaccagatcgaggtagcgaaactcgatggcactctccggactacattactggccggtgacatcgagcaccctcgcgctattgcgctggatcctcgggatggtatcctcttttggacagactgggacgcctctctaccacgcatcgaggccgcttctatgagtggagccggacgcaggacagtacacagagaaaccggttccggaggctggccaaacggactgactgtagactatcttgagaagagaattctgtggatagacgctagaagtgacgctatatacagcgcaaggtatgacgggtcggggcatatggaggtcctacgcggacacgaattcctgagccacccgttcgccgtaaccttgtacggcggtgaagtctactggaccgactggcgcacaaataccctggcaaaggcaaacaagtggacaggccacaacgtcacagtcgtccagcgaacaaatacccagcctttcgatttacaggtatatcacccgtcgcggcaacctatggccccaaacccctgcgaggctaatggagggcaagggccttgttcgcatctgtgcctcatcaattacaacaggaccgtcagctgcgcctgtccgcatttgatgaagctccacaaagacaacactacctgttatgagtttaagaagttcctcttatatgcacgtcaaatggagattcggggtgtggatctggacgccccatattataactatattatctcctttactgtccctgatattgataatgtgacagtccttgactatgacgcaagagagcagagagtgtactggtccgatgttcggacccaggctattaagcgtgcattcattaacgggactggcgtggagaccgtggtaagcgccgatctccctaacgcacatgggcttgcggtcgattgggtgtccaggaatttgttttggacatcatatgacacaaataaaaagcagatcaacgtggctagacttgatgggtccttcaagaatgcagttgtgcaaggtctggaacagccccacggcctcgtggttcaccccttaaggggcaaactgtattggacagacggggacaatatttctatggctaatatggatggctcaaacaggacccttcttttttccgggcagaaaggacctgtcggcctggccattgattttccagagtccaaactgtactggatttcatcaggaaaccacacaatcaaccgctgcaacctggatggctccggcttggaggtgatagacgcgatgagatctcagttagggaaagcgaccgcactggctatcatgggagataaactgtggtgggccgaccaggtgtccgaaaagatgggcacttgctcaaaggctgacggctccggaagcgtggtgcttagaaactctacaacgcttgtgatgcacatgaaggtctatgatgagtctatacagctagatcacaaaggcacgaacccctgttcagttaataatggcgactgcagtcaactgtgtctccccacgtcagaaaccaccagatcatgcatgtgtacagctggctactcactcaggtccggccagcaggcatgtgagggcgtgggaagttttctgctgtactccgtgcacgagggcatccggggtatccctcttgacccgaatgataaatctgatgctctggtgccggtgagcggcacctccctggctgtgggcatagattttcacgccgaaaacgacacgatttattgggtagacatggggctctccacaatttctagagctaaaagagatcagacatggagggaggacgttgtgaccaacggtatcggacgggtcgagggaatcgctgtcgattggattgccggtaacatctattggacagaccagggattcgacgtaatcgaggtggccaggctgaatggatccttcaggtacgtcgttatctctcaaggcctcgataaacctcgcgcaatcaccgtgcatccagagaaggggtatttgttttggacagagtggggccagtacccacggatcgagaggagcagactggacggaaccgagcgagtggtacttgttaatgtgtccatcagttggccaaacgggatctctgtggattatcaagatggaaagctgtattggtgcgacgcacgcacagataagatcgagcgcatcgatctcgagacaggcgaaaacagagaggtggtgctcagtagcaacaacatggatatgttttccgtttccgtgtttgaagactttatttactggtctgatcgcacccatgccaatggatcgatcaagcgcggatccaaggacaacgcaacagactccgtaccgctgcgaacaggtatcggggtgcagctcaaggatattaaggtctttaatagagaccggcagaaaggaaccaacgtctgcgctgtggcaaacggcggatgtcagcagctttgtctctataggggcagaggccagcgggcttgcgcctgtgcacacggtatgctggcagaagatggcgcatcctgccgcgagtacgcgggatatctgctctacagtgagagaaccatcctgaaatcaattcatctgtccgatgagaggaatctgaacgcacccgtgcaaccctttgaagacccagagcatatgaagaatgtcatcgcgctggctttcgattaccgagctggcaccagccccggtacaccgaatcggatttttttctcagacatccactttggcaacatccaacagatcaacgatgacggttcacgtaggatcacaattgtcgaaaacgtgggcagtgttgaaggtctggcgtaccaccggggttgggataccctgtactggacaagctacactactagtacgatcacaaggcacactgtcgaccaaacccgcccaggagcatttgagagggagacagtaattaccatgtctggagacgatcaccccagggcttttgtcctcgacgagtgtcagaacctgatgttctggactaactggaacgaacagcatccctcaattatgcgcgctgcattatctggagcgaatgtcctgaccctgatcgaaaaggacatacggaccccaaatggattagccatcgaccaccgggcagagaagttgtacttctctgacgccactctagacaaaatcgaacggtgcgaatacgacgggtcccaccgctacgtgatcctgaaatccgagcccgtgcacccgttcgggctggcagtctatggcgagcatattttttggacagactgggttaggcgggcagtacagagggccaacaaacatgtggggtctaacatgaaattgctgcgcgtggacatcccacagcagccgatgggcattattgctgtggctaatgataccaactcctgcgagttatctccttgtcggatcaacaacggcggttgtcaggatctgtgcctgctgacccatcagggccacgtgaactgttcgtgcagaggagggagaattcttcaggacgatcttacctgcagagccgtcaactcctcttgcagggcgcaggatgaatttgagtgcgccaacggtgagtgcatcaattttagtctgacttgcgatggcgttccgcactgtaaagacaagtcagacgaaaagcctagctattgtaactctaggagatgcaagaagacctttcggcagtgtagcaatggcagatgtgtaagcaacatgctctggtgcaatggcgcagacgactgcggtgacggtagcgatgagatcccttgcaataaaacagcatgcggtgtgggggagtttcgatgtcgcgatgggacctgtatcggcaacagcagcaggtgtaatcagtttgtggactgcgaggacgcaagcgacgagatgaactgctccgccactgattgttctagctacttcagacttggtgtgaaaggcgtgctgtttcagccctgcgaacgcacctcgctttgttatgccccatcatgggtgtgcgacggtgctaacgactgtggcgactatagtgacgagcgagattgccctggggtcaagcgcccacggtgtccacttaactacttcgcctgtccctccgggaggtgcatacctatgtcatggacttgcgataaggaggatgattgtgagcacggagaggacgagacgcactgtaataagttctgctccgaagcccagttcgagtgccagaatcatcgatgcatctctaaacagtggctgtgcgacggcagcgacgattgcggcgacggaagcgacgaagccgcacactgcgaaggtaaaacttgcggtccaagcagctttagctgtcccggtacgcatgtgtgcgtcccagagcggtggttgtgcgacggggacaaggattgcgcagacggggctgacgagtctattgcagctgggtgtctttacaattccacctgcgatgatcgcgaatttatgtgtcagaacaggcagtgtatccctaagcatttcgtgtgtgatcacgatcgcgattgtgcagatggcagcgacgaatcgcccgagtgcgagtatccaacctgcggaccaagtgaattcaggtgcgccaatgggcgatgcctctcatctagacagtgggagtgcgatggcgagaatgattgccacgaccagagcgacgaggcccctaagaatccccattgtacatctcaagagcataagtgtaacgcctcttcacaatttttgtgctcctcaggacgatgcgtggccgaagcccttctctgtaatgggcaggatgattgcggagattcatccgatgagcggggttgtcacatcaacgagtgcttaagccgcaagctgagtggatgctcacaggactgcgaggacttgaagataggctttaagtgccgctgccggcctggctttaggcttaaggacgacggcagaacctgcgccgacgttgacgagtgcagcacaaccttcccgtgcagccaaaggtgcatcaatacccacgggagctacaagtgcctgtgcgtggagggttacgcccctcgaggcggtgatcctcattcctgtaaggctgtcaccgatgaggaaccattcttgatattcgcaaatcgttactacttgcggaagctgaacttggatggatcaaactatacgcttctgaaacaggggctcaacaacgccgtggcactggattttgactatagagagcagatgatctattggacagatgtgaccacacaaggtagtatgattagaaggatgcatcttaacgggtccaatgtccaggtgcttcacaggactggcctctccaatcctgacggactggcggtcgattgggtcggaggtaatctgtactggtgcgataaaggcagagataccattgaagtgtctaagttaaacggtgcttaccggacagtgctggtctcctctggtctgcgggagccccgagctctcgtagttgatgtgcagaatgggtatttgtactggaccgattggggcgatcacagcctgatcggcaggatcggtatggatggaagcagccgtagtgttattgtagacaccaaaattacttggcctaatgggctgaccctcgattatgttactgagcggatctactgggctgatgcacgagaagattacattgaatttgcttctttagacgggagtaatcggcacgtggtgttatcccaggacattcctcacatcttcgctctgaccctgtttgaggactatgtttattggactgactgggagactaagtctatcaaccgagcccacaaaacgaccggcaccaacaagaccttgctaatcagcaccctgcacagacccatggacctgcatgtctttcacgcgctgcgacagccagatgtgcccaatcacccttgtaaagtgaacaacggcggttgcagtaatttgtgtttgctcagccccggaggtggccacaaatgtgcatgtcccaccaatttttacttgggttcggacggtcgcacatgtgtgagtaattgcaccgcctcccagtttgtgtgcaagaacgacaaatgcataccgttctggtggaagtgtgatacggaggacgattgtggggaccactctgacgaaccccctgactgtccggagtttaaatgtcggccaggccagtttcagtgctccaccgggatctgtaccaacccagcttttatatgcgacggagacaatgattgtcaagataacagcgatgaagctaattgtgacatccacgtgtgcctgcctagccagtttaagtgcaccaatactaacaggtgcatcccaggtatcttccgctgcaacgggcaggacaattgcggggatggtgaggatgaacgcgattgtcccgaagttacctgcgcacccaatcagtttcaatgctccattaccaaacgctgcataccacgagtttgggtgtgcgacagggacaatgattgcgtggacgggtcggatgagcctgccaactgcacccaaatgacgtgtggcgtggatgaatttcgatgtaaggacagtggtcggtgtattcctgccagatggaaatgcgacggtgaagatgactgtggcgatggcagcgacgagccgaaggaggaatgcgacgaacgcacatgtgagccttaccagtttcgatgcaagaataaccgctgtgtacccggaagatggcagtgcgactatgacaatgactgcggcgacaacagcgatgaggagtcctgcacacctcggccttgctccgagtcagagttttcatgtgccaatgggaggtgcatagctggcaggtggaagtgcgacggcgaccatgactgtgccgatggtagcgacgagaaagattgtacaccacgttgcgatatggatcagttccagtgcaagtcaggacactgtatcccactgcgttggcggtgcgacgcggacgccgactgtatggacggatccgatgaggaggcatgcggtactggcgtccgcacttgtccccttgatgagtttcagtgcaataatacactttgcaagccactagcgtggaagtgtgacggcgaagatgattgcggggacaattccgacgaaaaccccgaggaatgcgccagattcgtgtgcccacctaacaggccctttcgatgcaagaacgaccgagtgtgcctgtggattggacggcaatgtgacggcacagataattgtggagacggcacggacgaagaggactgcgaacctccaacagcgcatactacccattgcaaagacaaaaaagaattcctgtgtagaaaccaaaggtgccttagcagcagtcttaggtgcaacatgttcgacgactgtggcgacggttcagatgaggaagattgcagcatcgatcccaagctgactagctgtgcaacaaatgcgtcaatctgtggcgatgaggctagatgcgtgaggaccgaaaaggctgcttactgcgcctgtcgcagcgggttccataccgtccctggacaacctggttgtcaggacatcaatgaatgcctgcggtttggtacatgctctcagctgtgtaataacacgaaaggagggcacctgtgttcctgcgctcgaaattttatgaagacacacaacacctgcaaggcagagggatccgagtaccaggtgttatatatcgctgacgataacgaaattcgctccttgtttccagggcatcctcattcagcttatgagcaggctttccagggcgacgagagtgttcgcatcgacgcaatggacgtccacgtgaaagccggaagagtttactggaccaattggcacaccggcaccatatcttataggagcctacctcccgctgcccctcctaccacttcaaatagacatagacggcagattgaccggggagtgacacatctcaatattagcggactaaagatgccaaggggtatcgccattgattgggtcgctggaaatgtttactggaccgattctggacgtgacgtgatcgaggtcgcgcagatgaagggagaaaatcgcaaaaccttgattagcgggatgatagacgagccccatgcaatcgtggtagacccccttcgtgggactatgtattggtctgactgggggaatcatccgaaaatcgagactgctgctatggacgggacccttagggaaacactggttcaggataacattcagtggcctacgggtctcgccgttgattaccacaatgaacggctgtattgggccgacgctaagctgtcagttatcggatccatcagactgaatggcactgaccctattgtggcagccgacagtaaacggggtttaagccacccctttagcatcgacgtgtttgaggactatatctacggtgtaacatacattaacaaccgggtgttcaaaatccacaagtttggacatagccctctggtgaatttaaccggcggactctcccatgcatcggatgttgtgctgtatcaccagcacaaacagccagaggtcaccaatccctgcgacaggaaaaaatgcgagtggctgtgtctgctcagcccttcaggcccagtctgtacctgccctaacggtaagcgtttagataatgggacgtgtgtgcctgtgccgtccccaacccctccaccagatgctcccaggccaggcacttgtaacctacagtgcttcaatggaggatcttgttttcttaacgctcgcagacagcccaagtgtcgttgccaacccaggtacaccggggataaatgcgagctggatcagtgctgggaacactgtagaaacgggggtacatgtgctgcttcaccctcagggatgcccacttgtcgttgccctaccggatttaccggccctaagtgtacccaacaagtgtgtgcagggtactgcgccaataatagtacctgtacagttaatcaggggaaccagccgcaatgtcgatgcctgccaggtttcctgggagatcgctgccagtacagacagtgcagcggctactgtgagaattttgggacatgtcaaatggcagccgacggatccaggcagtgccgctgcactgcatatttcgaaggttccaggtgcgaggtcaacaagtgtagccggtgtctcgaaggagcctgcgtggtaaacaaacagtctggggacgtcacctgcaattgcaccgacggacgggtggcacctagttgtctgacttgtgttgggcactgctccaacgggggatcctgtactatgaacagcaagatgatgcctgagtgccaatgcccaccccacatgacagggccacgatgtgaggagcacgttttctctcaacagcagcctggccacattgctagcattttaattcctttactgctgcttctgctgctggtcctggtggcgggtgtggtattctggtacaaacgcagggtccagggtgccaaggggttccagcatcagcggatgaccaacggcgctatgaacgtggaaatcggaaaccctacctataaaatgtacgaaggcggagaacccgacgatgttggcggtttgctggacgcggactttgccctggaccctgataaacctaccaatttcactaatcccgtatacgcgacactctacatggggggacacgggtcccgccattcccttgcttcgaccgatgagaaacgtgaacttctcggccgaggcccagaagatgaaatcggggatcctttggcttac

SEQ ID NO: 228905 - DNA, 2142 bp, synthetic construct
  misc_feature 1..2142: note = Description of Artificial Sequence: Synthetic coding sequence
  source 1..2142: mol_type = other DNA
atgctcctggctactcttctgctactcctgctgggcggagcgctggcccatcccgatcgcatcattttccccaatcacgcttgcgaggacccccctgcagttttgctggaagtgcaaggaaccctccaacgaccattggtaagagactcccgcacttctcctgcgaactgtacatggctgatcctcggcagcaaggagcagacagtaactattcgctttcagaagctccaccttgcctgtggtagtgagcggttgactctccgcagccctctgcagccccttatcagtctttgcgaagcaccgccatcgccgctgcagttgccaggtggaaacgtgaccatcacatactcctatgctggagcaagagctcctatgggacaaggcttcctgctctcatattcccaagattggctcatgtgtctgcaggaggaatttcagtgcttgaatcataggtgcgtgagcgctgttcagcgatgcgacggcgtcgacgcgtgtggcgacggctcagacgaagctgggtgttcttccgaccctttccccggtctcactccacgcccagtgccatccctcccgtgtaacgttactttagaagacttttatggagtgttctcctctcctggatacactcaccttgcaagtgtgagtcatccacagagttgccactggctgctggacccccacgacggaagaaggttggcggttagatttactgctctcgatttgggattcggtgatgcagtgcacgtctatgatggcccaggccctcccgagagctcccgactccttcgctcactaacgcattttagtaacggcaaggcagtgaccgttgagactctgtctggtcaggccgttgtctcttatcacactgtggcttggtctaacggaagaggcttcaacgcaacctatcacgtgcggggttactgcctgccatgggataggccgtgtggtttggggtctggtcttggcgctggcgaaggcctcggtgagcgctgttattcagaagcccagcggtgtgacggatcttgggactgcgcggacggcactgacgaggaagactgccccggatgcccgccagggcattttccctgtggcgctgccggaacaagtggggcaacggcgtgttacctgcctgctgatagatgcaattaccagactttctgtgcagatggggcagacgagcggagatgccgccactgtcagcctggaaatttcaggtgtcgcgacgaaaagtgcgtttatgagacctgggtttgcgatggacagcccgactgtgccgacgggtcagacgagtgggactgctcctacgtgctgccaaggaaggtcattacggccgcagtgatcggaagcctggtgtgcggtctcctgttggtaatcgcgcttggttgtacgtgtaagctgtatgccatcagaactcaggagtatagcatctttgcccctctatcccgcatggaagcggaaatcgtgcaacagcaagcacctccgtcgtatgggcagctaatagcccagggcgctattcctcccgtggaggatttccccaccgaaaaccccaacgacaatagtgtgttggggaacctgagatcgctactacaaatcctgaggcaggatatgacccctggcggagggccaggagcaagaaggcgtcagcggggtcgactgatgcgtaggttggttcgcagacttcgtagatggggcttactgcctcgtacaaatacacccgctagggcctccgaggcaagaagtcaggtgactccatcagccgctccgctggaggccttagacggcggtactggcccagcacgggagggaggtgcggtgggtggacaggatggggagcaggcgccacccctccctatcaaggctcctctgccttcagcatccacttcgcccgctccgaccacagttccggaggcacccggacccctgccctcgcttcccttagagcccagcctcctttctggcgtcgtacaggccttaaggggcaggctgcttcccagtcttggccctccaggtccgactcgatcacctcccggaccgcacacggccgtgctcgctctggaggacgaggatgatgtgctgctggtgcccctggcagagcctggcgtctgggtggccgaggcagaggacgaaccgctgctcacctag

SEQ ID NO: 228906 - DNA, 1671 bp, synthetic construct
  misc_feature 1..1671: note = Description of Artificial Sequence: Synthetic coding sequence
  source 1..1671: mol_type = other DNA
atgctgttggccacactgctgttgctgctgctgggaggtgccctcgcacaccctgaccgtatcatctttccgaatcatgcttgtgaagacccccctgctgtattgctggaggtgcagggaaccctgcagagaccactggtgcgtgattcccggactagccccgctaactgcacctggctgatactgggatccaaagaacaaaccgtgacaatcagatttcaaaagctgcatctcgcatgcggctccgaacgtctgacactgagatcccccctgcagcccctgatcagtctttgtgaggcacccccatcccctctgcagttgcccggaggtaacgtgactattacttacagttatgcgggtgctagagctcccatgggccaaggttttctgctgagttactcccaggactggctgatgtgtctccaagaggagttccaatgtctcaaccaccgatgtgtgtccgcagtgcaacgctgcgatggagtggacgcctgtggcgatggctcggacgaggcaggttgcagttcagatcccttcccaggcctcacccctaggccggttccctcactgccatgcaatgttactctagaggatttctatggtgtgttttcctccccaggctacacgcacctagccagtgtctcccacccacaatcatgccattggttgcttgatcctcacgatggccgaaggctggcagtgaggttcaccgccctcgaccttggcttcggggacgccgtgcatgtgtacgatgggccagggccaccagaatccagcaggctcctccggtcccttacccatttcagcaatggcaaggccgtcaccgtggaaacactctcaggccaggctgttgtaagttaccacaccgtggcttggtctaacggaagaggatttaacgccacttatcacgtgaggggatactgcctcccgtgggacaggccttgcggcctgggctctggtctaggggcaggcgagggcttaggagagagatgctattccgaagcccagcggtgtgacggttcttgggactgtgcggatggtaccgacgaggaagactgccccggatgtccacccggacatttcccctgcggcgctgccggtacctccggggcaacagcatgttatctgccggcagatagatgcaattatcaaacgttctgtgccgacggtgccgatgagaggagatgtagacactgtcagcccggtaatttccgatgcagggatgagaagtgcgtgtacgagacttgggtttgtgacgggcaacccgactgcgctgacggctcggacgaatgggattgctcgtacgtgcttcccaggaaggtgatcaccgccgctgtaattggctccctggtttgcgggctgctgctcgtgatagctttagggtgcacttgtaagctctacgccatccggactcaagagtactctatctttgctcccctgtcacggatggaagccgagatcgtgcagcaacaggcacccccttcctacggacaactaatcgcacagggggcaattcccccagttgaggacttccctaccgaaaatcccaatgataactccgtgcttggtaatctgcggtctctgctgcagattcttagacaggacatgacccccggagggggtccgggagcacgtagaagacaaaggggtcggctgatgagaagactgtag

SEQ ID NO: 228907 - DNA, 13968 bp, synthetic construct
  misc_feature 1..13968: note = Description of Artificial Sequence: Synthetic coding sequence
  source 1..13968: mol_type = other DNA
atggatagaggtcccgcagctgtcgcatgcacgctgctccttgcactggtagcctgcctagcaccggctagcggacaagaatgtgattcggctcattttcgttgcgggagcggtcactgtatcccggcagactggagatgtgacggaacaaaggattgtagtgacgatgctgacgaaatcggctgtgcagtagtgacatgccagcaaggatattttaaatgtcagtccgagggtcagtgcatcccaaattcttgggtctgcgaccaagaccaagactgcgatgatggaagcgatgagcggcaggactgcagtcagtctacttgtagtagccaccagattacttgttctaacggacagtgcatcccttctgaatatcgatgcgaccatgtcagggattgcccagacggcgctgacgagaatgactgtcaataccctacctgtgagcaactcacctgcgacaacggagcctgttataatacttctcaaaaatgtgattggaaagttgattgccgcgatagctctgatgagattaactgcactgagatttgcttgcataacgaattctcatgtggaaatggtgagtgcattcctagggcttacgtgtgtgatcacgacaatgactgccaggacggctctgacgagcatgcctgcaattatcccacgtgtggaggttatcaatttacttgcccgagcgggcgttgtatctaccagaactgggtctgcgatggggaagatgattgcaaggacaatggagacgaagacggctgcgagagcgggcctcacgacgtgcataagtgcagcccgagagaatggagctgccctgagtccgggagatgtatcagtatttataaggtatgcgacgggatcctggattgtcccggtcgagaagatgaaaacaatacgtccactggcaagtactgctcaatgaccctgtgttcagcgctgaattgccagtatcagtgccacgaaaccccttacggtggagcatgtttttgtcctccaggctacatcatcaaccacaatgacagccggacctgcgttgaatttgatgattgtcaaatttgggggatctgtgatcaaaaatgtgaatctaggcctggaaggcacctgtgtcactgcgaagaaggttatatcctcgagcggggacagtactgtaaggcgaatgactcgttcggagaagcttccattatctttagcaacggacgtgaccttttgatcggggacatacacgggagatccttccgcatactcgtggagtcacagaaccggggagttgctgtcggagttgcatttcactaccatcttcagcgggtgttttggacagacacagtgcagaacaaggtgttctccgttgatatcaacggcctgaatattcaggaggtgctcaacgtttcagtagagaccccggaaaacttagctgtggattgggtgaataataagatttacctcgtagaaaccaaggtgaaccgtattgacatggtaaatctcgacggctcgtaccgggtgaccttaataacagaaaacctgggacatcctcgcggtatagctgtcgaccccaccgttggttacttatttttctccgattgggagtccctgtccggtgagccaaagttggagcgggcttttatggacggcagcaatcggaaggatctggtgaagacaaaactggggtggcccgctggagtgacattagacatgatctctaaacgggtgtactgggtagatagcaggttcgactatattgagactgtgacttacgatggaatccagcgcaagacggttgtgcatggtgggtcacttatcccacatccatttggggtctcactgtttgaaggccaggtgttttttaccgattggaccaagatggccgtgttaaaagcaaacaaatttactgagaccaatccccaggtctattatcaggcaagcctccgcccatacggagtgacagtctatcactcgctgcgccagccttatgccactaatccttgtaaagataataatgggggttgtgagcaagtgtgcgtgttgagccataggacagacaatgacggactgggctttagatgtaagtgcacctttggttttcagctggataccgacgaaaggcattgcatcgctgtccagaacttcttaatctttagctcccaggttgccataagaggcattccttttaccctgtcaactcaagaagacgtcatggtgcccgtttcaggcaacccctcttttttcgtagggatcgattttgatgctcaggattccaccatcttcttttccgatatgtcaaagcatatgatttttaaacagaagatcgacggcaccggcagagaaattcttgccgctaacagggtggaaaatgtggagagcctcgcattcgattggatatctaagaacctgtactggactgatagccactacaagagcatctcggtcatgagacttgctgataagaccagacgcaccgtagtgcagtacctaaataacccaaggtctgtggtggttcatccctttgcaggttacctcttttttactgattggttcagacctgccaagattatgagggcttggtcagatggctcccatctcctgccagtcatcaacaccacgctgggctggccaaacggacttgccattgactgggccgcttcccgcctgtattgggtggacgcctacttcgacaagatcgagcattccaccttcgatggcttggaccgcaggcgcctgggtcacatcgagcagatgacgcatccatttggcctggcaatctttggagaacaccttttctttacggattggcgtctcggtgctatcataagggttcggaaggccgatggaggggaaatgaccgttataagaagtggaatcgcctacatattgcacctgaagagctacgacgtgaacatccagacaggcagtaatgcatgtaatcaaccgacacaccccaacggggattgttctcatttttgtttccctgtgcccaattttcaacgagtttgcggttgcccatatggaatgcggttagcctcgaatcatcttacatgcgagggggaccccacaaacgagcccccaacagagcagtgtggacttttctcattcccctgcaagaatggacgctgtgtccccaattattatctatgcgacggagttgacgactgtcatgacaacagcgatgaacagctatgcggaacccttaataatacatgcagcagcagcgcatttacatgcggccatggggaatgcatcccggcacattggaggtgcgataagaggaatgactgtgtggacggttctgatgaacacaactgtccaacgcatgcacctgcttcctgtttagatacacaatacacgtgtgacaatcaccaatgcatttccaagaactgggtttgcgacaccgataacgactgcggggatggctccgatgagaagaactgcaactcaaccgaaacatgccagccatctcaattcaactgtccaaatcaccgatgcattgacctgagcttcgtgtgcgacggcgacaaagactgcgtggatggctctgacgaggttggatgcgtgctgaattgtaccgctagccagttcaaatgcgcgtcaggggacaagtgtattggagtcaccaatagatgcgacggggtgtttgactgtagcgataactcagacgaagcagggtgtcccacaagacctccaggcatgtgtcatagcgatgaatttcagtgccaagaggacggaatatgtattcccaatttctgggagtgtgatgggcatccggattgtctgtacggctctgatgagcataacgcgtgcgttcccaagacatgtccctcctcttatttccactgcgataatggaaactgtattcatcgggcttggctgtgcgatagggataacgattgtggggatatgtccgacgaaaaggattgcccaactcagccattccgctgtccttcttggcagtggcagtgtttgggccacaacatttgtgtgaacctgtccgtcgtgtgcgatggaatctttgattgccccaacggcaccgacgagagcccactgtgtaatggcaacagttgctcagatttcaatgggggatgcacccatgagtgcgtgcaagagcccttcggtgctaaatgcctctgccctctggggtttctgttagccaacgacagcaagacctgtgaggatattgacgaatgtgatattcttggtagctgttcacagcattgctacaacatgcggggaagcttcagatgtagctgtgatacagggtacatgctggagagcgacggcaggacttgtaaggtcacagcttccgaaagccttttgttgctcgtcgcctctcagaacaaaattatagcagacagcgttactagtcaagtgcacaatatatattccttagtagagaacggaagttacattgtggccgtggatttcgactctatatctgggaggatattctggtcagacgcaacccagggcaagacttggagtgcattccagaacgggacagatagaagggtcgttttcgactcaagcatcatcctgaccgaaacaattgcgattgactgggtgggacgcaacctctactggaccgattacgctctcgaaaccatagaggtctcaaaaatcgacggatcacatcgcacagttctgataagcaaaaatttgaccaaccctaggggacttgctctcgacccccgaatgaacgagcatttgctgttttggtccgactggggccaccatcctcgaattgaaagggcatctatggacggcagtatgcgcactgtgatcgtgcaggacaagatcttctggccttgcggcctaaccatcgactatcctaatcgtctgctgtatttcatggactcatacctggactatatggacttctgtgactacaatggccaccaccgtagacaagtcatcgcatcggacctcattataaggcacccctacgcactaaccctttttgaagatagtgtgtattggacagaccgagccacacgtcgagtgatgagggcaaataagtggcacggaggcaaccagtccgtcgtaatgtataatattcagtggcccctgggcatcgtggcagtccatccaagtaagcagcccaatagtgtgaatccttgcgcatttagtagatgttcccacctctgtttgctctcatcacagggaccgcacttctacagttgtgtctgtccaagcggatggtccctttcacccgacctactgaactgcctaagagatgatcaacctttcctgataaccgtgcgccagcatatcattttcggtatcagcctgaaccccgaggtgaagtccaatgatgccatggtccctatcgctgggattcaaaatggcctggacgtcgaatttgacgacgccgaacaatacatctattgggtcgaaaatcctggagaaatacatagagtcaagacggatgggactaaccgcactgtgttcgcctcaattagcatggtggggccaagcatgaaccttgccctggactggatttctaggaacctgtattctacaaatcctagaacccagagcatcgaagtattgactttacatggcgatatacgctaccgaaaaacccttattgcgaatgacggaaccgcgctgggcgtgggtttccctatcggaatcactgtcgatccagcccgaggaaagctgtattggtctgaccagggcactgactctggtgtgcctgctaagattgcaagcgccaacatggatggcacaagtgtgaaaaccctttttacaggcaacctcgagcatctggagtgcgtaactttagacattgaggaacaaaagctttattgggccgtcactgggaggggagtgatcgagaggggaaatgtagacggtaccgaccgtatgatattggtgcatcagctgtcacatccatggggaattgctgtccatgacagttttttgtattatactgacgagcagtacgaagtcatcgaacgcgtcgataaagccacgggtgccaataagattgtgctgagagacaacgtccccaacctgcgcggactccaggtgtaccatcgaaggaacgctgcggagtcctccaatgggtgttccaataatatgaacgcctgccagcagatctgtctgcctgtgcctggtgggctgttctcatgtgcttgcgcgaccggcttcaaactcaatcccgataaccggagttgttccccgtacaactcttttatcgtagtgtctatgctgtcagctatccggggttttagtttggagctcagtgatcactcagagacaatggtgcctgtagccggtcaaggcagaaatgcccttcatgtagacgtggacgtttcatctgggttcatatattggtgtgacttttcaagtagtgtggcgtctgataatgctattcgtcggatcaaacccgacggcagctcactgatgaatatagtgacccacggaattggagagaacggggtcagaggtattgcagtggattgggtggctgggaatctgtatttcaccaatgcattcgtcagtgagacactaatcgaggtcttgcgcattaatacgacctaccgcagagtcctgctgaaggtcacagttgatatgcccagacatatcgtagtggatccaaagaatcggtatctgttctgggccgactacggacagcgaccaaaaattgaacggtccttcctcgattgcacaaacaggactgttctggttagcgaaggtattgtcacccccaggggattagccgtggacaggtctgatggctacgtatactgggttgatgactccctggatattattgccagaattcgcatcaatggggagaatagcgaagtgataaggtacgggtctagatacccgaccccatatggaatcacagtgtttgaaaattcgattatttgggtcgacagaaatttgaaaaaaatctttcaggcatccaaggaacctgagaacaccgagcccccaacagtgatccgcgacaacatcaactggctaagagatgtgactatttttgacaagcaagtccaacccaggagcccagcagaagtgaacaataacccatgcctggagaacaatggtggatgctcacacttatgttttgctctccccggtctgcatacacctaagtgtgactgcgcgtttggcacgctgcagagtgacggcaagaactgtgcgatcagcacagaaaattttctcatattcgccctgtctaactctttgaggtcattgcacctggatcccgaaaatcattccccgcctttccagacaatcaacgtggaacggacagtgatgtctcttgactacgactctgtcagcgataggatttacttcacccaaaatttggcctcgggtgtcgggcagatctcatatgcaactctttcatccggaatccacactcccacagtaatcgccagtggtattggcacggcagatggaatagcgtttgactggataacacgaaggatatactattctgactatctgaatcaaatgattaactctatggccgaagatggaagcaatcgaacagtgatcgcccgagtgccaaaacctagagccatcgtcctggacccctgccagggatacttgtattgggctgactgggatacccatgccaaaatcgaaagggccaccttggggggtaatttccgcgtccccatcgtgaattcttccctggtgatgccaagtggcctaaccctggactatgaggaggatctgctgtactgggtcgacgcctcactgcaacggatcgaacgaagtacactgacaggggtggacagggaagttattgtcaatgcagctgtgcacgcttttggactcaccctatatggacagtacatatattggacagatctgtatacccagcggatctaccgggcaaacaaatatgacggatccggccagattgcgatgacaacaaatctgctctcccagccccgaggcattaatacagtcgtcaaaaatcaaaaacagcagtgcaataatccttgcgagcagtttaacggtggctgtagccatatctgcgcgcctgggcctaacggtgccgagtgtcagtgcccgcatgaaggaaactggtacctcgccaataataggaagcactgcatagtcgataacggagagcgatgtggcgcaagcagttttacatgcagtaacggcagatgtataagtgaggaatggaagtgtgacaacgataacgactgtggcgatggaagcgacgagatggaatctgtgtgcgctctgcatacttgtagccccactgcattcacatgtgccaatggaagatgtgtgcagtattcatacagatgtgactactacaacgactgtggcgacgggagcgacgaggctgggtgcttattcagggactgtaacgcaacgacagaattcatgtgcaacaacagacgctgtattccgcgagagttcatttgcaacggcgttgacaattgtcacgacaacaatacctctgacgaaaaaaactgtcctgacagaacctgtcagtctggatacactaagtgccacaattcgaacatctgcattccaagagtctatctctgtgacggagataatgactgtggcgacaactctgacgaaaacccgacatactgcacaactcacacctgctcctcttctgaattccagtgcgcatcaggtagatgtataccccagcattggtattgcgatcaggagacagattgcttcgatgctagcgatgaaccagctagttgcggacacagtgagaggacatgtcttgcagatgaattcaaatgtgacggcggtagatgcataccttccgagtggatctgcgatggagacaatgattgtggagatatgtccgatgaggataagcgacaccagtgccaaaatcaaaactgtagcgactccgaattcctttgcgtgaacgatcggccaccggatcggcgatgcataccccaaagttgggtgtgcgacggggatgtggattgcactgacgggtacgacgagaatcaaaactgtacaagacggacatgctcggagaacgagttcacttgcggctatggactgtgcattcccaaaattttccgctgcgacagacacaatgattgcggcgactattcagacgaacgcggatgcctgtatcaaacgtgtcagcagaatcaattcacgtgccagaacggccgatgcatcagcaagacatttgtttgtgatgaagataacgactgcggcgatggttcagacgaactgatgcacctgtgtcacacaccagagcctacgtgcccgcctcacgaattcaagtgcgacaatggccgttgcatagaaatgatgaaactatgtaatcatttggacgattgtctcgacaattccgacgagaaaggttgcgggatcaacgagtgtcacgatccatctatctccggctgcgaccacaattgcactgacaccctgacatccttctattgtagttgtcgccctggctacaaattaatgtcagacaaacgaacctgcgtagacattgatgagtgcaccgagatgccgttcgtctgctcccaaaagtgtgagaacgtgattggatcttacatctgcaagtgcgctcctggatacctccgggagcctgacggcaagacctgccggcagaactccaacatcgaaccctacttgattttcagtaatagatattatcttcgcaacctcaccattgatggctatttctacagcctgatcctcgaaggtctggataacgtcgtggctctggattttgaccgggtggaaaagagattatattggatcgatacccagcggcaggtgatcgaacggatgttccttaacaagacgaacaaggaaaccattattaatcaccgtctgccagccgcagagtctttagctgtggattgggttagtagaaagctgtactggcttgatgctcgcctggatggactctttgtcagcgacctaaacggtggccataggcggatgttggctcaacactgcgtggatgctaacaataccttttgtttcgataatccacgcggacttgcactgcaccctcagtatggatacctgtattgggctgattggggtcaccgtgcctatatcggccgagtcggaatggacggtaccaataaaagcgtcatcatttccactaagctcgaatggcctaatgggattactatagactatactaatgacttgctatactgggccgacgctcatctcggctacatagagtatagcgacctggaagggcatcatagacatacagtgtacgatggggcacttccgcaccctttcgccatcaccatttttgaggacactatctactggacagattggaacacacggacagtggaaaaaggaaacaagtatgacgggtctaacaggcagactctcgtaaacactacccacaggccttttgacatccacgtgtaccacccataccgacagccgattgtgtcaaatccatgcgggaccaataacggaggctgctcacacctttgcctcattaaacccggagggaaaggctttacctgtgagtgccccgatgactttcgcacgctccagctgagtggatctacttactgcatgcctatgtgttcttccacgcagtttctgtgtgccaacaatgaaaaatgcattcccatatggtggaaatgcgatgggcagaaggattgttcagacggctccgacgagctcgctctttgccctcagaggttttgtaggctaggtcagtttcagtgctctgatggaaactgtacaagtccacagacgctatgtaatgctcatcagaattgccccgatggatccgatgaggaccgcctgctgtgcgagaaccaccactgcgatagtaatgagtggcaatgcgccaacaaaaggtgcatccccgagagttggcagtgtgatacttttaacgactgcgaggataactctgatgaggactcatcacattgtgcgtcaagaacctgcaggcccggtcaattccggtgtgccaacggcaggtgtatccctcaagcatggaaatgcgacgtggacaatgactgtggtgaccactcagatgaaccgatagaagaatgcatgagtagcgcacatttgtgtgacaactttaccgaattctcttgcaaaacaaactacagatgtattcccaaatgggcggtctgcaatggggtggacgactgtcgggacaatagcgacgaacagggttgcgaggagagaacctgccaccctgtcggagactttaggtgtaaaaatcaccattgcattcccctgcgctggcagtgtgacggccaaaatgactgtggcgataacagtgacgaggaaaactgtgcaccaagagaatgtactgagagcgagttccgttgtgtcaatcagcagtgcattccctctagatggatatgtgatcattataatgactgtggcgataactcagatgagagagactgcgaaatgcgcacctgccatcctgaatatttccagtgcacaagtggccactgcgtgcattctgagctgaagtgtgacgggtccgcggattgtcttgacgcatcggatgaggcagactgccccactagatttcccgacggcgcttattgtcaggcaactatgttcgagtgcaagaaccatgtgtgcattcctccctactggaaatgtgatggagatgacgactgtggagacggctccgatgaagagctgcacctgtgcctggacgtcccttgtaacagcccgaatcggtttcggtgcgataataatcggtgtatttattcacacgaggtgtgtaacggcgttgatgattgcggagacggcactgacgagacggaagagcactgtcggaagccgacgccgaaaccttgcaccgagtacgagtataagtgcggaaacggtcactgcattcctcatgacaacgtgtgtgacgatgccgacgattgcggcgactggagtgacgaactaggatgtaacaaggggaaagagcgaacctgtgctgaaaacatctgtgaacagaattgtacgcaactaaacgagggtggattcatctgtagttgtacggccggattcgagaccaacgtgtttgatcgaacatcctgcctggacattaacgaatgcgagcagttcggtacatgtcctcagcactgccgaaatacaaagggctcttatgagtgtgtgtgcgctgatggatttacctcaatgagcgatagacctggtaagcggtgcgccgcagagggttcctcccccctcttgctactccctgataacgtaagaattagaaaatataaccttagcagcgaacggttcagcgagtacctgcaagacgaggagtacatccaggccgttgactacgactgggacccaaaggatattgggttgtccgtggtgtactatactgtgcgcggagaggggtctaggtttggagccatcaaaagggcttacatacccaacttcgagagcggccgaaacaacttggttcaggaagtggacctaaaactgaaatatgttatgcagccagacgggattgccgtagactgggtggggagacatatctattggagcgatgtgaagaacaagagaatcgaggtcgccaagctggatggtcgctatcggaagtggctgatcagcactgatctggatcagcccgcagccatcgccgttaatcccaaactcggtcttatgttctggaccgactggggtaaagagccaaagattgagtccgcctggatgaacggcgaagataggaatatcctagtcttcgaggacctcgggtggcccaccggcttgtctattgattacctcaataatgatagaatctactggagcgactttaaggaggacgttatcgagaccatcaagtatgacggcacagacagaagggtcatcgcaaaggaagctatgaacccctacagtttagatatttttgaagaccagttgtattggatcagtaaagaaaagggcgaagtgtggaagcagaataagttcggccaaggaaagaaagaaaagactctggtggttaacccatggctcactcaagttcgaattttccaccaactccgatataataagagtgtccctaatctgtgcaagcagatctgcagccacttgtgcttgctgcgacccggaggctatagctgtgcgtgccctcaaggaagcagctttattgagggatccacaacagagtgtgatgccgcaatcgagctgccaattaacttgcccccaccctgtagatgtatgcatggagggaactgctactttgacgagacagacctgcccaaatgtaaatgtccctccgggtacaccggcaagtattgtgagatggccttctccaagggtatcagcccaggaaccacagccgtggccgttttgctgacgatcctccttattgtcgtgatcggagcgcttgccatcgccggtttttttcactatcgcaggactggatccctgcttccggctctcccaaaactgccttcgctttcctcactcgtgaagccaagtgaaaacggcaacggtgtaacttttagatccggcgctgaccttaacatggacattggcgttagtggattcggacccgagaccgcaatcgaccgatccatggctatgagcgaggatttcgtgatggaaatgggtaagcagcccataattttcgaaaaccctatgtatagcgcccgagacagcgcagtgaaggtggtacagcccatccaggtgaccgtgagtgaaaatgttgataacaaaaattatgggtccccaataaacccaagcgagatcgtgccagagacgaaccctacgagtcccgctgcagatggcacacaagttacgaaatggaacctgttcaaacgaaagagcaaacagaccactaattttgaaaaccccatttacgcacagatggagaatgagcagaaggaaagcgtggcagcaacaccccctccatcaccaagtctgcctgctaagccaaagccaccatctcgcagggatcctactcctacatattctgccactgaggatacgtttaaggacacagctaaccttgtgaaagaggacagcgaggtctat

SEQ ID NO: 228908 - DNA, 3678 bp, synthetic construct
  misc_feature 1..3678: note = Description of Artificial Sequence: Synthetic coding sequence
  source 1..3678: mol_type = other DNA
atggaccggggacccgcagcagttgcctgcactctgctcctcgctctcgtcgcctgcttggcgcctgctagcggtcaagaatgtgatagtgcccactttcgatgcggtagtgggcattgtattccggctgattggagatgtgacggcacaaaggattgctccgacgatgcagacgagataggttgtgcagtggttacatgccagcaggggtacttcaaatgccagtccgagggccagtgtatacctaattcctgggtgtgtgatcaggaccaagactgcgatgatgggtccgacgagcgtcaagattgttcacagagcacgtgctcttctcaccagatcacctgcagcaacggccaatgcatcccctctgaatacagatgcgatcacgtgcgcgactgtcccgatggggctgacgagaacgattgccagtatcccacgtgcgaacaactgacctgtgacaatggtgcatgctataacaccagtcagaaatgcgattggaaagtcgactgcagagactccagtgatgaaatcaattgtacagaaatttgccttcataacgagttttcgtgtggaaatggcgagtgtattccacgtgcctatgtgtgcgaccacgacaatgactgccaagacggttcagacgagcacgcctgcaattaccccacgtgtggtggctaccagttcacttgcccttctggcagatgcatctatcaaaattgggtgtgtgatggggaagatgactgcaaagataacggcgatgaggacggctgtgaaagtggaccacacgatgttcacaaatgctcgcctagagaatggagctgtccagagtctggcagatgtatttccatctataaggtgtgcgacgggattcttgactgcccgggtcgcgaggatgagaataatacttccactggaaaatattgttccatgacactgtgctctgcgctgaactgccagtatcagtgtcacgagacaccctacggcggtgcctgtttctgccctcctggctacattattaatcacaacgacagtcgcacatgcgtcgaatttgatgattgccagatatggggaatatgcgaccagaaatgcgagtcccgccctgggagacacttatgtcattgtgaggaggggtacatccttgaacgcggacaatactgtaaagcaaatgacagtttcggtgaagcaagcatcattttttctaacggacgggacctcctcatcggggatattcacgggagatcctttcgaattctcgtcgagagccagaaccgcggagtggctgtaggcgtcgcttttcactaccatttacaaagagtgttctggaccgacactgtccaaaacaaagtctttagcgtggatataaatggtctgaatatccaggaggtcttaaacgtgtcggtcgagacacccgagaatctagcagttgactgggtcaataacaagatctatcttgtcgaaactaaagtgaaccgcatcgacatggtaaacctcgacggaagctatagagtcacgctgatcactgagaacttagggcaccccaggggaattgctgtcgaccctacggtggggaaaaccgtggtgcacgggggaagtctgatacctcacccttttggcgtcagcctgttcgaggggcaggtcttctttactgactggaccaagatggccgtcctaaaggcgaacaagtttacagaaactaacccgcaggtttactatcaggcctccctccggccttacggcgtaaccgtataccactccctacgccagccttacgctactaatccttgcaaagacaataacggaggctgcgagcaggtatgtgtcctgagccatcgcacagacaatgacgggctggggtttagatgtaaatgtacttttgggtttcagttagacactgatgagcggcattgtatcggccgagaaatcttagcagcaaatagagtagagaatgtggagtctttagcttttgattggatatctaagaatctgtactggacagacagccactacaagtccatttctgttatgcggctggccgataagacgaggcgcacagttgtccagtatctgaacaatccgagaagtgtggtagtgcaccctttcgccggatatctgttcttcaccgattggttccgcccagccaaaattatgagagcgtggagtgatggatcccatcttttgcccgtgataaacaccacactcggatggccaaatggacttgcgatcgattgggcagccagccggctgtactgggtcgacgcatacttcgacaaaatcgaacacagcaccttcgatggcctggacagacggaggcttggccacattgaacagatgacacacccttttggtttagcaatcttcggtgaacaccttttcttcaccgactggcgacttggagccattatcagagtcagaaaagccgacggtggagaaatgacggtgatccggagcggaatcgcgtacatccttcacctgaagagttatgatgtgaatatccaaaccggcagcaatgcctgcaatcagccaacccaccccaatggtgactgtagccatttttgtttccccgttcctaattttcagcgcgtgtgcggttgtccatatgggatgcggttggccagcaaccacctgacctgcgaaggcgatcccacaaacgagcctccgacagagcagtgcggattattcagcttcccctgcaaaaacggaaggtgtgtccccaactattatctgtgtgacggcgtggatgattgccacgataattcggacgagcagctgtgtggtacattgaacaatacgtgctcttcctccgctttcacgtgcggtcatggagagtgtatccctgcccactggcggtgtgataaacgtaatgattgcgttgatggttctgatgagcacaactgccccacacacgccccagccagctgtctggacacacagtacacctgtgacaaccaccaatgcatttctaagaattgggtctgcgacacagacaatgactgtggtgacggttctgacgagaaaaattgtaattctacagagacatgtcagccatcccagttcaattgccctaatcacagatgcattgacctgtcctttgtctgcgacggcgataaggattgcgtggacggaagtgatgaagtggggtgtgtgttaaattgtaccgcgagtcagtttaaatgcgctagcggggacaaatgcatcggggtaactaatcggtgtgacggcgtcttcgattgcagcgacaattctgacgaagcaggatgccccaccaggccccctggaatgtgtcattcagatgagtttcagtgccaggaagatgggatatgcattcccaatttctgggagtgcgatggccaccccgactgcttatatggcagtgatgaacataatgcctgcgtgcctaaaacttgtcccagttcttacttccattgtgataatggaaattgcatccacagggcttggttatgtgatcgggataacgactgcggcgatatgagtgacgaaaaggattgtcctacccagcctttccgatgccctagttggcagtggcagtgcctcggccacaatatctgcgttaacctctccgtggtgtgcgatgggatctttgactgccccaacggtaccgacgagagtcccctttgtagcaagttcccggatcacagtctgctggctatcaattcattctag

SEQ ID NO: 228909 - DNA, 1941 bp, synthetic construct
  misc_feature 1..1941: note = Description of Artificial Sequence: Synthetic coding sequence
  source 1..1941: mol_type = other DNA
atgttggcccagcattgtgtcgacgcgaacaacacattctgttttgacaacccacggggacttgccctgcaccctcagtacggctatctctactgggcagactggggccacagggcgtatatcggtcgcgtcggcatggacggaactaataaaagcgtcatcatatctacaaagctggagtggccgaatgggattaccattgactataccaacgacctgttgtattgggccgacgcgcacctcgggtatatcgagtattccgatttagaaggacaccatcggcatactgtatatgacggggctctgccccacccgtttgctatcaccatctttgaggatacaatatattggaccgactggaacacccgaaccgtcgaaaagggcaacaagtacgacggaagtaacaggcaaactctggtgaatacaacacacaggcccttcgacatccatgtgtaccacccgtaccgtcaacccatcgtgtctaacccctgtgggaccaacaacggaggctgtagtcatttgtgcctgataaagccaggcggaaagggctttacgtgcgagtgcccagacgatttccggacgctgcagctgagtggtagcacctactgtatgcctatgtgcagctcaactcaattcctgtgtgccaataacgagaaatgcatccctatttggtggaagtgcgacgggcagaaggattgttcagatggatccgatgaacttgccctgtgcccccagaggttctgccgtttggggcagttccagtgcagcgacggtaactgcacctcaccccagaccctatgtaacgctcaccaaaactgcccggacggaagtgacgaagaccgactcctgtgcgagaaccaccactgcgactcgaatgaatggcagtgtgcaaacaaacggtgtatcccagagtcctggcaatgtgatacttttaatgactgtgaggacaattccgacgaagattcttcacactgcgccagccgcacttgcaggccaggccaattcagatgcgccaacggacgctgtataccacaggcatggaaatgcgatgtggacaatgattgtggggatcattccgatgagcctatcgaagagtgtatgtctagtgcgcacctatgcgacaatttcaccgagttcagctgcaaaaccaattaccgctgcataccaaagtgggcggtgtgcaacggagttgatgattgtcgagataattccgacgaacagggctgtgaggagagaacatgccaccctgtgggcgacttcagatgtaagaaccaccattgcataccacttcggtggcagtgcgacggacaaaacgattgtggggacaattccgacgaagagaactgtgctccgcgagaatgcaccgagagcgaatttcgctgtgtgaaccagcaatgtatcccttctaggtggatttgcgatcattacaacgactgcggcgacaacagtgacgagcgggattgtggaatgcggctcatgaagctcatcgtcccacacgcatttctcatggtgcacacagcacggcttctctgtagcaatgccaaaaccatgtttgtgagccggcacattgggaacgtgatggccatgatgacggtcgctatggtgcagatgaaaaatttcacatgcgcatggatgttcccagttattcaccaaaccgtaagcggagtgacaaccattgctgcgttcatcgtcatgagatgcgcaatggtttggatgacagtggaaatggagctcatgcgacagagatcaacggtcgaaaatagacctctgaacctcgtacagaacatgaatatttccgtggcgatgggcatcgcgttccacatgacaatgtgcgtcatgatgcccatgaccgtcgtcaccgggccaatgaattgggtggcgattaaagaaaaaaaggaacatgtgctcaagatatatgcttccaagattgtgcccaactag

SEQ ID NO: 228910 - DNA, 2313 bp, synthetic construct
  misc_feature 1..2313: note = Description of Artificial Sequence: Synthetic coding sequence
  source 1..2313: mol_type = other DNA
atggagaaacgcgctgcagcagggttggaaggagctcccggtgcaagagcacagttggccgtggtctgtctagttaatatctttctgactggaaggctttcttccgccgtccctgcattggctgcatgttccggcaagttggagcagcacacagaacgtcggggagtcatctatagtcctgcttggcccttgaactacccccctggaaccaattgctcctggtacatccagggagatcggggtgacatgatcactatctcctttaggaacttcgacgtggaggagagccaccaatgctctctggactggcttcttctgggacccgctgcacccccaagacaggaggctttccggctgtgcgggagtgccatcccaccagcctttattagcgccagagatcacgtgtggattttcttccatagtgatgccagctctagcggtcaggcacaggggtttcgactcagttatatccgaggcaagctcgggcaggccagctgccaggcggacgaattccgttgcgataatggcaagtgcctgccaggcccttggcaatgcaataccgttgatgagtgtggcgatgggtctgatgagggcaactgtagcgcccctgccagcgagcccccaggaagcctgtgccctggtggaacatttccatgttcaggagcacgatcaacaaggtgtcttccggtggaacgtcgctgcgacggactgcaagactgcggtgatggctctgacgaagccggatgtccggatctggcctgcggaagacgtttgggctccttctatggttcctttgcctcgcctgacctctttggcgcagcgcgagggccaagcgatctacattgcacctggctggtcgacacacaggacagtcgacgcgtgttgctgcagctcgagctgcgacttgggtatgatgactacgtacaggtgtacgaaggcttgggcgaacgtggggatcgtctgctgcagacactgagttacaggagcaaccatcgacctgtgtcgttggaagccgctcaggggcgtctgacagtcgcctaccacgcacgggctcgaagtgcaggacacgggtttaacgctacgtatcaagttaaagggtactgcctcccatgggagcagccctgcggctcttccagcgatagcgatggcggaagtcttggcgaccagggctgtttcagcgagccccagcgttgcgatgggtggtggcactgcgcctcaggaagagatgaacaaggctgtccagcctgccctccggaccagtatccttgtgagggcggatccggactttgctatactccagctgatcggtgtaacaatcagaagtcgtgcccagacggtgctgatgagaaaaattgcttcagttgtcagcccggaactttccattgtgggacaaatttgtgtatcttcgagacctggcgctgtgacggacaggaagactgtcaggacggttccgatgaacatgggtgtctggccgcagtgcccaggaaagtcattacagccgctttaatcggaagcctcgtgtgtggtctgctcctcgttatcgcccttggctgcgcattcaaactttactcgctccggacgcaggagtatcgtgcatttgaaacccaaatgacccggctggaagctgaatttgtaagacgcgaagctcctccttcgtatggacaactcatagctcaggggttgattccacccgtggaggactttccggtatacagcgcctcgcaggctagtgtcctgcagaatctgaggaccgctatgcggagacaaatgagaaggcacgccagcaggagggggccaagccgcagaaggcttggcagactatggaatcgcttgtttcacagacccagagcacccaggggtcagatcccccttctgaccgctgcgaggcctagtcagacagtactcggcgacggattcctccagcctgccccaggcgcagctccagatccacctgcgcctctgatggacacgggctccacacgagctgcgggagatcggccaccctcagcacctgggcgagccccagaggtcggaccctcgggccctccgctccctagtggtctcagggatccggagtgtcggccagtggacaaggaccgaaaggtgtgccgcgaaccactggtggacggaccagcgcctgcggacgctccgcgtgagccgtgctctgcccaagacccgcatccccaggtgtccaccgcaagcagcactttgggaccacactccccagaacccctcggcgtgtgtcggaatcctccgcctccttgtagtcccatgctggaggcttctgatgatgaagccctcttggtctgctag

SEQ ID NO: 228911 - DNA, 858 bp, synthetic construct
  misc_feature 1..858: note = Description of Artificial Sequence: Synthetic coding sequence
  source 1..858: mol_type = other DNA
atgggaaaccatctgccagctttcgggccaagacctcctggaaggcgagaagctctactgagtcccgactgcccactgctaaggctgcatcccacgggcaaactgggacaggcctcatgtcaggctgacgagtttagatgcgataacgggaaatgcctgccgggtccctggcaatgtaacactgttgatgagtgtggagacggcagtgatgagggcaactgtagcgcaccagcgagtgagcctccgggatcgctgtgcccaggcggtaccttcccttgttcgggggctcgatctacaaggtgtttaccagtcgaacgaaggtgcgatggccttcaagattgcggcgacggatctgatgaggcaggatgtccggacctggcctgcgggcgtagattgggttcattttatggcagttttgcatctcctgatctgtttggtgcagccaggggaccatccgatctgcattgcacctggttagtggacacgcaggactcgcgcagggtgctgctgcagttagagctgagacttggttacgacgactatgtgcaggtgtacgagggtcttggcgagaggggcgatcggctgcttcagactctctcctacagatctaaccatcgcccagtgtctctggaggcagcccagggcagattgaccgtggcctaccacgccagagcaagatccgccggacatggttttaacgcaacctaccaggtgaaaggttactgcctcccctgggagcagccatgcggatcttcaagcgattctgacgggggatcactaggcgaccaaggttgcttcagcgagccccagcgctgtgacgggtggtggcactgcgccagcggaagagacgagcaatag

SEQ ID NO: 228912 - DNA, 5717 bp, synthetic construct
  misc_feature 1..5717: note = Description of Artificial Sequence: Synthetic coding sequence
  source 1..5717: mol_type = other DNA
atgcgacggcaatggggtgcgctgctgctgggcgctttgctctgcgcccacggcctggcatcatccccagagtgcgcttgtggccgatctcattttacctgcgcagtgtccgctctgggagagtgcacgtgcataccagcacagtggcagtgtgatggcgacaatgattgtggcgaccactctgacgaggatggttgcattctcccgacctgcagccccttggactttcactgcgataacggcaagtgcatccgcaggtcctgggtgtgcgatggggacaacgattgcgaggacgactccgatgaacaggactgccccccaagagaatgcgaagaggacgaattcccatgtcagaatgggtactgtattcgatcactctggcattgcgatggcgataacgattgtggagacaatagtgacgaacagtgtgacatgagaaagtgttccgacaaggaattcaggtgcagcgacgggagttgtatcgcagaacattggtattgtgatggagatactgactgtaaggatggctcggacgaagaaaactgccccagcgccgtaccagccccaccatgtaaccttgaagaattccagtgtgcgtacgggcgatgtatcctcgacatctatcactgtgacggtgatgatgactgcggcgactggtctgacgagtcagactgctcctcgcatcaaccctgtcgcagcggtgagttcatgtgtgattccggtctgtgcatcaacgctgggtggcgatgtgacggcgatgcggactgcgacgatcagagtgatgaaaggaactgcacaacctctatgtgcactgcagaacaattcagatgccacagcggtcgatgtgtgcgcctgtcttggcggtgcgacggcgaagacgattgtgccgataacagtgacgaagagaattgcgaaaacactgggtcaccccagtgcgccctggatcagttcctgtgttggaatggaagatgcattggacaaaggaaactgtgtaatggagtcaacgactgtggcgataactcagatgagtccccccagcagaactgtcgcccaaggactggggaggagaattgtaatgttaacaatggaggatgcgcacagaaatgtcaaatggttcggggagcagtgcagtgcacctgccacactgggtaccgcttgaccgaggacggccatacatgtcaggatgtgaatgaatgcgcagaggagggctattgcagccagggttgtactaactctgagggggcttttcagtgttggtgcgaaacgggctatgaactgcgccctgatagacgcagctgcaaggcacttggtcccgagcccgtgttactgtttgccaatagaattgatatccggcaggtgttgccacatcgctccgagtatacccttctcctcaacaacctggaaaacgcgatcgcacttgacttccaccacagacgcgaactcgtcttctggagcgacgttacacttgataggattctccgcgcaaatctgaatgggtctaacgtggaagaagtcgtgtctacgggcctggaaagtcccggaggtttggccgtcgattgggttcatgacaaactctattggactgactccgggacctctcggatagaggttgccaacctcgacggcgcacatcgtaaggtgttattgtggcaaaacctagaaaaacccagggccattgctcttcatcctatggagggcaccatctattggacagactggggaaatactcctaggatcgaggcgtccagtatggatggatcaggaaggagaatcatcgctgacacccatttattttggcctaacgggctcactatagattacgccggacgccgtatgtattgggttgatgccaagcatcatgttattgagagagccaacttggacgggtcacatcgtaaggcagtgatcagtcagggtctcccccatccatttgccatcacagtgtttgaggattctctgtactggacagattggcataccaaaagcataaatagcgccaataagtttaccgggaagaatcaggagattatcaggaacaaactgcacttccctatggatatacatacacttcacccccagcggcagcctgccggaaagaatcgctgcggggacaacaacgggggatgcactcacctgtgtctgccatcagggcagaactacacctgcgcgtgtcctacagggtttagaaaaattagctcccatgcgtgcgcacagagtttggataaattcctactttttgctcggcgtatggatatccgaaggatctccttcgacaccgaagacttgtccgacgacgttatacccttggcagacgtccgttccgccgtggctctggactgggacagccgtgacgaccacgtatattggactgatgtgagtacagacaccatttcaagggccaaatgggacggtacaggccaagaagttgtggtggacactagtctcgagagtcccgcaggactggcgatcgattgggtcaccaacaagctttactggacggacgccggtaccgataggattgaggtagcaaacaccgatgggtctatgaggacggtgttaatctgggaaaacctggacagacccagagacatcgtcgtggaacccatgggcggttatatgtattggactgattggggcgcttcccccaagatcgagcgggctggtatggacgcatctggaaggcaggtgatcatatcttcgaacctgacttggccgaacggtctggccatcgactacgggtcccagcgtttgtactgggccgacgccggaatgaagaccatcgaattcgccggactcgacggctccaaacggaaagtcctgatcggcagccagcttccccaccccttcgggttaacactctatggagaaaggatctattggacagattggcagacgaagagtattcagtccgcagacagactgacaggcctggacagggagactctgcaagaaaatctcgagaacctcatggacattcatgtcttccacagacgaaggccccctgtttcaacaccctgcgcaatggaaaacggcggttgctctcatctgtgtctgcggagcccaaacccctccggattctcatgcacctgccctaccgggatcaacctcctgagtgacggaaaaacttgctcccccggtatgaattccttcttgatttttgcgagacgtatagatatccggatggtgtcattagatattccgtattttgctgacgtggtggtgcccatcaatatcacaatgaagaacactatcgcaatcggggtggacccacaagagggtaaggtgtactggagcgacagtacactgcataggatcagtcgggcaaacctcgacggtagtcagcacgaggatataattaccacaggcttacaaaccacggatgggcttgccgtggatgcaattggcagaaaagtgtattggactgacaccggtaccaacagaatagaagtcggaaatttagacggcagtatgcggaaggttctggtgtggcagaacctggattcgcccagggctatcgtgctataccatgagatggggtttatgtattggactgactggggagagaacgccaagctcgaaagatccgggatggatggatctgaccgcgcagttcttatcaacaacaatctgggctggcccaatggcttgacggtggacaaagctagtagccagctgctgtgggcagacgcgcacacagagcggattgaagcagctgatctgaatggagccaatcgccataccttagtatctccggtgcaacatccctacggactaacgcttctggattcctacatttactggactgactggcagactcgctcaatccaccgggctgacaaaggcaccggaagtaacgtcattcttgttcgttcaaacctgccaggcctgatggacatgcaggcagtagacagagctcagcctctcggattcaacaagtgtggaagtcgtaatggcggatgtagtcacctctgcttgccgaggccatcggggttttcttgtgcctgccccaccggaatccagctaaagggagacggcaaaacatgtgatccttcccctgagacatatctcctcttttctagcaggggctcaatcagaagaatctccctggacacctctgaccacaccgacgtgcatgtgcccgtgccggaactgaacaatgtgatctcgctggattacgattccgtggatgggaaagtgtattacacagatgtattcctggatgtcatcaggcgggctgacctgaacggaagcaatatggagacagtgatcgggagaggactgaaaacgaccgacggattagcagtggactgggtggcgcgaaatctgtactggaccgacactgggaggaataccattgaagcaagcaggcttgatggctcatgtaggaaggtgctcattaacaactccttagacgagccacgggcaatcgccgtgtttccacgcaaaggctacctcttttggactgattgggggcatattgccaaaatagaacgcgcaaatctggatggaagcgaaaggaaggttctgatcaacaccgatctgggatggccgaacggactcaccttggactacgatacacggaggatatactgggtggacgcgcacctggatagaatagaatctgctgacctgaacggaaagctcaggcaggttctcgtgagccacgtgtcccaccccttcgctctcacacagcaagatcgatggatctactggacggactggcagactaaaagcatacagcgggtcgataaatattccggcagaaacaaagagaccgtcctcgccaacgtggaaggactcatggatattatagtcgttagtccccagcggcaaaccggtacaaacgcatgtggcgtgaataacggcggatgcactcatctttgcttcgccagggctagcgactttgtatgcgcatgtcccgatgagcctgatagcaggccttgtagcttggtgccaggcctggtgcctccggctcctcgggcaacaggaatgtccgagaagagtcctgtgctccccaatacccccccaaccaccctgtattcgtcaactactcgcactagaacctctttggaggaggttgaggggcgatgtagcgagcgggacgccagactgggcctttgcgcgaggagcaatgacgcggtccccgcagctccgggtgaaggcctgcacatctcatatgctatcgggggtctcctgagcattctcctgattctggttgtgatagcggctcttatgctctataggcacaaaaagtcaaaatttacggacccaggcatgggaaacctgacctactctaatcctagctacaggacatctacacaagaggtgaaaattgaggccattccaaagcccgctatgtataaccaactgtgttataagaaggaaggtgggcctgaccacaactacactaaggaaaaaattaagatcgtcgaaggcatctgcctgctgagtggggatgatgccgaatgggatgaccttaagcagctccggtcaagtagagggggactcctgagagatcatgtttgtatgaagacagacacagtctcaattcaggcctcctcaggttctctcgacgatacagagaccgaacaactcttacaagaagaacaaagcgagtgtagcagcgtgcacactgccgcaacacctgagcggcgaggcagcctgcccgacaccggttggaaacatgaacgtaaactcagctcggagagtcaggtgta

SEQ ID NO: 228913 - DNA, 4848 bp, synthetic construct
  misc_feature 1..4848: note = Description of Artificial Sequence: Synthetic coding sequence
  source 1..4848: mol_type = other DNA
atggaggcagctcccccaggtcctccctggcctctgttacttctcctgctgttgctccttgcgctgtgcggatgtcccgctcctgcagcagctagccccctccttcttttcgcaaataggagagatgtgaggttggtggacgcaggtggcgtcaaattagagagcaccattgtggttagcggactggaggatgccgctgccgtggactttcagttttcgaagggcgcagtttactggaccgacgtctccgaagaagccatcaagcagacctatctcaatcagaccggcgctgccgttcagaacgtcgtgatctccggtctggtgtcccccgacggattagcttgcgactgggtcggaaagaagctctactggactgactcagagaccaaccgcatagaagtagcaaacctgaacggcacatctcggaaggtgttgttctggcaggatcttgaccagcccagagccattgctctggaccctgcccatggctacatgtattggactgactggggagagactcctagaattgagagagctggaatggacgggtcaactaggaaaatcatcgtggactcagacatctattggcctaacgggcttaccatcgatctagaagaacagaaactgtattgggcggatgccaagttgtcctttatacacagagcaaaccttgatggatcgttccgccagaaggtggtggagggctcccttacccatccctttgccttgaccctgagcggggacactctgtattggacagactggcagaccaggagcattcacgcctgtaacaagaggacaggcggaaaacggaaggaaatcttgagtgctctctactctcctatggacatacaggttcttagccaagagcgtcagcctttttttcacacacgttgtgaggaggacaatggtggatgcagtcacctctgtctgctatcaccgtccgagccattctacacctgtgcttgccccaccggggtccagttgcaggacaacggacgcacctgcaaggcaggcgcagaagaagttctcctgctagctagacggacggatctgcgtagaatttctctggacacaccagactttaccgatattgttctgcaggtggatgatattcgacacgccattgccattgactacgaccccctcgagggctacgtctactggaccgacgacgaggtcagggctatccgccgtgcctatcttgatggctcgggggctcaaactctggtcaatactgaaatcaacgaccctgacgggatagccgtcgattgggtagcccgaaacctctattggactgatacaggtactgataggattgaggtgacaaggctgaatggcacttcacgcaaaattttggtctcagaagatcttgatgagcccagagcgattgctctgcatcctgtcatggggctgatgtattggacagactggggagaaaaccccaaaatagagtgtgccaacttagacgggcaggagaggcgagtgctggtcaatgcctctttgggatggcctaatgggctcgccctcgatctgcaggaaggcaagttgtactggggcgatgccaaaacagataagatcgaagtgatcaacgtggatggcacaaaacgcaggaccctcttggaggataagctgcctcacatcttcgggttcaccctgctcggtgatttcatctattggaccgattggcagagaaggtccatagagcgggtgcacaaagtgaaggcctctcgggatgtgatcattgatcagctccccgaccttatgggactaaaggccgtaaatgtggcaaaagtcgttggcacaaacccatgcgcagacaggaatgggggttgttctcacttatgttttttcacaccccacgcaacaagatgtggctgtcccatcggtttggagctgctttcagatatgaaaacctgcatagtccctgaagccttcctggtgttcacctccagagcggcaatacaccgaatcagtctcgaaacaaacaacaacgacgtggcaattccactgaccggagtgaaggaggcctctgccttggacttcgatgtgtccaataaccacatctattggacagacgtaagcctcaagactatatcccgtgctttcatgaatgggagttcggtggaacacgtagtagaattcggcctcgattacccagagggaatggcggtggactggatggggaagaacctctactgggccgataccggaaccaatcggatcgaggtcgcaaggctggacggccagttcagacaggttctggtgtggagagatctggacaacccgagatcccttgcacttgatcccaccaaaggttatatctactggacagaatgggggggtaagccacgtatcgtaagggcgtttatggatggaacaaactgtatgaccctggtcgacaaagttggtcgcgcaaacgatcttactatagactacgcagaccaacgtctgtactggacggatctggacaccaacatgatcgagtcatccaacatgctcggccaggagagggtagtcatcgctgacgacctgccacatcccttcggactgacgcagtacagtgattacatctactggacagattggaatctccattctatcgagcgagcagataaaacttccgggagaaatagaacactgattcagggacacctggacttcgtaatggacatattggttttccacagcagcagacaggacggtttaaacgactgtatgcacaacaatgggcagtgcggtcagctttgcttggcaatcccaggtgggcataggtgtggttgcgcctcccactacacgctcgatcccagtagcaggaactgtagccccccaacaaccttcctgctattttcccaaaaatctgccattagccgaatgatccctgatgatcagcacagccctgacctcattctaccgctgcacggactgagaaatgtgaaggcgatcgattacgatcccctggacaagttcatttattgggtagacggacggcaaaacattaagcgagcgaaagatgatggcacccagccttttgtcctgaccagcctatctcaagggcagaatcccgacagacagccccatgatctcagcatagacatctacagtcgaactttgttttggacctgtgaggccactaacacaatcaacgtgcaccgccttagtggggaagctatgggtgtagtgctgaggggggaccgcgataaaccacgggctatagtcgtgaatgccgaaagaggatacctatacttcaccaacatgcaagaccgcgcagctaaaatcgaacgggctgctttagacggcacagaacgcgaggtactgttcaccacaggactcattaggcccgtggctctcgtggtagataacaccctgggcaaacttttttgggtagacgccgacttgaaacgcatagagtcttgcgacctgtctggtgctaaccgtttgactctcgaggatgcaaacatcgtccagcccttaggactgaccatactgggcaagcatttatactggatcgataggcagcagcagatgatcgagagggtggagaaaactaccggggacaaacggactaggattcagggaagagtggcgcatctcacggggatccacgctgtggaagaggtgtcactggaggagttttccgcacacccttgtgcacgggacaatgggggatgctcgcatatttgtattgctaaaggagatggcacaccgaggtgctcttgtccagtgcatctggttctgcttcagaatcttctaacttgcggcgaaccacccacctgttctcccgatcagttcgcctgtgcaactggcgagatcgattgtatcccaggtgcctggcggtgcgacgggttccctgaatgcgatgaccagtcagacgaggaaggatgccctgtttgcagcgccgcacagttcccgtgcgccaggggacaatgcgtagatctcagactacgctgtgacggggaggctgattgccaagatcgctctgacgaagccgattgcgacgccatttgcctgccaaaccagttccgatgtgcctctggccaatgtgtactaatcaaacaacagtgcgatagctttcctgactgcattgatggtagcgacgagctgatgtgcgagataaccaagccaccatccgacgattccccggctcacagttctgcaatcggcccagttatcggtatcattctgtcgctgttcgtaatgggcggagtctactttgtttgtcagcgagtggtgtgccaaaggtacgcaggcgctaacggacctttccctcatgaatatgtgagtggaacgccacatgtgcctcttaacttcattgccccaggcggaagccagcacgggccattcaccgggatagcttgcgggaaatccatgatgtcctccgtctcgctaatgggtggtagggggggagtccccctttacgatcgcaatcacgtgactggagcctcctcgagctcatcatcatccacgaaggctactctgtaccccccaatcttgaatccaccgccttctccggcaactgatccttctctgtacaacatggacatgttttacagctccaacataccagccaccgcccgaccctatagaccctatatcatccggggaatggcgcctcccacaacgccatgttccacagatgtgtgcgactcggattattcggcctcccgctggaaggcttccaagtattacttggacctgaattcagattcagatccttaccccccacccccaacgccccactctcaatatctttccgccgaggatagttgtcctcccagcccagccacagagaggtcatatttccaccttttccctcctcctccaagtccatgtactgattcatcatag

SEQ ID NO: 228914 - DNA, 4841 bp, synthetic construct
  misc_feature 1..4841: note = Description of Artificial Sequence: Synthetic coding sequence
  source 1..4841: mol_type = other DNA
atgggagcggtgctgcggtcactgcttgcctgttcgttctgtgtgctcctgcgtgccgctcccctgctgttatacgcgaatcggcgagacttgcgtctcgtagatgccaccaacggaaaggaaaatgccacaatcgttgtgggtggcctggaagacgccgcagccgtggactttgtcttctcccacggcctcatctattggagtgatgtgtcagaggaggccattaagcgtacagagtttaataagaccgaatctgttcagaatgtggtggtgtccggactgttgagccctgatggattggcatgtgactggttaggcgaaaagctttattggaccgattcagagacgaatcggatagaagtgtccaacctggatggctccttgcggaaagtccttttctggcaggagctcgatcaaccacgagcaatcgctttagatcctagcagtggtttcatgtattggactgactggggcgaagtgccaaagatcgagagggctggtatggacggatctagtcggtttattatcatcaattcagagatctattggccaaatggacttacccttgattacgaagaacagaaactgtattgggccgatgcaaaactcaatttcattcacaagagtaacctggatggaactaaccgtcaggccgtcgttaaggggtcacttcctcacccatttgcgttaaccctgtttgaagacatactttattggaccgactggtccacccactctattctagcatgtaacaagtacaccggcgaaggcctgagagaaatccacagcgatatcttctcaccaatggatattcatgccttctctcagcagcgtcagccaaatgcaacaaacccttgcggaatcgacaatgggggttgttcccacctatgcctgatgtctccagtgaaacccttctaccagtgtgcttgcccaacgggagttaaactgttagagaacggaaagacatgtaaggacggcgcaaccgagctgctcctgctcgccaggagaactgacctgcgccgaatctccctggacactcctgactttaccgatatcgtgctgcagttagaagacatccgccacgcgattgctattgattacgacccggtggagggatacatttattggaccgacgatgaggtgagagcaattcggaggagcttcatagacggatcgggctctcaattcgtggtaaccgcccagattgcccatcccgacgggatcgcggttgactgggtggccaggaacctgtattggaccgataccggcactgataggatcgaagttacaagattgaatggcactatgagaaagatcctgatcagtgaggacttagaggagcctcgggctatcgtacttgatccgatggtggggtacatgtattggactgattggggggagatccctaagatcgaaagggcggctctcgacggttctgatagggtcgttctggtgaatacctccctggggtggcccaatgggctcgcgctcgactacgacgaaggaaaaatctactggggcgacgcaaaaaccgataaaatcgaggtcatgaataccgacggaactgggaggcgggttttggtcgaggacaaaatacctcatatattcgggtttaccctgctgggagactacgtgtactggaccgactggcagaggcggtccattgagcgagtgcataaaagatcagcggaacgcgaggtcataatagaccaactaccggatctcatgggcttgaaagctactaacgtccatcgcgtgatcggtagcaacccctgtgccgaggaaaacgggggatgttctcacctgtgtctgtacaggcctcagggactgaggtgcgcatgtccaatcggatttgaactcataagtgacatgaaaacatgcatcgtgccagaagcctttttactgtttagccgacgggctgacataagaagaatcagtctcgagacaaacaataacaacgtggctataccgttgacaggagtcaaggaggcctccgctctggatttcgacgttaccgacaacagaatttactggacagacattagcctgaaaactattagcagagcttttatgaacggaagtgccttagagcatgtagttgaatttggcctcgactaccccgagggcatggcggtggactggttgggcaagaacttgtactgggcggatacaggcacgaaccggatagaagtcagtaagctggatggacagcacaggcaagtcctcgtctggaaagaccttgactccccgagggctcttgccctagaccccgcagaaggattcatgtactggacagaatggggcggaaaaccgaagatcgatcgggcagctatggatggcagtgaaagaactaccctggtgcccaacgtcgggagggctaatggcctgacaatagattatgcaaagaggaggctgtattggactgacttagacactaatctcatagaaagctccaatatgctggggttgaatcgggaagttatcgcggacgacctgccacatccatttggactgacgcaatatcaggactacatctattggactgactggtcgcgcagaagtatagagcgggcaaacaagactagtggacagaacaggaccattatccagggtcatctggattatgtgatggacattctggtcttccactcttctcgtcaaagtggatggaatgagtgcgcctcctccaatggacactgttcccatttgtgcctggccgtgcccgtgggaggtttcgtctgcggctgccccgctcactactcactaaatgctgacaacagaacatgtagtgctcctacaacctttttgctgttcagccagaagtccgccattaatcgtatggtgatagatgagcagcagtcgcctgacataattctgcccatccattccctccgcaatgtgcgcgctatcgactacgaccccctggataagcagctctactggattgactcaagacaaaatatgatccggaaagctcaggaggatggaagtcagggtttcacagtggtggtctccagtgtacccagccagaatcttgaaatacaaccctacgacctgtccatcgacatctatagccgctacatttattggacatgcgaagctacaaacgtaataaatgtcacccgattagacggtaggagcgtcggcgtagttctcaaaggcgagcaggatcgtcccagggcagtggtagtcaaccctgaaaaagggtatatgtatttcaccaatctgcaggagcgttcgccgaagattgaaagggccgcactagatggcacagagcgggaagtgctgttttttagtggcctgagtaagccaattgcactggcgttggactctagactcggtaagctgttctgggctgattcagacctgcgacgcattgaatcctctgacctgagcggtgccaaccgcattgtgctggaagattccaacattcttcaacctgtgggactgaccgtatttgaaaactggttgtactggatcgacaagcagcagcaaatgattgaaaagattgatatgaccggcagagaggggcgaaccaaggtccaggcacgaatcgctcagctgtccgacatacacgctgttaaggagcttaacctccaggaataccgacaacacccctgtgctcaggataatggaggatgctcccacatctgccttgtaaaaggggatggaaccacaaggtgcagctgcccgatgcacctggtcctgcttcaggacgagttgtcctgtggagagccacccacatgctcacctcagcagttcacttgctttactggcgaaatcgattgtatccctgtggcatggcggtgtgacggttttactgaatgtgaagatcacagcgacgaattaaattgccccgtgtgtagcgagtctcagtttcagtgcgctagcggccagtgtattgatggtgccctgcgttgtaacggcgatgcaaattgtcaggacaaatctgacgagaagaactgcgaagtgctgtgtctgatcgatcagtttcgatgtgccaatggacaatgcatcggcaagcacaagaagtgcgatcataacgttgattgctcggataaaagcgatgaactcgactgctatcctactgaagagcctgcccctcaggccactaacacagtgggatccgtcatcggtgttattgttacgatcttcgtcagtgggacggtgtactttatttgccagaggatgttgtgtccacgaatgaagggggacggcgagactatgacaaacgactacgtcgtacacggcccagcatctgtgcctttgggctatgtgcctcatccctcctccctgtctggctcactgcccggaatgtcccgaggaaagtccatgataagcagcctcagtatcatggggggaagtagtggacccccatatgatagggcccatgttacaggcgcaagtagctcttccagctcctctaccaaaggcacttatttcccagccattctgaatccccctccaagcccagctactgagaggtcccactacaccatggagttcggttactccagcaatagtccatctacacatcgcagctactcctataggccatacagctatcgccactttgctccccctacaacgccctgtagcacggatgtatgcgattctgattatgctccgtcacggcgtatgacttcagtggcaaccgcaaaaggctacacatctgatctgaactacgactccgagcctgttcctcctcctccgacacctaggagccagtatctgagtgccgaagagaattacgaaagctgcccaccaagcccatacaccgagaggtcatacagtcaccacttgtaccccccacctccctctccatgcacggatagtagtta

SEQ ID NO: 228915 - DNA, 4437 bp, synthetic construct
  misc_feature 1..4437: note = Description of Artificial Sequence: Synthetic coding sequence
  source 1..4437: mol_type = other DNA
taattggaccagccaagggcaatcgcgctggatccgtcatccggctttatgtactggacggactggggagaggtccctaagattgaacgcgctggcatggacgggtcttctaggtttattatcatcaacagtgagatctactggcccaacgggctgacgctggactacgaggagcagaagctgtactgggccgatgctaaattaaattttatacataagagtaacctggatggaacaaaccgccaagctgtggtgaaaggcagtctcccccatccctttgccttaaccttattcgaggatatcctttactggaccgattggtctacccatagtattctggcctgtaacaagtacactggggagggcttgcgggaaatacactctgacatcttcagccccatggacatccacgcattttcacagcagcgtcagcccaacgccacaaacccctgtggaatcgacaatgggggttgtagtcacctgtgcctcatgtcaccggtgaaacctttctatcaatgcgcctgtcccacaggcgtgaagttgctggaaaacggaaagacgtgcaaggatggagccacggaactgcttcttttggccagaagaactgatctgaggcgaataagtttggatacccctgatttcactgacattgtgttacagctggaggacatcagacacgcaatagctatcgattacgatcccgtcgagggctatatatattggacggatgatgaagtcagggccataagacgatctttcattgatggtagtggaagtcaatttgtggtcaccgcccaaatcgcccacccggacggaatcgccgtggattgggtggcgagaaacctgtattggactgatacaggaaccgataggatagaggtcactcggctaaacgggaccatgcggaaaattctaatcagcgaggaccttgaggaaccccgtgccatcgtgctggaccctatggtgggatatatgtactggactgattggggagagattcccaagatagagcgagctgctcttgatgggtctgatagagttgtactcgtcaatacaagtctcggctggcctaacggtctcgcactcgactatgatgagggcaaaatctactggggggacgcaaaaacggataagatcgaggtcatgaacactgatggcacgggtaggagggtgctggtagaagataaaatcccacacatctttgggtttacccttttgggtgattatgtctattggactgactggcagaggaggagcatcgagcgagtgcataagagatctgcagagcgcgaagtgatcattgatcaacttcctgatttaatgggactgaaggctacgaatgtacatcgcgtgatcggctccaacccttgcgctgaagagaacggcggatgtagccacctgtgcctttatagaccacaaggcttaaggtgcgcatgtcccatcgggttcgagctgatctctgatatgaagacatgcatagtaccagaggcttttctcctattctcacgacgggcagatatccgtcgcatatctctagaaactaacaacaataacgttgccatccccctgacaggggttaaggaagcaagcgctttggatttcgatgtgacagacaaccgtatatactggactgatattagtcttaaaacaatttctagagccttcatgaacgggtctgccctcgaacatgttgtcgagttcggcctggactacccagaaggcatggcggtggattggctgggaaagaatctctattgggccgataccggaactaataggattgaggtgagtaaactcgacgggcagcatagacaggtgctagtttggaaagatttggacagcccacgggcattggctcttgatcctgccgagggctttatgtactggaccgaatggggaggcaaacccaagatcgaccgagccgcaatggatggctccgaaaggacgacactggtgcccaacgtggggcgtgccaacggattgacaatcgactatgccaagcgtcgtctgtactggacagacctggacacaaacctcatcgagtcctccaatatgttggggctgaaccgagaagtgatcgccgacgatctgccgcatccatttgggttgacacagtaccaggattatatctattggactgattggtcccgcagaagcatcgaacgagcaaacaagacctccgggcagaatcggaccattatccaaggccaccttgattatgtgatggatatcttggtctttcactcctccagacagagtggctggaatgagtgtgcctcaagcaacggtcactgcagtcatctgtgcctggctgtgcctgttgggggattcgtgtgcggatgtcctgcacactacagtctgaatgccgataacagaacctgcagtgctccaaccaccttccttctgttcagccaaaagtctgccattaatcgaatggtaattgacgaacagcagtcgccagacattattctccccatacacagtctgaggaatgtgagagccattgattacgaccccctggacaagcagctgtactggatcgacagtagacagaacatgattcggaaggcgcaggaggatgggtctcagggatttacggtggtcgtctcttccgtgcccagccaaaaccttgagattcagccctatgatctgtctattgacatctattcacgctatatctactggacctgcgaagccacaaatgttattaatgttacccgtctggatggaagaagcgtgggggtagttttaaagggtgagcaggacagaccacgggctgtggtggtaaaccctgagaagggctatatgtactttaccaatttgcaggagcgaagcccaaagatcgagagagccgcactcgacggaacagagagagaagtgttattcttctccgggctgtctaagcctatcgcgttagccctggattccagactcgggaagctgttttgggccgactccgacctgcgacgcatcgaatcaagtgacctgtccggggctaaccgtatcgtccttgaagactccaacatcctacagcccgtgggactgacagtgtttgaaaattggttgtactggatcgacaagcagcaacagatgattgagaaaatagacatgacagggcgagaaggcaggacaaaagtgcaagcaagaatcgcccaactgtcagacattcatgccgtgaaggagttgaaccttcaggagtaccgacaacatccttgcgctcaggacaatgggggatgttctcacatctgtctggtcaagggcgatggcactactcgctgttcttgtcccatgcatctggtgctgttgcaggacgaactgagctgtggagaacccccaacttgcagccctcagcagtttacatgttttacgggggagattgactgcatccccgtggcttggcggtgtgacggattcacggaatgtgaagatcattccgacgagctgaactgtccagtttgctccgagtcacaattccagtgcgcgtccggacaatgcattgatggcgcactgcgttgcaatggtgatgcaaattgtcaggataaatctgacgagaaaaattgtgaggtactgtgcctgattgaccagttccgctgtgccaatggccagtgtataggtaaacataagaaatgcgaccacaatgttgactgtagcgacaagtccgatgagctggactgttacccaacagaggagccggctcctcaggccacaaacacagttggctccgtcatcggcgtcatcgtcactatcttcgtttccggaacggtctatttcatatgccaacgaatgctgtgccccaggatgaagggagacggtgaaacaatgactaatgactacgtggtccacgggcctgcttcagtgcccctcgggtacgtcccacatccaagctccctgagtggctcgctgcctggaatgagccgtggcaagtctatgatctctagcctatcaattatggggggaagtagtggaccaccctatgaccgggcacatgttacgggggcatcatcctcctcatcctctagtactaagggtacatacttccccgcaattctcaacccacctccctctcctgccactgagagatcccactacactatggagttcggctatagcagtaatagccctagcacgcacaggagttacagctaccgcccttatagctaccgccactttgccccaccaaccacgccgtgcagcaccgacgtctgcgacagcgactacgccccaagcaggagaatgacgagcgtcgccaccgcaaagggttatacatctgatctgaattacgactcagaaccggttccaccacctccaaccccaaggtcacaatacctcagcgccgaagagaactacgagtcttgcccaccaagtccatatacagaaaggtcttactcccatcacctgtaccctccgcctccgagtccctgcaccgactcatcctag

SEQ ID NO: 228916 - DNA, 2382 bp, synthetic construct
  misc_feature 1..2382: note = Description of Artificial Sequence: Synthetic coding sequence
  source 1..2382: mol_type = other DNA
atgggcctgccagaacccggtcccctgcgcttgctggccctgttgctactactgttgctgctgctgctcctgcagctccagcatctcgccgcagccgctgctgatcccttactcggcggacaaggtcccgcaaaagactgtgagaaggaccagtttcagtgtcggaatgaacgttgtattcccagtgtttggcggtgcgatgaggatgacgattgtttggaccattcagacgaagatgactgtccgaagaagacttgtgcagacagtgactttacctgcgataatggccactgtatacacgaacgatggaaatgcgatggtgaggaggaatgtcccgacggctcggatgagtcggaagcgacctgcaccaagcaggtgtgtcccgctgagaaactgtcttgtggccctacatctcacaagtgtgtgccagcaagttggagatgtgatggagagaaagactgcgagggcggagccgatgaggccggatgtgcaacatggctgaacgagtgcctgcataataacgggggttgttcccacatatgcaccgatttaaagatagggtttgagtgcacatgcccggctgggttccagcttcttgaccagaagacttgcggagacattgacgagtgtaaagatccagacgcatgcagccaaatctgcgtgaattacaagggctacttcaaatgcgaatgttaccccggatacgagatggacctgcttacgaagaattgtaaggcggcagctggcaaaagtccttcgttgattttcacaaatcgccatgaggtgaggaggatcgatcttgttaaacgtaattactcccgcctcattcctatgctgaagaatgtagtggccctagatgtcgaggtggcaacaaaccgcatctattggtgtgacctctcctacaggaaaatctacagtgcctatatggacaaggcgagcgatccaaaagagcaggaagtgcttattgatgaacagctccactccccggaaggcctggccgtcgattgggtgcacaagcatatttattggacagattcagggaataaaaccatatccgttgcaactgttgatgggggacggcgaagaaccttattcagccggaatttgtctgagcccagagcgatcgccgtggaccctttacggggtttcatgtattggagtgactggggagaccaggcaaagatcgagaagtcaggtctgaacggtgtggaccggcagaccctggtatctgataacattgagtggcctaatggtatcactctcgacctcttgagtcagcgactgtattgggtcgactcgaaattacaccaactgtcgtccattgatttttcgggcggtaaccgaaagacactaatctcttcaaccgatttcctgtctcatccattcggaatcgcagtgttcgaggataaggtgttctggacagatttggagaacgaagctatattttccgctaacaggctcaacggtctagaaatttcgatactggccgaaaacctaaataatcctcatgatattgtgatatttcacgaactgaaacagcctcgggctcccgacgcgtgtgagctcagtgtacagccaaacggaggctgcgagtatctttgtcttcctgctccacagatttcttcacacagtccaaaatacacttgtgcgtgcccagataccatgtggctaggaccagacatgaaaaggtgctatcgtgcccctcagtccacgtccacaaccacacttgcctccacaatgacacgcacagtgcctgccactacgcgagcacccggaacaaccgtgcaccgcagtacttatcagaatcatagcactgaaacaccatctctgacagcagcagttccttcctcagtgtctgtccccagggccccttccatttcaccttccacactttcaccagccactagtaatcattctcagcattacgccaacgaggatagcaaaatgggcagtacggttaccgctgccgtcatcggcatcatagtcccaatagtggtgatagcactgttgtgcatgtcaggctaccttatttggaggaattggaaacgcaaaaacacaaagagtatgaattttgataatcctgtctacagaaagactacagaggaggaagatgaagacgagctccacataggacgaaccgcccagattggccacgtctaccctgccgctatttcgtctttcgacagaccactgtgggcagagccatgtctcggagagactcgtgagccggaagaccctgcacccgctctgaaggaactgtttgtgctgccaggtgaaccacggagccagctgcaccaattgcccaagaaccctctcagtgagttacctgtggtcaaatccaaacgggtggcactgagcctggaggatgatggcctcccgtag

SEQ ID NO: 228917 - DNA, 2892 bp, synthetic construct
  misc_feature 1..2892: note = Description of Artificial Sequence: Synthetic coding sequence
  source 1..2892: mol_type = other DNA
atgggccttcccgaacccggacctttacggttgcttgctttactgttgttactgctgctgcttctgctgttacagttacagcatctggcagccgctgccgctgaccccttattaggcggacagggcccagcaaaagactgtgagaaagaccagtttcagtgccgaaatgaaaggtgtattcccagtgtatggcgctgtgatgaagatgatgattgcctcgaccacagcgatgaggatgattgcccgaaaaaaacctgcgctgactcagattttacctgcgacaacgggcattgcattcatgagagatggaagtgtgacggagaggaagagtgccccgacggaagtgacgaaagcgaggctacctgtacaaaacaagtgtgcccagctgagaagctgtcctgcggtcccacgtcccacaagtgcgtcccagcctcgtggcggtgcgatggcgagaaagattgcgaggggggtgctgatgaagccggttgcgccactctgtgcgccccacatgaatttcagtgcggaaaccgatcttgtctcgcagcggtcttcgtctgcgacggggatgatgactgcggcgacggctcggatgagcgaggctgtgccgatcccgcatgtggcccacgagagttccgctgcggaggcgatggcggaggcgcatgtattcccgagcggtgggtgtgcgaccggcaatttgactgtgaagatcgctcagatgaagctgcggaactatgtggacgccctggcccaggtgctacctcggctcctgcagcttgcgctactgccagccaattcgcctgtcggtctggcgagtgtgttcatctggggtggaggtgcgatggagatcgtgactgtaaggataagagcgacgaggcagattgtccactcggaacctgtaggggcgatgagttccagtgtggcgacggaacctgcgtcctggctattaaacattgcaatcaagaacaagactgccccgacgggagcgatgaagcagggtgccttcagggcctgaatgagtgcttgcacaacaatggagggtgctctcacatttgtaccgacctcaagattggcttcgaatgcacctgccccgcaggattccaactactggatcaaaagacctgtggggacatcgatgaatgcaaagaccctgacgcttgttctcagatatgcgtgaattacaaaggctatttcaagtgtgagtgctacccgggatatgagatggatcttttgaccaagaattgtaaagctgccgcagggaagtctccgagcctgattttcactaacagacatgaagtccgaaggatcgacttggttaagcgaaattactctcgtctgatcccgatgcttaaaaacgtggtggcactggatgtggaggtggccacgaatagaatctactggtgtgatctgagctatagaaaaatctattcagcttatatggacaaagccagtgacccaaaagaacaggaggtgctgattgacgaacaactgcactcccctgagggtttggccgtggactgggtgcataagcacatctactggacggactcagggaataagactatctcggtggcaactgtggatggtgggcgacgtcgtacacttttctctcgaaacctcagcgaacctagagcgattgctgttgatcctctccgtggctttatgtactggtcagactggggagaccaggcaaagatcgaaaagagcggcctgaatggcgtcgatcggcagacattggtctcggataacatagagtggcctaatgggattactttggacctcctgtcccagcgcctgtactgggtggattcaaagctgcatcaactgtcctccatcgattttagcgggggaaatagaaagacgctgatctcatctaccgatttcttgtcccatccatttggaattgccgtgttcgaggacaaggttttctggaccgacctcgagaatgaggctatcttctccgccaataggttgaatggacttgagatatccatcctggcagagaacctcaataacccccacgacatagtgatctttcacgaattgaagcagcccagggcgcctgatgcatgcgagctgtcagtgcaacccaacggaggatgtgagtacttatgcctgcctgccccacagatcagtagccactcacccaagtacacttgtgcttgtcctgatacaatgtggctcggccctgatatgaagcggtgctatcgagcacctcagtccacaagcactaccacgttggcttccacgatgaccagaactgtccccgcaactacacgtgccccaggaaccaccgtccatcgtagtacgtaccaaaatcactctacggaaacaccttcactgacagccgcagtgccatcgagtgtgtcagtgccgcgtgcaccgagtatctccccttcaacattatctccagcaacctcaaatcactcacagcactatgccaatgaagactccaaaatggggtcgactgtaacggcggctgtgatcggcatcatcgtccccatcgtcgtcatcgccttgctgtgcatgagcggctacctcatctggaggaattggaaacgcaaaaataccaagtccatgaatttcgataatcctgtatacaggaagactacagaggaagaggatgaagacgaactgcatatcgggagaacagcgcagattgggcatgtctatccagctgcgatcagtagctttgacagacccctgtgggccgagccatgcctgggcgaaactcgggagccagaggatcccgctcctgcgctgaaagaacttttcgtgttgcctggcgagcccagaagccagcttcaccaactacctaagaatcctcttagtgagttgcctgtggtgaaatctaagcgtgtggccctttccctggaagacgacggattaccatag

SEQ ID NO: 228918 - DNA, 2103 bp, synthetic construct
  misc_feature 1..2103: note = Description of Artificial Sequence: Synthetic coding sequence
  source 1..2103: mol_type = other DNA
atgggactgccagaacccggacctcttaggttactcgcactcctcctgttacttctgttacttctgttactgcagctgcaacacctcgccgcagcggcagcggaccctctgctcgggggacaaggccctgccaaagactgcgagaaggaccaatttcaatgcaggaatgagagatgcattccttccgtctggcgatgcgacgaggacgatgactgtctggaccattctgacgaggacgactgccctaaaaagacctgcgccgatagcgacttcacttgtgacaatggccactgcattcacgagaggtggaaatgcgacggagaggaggagtgtcccgacgggtcagacgaaagcgaggctacttgcacaaagcaggtctgcccagccgaaaaacttagctgcggtcccacaagccataagtgtgtgcctgcttcttggagatgcgatggagagaaggactgtgaaggcggagctgatgaagccggatgcgctacctctctcgggacctgtagaggggacgagttccagtgcggggatggaacgtgtgtgctagcaatcaaacactgtaatcaggaacaggactgccccgacggtagcgatgaagctggttgtctccagggcctaaacgagtgcctacataataacgggggatgcagccacatttgtacagacctgaaaataggatttgagtgcacctgcccagcaggtttccagctcctggaccaaaaaacttgcggcgatatcgatgaatgcaaagatcccgacgcatgcagccagatttgcgtcaattacaaaggatattttaagtgcgagtgctaccccggatatgagatggacttactaaccaagaactgtaaagctgccgctggcaagtctccgagcctgatcttcaccaatcgacacgaggtccgcaggatagatttggtgaagcgaaattacagccggctcattccgatgctgaagaatgtggtggctctggatgtggaagtggctactaatcgcatctattggtgcgacctgtcatatcgcaagatttattcggcctacatggacaaagcttctgaccccaaagagcaagaggttctcattgacgaacaactccacagccctgagggcctggccgtggattgggtccacaagcacatttattggaccgattctggaaataagacaatatccgtggccaccgtcgacggcggacggaggcggaccctgtttagccggaatctgagcgagccccgagcaatcgccgtggatccactacgcggtttcatgtattggagcgattggggcgaccaggctaagattgaaaagtctggcctcaacggtgtcgacagacagactctggtctcagacaacatagagtggccaaacggcatcactctggacttactgtcccagaggctgtactgggtggactctaagctccaccagctgtctagcatcgacttctcagggggaaatcgcaagacactgatcagttccacagattttctgtcgcaccccttcgggatcgccgtttttgaggacaaagtgttttggacagacctggagaacgaggccatcttttcagctaatagactgaacgggcttgagatttccatcttggctgaaaatctcaacaacccacacgatatcgtgattttccatgagctgaagcagcccagggcacccgacgcttgcgaactcagcgttcagccaaacggtgggtgcgagtatttgtgtctccccgctcctcaaatctcctctcatagccctaagtacacttgtgcctgccctgacaccatgtggttaggcccagacatgaagagatgttaccgggacgcaaacgaggactctaagatgggatccaccgtcaccgcagccgtgatcggcattatcgttcccatcgtggttatcgccctcctctgcatgtccgggtacttaatttggcgtaattggaaaaggaaaaacacaaagagtatgaatttcgataacccagtgtaccgcaagaccaccgaagaagaggacgaggatgagctgcatattggcaggacggcacagattgggcacgtgtatccagccagagtggctctctcccttgaggacgatggtctgccctag

SEQ ID NO: 228919 - DNA, 2715 bp, synthetic construct
  misc_feature 1..2715: note = Description of Artificial Sequence: Synthetic coding sequence
  source 1..2715: mol_type = other DNA
atgggtctgcccgagcccggaccactcagactcctcgctctgctgctgctgctattgctactactattgttacagttgcagcacctggctgcagcggctgctgatcccctccttgggggacagggccctgcaaaggactgcgagaaagaccagttccagtgccgtaacgaaagatgcattccctctgtctggaggtgtgacgaagatgacgattgcctggatcactcagacgaggatgattgcccaaagaagacttgcgccgatagcgacttcacatgtgataacggacactgtattcacgagcgctggaagtgtgatggagaagaggagtgtccggatggatctgatgagtctgaggccacttgcacaaagcaagtctgtccagctgagaaactcagctgcggacctaccagccacaagtgcgttcctgcctcatggcggtgtgacggcgaaaaagactgtgaaggaggcgctgatgaggccggatgtgcaaccctttgtgctccccacgaatttcagtgcgggaaccggtcatgtttggctgccgtttttgtgtgtgatggggacgacgattgtggtgatggctctgatgagcgaggatgtgcagacccagcatgcggccctagagagttccgttgtgggggtgacgggggaggagcctgtatccctgagaggtgggtgtgcgaccgacagtttgactgtgaggaccgcagcgacgaggccgcagagctgtgtggcagaccgggtcccggagctacatccgccccagcagcatgcgccacagcttcacaattcgcatgccggagtggtgaatgcgtgcacttaggttggaggtgcgatggagatagagactgtaaggacaaaagtgatgaggctgactgtcctctgggcacttgccgcggagatgagttccagtgcggagacggcacctgcgtcctggcgatcaagcactgcaaccaggagcaggactgcccagatggctctgatgaggccggatgcctgcagggcttaaatgagtgccttcataataatggaggctgttctcacatctgcacagatctgaaaatcggcttcgagtgcacctgcccagctggattccagctcctggaccaaaagacttgcggtgatatcgacgagtgtaaggaccctgatgcgtgcagccaaatttgcgttaactacaaaggctatttcaaatgtgagtgctatccagggtatgagatggatctcctgacaaagaattgcaaagctgctgctgggaagagcccttcccttatattcaccaaccgtcacgaggtcaggcgaatcgatctagttaagcgtaattactccaggctgatcccaatgctgaagaatgtggtcgccctagacgtggaggtggccacgaacaggatttactggtgtgatttgtcctatcggaagatttactcggcctacatggacaaggctagcgaccctaaggagcaggaagtgctgatcgatgaacagctgcattcacccgaggggctcgcagtggactgggtgcataaacacatctattggacagactccggcaacaaaacaatttcagtggccaccgttgatggcggacgcagacggaccctgtttagccgcaacctgagcgagccacgtgctattgccgtggatcccctgcgcggatttatgtactggtcggattggggagaccaggcaaaaattgagaaatccggtttaaatggcgtggatcgacaaaccctggtgtccgataacatcgaatggcccaacggcatcactctcgatctgctttcacagagactgtattgggtggactccaaactccaccagctttcctccatagacttctccggaggcaatagaaaaactctgataagctctaccgatttcctatcacacccattcggaatcgccgtgtttgaggacaaggtgttctggacagacctcgaaaacgaagcgatattctcggccaatcggctcaacggccttgagatctctattctcgctgagaacctcaataatccacacgatattgttatatttcatgagctcaagcagccaagggctcctgacgcctgtgaattgtcggttcagcctaacgggggatgcgagtacctttgcctgcctgctccccaaatttcttctcactccccgaaatacacctgcgcctgtccggacaccatgtggctgggtcctgacatgaaaagatgttacagagccccacagtctacctctacaacaacactggcaagtacgatgactcggacagtgccagctacaacacgagctcccggtacgacagtgcaccggtctacatatcagaaccacagtacagagacgccttccttaaccgctgccgtcccttcttccgtgagtgtgcctagagctcctagtatcagcccttccactctgtctcctgccacatcaaaccacagtcaacattacgctaatgaggactctaagatgggatcgacggtcacagctgccgtgatcggtatcatagtgcctatagtggttattgctctgctgtgcatgagcggctacttaatctggcgtaattggaaaaggaagaataccaagtcaatgaacttcgacaaccccgtgtacaggaagacgactgaagaggaagatgaagatgaactgcacattggcagaaccgctcaaatcggccatgtctacccagccagagtcgctctgagcctggaagacgatgggctgccttag

SEQ ID NO: 228920 - DNA, 1074 bp, synthetic construct
  misc_feature 1..1074: note = Description of Artificial Sequence: Synthetic coding sequence
  source 1..1074: mol_type = other DNA
atggctccccgtcgcgtgcggagttttttaagggggctgcccgctctgctcctgcttctcctttttctggggccatggcccgctgcctcccatggcggaaaatacagccgagagaaaaaccagcctaagccttcaccaaagcgagaatctggagaggagtttcgcatggagaaactcaaccagctctgggagaaggcccaacggctccaccttccgcctgtgcggctggctgaattgcacgccgatttgaagatccaggaacgagatgagttagcctggaaaaaattgaaactcgacgggttagacgaggacggggagaaagaggcccgtctgatccggaatctgaacgtgatacttgccaaatatggcctggatggcaagaaggatgctaggcaagtaacttccaattctcttagcggcacccaggaagacggcctcgatgatccaagactcgaaaagctttggcataaggctaaaacatccggcaagttttcaggagaggaactcgataagctgtggagggaatttttacatcataaggagaaggttcacgagtacaacgtgcttctggagacgctcagcaggacagaagaaatccacgagaatgtgatttccccttctgacctgagcgacattaaagggtcagtgcttcatagccgacacaccgaactcaaagagaagttacgatctattaaccagggcctcgaccggctcagaagggtatcccaccagggatatagtactgaggcagagttcgaggaacctagggtaatcgatctgtgggacctggctcaatcagccaacttaaccgacaaagaactggaagcatttcgcgaggaacttaagcattttgaagccaaaattgagaagcacaaccactatcagaagcagttggagatcgctcacgagaagcttcggcatgccgaatccgtgggagacggggagagggttagtcgtagtcgagagaaacacgctctactggagggacgcactaaggagctgggttatactgtgaagaagcacctgcaggatctgagcggaaggatatcaagagcccgtcacaatgaactctag

SEQ ID NO: 228921 - DNA, 402 bp, synthetic construct
  misc_feature 1..402: note = Description of Artificial Sequence: Synthetic coding sequence
  source 1..402: mol_type = other DNA
atgaattacatgcccggaacagcatcattgatagaagacatcgataaaaagcacctggtgcttctgcgtgatgggagaactcttatcggctttctgcggtctatcgatcagtttgctaacttggtgcttcatcaaacagtagagcgaatccacgtcgggaagaaatatggtgacatacctaggggcatcttcgtcgtgaggggagagaatgtggtgttgctcggagaaattgacctcgagaaggagtccgatacccccctgcagcaggtgagcatcgaagagatcctggaggaacaaagggtggaacagcaaactaaacttgaagctgagaaactaaaagtacaggctctgaaggatcggggactaagcataccgagggctgatacgctggatgagtattag

SEQ ID NO: 228922 - DNA, 588 bp, synthetic construct
  misc_feature 1..588: note = Description of Artificial Sequence: Synthetic coding sequence
  source 1..588: mol_type = other DNA
atggctgcccctccaggcgagtatttcagcgtcggcagccaggttagctgtcggacgtgtcaagagcaacgactgcagggagaagtagtggcttttgattatcagtcaaagatgttggccttgaagtgcccaagtagtagtggtaaacccaaccatgcggatatcctcttgattaatcttcaatatgtgagcgaggttgagatcatcaacgatcggaccgaaacccctcccccattggctagcctgaatgtctccaagctggcatctaaagcaaggaccgaaaaagaggagaaactttcccaagcatatgcaatctctgctggcgtttcactcgagggacagcagctttttcaaaccatacacaaaacaatcaaggattgtaagtggcaggaaaagaatatcgtggtgatggaagaggttgtcatcacaccaccctatcaagtggaaaactgcaagggaaaggagggttcagcacttagccatgttagaaagatcgtagaaaagcactttagagacgtcgaatctcagaagattcttcaacggagccaggcgcagcagccccagaaagaggctgctctgagctcttag

SEQ ID NO: 228923 - DNA, 588 bp, synthetic construct
  misc_feature 1..588: note = Description of Artificial Sequence: Synthetic coding sequence
  source 1..588: mol_type = other DNA
atggcagcccctccaggagagtatttttcggtgggctctcaagtaagttgtcggacctgtcaagagcagcgcttgcaaggggaggtggtggccttcgactatcagtccaaaatgctggcactgaagtgtccatcctcctccggtaagcctaatcatgcagacatcctactcattaatctccagtacgtaagcgaggtcgagataattaacgatcgtacagaaacaccacctccgctggcttccctaaatgtatcgaagctcgcctctaaggcacggacagaaaaggaggagaagttgtcacaggcttacgcaatctcggcaggggtcagcttagaagggcagcagctatttcagactattcataagactatcaaggactgtaaatggcaagagaagaacattgtggtcatggaagaggtggtgattaccccaccataccaggtggagaactgcaagggaaaagaggggagcgccttatcccacgttcgcaagatagtagagaagcattttcgggatgtagagtcccaaaaaattttgcagcgctcgcaggcccagcagccacagaaagaggcagcgctctcttcatag

SEQ ID NO: 228924 - DNA, 288 bp, synthetic construct
  misc_feature 1..288: note = Description of Artificial Sequence: Synthetic coding sequence
  source 1..288: mol_type = other DNA
atgctgttttactccttcttcaaatcactggttggtaaggacgtggtcgtagagctcaagaatgatctgtccatctgcggcacactgcacagtgtcgaccagtatctaaatatcaagttaaccgatatctcggtcaccgaccccgagaaataccctcatatgctcagcgtgaagaactgctttattcggggaagtgtggtgagatacgttcagctgcccgcagatgaggttgatactcagctgctccaggacgcagcaagaaaggaggccttacagcaaaaacagtag

SEQ ID NO: 228925 - DNA, 288 bp, synthetic construct
  misc_feature 1..288: note = Description of Artificial Sequence: Synthetic coding sequence
  source 1..288: mol_type = other DNA
atgttattctactcattttttaagtccctggtgggaaaggacgtggtggtggaactgaaaaacgacctcagcatctgcggtaccctgcactcggtggatcaatacttgaacattaagctgactgatatctccgtgactgatcccgagaagtatccccatatgctaagtgtcaagaattgcttcatcaggggatcagtggtgcgttatgtgcagctgccagctgacgaagtggacacccagctgctacaagacgccgctcgcaaagaagctcttcaacagaagcaatag

SEQ ID NO: 228926 - DNA, 288 bp, synthetic construct
  misc_feature 1..288: note = Description of Artificial Sequence: Synthetic coding sequence
  source 1..288: mol_type = other DNA
atgctgttctacagcttttttaaatccctcgtcggaaaagacgtcgtggtggagctgaaaaacgatttgtctatctgcggaactctgcattccgtggatcagtatttaaatatcaagctgacagatataagcgtcaccgaccccgagaaatatcctcatatgctatccgtaaagaattgttttatccgagggtcagtggtaagatacgtgcagctgccagcagatgaagtggatacccagctcctccaggacgcagccagaaaggaggcccttcagcagaaacagtag

SEQ ID NO: 228927 - DNA, 288 bp, synthetic construct
  misc_feature 1..288: note = Description of Artificial Sequence: Synthetic coding sequence
  source 1..288: mol_type = other DNA
atgcttttctattcattttttaagtccctcgtcggcaaggacgtagttgtggagttgaaaaacgacttgagtatatgcggaactctgcactctgtggaccagtacttgaacatcaagctcacagacattagcgtaaccgacccagaaaagtatccacatatgttatctgtgaagaattgtttcatacggggtagcgtcgtcaggtatgtgcagctgcccgctgacgaagtggatacccagctattgcaagacgcagccagaaaggaagcactgcagcagaagcagtag

SEQ ID NO: 228928 - DNA, 288 bp, synthetic construct
  misc_feature 1..288: note = Description of Artificial Sequence: Synthetic coding sequence
  source 1..288: mol_type = other DNA
atgctcttctattctttcttcaaatcacttgtgggcaaagatgttgtcgtcgagctaaaaaacgatctatccatctgcggtacattgcactccgttgaccaatatttgaacatcaaactcacagacatcagcgtcaccgaccctgaaaaatatcctcacatgttatccgtgaagaattgtttcatccgtggtagcgtggtgcggtacgttcagttacctgctgacgaggtcgatacacaactcttgcaggacgctgccagaaaggaagcattgcagcagaagcagtag

SEQ ID NO: 228929 - DNA, 288 bp, synthetic construct
  misc_feature 1..288: note = Description of Artificial Sequence: Synthetic coding sequence
  source 1..288: mol_type = other DNA
atgttgttctattcatttttcaaatctcttgtgggcaaggacgtggtggtggaactgaaaaacgacttatccatttgtggaaccctccactctgttgatcagtatctgaacattaagctcacggatatcagcgtaaccgaccctgagaaatatccccatatgctgagcgtcaagaactgtttcattagaggttccgtggttcgctacgtacagctccccgcagacgaagtggacacgcagctgctgcaagacgcagccagaaaggaagccctgcagcagaaacagtag

SEQ ID NO: 228930 - DNA, 309 bp, synthetic construct
  misc_feature 1..309: note = Description of Artificial Sequence: Synthetic coding sequence
  source 1..309: mol_type = other DNA
atggcagacgatgtagatcaacagcagaccaccaacactgtagaggagcccctggacttgatcagattgagcctcgacgaaaggatctacgtgaagatgagaaacgacagagagctccgcggacgcctccatgcctacgaccagcaccttaacatgatcctgggagatgtggaggagaccgtaacaacaattgagattgatgaagaaacttacgaggaaatttataagtccaccaagcgtaatatcccaatgttgttcgtgcggggtgacggcgtagtccttgtagccccaccattgcgggtgggctag

SEQ ID NO: 228931 - DNA, 420 bp, synthetic construct
  misc_feature 1..420: note = Description of Artificial Sequence: Synthetic coding sequence
  source 1..420: mol_type = other DNA
atgctcccactgagcctactcaaaactgcacagaaccatcctatgcttgtcgagctgaagaacggagagacgtacaatgggcacctcgtcagctgtgacaattggatgaacatcaatctgcgggaggttatatgcacctcacgggacggagataagttctggaggatgcctgagtgctacatccgaggctccacaatcaagtatctgaggattccggacgagatcattgacatggtgaaggaagaagttgtagctaaaggacgtggtcggggaggtctccaacagcagaagcagcaaaagggtcggggaatggggggtgccggtcgcggagtttttggcggtcggggaagagggggtatccccggaactggcaggggccaaccagagaagaaaccgggtagacaggccggtaagcagtag

SEQ ID NO: 228932 - DNA, 420 bp, synthetic construct
  misc_feature 1..420: note = Description of Artificial Sequence: Synthetic coding sequence
  source 1..420: mol_type = other DNA
atgctgccgctgagcctgctgaaaactgcccaaaatcaccccatgttggttgagttaaaaaatggggaaacctacaatgggcatctcgtctcgtgcgataattggatgaacattaacttaagggaagtgatctgcacctctagagatggagacaagttttggaggatgcccgaatgttacattagaggttcaaccatcaaatacctgagaatcccagatgagatcattgacatggtcaaagaagaggtggtggccaagggacgaggaaggggagggcttcaacaacaaaagcagcagaaggggcgaggcatgggcggtgcagggagaggggtctttggagggagagggcgtggcggaatccccggaactggacgtgggcagccagagaagaagccaggtcggcaagctgggaaacagtag

SEQ ID NO: 228933 - DNA, 276 bp, synthetic construct
  misc_feature 1..276: note = Description of Artificial Sequence: Synthetic coding sequence
  source 1..276: mol_type = other DNA
atggctgccaacgcaacaaccaacccaagccagctgctacctctcgaattggtggacaaatgcatcggttctagaatccatattgtgatgaaatcggacaaagagatcgtcggtactttactcggtttcgacgatttcgttaacatggtacttgaagacgtcaccgaattcgaaatcacgccggaggggaggcggatcacaaaactggaccagatactgctgaatggaaacaatataactatgctggtccccggaggcgaaggtcctgaggtttag

SEQ ID NO: 228934 - DNA, 243 bp, synthetic construct
  misc_feature 1..243: note = Description of Artificial Sequence: Synthetic coding sequence
  source 1..243: mol_type = other DNA
atgtcgcttcgaaagcagacccctagtgatttcctcaaacagatcatagggcgtccagttgtcgttaaactgaactcaggcgtggattataggggtgtgctagcatgcctcgacggatacatgaatattgctctggagcagactgaggaatatgtgaacggccagctaaaaaacaaatatggggatgccttcatccgcggaaataacgtgctttatataagcacacaaaaaaggaggatgtag

SEQ ID NO: 228935 - DNA, 243 bp, synthetic construct
  misc_feature 1..243: note = Description of Artificial Sequence: Synthetic coding sequence
  source 1..243: mol_type = other DNA
atgagtctgcggaaacagacgccgtcagacttcttaaaacagattatagggcgacccgtcgtcgtcaaactcaattcaggcgtggattatcgtggcgtcctagcatgtctggacgggtacatgaacattgcactcgagcaaacggaagagtatgttaacggccagctgaagaataaatacggggacgcattcattcggggaaataacgtcctttacatttcaactcaaaaacggagaatgtag

SEQ ID NO: 228936 - DNA, 243 bp, synthetic construct
  misc_feature 1..243: note = Description of Artificial Sequence: Synthetic coding sequence
  source 1..243: mol_type = other DNA
atgtctcttcgaaagcagaccccttctgattttctgaaacagatcataggcaggcctgtcgtggtgaaactgaattccggagtggattatcgcggagtactcgcatgcctggacggatacatgaacattgccctcgagcaaactgaggaatacgtaaatgggcaactgaaaaataaatacggggatgccttcatcagaggcaataacgtcctgtatatctcaacccagaagcgaagaatgtag

SEQ ID NO: 228937 - DNA, 243 bp, synthetic construct
  misc_feature 1..243: note = Description of Artificial Sequence: Synthetic coding sequence
  source 1..243: mol_type = other DNA
atgagcctccggaagcagaccccaagtgattttctcaaacagataatcggacgccctgtggtggtcaaactcaatagcggagtggattacaggggggtgctggcctgtctcgatggctacatgaatatcgcactggagcaaaccgaggagtacgtcaacgggcagctgaagaacaaatacggcgatgcgtttatccggggaaataacgtgctgtatatctctactcaaaaaaggaggatgtag

SEQ ID NO: 228938 - DNA, 312 bp, synthetic construct
  misc_feature 1..312: note = Description of Artificial Sequence: Synthetic coding sequence
  source 1..312: mol_type = other DNA
atggctgacaaggaaaagaagaagaaggaatctattctggacctgagtaaatacatagacaaaaccattcgtgttaaatttcagggagggagggaagcttccgggatcttaaagggatttgacccactactcaacttagtactggatggaacaatcgagtatatgcgagatcctgacgatcaatataaattaaccgaagatacgcgccagctggggctggtagtgtgtcgcggtacatccgtggtactgatatgtccccaggacgggatggaagccatcccaaacccgtttattcagcagcaggatgcgtag

SEQ ID NO: 228939 - DNA, 1116 bp, synthetic construct
  misc_feature 1..1116: note = Description of Artificial Sequence: Synthetic coding sequence
  source 1..1116: mol_type = other DNA
atgagtgcgcaggctcagatgcgcgctcttctcgatcagctgatgggcactgcccgagatggcgacgaaactagacagagggtcaagtttacagatgatcgagtctgtaaatcacatctgttggattgttgtccccatgatatacttgccggtaccaggatggacttgggggagtgtaccaagatacatgatctggccttgcgtgcagactatgagatcgcctccaaagagagggacctgttctttgagttggacgcaatggatcaccttgaaagcttcatcgcagaatgcgatcggaggactgaactagctaagaaacgccttgccgaaactcaggaagaaatcagcgccgaagtgtctgcaaaggccgagaaggtgcacgaactaaacgaggagatcggtaagttattggccaaagctgaacaattaggcgctgagggcaatgtggacgagtctcagaagattttaatggaggtcgaaaaggtccgagccaaaaagaaagaggctgaagaggagtatagaaactccatgcccgcttcatcttttcaacagcagaagctgcgggtgtgcgaggtgtgcagtgcgtacctgggattacacgacaatgaccgccgactggccgatcacttcggaggaaaattacatttaggcttcatccaaatccgggagaagctggatcagctgcgtaaaacggttgctgaaaagcaggagaagcgaaatcaagatcgtctgcgcaggcgagaggagagagaacgtgaggagcggctgagccgcagaagcggtagtcgcactagggaccggagaagatcacgctcaagggataggcgcaggcgacggtcgcgatctacatcgcgagaacggagaaagttgtctcggagccgaagccgagatcgccatcgcagacatcgctcaagaagccggagtcattccagggggcaccgacgcgctagtcgagacaggagtgctaaatacaagtttagcagagagagagctagccgcgaagagtcatgggagtctggccgttcggagagagggcctcccgactggcggttggaaagtagcaatggtaagatggcctcccgccgatccgaagagaaagaggcgggagaaatatag

SEQ ID NO: 228940 - DNA, 978 bp, synthetic construct
  misc_feature 1..978: note = Description of Artificial Sequence: Synthetic coding sequence
  source 1..978: mol_type = other DNA
atgtctgcacaggcccagatgcgcgcactgctggatcagctgatgggcaccgcccgagacggcgatgaaacgcggcagcgagtcaaatttactgacgatcgggtgtgtaaaagtcacttacttgattgctgcccccatgatatacttgctggaacacgcatggaccttggcgaatgcaccaaaatccacgacctggcgttgcgggcagactatgaaatcgcctctaaagagagggacttgttctttgaactggacgctatggatcatctcgagagcttcattgccgaatgcgaccgacgtaccgaattggctaagaagcgcctggccgaaacccaagaggaaatcagtgcagaagtgagcgccaaagctgagaaggtgcatgagctcaatgaagagatcggcaaattgctcgcaaaagctgagcagctgggggctgagggaaacgtggacgagtcccagaaaatattaatggaggttgaaaaggttcgggctaagaagaaggaggcggaggaagagtaccggaattcaatgccggcatccagcttccagcagcagaagctgagggtctgcgaggtctgctccgcctacctcggcctccatgacaatgataggcgattagcagatcatttcgggggaaagttgcatctcgggttcattcagatccgggagaaactggatcaactgcggaagaccgtggcagagaaacaggagaagagaaaccaggatagactccggcgtcgggaagagcgggagagagaggaaaggctgagccgccgaagcggatcgaggacgcgggatagaaggagaagcagaagcagagataggaggagacgtagatcgcggtctacgagcagagaaaggaggaagctctcaaggtcgcgttcacgcgatcgccataggcgccaccgttcaagaagtcggtctcatagtcggggacataggagagcatcgagggacaggtcagcaaagtacaaatag

SEQ ID NO: 228941 - DNA, 819 bp, synthetic construct
  misc_feature 1..819: note = Description of Artificial Sequence: Synthetic coding sequence
  source 1..819: mol_type = other DNA
atggatttgggagagtgcaccaagatacacgacctggccctgagggccgattatgaaatagcttccaaagagagggacctgttctttgagttggacgcaatggaccatctcgagagttttatcgccgaatgcgataggagaacagagttggccaagaaacgccttgccgaaacacaggaagagatctccgcagaggtgtcagcaaaagccgaaaaggtacacgaacttaacgaggaaattggtaagcttttagcaaaggcagagcaactgggcgctgagggaaatgtggacgaaagccagaagatcctgatggaagtcgagaaggtcagggccaagaagaaggaagcagaggaggagtatcgtaattccatgcccgctagctcctttcaacaacaaaagctgcgagtgtgcgaggtctgctctgcctatcttggcttgcacgataatgatcgccgactcgccgaccactttggtggcaaattgcacttgggcttcatccagatccgcgaaaagctagatcagttacgcaaaactgtcgcggaaaaacaggaaaagcgaaaccaggacaggttgcgaaggcgggaggaacgcgaacgagaggagcgcctatcgcgcaggagcggcagcaggacccgcgaccgccgaagatctcggagcagagaccgtaggcgcaggcggtctcggtcaacctcacgggagcggagaaagttgtctagatcacggtctagagataggcatcgtagacaccggtcgcgttcaagaagccatagcaggggccatcgaagggccagccgtgacaggtccgccaaatacaaatag

SEQ ID NO: 228942 - DNA, 978 bp, synthetic construct
  misc_feature 1..978: note = Description of Artificial Sequence: Synthetic coding sequence
  source 1..978: mol_type = other DNA
atgtccgctcaagcacagatgcgcgctctgttagatcaactaatgggcaccgctcgagacggagatgaaactcgacagcgcgtaaagtttacagatgaccgggtatgcaagtcccatctactggattgttgtcctcatgacatcttggccggtacccgtatggatctgggtgaatgtaccaaaatccacgacctggctttgagggcggattacgagattgcaagcaaagagagagacttgttttttgagctggatgccatggatcatcttgagagcttcatcgctgaatgtgataggcgcacggagttggccaaaaaaaggcttgcagagacccaggaagaaatctccgctgaggtgagcgcaaaggccgaaaaagtgcacgagctgaatgaagagataggaaagctgttggcaaaagcggagcagttaggggctgagggaaatgtggatgaaagtcaaaaaatcctgatggaagtggaaaaggtgagagccaaaaagaaagaagccgaggaagagtaccgcaactctatgcccgctagttccttccagcagcagaaactccgggtttgcgaagtctgttctgcttaccttgggttgcacgataatgataggcgactggcagatcacttcggcggtaaactgcatctaggatttatccagataagggagaaactggaccagctccgaaaaactgtggctgaaaagcaagagaagcggaatcaggacagactgcgcaggcgagaggaacgggagcgggaggagcggttgtcgcggaggagcgggagtagaacacgagatcgacggaggtctaggagcagagatcgccgaaggaggcgcagccggagcacctcccgtgaaagaaggaaactctctcggagccgttcaagagatagacaccggagacatagaagccggtcacgttctcactcccggggacaccgcagagcgagccgcgaccgatccgcgaaatataagtag

SEQ ID NO: 228943 - DNA, 99 bp, synthetic construct
  misc_feature 1..99: note = Description of Artificial Sequence: Synthetic coding sequence
  source 1..99: mol_type = other DNA
atggatcttggagaatgcaccaagatacacgaccttgccctacgcgcagattacgagattgcgtcaaaggaaagggatctgttcttcgaactcgattag

SEQ ID NO: 228944 - DNA, 549 bp, synthetic construct
  misc_feature 1..549: note = Description of Artificial Sequence: Synthetic coding sequence
  source 1..549: mol_type = other DNA
atggatcacctggagagcttcatcgccgaatgcgacagacgcacagaattagctaagaaaagattagcggaaacccaggaggaaattagcgctgaagtgtcagctaaagccgagaaggtgcatgagttgaatgaggaaatcggcaaattgcttgctaaggctgaacaactcggagccgagggcaacgtggacgaatcgcagaagattctgatggaagtggagaaggtgcgggcaaaaaagaaggaagctgaagaagagtaccgcaactcaatgcccgctagcagcttccagcagcagaagctgcgcgtttgtgaggtgtgcagcgcttatttgggtctacatgacaatgaccgtaggttggccgatcactttgggggaaagcttcatctcggctttattcaaatcagagagaagctggaccaactccggaagaccgtggctgagaagcaggagaagagaaaccaggatagacttcgtaggagggaggagagggagagggaggagcgtctgtctaggcgcagtggcagccgtacaagggacagacgatag

SEQ ID NO: 228945 - DNA, 183 bp, synthetic construct
  misc_feature 1..183: note = Description of Artificial Sequence: Synthetic coding sequence
  source 1..183: mol_type = other DNA
taaagacgtaggagtcgatctcgtgataggagacgccgacgaagtcgcagcacttcccgagaaaggaggaagctgtcacgcagtagatccagggatcgtcatcgtaggcaccgttcgagaagcagaagtcactctaggggacacaggcgagcatcacgagaccgatctgctaaatacaaatag

SEQ ID NO: 228946 - DNA, 255 bp, synthetic construct
  misc_feature 1..255: note = Description of Artificial Sequence: Synthetic coding sequence
  source 1..255: mol_type = other DNA
atggaccatctagaatcattcattgcggaatgcgatcggcgtaccgagttggctaagaagcgcttggccgaaacccaggaagagatctctgcggaagtgtccgctaaggcagagaaagtgcacgaactcaatgaggagattggaaagttacttgctaaagctgagcagctcggcgctgaaggcaacgttgacgaaagccagaaaatactgatggaggttgagaaagtgcgggcaaagaaaaaagaagctgagtag

SEQ ID NO: 228947 - DNA, 1176 bp, synthetic construct
  misc_feature 1..1176: note = Description of Artificial Sequence: Synthetic coding sequence
  source 1..1176: mol_type = other DNA
atgcccgcatatttaaacctccagggaagcgtcagaaaagcgcctcactcgccgtctagagacacgacaagacagcgtattaagttctctgacgatcgagtttgcaaaagccatcttctgaattgttgcccccacgatgtgctgagtggcactcgtatggatctgggggagtgcctcaaggtccacgatctagccttacgggcagactacgaaatcgcctctaaggaacaagattttttcttcgaacttgatgcaatggaccatttgcagtccttcattgccgattgtgataggaggaccgaagtggcaaagaaaaggctggccgaaactcaggaagagatctccgcggaagtggctgctaaggctgagagggttcacgaactgaacgaggagatcggtaaactgcttgcaaaggttgagcagttgggcgctgagggcaatgtggaagagtctcagaaggtaatggatgaggtggagaaggctcgggctaaaaagcgcgaagcagaggaagtctatagaaattccatgccggcttcctctttccaacaacaaaagctgagagtgtgtgaggtatgttctgcgtacttgggactgcatgataacgataggcgattggccgatcactttggcggtaaactgcacctgggcttcattgagatacgtgaaaaactagaggagctgaagcgagtggtcgccgaaaaacaggaaaaaagaaaccaggaacggctgaaacgcagggaggaaagggaacgtgaagaaagggagaagttgcgaaggtcgcggtcacatagtaaaaaccccaagagaagtcgcagtcgggaacaccgaagacacagatccaggtctatgagtagggagagaaagcggaggacacggagcaagagtcgggagaaacgtcacagacacaggagccggtcaagcagccggtccaggtctaggtctcatcagagatcgaggcactcgagccgcgataggtcacgggaacgcagcaagcgcagatcatcaaaggaacggttccgcgaccaggacctggcctcatgtgaccgggaccgatcctctagagacaggtctcccagggaccgggatcgaaaggacaagaaacgctcgtatgagtctgctaatgggagaagtgaggatcggagatcttctgaggagagagaagcaggagaaatatag

SEQ ID NO: 228948 - DNA, 1179 bp, synthetic construct
  misc_feature 1..1179: note = Description of Artificial Sequence: Synthetic coding sequence
  source 1..1179: mol_type = other DNA
atgagtgctcaggctcagatgcgcgctatgctggaccagctaatggggacctcgagagatggagacaccacccggcagcggatcaagttctcagacgacagagtatgcaaaagccacctgttaaattgctgtcctcacgacgttctgagtgggacgcgcatggacctcggggaatgcctcaaggttcacgacttagccttgcgagccgactacgaaatagcttccaaggaacaggatttcttctttgaactcgacgctatggatcacctgcaatcgtttattgcagattgtgatcgcagaaccgaggtcgcgaagaaacggttggccgagacacaggaggagatttctgccgaagtggccgctaaggcagaaagggtgcacgagctgaatgaagagatagggaagctgctcgcgaaggtggagcagctcggcgctgagggaaacgtggaggaaagccagaaggttatggacgaggtagagaaggcccgagccaaaaagcgggaggcagaggaggtctaccgtaatagcatgccagcttcaagctttcaacagcaaaaactgcgcgtctgtgaagtgtgttccgcttatttgggactgcacgataatgacagacgactggctgatcacttcggcggaaaactgcacctcgggttcatcgagatcagagaaaaactggaggagctaaaaagggtcgtagccgaaaaacaggaaaagagaaaccaggagaggctcaaacgacgtgaggaaagagagcgcgaagagagggagaaactgagaaggagtcgtagtcacagcaaaaaccctaagaggtctaggagcagagagcacaggcggcatcgcagtagatccatgtccagggaaagaaagcgccgaaccaggagtaagtctcgggagaaaaggcacaggcatcgctcacggtcatcgtctaggagccggagccgcagccatcaaaggtcccgccacagcagtcgggatcgtagtagggagcggtctaagcgtcgctcctccaaggagcgatttagagatcaggatctcgctagctgtgatcgcgaccgtagcagccgagatcgaagtccacgggatcgggaccgaaaggacaagaagcgctcgtacgagtcagccaatggtcgatctgaggatcgcagaagttccgaagagcgcgaagccggagaaatatag

SEQ ID NO: 228949 - DNA, 1170 bp, synthetic construct
  misc_feature 1..1170: note = Description of Artificial Sequence: Synthetic coding sequence
  source 1..1170: mol_type = other DNA
atggtgatccactctcagctaaaaaagatccagggcgcaagcgaacggatgggcgatacaactcggcagagaattaagttttctgacgacagagtctgcaaaagtcacctgctcaactgctgtccgcatgatgtattatctggtacgaggatggacctgggcgagtgtctgaaggtacacgacttggctctcagggccgactatgagatagcttcaaaggagcaggacttcttcttcgagctggacgccatggaccacttgcagtccttcatcgccgattgtgaccgacgaacagaggtggctaagaagcggctcgccgagacacaggaggagatatccgctgaggttgccgcaaaagcggagcgagtccatgagctcaatgaggagataggaaagctactcgccaaggtggaacagctgggagccgaaggaaatgtggaagagtcccagaaagtgatggacgaggtggagaaagctcgagcgaagaagcgagaggctgaagaagtatataggaactctatgcccgctagtagttttcagcagcaaaagttacgggtttgcgaagtatgttccgcctatctaggccttcacgataacgatagacgcctcgccgatcatttcggaggaaagctgcatctgggcttcatcgaaatcagggaaaagctggaggagcttaaacgcgttgttgcagagaagcaggagaaacgtaatcaggagcgcctgaagcggagagaagaaagagaaagggaagaaagagagaagctaaggaggtcaagaagtcattctaagaaccccaagcgcagtcggagcagggagcaccgacggcaccgcagcagaagtatgagtcgagagcgcaaaaggaggacccgcagcaaatctcgcgagaagagacatcgtcatcgaagtcgctcatcatcaagatctcgatcccgaagccaccagcggtctaggcattcctctagagaccgcagccgcgaacgcagtaagcgacggtcaagtaaggaacgctttcgggaccaagaccttgccagctgcgacagagacagatcatcccgcgatcgttcgccacgagacagagatcgcaaggataaaaaacggtcttacgagagtgccaacggacggtcggaggatcggagatcttcagaagaacgggaggctggagagatctag

SEQ ID NO: 228950 - DNA, 1377 bp, synthetic construct
  misc_feature 1..1377: note = Description of Artificial Sequence: Synthetic coding sequence
  source 1..1377: mol_type = other DNA
atggccgcactcggcagtccgtctcacacctttcgtggactgctccgtgagttgagatatctatcagcagctacaggaaggccttatagagacaccgctgcgtaccgctaccttgtaaaagcgttcagggcgcatagggtcacctctgagaaactatgcagggcacaacacgagctacatttccaagcagcgacctatctttgtttgctgaggtctattcgaaagcacgtggctctacaccaggagttccatggcaagggtgatacaacgcgccagaggataaaattttctgacgaccgagtgtgtaagtcccacctgctcaactgctgcccccacgatgtgctttcaggtacacggatggatctgggcgagtgtctaaaagtgcatgaccttgcgctaagggctgactacgagatcgcatcgaaagagcaggatttcttttttgaactggatgccatggatcacctgcagtcctttattgcagattgcgaccgcagaaccgaggtggcaaagaaacgcctcgcagaaactcaggaagaaataagcgccgaggtggctgctaaggccgagcgcgtccatgagttaaacgaagaaattggtaagctactggccaaggtggaacaactgggcgcagaaggaaacgttgaagaaagtcagaaagtgatggacgaggtggaaaaggctcgcgcaaaaaagcgcgaagccgaggaagtctacagaaattctatgcctgccagctcgttccaacaacagaagctgcgggtatgtgaagtctgttcagcatacctggggctccacgataacgacaggaggttggctgatcactttgggggaaaactccacttaggcttcatcgagattcgggagaaactggaagagctgaaacgggtcgtggccgaaaaacaagagaagcgcaaccaggagcggctgaagagaagggaggaacgcgaacgggaagaacgcgaaaagctacgcagatcgaggtcacacagcaaaaacccgaagcgctctaggtcacgggagcaccgcagacaccgaagccggtcaatgtcacgggagagaaaacggagaacgcgttctaagtcccgggagaaacggcatagacaccgctcccgatctagcagtcgcagtcgctcgcgctcgcaccagcgatcacgccacagctcgcgtgaccgcagccgtgaacggtcaaagagaagaagcagcaaggagcgctttcgggaccaggatcttgcctcatgcgacagggataggtccagtagagacagatccccccgagaccgggatagaaaagacaagaaacggagctacgagagcgccaatggaaggagcgaagataggcgcagtagcgaggagagggaggccggagagatctag

SEQ ID NO: 228951 - DNA, 1179 bp, synthetic construct
  misc_feature 1..1179: note = Description of Artificial Sequence: Synthetic coding sequence
  source 1..1179: mol_type = other DNA
atgagtgcgcaggctcagatgagagccatgttagatcaactgatgggaacttctcgagacggcgacaccactaggcagcgtatcaaattctccgatgatagggtatgcaaaagtcacctcctgaactgctgcccccatgatgtgctctcaggaacaagaatggacctgggagaatgtctcaaggtgcatgatctggctctgagggccgactacgagatcgcttccaaggagcaggatttttttttcgagttggacgcgatggaccatcttcagtcctttatcgccgactgtgatcgcagaacagaggtcgccaagaagcgactagccgagacacaggaggagataagtgcagaggtcgctgcaaaagccgaaagggtccacgagctgaatgaagagattggcaaactgcttgctaaggtcgagcaattaggggctgaaggcaacgtcgaagagtcccagaaagtgatggatgaggtcgagaaggcaagggctaagaagagggaggctgaggaggtataccggaacagcatgccggcatcgagcttccagcagcagaaactccgtgtgtgcgaagtgtgctctgcttacctgggtctccatgataacgaccgtcggttagctgaccatttcggtggcaagctgcacctgggatttatcgagattagggagaaactcgaagaacttaaacgcgtcgtcgctgaaaagcaggaaaagcgaaatcaggaacggttgaagaggagagaggagagagagagagaagaacgcgagaagctcaggaggtctcgctcccacagtaaaaatccaaagaggtcccggagtcgtgaacaccgaaggcatcggtcccggagcatgtctagggagcggaagagacggaccaggtccaagagccgggaaaaaaggcatagacaccggagcaggagctcgagccggagccgctcacgcagccaccagcgctctaggcactcttccagggacaggtcacgcgaacgttctaaaaggcgaagttctaaggagcgcttcagggaccaggatcttgcttcctgcgatcgcgacagatccagtcgggacagatcccctcgggaccgggatagaaaggacaagaagcgctcatacgagagtgccaacgggagatcagaagacaggcgatccagcgaggagcgagaggccggagaaatttag

SEQ ID NO: 228952 - DNA, 252 bp, synthetic construct
  misc_feature 1..252: note = Description of Artificial Sequence: Synthetic coding sequence
  source 1..252: mol_type = other DNA
atgtcagcccaggcacagatgagagctatgctcgatcagttgatggggacttcccgggatggatcgatgtacctgtgcctgcccacaagcatctgtaaaggtgtatccgagagacctagaatccggcaagcagaaattcagctcgttaatgaatcaaattcggtgatgactgagtatgccagagtgaccttcagcacggtggttctgatgatgtcattcttggagctggagtggattcttgagaacgtatag

SEQ ID NO: 228953 - DNA, 1299 bp, synthetic construct
  misc_feature 1..1299: note = Description of Artificial Sequence: Synthetic coding sequence
  source 1..1299: mol_type = other DNA
atgatttcagcagcgcagttgttagatgaactcatggggcgagataggaatctggcccctgacgagaaaaggtcaaacgtgaggtgggaccacgagtccgtctgtaaatactacctgtgtggcttttgccctgccgagttgtttaccaacactcgtagcgacctcggtccatgcgaaaaaatccacgatgagaatctgaggaagcaatacgaaaaaagtagtcggttcatgaaggtgggttacgagcgggactttctgagatacctccagagtcttctcgccgaagtagagcgacggatacggcgaggtcatgctcggttggccttgagccagaatcaacagtcctccggggctgccggtccaaccggtaaaaatgaagaaaagattcaggtgttaaccgataagatagacgtgctgttgcagcagatcgaagagctggggtcggaagggaaggtcgaggaagcccagggcatgatgaaactcgtggaacagcttaaagaggaaagagagctgctgcgttccaccaccagtacaatagagagcttcgccgcacaagaaaagcagatggaggtctgtgaggtgtgcggtgcatttctgatcgttggcgacgcgcaaagcagagttgatgaccacctgatgggaaagcagcatatggggtatgccaagataaaagccaccgttgaggaactgaaggaaaagctcaggaagcgcaccgaggaacccgacagggacgagagacttaagaaagaaaagcaggagagagaggaaagggaaaaggagcgggaaagagaaagggaggagcgagaacgaaagaggcgtcgcgaagaggaggaacgggagaaggagcgcgcaagggacagagagcgacggaagcggagccgctcccgcagtcgtcacagctcaaggacttcagaccgaagatgcagccgctcccgtgaccataagagatccagatcacgagagcgacgccgaagccgcagtcgggataggcggcgttcgcgaagccacgatcgcagcgaaagaaagcatcgatccagaagccgagacaggagacggagcaagtcaagagaccgcaaatcctataagcatcgcagtaaatcccgggatcgggagcaagacaggaagtccaaagaaaaagagaagcgcggaagcgatgacaaaaagtcgtcagtgaaaagcggaagtagagagaagcaatccgaagacaccaacactgagtctaaagagagcgacacaaaaaatgaggtcaacgggacatcagaggacatcaagtctgagggagatacacaatcaaattag

SEQ ID NO: 228954 - DNA, 240 bp, synthetic construct
  misc_feature 1..240: note = Description of Artificial Sequence: Synthetic coding sequence
  source 1..240: mol_type = other DNA
atgatctcagccgcacaactacttgacgagctcatgggcagggaccgtaaccttgctcccgacgaaaagcggtctaacgtacgatgggatcacgagtctgtttgcaaatattacctctgcggtttctgtccagccgagttgttcacaaatactaggtcggatcttgacgtatttggcagaggtgacaacattcgagacgtgagcaagttcctcgaagacgacaagtggatggaagagtag

SEQ ID NO: 228955 - DNA, 1299 bp, synthetic construct
  misc_feature 1..1299: note = Description of Artificial Sequence: Synthetic coding sequence
  source 1..1299: mol_type = other DNA
atgatttccgccgcacagctgttggatgagctgatgggcagagacaggaacttagcccctgatgaaaagaggtctaacgtacgttgggatcacgaatcagtgtgtaaatattacctgtgcgggttctgtcctgctgaactgttcaccaatacgaggtccgatctgggtccgtgtgagaaaatccacgacgaaaacctgcggaaacagtacgagaaatcctccaggtttatgaaagtcggctacgaaagggactttttacgctatttgcagtcattgctggcagaggttgaaaggagaattcggagagggcatgccagactcgctctgagccagaaccagcagagttcaggagcagccggaccaaccgggaaaaacgaagaaaagatacaagtgctgactgataaaatagacgttctcctccagcagatcgaagagctgggcagcgaggggaaggtcgaagaggcgcagggcatgatgaagctggttgagcagcttaaagaggagcgagagctgctcagaagtactaccagtacaattgaaagctttgctgcccaggagaagcagatggaagtgtgtgaagtatgtggagctttcctgatagttggagatgcacaatctagggtggacgaccacctcatgggcaagcagcatatgggctacgccaaaataaaggccacagtggaagagcttaaggaaaagctcaggaaaaggacagaagaacctgatcgagatgaaaggttgaaaaaggaaaaacaagagcgggaagagcgagaaaaggagcgcgagagagagcgtgaagagcgggaacgtaaaagacgcagagaggaggaagaacgggagaaggagcgggcacgcgacagggagaggaggaaaaggagccggtcaaggagtagacactcctcaaggacaagcgatcgacggtgttcaagaagtcgcgatcataagcgcagccgatctagagagcggaggcggtccagaagccgggacagacgacggtcccggagtcacgacaggagcgagaggaagcacagatcccgtagccgggacagacggagatctaaatctcgcgatcgtaagtcttataagcaccgatcaaaatctagagaccgcgagcaggaccggaaatctaaagaaaaggagaagaggggctcggatgataagaaatccagcgtaaagtctgggagtcgcgagaagcagagtgaagatactaacacggagtccaaagagagtgacacgaaaaatgaggtgaatggtacttctgaggacatcaagtctgagggcgatacacagtccaattag

SEQ ID NO: 228956 - DNA, 711 bp, synthetic construct
  misc_feature 1..711: note = Description of Artificial Sequence: Synthetic coding sequence
  source 1..711: mol_type = other DNA
atgatcagtgccgctcagctgctggacgagctgatgggcagagatcgtaacctagcccctgacgaaaaaagatctaatgtgagatgggaccatgagtcagtctgcaagtattatttatgcggtttctgccccgctgagctgtttacaaacacacgatctgacctgggaccatgtgaaaagattcacgatgagaacttacggaaacaatatgagaaaagcagtaggttcatgaaagtggggtacgaacgcgatttcctgagatacctccagtctctgctggcagaagtggagaggcgcattcggagaggacatgcgaggctcgccctgagccagaaccagcagagctcgggtgccgcaggacccacaggtaagaatgaagagaagatacaggtgctcacggacaaaattgatgtactcctgcaacaaatagaagagctggggtctgagggtaaggtggaggaagcccaggggatgatgaagctcgttgagcaattaaaagaggagagagagctgctgcgctcgactactagtactatcgagtctttcgcggctcaagagaagcaaatggaggtgtgtgaggtctgcggagcattcctaattgtgggagacgcacagtcccgggtcgatgatcaccttatgggtaaacagcacatgggctacgccaagattaaggcaacagtcgaggagaaaaagaagaagaagaaaaagtag

SEQ ID NO: 228957 - DNA, 1071 bp, synthetic construct
  misc_feature 1..1071: note = Description of Artificial Sequence: Synthetic coding sequence
  source 1..1071: mol_type = other DNA
atgaaagtcggctacgagcgggattttctgcgctacctgcagtcactgcttgcagaagtggagagacgcatacggaggggccatgccaggctggctttgtcccagaatcagcagtcgtcaggcgctgcaggacccaccggaaagaacgaggaaaagatacaggtactcacggataaaatcgatgtgcttctgcagcagattgaggaactgggctctgaaggcaaagtcgaggaagcccagggtatgatgaagctggtagaacaactcaaggaggaacgcgaactgctccggagcactacctctactattgagtctttcgccgctcaagaaaaacagatggaagtctgcgaggtgtgtggcgctttcctgattgtaggcgatgcacagagtcgagtcgatgatcatctgatgggcaagcagcacatgggctacgcgaagattaaggcaacggtcgaggaacttaaagaaaagctgcggaagcggacggaagagccagaccgcgacgagagactgaaaaaggagaagcaggaacgggaggagagagagaaagagagggagagggaacgcgaggaacgcgagcgaaaaagaaggagggaagaggaggagagagagaaagaacgtgcacgtgacagagaaagacggaagagatcccggagcaggtcccggcattcttcccggacaagtgacagacgctgctccagatctcgggatcataaacgaagccgaagtcgcgagcggcgacgttcacgaagcagagatagacgcagatctcgttcccatgatcgaagcgaaaggaagcatagaagcagatctcgggatcgtcggagaagtaagagtagggaccgcaagagctataagcaccgaagtaagtcccgggatcgcgagcaggatcggaagagtaaggagaaggagaagaggggaagtgatgacaagaaatcaagtgtgaagagcggctcacgtgaaaagcagtcagaggataccaacaccgagtctaaggagtccgataccaagaatgaggtcaatggaacatcagaagacattaagagtgagggcctgtttgtgacagtgtag

SEQ ID NO: 228958 - DNA, 1017 bp, synthetic construct
  misc_feature 1..1017: note = Description of Artificial Sequence: Synthetic coding sequence
  source 1..1017: mol_type = other DNA
atgtctctcagtgccttcacattgttccttgccctgataggaggcacctctggacagtattatgattacgatttccccctgtctatctacggtcagtcgtcccccaactgcgcccctgagtgcaactgtcccgaatcatatcccagcgccatgtattgtgatgagctaaagttaaaaagtgtgcctatggtcccccctggaataaagtatctttatctccggaacaaccagatcgatcatattgatgaaaaggcatttgaaaatgttactgacttgcagtggctgatccttgaccataacttgctggagaacagtaagattaaaggacgggtgtttagtaagcttaaacagctgaagaaactccatatcaaccataacaacctgactgagtccgtcggaccgctccctaagtcgctggaggaccttcagcttacacacaacaagataacaaagctgggctcgtttgaggggttggtgaaccttaccttcatccacctccagcacaacaggctgaaggaagatgctgtcagcgctgcgtttaaggggttgaagtcactggaatacctcgatctgtcgtttaaccagatagctaggctgccctccggtctccctgtatcactgcttacattatatctggataacaataagatctcaaacatacccgacgaatacttcaagagattcaacgcactccagtacctgaggctttcgcacaacgagcttgccgatagcggaatacccggaaattccttcaatgtgagctcattggtagagttggatctgtcttacaacaagttgaagaacatccccactgtcaacgaaaaccttgaaaattactatctcgaggtcaatcaactggaaaaattcgatataaagtctttttgtaagatattaggcccactttcttacagcaaaataaagcatctgcggctcgatggcaatcgaatctctgagacctcactccctccagacatgtacgagtgcctgagggtggctaacgaggtgaccttgaactag

SEQ ID NO: 228959 - DNA, 2100 bp, synthetic construct
  misc_feature 1..2100: note = Description of Artificial Sequence: Synthetic coding sequence
  source 1..2100: mol_type = other DNA
atgaagcaacgcttttcggccctgcagcttctgaagctactgctgctgctacagccgcctctcccacgcgcactgagagaagccctttgccccgaaccttgcaactgtgtgcctgacggcgcactgcgctgcccagggccaaccgcgggtttgactaggctgagcctagcgtatttgcctgtcaaagtgattcctagtcaggcatttcggggactcaacgaagtgattaagatagaaattagccagatcgacagcttagagagaatcgaggcgaatgctttcgacaacttactgaacctaagcgagattctcattcagaataccaaaaatctgagatatattgagcctggcgctttcatcaatttgcccagacttaaatacttgagcatctgtaatactggaatacgtaaattccctgatgtgacaaaagttttctcgtccgagtccaacttcatcctggagatctgcgataatttacatatcaccactattcccggtaatgcgttccagggcatgaataatgagagcgtaacacttaagctgtatgggaacggtttcgaggaggtgcagtcccatgccttcaatggcacaaccctgacatctctcgagctgaaagaaaatgtccatcttgagaagatgcacaatggtgcttttcgcggagctactggaccgaagacgctggacattagttctaccaagctccaggctctgccatcatatggcctggagtctatccaacgtctgatcgcaacctctagctactctctgaagaagctccccagtagagagacttttgtcaacctgctggaggccacactgacgtacccaagccactgctgcgcgttcaggaatctgccaaccaaagaacagaacttctcgcacagtattagcgaaaactttagtaaacagtgcgaaagtacggtgcgtaaggtgaataacaaaacactttacagcagtatgctggctgagagcgagctgtctggttgggactacgagtacgggttttgtttgcctaaaacccctcgttgcgcaccggagccggacgcatttaatccatgtgaagacatcatggggtatgacttccttcgagtgctgatctggttaatcaacatcctggccattatgggaaacatgactgtcctatttgtgctcctgactagccgctataaactgacagtgccgcgattcctgatgtgtaatctgtcatttgccgatttctgcatgggactatatttgctgctgattgcatctgtcgactctcagaccaaaggacagtactataatcacgccattgattggcagactggttccggctgctccactgcgggtttctttacggtgttcgcctcagaactctcagtgtatacactgactgtaatcacgcttgaaaggtggcacacaatcacgtatgctatacacttggatcagaagcttagactccgtcatgccatccttatcatgttaggaggctggctcttttccagtctcatagctatgctgccattagtgggcgtcagtaactatatgaaagtgtccatctgttttccaatggatgtggagacgactctttcccaagtgtacatactgactatacttatcctgaatgtggtggctttctttattatctgcgcttgctatattaaaatatactttgcagttcgaaaccccgaactcatggctaccaacaaagatacaaaaatcgcaaagaaaatggcgatactgatcttcaccgatttcacatgcatggcccctatttccttcttcgcgatctccgcagcttttaaggtgccactcattacggttacgaactccaaagtcctattggtgttattctacccaataaatagctgcgccaaccccttcttatatgccatattcaccaagacatttcagcgcgacttcttcctgcttctaagcaagttcggttgttgtaagagacgagcagaactctataggagaaaggatttcagtgcctataccagcaactgcaagaacggtttcacagggtcaaataagccttctcaaagcaccctgaaacttagcacactgcactgtcaagggaccgctctactggacaaaacaaggtatacagaatgctag

SEQ ID NO: 228960 - DNA, 1914 bp, synthetic construct
  misc_feature 1..1914: note = Description of Artificial Sequence: Synthetic coding sequence
  source 1..1914: mol_type = other DNA
atgaagcaaaggttcagcgcactccaactcctcaagctgctgctgttgctgcaaccgccactgcccagagcgctccgggaggctttatgtcccgagccttgcaattgtgtgcccgacggtgcactacgttgcccgggacccacagctggcctgactcggctatcactggcgtatctccctgtaaaggttattccatcccaggcattccgcggacttaacgaggttattaagatagagatttcacagattgactccctggagcgcatcgaagctaatgcctttgacaacctgttgaacctgtctgaaatccttatacagaacacaaaaaacctccggtacatcgagcctggggcttttataaacctgccacggttgaagtatctttccatttgcaatactggcattagaaagttccccgatgtgactaaggtcttttcatctgagtccaattttatactcgaaatctgcgataatctgcatatcactacaatacccggtaacgctttccagggaatgaacaacgagagcgtaacactgaagttatacggcaatggatttgaggaggtacagtcacacgcattcaacggcacaactttaacgagtcttgaactgaaggagaacgtgcacctcgagaaaatgcacaacggtgcctttcgcggtgccaccgggcctaaaaccctccagaattttagtcacagtatttccgagaatttttccaaacagtgcgaatctactgtgcgaaaggtcaacaataagactctgtactcctcgatgctggccgagtctgaactttccggatgggactacgagtacggcttctgcctgcccaagaccccacgttgtgcgcctgagccagacgcttttaacccctgtgaagacattatgggatacgattttcttagagtccttatttggttgattaacatcctggcaataatgggcaacatgactgtgctgtttgtgctactgacgtctcgatacaaactgaccgtgcccaggtttttgatgtgtaacctgagttttgccgatttttgcatgggtctctacctgctgctaatagcaagcgtggattcccagactaagggccagtattataaccatgccattgattggcagacaggctccggttgtagcaccgctggtttctttaccgtcttcgcctcagagctgagcgtgtacactctcacagtgataactctcgaaagatggcatacgatcacctacgcaatccacctggatcagaagctgcgcctgcggcatgccatacttatcatgctgggaggttggctgttctccagtctgattgctatgctgcccctcgtgggagtgagcaattatatgaaagtcagcatttgcttccccatggacgttgagactactttgagccaagtgtacatcctcacgatcctgatacttaatgttgttgccttctttatcatatgcgcatgctacataaaaatatatttcgcagttaggaacccagaacttatggctactaataaagacacaaaaatcgcaaaaaagatggccatactaatatttaccgattttacttgcatggctccaatttcatttttcgctattagcgctgcttttaaagtgcccctcattaccgtcaccaattcaaaagtgctgttggtgctgttctatccaattaatagctgcgccaacccgtttctgtacgcaatcttcacgaaaacatttcagcgggacttttttttactgctctctaagtttgggtgttgcaagcggcgtgccgagttgtaccgcagaaaagatttctccgcctatacaagcaactgtaaaaacggcttcaccggctccaataagccgagtcagagtacccttaaactgtcaaccctgcattgtcaaggcacggccctcttggataagactagatacaccgaatgctag

SEQ ID NO: 228961 - DNA, 978 bp, synthetic construct
  misc_feature 1..978: note = Description of Artificial Sequence: Synthetic coding sequence
  source 1..978: mol_type = other DNA
atgaagcagcggttctctgcccttcagctcctgaagcttcttctgctcttgcagccaccactgcctcgcgcacttagagaggccctttgccctgagccatgcaactgcgttccggatggcgctctgagatgccctggtccaaccgctggtctcacacggctttcactggcatatctccccgtgaaagtaatccctagtcaggcctttaggggactaaacgaggtgatcaaaatagagatctcccagattgactccttggagcgtattgaggcaaacgcattcgataatctcctaaatctctctgaaatcctgatccagaatacaaaaaatctgcgctacatcgagcctggtgcgttcataaacttgcccagattaaagtatctgtccatatgcaacacgggaatccgaaagtttccagacgtgaccaaggtgttttcaagcgaatcaaacttcattctggagatttgtgacaacctccatattaccaccatacccggaaacgcattccagggcatgaacaatgaatctgtgacactgaagctgtacggcaacggctttgaagaagtgcaaagccacgcgtttaacggcaccaccctgactagcctggaacttaaggaaaatgttcacctcgagaaaatgcacaatggggcttttagaggtgcaaccggcccaaagacactggatattagtagcacgaagctccaggccctgccgtcttatggcctggaaagcatacagagactaatagctacgagttcctacagcctgaagaaactccctagtagagagacctttgttaatcttctcgaagccacactcacatacccatcacattgctgcgcctttcgcaaccttccaacaaaagaacagaacttctcccattccatcagcgagaatttttctaaacagtgcgaatcgactgtgaggaaggtgaataataaaaccctttctaagcctcgcataaatggataccaatag

SEQ ID NO: 228962 - DNA, 990 bp, synthetic construct
  misc_feature 1..990: note = Description of Artificial Sequence: Synthetic coding sequence
  source 1..990: mol_type = other DNA
atgaaacagcgcttttcagcactgcagttgcttaagctactgctgctgctgcaacccccattacccagagccctccgagaggccctgtgtcctgaaccatgcaattgcgtgcccgacggcgcacttcgatgtcccggacccactgcaggtttgacgaggttgtccctcgcgtacctcccggttaaggtgatcccatcccaggctttccgcggactgaacgaagtgataaaaattgaaatctcacagattgactctctggaacgaatcgaagcaaatgcctttgataacctgctgaatctcagcgaaattttaattcagaacaccaagaatctgcggtacattgagccaggtgctttcatcaaccttcctaggctcaaatacctgtctatttgtaataccggcattcggaaatttccggatgtcaccaaggtgttcagctctgagtctaattttatcctggagatatgtgacaaccttcacatcacaaccatacctggtaatgcctttcaaggtatgaacaacgaatctgtgaccttaaaactgtatggcaacggtttcgaggaagtgcagagccatgcttttaacggtaccaccttaacgtcactcgagctaaaagagaacgttcacctggagaaaatgcacaacggcgcattcagaggcgctacagggccaaagaccctggatatatcctcgaccaaactccaagcccttcctagctatggccttgaaagcatacagcgactaatcgcgacttccagctattccttaaaaaagttgcctagcagagagacttttgtaaatctactcgaggcaaccctcacttatccctctcattgctgcgctttcaggaacttgcccacaaaggagcagaatttctcccacagcatcagcgagaacttctcaaaacagtgcgagtcaacagtgaggaaagtgaacaacaagacattgctgctgcacggggctctgtcagctgcccacagcctatcctag

SEQ ID NO: 228963 - DNA, 2019 bp, synthetic construct
  misc_feature 1..2019: note = Description of Artificial Sequence: Synthetic coding sequence
  source 1..2019: mol_type = other DNA
atgaaacagcgattttctgcacttcaactcctcaaactcctgctgttattacaaccacctttgccgagggcactgcgagaggccctgtgtcctgagccatgcaactgtgtcccggatggtgcccttcgctgtcccggacccactgccggtctcacacggttgtcccttgcctatctgcccgtaaaggtcatccccagccaggcgttccgtggtttaaatgaggttatcaagattgagatctctcagatcgattcgctcgaaagaatcgaagccaacgcatttgataatctcctaaacctgtccgaaattttgatccaaaacaccaagaatcttaggtacatcgaaccaggagcttttatcaaccttccacggctcaaatacctatctatctgcaacactgggatacggaaatttcctgatgtcaccaaggttttctccagtgagtcaaattttattcttgagatttgtgataacctccacataacaacaatcccgggaaacgctttccagggaatgaacaatgaatctgtcaccctgaaattatatgggaatgggttcgaggaggtgcagtcccatgcctttaatggcaccaccctgacaagcctcgagttgaaggaaaacgtccacctggaaaagatgcacaacggagcattccggggagcaactggccctaaaactctcgacatcagctccaccaaactccaggcactgcccagctatggcctggagtcgatccagagattaatcgcaacatccagttactctctgaagaaactgccttcgcgggaaacattcgtgaaccttctcgaagcaactctgacatacccctctcattgctgcgcttttaggaatttgcccactaaggactactcctcaatgctcgctgaatctgagttgagtggctgggattatgaatacggtttctgcctgcccaaaacccctaggtgcgcccctgaaccggacgcctttaacccatgcgaggatatcatggggtatgactttctgcgcgtcttgatatggctgattaacatcctggctataatgggtaatatgactgtccttttcgtgctcctgacctcgcggtataaacttacagtcccccgttttttgatgtgtaatctgtcatttgccgacttctgcatggggctctacctcctactgattgcgagcgtggactctcagacaaaggggcagtattataatcatgctatcgattggcagactggatcgggatgctctactgccggattcttcacagtttttgcatcagaactaagcgtgtatactcttacagtgattacactggagcgatggcataccataacctacgcaatccacttggatcagaagttgcggttaaggcatgccatcctgataatgctcggaggttggctgttctcaagtctgattgccatgctacccctggtcggtgtgtcaaactacatgaaggtgagcatctgcttccccatggatgtcgagactacactgagtcaggtctatatcctgacaattctcattctcaatgttgttgcattcttcatcatctgtgcatgttacattaagatttactttgccgtacgaaatcccgaactgatggccacaaacaaagatactaaaatcgccaagaagatggctatcctgatttttacagatttcacgtgcatggcacccattagtttttttgctatctcggcagcgttcaaggtgcctctgataaccgtgaccaattctaaggtcctgttggttctgttttatcccattaattcttgtgccaatcctttcctgtatgcaattttcacaaagacattccagagagatttttttttgctgctctctaaattcggatgttgtaaacggagagcagaactttatagacggaaggatttcagtgcctacaccagcaactgtaagaatggcttcacgggatccaacaaaccctcccagtccacactgaagttgtctaccctccattgtcagggtaccgctctactcgataaaactcgatacacagaatgttag

SEQ ID NO: 228964 - DNA, 396 bp, synthetic construct
  misc_feature 1..396: note = Description of Artificial Sequence: Synthetic coding sequence
  source 1..396: mol_type = other DNA
atgacacctctgctcacactcattctcgtcgtccttatgggattaccactggcccaggccttggattgtcacgtgtgtgcatacaatggagacaactgctttaatccgatgcgatgtcctgcaatggtggcctactgcatgacaacacggacaagtgccgcagaggccatctggtgtcatcaatgcactggattcggaggctgctcgcatggaagcagatgtctgcgcgactccactcattgtgttacgacggcaaccagagtcctcagcaataccgaggatcttccgctcgtgaccaaaatgtgtcatattggatgccctgacataccatcattgggcctgggcccatacgtgtcgattgcctgctgccagactagcctgtgcaatcatgactag

SEQ ID NO: 228965 - DNA, 351 bp, synthetic construct
  misc_feature 1..351: note = Description of Artificial Sequence: Synthetic coding sequence
  source 1..351: mol_type = other DNA
atgactcctctcctgacactgatcttggtggtgctgatgggactgcctcttgcgcaggccctcgactgccatgtctgcgcatacaacggggataactgcttcaatcctatgagatgtcctgcaatggttgcttattgtatgactactcggacttattatactcccaccagaatgaaagtcagtaagtcatgtgtcccacgctgctttgaaactgtttatgatggctacagtaaacacgcctccaccacttcttgttgtcaatacgatctgtgtaacgggaccggtctagctactccagccacgttggctttagcgcctatcctgcttgctacattgtgggggctactgtag

SEQ ID NO: 228966 - DNA, 351 bp, synthetic construct
  misc_feature 1..351: note = Description of Artificial Sequence: Synthetic coding sequence
  source 1..351: mol_type = other DNA
atgaccccacttctgacgctcatcctcgtggtgctgatgggactcccgttagcccaggctttggattgtcacgtttgcgcgtacaatggagataattgtttcaaccctatgagatgccctgcaatggtggcctattgcatgaccactagaacctactacactccaacaaggatgaaggtttccaaaagttgcgtccctcggtgcttcgaaacggtgtacgacggatatagtaaacacgcatctacaacctcctgttgccagtacgacctttgtaatggcaccgggctggccacacctgctaccctggccctggcacctatcctcctggccaccctgtggggtttgttgtag

SEQ ID NO: 228967 - DNA, 351 bp, synthetic construct
  misc_feature 1..351: note = Description of Artificial Sequence: Synthetic coding sequence
  source 1..351: mol_type = other DNA
atgactccccttctaactctgattttagtcgtgctaatgggattacctcttgctcaggccctcgattgtcacgtgtgtgcatacaacggcgacaactgtttcaaccccatgaggtgccctgctatggttgcctactgcatgacaaccagaacctactatacacctacccgcatgaaggtgtctaaatcttgcgtgccaagatgttttgagaccgtgtatgacggctattccaaacacgcttccaccacctcctgctgtcagtacgatctgtgcaacggaaccggtctggctaccccggctacgcttgccctggcacccattttgctcgctacactgtgggggttgctctag

SEQ ID NO: 228968 - DNA, 249 bp, synthetic construct
  misc_feature 1..249: note = Description of Artificial Sequence: Synthetic coding sequence
  source 1..249: mol_type = other DNA
atgacccctctgctcacacttattctggtggtgctcatggggcttcctttggcccaggctctggactgccacgtttgcgcctataacggagacaattgcttcaaccctatgagatgcccggcaatggtggcgtactgcatgactaccaggacttattacacccctacacgaatgaaggtctctaagagctgtgtgcccaggtgttttgaaaccgtgtatgatggatactccaaacatgcctctacctag

SEQ ID NO: 228969 - DNA, 255 bp, synthetic construct
  misc_feature 1..255: note = Description of Artificial Sequence: Synthetic coding sequence
  source 1..255: mol_type = other DNA
atgacacctcttttgacattgatcctcgtggtactgatggggctcccactggctcaggccctggattgccatgtgtgtgcgtacaatggagataactgttttaaccccatgcgatgtcctgctatggtggcctactgtatgaccaccaggacctactatactcccacccgcatgaaggtcagcaagagctgtgtaccccgttgctttgaaactgtctatgatggctatagcaagcacgcctctacgacatcatag

SEQ ID NO: 228970 - DNA, 1041 bp, synthetic construct
  misc_feature 1..1041: note = Description of Artificial Sequence: Synthetic coding sequence
  source 1..1041: mol_type = other DNA
atggaccctgcccgtaaggcgggagctcaagccatgatttggacggctggttggctcctgctgttgcttctccggggaggcgcacaggccttggagtgctacagttgcgtgcaaaaagcggacgatggatgctctcccaataagatgaaaacagtgaagtgtgcccctggggtggatgtatgtaccgaagcagtcggagctgtggagactatacatgggcagttctctctagccgtccgcggatgcggttcagggctgcccggaaaaaacgatcgaggcctggatctccacgggctgctcgcttttattcagctccagcagtgcgcccaggacaggtgtaacgctaaattgaatctcacttcccgggctctggaccccgctggtaacgagtccgcctacccccctaacggcgtcgagtgttacagctgtgtgggcctttcacgggaagcttgccagggaacatcaccgccagtggtttcctgctacaatgcttctgaccacgtatacaagggctgcttcgacggcaacgtcactctaaccgcagccaacgtcaccgtgtcccttccagtgaggggctgcgtccaagatgaattttgtacacgggacggcgtgaccggccctggctttaccctctcgggcagctgttgccagggcagccggtgtaattccgacttgcggaacaaaacgtatttttctccacgaattccaccactggtaaggctgcctcccccagagccgacaaccgtggcctcaaccacaagtgtgaccacatctacgtcagctccagtgaggcctaccagcaccacaaaacccatgccagctccaacgtctcaaactccgagacagggcgtagagcatgaagcgtcccgtgatgaagagccccgattgaccgggggtgccgctgggcaccaagataggtctaattccggtcagtaccccgcaaagggcggacctcaacagccccacaataaaggctgtgtcgcaccgacagccggtctggccgcactgctgctcgccgtcgccgcaggcgtgctcctctag

SEQ ID NO: 228971 - DNA, 885 bp, synthetic construct
  misc_feature 1..885: note = Description of Artificial Sequence: Synthetic coding sequence
  source 1..885: mol_type = other DNA
atggaccccgcaaggaaggcgggtgcgcaggctatgatctggaccgctgggtggctgctactgctgttgctcagaggtggcgcacaagccctggagtgctattcttgtgtccagaaagctgacgatggctgctctcctaataagatgaagactgtcaagtgcgcacctggtgttgacgtctgcacagaggcagtcggggcagttgagaccattcatggacagttttccctagcagttcgtggctgcgggtccggattgcccggaaaaaatgaccgcggtctcgacctccacggccttctcgcgttcatacagcttcaacagtgtgctcaggaccgctgcaacgctaaactaaacttgacttcaagagctctcgaccctgcagccgcagccaatgtgacagtgagcctgcctgtcagaggatgtgttcaggatgaattctgtacacgggacggagtcactggacctggcttcacgttgtctgggtcttgttgccagggaagcaggtgcaactcagacttgagaaataagacatatttcagtccacgaatccctcctctggtcaggttgccgcctccagagccaaccactgtggccagcactacctctgtaacgacctccactagcgccccagttcgcccaaccagtaccactaagcccatgccagccccaacatcccaaaccccccgacagggggtcgagcacgaagcttccagggacgaagagccccgactgacaggaggcgcagcaggtcaccaggataggagcaattccggacagtaccccgctaagggtggaccccaacaacctcacaataaggggtgcgtggcaccgacagctggactggccgcactcttgttggctgtggccgcaggcgtgctactatag

SEQ ID NO: 228972 - DNA, 516 bp, synthetic construct
  misc_feature 1..516: note = Description of Artificial Sequence: Synthetic coding sequence
  source 1..516: mol_type = other DNA
atggagccagggccagcactagcctggttactgttgcttagcctgctcgctgactgcctgaaggccgcacagagccgcgacttcacagtgaaagatatcatctatttacatccatccaccacaccatatcctggaggattcaagtgttttacctgtgagaaggcggctgacaattatgagtgtaacagatgggccccagacatctactgtcctagagagacccggtattgttatacacagcatacgatggaggttaccggcaatagcatatcagttactaaaaggtgcgtcccgctggaagaatgtctctcaacagggtgtagagacagcgaacatgagggtcataaagtgtgcacgagctgctgtgaagggaacatctgcaacttaccacttccccgaaatgagacagatgccacatttgccactacctccccaatcaatcaaacgaatgggcaccctcggtgcatgtcagtgatcgtcagctgcctctggctatggctgggcctgatgctctag

SEQ ID NO: 228973 - DNA, 516 bp, synthetic construct
  misc_feature 1..516: note = Description of Artificial Sequence: Synthetic coding sequence
  source 1..516: mol_type = other DNA
atggagccaggacccgcacttgcctggcttctgctcctcagcctcctcgcggactgcctaaaagctgcacagtcccgtgatttcacagttaaagatattatttatcttcacccgtccactactccatatcccggtggcttcaaatgttttacatgcgaaaaagcggctgataactatgaatgtaatcgttgggccccagatatttactgccctagagagaccaggtactgttatacgcagcataccatggaggtaacaggcaattctatttcagttacaaagcggtgcgtccccttggaggagtgcctgagtactgggtgccgagattccgagcacgaggggcacaaggtgtgcacctcctgctgtgagggcaacatctgtaatctgccactcccgagaaatgaaacagatgcaacctttgccacaactagtccaatcaatcagactaacggacatccccgttgcatgtccgtgattgttagttgcctttggctatggctgggtcttatgctttag

SEQ ID NO: 228974 - DNA, 162 bp, synthetic construct
  misc_feature 1..162: note = Description of Artificial Sequence: Synthetic coding sequence
  source 1..162: mol_type = other DNA
atggagcctggcccagccctggcgtggctgttgcttctgtctttgctagcagactgtctaaaggccgctcagtccagagactttacggtgaaggatataatttatctgcatccttcgaccacaccttatcccggaggatttaaatgtttcacctgcgaatag

SEQ ID NO: 228975 - DNA, 969 bp, synthetic construct
  misc_feature 1..969: note = Description of Artificial Sequence: Synthetic coding sequence
  source 1..969: mol_type = other DNA
atggcccgatgcttctccttggtgctgctcttaacctctatatggacaactagattactagtccagggttctctgcgcgctgaagaacttagtatccaagtgtcatgccgcattatggggatcacgctcgtgtccaagaaggctaatcaacaactaaatttcactgaggccaaagaggcatgtcggctactgggcctgagtctagccggtaaagatcaagtagagactgccttaaaggccagcttcgagacgtgcagctacggttgggtgggtgacgggtttgtggtgatttcaaggataagccctaatccgaaatgtggaaaaaacggcgtcggcgtgctgatctggaaagtgcccgtgagtagacaatttgctgcttactgttataactcttcagatacatggaccaattcctgtatacccgagattatcaccactaaagaccccatttttaatactcagaccgcgacccagactaccgaatttatagtcagcgatagcacatatagcgttgcgagcccttattccacaattcccgcaccgaccacaactcctcctgctccagcatcaaccagcattcctagacgaaagaagcttatttgcgtcaccgaagtcttcatggagactagcacaatgagtactgaaaccgagccatttgtggagaataaagccgcattcaaaaatgaagcggctggatttgggggagtccctaccgcgctgttagtcctggcgctcctatttttcggagccgctgctggacttggcttttgctatgtgaagaggtacgttaaagcattcccatttacaaataaaaaccagcagaaggaaatgatcgagaccaaagtggtgaaagaggagaaggcaaacgatagcaacccaaatgaggaaagtaagaaaactgataaaaatccagaagaatctaagtctcctagcaaaacaacggtgagatgcctggaggccgaggtctag

SEQ ID NO: 228976 - DNA, 387 bp, synthetic construct
  misc_feature 1..387: note = Description of Artificial Sequence: Synthetic coding sequence
  source 1..387: mol_type = other DNA
atgcgaaccgctctgttgctgctggctgctcttgcagtggccaccgggccagcccttacactaagatgtcacgtttgcacgtcatcatcaaactgcaagcactctgttgtgtgccccgcatcctcgaggttctgtaagacaacgaataccgtggaacccctcaggggaaaccttgtgaaaaaagattgcgcggagagctgtacacccagctacactttacaagggcaggtgtcgtcaggaacctctagcacgcagtgttgtcaggaggatctgtgcaatgaaaaacttcacaatgccgcacctactagaaccgcactggctcacagcgccctatctctgggccttgccctaagtctcttggctgtgattcttgcaccttccctgtag

SEQ ID NO: 228977 - DNA, 396 bp, synthetic construct
  misc_feature 1..396: note = Description of Artificial Sequence: Synthetic coding sequence
  source 1..396: mol_type = other DNA
atgaaaatctttctgccggtgctgctcgcggcactactcggggtagagagggccagctcacttatgtgcttttcgtgtcttaaccaaaaatctaatctgtattgtctgaaaccaacaatctgcagcgaccaggacaattattgcgtcaccgtttcagcaagcgcagggataggcaatctcgtaacattcggccacagcctctctaagacgtgttccccagcctgccccatcccagagggcgtcaacgtgggagtggcctctatgggaatttcatgctgccagtccttcctgtgtaacttttctgctgcggacggaggcctccgggctagcgttactctcttgggcgcaggtctgctgcttagtctgttaccggcactcctgcgcttcggtccatag

SEQ ID NO: 228978 - DNA, 396 bp, synthetic construct
  misc_feature 1..396: note = Description of Artificial Sequence: Synthetic coding sequence
  source 1..396: mol_type = other DNA
atgaaaatctttctgccagtgcttctggcggctctcctgggcgtggagagagcgtctagtctcatgtgcttttcctgcttaaaccaaaagagcaatctgtactgcttaaaacccacgatctgttcagatcaagacaactactgtgtgactgtatctgcctcggctgggattggtaacttggtgactttcggccactccctctcgaaaacctgctcaccggcttgcccaatcccagagggggtaaacgttggcgtggcgagcatgggaattagttgctgccagtcctttctctgcaatttctctgctgcagacggcggactcagggcaagcgtgactctgctgggggcagggcttctgcttagtctgttacccgcactgcttaggtttggaccttag

SEQ ID NO: 228979 - DNA, 267 bp, synthetic construct
  misc_feature 1..267: note = Description of Artificial Sequence: Synthetic coding sequence
  source 1..267: mol_type = other DNA
atgaagatcttcctccccgttctactggcggcactgctcggagttgagcgtgcctcaagcttaatgtgctttagctgcttaaatcaaaaatcaaatctgtattgcctcaagcctacaatttgttctgaccaggacaattattgcgtgactgtgtcggcttcggccggaatcggaaatctggtgacctttggtcacagcctctcaaagacttgctctcccgcatgtcctatccccgagggggtaaatgtgggggtggcctctatgtag

SEQ ID NO: 228980 - DNA, 396 bp, synthetic construct
  misc_feature 1..396: note = Description of Artificial Sequence: Synthetic coding sequence
  source 1..396: mol_type = other DNA
atgaagatttttcttcccgtgctgctagccgcattactcggagtagagcgggctagctctttaatgtgcttcagctgtcttaaccagaaatctaatctgtactgcctaaagcctacaatttgctcagaccaagacaattattgcgtgactgtgagtgcgtccgccggtatcggcaacctcgtgacctttggacattccttgagcaagacctgctcacctgcgtgccctatcccggagggagttaatgtgggcgttgcttcaatgggcattagttgctgtcagtccttcctttgtaacttctccgccgcagatggtggactgcgggcatcggttaccttgttaggtgccggactgctgctctcgttgctccctgccctactgcggtttggtccatag

SEQ ID NO: 228981 - DNA, 396 bp, synthetic construct
  misc_feature 1..396: note = Description of Artificial Sequence: Synthetic coding sequence
  source 1..396: mol_type = other DNA
atgaaaattttcctcccagtcttactcgctgctctattaggagtggaaagggcttcctcacttatgtgtttcagctgtctgaaccaaaagagcaacctgtactgccttaaacccactatctgcagcgatcaagataactactgcgtaacggtttccgcctcagccggaataggcaacctggtgacctttggacacagtctaagcaagacctgctcgcctgcttgccccattcctgaaggggtgaacgtcggtgtagcatcaatgggaatctcctgctgccagtctttcttgtgtaacttcagcgccgctgacggcggtctccgggcatcggtaaccctgctgggcgcaggcttgttgctgagcttattgcctgctttgttgaggtttggaccctag

SEQ ID NO: 228982 - DNA, 396 bp, synthetic construct
  misc_feature 1..396: note = Description of Artificial Sequence: Synthetic coding sequence
  source 1..396: mol_type = other DNA
atgaagatctttctgcccgtcctcttggcggctctactcggcgtggagagggcaagcagtctgatgtgcttctcttgcctgaaccagaaatctaacctgtattgtttgaaaccaaccatctgttctgaccaagacaactattgtgttacagtaagcgcgtctgcaggaatcggcaacctggttaccttcggccactccttgagtaagacatgctctcccgcttgccccatcccagaaggagtcaacgtgggggtcgcatccatggggatctcatgttgccagtccttcctatgtaactttagcgcggctgatggagggctaagagcctcggtgactctgttgggggctggcctgctgctaagccttctgcctgcccttctgcgattcggtccgtag

SEQ ID NO: 228983 - DNA, 396 bp, synthetic construct
  misc_feature 1..396: note = Description of Artificial Sequence: Synthetic coding sequence
  source 1..396: mol_type = other DNA
atgaaaatattcctaccagtgctactggctgccctgctcggagtcgagcgtgcatcatcactgatgtgcttcagctgtctgaatcagaagtcaaacttatactgccttaaacccaccatttgctctgaccaggataattattgcgtcaccgtgtcagcgagcgcgggaatcggcaatctggtaacgttcggtcacagtctgtccaagacatgctcccccgcatgtcctatccctgagggtgtcaacgtcggcgttgcttccatggggatctcgtgctgtcagtcctttctctgcaacttttctgccgctgacggaggccttagagcttctgtaactttacttggtgctggcttgctgctgtcactgcttccggctcttctgcgtttcgggccttag

SEQ ID NO: 228984 - DNA, 396 bp, synthetic construct
  misc_feature 1..396: note = Description of Artificial Sequence: Synthetic coding sequence
  source 1..396: mol_type = other DNA
atgaagatttttttgcccgtgctgctggctgctctccttggagtggaacgcgctagcagtctaatgtgcttttcctgtctgaaccagaagagtaacctgtactgtcttaagcctaccatctgcagcgatcaggataactattgtgtgacggtctctgcaagtgccggtataggtaacttggtgacttttgggcattctctctccaaaacgtgctctccggcatgccccatccccgagggggtgaatgtgggagtggccagcatgggcatttcatgctgtcagtcctttctctgtaattttagcgcagctgacggcggactcagagctagtgttactctgctgggggctggcttgctgctgtctctgcttccagcactgctgagattcggcccatag

SEQ ID NO: 228985 - DNA, 402 bp, synthetic construct
  misc_feature 1..402: note = Description of Artificial Sequence: Synthetic coding sequence
  source 1..402: mol_type = other DNA
atgaaaccccaatttgttggtatcctcctctcaagcctgctgggagcggctcttgggaatagaatgagatgctataattgtggcggatccccctcgtccagctgcaaagaagctgtgaccacctgtggggagggtcggcctcagcccggattggaacagattaaactgcccggaaatccccctgtgaccctgattcatcagcacccagcctgtgtggccgctcatcattgtaaccaagtggagacggaatccgtcggcgacgtcacttaccccgctcatagggattgctacctcggggacctgtgcaattccgccgtcgcttcccacgttgcacccgctggaattctggcagccgcagcaacagctctgacctgtctgttaccaggactctggtccggctag

SEQ ID NO: 228986 - DNA, 525 bp, synthetic construct
  misc_feature 1..525: note = Description of Artificial Sequence: Synthetic coding sequence
  source 1..525: mol_type = other DNA
atgaaaccacagtttgttggcattctgttgagctcgctgctgggcgctgccttgggcaacagaatgaggtgttacaattgtggaggctctccgtccagcagctgcaaggaagctgtaacgacctgtggagaggggaggccacagcccggactggagcagatcaagttacctggaaaccgcagatgctttctgagaggtctgaaaattcctttggggagcctcaaaagtcatctgttgtgtccacgcagacaggtgctgaaaccaggagtgcagcacccctcttttatcctgagtctgtctccctccgatctggatagtccaacttcctcgctccgaaggtctccttccctccagagctcaggggaccgggtcggagggagacgcgatctgtcctcccctcaggggctgctccccggtagacctgtgcagcaacgtcgaggaaagccatgtggcccttgccgccacttcggatgtagcagctataggcccgatctgtctttagcccgtaccgtggaaagaatctag

SEQ ID NO: 228987 - DNA, 402 bp, synthetic construct
  misc_feature 1..402: note = Description of Artificial Sequence: Synthetic coding sequence
  source 1..402: mol_type = other DNA
atgaaaccacaattcgtggggatactcctgagctctctgcttggagctgctctggggaaccggatgaggtgctacaattgcgggggatctccatcaagcagttgtaaagaagccgttacgacctgtggcgagggacgccctcagcctggccttgagcagatcaagttaccaggcaacccccctgtgactctgatacaccagcacccagcttgcgtagccgcacatcattgcaatcaagttgagacagagtcagtgggagacgtgacctatccagctcaccgcgattgttatttgggggatctctgcaatagcgccgtggcatcccacgtggcccctgctggcatactggccgcagccgcaacggccctgacctgcctactgcccggactatggtcagggtag

SEQ ID NO: 228988 - DNA, 1149 bp, synthetic construct
  misc_feature 1..1149: note = Description of Artificial Sequence: Synthetic coding sequence
  source 1..1149: mol_type = other DNA
atggcagtgcttttcctgcttctgttcttatgcggcactccccaggcggcagacaatatgcaggcaatttacgtggccctcggggaggccgtagaacttccttgcccttcaccccctactctgcatggagacgaacatctctcatggttctgcagcccagctgctggatcctttaccacactggtggctcaagtacaggtgggcaggcctgcccctgatcccggaaaacctggaagagagtcacgtcttcgcctgctgggaaactactcactttggctggaaggctccaaagaagaggacgccggtcgctattggtgtactgtgctcggtcagcatcacaactatcagaattggcgagtatatgacgtgctggtcctgaaaggctcccaacttagtgccagagccgctgacggctctccatgcaatgtgctgctctgttcagtggtcccgtcccgtaggatggacagcgtgacttggcaagaaggaaaagggcctgtgagaggtagagtccagtctttctggggctcagaggcggcattgctgttggtctgtcccggtgaaggcttaagtgagcctcggtcccggaggccaaggatcattcgctgcttgatgacccataataaaggtgtgtcttttagtttagcagcttccatcgatgcaagtcctgccctttgcgcacccagtacaggatgggacatgccctggattctcatgctgctgttgaccatgggtcaaggggtggttatactggcactatcaatagtgctttggcgtcagcgggttcgcggagcccctggacgagggaatcgcatgagatgttataattgtggtgggtctcctagtagttcgtgcaaggaggccgtcactacttgtggcgaggggcgaccgcaaccagggttagaacagatcaagttaccaggcaatccgcctgtgacactgatacatcagcaccctgcctgcgtggcggcacatcattgcaatcaggtagagactgagtccgtgggagatgtaacttacccagcccatcgggattgttacctgggcgatctgtgtaactccgccgtggcctcccatgttgcacccgctggcattctggctgccgctgcaaccgcactgacatgcctgctgccaggcttgtggagtggctag

SEQ ID NO: 228989 - DNA, 402 bp, synthetic construct
  misc_feature 1..402: note = Description of Artificial Sequence: Synthetic coding sequence
  source 1..402: mol_type = other DNA
atgaagcctcagttcgtaggcatccttctctccagcttactgggagcagccctggggaacaggatgagatgctacaactgcggcggaagtccctccagcagctgtaaagaagccgtaactacatgcggagagggcaggcctcaacccggtctggagcagatcaaactcccgggtaatccccctgtgaccctgattcaccagcacccggcttgtgtagccgctcaccactgtaatcaggtggagactgagtcagtcggggatgtgacctaccctgcccaccgagactgttatcttggagatctgtgcaatagcgccgttgctagccacgtggcccctgcaggaatattggccgcagcagccactgccctgacttgtctgttacctggactgtggagcggctag

SEQ ID NO: 228990 - DNA, 402 bp, synthetic construct
  misc_feature 1..402: note = Description of Artificial Sequence: Synthetic coding sequence
  source 1..402: mol_type = other DNA
atgaagccacagtttgtgggaatcctgctgtcttccctgctcggtgcggcacttgggaataggatgaggtgttacaattgcggcggatccccgtccagttcatgtaaagaggctgtgacaacctgtggcgaggggagaccccaacctggcttggagcagatcaagctaccaggaaacccaccggtgacactgatacaccagcatcctgcttgtgtggctgcgcaccattgtaaccaagtggagactgagagtgtaggggatgtcacatacccagcccaccgagattgttatcttggcgatctctgcaacagcgcagtcgcctctcacgttgcccctgctggtatcttagccgctgcagctaccgccctgacttgcctgctccccggattgtggagtgggtag

SEQ ID NO: 228991 - DNA, 1149 bp, synthetic construct
  misc_feature 1..1149: note = Description of Artificial Sequence: Synthetic coding sequence
  source 1..1149: mol_type = other DNA
atggccgtgctcttcctcttactcttcttgtgcggcaccccccaggctgccgacaatatgcaggctatatacgttgctctaggagaagccgtagagctaccttgcccatcgccgccaacactacatggcgacgagcacttatcttggttctgttccccggctgcaggctcattcacaactctcgtcgctcaagtacaggtgggccgaccagcgccagatcccggtaaacctggacgcgagtccaggttgcgcttacttggtaactatagcctctggctggaggggagcaaagaagaggatgctggaaggtattggtgcgcagtcctcggacaacaccacaactaccagaactggagggtgtacgacgtactggttctcaagggctcccagctctctgctcgcgcagctgacgggagcccatgtaacgtgctgttgtgtagcgtggtgccaagcagacgaatggacagcgtaacatggcaggaaggcaaaggcccagtccgaggacgggtgcagagcttttggggctctgaagctgcccttctccttgtgtgccccggtgaagggctgtctgagcccaggtcaagaagaccgagaattataaggtgcctgatgacacacaacaaaggagtgtcattctccctggcagcctctatcgatgcaagccccgcactttgtgctccatcaaccggctgggacatgccgtggatactgatgctgttgttaacaatgggacagggtgtagttatcctggcgctgtccatcgtcctgtggaggcaaagggtgaggggagcgccaggacggggaaatcggatgcgctgctataattgtggcggatcaccaagcagctcttgtaaagaggctgtcacaacctgcggggagggacgtccacagccgggtcttgaacagattaagctgccaggaaacccacccgtcaccctgattcaccaacatcctgcgtgtgttgccgctcatcactgtaatcaagtggagaccgaatctgtgggggatgtgacttaccctgcccatagagactgctacctgggggatctgtgcaacagcgccgtggcctcccacgtcgctcccgctgggatcctggcagcagctgcaactgctctaacctgcctcctgccgggattgtggtcaggatag

SEQ ID NO: 228992 - DNA, 402 bp, synthetic construct
  misc_feature 1..402: note = Description of Artificial Sequence: Synthetic coding sequence
  source 1..402: mol_type = other DNA
atgaagcctcagttcgtgggcatccttctgtccagcctcttgggcgcagcgctcggcaatcgcatgagatgttacaactgcgggggaagcccttcaagtacatgtaaagaagccgtgacaacctgtggcgaaggtcgaccccagcccggactggagcagatcaagttgcccggaaatcctcccgttactctgatacaccagcacccagcctgtgtagcagctcatcactgcaatcaggtggaaactgagagcgttggggatgtgacgtatcccgcacatagggactgctatctcggagacctttgtaactccgctgtcgccagtcacgtcgcccctgccggaatcctcgcagcggctgcaaccgcattaacttgtctactccccggtctgtggagtggctag

SEQ ID NO: 228993 - DNA, 402 bp, synthetic construct
  misc_feature 1..402: note = Description of Artificial Sequence: Synthetic coding sequence
  source 1..402: mol_type = other DNA
atgaagcctcaattcgttggaatcctgttatctagtctgttgggcgctgcactgggcaaccgcatgcggtgttacaattgtggaggatcaccttcgagctcctgtaaagaggccgtcactacatgcggtgaaggcagacctcagcctgggctggaacagataaaactgcctgggaatcccccagtcactctaattcaccagcatcccgcatgtgtggccgctcatcattgtaaccaggtcgagaccgaaagcgtgggggacgtgacctatcctgcgcaccgcgattgttacctcggcgacctctgcaactccgctgtggcctcccacgtcgcgcctgccggaatattggctgcagccgctaccgctttgacttgcctcctgcccggactctggtccggttag

SEQ ID NO: 228994 - DNA, 402 bp, synthetic construct
  misc_feature 1..402: note = Description of Artificial Sequence: Synthetic coding sequence
  source 1..402: mol_type = other DNA
atgaagccccaattcgtcgggattttgcttagttcgctgcttggcgcagctctcggcaatcggatgcgctgttacaattgtggcggaagtccctcctcttcctgcaaagaggcagtcacaacatgcggggagggccgtccccagcctggcttagaacaaataaagttacccggtaacccccctgtgacattgatacatcagcatccagcctgcgtagctgctcatcactgtaaccaggtggaaacagagagcgtcggcgacgtaacctatccagcgcatcgtgactgttacctcggagacctgtgcaattcggcagttgccagccatgtggcaccagctggaatcttggcagcagctgctaccgccttaacatgccttctccctggactttggagtggctag

SEQ ID NO: 228995 - DNA, 525 bp, synthetic construct
  misc_feature 1..525: note = Description of Artificial Sequence: Synthetic coding sequence
  source 1..525: mol_type = other DNA
atgaaaccccaattcgtgggcatactactgagctcgctactgggagccgctcttggtaaccgcatgagatgctacaactgcgggggtagccccagctcttcatgcaaagaagctgttaccacatgcggtgaaggcaggcctcagccaggcctcgagcaaattaagctccctggaaacagacgttgcttcttacgaggtctgaagatacctctcgggtccctaaagagccacttgttgtgtcccagacgccaggtgcttaagccaggtgttcaacacccttccttcattctcagtctttccccctcagacctggattcccctacctcctctctgcgcagatcaccgagcctacagtcttcaggggatagggtggggggtcgcagagatttatccagtcctcaggggctgctcccaggcagaccagtgcaacaacgcagaggtaagccctgcggcccttgccgacatttcgggtgctcatcttaccggcctgatctatcactcgccaggaccgttgagcgtatctag

SEQ ID NO: 228996 - DNA, 486 bp, synthetic construct
  misc_feature 1..486: note = Description of Artificial Sequence: Synthetic coding sequence
  source 1..486: mol_type = other DNA
atgttggcccctcaaagaacccgagctccttcgccccgtgctgcgcctcgccctacgcgatctatgctccccgcagcaatgaaggggttgggtcttgctcttctcgcagtgctgctctgtagcgctcctgcgcacggactgtggtgccaagattgcacgctgaccactaatagttcccactgtacacccaagcagtgtcaaccaagcgacacagtgtgtgcttccgtgcgcattacagacccctcaagcagccggaaggaccatagtgtgaacaagatgtgcgcctctagctgcgattttgtgaaaaggcacttcttcagtgactaccttatgggtttcatcaacagcggaattctgaaagtcgatgtggactgttgcgaaaaggatctgtgcaatggcgcagccggtgcaggccacagcccctgggccttggcaggtggattgttactgtcattgggtcccgctctgctgtgggccggaccatag

SEQ ID NO: 228997 - DNA, 486 bp, synthetic construct
  misc_feature 1..486: note = Description of Artificial Sequence: Synthetic coding sequence
  source 1..486: mol_type = other DNA
atgctcgccccacagagaactcgggcaccttctcctagagcagcaccgaggcctactcgcagcatgctgcccgctgcaatgaaaggactggggcttgctctgctcgcagtgctcttatgcagtgccccagcccacggactgtggtgtcaagactgtacactgaccaccaatagttctcattgcacccccaagcagtgtcagccatccgacacagtctgcgcctccgtaagaatcaccgatccctctagcagcaggaaggatcattccgtgaacaagatgtgtgccagcagttgcgacttcgtcaagcgtcacttttttagcgactatctgatgggcttcattaacagcggcatcctgaaagtagacgtggattgttgtgagaaggacctttgtaatggcgcagccggtgccggacacagcccatgggctctggcgggaggcttgctgctgtcacttggtccggctttgctgtgggctgggccatag

SEQ ID NO: 228998 - DNA, 423 bp, synthetic construct
  misc_feature 1..423: note = Description of Artificial Sequence: Synthetic coding sequence
  source 1..423: mol_type = other DNA
atgcttccagctgcgatgaaggggctcggacttgccttgctggccgtgttgctttgttcggctcctgcacacggcttgtggtgtcaagattgcactcttacaaccaactctagccactgcacccccaagcaatgccagccatctgacacagtgtgcgcttccgttcggatcactgatccctctagttcacgcaaggatcacagcgtgaataaaatgtgtgctagtagctgtgatttcgtgaagaggcactttttcagcgactacctcatgggcttcatcaactcaggaatattgaaagttgatgtggattgttgcgaaaaggacctgtgtaatggggctgcaggagcgggacactcaccatgggccctagccggagggctcctgttgagcctcggacctgctctgctgtgggccggaccctag

SEQ ID NO: 228999 - DNA, 1971 bp, synthetic construct
  misc_feature 1..1971: note = Description of Artificial Sequence: Synthetic coding sequence
  source 1..1971: mol_type = other DNA
atggtggcacccaaatctcataccgatgactgggcgcctggtccttttagctcaaagcctcagcgcagtcagctgcagatcttctccagcgttctccagaccagtctgctatttctgcttatgggtctccgcgcatccggaaaggattccgcgccaacagtggtgtctgggatactgggcggatcagttactcttccccttaatatctccgtcgatacagaaatcgagaacgttatttggatcggtcccaagaatgctctcgccttcgcccgtcccaaagaaaacgtaactattatggtgaagagttacctcggcaggctggacatcactaagtggagctattccctctgtatttcaaatctcaccctcaatgatgcaggttcttacaaggcccagattaaccagagaaactttgaagttacgaccgaggaggaattcacattgttcgtgtacgagcagctgcaggaaccccaggtcacaatgaagagcgttaaggtgagcgagaatttcagctgcaacatcactctgatgtgttccgtgaaaggggcagaaaaatctgtcttgtacagttggactccacgggagccgcacgcctccgaatcaaacggaggcagcattctcaccgtctcaaggacaccgtgtgaccccgatcttccctatatttgcactgcccagaatccagtgtcccagcgctcctctttgccggtgcacgtggggcagttttgtacagaccccggagcttcccgcggtggtaccacgggcgaaactgttgtgggcgtcctgggcgagcctgtgaccctgcccctggccctacccgcatgtagggataccgagaaagtcgtgtggctattcaacactagcattatttctaaagagcgcgaggaggctgcgaccgcagacccccttataaagagcagggacccatacaaaaatagagtgtgggtgagttcccaagattgctccttgaaaatttctcagttgaagatcgaagacgccggtccatatcacgcatacgtctgttccgaggcttcgtctgtgaccagtatgacgcatgtgaccctactgatttatcggaggctgcggaaaccgaaaatcacgtggtctctgcgtcactccgaggatggcatatgtcggatcagcctgacttgcagtgtggaggatggaggaaacaccgtgatgtatacatggacaccgctgcaaaaagaggccgtggtaagccaaggtgaatcgcatctcaatgtgagctggcggagttccgagaatcatcccaacctcacttgcacagcgtctaatccagtgagtagaagtagtcatcaatttttgtctgagaatatatgttccggcccagaacgcaacaccaaattatggatcggtctctttcttatggtgtgtctgctatgtgtgggaattttttcctggtgtatttggaagagaaaaggaaggtgtagtgtccctgctttttgctcctctcaagctgaggcaccagcggatactcctgaaccgacggcaggacatactctctatagtgtgctgtcgcaaggctatgagaagctcgatactcccctgcggcctgcccgtcagcagcccacaccaacctctgacagctctagcgattctaacctaacaaccgaagaggatgaggaccgcccagaagtgcacaaacccatcagtgggaggtatgaggtttttgaccaagtgacacaggaaggggcaggacacgatcccgctcccgagggacaagctgactacgatcctgtgaccccatacgtcacagaggtagaaagcgtggtcggcgagaatacaatgtacgcccaggtgttcaatttacaaggaaaaactccggtgtcacagaaagaggagtcgtccgctacaatctactgcagtatccggaaacctcaggtggtggtgccccctcctcagcagaacgacttagagatccccgagtctccaacctacgagaatttcacgtag

SEQ ID NO: 229000 - DNA, 1566 bp, synthetic construct
  misc_feature 1..1566: note = Description of Artificial Sequence: Synthetic coding sequence
  source 1..1566: mol_type = other DNA
atggtggccccaaaatcccacactgacgactgggcgccaggccctttttcctctaaaccacaaaggagtcaactgcagatcttctcgagcgtcctacagacaagcctcctgtttttgctcatggggcttcgagctagcggaaaggactccgccccaacagtggtgtctgggatcctgggcggttcagtcaccctacctctgaacattagcgtggatacagagatcgagaacgtgatttggattggcccaaagaacgctttggcctttgcacgaccgaaggagaacgttacgatcatggtcaaaagttacttagggaggctagacatcactaaatggtcatactcactgtgtatctccaatctcactctgaacgatgccggttcttataaggctcaaattaaccagcgtaattttgaagtcacgactgaggaggagtttacactatttgtgtacgaacagcttcaggaaccgcaggtgaccatgaagtccgtgaaggtgagtgaaaatttcagctgtaatatcacactgatgtgttctgttaagggagcagagaagtctgttttgtattcctggacaccgagagaacctcacgcctcggagtctaatggcggaagcattctcacagtctctcggactccatgtgaccccgacctaccttatatctgtaccgctcagaatcctgtttctcagaggtcatccctcccggttcacgtgggccaattctgtaccgaccctggcgcatccagaggcggtaccacaggcgagacagtcgtcggtgtgctaggggagccggtgacactcccattggccctgcccgcatgcagagatactgagaaagtggtttggctgtttaatactagcatcatctctaaggaaagggaagaagccgcaacggcggaccccttaataaaatcaagggacccctataaaaatcgcgtgtgggtctcctcccaagactgcagcctcaagatctcgcaactcaaaattgaggatgcgggaccttaccacgcctatgtttgttctgaagcctctagtgtcacctcgatgacccacgtgacacttttgatttaccgtcctgagcgcaacacgaaactctggatcggtctcttcctcatggtatgcctcctgtgtgtgggcatcttctcatggtgcatttggaaacggaagggaagatgcagtgtgcccgcattttgctcgagccaggctgaggctcccgctgacactcccggttatgagaaactggataccccactgaggaagcctatcagcggaaggtatgaggtctttgatcaggttacgcaggaaggcgctggtcacgaccctgcacctgagggtcaggccgactatgacccagttaccccgtacgtcacggaagtagaatcggtggttggggaaaacaccatgtacgcccaagtgttcaacctacagggtaaaactcctgtgagccaaaaagaggagagctcagcgaccatctactgcagcatccgaaaaccacaggtggtccccccaccacaacaaaatgatctggaaatacccgaatcccctacgtacgaaaatttcacttag

SEQ ID NO: 229001 - DNA, 813 bp, synthetic construct
  misc_feature 1..813: note = Description of Artificial Sequence: Synthetic coding sequence
  source 1..813: mol_type = other DNA
atgacacacgtgaccctcctaatctaccgacgcctgcgcaagcccaagattacttggagcctgcgacattccgaggacgggatatgccgtatcagtttgacctgttccgtggaagacggaggcaacaccgttatgtatacttggacgccgctacagaaagaagctgtggtcagccagggggaaagccacctgaatgtctcatggcggtctagtgaaaaccacccaaatctgacatgcaccgcctccaatccagtctcaagatcctcgcaccagtttttgagtgaaaatatttgctctggccctgagagaaacacaaaattgtggattgggctcttcttgatggtttgcctcctgtgtgtgggtatcttctcttggtgtatttggaagcgcaagggacggtgcagtgtccccgcattttgcagttcgcaggcagaggcgcctgccgatacccccggatatgagaaactggataccccactccggccagcaaggcagcaacctactcctaccagtgacagctcgtccgattctaatctgacgacggaggaggacgaagaccgtccagaagttcacaagcccatcagcggcaggtacgaggtattcgatcaggtgacccaagagggcgcaggacacgatcccgcacccgagggacaggccgattacgacccagtgactccatatgtcacagaagtcgaatccgtcgtaggggagaatacgatgtacgctcaggtcttcaatctgcaggttgtgccaccaccccagcagaacgatctggagataccagaaagcccaacgtacgaaaattttacttag

SEQ ID NO: 229002 - DNA, 813 bp, synthetic construct
  misc_feature 1..813: note = Description of Artificial Sequence: Synthetic coding sequence
  source 1..813: mol_type = other DNA
atgactcacgtgaccctactaatctatcggcgtctccgtaaacccaaaattacctggagcttgcgccactccgaagatggcatctgcaggattagtctgacttgctcagttgaagacggagggaataccgtgatgtatacttggactcctctgcagaaggaagccgttgttagccagggagagtcccatctcaatgtgtcctggcgcagcagcgagaaccatccgaatctcacttgcactgcatctaaccccgtaagcaggagctcccaccaattcctctccgagaatatttgctccgggccagagaggaacacaaagctctggattgggctgttcctcatggtgtgcctcttgtgtgtgggaattttcagttggtgtatttggaaacggaagggaaggtgttccgtcccagcattttgtagttcccaggccgaggctccagccgatactcccggttatgaaaaactagacactcccctgcgcccagcccgacagcaaccgactcccacatccgactcaagctccgattccaatctgaccactgaggaggacgaagaccgccctgaggtccacaagcctatttcaggcagatatgaggtgttcgatcaggtgacgcaagagggggcaggccacgaccctgcgccagagggtcaagctgattacgacccggtaacaccatatgttacagaggtggagagcgttgtgggtgagaacaccatgtatgcccaagtgttcaatttacaagtggttcctccacctcagcagaacgatctggagatccccgaaagtcccacctatgaaaatttcacctag

SEQ ID NO: 229003 - DNA, 1968 bp, synthetic construct
  misc_feature 1..1968: note = Description of Artificial Sequence: Synthetic coding sequence
  source 1..1968: mol_type = other DNA
atggtcgccccaaaatcacacacagatgattgggctccgggaccattcagctctaagccccagaggtcacaactacagatcttctcctccgtgctccagaccagccttttgtttctgttaatggggctgcgggcatcaggaaaggattcagcccctacagtggtcagtggcattttggggggtagtgttactctgccgcttaacatcagtgttgataccgaaattgaaaacgttatctggatcggcccaaagaacgccctggcctttgctcgacctaaggagaatgttactatcatggtcaagtcatatctgggtaggctagacattacaaaatggtcttatagtctgtgtatttccaatctgacactcaacgacgcgggatcttataaagcacagattaatcagcgtaatttcgaggtgaccactgaagaggaatttaccctcttcgtgtatgaacagctgcaggagccacaggtcaccatgaagagtgtgaaggtctctgaaaacttcagctgtaatattactttaatgtgcagtgtaaaaggtgccgaaaaaagcgttctctacagctggacaccacgcgagcctcacgccagtgaatcaaacggcggatctattctcacagtatcacgaacgccttgcgaccctgacttaccatatatctgtactgctcagaaccccgtgtcgcagcggtctagcctcccagtgcacgtaggacagttctgtaccgatcccggtgcctcccgcggaggaaccacgggggaaactgtggtgggtgtgctcggggaacccgtgaccctccccctcgctctgccggcttgtcgcgacacagaaaaggtggtttggctcttcaacacatcgatcatctcgaaggaacgggaagaggccgctacagccgaccctctgatcaagtctagggacccatacaagaaccgcgtctgggtgtccagccaagactgtagcctcaagatctctcagctcaaaatcgaggacgcgggaccgtaccacgcctatgtgtgttctgaggcctcaagtgttacttccatgacacacgtcacactgctgatttatcggcgattgaggaagcctaagatcacatggtccctgcggcattcggaggacgggatttgtcgcattagcctcacatgtagcgtcgaagatggtggcaacaccgtcatgtatacctggactcctcttcagaaagaagcggtagtaagtcagggagaaagtcatctcaacgtttcatggcgttctagcgaaaaccaccccaacctgacctgcacggccagcaatccggtatcacgcagctcccatcagttcctgtccgaaaacatctgttccggtcctgagagaaacacaaagttgtggatcggactgtttttgatggtgtgcctgttgtgcgtcggcatcttttcatggtgcatttggaaacgtaaggggagatgctcagttcctgccttttgctccagtcaggctgaggctccagccgacaccccggagccaaccgccggacatacattatactctgtgctgtctcaaggctacgagaagctcgatacacccttgcgaccagcaaggcagcagccaacaccaacatcggattccagctctgacagcaatctgacaacggaagaggacgaggaccgcccagaggttcacaagcccattagcgggagatatgaagtcttcgaccaggttacgcaggagggagccggacatgaccccgcaccagaggggcaggcagattatgacccagtcaccccctacgtgactgaggtggaaagcgtggttggcgaaaatactatgtacgctcaggtgttcaacctccagggaaaaacccccgtgtcacagaaagaggaatcctcggcaactatctattgctccatcagaaagccacaggtcgtgcctcctccacaacaaaatgacctggagattccggaatccccgacatacgaaaattttacctag

SEQ ID NO: 229004 - DNA, 1116 bp, synthetic construct
  misc_feature 1..1116: note = Description of Artificial Sequence: Synthetic coding sequence
  source 1..1116: mol_type = other DNA
atggtcgccccaaaatcccacacagacgactgggcgccagggccattctccagcaagccacaaagatctcaattgcagatcttctcaagcgttttgcagacttccctactgtttctgctgatgggcttgagggcttcggggaaggattccgcacctactgttgtgtcaggcatactcggagggtccgttacactgcctctgaacatcagcgtggacactgaaatcgagaatgtgatctggattggacctaagaatgcactggccttcgccaggcctaaggagaatgtgacaatcatggtgaagtcgtatctcggtcgattggatattaccaaatggagctactcattatgtattagtaacctgactctgaacgatgctgggtcttacaaagcccagatcaaccagcgaaactttgaggtcactactgaggaagagtttacacttttcgtatatgaacagctccaagagcctcaggtgactatgaaatctgttaaagtttccgagaacttcagctgtaatatcaccctgatgtgcagcgtcaagggggcagagaaaagcgtcctttatagttggaccccaagagaaccacacgcatctgagagtaacggcggatctatcttgactgtttcaaggacaccctgcgatcccgatctgccctatatctgtaccgctcagaatcccgtgtcccagcggtcatctttgcctgtgcacgttggccaattttgtacagatccaggggcatcaaggggcggaacaaccggcgaaacggtggtcggcgttttgggggagcctgttactctacctcttgcccttccagcatgccgggatactgagaaagtggtctggctgttcaacactagcatcatctctaaagagcgggaggaggctgccacagcggaccctctgatcaagtctagggacccatataaaaaccgggtgtgggtcagcagccaggattgtagtctcaagatcagtcaactgaagatcgaggatgctggaccctaccacgcctacgtgtgctctgaggcttcctccgtgacctcgatgacccatgtcacgctcctgatctatcgggagagtcttggaagggccccaattactcggttcctgctctag

SEQ ID NO: 229005 - DNA, 1809 bp, synthetic construct
  misc_feature 1..1809: note = Description of Artificial Sequence: Synthetic coding sequence
  source 1..1809: mol_type = other DNA
atgggcctacgggcttccgggaaggatagcgctcccacagtcgtgagtggcattttgggaggctcagtgacactgcctctgaatatctcagtcgataccgagatcgaaaacgtgatttggattggacccaaaaatgctctggcttttgcaagacctaaagaaaatgtaaccatcatggttaaatcctacctgggccgtctggatatcaccaaatggagttattcgctgtgcattagcaacctcaccctcaatgatgcaggttcctacaaagctcaaatcaaccagcgcaatttcgaagtgacaactgaagaggagttcacgctatttgtttatgaacaactgcaggagccccaggttactatgaaaagcgtgaaggtgtccgagaacttcagttgcaatattacactgatgtgcagcgttaaaggggctgagaaaagcgtcctgtactcctggactccaagagaacctcacgcctcagaatccaacgggggtagcatcctcaccgtaagcaggacaccgtgcgaccctgatctgccttatatatgtactgctcagaaccccgtaagccagcgcagtagcctccccgttcatgtggggcagttttgcacagaccccggagcttctcgaggaggcacaaccggcgagaccgttgttggtgtcctcggagagcctgtgactttacctctcgctctgccagcctgtcgggataccgagaaggtggtatggctattcaacactagcatcattagtaaggagagagaagaggcagccaccgccgaccctctgattaaatctagagatccctacaagaatagagtctgggtcagcagtcaagattgtagcctgaaaatctctcaattgaaaatcgaggacgcaggaccatatcatgcctacgtctgcagcgaagccagttcggtcacaagtatgacccacgtcactctgctgatataccgccgactgcggaaacccaagataacttggtcactacgtcatagtgaggacggaatctgcaggatttcactgacttgcagcgtcgaagatggcggaaacacggtgatgtatacttggacacccctccagaaggaagccgttgtgagccagggagaatcccatctgaatgttagctggagaagcagtgagaatcaccctaatctcacctgcaccgcttccaaccccgtctccagatccagccaccaattcctgtccgagaacatatgtagcggacccgaaaggaataccaagctgtggatcggattgttcctgatggtttgtttgctatgtgtgggcatcttttcatggtgcatttggaagcgaaaaggtcggtgctccgtacccgctttctgttcaagccaggccgaagcccctgccgacacaccaggatatgaaaaactggatactcctctccgacctgcccgacagcagcctaccccaacgtccgattctagcagcgatagcaatttgacaaccgaggaggacgaggatcggcctgaagttcacaaacccatctctggacgctatgaagtcttcgaccaagttacccaagagggagctggacacgacccagctccagaaggtcaggccgattatgatcctgttaccccatatgtgactgaggtggagtcggttgtcggggagaataccatgtacgctcaggtgtttaatcttcagggaaagacacctgtgagtcagaaggaggagtcatcagccaccatctactgctcaataagaaagccccaggtggtggtcccacccccacagcaaaacgacctcgagatcccagagtcgccgacctatgaaaacttcacctag

SEQ ID NO: 229006 - DNA, 582 bp, synthetic construct
  misc_feature 1..582: note = Description of Artificial Sequence: Synthetic coding sequence
  source 1..582: mol_type = other DNA
atggtggcaccaaagagtcacactgatgattgggcacctggacccttttcctcaaagcctcagagatctcaacttcagattttttctagcgtgctccagactagtttgctctttcttttgatgggactgcgcgcaagtggtaaagattccgcccctacagtggtctccggaatcctgggtggctcagtcacgctgccgctcaatatcagtgtagatactgagatcgagaatgttatatggataggtcctaagaacgccctggccttcgcacgcccaaaagaaaacgtcacaattatggtcaagagctatctgggacgtctcgatatcacgaagtggagttatagcttgtgcatctcgaacttaacattgaacgatgcgggatcttacaaagcccagataaatcagcggaatttcgaggtcaccacagaagaagaatttacactgtttgtttacgcacctttcatcgagaaactgtccgtgcacgtcatcgaaggagaccatcgtactcttctggaaggcagtggcctagaaagtatcataagtaccctggcagagccaagggtgtcggtacgcgagggatag

SEQ ID NO: 229007 - DNA, 1581 bp, synthetic construct
  misc_feature 1..1581: note = Description of Artificial Sequence: Synthetic coding sequence
  source 1..1581: mol_type = other DNA
atgggcctgagagcatccggaaaagactcagccccaacagtggttagtgggattctggggggttcagtcaccttgcctttaaatatcagcgtagacactgaaatcgaaaacgtgatatggatcggcccaaaaaacgctctcgcttttgctcgtcctaaggaaaacgttactatcatggtgaaaagctatctcgggagactggacataaccaaatggagttactccctctgcattagtaacctgactctgaatgatgccggttcctacaaagcccagatcaatcaacggaacttcgaggtgaccacagaggaggaatttactctgttcgtgtacgagcagctccaggaaccccaggtcactatgaaaagtgtcaaagtgtccgagaacttcagttgtaacatcaccctgatgtgctccgtgaagggagcagagaagtccgttctgtatagctggacccctcgcgagccccatgcttctgaaagtaatgggggaagcattctgactgtctctcgcactccttgcgaccctgacctgccttacatatgtaccgctcagaacccagtctctcagagatcaagtcttccagtacacgtcggccagttctgcactgatccaggcgctagtagaggcggtaccacaggcgagaccgtggttggggttctgggcgaacctgttaccctccctctcgcgctgcctgcctgccgagatactgagaaggtggtatggctcttcaatacaagcatcatcagtaaggaaagagaggaggcggctaccgcagatcctcttattaagtcgagggacccatacaagaatcgcgtgtgggtttctagccaagactgcagcctgaaaatcagccaactcaagatagaggacgcgggaccttaccacgcctatgtttgcagcgaggcgtcatccgtaacttccatgacgcatgtgacactcttgatttacagacccgagagaaataccaagctgtggattgggctgtttcttatggtttgtctgctgtgcgtgggcattttcagctggtgtatctggaaaagaaaaggacgctgcagcgtaccagcgttctgcagctcccaggctgaagcgccagcggatactccggagcctacagcgggacatacgctctactctgtgctgtcgcaaggttatgaaaaactcgatacccctctccgaccagctcgccagcagccaacgccaaccagcgacagctcttctgacagtaatctgacaactgaagaagacgaggatcgcccagaagtgcataagccaattagcgggcgatatgaggtgtttgaccaggtgacacaggagggagccggtcacgatccagcacctgaggggcaggcagattatgatccagttacgccttacgtaactgaggtggagtcagtggtgggagaaaacacaatgtacgcacaggtctttaatctgcagggaaaaacccctgtgagccagaaggaagagagctctgccaccatttactgttctattagaaaaccccaggtagtggttccgcctccccaacaaaatgacctggagattcccgagtcccccacctacgaaaactttacctag

SEQ ID NO: 229008 - DNA, 1884 bp, synthetic construct
  misc_feature 1..1884: note = Description of Artificial Sequence: Synthetic coding sequence
  source 1..1884: mol_type = other DNA
atggcgagagggtccgtttccgacgaagagatgatggaactccgggaggccttcgcaaaagtggacacagatggcaacggctacattagcttcaatgagctgaatgatttgttcaaggcagcttgcctgcccctgccaggataccgggtaagggagattacggaaaatttgatggccacaggggacctggaccaggacggccgaataagcttcgatgaatttattaaaatcttccacggtctcaaatccactgatgtggcgaagacgtttcggaaagccattaataagaaagagggaatttgtgccattggcggaacgtctgagcaatctagtgttggaactcagcactcctattcagaagaggagaaatacgccttcgtcaactggatcaacaaggccctcgaaaacgaccctgactgtcgtcacgtgattcccatgaaccccaacacaaacgacctgtttaatgccgtgggagatggaattgtgctctgcaagatgatcaacctctccgtcccagacacaattgacgaaaggacaatcaataaaaagaaactgacccctttcacaattcaggagaatctgaatctagcactgaattcagcaagtgcaatcggctgtcacgtggttaatataggagcagaagatctcaaagaagggaaaccatacctggtcctggggcttctgtggcaggtgatcaagataggtctattcgccgacattgaattgagccgcaacgaagcccttatcgcattgttgagggaaggggagtcgctcgaggatttgatgaagctcagccccgaggaactgctcttgaggtgggcgaactaccatcttgaaaacgccggttgcaataaaatcggaaactttagtaccgatattaaagacagcaaggcctactaccacctgttggaacaagtggctcccaagggcgacgaagagggagtgcccgctgtcgttatcgatatgtcaggtctgagagagaaagacgacattcagagggccgagtgtatgctgcaacaggcggagaggttaggctgtagacagttcgttacagctacagatgttgttcggggtaatcccaagctgaacctggcctttatcgccaacctgtttaatcggtaccccgctctgcataaacccgaaaatcaagatatagattggggcgctctggaaggtgaaactcgggaggagcgcacatttcgcaattggatgaattcattgggcgtgaatccgcgagtgaaccatttgtacagtgacttatccgacgccctggtgatttttcagttatatgaaaaaatcaaggtccccgtggattggaacagggtgaacaaaccaccctaccccaaactgggtggtaacatgaagaagctggagaactgtaactacgccgtggagctaggaaagaaccaagcaaaattttccctggtgggtatcgggggtcaggacctcaatgagggtaaccggacactaacattggcactcatctggcaactgatgagacgatacaccttaaatatcctggaagagataggcggtggacagaaggtgaatgatgatattatcgtcaactgggtcaatgaaaccttacgagaggcaaaaaagagtagctctatcagcagcttcaaagaccctaagataagtacaagtctcccagttttagacttaattgacgccattcaaccgggtagtatcaattacgacctcttgaaaactgaaaacctcaatgacgacgaaaagctgaacaacgccaaatacgccatctccatggcacgaaaaatcggagcgcgtgtctatgctcttcccgaggatctagtagaagtcaacccgaaaatggtcatgaccgtgtttgcgtgccttatgggcaagggcatgaaaagagtgtag

SEQ ID NO: 229009 - DNA, 1884 bp, synthetic construct
  misc_feature 1..1884: note = Description of Artificial Sequence: Synthetic coding sequence
  source 1..1884: mol_type = other DNA
atggccagaggaagcgtgtccgacgaagaaatgatggagctgcgcgaggccttcgcaaaagtggatactgacgggaatgggtacataagctttaacgagctcaacgatttattcaaagcagcctgcttacccttgcctggttatagagttcgggagatcaccgagaacctgatggccaccggcgacctggaccaggatgggaggatttcatttgatgagttcatcaaaatctttcacgggctcaaatctactgacgtggctaagacttttaggaaggcaattaataagaaggagggtatatgcgccatcggtgggacctccgaacaaagcagtgttggcacacagcattcctatagtgaggaggaaaaatatgctttcgtgaattggattaataaggccctggagaatgatccagattgtaggcacgttatacccatgaatccgaatacaaacgacctgttcaatgctgtaggggacgggatagtcctgtgcaagatgattaacctctccgtgccggatactatagacgaaagaacaataaataagaaaaagctgaccccattcaccatacaggagaatcttaacctggcccttaacagcgcgagcgccatagggtgccatgtggtgaatatcggggcagaagacttgaaggaagggaagccctacctcgtcctcggcctcctctggcaggtcattaagattgggcttttcgctgacatcgagctctccagaaatgaggcgctcatagctttgctgcgcgagggcgaaagcttagaggatttgatgaagctctctccagaggagcttttgcttagatgggccaattaccatctggaaaacgctgggtgtaacaagattgggaatttttctactgacattaaggactctaaagcctattatcatcttttggagcaagtggcccctaaaggggacgaagaaggagtgcccgctgttgtcatagacatgtcaggattaagggagaaagacgacatccaaagagcagagtgtatgctgcagcaggctgagaggctaggatgtcgacagtttgttacggcgaccgacgttgtgagaggaaacccgaagttaaacctggccttcatcgccaatttgttcaataggtaccctgcactccataagcctgaaaatcaggatatcgactggggtgctctggaaggagaaacccgtgaggagcggaccttcaggaattggatgaactctctgggcgtgaaccccagggtcaatcatttgtactcagatctaagcgatgccttagtgatcttccagttgtatgaaaaaatcaaagtacccgtggactggaatcgggtgaataaaccgccatacccgaagctagggggtaatatgaaaaagctggaaaactgcaactacgcggtcgagctcggcaagaatcaggccaagttctctctcgtgggaatcggcggtcaggatctcaacgagggaaaccgaacactcacactggccctcatctggcagctaatgcgaagatacaccctgaatatcctagaggaaatcggcggtggtcagaaggtcaacgacgatatcatcgtgaactgggtaaacgagaccttgcgagaagcaaagaaaagtagctcgatttcctcttttaaggatcccaaaatttctacgtctctccccgtgctcgacctgatcgacgccattcagccagggtccattaactatgacctcttgaagaccgagaatctgaacgacgacgagaaactgaacaacgcaaaatacgctatctctatggccagaaaaataggggctcgcgtgtacgctttaccagaggacttagtggaagtgaatcccaagatggtgatgactgtctttgcctgcctgatgggaaaaggcatgaagcgggtgtag

SEQ ID NO: 229010 - DNA, 741 bp, synthetic construct
  misc_feature 1..741: note = Description of Artificial Sequence: Synthetic coding sequence
  source 1..741: mol_type = other DNA
atggccaggggttccgttagtgacgaggagatgatggagctgagggaagcctttgcaaaggtggatacagatgggaatgggtatatctccttcaacgagttgaatgatctctttaaagccgcatgcctgcctttgcccggttacagagttagagagataactgaaaacctcatggctaccggggatctcgaccaggacggcagaatcagttttgacgagtttattaagatcttccacggtctgaaaagcacggacgtggccaaaaccttccggaaggccattaataagaaagaaggaatctgtgccattggtggtacaagcgagcagtcctctgttggaacccagcactcctattctgaagaggagaagtatgctttcgttaactggatcaacaaagctctcgagaatgaccccgattgcaggcatgtgattcccatgaacccaaatacgaacgatcttttcaacgccgttggcgatggtatcgtgctgtgtaagatgataaatctgtcggtgcctgatacgatagacgagcgcactataaacaagaagaaactcactccttttacaatacaggagaatctgaatctagctctcaactcagcttcggcaatcgggtgtcacgtggtcaacatcggggcagaagaccttaaggaaggaaagccctatctggttctcgggctgctttggcaagtaatcaagataggattgttcgccgacatcgaattgtcgcggaatgagtag

SEQ ID NO: 229011 - DNA, 591 bp, synthetic construct
  misc_feature 1..591: note = Description of Artificial Sequence: Synthetic coding sequence
  source 1..591: mol_type = other DNA
atgtgcgctgaagacggcgactccaagtttagcatgtctattagtatgaacagcccctttctcgagattctccatcttgaaaactgtaattacgccgttgagcttgggaaaaatcaggccaagttcagtttggtaggtatcgggggacaggacctgaatgaggggaacaggacacttaccctcgccttgatctggcagctgatgcggagatacaccctcaacatccttgaggaaattgggggaggacagaaggtgaatgatgacataatcgtgaattgggttaacgaaacactgcgtgaggctaagaagtcttcttctataagctccttcaaagatcctaaaatcagcacatccctgcccgtgttggacctcatcgatgctattcagccaggatcgatcaattacgacttgctgaagactgaaaacctgaacgatgatgaaaagctcaataacgctaaatacgccattagcatggcccgaaaaataggcgctcgcgtttatgccctgcctgaggatctggtagaggtcaatccaaagatggttatgaccgtgttcgcctgcttaatggggaagggcatgaagagggtgtag

SEQ ID NO: 229012 - DNA, 201 bp, synthetic construct
  misc_feature 1..201: note = Description of Artificial Sequence: Synthetic coding sequence
  source 1..201: mol_type = other DNA
atggccagggggtctgtgtctgatgaggagatgatggaactgcgagaagctttcgccaaagtagacaccgacggcaacggttacatttcattcaatgaactgaacgatctgttcaaagccgcatgcctccctctccctggttatcgtgtacgcgagataaccgagaatctcatggcgacgggcgacctcgatcaggactag

SEQ ID NO: 229013 - DNA, 1602 bp, synthetic construct
  misc_feature 1..1602: note = Description of Artificial Sequence: Synthetic coding sequence
  source 1..1602: mol_type = other DNA
atggccctcagaaacgttcccttccggtcagaagttctggggtgggatccagactctttggccgactatttcaaaaagcttaactataaggattgtgaaaaggcagttaaaaaataccacatcgacggggcaagattcttgaacctcactgaaaatgatatccagaagttccctaagctacgggtccctattctctctaagttaagccaggagatcaataagaacgaagagcggcgttccatatttacccgcaagccacaggtccctaggtttccagaggaaacagaatcccatgaagaagataatgggggatggagcagttttgaggaagacgactacgagtccccaaatgatgatcaggatggagaagacgacggcgattacgagagccccaacgaggaggaggaggctcctgtggaagatgacgctgattacgaacctcctccttcgaatgacgaggaggcccttcagaatagtatcttgcctgcaaaacctttccctaactctaactcaatgtacatcgataggcctccctcgggcaagactcctcagcaacccccagttcccccacaaagacccatggccgcactgccccctcctccagccggtcgtaatcacagcccactgccccctcctcagacgaatcatgaggagccgagtcgttcacgcaaccataaaacagctaaactgcctgctcctagcatcgacagatctacaaaacccccactcgatagatcccttgcacctttcgatagagaaccatttacactaggaaaaaagcctccttttagtgacaagccgtccatacccgcaggacgtagtctaggcgaacatctacccaagatccagaagcccccattgccacccacgacggagaggcacgagagaagcagccccctgcccggaaaaaagcccccagtgcccaagcacggttggggaccagaccgaagggagaatgatgaagatgacgtgcaccagcgacccctaccacaacccgctcttctccctatgagttctaataccttccctagcaggtccactaagccatcaccgatgaaccccctgccatcttcacatatgcctggggctttttctgaaagcaattctagcttcccccagagtgctagcttgcccccttatttcagccaaggacccagtaatcgacctccgatccgtgccgaaggtcgaaactttcccctgccgctgccgaataaacccagacccccatcgccagctgaagaggagaacagcctgaatgaagagtggtatgtcagctacataacccgccctgaggctgaagccgcactgagaaagatcaatcaagacgggacattcctcgtgcgtgacagctctaaaaagacgacaaccaacccctatgttctgatggtgctttataaggataaagtgtacaatatccagatacgctatcagaaagagtcccaggtctatttgttgggtacaggcctgcgcggaaaggaggatttcctgtctgtgtcagacatcatcgattacttccggaagatgcccctcttgcttatcgacgggaagaaccgcggtagccgctaccagtgtacgctgactcatgccgctggctacccttag

SEQ ID NO: 229014 - DNA, 1578 bp, synthetic construct
  misc_feature 1..1578: note = Description of Artificial Sequence: Synthetic coding sequence
  source 1..1578: mol_type = other DNA
atgtgggaggcacagttccttggcctgctgtttttgcagcctctgtgggtggcaccggtgaagcccctgcagcccggagcagaagtgccagtggtgtgggcccaagaaggtgcccctgctcagctgccgtgctcccctacaatccctctccaggatttatcgctcctcagaagggccggtgtgacatggcagcatcagccagacagcgggccaccagccgctgcgcctgggcatccactggcgccaggaccccacccagctgctccaagcagctgggggcctcgccctcgcagatacaccgtgctgtctgtgggtcctgggggtctccggtcaggccgacttcccctgcagccccgagtgcagctggatgaaagagggaggcagagaggagatttcagtctctggctgagacccgctcgcagagcagacgctggagaatacagggctgcagtgcacctcagagatagggctctcagttgccgtctcaggctcagattgggtcaagcgtcaatgactgcctctccacccggttccttacgcgctagcgactgggtgattctgaactgctcttttagtcggccagaccggccagcctctgtgcactggtttcggaatcgcggacaaggccgagtccccgtacgggaaagtccccaccaccacctggctgagtcatttcttttcctcccgcaggtcagtcctatggattcaggcccttggggttgcatcctcacttatcgcgacggattcaacgtctcaatcatgtacaatttgacggtactcggacttgagccgccaacccccttgaccgtgtacgcaggcgctggtagtagggttggactgccctgtaggcttcccgctggagtggggactaggtcctttctgaccgccaagtggacgccacccggaggcggacccgatctgcttgtgacgggtgataatggggacttcaccttgcgtttagaagacgtctctcaggcccaggctggtacttacacttgccatatccacttgcaagagcagcagctgaatgctacggtaacattggctattattaccgtgacaccgaaatccttcggttccccaggttccctcggaaagctgctgtgtgaggtgacacctgtatcgggccaggaacgatttgtgtggagctctctggacaccccatcccagcgatccttcagcggcccatggctggaagcacaggaggctcagctccttagtcagccctggcagtgtcagctgtaccagggggagagactcctgggcgcagccgtctactttacagagctaagcagccctggagcacagagatccggacgggctcctggggcactcccggctggacacctcctgttgttcctgatcctgggggtgctgtcactactgcttttagtcactggagcattcgggtttcatttgtggcgcagacagtggcgaccacggagatttagtgccttggaacagggcatccatcccccacaggcacaatctaaaatcgaggaactggaacaggagccggaaccagagccagaacccgagccagagcctgaacctgaaccagagccggaacaactgtag

SEQ ID NO: 229015 - DNA, 1020 bp, synthetic construct
  misc_feature 1..1020: note = Description of Artificial Sequence: Synthetic coding sequence
  source 1..1020: mol_type = other DNA
atggcagaggcaagctccgatcccggagcggaagaacgggaagagctgctgggtcccactgcccagtggagcgtggaggacgaggaggaggccgtgcatgaacagtgtcagcacgagcgagatcgacagttacaggcacaggatgaggagggcggaggtcacgtgccggagcgcccaaagcaagagatgctcttgtcactgaagccctctgaggcccctgagctcgacgaggatgagggctttggggactggagtcagaggcccgagcagaggcagcaacatgagggagcccagggtgccttggattctggcgaaccgcctcagtgtcggagccccgagggcgagcaggaggatcgtcctggcctccacgcctacgagaaagaggactctgacgaggtgcacctggaggaactgtccctgtcgaaggaaggaccaggtcctgaagacaccgtacaggacaacctgggtgccgcaggggctgaagaggaacaagaggaacatcagaagtgccaacaaccgcgaactccctcccctctcgtcctggaaggaacaattgagcagagtagcccccctctatctccaaccacaaagctcattgacagaacggaaagcctgaataggagcatcgagaaaagcaatagcgtgaaaaaaagccagccagacttgccaatctccaaaattgatcagtggctcgagcaatacacccaggctatagagactgcaggacggaccccaaagctcgcaaggcaagcctccattgaactcccttccatggctgttgccagcaccaagagccgctgggaaaccggggaagttcaagcacaatctgctgcaaaaacacccagttgtaaggacattgtagcaggcgatatgagcaagaaatcactgtgggagcaaaagggaggttccaaaacatcgtcaacgatcaagtcaaccccctccggcaaacggtataagtttgtggccacagggcacggcaagtacgaaaaggtgcttgtggagggtgggcctgctccctag

SEQ ID NO: 229016 - DNA, 834 bp, synthetic construct
  misc_feature 1..834: note = Description of Artificial Sequence: Synthetic coding sequence
  source 1..834: mol_type = other DNA
atgctgctgtccctgaagcccagcgaggctcccgagctcgatgaggatgagggtttcggagactggagtcagagacctgagcagagacagcagcatgaaggtgctcagggtgccctggacagcggcgagcctccacagtgtagatcccctgaaggggagcaagaggatcgccctggtttgcacgcctatgagaaggaggatagcgatgaagttcatcttgaggaactgagcttaagcaaggaaggcccaggacccgaagacacggtgcaagataatctgggtgctgcgggtgccgaggaggaacaagaagagcatcagaaatgtcagcagccaagaaccccaagtcctcttgtgcttgagggaacaatcgaacagagtagtcccccactcagcccaactacaaagctgatcgaccgtaccgaaagtttgaatcgctctattgagaaaagcaactcagtaaagaaatcccagcccgacttgccaatcagcaagatcgatcagtggttggaacagtacacacaggcgattgaaaccgccggacgcacacctaaactcgcccgtcaggcctctatcgaactgccctctatggccgtagcctctacgaaaagccgttgggagaccggcgaggtgcaggcacagtcggctgccaagaccccctcctgtaaagacatcgtcgctggggatatgtcaaagaagagtctatgggagcaaaagggcggatcaaaaacgagcagcacaatcaagtccacccctagcggtaagagatataaattcgtggctactggacacggtaagtacgaaaaagtgctcgtggagggcggacctgcgccttag

SEQ ID NO: 229017 - DNA, 834 bp, synthetic construct
  misc_feature 1..834: note = Description of Artificial Sequence: Synthetic coding sequence
  source 1..834: mol_type = other DNA
atgctgctgtccctgaaaccatctgaggcgccagagctagacgaggatgaagggttcggagactggtctcagcggccagaacaaaggcagcagcacgaaggagcccagggcgcactggattcaggcgagccccctcagtgccgatctcccgagggagaacaggaagatcgcccaggtctccacgcctacgaaaaggaagactccgacgaagttcacctggaagaactgtccctttccaaggaaggccctggccctgaggacacggttcaggacaatctcggggcagcgggtgccgaagaagagcaggaggaacatcagaaatgtcagcagccgaggaccccctcccctttagtcctcgaaggcaccatcgagcagagctcacctcccctttccccaacaaccaaactgatcgacagaaccgagagcctgaatcggagcattgaaaaaagtaactccgtcaagaaatcacaaccagatctgccaatcagcaagatcgatcagtggctcgagcaatatacccaggctatcgagaccgctggccgtacccccaaactggccagacaggccagcattgagctgccatcaatggccgtagcatccaccaagtcccgatgggagacaggggaggtccaggctcagtcagccgctaaaaccccaagttgcaaggacatcgtcgcaggcgacatgtctaagaaatccctatgggaacagaaggggggatcaaaaacatcttctactataaaatcgactccatctggaaaacgctataagtttgtggccaccggtcatgggaaatatgagaaggtgctggtggaagggggacccgcaccctag

SEQ ID NO: 229018 - DNA, 669 bp, synthetic construct
  misc_feature 1..669: note = Description of Artificial Sequence: Synthetic coding sequence
  source 1..669: mol_type = other DNA
atgctgctgagcctgaagccatccgaagctccggagctggatgaagacgaagggtttggagactggagccaacgccctgaacagagacagcagcatgaaggagctcaaggggctctcgactcgggcgagccacctcagtgtagatctccggagggagaacaggaagatcgcccaggacttcatgcctacgagaaggaggacagtgatgaggtgcacctagaggagctgtccctttccaaagagggacctgggcctgaggacacagtccaggataatttgggagctgctggcgcagaggaagagcaggaagaacatcagaagtgtcagcagcctcggactccttcgcctctcgtacttgagggaaccatcgagcagagttcacctccactaagccccaccaccaagttgatagatcggacagaaagcctcaacagaagcattgagaagtctaacagcgtgaagaagagccagcccgatttgcccattagcaagattgatcagtggcttgagcagtacacccaagcgatcgagacagcagggagaacccccaaacttgctcgccaggcgagcatcgagctaccaagtatggccgtcgccagcactaagagccggtgggagaccggggaagtccaggctcagagcgctgctaagaccccttcttgcaaatag

SEQ ID NO: 229019 - DNA, 183 bp, synthetic construct
  misc_feature 1..183: note = Description of Artificial Sequence: Synthetic coding sequence
  source 1..183: mol_type = other DNA
atgctgctgtccttgaaacccagtgaggccccagagcttgatgaggatgagggctttggcgattggagtcagcgcccagaacagcgccagcagcacgaaggggcacagggggctctggacagtggggaaccccctcaatgcaggtcccctgagggagagcaggaggaccgccctggactttag

SEQ ID NO: 229020 - DNA, 669 bp, synthetic construct
  misc_feature 1..669: note = Description of Artificial Sequence: Synthetic coding sequence
  source 1..669: mol_type = other DNA
atgctgttaagtctaaaacccagcgaagccccagagctggacgaggatgagggttttggagactggagtcagcggcctgaacagcggcagcagcatgaaggcgcacaaggagccttggactctggcgaaccacctcagtgtcgctcgcccgaaggtgaacaggaggacagaccaggcctgcatgcctatgagaaagaagattctgacgaagtccacctggaggagctctccctatccaaggaggggccagggccagaggatacagtgcaggataacttgggggcagccggagccgaagaagagcaggaagagcatcagaagtgtcagcaacctagaaccccatctcctttggttttggaaggcactatcgagcagagctctcctccgctgagccccacaaccaaactaatcgaccggacagagagtctgaatagatccatcgagaaatcaaacagcgtcaaaaagtcccaacccgacctacctataagtaagattgaccagtggcttgagcagtatactcaagctatcgagactgccggacgaacaccaaaactggctcggcaggccagtatcgagctgccttcaatggcagttgctagtacaaaatcccgatgggaaacgggggaagtgcaggcacaatcagcagcaaaaactccgtcttgcaagtag

SEQ ID NO: 229021 - DNA, 381 bp, synthetic construct
  misc_feature 1..381: note = Description of Artificial Sequence: Synthetic coding sequence
  source 1..381: mol_type = other DNA
atgctgctgtcattaaaaccatctgaagctccggaactagacgaggacgagggtttcggtgactggagccagagacccgaacagaggcagcagcacgagggcgctcagggggctctcgattcaggcgagccccctcagtgtcgtagccccgagggcgaacaggaagacaggcctgggctacacgcatatgaaaaggaggatagcgatgaggtacacctggaagaactcagcctgagcaaagaagggccaggaccagaagatacagttcaggataatctgggggcagccggtgccgaagaagaacaggaggaacaccaaaagtgccagcagccacgaaccccgtcacccctggtgttggaaggaactatcgaacagtcatag

SEQ ID NO: 229022 - DNA, 195 bp, synthetic construct
  misc_feature 1..195: note = Description of Artificial Sequence: Synthetic coding sequence
  source 1..195: mol_type = other DNA
atgctgctctctttgaaaccttctgaagccccagagctcgatgaggacgagggtttcggagactggagtcaaagacctgagcaaaggcagcagcatgagggggctcagggagccctcgacagtggggagcccccacagtgccggtcccccgagggcgagcaggaggataggcctggcctgcacgcatacgaatag

SEQ ID NO: 229023 - DNA, 1404 bp, synthetic construct
  misc_feature 1..1404: note = Description of Artificial Sequence: Synthetic coding sequence
  source 1..1404: mol_type = other DNA
atggcaccaatctggtctccgcctgggagggtgtcaggttgccacctgtcaagcggccctgccccaggatcagcggtggggccatggctcggcactccacacccctcattacctctgccccttgcgccacataaacccccacctccaggacttcctggaagcgccggacagacctctctgcccgcacagcgggagtgcgtgtttcctggagacgctgccgtccaccaggaactttgcggactgggattcgaggagtgtttgggaagtattccgcaggctcaccagtgttatctgaccaatggccctaagcggcgaaaatgcagcccacgcaggcggggacgggctccagcttggttgtgtggcggatcacccccatgtcatcaaggcctgggccacgagcacccctcgtccggaccaagcacaaattgctcaccgagacctaccgctcagtggtctgttgaggacgaggaggaagcagtgcatgagcaatgccagcacgagagagatcgacagctgcaggctcaagacgaagaaggaggtggccatgtgcctgaaaggcctaaacaggagatgctactgtctttgaagccttctgaggccccagaactcgatgaagacgagggattcggtgactggtcacagagaccagagcagcgccagcaacacgagggtgctcaaggggctctggattctggggaaccccctcagtgccgaagccctgaaggggagcaagaggaccggccagggttgcatgcctatgaaaaggaagactctgatgaggttcacctggaggagctctcattgagcaaggaaggacccggacctgaggatacagtgcaggacaatctgggagccgctggcgctgaagaggaacaggaggagcaccaaaaatgtcaacagccgcgaacaccctcaccacttgtcctagaggggacaattgaacagtctagtcctcccctgagtcctacgactaagctgattgataggacagagagtctaaaccgctctattgagaaatctaattctgtcaaaaagtctcagccagacttgcctattagtaagattgaccagtggttagaacagtatacccaggccatcgagaccgctgggagaaccccgaaactggcaagacaggcatctattgagctgccttctatggctgtagccagcactaaatctcggtgggagaccggcgaagtccaagcacagtcagcagctaagaccccgagctgcaaggatattgttgccggtgacatgtcgaagaagtcgctctgggagcagaagggcggatcaaaaaccagctcaacgatcaaatctactccttctggtaagcgctacaagtttgtggctacgggccacgggaagtatgagaaggtcctcgtagagggaggacctgcgccatag

SEQ ID NO: 229024 - DNA, 618 bp, synthetic construct
  misc_feature 1..618: note = Description of Artificial Sequence: Synthetic coding sequence
  source 1..618: mol_type = other DNA
atgactccaccagagagactgtttttaccacgggtttgcgggacaacgctgcacctgctgctcctgggactactccttgtgctgttaccgggtgcacaggggctcccaggagtgggactgacacccagcgcggcacagactgcccgacagcaccctaaaatgcacctggcccatagcaatctcaagcccgctgcgcacctgattggcgatccttccaaacagaacagtttactatggcgggctaacactgaccgtgcatttctgcaggacggcttttccctctctaacaacagcctactcgttcccacctccgggatctatttcgtgtactcacaggtggttttcagtgggaaggcatattctcccaaggctacatcaagccctctttatctcgcacacgaagtccagttattttcatcccaatatccctttcatgtcccgctcctgtcctcgcagaaaatggtctatcctgggcttcaagaaccgtggctgcacagcatgtaccacggtgctgcattccagcttactcaaggtgaccagctgtcgacccacaccgacggcatccctcatcttgtcctgtcaccaagcactgtgttctttggagccttcgcgctttag

SEQ ID NO: 229025 - DNA, 618 bp, synthetic construct
  misc_feature 1..618: note = Description of Artificial Sequence: Synthetic coding sequence
  source 1..618: mol_type = other DNA
atgacacctcccgaacggttgtttcttccacgggtctgcggcactacgctacacctgctccttctaggactattgcttgtccttctgccaggtgcacaaggcctccctggcgtcggcctgactccctctgctgcacagaccgcacgccagcatccaaagatgcatttagcccactccaatctgaagccggctgcgcacctgatcggagatccttcgaagcagaatagcctgctctggcgagctaacaccgatagagcgtttctgcaggacgggttctcactctcaaataactctctgctcgtcccaacctccggcatctacttcgtttattcccaggtggtcttctctgggaaggcctatagtccgaaagctacaagctctccattgtacctggcccatgaggttcagcttttttccagccagtaccccttccacgtcccactgctgtccagccagaaaatggtgtaccccggtctgcaggaaccctggcttcactcaatgtaccacggggctgcgtttcaattgacccaaggagaccagttgagcactcataccgatgggataccccacctcgtgctaagcccatccacagtgttcttcggcgcttttgctctctag

SEQ ID NO: 229026 - DNA, 618 bp, synthetic construct
  misc_feature 1..618: note = Description of Artificial Sequence: Synthetic coding sequence
  source 1..618: mol_type = other DNA
atgaccccacctgagagactgttcctcccgagagtgtgcggaactacccttcaccttttgctgctgggtttattgctggtactcttgcccggtgctcaaggtctcccaggggtggggttgaccccttcagctgcacagacagcacgtcagcaccctaagatgcatctggctcactccactttgaaacctgcggctcacctaataggagaccccagcaagcagaattcacttctctggagagcaaataccgacagggcctttctccaggatggcttctctctcagcaacaactccctactagtacctaccagcggcatttatttcgtgtactcacaagtggtttttagcgggaaagcttactcccccaaagccaccagcagccctctgtatctcgcccacgaagtccagctgttctcctcccaataccccttccacgtgccgctgctgtcatcacagaagatggtgtaccctggcctgcaagaaccatggcttcattctatgtaccatggtgccgctttccagctcacccagggcgaccagctcagtacgcatacagatggcatcccgcacctggtcttgagcccctccacggtttttttcggcgcatttgcgctttag

SEQ ID NO: 229027 - DNA, 618 bp, synthetic construct
  misc_feature 1..618: note = Description of Artificial Sequence: Synthetic coding sequence
  source 1..618: mol_type = other DNA
atgaccccacccgaaaggctattcctgcccagagtgtgtggaacaacactgcacttgctcctgttaggcctcctgctggtcttattgcccggtgctcaaggtctcccaggcgtgggactaaccccgtcagccgcacagacagctaggcaacatcccaagatgcacctcgcacattcaacactcaagcctgccgctcatctgatcggtgacccctccaagcaaaattcactcctgtggcgggctaacactgaccgtgcttttctgcaagacggcttctcactgtctaacaacagcctattggttcccacttctggaatttatttcgtgtattctcaggtcgtattctccggcaaagcatactctccaaaagccacctcatctcctctttacttggcccatgaagtccagctgttctcttcccagtatccattccatgtgccactacttagctcacagaagatggtgtatccaggtttgcaagaaccttggctccacagcatgtaccatggcgcagcattccagcttacccagggcgaccagctgtccacccataccgacgggattccacacttggtcctgtccccctctacagtcttcttcggcgcttttgcgttatag

SEQ ID NO: 229028 - DNA, 618 bp, synthetic construct
  misc_feature 1..618: note = Description of Artificial Sequence: Synthetic coding sequence
  source 1..618: mol_type = other DNA
atgacccctccggagagactgtttcttccaagggtgtgcgggacaacactccacctgttgctgctgggcctcttgcttgtgctgttaccaggcgctcaggggctccctggcgtggggctgactccctcagctgcccaaaccgctcgccagcatccgaaaatgcacctggcgcactccaccttaaaacctgctgcccatctgatcggcgatccttcaaagcagaattcgctgctttggcgggctaatacggatcgcgctttcctccaagacggattttccttatcgaataatagcctgctggtacctactagcggtatttactttgtctatagccaggtggtgttcagcggcaaggcttatagtcctaaggcgaccagcagtcccctttacctggctcatgaggtgcagctgttctcttcacagtatccttttcacgtgcctcttttatcgtcgcagaagatggtttaccctgggttacaggagccctggctgcattccatgtatcacggtgctgcctttcagctcactcagggcgaccaactgtcaactcatacagacggaattcctcaccttgtgctgagcccaagtacagtcttcttcggcgctttcgcgctgtag

SEQ ID NO: 229029 - DNA, 618 bp, synthetic construct
  misc_feature 1..618: note = Description of Artificial Sequence: Synthetic coding sequence
  source 1..618: mol_type = other DNA
atgaccccaccagagagactgttcctcccccgtgtacgtggcacgaccctccacctcctacttctgggcctcttattggtgcttttaccaggcgctcagggattgcccggtgtcggcctcactccatcagcagcacaaacagcccgacagcaccccaaaatgcacttagctcacagcaccctaaagcccgctgcccacctgattggcgaccccagcaaacagaacagcctcctgtggagagccaatacagatcgggcatttttgcaagatggattttctctgtctaacaatagtctcctggtgccgacttccggaatttactttgtgtactcacaggttgtgttctctggtaaggcctactcccccaaggcgactagctctcccctctatttggcccacgaggtgcagctattttcctcccaatatccgtttcatgtgcctctgctgtccagccaaaaaatggtatatcccggactgcaggagccttggttgcacagcatgtaccacggggctgcattccagttaactcagggcgaccagctgagtacacacaccgacgggatcccacatcttgtcctcagtcctagcacagttttcttcggggcattcgccctatag

SEQ ID NO: 229030 - DNA, 618 bp, synthetic construct
  misc_feature 1..618: note = Description of Artificial Sequence: Synthetic coding sequence
  source 1..618: mol_type = other DNA
atgaccccgccagaacgactctttctccccagagtgtgcggcaccacactgcacctcctgcttctcggactgttgctcgtcttgctgcccggtgcacaaggactgccaggcgtgggtctgaccccctcagctgcccagactgcaaggcagcatccaaaaatgcacttagcccactctactctgaagccagctgcccacctcatcggggacccaagcaagcagaatagtctcctctggagagctaacacagaccgggcttttttgcaggatggtttctcacttagcaataactccctgctggtgcccacttccgggatctacttcgtttattcccaggttgttttcagtggaaaagcctactcccccaaggccacctcaagtccattgtaccttgcacacgaagttcagctcttctccagtcagtacccctttcatgtgccgttgttgagctctcagaaaatggtctatcctggcctgcaggaaccttggttacactccatgtaccatggagctgccttccagctgactcagggcgatcagttaagtacccatacagacggaatccctcatcttgtcctgtccccaagtaccgtctttttcggggcttttgccctctag

SEQ ID NO: 229031 - DNA, 417 bp, synthetic construct
  misc_feature 1..417: note = Description of Artificial Sequence: Synthetic coding sequence
  source 1..417: mol_type = other DNA
atgaccccacccgagcgtctgtttcttccacgggtgtgtgggaccacattacacctgctgttgttggggttgttgctcgtcctgctacccggagcccaaggtctacccggtgtgggactgacaccctcggcggctcagacagcacggcagcacccgaaaatgcacctggcccactctacattgaagccggctgcccatcttatcggcgatccatccaagcaaaattcgctcctttggagggccaacacagatagagcattcctccaggatggcttcagtctgagtaataacagcctgctggtgccaacaagcggaatctattttgtctatagccagggctcctcgccccctctgctgtggcccttccagcaattgaaatcttcactgatcaagtctcctgaattaagtaagaagtag

SEQ ID NO: 229032 - DNA, 618 bp, synthetic construct
  misc_feature 1..618: note = Description of Artificial Sequence: Synthetic coding sequence
  source 1..618: mol_type = other DNA
atgacaccaccagagagattatttttgcccagagtgagagggaccacactgcatttgctcttgctgggattgttgctcgtgctcctacccggtgctcagggcctgcccggtgtggggcttacaccttctgcggcacagaccgcaaggcagcatcccaaaatgcaccttgcccatagtactttaaagccagccgctcacttgattggtgatccctccaagcagaattctttactgtggagagctaatactgatcgtgcgtttctccaggatgggttttccctgtcaaataacagcttgctggtgccaacaagcggaatttacttcgtctacagtcaggttgtgttctccggtaaggcttacagcccaaaggccacttctagcccactttatttggctcatgaagtccagcttttctccagtcaatatccctttcacgtccctctgctgtcctcccagaagatggtctatccagggcttcaagagccctggcttcatagcatgtaccacggcgcagcattccagctaacacaaggcgaccaactgtcaacccacacagatggtattcctcacctggtactctcaccctccaccgtgtttttcggcgcttttgcactttag

SEQ ID NO: 229033 - DNA, 618 bp, synthetic construct
  misc_feature 1..618: note = Description of Artificial Sequence: Synthetic coding sequence
  source 1..618: mol_type = other DNA
atgacccctccggaacgattgttcctaccgcgagtgcggggtacgaccttacatttactcctcctgggactgttgctcgtgctgctgcctggtgctcaaggcctgcccggtgtcggtctcacaccctccgcagcccagactgcccgacagcacccaaagatgcacttggcccatagcacactcaaacctgctgcccatctcatcggggatcctagtaaacaaaattctctcttgtggcgagctaataccgaccgcgctttcctacaggatggcttcagcctgtctaataattcactgctggtccctacctccggcatttactttgtgtactctcaggtggtgttctcagggaaggcgtattctccgaaggcaaccagttcccctctgtacctggcccacgaggtgcaactgtttagttcccagtacccctttcatgtccccctgttgagttcacagaaaatggtctacccaggcctgcaagaaccttggttgcacagcatgtaccatggggcagcctttcagttgacacagggcgaccaactgtctacacacactgatggcataccccatcttgttctctccccctctaccgtttttttcggagcttttgctctgtag

SEQ ID NO: 229034 - DNA, 618 bp, synthetic construct
  misc_feature 1..618: note = Description of Artificial Sequence: Synthetic coding sequence
  source 1..618: mol_type = other DNA
atgacaccccctgaacggctgttcttgcctcgcgtgtgtggaaccacattacacttattgctcctcggccttctgctcgttctgcttccgggagcgcagggcttgcctggtgtcggattgacaccctcggcagcccaaaccgcccgacagcatcccaagatgcacctagctcatagcacgctcaaacccgctgcccacctcatcggagatcccagtaagcagaactcccttttgtggagggctaacaccgatagggctttcctccaagatgggttctcactcagtaataactcactgctcgtgcctacctccggtatttattttgtttattcacaagtagttttcagcggtaaggcttacagtccaaaagctacctcctcccctctgtatctggcccatgaggtgcaactcttttccagccaatatccatttcacgtgcccctactgtcatcccagaagatggtgtaccccggtctgcaggaaccttggctccactccatgtaccatggcgcagcgtttcagttgacacaaggtgatcagctttctactcatactgacggcattcctcacctggttctgtcaccttccaccgtgttttttggtgctttcgccctatag

SEQ ID NO: 229035 - DNA, 618 bp, synthetic construct
  misc_feature 1..618: note = Description of Artificial Sequence: Synthetic coding sequence
  source 1..618: mol_type = other DNA
atgacaccaccagagcgcttgtttctgcccagagtttgtggcaccactctgcacctcctgcttctagggcttctcctggtcctcttacctggtgctcagggcctccccggtgtgggactgacaccatccgctgctcagaccgcaagacagcatcccaagatgcacctggcgcattccacgctgaagcccgcagcccatctgatcggtgatcctagcaagcaaaactctctcctgtggcgcgctaatacggaccgggctttcctgcaggatggattctcactttctaacaactctctgctcgtgccaacgtccggaatctacttcgtgtatagtcaggtggtcttctccggtaaagcatactctccaaaagccacatcctctccactgtacctcgcccatgaggtgcagctttttagcagccagtatcccttccatgtgccccttctttctagccagaaaatggtatatcccggtctccaggagccctggttgcactccatgtatcatggcgctgctttccagttgactcagggagatcaactttctactcacaccgatggaatccctcatcttgtcctcagtccatccactgtgtttttcggtgccttcgcactctag

SEQ ID NO: 229036 - DNA, 618 bp, synthetic construct
  misc_feature 1..618: note = Description of Artificial Sequence: Synthetic coding sequence
  source 1..618: mol_type = other DNA
atgacaccaccagagcgcctgttcttgcctagggtgagggggacaaccttgcacctcctgttacttggtcttttgcttgtgctgctgcctggcgcacagggattgcctggagtcgggttgacccccagcgccgctcaaacagctagacagcatccgaaaatgcacctggcccattctactttgaaaccagccgcacatctgattggcgacccatcgaaacagaatagtttgttgtggcgtgcgaatacagacagagctttcttgcaggatggattcagcctctctaataattcactcctggtcccaacttcaggtatctatttcgtgtacagtcaggtcgtgttcagtggtaaggcctatagccccaaggctacctctagccctctgtatttggcccacgaggtgcagctattttcttctcagtatccatttcacgtccctctcctcagctcccagaaaatggtatatccagggctgcaggaaccctggctccattcaatgtaccacggcgctgccttccagttgacccagggggatcaactcagtacccacaccgacggaatcccacatcttgtgctgtcaccaagcacagtcttcttcggggctttcgcactgtag

SEQ ID NO: 229037 - DNA, 417 bp, synthetic construct
  misc_feature 1..417: note = Description of Artificial Sequence: Synthetic coding sequence
  source 1..417: mol_type = other DNA
atgacgcccccagaaaggctgttcctccccagggtgcggggtacaaccttacatctactactcctcggactgttgctcgtgctgttgcctggagcacaggggctgcctggagtgggcttaaccccaagcgctgcgcagaccgccagacagcaccctaaaatgcatctggcgcatagcactctcaagccggcagctcatttgattggtgacccttccaaacagaacagcttgctctggagggcaaataccgacagagcgttccttcaggacgggttctccctgtccaacaactcgcttctggtgccaacaagtggcatctactttgtctatagtcaaggaagcagtcctccactcttatggcctttccagcagctgaagtccagcctgattaagtctcctgagctgagcaagaagtag

SEQ ID NO: 229038 - DNA, 474 bp, synthetic construct
  misc_feature 1..474: note = Description of Artificial Sequence: Synthetic coding sequence
  source 1..474: mol_type = other DNA
atgactcccccagaacggctgtttctgccgagggtctgtggtactaccctccatttgctgctgctcggcctgctgcttgtgttactacctggtgcccaaggcctgcctggcgtcggcctcacgcctagcgcagcacagaccgctcgacagcaccctaagatgcatttagcgcatagcaaccttaaacctgcagcccacctgattggggacccctcaaaacagaacagcttgctgtggcgtgcaaacacagatcgcgctttcctccaggacgggttcagcctgtcaaacaattcactgttggttcctaccagcggaatatacttcgtctacagccagctacctgaagatggagttagccgcgcagccggtactctggccgcactcgacgtgcccaggggatgtgtccctgcccacccgggaagaccagctatccacccacacagatggcatcctccacccagcccccagccgtag

SEQ ID NO: 229039 - DNA, 417 bp, synthetic construct
  misc_feature 1..417: note = Description of Artificial Sequence: Synthetic coding sequence
  source 1..417: mol_type = other DNA
atgactccacctgaacgtctgtttctcccaagggtttgtggtactaccctccacctcctcctcctggggctcctgctggttctgctgccaggcgcacagggtctccctggcgtgggactgaccccttccgctgctcagacagcaaggcagcatcccaagatgcatttggcccactcaacactgaaaccagctgcacacctgataggcgaccccagcaaacaaaactcattattatggagagcaaatacagacagagcttttctgcaggatggcttcagtctctccaacaactctttattggtgcccacatcaggcatatattttgtatattcacaaggcagcagtccacccctgctctggccatttcaacagctgaaaagttcactcattaaatccccagagctgtctaaaaaatag

SEQ ID NO: 229040 - DNA, 417 bp, synthetic construct
  misc_feature 1..417: note = Description of Artificial Sequence: Synthetic coding sequence
  source 1..417: mol_type = other DNA
atgacccctcccgagaggctgttcttgccgagggtttgcggtaccactctacatttgctcctgctaggccttctgctcgtgctgttacccggtgctcagggacttcctggcgtcggcctgaccccgtctgccgcacaaacggccaggcaacacccaaaaatgcacctggctcactctacattgaagcctgcagcccacttgatcggtgaccccagcaaacagaacagtctcctgtggcgagccaatactgatcgagcttttctccaagacggcttttctctcagcaataactccttgttagtacctacctcaggaatttatttcgtctacagccagggaagttccccaccgctcctttggccattccaacagctgaagtcttcgttgataaagtctccagagctctccaagaaatag

SEQ ID NO: 229041 - DNA, 417 bp, synthetic construct
  misc_feature 1..417: note = Description of Artificial Sequence: Synthetic coding sequence
  source 1..417: mol_type = other DNA
atgacccccccagagaggctctttctaccaagggtgaggggcacaaccttgcacctcctgttgctaggattgctgctcgtgctcctgccaggggcacaggggttgcctggagtcggccttactccttccgctgcccaaacagccagacagcacccgaagatgcaccttgctcatagcacattaaaacccgctgcacacttgattggcgatccttccaaacaaaattccctactctggcgcgcaaatacagatagggcctttctgcaggacggcttctctttgtccaacaatagcctgctcgtacccacctcgggtatctactttgtttactcccaggggagctctccccctctgctgtggccttttcagcagttaaagagtagcctgataaaaagcccggagctctctaagaagtag

SEQ ID NO: 229042 - DNA, 735 bp, synthetic construct
  misc_feature 1..735: note = Description of Artificial Sequence: Synthetic coding sequence
  source 1..735: mol_type = other DNA
atgggggcattggggttggaagggagaggtggcaggttacagggtcggggatctttgctcctcgccgtggctggcgctaccagcctggtaacactgctgctcgcagttcctattaccgtacttgcggtgctggctctagtgccccaagaccagggaggtcttgttacagaaacggcagatccgggtgctcaggcacagcagggcctcgggttccaaaagttacccgaagaagagcctgaaacggaccttagcccgggtctgccggcagcccaccttattggcgcaccccttaagggccagggacttggctgggaaacaaccaaggaacaggcatttttaacatccggcacacagttctcagacgctgaagggctggctttgccccaggacgggctgtactacttgtattgtcttgtgggatataggggtcgggcaccccctggcggaggagaccctcaggggaggtccgttacgctgaggtcaagtctctatagagccggaggcgcatacggacctggaacccccgagctgctcctagagggcgcagaaactgtgacccccgtgttggatcctgctcggagacaggggtacggaccactatggtatacatctgtgggtttcggtggtctcgtgcagctccgcaggggggagcgagtttacgtaaacatctcacatcctgacatggtggactttgccagaggcaaaacattcttcggggcagtgatggtcggctag

SEQ ID NO: 229043 - DNA, 735 bp, synthetic construct
  misc_feature 1..735: note = Description of Artificial Sequence: Synthetic coding sequence
  source 1..735: mol_type = other DNA
atgggtgccctgggcctggaggggcgagggggaaggctgcagggacggggatccctcctcttggccgtagctggggctacaagcctagtgacattgctattagcagttcctattacagtcctggcagtcctcgcactggtcccacaagaccaggggggtcttgtgacagaaactgccgaccccggtgcacaggcccagcagggattaggattccagaaactgccagaggaagaaccagagacggacctgtctcccggtctgcccgctgctcacctgattggggctcccctaaaggggcagggcctgggatgggagaccacgaaagaacaggcctttcttacatctgggacacaattcagtgatgcagaggggctggccctaccccaggatggtctgtactacctttactgcctagtgggctatagaggccgtgctcctcccggtggcggtgacccacaaggtagatcagtcactcttcgatcctctctttatcgagcgggaggggcttatggcccaggcacacctgagttattgctggagggggcagagacggttacccccgtcctagaccctgctcggaggcagggctacggacccctctggtacactagcgtgggattcggtgggctggtacaattgaggagaggcgaacgggtgtacgtgaacatctcccacccagacatggtcgacttcgcaagaggcaagacgtttttcggcgcagtcatggtgggatag

SEQ ID NO: 229044 - DNA, 735 bp, synthetic construct
  misc_feature 1..735: note = Description of Artificial Sequence: Synthetic coding sequence
  source 1..735: mol_type = other DNA
atgggggctttgggcctggaaggccgtggaggacggctgcagggcagagggtccttacttctggcagtggctggagccacaagcttagtgaccctgttactcgcggtacctatcaccgtgctggccgttctggcactcgtgccccaggatcaggggggactggtgacagaaactgcagatcctggtgcccaggcacagcagggattgggatttcaaaagctgcctgaagaagagccagaaacagatttgagcccgggattgcctgccgcacatctgattggagcacctttaaaagggcaagggcttggctgggaaaccactaaggagcaagcattcttgacgagcggcacacagttctccgatgctgaagggctggcgctacctcaagacggactttactatctgtattgtctggtgggctacaggggcagggccccacccggtggaggcgatccgcagggaagatctgtgaccttaaggtctagcttgtaccgagccggtggggcatacgggccaggaacacctgagctgctgctggagggtgcagagactgttactcctgttctggacccggcacgccgacaaggttatggcccactgtggtatacaagtgtgggctttgggggtctggtgcagctgcgaaggggagaaagggtatatgttaatatctcacaccctgacatggttgactttgccagaggaaaaaccttctttggcgctgtgatggtagggtag

SEQ ID NO: 229045 - DNA, 735 bp, synthetic construct
  misc_feature 1..735: note = Description of Artificial Sequence: Synthetic coding sequence
  source 1..735: mol_type = other DNA
atgggagccctgggcctagaaggccgtgggggacgcctgcaggggaggggctctctcctgctggccgtggctggagcaaccagtctagtcaccctgctcctggccgtacccatcacagtactcgcagtcttggccttagttccacaggaccaggggggtttagtgacagaaacggcagaccctggcgcacaggctcagcaagggcttggttttcagaagcttcccgaggaagagcctgagaccgacctttctcccggtctgccggctgcccacctcattggagccccactgaagggccaaggacttgggtgggaaaccaccaaggaacaggcgtttctcacaagcgggacacagtttagcgacgccgaaggacttgcactgcctcaggatggactctattatctgtactgcctggtgggttacaggggcagggctccccctgggggtggcgatccacagggacgctccgtgaccctgagatcgtccctttacagggctggcggtgcatacggccctggcacccccgagcttctgctggaaggagccgagaccgtaacgcccgttctggatccggctagaaggcaaggatatggccctctatggtacacatccgttggctttggaggtctcgtccagctacggaggggcgagcgcgtgtacgttaacatctctcaccctgacatggtcgattttgccaggggcaaaacatttttcggggcagtgatggttgggtag

SEQ ID NO: 229046 - DNA, 735 bp, synthetic construct
  misc_feature 1..735: note = Description of Artificial Sequence: Synthetic coding sequence
  source 1..735: mol_type = other DNA
atgggagcactgggcttggaggggagaggtggacgactgcagggaagaggaagccttctgctggcagttgccggagccacctccctcgtgactcttctgctggccgttcccataactgtcctggccgtactggctcttgtgccccaagatcagggcggtctggtgactgaaactgctgatccaggtgcccaggctcagcaaggcctcgggttccaaaagcttcccgaggaggagcctgaaacagatctgagccctggccttcctgcagcccatctgatcggtgcacccctcaaaggccaaggactggggtgggagacaaccaaggaacaggcctttttaacgagtggaacacagttctctgatgcggagggactagcactgccccaggatggcctgtactatctgtactgtctagttggctatcggggtcgggctccccctggcggaggggacccacagggacggagcgtcactctacgaagcagtctgtacagagccggtggggcttatggacctggtacacctgagttacttttggagggggctgagactgtgacccctgtgctcgaccctgccaggagacaggggtatggacctctttggtacacgagtgttggtttcgggggtttagtgcaactccgcaggggcgagcgagtctacgtcaatatatcccacccggacatggtggatttcgcccgaggcaagaccttttttggtgccgtgatggtgggttag

SEQ ID NO: 229047 - DNA, 735 bp, synthetic construct
  misc_feature 1..735: note = Description of Artificial Sequence: Synthetic coding sequence
  source 1..735: mol_type = other DNA
atgggggcactcggactggagggtcgaggcggtagacttcagggcaggggcagtctgctgctggccgtggcgggagccaccagcctggtcacgttgctgctagccgtccctatcaccgtgctcgccgtgctggcactggtaccccaagatcagggtggactggtcactgagaccgcggatccgggagcccaggcacagcagggactcggcttccagaagctgccagaggaggagccagagacggacttgtccccgggactccccgctgcgcacctgattggagccccattaaaaggacagggcctgggctgggagacaacaaaggagcaggccttcctgaccagtggaacccagttctccgacgctgagggcctggccctgccccaggatggcctctactatctatactgtcttgttgggtaccggggacgggctccgccaggaggaggagatccccaagggcgtagcgttacacttcgcagtagcctctatagggccggtggcgcttacgggccagggacacccgaactattgttagaaggagccgaaaccgtgactccggtcctcgaccctgccagacgacaagggtacggacccctctggtatactagtgtcgggtttggaggcctcgtgcagttacgccgtggcgagagagtatacgtgaatatctcccacccagacatggtggactttgccaggggaaagacgttttttggggcagtgatggtgggttag

SEQ ID NO: 229048 - DNA, 234 bp, synthetic construct
  misc_feature 1..234: note = Description of Artificial Sequence: Synthetic coding sequence
  source 1..234: mol_type = other DNA
atgggtgccctgggtctggaaggaaggggcggtagactgcaaggcaggggctctctactgctggctgtggcaggcgcaacctcgctcgtcactctgctgctagcagtgcctattactgtgcttgctgttctggccctggttccgcaggatcagggcggtctgggcttccggagttgtcaacgcagatctcaaaaacagatcagcgctcccggttcgcaactgcccacgtcctag

SEQ ID NO: 229049 - DNA, 735 bp, synthetic construct
  misc_feature 1..735: note = Description of Artificial Sequence: Synthetic coding sequence
  source 1..735: mol_type = other DNA
atgggtgctctgggcctggaaggcagaggaggaaggctccagggcaggggcagtttactgctggctgtagccggtgcaacttccttggtgaccttgctgttggcggtccctattaccgtcctcgctgtgctggccctcgtcccccaggaccagggaggtcttgtaaccgaaaccgctgatcccggtgctcaggcccagcagggactaggatttcaaaaacttccagaagaggagccagagacagatctgagtcctggccttcccgcagcccacttgattggagccccactaaaaggtcagggcctggggtgggagacgacgaaagaacaggcctttttgacctccggaacacagtttagtgacgccgagggcctggctctacctcaggatggtctgtactatctgtactgtctcgtggggtatcgtgggagagcaccacccggagggggagaccctcaggggaggtccgttaccctgcgctcctccttgtatagggccggaggggcttacggtccaggtacgcccgagctcctacttgagggagccgagaccgtgacacctgttctggacccagcgcgaaggcaagggtatggtcctttatggtacacctccgtagggttcggaggcctggtccagctcaggcgcggtgaaagagtgtatgtaaacatctcacatccagatatggtggatttcgctcgtggaaagacgtttttcggtgccgttatggtgggttag

SEQ ID NO: 229050 - DNA, 735 bp, synthetic construct
  misc_feature 1..735: note = Description of Artificial Sequence: Synthetic coding sequence
  source 1..735: mol_type = other DNA
atgggtgcactgggcctggaggggaggggtggcaggttacagggtagggggagcctgctgctagcagtggctggcgcaacgtccctcgtcaccctactgttggcagtccctatcactgtattggctgtgctggccctagtgccccaggatcagggaggcctcgtgacagagacggcagaccccggagcacaggcccagcaaggccttggttttcaaaagcttcctgaggaagagcctgaaactgatctatcacccggactgcccgctgcacatcttatcggcgcaccactgaagggacaggggctaggatgggaaaccaccaaggaacaagcctttttgacatcgggcacgcaatttagcgatgccgagggacttgcgctgccccaggatgggctgtactatctctactgtctagtggggtatagagggagggcacccccaggagggggagacccacagggcaggtctgtcactctgaggtctagtctctaccgggcaggtggcgcatatggtccgggaacccccgaactgctcctggaaggagcagagacggtgacaccagtgctggatccggcacggagacagggatatggcccactgtggtacactagcgtcggcttcggcggacttgtccagctgcgcagaggcgagagagtgtacgtcaacatcagccatcccgatatggtagattttgccaggggcaaaacattcttcggagcagtcatggtaggctag

SEQ ID NO: 229051 - DNA, 276 bp, synthetic construct
  misc_feature 1..276: note = Description of Artificial Sequence: Synthetic coding sequence
  source 1..276: mol_type = other DNA
atggctgcatcctcccgagcccaggtgttgagtctctacagagctatgttgcgggaaagcaagcggtttagcgcttataactatagaacttatgcagtgcggaggatcagagacgcattccgcgaaaataagaacgtaaaggatccagtggagattcagaccctggtgaacaaggccaaacgcgacctcggagtgatcagacgtcaggttcacataggccagctgtattctacagataagttgatcattgagaacagagacatgcctcgcacttag

SEQ ID NO: 229052 - DNA, 393 bp, synthetic construct
  misc_feature 1..393: note = Description of Artificial Sequence: Synthetic coding sequence
  source 1..393: mol_type = other DNA
atggcggctagcagtcgcgctcaggtgctgagcttatatagagcaatgcttcgcgagtcaaaacgatttagcgcctataattatagaacctatgccgtgagaagaataagagacgcgtttcgtgaaaataagaacgtcaaggatcccgttgaaatccagaccctggtaaataaggccaaacgggacctgggtgtgatccgccgtcagatggacagccatagtgtggctcaggctggggtgcactggaacgacctcagcagtctgcagcccctcccgccatggtttaagcagttttcttgcctcagcctgcctagcagttgggactaccggagaactccccctcgcttagccaatttttgcatcctgtccagggacgtaatatccttatactag

SEQ ID NO: 229053 - DNA, 291 bp, synthetic construct
  misc_feature 1..291: note = Description of Artificial Sequence: Synthetic coding sequence
  source 1..291: mol_type = other DNA
atggctgctagctcaagggcacaggttctgtctctgtaccgggcaatgctacgagagtctaagagattcagcgcctataattacaggacctacgccgtgcgaaggataagggatgccttcagggaaaataaaaatgtgaaggatcctgtagaaatccagaccttagtgaacaaggccaagagagatctcggtgtaatccgccgtcaggtggctgaacagggcactgcagcgaggagaaagagcggtaattcatcccggagcctaggaaagccatgtacatcttggccttag

SEQ ID NO: 229054 - DNA, 2559 bp, synthetic construct
  misc_feature 1..2559: note = Description of Artificial Sequence: Synthetic coding sequence
  source 1..2559: mol_type = other DNA
atgctctcgggcaaaaaggccgctgccgcagcggctgcagccgctgctgctgcaaccgggacagaggccggtccagggactgctgggggatccgaaaatggctccgaagtggccgcacagcccgcaggcttgagtgggcctgccgaagtgggccctggggcagtgggggagaggaccccccgtaagaaagagcccccaagggcctccccgcctggtggactagccgagccacctgggtcggcgggaccccaggctgggcctaccgtggtgcccggttctgctactcctatggagactggcattgcagagacgcccgagggccgtcgcactagtcgcagaaagagagccaaagtcgagtacagggaaatggacgagtccctggccaacttaagtgaagatgagtactactctgaggaggaaaggaacgcaaaagcagagaaggaaaaaaaactgccccctccccctcctcaggcaccaccagaggaagagaacgagtccgaacccgaagagccgagcggagtggagggggctgccttccagtcacgactgccccatgaccgcatgacatcgcaagaagcggcatgctttcctgatatcatatctgggccacagcagactcagaaggttttcctctttatacgaaacagaacactgcagttgtggctggataacccaaagattcagctgacatttgaagccacactccagcaactggaagccccttacaattctgatacggtactcgtccaccgcgtacacagctatctagaacggcatgggctgatcaatttcggaatatataaacgaattaaaccactccccacaaaaaagacaggaaaagtgatcatcatcggttctggagtgtctggattggccgcagcaagacaactgcagagttttgggatggacgtcacactactggaggctagagacagggtcggaggcagggtggctactttccggaaagggaactacgttgctgatttaggtgctatggtggtgacaggtctgggaggcaatccaatggccgtggtatccaaacaggtgaatatggagctggccaaaataaagcagaagtgtccactgtatgaagccaacggacaggccgtgcctaaagagaaagatgaaatggtcgaacaggagttcaatcgtctcttggaggctactagctacttatcccatcagctcgattttaacgtgctcaataacaagcctgtttctctgggccaggcgctggaagtcgtgatccagctccaggaaaagcatgttaaggatgaacagatcgagcactggaagaaaattgtgaaaacccaggaagagttaaaggagctgctgaataagatggtgaatttgaaagagaagatcaaggaactccatcagcagtacaaagaggcttccgaggtgaagcctcccagagacatcacagctgagttcctcgtgaaatcaaaacaccgcgacctgaccgccttgtgtaaagaatacgacgaacttgcggagacacaaggtaaactggaagaaaaacttcaggagctggaggctaatccaccctccgacgtgtatctcagcagtcgagatcgccagatactcgattggcatttcgccaacctggagttcgcgaatgcaaccccgctgagcacgctaagcctcaaacattgggaccaggatgacgacttcgagtttaccggctcacacctaactgttcgtaatggatactcttgcgtgccagtggccctggcggagggactggatatcaagctgaatactgccgtgcgccaggtcagatacacggcaagcggctgtgaagtgattgcagtgaataccagatcgaccagccagacgtttatctataagtgcgatgccgtgttgtgcactttgcccctgggagtactgaaacagcaacccccagctgtgcagttcgttccacctcttccagagtggaaaacatccgcggtgcagaggatgggatttgggaatcttaacaaagtggttctgtgttttgatagagtcttttgggatccctccgttaatctgttcggccatgtgggttctacaacagccagcaggggagagctcttcctattctggaatttatacaaagccccaatcctcctcgccctcgtcgctggggaggcggctggaattatggagaatattagcgacgatgtgatcgttgggagatgcctggccatcctgaagggaatctttgggtcctcggcagtgccgcagcctaaggagaccgtggtgtccaggtggcgcgcagacccttgggccagagggtcgtattcctatgtggctgccggatctagtggaaacgactacgaccttatggcacagccaataacacctgggccaagcataccgggagctcctcagcctatccccagactgtttttcgccggagagcacacaattagaaactatcccgcaaccgtacacggagcgttattgagtgggttgagagaagcaggcagaatagccgatcagttccttggggctatgtacaccctcccccgtcaggcaacacctggcgtgcctgctcaacagtcacctagcatgtag

SEQ ID NO: 229055 - DNA, 2631 bp, synthetic construct
  misc_feature 1..2631: note = Description of Artificial Sequence: Synthetic coding sequence
  source 1..2631: mol_type = other DNA
atgcttagtgggaaaaaagcggcagctgcggcagctgcagccgcagcagccgctaccggaacagaagctggacccggaaccgccggtgggtctgaaaatgggtccgaagtggcagcacagcctgcgggacttagcggcccagccgaggtagggcctggggcagtgggagagcgtacgcccagaaagaaggaaccaccaagagcgtctcccccaggcggattagccgagccccctggatccgccggtccccaggctggtcctactgtggtgcccggaagcgctacacccatggagacaggcattgctgagactccagaaggcaggcgcacatcgagaagaaaaagagctaaggtggaatacagagagatggacgaatctctggctaacctctcagaggatgaatactacagcgaggaagagaggaatgctaaggccgaaaaagagaaaaagctgcctcctccgcctccccaggcccctccggaagaggaaaatgagtctgaacctgaagagccctctgggcaggcaggcggattgcaggatgacagcagcggcggatacggagacggccaggcttccggagttgagggcgctgcgttccagtccaggctgcctcacgacaggatgaccagccaggaggccgcttgttttccagacatcatctctgggcctcaacagacgcagaaggtttttctattcatccgtaaccgcacacttcagctgtggctggataatcccaagatccagctgacttttgaggccaccctgcagcagctagaagctccatacaactctgacacggttttggtccatagagttcacagctatctggaaagacatgggctgattaattttggcatatacaagcgaatcaagccactccctacgaagaaaaccggtaaggtcattataattggaagcggtgtgtcagggttggcagcagccagacagctgcaatcattcggtatggacgtcacgttattggaagctcgcgacagagtcggaggacgcgtagccacttttagaaaaggaaactacgtggcagacctcggggcaatggtggtgaccggcctgggtggcaatccaatggcagtggtctcgaagcaggtgaatatggaactggccaagatcaagcaaaagtgccccctgtacgaggcaaatggccaagcggagcgtatcatcgttccaaaggaaaaagacgagatggtggagcaagagttcaatagactactggaggccacctcttacctgagtcatcaactggacttcaacgttcttaacaataagcccgtgtccttggggcaagcgctggaggtggtcatccagctacaagaaaagcatgtgaaggacgaacaaatagagcactggaagaaaattgtaaagacacaggaggagctgaaggaattgctaaacaagatggtcaacttgaaggaaaagatcaaggagctgcatcagcagtacaaagaggcttccgaggtgaagccccctcgggatattacggccgaatttcttgtgaagagtaaacatcgggatttgacggccctgtgtaaagaatatgacgaactggctgaaacccaggggaagctggaagagaaactgcaggaactagaagctaacccccctagcgatgtgtacctaagttctcgcgaccgacagattctggactggcatttcgccaacctcgaattcgccaatgccacccctctctctaccttgtccctcaaacattgggaccaggatgacgatttcgagttcacaggctcccacttgacggtgcgtaatggttacagctgtgtccccgtcgcactggccgagggtctcgatataaaactgaataccgcagtgaggcaagtgagatacacggccagcggttgcgaagtaatcgctgtgaacacccgatccacttctcagaccttcatctacaagtgtgacgccgtactttgtactctcccactgggcgtgctaaaacaacagccacctgctgtgcaatttgtccctcccctgcccgagtggaagactagcgccgtgcaacgcatgggttttggcaacctcaataaagtcgtgctgtgctttgacagagtgttttgggacccttcggtgaatctgttcggacatgtggggtctaccacagcctcacggggagagctgttcctgttctggaatctctataaggcacccatcctgctcgcacttgtggccggagaagcggctggcattatggaaaatatttcagacgatgtgattgttggtagatgtcttgctatactgaagggcatcttcggtagctctgctgttccgcagccgaaagaaaccgttgtctcacgctggcgagctgacccttgggccaggggttcatacagctacgtagccgctggctcttctggtaacgattatgatcttatggctcagcctattacccccggtcctagcattccgggagctccacagcccatccctcgccttttttttgctggagagcatacgatcagaaactatcctgccacagtccatggagccctcctgtcaggcctcagagaagccggaagaattgctgatcagtttctgggagcgatgtatactctgccaagacaggctaccccgggagtacccgctcagcagagtccctctatgtag

SEQ ID NO: 229056 - DNA, 2631 bp, synthetic construct
  misc_feature 1..2631: note = Description of Artificial Sequence: Synthetic coding sequence
  source 1..2631: mol_type = other DNA
atgctgtccggcaagaaggccgctgcagctgctgccgcagccgcagcagctgctaccgggacagaagctggcccaggtacagcagggggaagcgaaaatggctccgaggtcgcggcacaaccagccggactctcgggaccagcagaggtgggacccggagccgtaggggagcgtacaccacgtaaaaaggaaccgcctcgagcctcacctcctggagggttggcagaacctccaggctccgctgggcctcaggccggaccaacagtagtcccaggctccgcgaccccaatggagacaggtattgctgaaaccccagaaggacgacgaactagtcgacgcaagcgggcaaaggtggaatatcgagagatggatgaaagtctagccaacctgtctgaggatgagtactacagtgaggaagagaggaatgcgaaggccgagaaagaaaagaaactcccgcctcctcccccacaagcacccccagaagaagaaaacgaatcagaacctgaggagccctccggacaggcgggagggttgcaggatgacagtagcgggggatatggggatggtcaggcttctggtgttgagggggctgcgtttcaaagtcgcctccctcatgaccgcatgacgagtcaggaagcagcctgctttcctgacattataagcggccctcagcagacgcagaaagtattcttgtttattagaaaccggaccctgcagctgtggctcgacaatccgaaaatccagcttacctttgaggctacgctgcagcagctggaagccccatacaactctgatacagtattggtgcaccgggttcactcctatttggagagacatgggctgattaatttcggcatatataaaaggatcaaaccactccctacaaaaaaaaccggtaaggtcatcatcatcgggtccggcgtatccgggctggccgcagctaggcagttgcagtccttcggcatggatgtcactctgctggaagctcgggatagagtgggaggtagggtcgcaactttccgcaaaggcaattatgtcgccgatttgggagccatggtggttactggcttgggcggaaacccaatggccgttgtatcaaagcaggttaacatggaactggctaaaattaagcaaaagtgccctctttatgaagctaatggacaggcagacacggtgaaggttcccaaagaaaaggatgagatggttgagcaggaattcaacaggctcctggaagccacttcctacctgtctcaccagctggattttaacgtgctcaataacaagccagtttctctggggcaggcacttgaggtagtaattcagctccaggaaaaacacgtaaaagacgagcaaatcgaacactggaagaagatcgtgaaaacgcaggaagaattaaaggagctgctgaataaaatggttaatctgaaagagaagattaaagagttacaccaacagtacaaggaggcttccgaggtgaaaccaccgagggacatcaccgctgagtttctcgttaagtcgaagcatagggacttgacggccctgtgcaaggaatacgacgagctggcggagacccagggcaagcttgaggaaaaattgcaggagttagaggctaacccgccatccgatgtatacctctccagccgtgatcgtcagattctggactggcacttcgctaatttggagttcgcaaatgcgactccattgtcaaccctttctttaaagcattgggatcaggacgatgatttcgaatttaccggcagccacctaaccgtgcggaacggctattcttgcgtacctgtggccttggccgagggtctcgatatcaagctgaacaccgcagtgcgccaggtgcgctatacagcgagtggatgtgaagttatcgccgtgaacacccgcagtacgtcgcagacttttatttataaatgcgatgcggttttgtgcactttgcccttgggcgtcttgaaacaacagcctccagccgtgcagttcgtacctcctctgccagaatggaaaacatccgctgtacagcgcatggggttcggtaacttgaacaaggttgttctgtgctttgaccgagttttttgggacccctcagttaacttattcggccatgtggggagcactaccgcctctcgcggagaattatttctattttggaatttgtacaaagccccaatcctgttggcgttggtagcgggagaggcggcaggcataatggagaacatatccgacgacgttatagtgggtaggtgtcttgcaattctgaaagggatctttggtagcagcgctgttccccagcctaaagagacagtcgtgtctcggtggcgggcagatccttgggccaggggctcctattcctacgttgctgcagggtcctcaggcaacgattatgatctgatggcccagccaatcacacccggtccctccatccctggggcacctcaacccataccaaggcttttcttcgctggtgagcataccattcggaactatcccgcaacagtgcatggagccctgctaagcgggcttagggaagccggaagaattgcggatcagttcctgggcgcaatgtacacattacccaggcaggccaccccaggagtgcctgcccagcagagccccagcatgtag

SEQ ID NO: 229057 - DNA, 1773 bp, synthetic construct
  misc_feature 1..1773: note = Description of Artificial Sequence: Synthetic coding sequence
  source 1..1773: mol_type = other DNA
atggcgacccctcggggacgaacaaaaaagaaggcctcatttgatcacagccccgacagcctgcccttgcgtagctcaggacgacaggccaagaagaaggcaactgagacaactgacgaggacgaagacggtgggagtgagaagaagtaccggaagtgcgaaaaggccggatgcacagcaacttgccctgtctgcttcgcctcagcgtccgaacgctgtgctaagaatggttacacttcaaggtggtatcacctctcttgcggcgaacacttctgcaacgaatgttttgatcattactaccggtcacacaaagatgggtatgataagtatacaacctggaagaagatctggacctccaacggcaaaactgagccctcacctaaagcattcatggctgatcagcagcttccctactgggtgcagtgtacaaagcccgagtgccgcaagtggcggcaactgacaaaggaaatccaacttacgccccagatagccaagacctacagatgcgggatgaagcctaacaccgccattaagcccgaaacctccgatcactgctcattaccagaagatctcgaggctcttaccccgcagaagtgcatcccgcatatcatagtacgcggactcgttcggatcagatgtgtccaggaggtagagagaattctctacttcatgaccagaaagggattgattaatacaggcgtcctgtctgtgggcgctgaccagtacctgctaccaaaggactaccataacaagagcgttatcattattggagccggtccggctggcctggccgcagctcggcagctgcataacttcgggattaaggtgacagttctggaggcgaaagaccggataggtggtcgggtgtgggatgataagtcatttaagggcgtgaccgtgggcaggggggcacagattgtgaatggatgcataaacaaccctgtggctctgatgtgcgagcaggtgtctgccagatcttgggatcataacgagttttttgcccagttcgccggagatcacacgttactgactcccggatactccgtgatcatcgaaaagctggccgagggactggatatccaactgaaatcacctgtacaatgcattgactactccggcgacgaggtacaggtcacgacaacggacgggactggatattccgcccaaaaagtgcttgtgaccgtgcctctcgccctccttcagaagggcgcaatccagttcaaccctcctcttagtgagaagaaaatgaaagccatcaattctctgggtgccggtattattgagaagattgcgctgcagttcccctatagattttgggatagcaaagtgcagggcgctgactttttcgggcatgtgcctccgtctgccagcaaaagggggctttttgcagtgttttatgatatggatccacaaaagaaacatagtgtactgatgtctgtgatcgctggtgaagcagtagcctcagtgcggactctcgacgataagcaggtgctgcaacagtgcatggccaccctaagagagctgtttaaagagcaggaggtccctgatcctactaaatattttgtgactaggtggtccacggacccttggatacaaatggcgtattccttcgtgaaaacagggggttccggtgaagcctacgacattatcgcagaggatatccagggtacggtctttttcgccggagaagctacgaatagacactttcctcagaccgtgacgggagcatacctgtccggagtccgagaggccagcaaaatcgcggctttctag

SEQ ID NO: 229058 - DNA, 2463 bp, synthetic construct
  misc_feature 1..2463: note = Description of Artificial Sequence: Synthetic coding sequence
  source 1..2463: mol_type = other DNA
atggcaactccacgcggtagaaccaaaaaaaaggcttccttcgatcactcccccgactctctaccattgcggtcatccggcagacaggcgaaaaagaaagcaacagagaccacagacgaagacgaagacggagggtcggagaaaaagtataggaagtgcgaaaaagccggttgcaccgcaacttgtccagtgtgcttcgcctcggcctcagagcgatgtgcgaagaacggctacaccagccgctggtatcatctcagttgcggggaacacttttgtaatgaatgctttgaccattattaccgttcccataaagacggctatgataaatacacaacttggaaaaaaatctggacaagtaatggaaagactgaacctagtcccaaggcatttatggcagaccaacagcttccatattgggtccagtgtactaaacctgaatgtcggaagtggaggcaactgacaaaggaaattcagctgacaccacaaattgccaagacttacaggtgcggaatgaagcctaataccgcaattaagcccgagacgagtgatcactgtagcttgcccgaagatctacgggtcctggaagtgtctaatcactggtggtactctatgctgattctgccgccactcctaaaggactccgtggccgctcccttgctgagcgcatactaccccgactgcgtcgggatgagcccaagttgtactagtacaaatagggcagccgctaccggtaacgcctctcccggaaaactggagcatagcaaggcggcactgagcgtgcacgtgcccggaatgaatcgttactttcagcccttctatcagcccaacgaatgtggaaaagcactgtgtgtgagacctgatgtgatggaactggatgagctttatgaattccctgaatatagtcgagacccaactatgtatcttgccttaaggaatcttattttagctctgtggtatactaactgcaaggaggcactgacaccgcagaagtgtattccgcacatcatcgtgagaggactggtccgcatacgatgtgtacaggaggttgagagaatcctttacttcatgacacgaaaaggcctcatcaataccggtgtcctgagcgtgggcgcagatcagtatttgctgcccaaagactatcacaataagagtgtgataatcatcggtgctggcccagcagggctagcggcagccaggcagctccataatttcggcattaaggtcacagtgcttgaggctaaagaccggattggcggaagagtgtgggatgataaaagctttaaaggcgtgacagtggggaggggagcccagatcgttaatgggtgtatcaataacccagtagcgctcatgtgcgaacaattgggtatctccatgcacaaattcggggagcggtgcgacctcattcaggaaggcggtcgcataacagaccccactatagacaaacggatggatttccatttcaacgccctacttgacgttgtcagcgaatggaggaaggataagacacaacttcaagatgttcccctcggcgagaaaattgaagagatctataaagctttcataaaagagtctgggatccagttctctgagcttgaggggcaggttctgcagttccatctatctaacctggagtacgcctgcgggagcaacttacaccaagtctctgcgcgtagctgggaccataatgagttcttcgcccagtttgccggagatcatactctgctcacaccgggttacagtgtgatcattgagaagctggctgagggtctggacatccagctgaagtcccccgtccagtgtatagactatagtggagatgaggttcaggttaccacgacagatgggacagggtacagtgcccagaaagtcctggtgacagtacctctcgctctgctacagaaaggagctatccaatttaaccccccactctcagaaaaaaagatgaaggccattaactccctgggcgctggcatcattgagaaaatagctctccagttcccctaccgcttttgggatagcaaagtgcagggtgccgattttttcggccacgtgccaccctctgccagcaagagaggactgttcgccgtcttctacgacatggatccccaacactctgttctgatgtcagtcatcgcaggcgaggcagtcgcgtccgttcggacactcgacgacaagcaggtgctccagcagtgtatggcgacccttcgagagttattcaaggagcaggaagtccccgaccctactaagtacttcgtgacaagatggtccactgatccatggattcagatggcatattcgttcgtaaagacaggaggttctggcgaggcatatgacatcatcgctgaagacattcagggcaccgtcttttttgctggagaggccactaaccggcacttcccacagactgtcactggagcctacctaagcggcgtcagggaggcctccaagattgctgctttttag

SEQ ID NO: 229059 - DNA, 2472 bp, synthetic construct
  misc_feature 1..2472: note = Description of Artificial Sequence: Synthetic coding sequence
  source 1..2472: mol_type = other DNA
atggctaccccacgcggacgaacaaaaaaaaaggcttcttttgaccactcacctgatagtctaccgcttcgctcaagtggcagacaagcaaagaaaaaggccactgagactacggacgaggacgaagacggtgggtcagaaaaaaaataccgtaagtgtgagaaggctggttgcaccgccacatgccccgtgtgctttgcatctgctagtgagcggtgtgcaaaaaatggttacacatctaggtggtaccacctgagttgtggagagcacttctgcaatgaatgcttcgatcattactatagatcccataaggacggctacgacaaatatacgacttggaaaaaaatttggaccagtaatggcaaaaccgaaccctcaccaaaggcgttcatggcagatcaacagctcccctactgggtacagtgcacaaaaccggaatgccgcaaatggagacagttgactaaggagattcagctgacccctcagatcgccaaaacttatagatgtggtatgaaacccaacacagccattaaacccgagacctccgatcactgttccctgcctgaagatctgcgggtcctcgaggtgtcgaaccactggtggtactcaatgctcattctccctcctctgctgaaggactctgtcgcagcgccactcctttccgcatactacccagattgcgtgggtatgagcccaagctgtacaagcacaaaccgagccgcagccacaggcaatgcgagccccggtaaacttgaacactctaaggcggcactaagtgttcatgtcccaggaatgaacagatactttcagccattctaccagcccaatgaatgtggcaaggccctgtgtgtgaggcctgacgtcatggagctagacgaactgtatgagtttccagagtactctagagatcctactatgtacctggctttgaggaatctgatcttggctctgtggtatacaaactgcaaggaggcactgacaccgcaaaagtgtatccctcacatcatcgtgcgaggcttggttaggattaggtgcgtacaggaggtggagcgaattctttatttcatgacacgaaaggggcttataaataccggggtactcagtgtgggcgctgaccagtatctgctcccgaaagactaccacaacaaaagcgtgatcatcatcggggcaggacctgctggcctcgcggctgccagacaactgcacaactttggaattaaggtgactgtgcttgaggcaaaggaccgcatcggaggacgcgtgtgggacgacaaaagcttcaagggcgtaactgttggtaggggcgcacagattgtgaatggatgtatcaataatcccgtggctctcatgtgcgaacagctcggcatttcaatgcacaagtttggtgaacgctgcgacctgatccaggagggtgggagaatcactgaccccactattgataagcgcatggatttccattttaacgccctgctcgatgtggtttctgagtggcgcaaggataagactcagctgcaagatgttcccctgggggagaaaattgaagagatctataaggctttcataaaagagagcggcattcagttctcggagctggagggacaagttctccagttccatctttccaacctggaatatgcgtgtgggtccaacttgcatcaggtatctgcaagaagttgggatcataatgaattttttgcccaatttgccggtgatcacacactccttaccccaggctactcagtgattatagagaagctagccgagggcctggacatccagctgaaatccccccaggtgcaatgcattgattattccggagacgaagtgcaggtaactactacagacggcacaggttacagcgctcaaaaggtgttggttaccgtcccccttgcgctccttcagaagggagcaatccagtttaaccctccgttgagcgaaaagaaaatgaaggcaatcaactccctgggcgcagggatcatcgagaaaatagctttacagttcccatatagattttgggactccaaagtgcagggtgcggacttcttcgggcatgtaccaccttccgcctctaagcgcggtctgtttgccgtgttctatgatatggatccccaaaagaagcactcagtcctgatgtctgtgatcgctggtgaggcggtggcttctgtccgtacccttgatgacaagcaagttcttcaacagtgcatggctaccctgcgcgagctttttaaagagcaagaggtacctgatcctactaaatatttcgtgacccgttggtctacagatccctggatccagatggcctattcatttgtgaaaaccgggggatcgggcgaggcctacgacatcatagctgaggacatccaaggcactgtctttttcgctggtgaggccacgaatcgacacttcccacagaccgtgacgggggcatacctaagcggtgtgcgggaagcatccaaaatcgccgctttctag

SEQ ID NO: 229060 - DNA, 1776 bp, synthetic construct
  misc_feature 1..1776: note = Description of Artificial Sequence: Synthetic coding sequence
  source 1..1776: mol_type = other DNA
atggccaccccacgaggcaggaccaagaaaaaggctagctttgatcatagtccagactcactcccccttcgtagcagcggtcgacaggcaaagaaaaaggcaacagagaccaccgatgaggatgaggacggagggagcgagaaaaagtatcgtaagtgcgagaaagctggttgcactgccacttgccccgtctgcttcgcctccgcgagcgaaagatgtgccaaaaatggatatactagtcgctggtaccatctcagttgtggcgagcatttttgtaatgagtgcttcgaccattattacaggtcccacaaggacgggtacgataagtacactacatggaaaaagatctggactagcaatggtaaaacggagcccagccccaaagcattcatggcagatcagcagctgccttattgggtacagtgcacaaaacccgagtgccgtaaatggcgccagcttacaaaggagattcagttaaccccccagattgctaaaacctacagatgcggcatgaaacccaatacagcgattaaacctgagacctctgaccactgcagcctccctgaggatctggaagccctgacgccccaaaagtgcatcccacatattatcgtccgcggactggttcgcattcggtgtgtccaggaggtggaacgaatcttgtatttcatgacaagaaaggggctgattaatacaggtgtactgtcagtaggagctgaccagtacctgcttcctaaggactatcacaacaagagtgtcattatcatcggagccggacctgcgggtttggctgccgcacgccagctgcacaatttcgggatcaaggtcaccgtgctagaagcaaaagataggatagggggacgggtttgggacgacaagtctttcaagggcgttactgtgggcagaggagctcagatcgtgaatgggtgcataaacaatccagtagcccttatgtgtgagcaggtttccgcccgttcctgggaccacaacgagttctttgcccaatttgctggagatcacaccttacttacccctgggtacagcgttattatcgagaagcttgctgaaggcctcgacattcagctgaagtcaccacaagtgcagtgtattgattactctggcgatgaagtccaggtcactactacagatggcaccggctattccgcccagaaggtgcttgttactgttcccctagccctcttgcagaagggagctatccaattcaacccacctcttagtgagaagaagatgaaagcaatcaatagcttaggcgcagggatcatagaaaagatcgctctgcagtttccctatagattctgggattccaaagtgcagggtgccgacttctttgggcatgtgcccccatccgcatccaaaagaggactattcgccgtgttctacgatatggaccctcagaaaaagcacagcgttcttatgtccgtgatcgctggagaggctgttgcaagtgtgcgaaccttagacgacaagcaggtgctgcagcaatgcatggccaccctgcgcgaactcttcaaggagcaggaagtgcccgaccccacaaaatatttcgtgacccggtggagtaccgacccctggatacaaatggcatactcttttgtgaagacagggggaagtggtgaggcttacgacatcatcgccgaggacattcaggggacggtgttttttgccggagaggccacaaaccgtcactttcctcagactgtcaccggtgcttacctcagtggggtgagagaggcatcaaagatagcggctttctag

SEQ ID NO: 229061 - DNA, 1923 bp, synthetic construct
  misc_feature 1..1923: note = Description of Artificial Sequence: Synthetic coding sequence
  source 1..1923: mol_type = other DNA
tgatgcagcctacccgaggatctaagagtactggaggtgtcaaaccactggtggtacagtatgctgatacttccaccactcttaaaggactcagtggcagcacccctgcttagcgcttactatcctgattgcgtgggtatgagcccctcatgtacctccacaaaccgggcagccgctaccggcaacgcaagccccggaaagttagaacattctaaagcagcgctatcggttcatgttcccggaatgaatcgttatttccagcccttttaccagcccaacgaatgcggaaaggctctttgcgtcagaccggatgtgatggaactggacgaactgtacgaatttcccgaatactcccgggacccaactatgtacctggctttgcgtaacctcatactggcgctgtggtacactaattgtaaagaagctctgactccgcagaagtgcatcccccacatcatcgttcggggattagtgcgcatccgatgcgtgcaggaagtcgaaaggatcctgtacttcatgacacggaaggggttaattaacacaggagtgctgagcgtgggggcagaccagtacctattgcccaaagactaccacaacaaatctgtaattattatcggcgctgggcctgccggacttgcagcagccaggcagctccacaattttggaataaaggtgacagtgctggaagccaaagatcgtataggaggtagggtttgggacgataagtccttcaagggagtgactgtaggaaggggtgcacagattgtcaacggatgcatcaataacccggttgccctcatgtgtgagcagttgggcatctcaatgcataagtttggcgaacgttgtgacctcatccaggagggcggaaggattaccgatccgaccatagacaaaagaatggactttcatttcaacgccctactggacgtggttagtgagtggcgtaaagataaaacacaactccaagacgttcctttgggggagaagatcgaggagatttacaaagccttcataaaggagtcagggatccaattttcggaactcgaaggtcaggtcctccagttccacctcagcaacctcgaatacgcgtgcggctccaatctgcatcaagtatcggcacgctcctgggaccataacgagttcttcgcccagttcgccggtgatcacactctgttgacacctgggtactctgtgatcatcgaaaaactggccgaaggtctcgacatacagcttaaatcaccacaagtgcagtgtatagactattctggcgacgaagttcaggtcaccacaaccgacgggactggctacagcgctcagaaggttctcgtgaccgtgcctctggctctactgcagaaaggcgcaatccaattcaaccccccattgagcgagaagaagatgaaggccatcaattcacttggcgctggcatcattgagaagattgccctgcagttcccctatagattctgggattcaaaagttcagggcgctgacttcttcggccatgtgccaccttcagcttccaagcggggactgtttgcagtcttttacgatatggacccccaaaagaaacactcagtgctaatgtcagtcattgctggagaggccgtagccagtgttaggacgctggatgataaacaggtgcttcagcagtgtatggccacactgcgagaactctttaaggaacaagaagtacccgaccccacgaaatatttcgtcacccgctggtctacagatccatggatacagatggcctacagcttcgtcaaaacaggaggctcaggtgaggcatatgacattatcgcagaggatatccagggcacagtcttcttcgcaggggaggcaaccaacaggcactttcctcaaacagtgacgggcgcttacctctctggggttagggaagcttccaagatcgccgcattctag

SEQ ID NO: 229062 - DNA, 342 bp, synthetic construct
  misc_feature 1..342: note = Description of Artificial Sequence: Synthetic coding sequence
  source 1..342: mol_type = other DNA
atgagcgtgattgcaggtgaagcagtggccagcgtgcgaacgttggacgacaagcaggttttgcaacagtgcatggccacacttagagagctattcaaggagcaagaagtgcccgatccaacaaagtactttgttacacgatggtcaacggacccatggattcaaatggcatactcttttgtgaaaactggcggatctggggaggcttacgatatcattgctgaagacattcaagggaccgtgttcttcgccggagaggccactaatagacatttcccacagacagtcacaggcgcttacttatccggagtgcgcgaggcgagcaaaattgccgcattctag

SEQ ID NO: 229063 - DNA, 3966 bp, synthetic construct
  misc_feature 1..3966: note = Description of Artificial Sequence: Synthetic coding sequence
  source 1..3966: mol_type = other DNA
atggtcctgactctaggtgaatcgtggcccgtgctagtaggcagacgcttcttaagcctgagtgcggctgacggctccgacggctctcacgattcttgggacgtggaacgcgtagcggaatggccttggttaagcggcactattagggcagtgtctcacaccgacgtgacgaaaaaagacctgaaggtatgcgtcgaattcgacggggaatcctggaggaaaagaaggtggatagaggtgtattctttgctgaggagggcctttctcgttgaacacaacctggtcctcgccgagaggaagtcacctgaaattagtgagcggatagtccagtggcccgcaataacttacaagcccctgctggacaaagctggcctaggctcaatcacctccgttcgcttcctgggagatcagcagagagtgtttctcagtaaagacttgttgaagcccatccaagacgtgaactcgctgcggctctccctcactgacaaccagatagttagtaaagaatttcaggccctcattgttaagcacctggacgagagccacctcctgaagggggataagaatttggtaggtagtgaagtgaaaatctattccctggacccgtcaacgcaatggttcagcgcaaccgtaatcaacggcaatcctgccagtaaaactcttcaagtaaactgcgaagagatcccggctctcaaaatcgtggatccgagcctgattcatgtggaggtagttcatgacaatctggtgacctgcgggaactctgccagaatcggcgcagtgaaaagaaagtcctcagagaacaacggcacattggtgtcgaagcaggccaagagctgctcagaggcctccccctccatgtgccccgtgcagtccgtgccaaccactgtgttcaaagagatcctcctgggctgcaccgccgcaacacctccttctaaggatccacgacagcagagtacccctcaagctgcaaactccccgcctaacctcggcgcaaaaataccccagggatgccataaacagagtctacctgaggagataagttcctgcttgaacaccaaatcagaagctctgcgcaccaaacccgacgtctgtaaggctgggctcctgagtaaatcctcgcagatcggcaccggggacctgaaaatcctgaccgaacctaagggcagttgtacacaaccaaagactaacacagaccaggaaaaccgacttgagagtgttcctcaggccctgacaggactgccaaaggaatgcctgcctaccaaggcttctagcaaggcagagctcgaaattgccaatcccccagaactgcagaagcatctggaacacgcaccctcaccctccgacgtctctaacgcccctgaggtgaaagccggtgttaactcggactctccaaataattgttcgggaaaaaaggtagagcctagcgctcttgcttgcagatcacagaacctgaaagaatcgtctgttaaggttgataacgagtcctgttgctcacgctcaaataacaagatccagaatgccccttctcgaaaaagtgtgctgactgacccggcaaaattgaaaaagttacagcaatccggagaggcttttgtgcaggacgacagctgtgttaatatcgtcgctcagctacctaaatgtagagagtgtcgcttggattccttgcgcaaggacaaggagcagcagaaagacagccccgtgttctgccgcttcttccacttccggaggctgcagttcaataagcatggagtgctgcgtgttgaaggatttctgacccccaacaagtacgacaatgaagccatcggcctgtggctgcctctgacaaaaaacgtggtaggcattgacctagacactgctaaatatatcctggccaacattggagaccacttttgccagatggtgatctcagaaaaggaagcaatgagcacaattgagccccataggcaggtggcgtggaagcgtgctgttaagggcgtgcgggagatgtgtgacgtctgcgatacaacaatcttcaacctccattgggtgtgccctcgctgcggattcggagtctgcgtagattgctacagaatgaaacggaaaaattgtcaacagggagccgcatataagaccttcagttggttgaagtgcgtaaagagccagatccatgagcccgagaatcttatgccaacacagataattcccggaaaggccctgtacgatgtgggcgacatcgttcacagcgtgcgcgcaaagtggggcatcaaagcaaactgcccatgttcaaacaggcaatttaagctgttctctaagccagcgtccaaagaggatctgaaacaaacttcactcgccggagagaagcctactcttggagctgtcctgcagcagaacccttcggtcttggaacccgcagctgtgggaggagaagcagccagcaaacctgcgggatcgatgaagcccgcatgtccagcctctacgtccccacttaactggttggcggacctgacctccggaaatgtaaataaggaaaataaggaaaaacagcctaccatgccgatcctcaaaaatgaaatcaaatgtctgcctccactacccccactaagcaagagttcaacggtccttcacactttcaacagtaccatcctcacccccgtatcaaataacaattctggattcctgcgtaatctcctcaactcgtctactggcaaaaccgagaatggtctgaagaacacacctaaaatcctggacgacatttttgccagccttgtacagaataagaccaccagtgacctgtctaaacgccctcagggactgaccatcaagccaagtattctgggctttgatacaccccactactggctgtgtgacaaccggttattgtgcctccaagaccccaataacaagagcaattggaacgtgtttagggagtgttggaaacaggggcagcctgttatggtgtctggcgttcaccataagctcaactctgagctgtggaaacctgaatccttccgcaaagaattcggggagcaggaggtggaccttgtgaattgtcggacgaacgagataattaccggagccaccgtgggagacttttgggacggctttgaagatgtccctaaccgtttgaaaaacgaaaaggagcccatggtcctgaaacttaaagattggccccctggcgaggactttcgcgacatgatgccatccagatttgacgacctgatggccaatatcccactgcccgagtatactcgacgcgacggcaagctgaacctggccagtagactgcctaattatttcgttcgtccagatctcgggcctaaaatgtataatgcctacggactgatcacccctgaagaccgtaagtacggcacaaccaatctccatctggatgtgtctgatgctgccaatgttatggtgtatgttggaatcccaaaaggccaatgcgagcaagaagaagaagtattaaaaacaattcaagatggcgacagcgacgaactgacaattaagcgcttcatagagggcaaggagaaaccaggcgctctgtggcacatctacgctgctaaagatactgaaaaaatcagagagtttctgaagaaggtgagcgaagagcagggccaggaaaatccggctgatcatgacccaatacacgaccagagttggtacctggaccgaagcctgagaaagcggctgcatcaggaatacggcgttcagggatgggcaatcgtacagtttttgggcgatgttgtgtttatacctgccggtgcaccccatcaggtacacaatctctatagctgcattaaggtcgctgaggactttgtctctccagaacatgttaagcactgcttttggctgacccaggagtttcgatacctatctcagacacacactaatcacgaagataaattgcaagtcaagaatgtgatctatcacgctgtcaaggacgccgtggctatgctcaaggcatccgagtcgtccttcggcaaaccatag

SEQ ID NO: 229064 - DNA, 3966 bp, synthetic construct
  misc_feature 1..3966: note = Description of Artificial Sequence: Synthetic coding sequence
  source 1..3966: mol_type = other DNA
atggttctgactctgggagaatcttggcccgtcctcgttgggaggaggtttctgtctctctctgctgccgatggctcggacgggagccacgatagctgggatgtcgagcgcgtagcagagtggccatggctgtccgggactatacgcgcagtgagccatactgacgtcacgaaaaaagatctaaaggtctgtgtagagttcgacggagaatcatggaggaaaagacgctggattgaggtttacagcttactgcgccgagccttcctagttgagcacaacctggtgctcgccgagcggaagtcaccagaaatatcagaaaggatcgtccagtggccggctatcacatataagcctttgctggataaggctggactgggctcgatcacctccgtcagatttcttggggatcagcaaagggtgtttttgtcaaaggatctcctgaagcccattcaggacgtgaattctttgagactgtccctgaccgataaccagattgtaagtaaagaattccaagccctgattgttaagcacctggacgaaagccacctgctgaaaggggataaaaatctcgtgggaagcgaggtgaagatctacagccttgatccctcaacacaatggttctccgccacagtcatcaacggtaaccctgcctccaagaccctgcaagttaactgtgaggagatcccagctctcaagattgtggacccctcactgattcacgtggaagttgtacatgacaacctcgttacgtgtggtaactccgccaggataggggcagtaaagaggaaaagcagcgaaaacaacggtaccctcgtgagtaagcaggccaaatcttgcagcgaagcttctccctcaatgtgtccagtgcaatccgttcccaccacagtattcaaagaaattcttctcggatgtaccgccgcaacaccaccatccaaggatccacgacaacagtcaactccccaggcggcaaactctccacctaatctgggagctaagattccccagggctgccacaagcaatccctccccgaggagatttctagctgtcttaataccaaaagtgaagcactgcgaacgaagcccgatgtgtgcaaggcaggcttgctcagcaagtcctctcagattggcaccggggatctcaagatcctcaccgagcccaaagggtcctgcactcagccaaagactaacaccgatcaggagaaccgcctggagagcgtgcctcaggccctgaccgggctgcccaaggagtgcctgcctacgaaggcctcgagtaaggcggagctggaaattgctaatcctcctgaactgcaaaagcatttagagcacgctccttcccccagcgatgtttctaacgcaccagaggttaaggcaggtgttaactccgattcgcccaataactgcagtgggaagaaagttgagcctagcgcactggcgtgccgatctcagaacctgaaggaaagtagtgttaaagtggataacgaatcatgttgttcaaggagcaataacaagattcaaaatgctcccagtcgcaagtcggtgctgactgatcctgccaagttgaagaagctgcagcagtccggtgaggcatttgtccaagacgactcctgcgtgaatatagtcgctcagctaccaaaatgcagggagtgtaggctggactccctgcgcaaggacaaggagcaacagaaggattcaccagtgttctgtcgcttttttcacttccgaagactacagttcaacaagcatggcgtgttacgggtggaaggcttcctgactcctaataagtacgataacgaggcaattggactctggctgcccctcactaagaacgtagtgggaattgatctcgatactgccaaatacattctggcgaatattggcgaccatttctgccagatggtcatcagcgaaaaggaagctatgtctacgattgaaccccaccgccaggtggcctggaagagggctgtaaaaggtgtgagggaaatgtgcgacgtgtgcgatacgacaatctttaacctgcactgggtgtgtccgcgttgcggctttggcgtgtgtgtggactgctataggatgaagagaaagaattgtcagcagggcgctgcctacaagacatttagttggctcaagtgcgtcaagagtcagattcacgaacccgaaaacctgatgcccactcaaatcatacccggtaaggccctttatgatgtaggcgatatcgtacactctgtgagggcaaaatggggtatcaaggcgaattgcccttgctctaatcgtcagttcaagctgttctccaagccagcatcaaaggaagatctaaagcaaaccagcctggcgggtgagaaacccacgctgggggcagtcctgcagcaaaacccctcagtcttagagcctgccgcagtgggtggcgaggcagcaagcaagcctgccggaagtatgaagcccgcttgtccagcctctacgtctcccctcaattggctggccgatttgacctctggaaatgtcaataaggaaaacaaagagaaacagccaacaatgcccatactgaagaatgagataaagtgtctcccccctctgccacctctatccaagtcctcaacggtattacacaccttcaattctactattctgacacccgtgtccaataacaactcagggtttttacgcaatttgctaaacagcagtactggaaagactgaaaatggcttaaaaaacactccgaagatcctggatgacatcttcgcgtccctagtacagaacaaaacaaccagcgacctctcaaagaggccccaggggctaactatcaagccttcaatcctcggcttcgatactccccattattggctctgcgataataggcttttatgcttacaagacccaaataacaaaagcaattggaatgtctttcgcgagtgctggaagcagggccagcccgtcatggttagcggagtgcaccacaagctgaactctgaactgtggaaacccgaatccttccggaaggaattcggagagcaggaggtagacctagttaactgtagaaccaatgagatcataacaggagctacagtgggcgatttctgggacggatttgaggacgtcccgaaccggctgaaaaacgaaaaggagcccatggtacttaaactgaaggactggcctccaggggaagactttagggacatgatgcccagccgatttgatgatctcatggctaacatacctctgccggagtatacgcgacgagacgggaaactcaacctggccagccggctacctaattatttcgtgcggccagatttaggccctaagatgtataatgcttacggactgattaccccggaagatcgtaaatatggtacaactaacctgcacttggatgtttcagatgctgccaatgtgatggtgtatgtgggtatccccaaggggcaatgtgaacaagaagaagaagtcctaaagactatccaagatggggattccgatgaactgacaatcaagaggttcatcgagggcaaagagaagcccggagcactgtggcacatatatgcggcaaaagataccgaaaagataagagagttcctgaagaaggtaagtgaggagcagggacaggaaaaccccgcagatcacgaccctatccatgaccagagttggtacctggatcggagtctgaggaaaaggctccaccaggaatatggggtgcaggggtgggcaattgtgcaatttcttggggatgttgtgttcatcccagccggagctccacaccaggtacacaacctgtacagctgcatcaaagtggccgaggatttcgtgagtcccgaacacgtcaagcattgtttctggctgacacaggaatttcgatacctgtcccagactcatacgaaccacgaggataaattgcaggtcaaaaacgtcatttaccatgccgtcaaagatgccgtagccatgctgaaagcatccgagtcttccttcggcaagccgtag

SEQ ID NO: 229065 - DNA, 3966 bp, synthetic construct
  misc_feature 1..3966: note = Description of Artificial Sequence: Synthetic coding sequence
  source 1..3966: mol_type = other DNA
atggtcttgacactgggagagagctggccggtgctagtcggccgacgattcttgagtctgtcagcagccgacgggtctgatggcagccacgatagctgggacgtggagcgggtcgctgagtggccgtggctgagtgggacaattcgcgctgtctcccatacggatgtgaccaaaaaggatttaaaggtgtgcgtggaatttgacggggagtcttggcgtaagcggcgatggatcgaggtgtactccttgcttaggagagcgttcttggtggagcataacctcgtgttagcagagcggaagagtccagagatttcagagcgaatcgtgcaatggcccgcaataacttacaagcccctgctggacaaggcgggtctcggaagcatcacctcagtgcgattcttgggtgaccagcaaagggtcttcctctctaaagacttgctgaagccaattcaggacgttaatagtctgcggctgtccctgacggacaaccagattgtcagcaaggagttccaagctctgattgttaagcacctcgatgagtctcacctgctcaagggtgacaaaaatctggtgggttcagaggtcaaaatctactccctagacccaagtacccaatggttcagtgcgacggtaatcaatgggaaccctgcctccaagaccctgcaagtcaactgcgaggagatcccagccctgaagattgtcgatccttcgttgattcacgtcgaagtggtgcacgataatctggtcacatgcggtaatagtgctcgcatcggagctgtcaaaagaaagtcttccgaaaataatggtacactggttagcaagcaggctaagagctgctcagaagcttctccaagcatgtgtccagttcagagtgtgccaaccaccgtgtttaaagaaatccttttagggtgcaccgctgccacacccccatccaaagatcctagacagcagagcaccccccaggccgctaattcaccgccaaatttgggggctaaaataccacaggggtgccacaagcagtccttgccagaggagatttccagctgcttaaacacaaaaagcgaggcactgaggacaaagcccgacgtatgcaaagctggtttgctgagcaagagctctcagattgggactggtgatcttaagattctgaccgaacctaagggctcctgtacccagcccaaaactaacacagatcaagagaatcgcctggagtcagtacctcaagctctcaccggacttcccaaagagtgtctccctacaaaggcttcttcaaaggctgaactcgagattgccaaccctcctgagctgcaaaaacacctggagcacgctccttcccccagcgacgtatctaacgctccagaggtcaaggcaggcgttaacagtgatagccccaacaattgctctgggaagaaagtggagccatctgctttggcgtgcaggagccaaaatcttaaagaatcctcagtgaaggtggacaatgagtcctgctgctcgcggtcaaataataaaatccaaaatgctcccagtaggaagagtgtgctcaccgatcccgctaagctgaagaagctccagcagtccggagaggcctttgtccaggatgactcctgcgtcaacattgtggctcagcttccaaagtgccgagagtgtcggttagatagcctgaggaaggataaggagcaacaaaaggacagtccggtgttctgtcgcttttttcattttcgacgcctgcagttcaacaagcatggcgttttgagagttgaggggttcctcactcccaataagtacgataatgaggccataggtctgtggctcccattgactaagaacgttgtggggattgaccttgatacagctaagtacattcttgcgaacataggagaccacttctgccaaatggtaattagcgagaaggaagccatgagcacgatcgagccccataggcaggttgcatggaagcgggctgtgaagggcgtgcgcgaaatgtgcgacgtctgcgataccactattttcaatctgcattgggtgtgtcctagatgcggattcggcgtctgcgttgattgttataggatgaagcgcaagaactgtcagcagggcgctgcatacaaaaccttctcctggctgaaatgcgtgaaaagccagattcacgagcctgagaatcttatgcctacacagattattccaggcaaagctctgtacgatgttggggatattgttcacagcgtaagggccaaatggggcatcaaggcaaactgcccttgttccaatcgtcagttcaagctgttttccaaacctgccagcaaggaggacctcaagcagaccagcctcgccggagagaagccgaccctcggggcagtccttcaacagaacccctcagtccttgagccagccgctgtcggaggcgaagcggcaagtaagcccgctggtagcatgaagcccgcttgtccagcttcaacttcgccgctcaattggctagctgatttgacaagcggaaatgtgaacaaagagaataaggagaagcagccgaccatgccaatacttaagaacgaaatcaagtgcctgcctccactccctcccctgtctaaatcctctaccgtcctccacacctttaactcgactattctcactcctgtgtctaacaacaattccggcttcttaaggaacctgctcaacagtagtactggaaagaccgaaaatggtctgaaaaacacccctaagatcctggacgacattttcgcctctctggtgcagaacaaaacaacaagcgacctgagcaagcgaccacagggcttgaccatcaaacctagtatcctaggcttcgacacaccacattactggctctgcgataatcgactgctgtgtctgcaggacccaaacaacaaaagtaattggaacgtgttcagagagtgttggaagcagggacaacccgtgatggtgtctggagtgcatcacaagctgaattctgagctgtggaagccggaaagttttaggaaagaattcggcgagcaggaggtggacctggttaactgtagaactaacgaaattatcactggcgcaacagttggagatttttgggacggctttgaagacgtgccaaatagactgaagaacgagaaagaacctatggtgctgaagttgaaggattggcccccaggcgaagactttagagatatgatgccatctagatttgacgacctgatggctaacatccctctcccagagtacacccgccgtgacggcaagctcaacctggctagtcgtctgcctaattatttcgtaagaccagacctggggcctaaaatgtataacgcttacggccttatcacccctgaggacaggaagtacgggaccacaaatctgcatctcgatgtcagcgatgctgctaacgtaatggtttacgtggggatccccaagggacagtgcgagcaggaggaggaggtgttgaagacgattcaggatggagacagcgacgagctgacaattaagaggtttattgaaggaaaggaaaagccgggtgccctctggcacatttacgccgctaaagacaccgagaagattagagagtttctcaagaaggtttccgaagaacagggccaggagaaccccgcagatcacgaccccattcacgaccaatcctggtatctggaccggagcctgaggaagcggcttcatcaggaatatggggtgcagggatgggcaatagtacagtttctgggagatgtcgtgttcatacctgctggggctccacatcaagtccacaatctctactcttgcataaaagtagccgaggacttcgtaagccccgagcatgtgaagcattgtttctggctcacacaggagttcaggtacctgagccagacacacaccaatcacgaggacaagctacaggttaaaaatgtcatttaccacgcagtgaaagatgctgtggcaatgcttaaggcctctgagagcagcttcggtaagccctag

SEQ ID NO: 229066 - DNA, 513 bp, synthetic construct
  misc_feature 1..513: note = Description of Artificial Sequence: Synthetic coding sequence
  source 1..513: mol_type = other DNA
atggttctcaccctaggcgagtcctggcctgtcctggtgggccgtcgattcctgtctttgtctgctgcggacgggtctgacggcagccatgattcctgggatgtggagcgcgtagcagagtggccgtggctgagtgggactatcagagctgtttcacacacagacgttaccaaaaaggatctgaaggtgtgtgtcgagttcgatggagagtcctggcgcaaaaggcggtggatcgaggtctacagcctgcttcgaagagcctttcttgtcgaacacaatttagtgctcgccgagagaaaatctccagaaatcagcgaaaggattgtccagtggccagcaatcacctataaacctctactggataaagcaggcctgggatctattacctcagtaaggtttctgggcgatcagcagcgcgtatttcttagcaaggatctgttgaagcctattcaggatgtgaattcactaaggctcagcttgactgacaatcagatagtcagtaaagaattttag

SEQ ID NO: 229067 - DNA, 2136 bp, synthetic construct
  misc_feature 1..2136: note = Description of Artificial Sequence: Synthetic coding sequence
  source 1..2136: mol_type = other DNA
atggtgttgacactcggcgagtcctggcctgtgctggtagggaggcggttcttgagtctgtccgccgcagacggcagcgacggcagtcatgactcatgggatgtcgaacgggtggctgagtggccttggctgtcaggcacaattcgcgctgtcagccatacagacgtgactaagaaagatctcaaagtttgcgtggagtttgatggagaatcctggcgcaagagaagatggatcgaggtctattctctccttcgtagagcatttttggtagaacacaatctggttctggctgaacgaaagtcccctgaaatttccgaaagaatcgtgcaatggcccgctatcacatacaagcctttgctggataaagccggtctgggctctataacttccgttcgctttctgggagatcagcagcgggttttcctcagcaaggatctactgaagcctattcaggatgtgaattccctgcgcctttccttaactgacaatcagatagtgagcaaagagttccaggcgttaatagtcaaacacttagacgagtctcacctgttgaaaggcgacaaaaacctggtgggatctgaggtaaagatctattctcttgacccctccacccagtggttctctgccaccgttattaacggaaacccagcctcaaaaaccctccaggttaactgcgaggagatacctgcactcaagatcgtcgaccctagtctcatacacgttgaggtggtgcatgacaatctcgtgacttgtggcaattctgcccgaattggggctgtcaagagaaaatcctcagaaaataacggaacactagtttcgaaacaggctaagagctgtagtgaggcttctccgagtatgtgtcctgtgcaatccgtacccaccacagtctttaaggagatcttgctcggctgtaccgctgctactcccccaagcaaggaccctcgtcagcagagcactcctcaagccgctaactcccccccaaacctcggcgctaaaataccacagggatgtcataaacaaagcctgcccgaggagatttccagttgcctcaatactaagtctgaggcgcttagaaccaagccagacgtctgtaaggcaggcctccttagtaagagttcccagataggaactggggatctcaagattcttaccgagccaaaagggtcttgtacacaacctaagaccaataccgatcaggagaatcggcttgagtccgtgccgcaggccctgaccggcctgcccaaagaatgcctgccaaccaaagcatcatccaaagcggagctggaaatcgccaaccctcccgaactgcagaagcatttggagcatgccccatctccctccgacgtcagcaacgcccctgaggtgaaggccggagtgaatagtgacagtcccaataattgctcagggaaaaaggtcgaaccctctgcactcgcttgtagaagtcagaacctgaaagaaagctccgtgaaggtggataatgagtcctgttgtagtagatcaaacaacaaaatacagaacgcaccatcccggaaatccgtattgaccgatcctgccaagctgaagaagctgcagcagtcaggtgaagccttcgtgcaggacgactcttgtgtgaacattgttgcccagctgccaaaatgtcgcgagtgccggctggactctttacggaaagacaaggaacagcagaaggacagtcctgtattctgccgatttttccactttaggaggctccagttcaataagcatggcgtgctgagagtggaaggcttcctcaccccaaacaagtacgataacgaagctatcggactgtggctccccttgactaagaacgtggttggaattgacctcgacactgcaaagtacattctggcgaatataggcgatcatttctgtcagatggtgatctccgagaaggaagctatgagtacgattgagccccataggcaggtggcttggaagcgtgcggtaaaaggcgtccgggagatgtgtgatgtgtgcgacaccacgatcttcaatctgcactgggtctgtcctcgttgcggattcggagtatgcgtcgattgctatcgaatgaagcgcaagaattgccaacagggagagaacaggttcgactcacctcctgcaccactccactcttag

SEQ ID NO: 229068 - DNA, 366 bp, synthetic construct
  misc_feature 1..366: note = Description of Artificial Sequence: Synthetic coding sequence
  source 1..366: mol_type = other DNA
atggtgcttaccctgggcgagagctggccagtcctcgtcggtagacggtttctgagcctatctgccgctgatggatcagatggatctcatgactcttgggatgtcgaacgggtggccgagtggccttggctgagtggcaccatccgcgctgtgtcccacaccgatgtcacaaagaaggacctgaaagtctgcgttgaatttgacggagagtcatggaggaagaggcgctggattgaggtatatagcctcctgagaagagcattcctggtcgaacataatttggtgctggcagagaggaagtcacccgaaatctcagaacgaatcgtgcagtggcccgcaattacgtacaagccccttctcgattag

SEQ ID NO: 229069 - DNA, 3984 bp, synthetic construct
  misc_feature 1..3984: note = Description of Artificial Sequence: Synthetic coding sequence
  source 1..3984: mol_type = other DNA
atggttctcacactcggagagagttggccggtacttgttggtaggcggttcttaagcctgtcagccgcagacggctctgacggcagtcatgattcttgggacgtcgaacgtgtcgctgagtggccctggctgagcgggaccataagagctgtatcccacaccgacgtgaccaaaaaggatctgaaggtttgtgtagagtttgatggggaaagctggaggaagcggcgatggatcgaggtttactcactgttgcggagagcattcctagtggagcacaacctggtgctggccgagaggaagtctcccgaaatcagcgagcgaattgtgcagtggcctgccataacttataaaccattgttggacaaagccggtctgggcagcataacgtctgtcaggttcctgggggatcaacagagggtctttctgagtaaggacttgctgaagccgattcaagatgttaactccctccgtctgagtctaaccgacaaccaaatcgtttcgaaggaattccaggctctcatcgtgaagcaccttgacgagagtcacctgcttaagggcgataagaatcttgtggggagcgaagtgaaaatatatagcctcgacccttctacgcagtggttttccgctactgtaattaatggaaatcctgccagcaagacgctgcaggtgaactgtgaagagatcccagcactcaagatcgttgacccttcactgatacacgtggaggtagttcacgacaacctcgtgacctgcggcaactcagcccgtattggcgctgtgaagagaaagtcgtcagagaataacggcactctcgtgagcaaacaggctaagtcttgtagcgaagcatccccttccatgtgtcctgtgcaatcagtgcccaccaccgtatttaaggagatactgctgggttgcaccgctgcaaccccacccagcaaggatccacgacagcagtctaccccccaagcagcgaactccccaccaaacctgggtgcaaagattccacaaggctgtcacaagcagtcactcccagaagaaatatcgtcttgtctgaatacaaagtctgaggccctgcgtaccaaacctgacgtgtgtaaggccggacttttgagtaagagctcacaaataggaactggcgatctgaagattttgacagaaccaaagggatcctgtacacagccaaagacgaatacagaccaggagaatcggcttgaatccgtaccccaggccctcacaggattgccaaaggaatgtctgcccacgaaagcatccagcaaagctgagcttgaaatcgcaaacccgcctgaactccagaagcacctggaacacgctccctctccctctgacgtttcgaatgctccagaagttaaggcaggagtgaacagcgattctcctaataactgctccggaaaaaaggtggaacccagcgctctggcttgtagaagccagaatctcaaggagtcatcagtgaaagtggataatgagagctgctgctctagatcgaacaataagatacagaacgctccctctagaaaatcagtcttaaccgatccagccaagttaaagaagttgcaacagtccggcgaggctttcgtccaagatgacagctgtgtgaatatcgtcgcccaactcccaaaatgcagggagtgtcggctggacagcctgagaaaagacaaggaacaacagaaagatagcccggttttctgcaggttttttcatttccggagactgcaatttaacaagcatggcgtgctgcgggtggaaggctttttgacacccaataaatacgacaacgaggctattggcctttggctgcccttgacaaagaacgttgttggtatcgaccttgacacagccaaatatattcttgccaacatcggtgaccacttttgccagatggttatcagtgagaaagaagccatgtccactatcgaaccccataggcaagttgcttggaaacgagcagtgaaaggcgttcgggagatgtgcgacgtgtgtgatacaacaatctttaatctgcactgggtctgcccacgctgcggttttggcgtgtgcgttgactgttaccgaatgaagaggaagaactgtcagcagggtgccgcttacaaaacatttagctggctgaagtgcgtgaaatcacagatacacgagcctgaaaacctgatgcccacccagattatccctggtaaagctctgtacgatgtgggggatatagtacactctgttagagcaaagtggggcattaaggctaattgtccctgctctaataggcaattcaagctgttctccaagccggcatcgaaagaggatctgaaacagacaagcctggctggggaaaaaccaactttgggcgctgtgctgcagcagaacccttcagttttggagcctgcagccgtcggaggtgaggccgcaagcaagccagcgggatcaatgaaacccgcttgccccgcttctacaagtccgttgaactggctcgccgatctcacctccggaaacgtaaataaggagaataaggaaaaacagcctacaatgcctatcctgaagaacgagatcaagtgcctgccccctctgccccctctgagcaaatccagcaccgtacttcatacctttaattccaccatcctcacaccagtgagtaacaacaattccggatttctgaggaatctgctaaatagctccaccggcaagactgaaaacggattaaaaaatacccctaagatactggacgacattttcgcaagcctggttcaaaataaaaccacgagcgacctgagcaaaaggccacaaggacttaccatcaagccatctatccttggctttgacacaccccactattggctctgtgacaaccggttactgtgtttgcaggaccccaataataaatctaattggaatgtcttccgggaatgttggaaacaggggcagcctgtgatggtttccggtgtgcaccataagctaaacagtgagctatggaaaccggaatccttccgtaaggaatttggggagcaggaggtggacctcgtaaattgtcggaccaacgaaatcatcacgggggctaccgtcggcgatttctgggatgggtttgaagatgtgcccaataggctgaagaatgagaaagaaccaatggtactgaaactgaaggattggccgcctggggaggactttagggatatgatgccatcgcggttcgacgatctgatggccaatatcccattaccggagtacactagacgagatggtaaactgaacttggctagcaggctccctaactactttgtgagaccagatctggggccaaaaatgtacaatgcgtacggacttatcacccccgaggacaggaaatacggaacaacgaacctccacctggacgtgagcgatgctgccaatgtgatggtgtatgtgggcattccaaagggtcagtgcgagcaagaggaagaggtcctcaaaacgattcaggacggcgactctgatgagctaaccatcaaaagattcatagagggaaaggagaaacccggtgctttatggcacatctacgctgccaaggatactgaaaaaatacgtgagtttctcaagaaggtttctgaagaacaggggcaggaaaatcccgctgaccatgatcctatacacgatcagagctggtacctggaccgctctctccggaaaaggctgcatcaggagtacggcgttcaagggtgggcaattgtgcagttccttggagatgtggttttcatacccgctggcgctccgcatcaagtgcataatctttatagctgcattaaagtggcagaggactttgtgtcccctgagcacgtgaagcactgtttctggctgactcaggagttcagatatctctctcagacccacacaaatcacgaagataagctacaagtcaagaatgtcatctatcacgcagtgaaagacgccgtagctatgctcaaagtgaacccagtgctggctaacctcaacctaccagcccattggaagtag

SEQ ID NO: 229070 - DNA, 3810 bp, synthetic construct
  misc_feature 1..3810: note = Description of Artificial Sequence: Synthetic coding sequence
  source 1..3810: mol_type = other DNA
atggtgctcacacttggcgagagctggccggtcctcgtgggaaggaggttcttgtcactatccgccgctgacggttccgacggttcacatgattcatgggatgtagagagggttgcggaatggccttggctctcaggtaccatccgcgctgtatcacatactgatgttaccaagaaggacctcaagacttacaaaccgctcctggataaggctgggcttgggtctattacctccgtgaggttcctgggtgatcaacagagagtgttcctgagcaaagatctcctaaaaccaatccaggacgttaactctctccggctcagtttgacagacaaccagatcgtgagcaaagagttccaggcattgattgtaaagcacctcgatgaatcacacctgttgaaaggagacaagaaccttgtgggaagcgaggtaaagatctattcgctggatccaagtacccaatggttttctgcgacagtgattaacggtaatccagcctccaagactctgcaggtgaactgcgaagaaattccagccctgaagattgtggacccttcccttatccacgtggaggtggtgcacgacaacctcgttacctgtgggaacagtgctcgaatcggggctgtcaaacgcaaaagtagcgagaataacgggaccttagtctcaaaacaggccaaatcctgctcagaggcaagtccgagtatgtgccccgtacagtcggtgcccaccaccgtgtttaaagaaatcctcctcggttgcaccgccgctacacccccaagcaaggaccctaggcagcaatctaccccacaggctgccaattcaccccctaacctgggggctaagattccgcagggctgccataagcaatctctgcccgaggagattagctcatgcctcaacactaagtccgaagcgctgcgcacaaagcccgatgtatgtaaggcgggacttttatcgaaatcatcccagattggcacaggggacttaaagattttgacggaaccaaagggatcatgtacccaacccaagacgaacactgaccaggaaaaccggctcgaaagtgtcccacaggcgttgactggattgcccaaggaatgtttgccaaccaaggcatcttctaaggccgaactagagatcgctaacccgccagagctccaaaaacatttggaacacgccccttcaccatcagatgtctccaacgcacctgaagtgaaagccggtgtcaactcagatagccctaacaattgttctggaaagaaagtcgagccttctgccttagcttgccggtcccagaacctaaaggaatctagcgttaaagtggataacgaatcctgttgcagcaggagcaacaacaaaattcagaatgcaccatcgcgtaagtccgttttaactgatcccgcaaagctgaaaaaactgcagcagagcggcgaagcctttgtgcaggatgattcatgtgttaacatcgttgcccagttgcccaaatgtcgggagtgtcgactggactcattgaggaaggacaaggagcaacagaaagattcacctgtgttttgccgttttttccattttagaaggctccagttcaacaagcacggagtcctcagggtagagggattcctgacaccaaataagtatgacaacgaggcgatcggattatggctccccctgaccaaaaatgtagtagggattgatctcgacaccgcaaaatacattcttgccaatattggggaccatttctgccaaatggtcatcagcgaaaaggaagctatgagtacgatcgagccccatagacaagttgcctggaagagggctgttaagggtgtgcgcgagatgtgtgatgtgtgcgacacgactattttcaacctgcattgggtttgcccaaggtgtggcttcggcgtgtgcgtggactgttatcggatgaaaagaaaaaactgccagcaaggagcagcctacaaaacattttcgtggctgaaatgcgtgaaatcccaaattcatgagccagaaaacctgatgccaactcagataatccccggtaaggcgctgtatgatgtcggtgatattgtacattctgtgagagctaagtggggtatcaaagctaactgcccgtgctcgaatcggcagttcaaactgttttctaagcccgcaagtaaagaagatttgaagcagacttcactggccggagaaaagccaacactcggcgcagtcctgcaacagaacccaagcgtgctggagcctgcggcagtgggaggggaggctgcttctaagccagccggaagcatgaagccagcttgcccggcaagcaccagtcccctcaattggctcgccgacctgaccagcggcaacgtgaataaagaaaacaaggagaagcaacctactatgccgatcctaaagaacgagattaagtgtttacctcctctgccacctctctcgaagtcaagtacggtcctgcacacgttcaacagcactattctaacccctgttagcaacaacaacagcggattcctgcgcaatctacttaacagctctacaggcaagaccgagaatggcttgaagaacactcccaaaattcttgatgacattttcgccagcctggtgcagaacaagacaacctcagatctgtccaagcgtccccaggggctgaccatcaagccatctattctcggttttgacacaccacattactggctgtgtgacaacaggttgctctgtttacaggacccaaataacaagagcaactggaatgtgtttcgggagtgctggaagcagggacagcccgtcatggtttctggtgtgcatcacaaactgaactctgaactttggaagcccgaaagtttcaggaaggaattcggggagcaagaggtggatctggtgaattgcagaaccaacgagataatcaccggggcaaccgtaggtgatttttgggacgggttcgaggacgtccccaataggcttaaaaacgaaaaggaaccaatggtgcttaagctgaaggactggccccctggcgaggatttcagggacatgatgcccagtcggttcgacgacctgatggcgaacattccactgcctgagtatacaaggagagacgggaaactcaacttggctagcaggctgcctaactactttgttcgacccgatcttgggccaaagatgtacaatgcttatggcctgatcacaccggaagacagaaagtacggcacaaccaaccttcatttagatgttagcgatgccgctaatgtgatggtttacgtggggattccgaagggtcaatgcgaacaggaagaggaggtgttgaagaccatacaggatggggatagcgatgagctcaccataaaacggtttattgagggaaaggagaagcccggagcactctggcacatctacgccgctaaagataccgagaagatcagggaatttttgaaaaaggtctccgaagagcaaggccaagagaaccctgcagaccacgatccaatacatgaccagtcttggtacctggataggtcactgcgaaaacgactgcatcaagaatacggagtgcagggttgggcgatcgttcaattcctgggagatgtcgtgttcatcccagccggagctccacaccaagtgcataacctatattcatgcataaaagtggcggaagatttcgtgagccctgaacatgtcaaacactgcttttggctgacccaggagttccgatacctgtctcagacacataccaatcacgaggataagttacaggtcaagaatgtcatttatcacgctgtgaaggacgcggtggcaatgctgaaagccagtgagagctcctttgggaaaccgtag

SEQ ID NO: 229071 - DNA, 5285 bp, synthetic construct
  misc_feature 1..5285: note = Description of Artificial Sequence: Synthetic coding sequence
  source 1..5285: mol_type = other DNA
atggcggacgcggcagccagcccagtaggcaaacgccttctgctgctcttcgcagatacagcggcatccgcttctgctagtgcccctgccgcagccgctgcaagtggcgacccaggacctgcccttcggacccgcgcttggcgggctggcacagtgagagccatgtcgggggcagtccctcaggacctcgccatttttgttgaattcgatggctgtaattggaaacaacacagctgggttaaagtgcatgcagaggaagtgattgtgttacttctggagggcagcctggtgtgggcacccagggaggaccccgtgctattgcagggcatccgtgtgagtatagcccagtggcccgctttaactttcaccccactagttgataaactggggctgggctccgtggtacccgtcgaatacctgttggatcgggagctgcggttcctgtcagatgccaatgggcttcacctgttccaaatgggtactgatagtcagaaccaaatccttctagagcacgcggctctgagggaaaccgttaacgccttgatctcagaccaaaaactgcaagaaatctttagcaggggcccttattcggttcagggccacagagttaagatttatcagcccgaaggcgaagagggttggttgtacggagtggtgtctcatcaggatagcatcactaggctgatggaggtgtctgtgacagagtccggcgaaataaaatcggtcgatccacgcctgattcatgtaatgctcatggacaactcggccccacagtcagagggcggaacgcttaaggctgtgaagtcctccaagggcaaaaaaaaacgggaatctatcgaaggaaaggacggacggagaagaaaatccgcatccgactccggctgcgaccccgcatcgaagaaattgaaaggggacagaggggaggtggactccaatggttcagacggtggagaggccagtcggggaccctggaagggaggtaatgcctccggggaacctgggctggaccagcgggctaaacagccacccagcacgttcgtgccacaaatcaaccgaaacattcggttcgctacatacacgaaggaaaatggtcgtacccttgtggtccaggatgaaccagtgggtggtgacactccggcaagttttacaccatattctactgcaacaggccagacacctctggcaccagaggtagggggagctgaaaacaaggaagccggaaaaaccctggaacaggttgggcagggaatcgtcgcaagtgccgcagtggtcaccactgcctcctccacaccaaataccgttaggatcagtgacaccggtctcgccgcaggcactgtgcctgagaaacagaaaggatccagatcccaggccagcggggagaactccaggaactctattctcgctagctccggctttggggctccactccctagtagctcacaaccactgaccttcggcagcggcagatctcagagtaatggggtcctcgccaccgagaacaaaccactcgggttctcattcggatgttcctcagcccaggaagctcagaaggatactgacctctcaaagaatctgttttttcagtgcatgtcccagacactcccaacttcaaattactttaccacagtctcggaatctttggctgatgattcctcttcacgcgattcctttaagcagtcgctcgaaagtctgagcagcggcctgtgcaagggtagaagcgtcctgggaaccgatacaaagcctggttcaaaggccggttccagcgttgacagaaaggtgcccgcagaatctatgccaacactcacaccagccttccctcgctcattgctgaacgcccgaacacccgaaaatcacgagaaccttttcttacagccacccaaactctcccgcgaggagcctagtaatcctttcctggctttcgtcgagaaagttgagcattcaccattttcatctttcgcatctcaggcctcaggtagttcaagttctgcaacgactgtgaccagtaaagtggccccaagctggccagaatcccatagttccgccgatagtgctagcctcgctaaaaagaagccattattcattaccaccgatagctctaagcttgtctctggagtcctggggagtgctctcacatctgggggaccaagtctatccgcgatgggcaatggcagatcttcatctcctactagttctctcactcagcccatcgagatgccgacactgagtagttcgcctaccgaggagcgacccacggtcggtcctgggcagcaagacaatccccttttgaagactttttctaacgttttcggtaggcatagcgggggatttctgtcgtctccagccgatttcagccaagagaacaaggctccttttgaggctgtgaaacggttcagtttggacgagagaagtctggcctgtcggcaggacagtgactcctccaccaactcggatctgtctgacttgagcgattccgaggagcaactccaggcaaagaccggactgaagggtatacccgaacacctcatggggaagctgggtccaaacggagagaggtctgcagagctgcttttgggcaaaagcaagggcaaacaggccccaaagggcaggcctcgaacggcacccctgaaggtgggacagtccgtactcaaagacgtaagcaaggtcaagaagctaaaacagtccggcgagccctttctgcaggacggatcttgcatcaacgtggctccacatcttcataagtgcagagaatgtagactggagagatataggaagttcaaggagcaggagcaggacgactcaacagtggcgtgccggttctttcacttccggagactcatatttacaaggaagggggtacttagggtcgaaggattcctgtcacctcagcagtctgatcccgatgcgatgaatttatggataccatccagttcattggccgagggcatagatttggagacatctaagtatatcctggctaacgtgggcgaccagttttgccagcttgttatgtccgaaaaggaagctatgatgatggtggagcctcatcagaaggtggcatggaaaagagccgtgcggggtgtgcgggaaatgtgcgatgtgtgcgaaactacactcttcaacattcattgggtgtgcagaaagtgtgggtttggagtgtgtttggactgctatcgcctgaggaagagcagaccgagatctgagaccgaagagatgggcgacgaagaagtgttcagctggctgaaatgcgctaagggccaaagccatgaaccagagaacctgatgcccacacagattatccccggaacggctctctataatattggagacatggttcacgcggctcgcggaaagtggggcattaaggccaactgcccctgcatatcccgccagaacaagtcagtgctaaggccagctgttaccaatgggatgagccaacttcctagcatcaatccaagcgcgagttcgggtaacgagacaacctttagcggcggaggcggtccagctccagtcacaactccggaacccgaccatgtccccaaggccgattctacagacatcagatcagaagagcccctcaagactgatagtagtgcatctaactcaaatagtgaactgaaggcgattaggccaccttgcccggacacagctccaccctcaagtgcattgcattggctggctgaccttgctacacagaaagccaaggaggagacaaaagaggccggatccctgcgctctgtgctgaacaaagagtcccactcccccttcggacttgacagttttaacagcacagccaaagtgtcccctctgaccccgaagctgtttaatagcctgctgctcggaccgactgcttcaaacaataaaacagagggttcctcactaagagacctgctacattccgggcctggaaagcttcctcagaccccattggacactggaatcccattccctcctgttttctctacatccagcgcaggtgtcaaaagtaaagcaagcttgcctaatttcctcgaccacatcattgcttccgtcgttgaaaataagaagacctctgacgctagtaagagagcatgtaacctgaccgacacacaaaaagaggtgaaagaaatggtcatgggtctaaatgtcctcgacccacacacgagtcactcctggctctgtgatggtaggctgctgtgcctccacgatccttcaaataaaaataattggaaaattttccgcgaatgctggaaacaaggccagcctgtccttgtgtctggcgttcataagaaactcaaatcagaactgtggaaaccagaggcgttttcgcaggaatttggggaccaagacgtggatcttgtaaactgccgcaactgtgcaatcatcagcgacgtgaaggttagggacttctgggacggattcgagataatttgtaagcgcctgcggagtgaggatggacagccaatggttctgaaattaaaagactggcctcctggagaggacttccgggacatgatgcctacaaggttcgaagatctcatggagaacctgcccctcccggagtacaccaagcgcgacgggaggcttaacctggcctcgcgtctgccttcttatttcgtacgcccagacctgggaccgaagatgtataatgcttatggcctgattacagctgaagatagacgggtggggaccaccaatcttcatctggatgtgtcagacgccgtcaacgtgatggtgtatgtaggcatccccatcggtgaaggcgctcatgacgaggaagttctgaaaaccattgatgaaggcgacgctgacgaggtcactaaacagcggatacatgacggtaaagagaagccaggtgctctgtggcacatctacgctgccaaagacgccgaaaagattagagagctcctccggaaggttggtgaggagcaggggcaggagaatcctcccgatcatgacccgatacacgaccagtcttggtatctggaccaaacacttcggaagaggttgtacgaagagtacggggtgcaagggtgggccatcgtccagttcctcggcgatgctgtttttatccctgctggtgccccacatcaagtacacaacctgtacagctgcatcaaggtcgccgaagactttgtgagccctgagcacgtcaaacactgttttcgactgacccaagagtttagacatttaagcaatactcataccaaccacgaagataaactacaggtaaagaacattatctaccatgccgtaaaagacgccgtgggaacactgaaagcacatgaaagtaaactcgctcggtcata

SEQ ID NO: 229072 - DNA, 4254 bp, synthetic construct
  misc_feature 1..4254: note = Description of Artificial Sequence: Synthetic coding sequence
  source 1..4254: mol_type = other DNA
atgggtgccatggagataaatagaaacatccgttttgcaacgtacacaaaggagaacggacgcacactggtcgtgcaggacgagccagtggggggagatactccagcctctttcacaccatatagcacggcaacaggtcagacccccctggctcccgaagttggaggggcagagaataaggaggcgggaaaaacactggagcaggtggggcaaggtatcgtggccagcgcagcagtcgtgaccaccgcatccagcacccccaataccgtaaggatctcagatactgggctggcggctggtactgtgcccgagaagcagaagggctcccgatctcaagccagtggggagaacagcagaaatagcatcctcgcctccagtgggttcggagccccactgcccagcagctcccaacctcttacatttggtagtggaaggtctcagtccaacggcgtgctggctaccgagaacaaacccctgggatttagttttggctgctcttccgcccaggaggctcagaaagacactgatcttagcaagaatctttttttccagtgtatgagccagaccctccctacctccaactattttacgacagtctcagagagtctcgctgacgatagttcgtctcgcgacagctttaagcaatctttggagtccttgtctagcgggctgtgtaaaggaagatcagtcctcgggactgataccaagcccggatctaaggccggaagcagcgtggataggaaagtcccagctgagtcaatgccgacactgactcctgcttttcctcgttcactactcaacgcccgaactcctgaaaaccatgagaacctgttcctccagccaccaaaactttctagagaagagccctccaatcctttcctggccttcgtcgagaaggtggaacatagccctttttcatcttttgcttcccaagcttcggggagtagtagtagtgccaccaccgtcaccagcaaggtggccccttcgtggccggaaagccactcctcagccgatagtgcttctttagctaaaaagaaaccgttgttcatcaccaccgattctagtaagctcgtctccggagttctgggctctgccctcacaagcgggggaccgtcacttagcgctatgggaaatgggagatccagtagtcctacttcatcccttactcagcctatcgagatgcccactctgagcagcagtcccacagaagagcggccaactgttgggcctggtcagcaagacaaccccttgctaaaaactttctcaaacgtcttcggaaggcacagcggcggatttttgtcatcacccgctgacttttcccaggagaataaggcccctttcgaagcagtgaagcgatttagtctggatgagagaagtttggcttgccggcaagattcggattccagtaccaatagcgatctttccgatttgtcggattctgaggagcagctgcaggcaaaaaccggactcaaagggatccccgaacatctgatgggcaaacttgggcctaacggcgagcgtagcgccgagttgctgctgggcaagtccaagggcaagcaagccccaaagggcaggcctcggacagcgccacttaaggtcggccaaagcgtgctgaaggatgtctcgaaggtgaagaagcttaagcagtccggagaacccttcctgcaggatggatcatgtatcaatgtagccccacacttacataagtgtagagagtgccggcttgagcggtaccgcaagttcaaggagcaggagcaagacgatagcaccgtcgcgtgcagattcttccactttcggagactgatctttacgaggaagggggtccttagagtcgaaggtttcctttctccccaacaaagcgaccccgacgccatgaacctgtggataccaagtagctctttagctgagggaatcgatctagagacatcaaagtatatcctcgcaaacgtgggcgaccagttctgccagttggtcatgtccgaaaaagaagctatgatgatggtggagccacatcagaaagtggcttggaaacgcgcagtcaggggggtcagggaaatgtgcgacgtctgtgaaacgacattgtttaatatccactgggtttgtcgcaagtgtggctttggggtgtgcctcgactgctaccgccttcgaaagtctcggccacgatctgagaccgaggagatgggagacgaagaagttttttcgtggcttaagtgcgccaaaggacagagccacgaacctgagaacttgatgcccacacagatcattcccggaaccgccctgtacaacatcggagatatggttcacgctgctaggggtaagtggggtatcaaggctaattgcccctgtattagccgccaaaacaaatctgtcttgagacccgctgtgacaaacggaatgtcccaattaccctctatcaatccatctgcctcatcaggcaatgagaccaccttcagtggcggaggaggtcccgctcccgtcacaacacccgaacctgaccacgttcctaaggctgacagcacagatattaggtcagaggagccattgaaaaccgactcttccgcaagcaactcgaacagcgaactcaaagccattcgcccaccctgccctgacacagccccaccttcaagcgctttgcattggttagccgacctcgcaacccagaaagccaaggaagaaacaaaggaggccggaagccttagatccgtcctcaataaagaaagtcatagccctttcggccttgactccttcaactctacggccaaggtctcacctctgactcccaaactgttcaatagcctcctgctcgggcctacagcaagcaataacaagaccgaaggctcctcactgagagacctcctccatagcggaccagggaaactaccccagacaccactagatacgggaatcccttttcctcctgttttttcaacttctagcgctggcgtgaagtccaaggcaagcctccccaatttcctggaccacatcattgcctccgttgtggagaacaaaaaaacctctgatgccagcaaaagagcctgtaaccttaccgacacgcagaaggaagttaaggagatggtgatgggcttaaatgttctcgatccacatacctctcatagttggctgtgtgacggtagacttttgtgtctgcacgatccttccaataaaaacaactggaagatatttcgggaatgttggaaacaaggtcagcctgtgcttgtgagtggcgttcacaaaaaactgaagagtgagctctggaagcctgaggcatttagccaggagttcggcgaccaagatgtcgacttagtgaactgtagaaattgcgccatcatttctgatgtgaaagtgcgggatttctgggacggtttcgaaatcatctgtaaacgcctgagatccgaggatggtcaaccaatggtgctcaagttgaaagattggcctcccggtgaggacttccgcgatatgatgcctaccagattcgaggatctcatggagaatcttcctctacctgagtacactaagagggacggcagactcaacctggcttcaaggcttccaagctacttcgtgaggcctgacctgggtccaaagatgtacaatgcttacggactgattaccgccgaggatcgccgtgtgggcaccacaaatctgcatcttgacgttagtgatgccgtgaatgtgatggtttatgttggaatccccatcggcgaaggagcccacgatgaagaagtcctcaaaacaatcgacgagggtgacgcagatgaggtgaccaaacagcgaatccacgacggaaaggaaaagcctggagccttgtggcacatatatgccgcaaaggatgcagagaagatcagagagctcttgcgaaaggtcggcgaagaacagggtcaggaaaatccgccagaccacgacccaatccacgaccagtcttggtacctggatcaaacgttgcggaagaggctctatgaggagtatggagtgcaaggatgggccatcgtgcagtttcttggcgatgctgtgtttatccctgccggtgccccacatcaggtgcacaacttatacagctgtataaaagtggccgaagactttgtctccccggaacatgtgaaacactgctttagacttacacaggagttccgccacttgtcaaatactcatactaatcatgaggataaactccaggtgaaaaacatcatttatcatgccgtgaaagacgcagtcggaaccctcaaagctcatgagagtaaattagctcggtcttag

SEQ ID NO: 229073 - DNA, 2382 bp, synthetic construct
  misc_feature 1..2382: note = Description of Artificial Sequence: Synthetic coding sequence
  source 1..2382: mol_type = other DNA
atgaacctgtggattccctcatcttctctcgcagaagggattgatttagaaactagcaagtatatccttgctaatgttggggaccaattctgccagcttgttatgagcgaaaaggaggcgatgatgatggtggaaccacaccagaaggttgcttggaaacgggcagtccgaggtgtccgggagatgtgtgacgtgtgcgagacaaccctcttcaacatccactgggtgtgtaggaagtgtgggttcggtgtctgcctggattgctaccggttacgcaagtcccgaccaagaagcgagactgaggagatgggcgacgaggaagtgtttagttggctaaagtgtgcaaaggggcaaagtcatgagcccgaaaacctgatgccaacccaaatcatcccgggaacggccctctataacattggggatatggttcatgctgcaagggggaagtggggaattaaagctaactgcccctgtatatcccgtcagaataagagcgtgttgcgaccagcagttaccaacggaatgtctcagctcccttcgatcaatccctctgcatcgagcgggaacgagacaactttctccggaggtggaggcccagcccctgttactaccccagagccagatcatgtacccaaggccgactctaccgatatccggagcgaggagcccctgaaaactgactcctctgcctctaatagtaatagcgaacttaaagcgatcaggccaccctgccccgacacagcaccgccatcatctgcccttcactggcttgcagacttggcaacacaaaaggctaaagaggaaacaaaggaagctggtagtctcagatctgttctcaataaggaaagtcactccccattcggcttggacagttttaacagcaccgcaaaggtgtcccctctgacccccaagctttttaattccctacttctcggccctactgcctcaaataataaaactgagggtagctcactgcgggacctcttgcacagtgggccagggaaactaccccagacgcccctggatactggtataccttttcctcccgtgttctccacctcatctgccggtgtcaaatccaaagcctccttgccaaacttccttgaccacataattgcctcagttgtcgaaaacaaaaagacaagcgatgccagcaaaagagcttgcaatctgactgacacacagaaggaagtgaaagaaatggtcatgggcctgaacgtcctggatccgcacacaagccacagttggctctgtgacggaagactcttgtgcttgcacgatccatcgaataaaaataactggaaaatcttccgggaatgctggaagcaaggacaacccgtactcgtcagcggggttcacaagaagctaaaatcagagttgtggaaacccgaagcattctctcaggagttcggcgatcaggacgtggaccttgtcaattgccgcaactgtgcaataataagtgatgtgaaagtgagggatttctgggatggcttcgagatcatctgcaaacgcttgaggtcagaggatggacagcctatggtcctgaagttgaaagactggcccccaggagaagatttcagggacatgatgccaactaggttcgaggatcttatggagaacctcccacttccagaatataccaaacgggatggtcggctcaatttagcgtcacgcttgcccagttacttcgtgaggccagatctcgggcctaagatgtacaacgcgtacggactcatcaccgccgaggatcggagggtgggtaccaccaatctgcatctcgacgtgtccgacgccgttaatgtaatggtatacgtggggatcccaatcggcgagggcgctcacgacgaggaagtgctgaaaacaatagatgaaggggacgcagatgaagtcacaaaacagcgcattcacgacgggaaggagaagcccggtgccctgtggcacatatacgccgctaaggacgctgagaagatccgcgaactgctgagaaaagtgggagaagagcaaggacaggagaatcctccagatcatgaccctattcacgatcagagctggtatctcgaccagacacttaggaagagactttatgaggagtatggcgtccagggatgggcaatagtacagttccttggggacgctgttttcatccctgctggggctccacatcaggtgcacaacctatactcttgtattaaggtagccgaggattttgtttctccagagcacgtaaagcattgcttcagattgactcaggaattccgacatctgtccaatacacatacgaatcatgaagataaactacaagtcaagaatataatctatcacgcagtcaaggatgcggtgggaaccctgaaagcccacgagtccaagctggccagatcctag

SEQ ID NO: 229074 - DNA, 4656 bp, synthetic construct
  misc_feature 1..4656: note = Description of Artificial Sequence: Synthetic coding sequence
  source 1..4656: mol_type = other DNA
ggctggcggtggctgtatggcgtcgtcagtcaccaggactctattacccggctgatggaggtgtctgtgactgagtcaggtgagatcaaaagcgtggacccacgactaattcacgttatgcttatggataatagcgcccctcagagcgaagggggaactctgaaggccgtgaagtcatcaaaaggcaagaagaaacgagaaagcatcgaaggcaaggacgggcgtcggagaaaatccgccagtgacagcgggtgcgaccccgcttctaagaagttgaagggagatcgcggagaagtggactctaacgggagcgacggcggagaagcatctcgcggtccttggaagggcggtaacgcctccggagaaccgggtctggatcagagagccaagcaacccccaagcacttttgttcctcagataaatcgcaacattcgctttgccacttacaccaaggagaatggtagaaccctggtggtgcaagacgagccggtgggtggtgataccccagcttcttttacgccatacagtacagccacaggccaaactcctctcgctcccgaggtcggtggtgccgagaataaggaggccggtaagactttggagcaagtgggtcaggggatcgtggcatcagccgcagtcgtcaccaccgcaagctctactcccaacacagtgagaatcagcgatacagggctggccgcagggaccgtgccagagaaacagaaaggaagccgaagtcaggcttctggcgagaacagtcgcaattccatcctggccagtagtgggtttggcgctcccctgccgtctagtagccaacctttgacatttggtagcggtagatcacagagcaacggcgtcttggctactgagaacaagcccctcggtttctcctttgggtgtagctctgctcaggaggcccagaaagacacagacctgagcaagaacctcttcttccaatgtatgtcccagacattgcctacatccaattactttacaacagtatccgaatcacttgcagacgattcctcttcccgggattcttttaaacagtccctggaatctctgtcttcaggcctgtgcaagggtcgcagcgtcttaggtactgatacgaagccagggtcaaaggctggctcctctgtggatcggaaggtgcccgctgagagtatgcccaccctcaccccagcttttcccaggtcactgcttaacgccagaacacctgagaaccacgaaaatctgttcctgcagccacctaagctgtctagggaagaacctagcaatccttttcttgctttcgtggaaaaggtggagcactctccattttcgagcttcgcatcacaggccagcggatccagcagctctgcaacgactgtgacgtccaaagtggctccttcctggcctgagagccattctagtgctgacagtgccagcctggccaaaaaaaagccgctctttatcactaccgacagtagcaagctggtatctggcgtgcttggaagcgcacttacctccggtggacctagtctttctgctatgggaaatggcagatcttcctcccccaccagcagcctgacacagcccattgaaatgcccacattaagctcgtctccgacagaggaaaggcctacagtgggccctggccagcaggataatcctttgttgaaaactttttctaatgtgtttggaagacactctggaggattcttaagctccccggcagacttctcacaggaaaacaaggccccattcgaggctgtcaaaaggttcagcttggatgagaggtccctcgcttgtagacaggactctgatagtagcaccaattcagatctcagcgatttgtctgattctgaagagcaactccaggcaaagaccgggctgaaaggaatccctgaacacctaatgggaaaactgggacccaatggcgaacggtccgccgagctactcctcggcaaatcaaaggggaagcaggcaccaaagggacggcctcgcactgccccactgaaagttggccagagcgtcctgaaggatgtttcaaaggtcaagaagctgaaacagtccggagagccatttctccaggatggcagctgcattaatgtcgctccacacttgcacaagtgccgcgagtgcagacttgagagatatcggaaattcaaagaacaggagcaggatgattccacagtggcatgccgcttctttcactttcggaggctgatctttacacgaaagggggtcttgagggttgagggatttctcagccctcagcagagtgaccccgatgccatgaatctgtggataccctcttccagtctagcagagggaatcgatttggagacctcaaagtacatcctggctaacgttggggaccagttctgtcagttagtgatgtcagagaaggaagcaatgatgatggtagagccccatcagaaggtggcgtggaaacgtgccgtgaggggggtacgggagatgtgcgacgtttgcgaaacaaccctgttcaacattcactgggtgtgtcgtaagtgtgggtttggtgtgtgcctggactgttatagattgcgcaagagtaggcctaggagcgagaccgaagagatgggggatgaggaggtgttttcttggctgaaatgtgctaaagggcagtctcacgaacccgaaaacttgatgcctacccaaattatcccagggaccgccctgtacaatattggggatatggtgcatgcagctcgcggtaagtggggtatcaaggccaactgtccatgcatttctcgccagaacaagtcggtattaagacccgctgtcaccaacggaatgagccagttaccttccatcaacccgtccgccagcagcggcaatgagaccacctttagtggtggcggtggccctgcccctgtgaccactcccgaacccgatcacgtaccaaaggccgattctacagatatcagatctgaggagcctctgaaaacagactcctccgccagcaattcaaactccgaacttaaggctatcagacctccatgtcctgataccgccccaccttcctccgctctgcactggttagctgatctggctactcagaaggccaaggaagagacgaaggaggctggaagtctgcggagtgttttaaacaaagaatcccattccccgttcggcttggactcattcaacagcaccgctaaagtgtctcccctgacaccaaaattatttaattctttgctgcttggccctacggccagcaacaacaagacagagggaagtagcctgagggaccttctgcattcgggaccgggaaaactaccgcagactcccctggacaccggtatcccatttccgccagttttcagtacgtcgtcagccggtgtgaagtccaaagcatcccttcctaacttcctcgatcatatcatagcctccgtggtggagaacaagaaaacttcggatgccagtaagagagcatgtaacctcacagatacccagaaagaggttaaggaaatggtaatgggactgaacgtgttggatccccacaccagccactcctggctctgtgacggacgtttgttgtgcttgcacgatccttcaaataagaacaactggaaaatttttagagaatgctggaaacaggggcagccagtgctggtgtcaggcgtgcacaagaaattaaagtccgagctttggaaacccgaggccttctcacaagaatttggagaccaggacgtggatctggtgaactgtaggaactgcgcaattataagcgacgtaaaggtccgagatttctgggatgggtttgagatcatatgtaaaagactgcgctccgaggacggacagcccatggtgttgaaactgaaagattggcccccaggggaagatttccgtgatatgatgccaactcggttcgaggatctcatggagaatctgcctctccccgagtatacgaagagggacggcaggctgaaccttgcatctagactccctagttacttcgtgcggccagacttaggtccaaagatgtataatgcctatggcctgattaccgccgaggataggagggtgggaacgaccaatctgcacttggacgtgtcagacgccgtgaacgttatggtttatgtgggaatcccgattggagaaggagcccatgatgaggaagttctgaaaactatagacgagggcgatgcagatgaagttaccaaacagcgcatacacgacggtaaggaaaagcctggagccctgtggcacatctacgcagccaaggacgcagaaaagatacgcgagttgttaaggaaagtgggtgaagaacaaggccaagagaatcctcctgaccacgatcccatccatgaccaatcctggtacctggatcagactttgagaaaaagactctatgaggaatacggcgtacaaggatgggcaatcgttcagtttctaggagatgctgtgttcatccccgcaggagctccccaccaggttcataacctatacagctgtattaaagtggcagaggatttcgtttctccagaacatgtgaagcactgtttcagactgacccaagaatttcgccacctttccaatactcataccaatcacgaggataagctgcaggtgaagaatatcatctaccacgccgtgaaagatgccgtcggaacactgaaagcacatgaatccaaactggcacggtcttag

SEQ ID NO: 229075 - DNA, 2148 bp, synthetic construct
  misc_feature 1..2148: note = Description of Artificial Sequence: Synthetic coding sequence
  source 1..2148: mol_type = other DNA
atggcaggcgtcggcccaggaggatacgcagctgaatttgtgcccccacctgaatgtcccgtatttgaacccagttgggaagaatttactgatcctctttccttcatcggtcggattcggcctctcgccgagaagacagggatctgcaagatcaggccccctaaggaatatgcgcttagcgggtggaacctgaacaacatgcctgtgctagagcagtcagtgttggcacacataaatgttgatatatccgggatgaaggtgccctggctatacgtgggaatgtgtttttcatccttttgctggcatatcgaggaccattggtcctattcaatcaactacctgcattggggggagccaaagacgtggtacggggtaccgtctcacgcagcggagcaactcgaggaggtgatgcgggaactagcacccgagctgttcgaaagccagccggatctcttacaccagcttgttaccattatgaaccctaacgtgctgatggaacatggcgtacccgtgtatagaacgaaccagtgtgcaggggagtttgttgtaacctttcctcgcgcttatcattcagggtttaaccagggttataactttgccgaagcagtgaatttctgcactgcagattggctgcccattggcagacagtgcgtgaaccactataggcggctgcggcgacactgcgtgttttcacacgaggaactgatctttaagatggcagctgacccagaatgcttggatgttgggctggcagccatggtgtgtaaggagctgaccctcatgacagaagaagagaccagactgcgagagagcgtggtccagatgggagtcctgatgtccgaggaggaggtttttgaactcgtccccgatgacgagaggcagtgctccgcatgtcggacaacttgttttttatcagccctgacctgttcttgcaatcctgagcggctggtgtgtctgtaccatcctaccgatctgtgtccgtgccccatgcaaaaaaaatgcctaaggtatcggtatcctctcgaggacctcccatccctcctttacggcgttaaagtgagagcacaaagttatgatacatgggtgtcgagggtgacagaggccctgtctgccaattttaaccataagaaggacctgatcgagctcagggtgatgctggaagatgctgaagaccgaaagtaccccgagaatgatctatttcggaaacttagggatgctgttaaagaagctgaaacttgcgccagcgtcgcacagctgcttctgtccaagaaacagaagcaccggcagagccccgactctggaaggacacgcaccaagctgaccgtcgaagaactgaaggcctttgttcagcagctcttttcccttccctgcgtgatatcccaggccaggcaagtcaaaaatctgctggacgatgtggaagaattccacgagcgcgcacaggaagctatgatggacgagactcccgatagctccaagctgcagatgctgattgacatgggcagttcactgtacgtcgagctcccggagctgccacgcctcaaacaggagctccagcaggcacggtggctagacgaggtgcgcctaacactgtctgacccacaacaggtgaccctcgacgtcatgaagaagcttattgattcaggggtgggacttgcaccgcaccatgccgtggagaaggcgatggccgagctgcaggagctcctgacagtgtcagaacgttgggaggagaaggccaaagtgtgcctgcaagctcgacctcgacactccgtcgcctctctggagtccatagtcaatgaggcaaagaacatacctgcattcctaccaaacgtactatctttgaaagaagctttgcagaaagcgagagagtggactgccaaggtagaggctatccagtctggctccaattacgcctacctggaacagctggaatccctgtcagccaaagggcgtccaatacccgtccggttggaggcactgccacaggttgagtcccaggtggcagccgctcgggcttggagagagagaacaggtagaacctttctgaagaaaaacagttcccataccctgctacaagtacttagccccagaacagacattggcgtttacggatccggaaagaatcgtcggaagaaagtgaaagagttgtag

SEQ ID NO: 229076 - DNA, 4911 bp, synthetic construct
  misc_feature 1..4911: note = Description of Artificial Sequence: Synthetic coding sequence
  source 1..4911: mol_type = other DNA
atggccggtgttggccctggcggatacgcagccgaattcgtgccaccccctgagtgccccgtcttcgaacctagctgggaagagtttaccgatcctctctccttcattggcagaattcggccactggcagagaagactggaatttgcaagatcagaccccctaaagactggcagccgccattcgcttgcgaggtcaagtcattcaggttcaccccacgcgtccagcggctcaacgagctagaggccatgactagggtcagactggatttcctcgatcagctggcaaagttctgggagctgcagggtagcactctcaaaatcccggtcgttgaacgtaagatcctggacctatacgctctctctaagatcgttgcatccaagggagggtttgagatggtgactaaggaaaaaaagtggtccaaggtgggttcacgtctcggatatttgccaggtaagggcacaggttccttactgaaaagccactacgagaggattctgtacccatacgagctcttccagagcggagtttccctgatgggtgtccaaatgcccaacctggatttgaaggagaaggtggaacccgaggtgctttcgacagatacgcagaccagccccgagccgggaacacgcatgaatattctccctaaacggactcgccgtgtgaagactcagagcgaatccggtgatgtttcaaggaatactgagctcaagaaactccagattttcggagcaggacccaaggtggtggggctggccatgggaaccaaagacaaggaagacgaggtgacaagaaggaggaaagtgaccaacagatccgacgccttcaatatgcaaatgaggcagaggaagggtacactgagtgtgaattttgtggacctctacgtgtgcatgttttgcggacgagggaacaacgaggataagttactgttgtgtgatggttgtgacgatagctatcacacattctgtctgattcccccactgccggatgtacccaaaggtgattggagatgtcctaaatgtgtggcagaggagtgctcaaaaccacgggaggccttcggatttgagcaggccgttcgcgaatatacacttcagagcttcggggaaatggccgataacttcaagtcagattatttcaacatgccggtgcacatggtccccacagagctggtcgaaaaggaattctggagactagtgtcctcaattgaggaggacgtcatagtcgaatatggagcggacattagttctaaagactttggaagtggcttcccagtaaaagacggtagacgaaaaattcttcccgaggaagaagagtatgctcttagcggctggaacttgaacaacatgcctgtcctggagcagtccgtcctcgcacatatcaatgtggatattagtgggatgaaagtgccatggttatatgtgggaatgtgtttttccagcttctgctggcatatagaggatcattggagctactcaattaattaccttcattggggcgaaccgaaaacatggtacggcgtgccctcacacgctgcagagcagctggaggaagttatgcgggaactagcaccagagctcttcgagtcccaacctgatttgttgcaccagttggtcactattatgaaccctaacgtgctcatggaacacggagtgccagtgtataggaccaaccaatgtgcgggagagtttgttgtgactttccccagagcctatcattctggatttaatcaggggtacaattttgccgaggcggtgaacttctgcactgctgactggctgcccatcggcaggcagtgcgttaatcactaccgtcgtctacggagacactgcgtgttttcccacgaagagctcatttttaaaatggccgctgatccagaatgcctggatgttggcctcgccgctatggtctgcaaagagctgaccctgatgacagaggaagagacaaggctccgcgaatccgttgtgcagatgggagtgttaatgtctgaggaagaggtgtttgaactcgtgccagatgacgagcgacagtgctccgcttgccgtacaacatgctttctaagcgccctgacttgttcatgtaatcctgaacgactggtctgcctctatcatcctacagacctgtgtccttgcccaatgcaaaagaaatgcctgaggtacaggtaccccctggaggacctgccaagcctgctgtacggggtgaaggtgcgggcacagagctacgatacgtgggttagtcgtgttacagaagcgctttctgctaatttcaaccataagaaggacttgattgagcttcgggtgatgctggaggatgcagaggatcggaagtatccagaaaatgacctgttcagaaaactacgagacgcagtaaaggaagcggaaacctgcgcctcagtggcccagttgctcctgagtaagaaacagaaacataggcagagcccagacagtggacgcacccgcaccaaattgacagtggaagagttaaaagcattcgtccagcaactgttctccctgccctgcgtcatttcacaggccagacaagtgaaaaatctgctggacgatgtcgaagagtttcatgagcgcgcacaggaggccatgatggatgagacaccagattcgtctaaactgcagatgttgatagatatgggtagttccttgtacgtcgagctgcccgagcttcccagacttaagcaggaattgcaacaggcacgttggttagacgaagttcgcctcaccttgagtgacccgcaacaagttacattagacgtaatgaaaaagctgatcgactccggcgtgggcttggctccccaccatgccgttgagaaagctatggccgaattgcaagagctgctgacagtttcagagcgatgggaggagaaggctaaagtgtgtctccaggccagaccacgtcattctgtggcaagtctagagtcaattgtgaacgaggccaaaaatatcccagccttcctgccgaacgtgctgagcctcaaggaagctctacagaaagctagggagtggacagccaaagttgaagccatccagagtggctccaattacgcctacctggaacagcttgaatctctaagcgctaagggcagacctatcccggttcggctggaggcactccctcaagttgagtcccaggtggctgcagctagggcctggcgggaaagaacaggcagaactttcctgaaaaagaatagcagtcacaccctgcttcaggtgctgtctcctaggactgatatcggagtgtacggttctggcaagaataggaggaagaaggtgaaggagctgattgagaaggaaaaggagaaagacctggacctcgaacccctgagtgacctcgaggaagggttagaggagactcgggacacagctatggtggtggccgtttttaaagagagagagcagaaagaaatagaggcaatgcactctctgagggccgctaaccttgcaaaaatgaccatggttgatcggatcgaggaggtgaagttttgcatctgtcgaaaaacagctagcgggtttatgctgcagtgcgaactgtgtaaggattggtttcacaattcctgcgttccactgcctaagtcttcaagccagaagaagggaagcagttggcaggctaaggaggttaagtttctctgtccgctgtgtatgcggtctcgccgtcctcgtctggaaacaatcctgtcgctgctggtgtcgctgcagaaattgcccgtcaggctgcctgagggcgaagctctgcagtgtctgaccgagcgagctatgagttggcaggaccgagcaagacaggcacttgccaccgatgaactgagcagtgccttggcgaagctgtccgtactctctcaacgcatggtggagcaagcagcaagggagaagaccgagaaaataatctccgctgagctccagaaggccgcagcgaaccctgatttgcagggccacttaccttcctttcaacagagtgctttcaaccgcgttgtgagctctgtcagcagctcccctcggcagactatggattacgacgatgaggaaacggattcggacgaggatatacgcgagacctacggctacgatatgaaagataccgcctccgtgaaatcatccagcagtttggagcccaatctgttctgtgatgaggagataccgatcaagagcgaagaggtagtgacccatatgtggacggcacctagcttctgcgccgaacatgcctatagtagcgcctcaaagagctgttcgcagggaagctccacccctcggaagcagccgaggaagtctcccctggtgccacggtctttggagcctcctgtactggaactgagccctggggctaaggcccagctcgaggaacttatgatggtgggagacctgctcgaagtctccctggacgagactcagcatatttggcggattctgcaggccacacaccccccttctgaggaccggttcctgcatattatggaggacgatagtatggaggaaaagccccttaaagtaaagggcaaagactcgagtgagaagaagcgcaaacgcaaactagagaaggttgaacaactttttggggaaggaaaacagaagtcaaaagaactgaagaagatggataagcctcgcaagaagaagctcaagctgggagctgacaagtctaaagagctaaacaagctggccaaaaagctggccaaggaagaggaacgaaaaaagaagaaggaaaaggccgctgccgctaaagtggagctcgtgaaggaaagtaccgaaaagaagcgtgagaagaaggttctagatattccaagcaaatatgattggagtggagccgaggagagtgatgatgaaaacgccgtgtgcgccgctcagaattgccaacgaccatgcaaggacaagggcgttgtgttcgtaaccgaggaggaaaaaaataagaagtattag

SEQ ID NO: 229077 - DNA, 3150 bp, synthetic construct
  misc_feature 1..3150: note = Description of Artificial Sequence: Synthetic coding sequence
  source 1..3150: mol_type = other DNA
atggcaggcgtggggccaggcggttacgcagctgaattcgttcccccacccgagtgccccgtgttcgagccctcctgggaagagtttactgacccactgtcgtttatagggaggatcaggccacttgctgagaagactggaatttgtaagatcagacctcccaaagattggcagcccccatttgcctgcgaagttaagtcgttccgcttcacccccagagtacagaggttgaacgaactcgaaatcgtggcatccaagggtgggttcgaaatggttacaaaagaaaagaagtggtcgaaggttgggagccgactgggatacctgccagggaagggcacgggctctctcttgaaatcacactatgagcgcatactctatccctacgagctgtttcagtccggcgttagcctgatgggggtgcagatgcccaaccttgacctgaaagagaaagttgagccggaagtgctttccacggacacacaaaccagccccgagccagggactaggatgaatatcctccctaagaggactagacgggtcaagacacaaagcgaatctggagatgtgtcaagaaacactgagctgaaaaagctgcagatcttcggagcaggccctaaggtggtgggacttgccatgggaaccaaggataaggaagatgaggtcacccgcagacggaaggtgacaaacaggtcagacgcatttaatatgcaaatgcggcaacgcaagggcaccctttctgtgaatttcgtggatctgtatgtctgtatgttctgcggcagaggcaataatgaagataagctcttactgtgcgacgggtgcgatgactcctaccacacgttctgtctcattccacccctgcccgatgtcccgaagggagactggcgttgccctaagtgtgtggcggaagagtgctccaagcccagggaggcattcggcttcgaacaggcagttagggaatacactttgcagtcttttggcgagatggccgataatttcaagagcgattatttcaatatgcccgtgcacatggtcccaacagagttagtggaaaaggaattctggaggttggtttcaagcattgaggaggacgtgattgtggagtatggcgctgacatcagcagcaaagacttcggaagcgggttcccggtcaaagatgggaggcgcaagatcctacccgaagaagaggaatacgcgctgagtggctggaacctcaataacatgccggtgttggagcagtccgtgctggcacacatcaatgtggatataagtggcatgaaggtaccttggctctacgtgggcatgtgctttagcagcttttgctggcatatcgaggatcattggagttattcaattaactacctgcactggggcgaacccaaaacatggtacggcgtgccatctcatgcggcagaacagctggaagaagtcatgcgggagctggcccctgagctgttcgagtcgcagcctgacctcctgcaccagctagttacaatcatgaaccctaatgtgctaatggaacatggggtgcctgtatacaggacaaatcaatgcgcaggtgaatttgtggttacattccccagggcatatcattccggatttaaccagggctacaatttcgctgaagctgtcaacttttgcacagctgactggctccctattgggaggcagtgtgttaatcattaccgcaggctcagacgacattgcgtgttctcacacgaggagctgatttttaaaatggctgccgacccggaatgccttgacgtcggattggcagcaatggtgtgtaaagaactgactctgatgacagaagaagagacacgtctcagggagtcagtagtgcagatgggagtgttgatgtcagaggaagaagttttcgagttagttcctgatgatgaacgccagtgtagcgcgtgtcgaaccacctgctttttatccgccctgacatgttcttgtaatcctgagcggcttgtgtgtttgtatcaccccactgatctttgtccctgccctatgcagaaaaagtgtcttcgatacaggtatccgctggaagatcttcccagcctactctacggtgtgaaagtcagggcccagagctacgatacctgggtgtcacgcgtaactgaggccctgtcagccaactttaaccacaaaaaggaccttatcgaattgcgggtgatgctggaggacgccgaggaccgcaaataccctgaaaacgatttgttcagaaaactgcgggacgcagtcaaggaagctgaaacctgtgcctcagtcgcacagctcctgttatccaagaagcagaaacacaggcagagccccgatagcggccgaacacgcacaaagttaaccgtcgaagagttgaaggcgttcgtgcagcagctgttttccttaccttgcgtgattagtcaggctcgccaggtgaagaatttgctcgacgacgtagaggaatttcatgaacgggcacaagaggcaatgatggatgagacccctgactctagcaagctgcagatgctcatcgatatggggtccagcttatatgttgagctcccagaactgcctagacttaaacaggagctccagcaggctcgatggctagatgaagtgaggctaaccttatccgatccacaacaggtcaccctcgacgttatgaagaagcttatagattccggagttggtctcgctccccatcatgctgtggaaaaggcgatggcagagctccaagaacttctgaccgttagtgaacgctgggaggagaaggccaaagtctgcctgcaagcacgccctcggcattctgtagccagtctagagtccatcgtcaacgaagcaaaaaacatccccgcatttctgccaaatgttctaagtctgaaggaggcgctccagaaggcccgagagtggacagctaaggtggaagcaattcaatccggcagtaattacgcctacctggagcaactcgagtccctgtccgctaagggcagaccaattccggtgcgactggaggccttgccacaggtggagtcgcaggtggccgcagcacgagcatggcgtgagagaactggtcgaacctttctgaaaaagaactctagtcacactctgttgcaagttttgtctcccagaaccgacattggagtgtatggatctggcaaaaatcgacgatag

SEQ ID NO: 229078 - DNA, 5072 bp, synthetic construct
  misc_feature 1..5072: note = Description of Artificial Sequence: Synthetic coding sequence
  source 1..5072: mol_type = other DNA
atggctggtgtgggccctggaggttacgctgctgagtttgtgccaccaccagaatgtccggtttttgaaccatcatgggaagaatttacggatcctctaagtttcatcggacggattagacccctggctgagaagacagggatctgtaagattagaccacctaaagattggcaaccaccctttgcatgcgaagtaaaaagtttccgtttcacaccccgtgtgcagcgcctcaatgaactggaggcaatgactagggttcgcctcgactttctggaccagctggcaaagttttgggagttgcagggcagcacactgaaaatcccagtcgtggaacgcaaaatcctggatttatacgccctgagtaagatcgtcgcttctaagggaggcttcgagatggtgactaaggagaaaaaatggtccaaagtggggtctcgcttaggatacctgcctggaaagggtacagggagtctgctgaagagccattacgaaagaattctttacccttacgaactgtttcaatccggcgtctctctgatgggagtacagatgcctaacctagacctgaaggagaaggtggaacccgaagtgctttccactgatacccagacgtcccccgagcccggtacgcgcatgaacattttacccaaaagaacacgacgggtaaagacccaatccgaatctggcgatgtgtcccgtaatactgagctgaaaaagctgcagatattcggcgctgggcctaaagtcgtcgggctagccatggggaccaaggataaggaggatgaggttacccgcaggaggaaggtaacaaaccgaagcgacgccttcaatatgcaaatgcggcagcgaaagggcaccctttcggtcaactttgtggacttgtacgtctgcatgttctgtggtcggggaaataacgaagataagttattgttgtgcgacgggtgcgatgattcataccacacattctgtctgatacctcctctgccagacgtgcccaagggcgactggcgatgtcccaagtgcgtggcggaggagtgtagcaagcccagggaggcgttcggctttgagcaggctgtccgagaatataccctccagtcgttcggcgagatggccgataactttaaaagcgactactttaacatgcccgtgcatatggtccctaccgaattagttgagaaggaattctggaggttggtgtctagtattgaagaagatgtgatcgtcgaatacggcgcagatatttcctcgaaagactttggatcaggctttccagttaaggatgggcgtagaaaaatcctacctgaggaggaggaatatgccctatccggttggaacctcaataatatgcctgttctggaacagagtgtcctggcacatattaatgtggacatctctggtatgaaagtcccgtggctatacgtgggcatgtgcttctcctcgttttgttggcacatcgaggaccactggtcatatagtatcaactatctccattggggggagccaaaaacatggtatggcgttccaagccacgctgccgagcagctggaggaagtgatgagagagttggccccagaactcttcgagagtcagccggacttacttcaccagttagtgacaattatgaatcctaatgttttaatggagcatggagtgcctgtctacagaaccaaccagtgtgccggagagtttgtcgttacattcccccgagcctaccactctgggtttaatcaaggctataattttgcagaagccgtgaacttctgtacagccgactggttgccaataggacgccagtgtgtcaatcattatcgccgtctgagacgacattgcgttttctcccacgaagaactgatcttcaaaatggctgcggaccccgaatgcctggacgtaggcctggccgctatggtctgtaaggagttaaccttgatgacagaggaagaaacccgactaagggaatccgtggtgcaaatgggagtgttaatgtctgaagaggaagtattcgaattggtgcctgacgatgaaaggcagtgttcagcatgcaggacaacctgctttctgtcagcactcacttgctcctgtaaccctgagaggcttgtgtgcctgtaccaccccacagatctgtgtccttgccctatgcagaagaagtgcctgcgctataggtaccctttggaggatctgccaagcctgctgtatggtgtaaaggtccgcgctcagagttatgacacttgggtgtcgcgagtcactgaagccctgagcgcaaatttcaaccacaaaaaggacctgattgagctgagggtgatgttggaagatgccgaagatcggaaatacccagagaatgatctctttcgcaagttgcgcgatgccgtgaaggaagccgaaacatgcgcgtccgttgcacagctgctgttgagcaagaagcaaaaacaccgccaatctcccgactctggcagaacccgcacaaaactgacagtagaggaattgaaggctttcgtacagcagctgttttcgcttccctgcgtcatctcgcaggcacggcaggtcaagaatcttctagatgatgtggaagagttccacgagcgcgctcaggaggccatgatggatgaaacaccagactcttctaaactccagatgttaatcgacatgggttcgtctctctacgttgagctgcctgaactgcctcgcctcaagcaggagctgcagcaagctaggtggttggatgaagttcggctcaccctttccgatccacaacaggtcactctggacgttatgaaaaagctgatagattccggagtgggtctggcaccccaccatgccgtggaaaaagctatggccgagctgcaagaactgctgaccgtgtcagagagatgggaggagaaggcgaaggtgtgcttacaggctaggcctcggcattccgttgcatcccttgagagcatcgtcaacgaggctaagaatattcctgccttcttaccaaacgtgctatccctcaaggaggcacttcagaaagcgagagaatggaccgccaaggttgaggctatacagagcggcagtaactacgcttatctagaacagctggaaagcctttccgccaaagggagaccaatccctgtgcggctggaggcactgccccaggtcgagagtcaggtggcagccgctagggcttggagggaacgcaccggcaggacattcttgaaaaagaattcctcacataccctgctccaggttctgtcccccaggaccgacattggggtgtacggcagtggaaagaatcggaggaagaaggttaaggagctgatcgagaaagagaaagagaaggatctggatctcgaaccactgtccgacctggaggaaggcctggaagaaactagggacacagctatggtggtggccgtctttaaagagcgggagcaaaaagagatcgaggccatgcactcacttagggccgcaaatcttgcaaagatgaccatggtggacagaatcgaggaggtgaagttctgtatttgccgaaagaccgcgagcggattcatgttgcagtgcgagctctgtaaagattggtttcataatagttgtgtacccctgcctaaatcctcatcacagaagaaaggctcctcttggcaggcaaaagaggtcaaattcctttgccccctatgtatgcggtctagacgtcccaggcttgagacaatcttgtctctcctggtgtcactccagaaactgccagtgaggcttcccgaaggggaggcccttcagtgtctgaccgaacgagcaatgtcttggcaggatagagctagacaggccctggcaacagatgaactcagcagcgccctggccaagctctcggtgctctcgcagaggatggttgagcaggccgctcgagaaaagacagagaagattatatctgccgaactccagaaggccgcagcaaatccagaccttcaaggtcatcttccctctttccagcaatctgcattcaatagggtcgtcagctccgtaagttcttctccacgacagaccatggattatgacgatgaggagacggattccgatgaagatattcgagagacgtacggatacgacatgaaagacactgccagtgtgaaatcaagtagcagtttggagcccaacctgttttgcgatgaggagatcccaatcaagagtgaagaggtggtgacacacatgtggactgcccctagtttttgtgccgagcacgcctatagttctgcgtccaagtcctgtagccagggcagttccactcctagaaaacagcctagaaagtcccccctagtgcccaggtctttagaacccccagtgctggagctttcccctggagccaaggcccagttggaggagctaatgatggtgggagatctgctggaggtgtctctagatgagacccaacatatatggagaatattgcaggccacgcaccctccttctgaggatcgttttctgcacatcatggaggatgattctatggaggaaaagcctctaaaggtcaaaggaaaggatagttctgagaagaaacgcaagagaaagctggaaaaggtggagcagttattcggggagggaaaacaaaaatcaaaggaactcaagaaaatggacaaaccgaggaaaaagaaattaaaactcggcgctgacaaatccaaagagctgaataagttagccaaaaagttagcaaaggaggaagagaggaagaagaagaaagagaaagcagccgcagctaaagtggaactcgttaaggagagcaccgagaaaaagcgcgaaaagaaggtcttagatataccttcgaagtatgactggtcgggcgctgaggaatccgatgatgagaatgccgtgtgcgccgcacagaactgccagcggccatgcaaagataaagtggactgggtgcagtgtgacggcggatgtgatgaatggtttcatcaggtttgtgttggcgtcagtcccgagatggccgaaaacgaggactacatctgcattaattgtgcaaaaaagcagggccctgtatctcctgggccagcccctcccccttcattcattatgagctataaacttcccatggaggacttaaaggagacttcata

SEQ ID NO: 229079 - DNA, 3828 bp, synthetic construct
  misc_feature 1..3828: note = Description of Artificial Sequence: Synthetic coding sequence
  source 1..3828: mol_type = other DNA
atgggcttcgcccctggcaaagctgtcggctctcacattcgcggacactacgaacgtatactgaacccttataatctgtttctgagcggtgatagtctaaggtgcctgcaaaaaccaaatcttactactgacaccaaagacaaggagtataagcctcatgacataccccagcgacagagtgtgcagcctagcgagacatgcccacctgcccgtcgcgcaaagcgcatgcgggcagaggcaatgaatattaagattgagcccgaagagactactgaagccaggactcataacctgcgtaggcggatgggctgcccgacaccgaagtgcgagaacgagaaagagatgaaatcatcaataaagcaagaacctatagagcgtaaagattacatagtggagaacgaaaaagaaaagcctaagtctcgctccaagaaagcaacaaacgccgtggacctatacgtgtgtctgctatgcgggagcggaaatgatgaggacagactgctgctgtgtgatggatgtgatgacagttaccacaccttttgcctcatcccgcctctgcatgacgtgcccaagggggattggcggtgtccaaaatgcctggctcaggaatgtagtaaaccccaggaggccttcggattcgagcaagccgcacgggattatactctccgaacctttggagaaatggccgacgccttcaagagtgattatttcaatatgcctgtacacatggtacccaccgagcttgtagagaaggagttttggagactggtaagtactatcgaggaggacgtgactgttgaatacggagccgatatcgcgagtaaagagttcggcagcggcttccctgtgagggatggcaaaatcaaactgagcccagaagaagaggaatacctggattcaggatggaaccttaataacatgcctgtcatggagcagtctgttttggctcacattacagccgatatttgcgggatgaagttgccatggctctacgtgggcatgtgtttctcttccttctgttggcatatcgaggatcactggtcttatagtatcaactatctccactggggcgagcccaagacatggtacggcgtgcctggctatgcggcagaacaactggaaaacgtcatgaaaaagctggccccagagcttttcgtgtctcaacctgacttgttacaccagctagtcactatcatgaatcctaacaccctcatgactcatgaggtgcccgtgtatagaacgaaccagtgtgctggtgaatttgttattactttccccagggcatatcattccggtttcaaccagggctttaacttcgccgaggctgtgaacttctgcactgtcgattggctccccctcggccgtcagtgtgtggagcactatcggcttttacacaggtactgcgtgttttcgcacgatgaaatgatctgcaagatggcttcgaaggccgatgtgctcgacgtggtggtggcgagcactgtccagaaggatatggccatcatgatcgaggacgaaaaggcactccgtgaaacagtgcggaagctcggggttatagattccgaaaggatggacttcgagctgcttcccgacgatgagcggcagtgcgtcaaatgcaaaacaacatgctttatgtctgccattagttgcagttgcaaacccggactcttggtgtgcctgcaccacgtgaaagagctgtgcagctgccccccttacaagtataaactaagatacagatatacactggacgatctgtacccgatgatgaacgccctgaagctgagagcagagagctataatgagtgggctctgaatgtaaacgaggccctggaggcaaagattaataagaagaagtctttggtgagttttaaagcacttatcgaggagtccgaaatgaaaaaattccccgacaacgacctgctcaggcatttaaggctggttacccaagacgccgagaagtgcgcgtcggtcgctcagcagctcttgaatggaaagcggcagaccaggtatagatctgggggtggcaaaagtcaaaaccagctgacagtgaacgaactgagacaatttgtgacgcagctgtacgctctgccgtgtgtcctgagtcaaacaccactcttgaaggacctgctgaatagagttgaggattttcagcaacacagccaaaagctgctttctgaggagaccccatccgccgctgaactgcaggatctgctggatgtgagttttgaatttgatgtggaactgccacaactcgccgagatgaggattcgcctggaacaggctcgatggctggaggaagtccagcaggcttgcttggacccttcttccctaaccctcgatgacatgcggcgtcttatagacctcggagtcggactcgccccttattctgccgtggaaaaagccatggcccgtctgcaggagctgctcacagtcagtgaacattgggacgacaaagccaagagtcttctaaaggccaggcctaggcatagcctcaattctctcgcgacggccgtgaaagagatcgaggagattcctgcttatctgcctaatggggctgctttaaaggatagcgtccagcgagctcgtgattggttgcaggacgttgagggattacaggctggtggaagggtccctgtcctcgatactctgattgagctggtgacccgcggacggtccattcccgtgcatcttaactccttgccccgactcgaaaccctggtagcagaggtccaggcctggaaagagtgtgctgtgaacaccttcctgaccgaaaatagtccctattcactcctggaagtgctatgccctcgatgtgacatcggactgttgggcctgaagagaaaacaaagaaaactcaaggaacccctgcccaacggcaagaagaaatctacaaagctggaatccctgagcgatctggagcgcgctctcacagaatctaaagagacagcatctgccatggccactctgggggaggctaggctacgggagatggaggcactacaaagtctacgacttgccaatgaaggcaagcttcttagccccctccaggacgtggacatcaagatctgtctgtgccaaaaagcgcctgctgccccaatgatccaatgtgaactctgccgagacgcgtttcacacgtcctgcgtggccgttccctcaatttcccagggattaagaatttggctatgccctcactgccggcgatcagagaagccaccactggagaaaattttaccattgttggccagcctgcagaggattcgggtgaggttaccagagggtgatgccctgcgttatatgatcgaacgtactgtgaattggcagcatcgagcccagcagctgctttcttccggaaatctcaagtttgttcaggaccgcgtcggttctggattactgtattcacgctggcaagcctccgctggtcaggtttctgataccaacaaggtttcccagcccccaggcaccacaagttttagcctgcccgacgattgggataacaggacatcatatctccactccccctttagcaccgggaggtcctgcatccctctgcatggagtctctccagaggtgaacgaactgctgatggaagcacaactgttgcaggtgagcctccctgaaatccaggaactgtaccagacactactggccaagccctcccccgcacagcagactgatcgctctagtccagtgcgacccagctctgagaagaacgactgctgccgcggtaagcgggacggcattaactccctggaaaggaaactaaaaaggcggttggagagagaaggactgtcttcagaaagatgggagcgggtcaaaaagatgcgcactccttag

SEQ ID NO: 229080 - DNA, 4743 bp, synthetic construct
  misc_feature 1..4743: note = Description of Artificial Sequence: Synthetic coding sequence
  source 1..4743: mol_type = other DNA
atggaggccgctaccaccctgcatcctggccctaggcccgctctaccgttgggaggccctggccctctgggggagtttctacctccccctgaatgtcccgtgttcgagccctcatgggaagagttcgccgaccctttcgcgtttatacacaagattcggccaatcgcggagcaaacgggtatctgtaaagtcaggccaccacccgattggcagccaccattcgcttgtgacgtcgataagctgcatttcacccctcggatacagagactgaacgagctagaggcccagactcgcgtgaaactcaactttctcgatcagattgcaaagtactgggaactccaggggtccaccttgaagatcccccacgttgaacgtaaaatactggatttgttccagctcaacaaattagtggcggaagagggcggtttcgcagttgtttgtaaggaccgcaaatggaccaaaatagcgactaagatgggatttgcccctggtaaggccgtgggcagtcatatacgtggacactatgagaggatcctcaatccttacaatttgttcttgagcggggacagtctgaggtgtctgcagaaacctaatctcaccacagacacgaaggacaaagagtataaaccacatgacatcccacaacggcagtccgtgcagcctagcgaaacctgtccccctgccaggcgggctaaacgtatgagagccgagaggcaatcactggctgtattgcccaggctggaatgctcaggagccatcctcgcacactgtaaccttcgcttactcgattctagcaacagttctgcttcggcctcccaggcgatgaacattaagatcgagcccgaggagacaacagaggccagaacacacaatctgcggaggcgtatgggctgcccaacccccaagtgtgagaatgaaaaggaaatgaaaagtagcatcaaacaggagccgatagagcgcaaggattacatcgtcgaaaacgaaaaagaaaagccaaagagccggtccaaaaaagcaacaaacgccgtagacctgtacgtgtgcctgctttgtgggtccgggaacgatgaggatcggttattgttgtgtgacggttgtgatgactcatatcatacgttttgcctcattcccccactgcacgatgtgcctaagggcgattggagatgccccaaatgtctagcacaggagtgctccaaaccacaggaagcattcgggttcgaacaagccgcacgagattataccttacgcacctttggggagatggctgatgcgtttaaaagtgactattttaatatgcctgtgcatatggtcccgacagaattagtggagaaagagttctggcgactcgtttctacaatagaggaggatgtgaccgtggaatacggagcagacatagcgagtaaagaatttggctctggattcccagtgcgagatggaaagattaaactgtcacccgaagaggaggaatatctggatagcggctggaatctgaacaacatgcctgtaatggaacagagcgttctggcgcacatcacagcagacatatgcggcatgaagcttccttggttatatgtgggcatgtgctttagttccttctgttggcatatcgaggatcattggtcttatagcatcaactatctgcactggggtgagcctaaaacttggtacggggtccctggctatgctgctgaacagcttgaaaatgttatgaaaaaacttgcacctgaactgttcgtcagtcagccggatctcctacaccagctggtaacaatcatgaacccaaacacgcttatgactcacgaagtgccagtgtatagaaccaaccagtgtgcaggagaatttgtcatcactttccccagagcctatcatagtgggttcaatcagggctttaatttcgctgaggccgtgaacttctgcaccgtggactggttgccactgggcagacagtgcgtagagcattacaggttgctgcaccggtactgcgtttttagtcacgacgaaatgatctgcaagatggcatctaaagctgatgtcctggacgtggttgtggcatctaccgtgcagaaggacatggctatcatgatagaagacgagaaggccttacgggagaccgtgaggaagttaggcgtcattgacagcgagcgtatggactttgagctacttcccgacgacgagaggcagtgcgtgaagtgtaaaacaacctgctttatgtctgcgatatcatgttcctgtaaacctggactgttggtttgtctccatcatgttaaggagttgtgtagctgtcctccgtataagtataagctaagatataggtacaccttagatgatctttacccaatgatgaatgcccttaaactgcgtgctgagagctacaatgaatgggcattgaacgtgaatgaagctctggaggctaagattaacaaaaaaaagtccttggtgtcgtttaaggccttgattgaggagtcagaaatgaaaaaattcccagataacgacctactcagacacctgcgcctggtcactcaggatgccgagaaatgcgccagcgtcgcccagcagttacttaacggtaaacggcagacccgctatcggagcggaggcggaaagtctcaaaaccagttaacggttaacgagctgcgacagtttgtgacacagctgtacgccctgccatgtgtgctgtcgcagacgcctctgctaaaggacctgctgaaccgtgtcgaagattttcagcagcatagccagaagcttttgagcgaggaaacacctagcgcagccgaactacaagaccttctcgacgtatcttttgaatttgatgtggagctaccacagctcgctgaaatgaggattcggcttgagcaggctcgatggttggaagaagtccagcaggcctgtcttgatccaagtagtctcacactagatgacatgaggagactcatcgacttgggagtaggacttgccccttatagtgcagtggagaaggcaatggcccgtctgcaggaactgctgacagtttctgaacattgggatgataaagccaaaagcctgctgaaggctcgccctcgccacagcttaaatagcctcgccactgcagtgaaagaaattgaagagattccagcatacctgcctaatggcgctgcactgaaggactcagtacagcgagctcgcgattggctgcaggatgtcgaggggttgcaggctgggggacgggtacctgtgctagatactcttattgaactcgtgacccgtggacgcagtatccccgtccacttaaattcacttcccagactggagactctggtagcagaggtgcaggcttggaaagagtgtgccgtgaatactttcttgacagagaatagcccttactccctgctagaagtcctgtgccccagatgcgacatcggtctgcttgggctgaaacggaagcagaggaaattaaaagaaccgttgcctaatggaaagaagaaaagcaccaagctggagtctctgtccgatctagaacgagcgctgacagaatctaaggagacagcatccgcaatggccactctgggagaggcccgtcttcgagaaatggaggcgctacagtctttgcggctggccaatgagggaaaactattaagcccacttcaggatgtggacattaagatctgcctctgtcagaaggctcccgctgcacccatgattcagtgcgagctctgtcgcgatgcgttccatacctcttgtgtcgcagtaccaagcattagccaggggctgagaatttggctatgtccccattgtcggcgttcagaaaagccgccattagaaaagattctgcctctgctcgcttctcttcagaggattagggtgcgtttgcccgagggagatgctctgaggtacatgatcgagaggacagtgaattggcagcatagggcccagcagctcctcagctcgggtaatctgaagtttgtgcaggatcgcgtgggaagcggcctgctgtattcaaggtggcaggcttccgccggacaggtatcggataccaacaaggtatctcaacccccaggcaccaccagcttctccttaccggatgattgggacaatcgtacctcctatctacacagccctttcagtaccggacgctcttgtattccccttcacggcgtctccccagaagtgaacgagttgctaatggaggcccaactattacaagtctcattacccgagatccaggaactgtaccaaaccttgttggctaaaccctctcccgctcaacaaactgacagatcctctccggttcggcctagctctgagaagaatgattgctgcaggggaaagagggatggcatcaactccttagagaggaagctgaaacgaaggctcgagagagagggtctctcttcggagcgatgggagcgggtgaagaagatgcgcacacccaaaaaaaagaaaattaaactcagtcatcccaaggatatgaacaatttcaagcttgaacgtgaacgtagctacgagctggtgcgaagcgctgagacgcactctttacctagtgacacatcatactccgaacaggaagactccgaagatgaggatgctatctgccctgccgtgtcctgtcttcaacctgaaggcgacgaagtagactgggttcagtgcgacggcagctgtaaccaatggtttcaccaagtatgcgtaggcgttagtcccgagatggctgagaaagaagactacatctgcgttaggtgcacggttaaggacgctcctagccggaaatag

SEQ ID NO: 229081 - DNA, 4635 bp, synthetic construct
  misc_feature 1..4635: note = Description of Artificial Sequence: Synthetic coding sequence
  source 1..4635: mol_type = other DNA
atggaagcagccaccaccttgcaccctggcccacgacccgcactgccattaggaggcccaggtccactgggagaattcctgccgccacccgaatgccccgttttcgagccatcatgggaggagtttgccgatccgttcgctttcattcacaagatcagacctatcgccgaacagaccgggatttgtaaggtacgtccgccacccgactggcaaccaccctttgcttgcgacgttgataagctccactttacccccaggatccagaggctgaacgagcttgaggctcaaactcgggtaaaattgaactttctagaccagatcgctaagtattgggaactgcagggatctactttaaaaatcccacatgtagagaggaaaattttggatctgttccagctgaacaagctggtcgcggaagaaggcggattcgctgtggtctgcaaagatagaaagtggacaaagatcgcaactaagatgggcttcgctccaggcaaggcagttggctcacatatccgcggtcactatgagcgcatactgaatccatacaacctgtttctatctggagacagcctgcggtgcctccagaaacctaatctgacaaccgacacaaaagataaggagtacaagcctcacgacattcctcagagacagagcgtgcaaccaagtgagacatgtccacctgcccgacgagccaagcggatgcgcgcagaggccatgaatattaagatcgagcccgaagagacaacagaggcacgtacacataatctgaggagaaggatgggatgccctactcccaagtgcgaaaatgaaaaagaaatgaagtcctctatcaagcaagaaccgattgagagaaaagattatatagtcgagaacgaaaaggaaaaaccgaagtctaggtccaaaaaagctactaacgccgtggatctttatgtttgtctcttgtgcggaagtgggaacgacgaagatcggttgttactctgtgatgggtgtgatgactcataccacacattttgtcttatacccccactacatgacgtccccaaaggggactggcgttgtccaaaatgtctggcacaagaatgcagtaagcctcaggaggctttcggcttcgagcaggcggctcgtgactataccttgagaacatttggggagatggccgacgcctttaaatccgactatttcaacatgccagtgcatatggtccccactgagttggtggagaaagaattttggcgtttagtgtccaccattgaagaagacgtgactgtggaatacggcgcagatattgcgtcgaaggagttcggatctggattcccagtgagagatgggaaaatcaagctgtctcctgaagaagaggaataccttgactcaggctggaacctgaataacatgcccgtgatggagcagagtgttttggcccacatcaccgctgacatttgcgggatgaaactgccgtggctttatgtggggatgtgtttttctagcttctgctggcacatcgaggatcactggtcctattctatcaactatctccactggggtgagcccaagacctggtatggcgtcccagggtatgcagccgagcaactggagaatgttatgaaaaagctggctccagagctgtttgtgagtcagccggatctgttacaccagctggtaaccattatgaaccccaatactctgatgacccacgaggtgccagtgtatcggactaaccaatgcgcgggagagttcgtgattacctttccaagagcatatcacagcggattcaatcagggctttaacttcgctgaagccgtaaacttttgtaccgtcgactggctgcctttgggccgtcagtgtgtggagcactacagactgcttcaccgctattgcgtattctcccacgacgagatgatctgcaagatggcttccaaggccgacgttctagatgtggtggtcgcctctactgtccaaaaggatatggcaatcatgattgaggatgaaaaagctctgagggaaactgtgagaaaattgggtgtgattgatagcgaaagaatggattttgagctgctgccagatgacgaacggcaatgtgtgaagtgcaaaacgacttgctttatgtctgctatctcctgctcttgtaaaccgggactgctggtctgtctccaccacgtcaaagaactctgttcctgccctccatataagtacaagctgagatatcggtacacacttgatgatctttatcctatgatgaatgcccttaagctgagggccgagagctacaatgagtgggccctgaacgtaaacgaagcactggaagccaagatcaacaagaaaaagtcgttggtgagtttcaaagctttaattgaggagagtgaaatgaaaaagttcccagataatgaccttctgcgccatcttcgactggtgacccaggacgcagaaaagtgcgcttcagttgcacagcagcttctaaatggcaaaaggcagacaagatatcgctccggaggcggaaagtctcagaaccaactgaccgtcaatgagctgcgacagttcgtgacccagctgtacgcactgccgtgcgtgctgtcccagactcctcttttaaaggaccttctgaaccgagtagaggacttccagcagcacagccaaaagctgttaagcgaggagactcctagcgccgcagaattacaagatctgctagatgtgagttttgagttcgatgtagagctgccacagctggctgagatgaggattcgcctggaacaggctaggtggctagaagaagtgcagcaagcctgcctggacccctcgagccttacactagacgacatgcggcgactcatcgacttgggagtagggctggcaccctactccgcggtggagaaggccatggcacgcctccaagaactgctcaccgtaagtgagcattgggatgacaaggctaaatcactcttgaaggcccgtccacgacattctctcaatagcctggccacagccgtcaaagagattgaagagatccccgcataccttcccaacggggctgccctcaaggattccgtgcagcgagccagagattggctccaggatgtggaagggctgcaggccggtggtagagtgcctgtgctggacacactaatagagttggtcactcgcggtcgctccattccagtgcatttgaacagccttcccaggctggagactcttgttgccgaggttcaagcctggaaagagtgtgccgtgaatacctttctgacagagaactccccttactccctcctggaagttctatgtcctcgatgcgacattgggctcctgggactgaaacgaaagcagagaaagctgaaagagcctcttcccaacggtaagaagaaatcaactaaattagaatccctgtcggatctcgaacgggctctcactgaatccaaagaaaccgccagtgccatggctacactgggagaggcgcgactgcgtgaaatggaagcactgcaatccctgcgcctggcaaatgagggaaaattgctgtcacctctgcaggatgtggacattaaaatctgcctttgtcaaaaggcacctgccgctcccatgattcaatgtgagctgtgtcgcgacgccttccacacttcgtgtgtggctgtcccgtccattagccaggggcttcgcatttggctgtgccctcattgtcggaggtccgagaaacctccactggagaagatcctccctctcctggcttccctgcagaggattcgtgtgaggctccccgaaggggacgcgctccgctacatgatcgagcgcaccgtgaattggcagcacagggctcagcagctcctgtcctccgggaacctcaagttcgtccaagacagagtcggctcaggactgctttactcacggtggcaggccagcgccggacaggtgtctgacacaaacaaggtcagccagccgccaggaaccactagtttcagtctacctgacgattgggataaccgcacgtcttatttacattcacccttttctacaggtaggtcatgtatacctttgcatggagtgtctcctgaagtcaacgaattactcatggaagctcagttgctgcaggtttccctgccagagatccaagaactgtaccagaccctgctggctaagcccagtccagcgcaacaaaccgatcggtcatcacctgtgcgccctagctccgagaagaacgattgctgcagggggaagcgcgacggaattaattctctggaacggaagctgaagaggcggctggagagggaagggctctccagtgaaagatgggagcgtgtgaagaagatgcggacaccgaaaaaaaagaagataaagctgagccaccccaaggacatgaataactttaagctggagcgtgagaggtcttatgaacttgtccgctcagccgagactcactccctgccttccgataccagttattccgaacaggaggacagtgaggatgaagacgcaatttgccctgcagtgtcctgcttgcagcctgagggcgacgaagtggattgggttcagtgcgatggttcgtgtaaccagtggtttcaccaggtgtgtgtcggagtttcaccagagatggctgaaaaagaggattacatctgcgtacgctgtactgtgaaagacgctcctagccggaaatag

SEQ ID NO: 229082 - DNA, 4161 bp, synthetic construct
  misc_feature 1..4161: note = Description of Artificial Sequence: Synthetic coding sequence
  source 1..4161: mol_type = other DNA
atgggcttcgctcccggaaaagccgtgggctcacatatacggggacactacgaacggattttgaatccttataatctgtttctgtcaggagactccctgagatgcctccaaaaacctaatctgacgactgatacgaaggacaaagagtacaaacctcacgacattccacagagacaatcagtgcagccatcagagacttgtcctccggctcggagagccaagaggatgagggccgaggccatgaatatcaaaatcgagccagaagaaaccaccgaggctagaactcacaacttgcggaggcggatgggctgccccaccccgaaatgcgaaaatgagaaggagatgaagtcaagcattaaacaggaacctattgaaagaaaggactacattgtggagaatgagaaagagaagcctaagagcagatctaagaaggccaccaatgccgtagatctctatgtgtgtctactgtgcggttctggtaatgacgaggaccgactcttgctgtgcgacggatgtgacgacagctatcacactttctgcctgattccccctcttcacgatgtacctaaaggcgactggcgctgtccaaagtgtctcgcccaggagtgttcaaaacctcaagaagcgtttgggtttgagcaagcagcgagggattatactctacgaaccttcggcgaaatggcggacgcatttaagtcagactacttcaatatgcctgtccacatggttccaactgagctagtggagaaggaattctggaggttagtctccaccatcgaggaagatgtgacggtggagtatggagcagatatagcttctaaggaattcggctccggatttccagtgcgcgacggaaaaatcaagctgtctccggaagaggaagaatacctcgattctggctggaatttaaataacatgcctgttatggaacaaagtgtcctagcacacattacggccgacatatgcggaatgaaactcccctggctgtacgttggcatgtgcttttccagtttttgttggcacatcgaggaccactggtcctattctatcaattatctgcattggggagaacctaaaacctggtatggcgtcccaggctacgcagcagaacagctcgaaaatgtgatgaaaaagcttgctccagagctttttgtttcgcaacctgatctgctccaccagctggttacaatcatgaatcccaacaccttgatgactcatgaggttcctgtgtatcggactaaccagtgtgcgggagagttcgtgatcacattcccacgagcctatcactcaggctttaatcagggattcaacttcgcggaggctgtgaacttttgtacagttgactggcttcccctaggtaggcagtgcgtggaacactatcgcctgctgcaccgatactgcgtgtttagccacgacgaaatgatctgcaaaatggcgtcaaaggccgacgtcttggacgtcgtggtggcatccaccgtgcaaaaagacatggccatcatgattgaggacgagaaggctctcagggagacagtacgcaagttgggagtaattgattcggaaaggatggattttgaactgctacccgacgacgaaaggcagtgcgttaagtgcaagaccacctgctttatgtccgccatatcctgttcatgtaagccgggactactcgtgtgtctgcaccacgtgaaagaattgtgttcctgccccccatacaagtacaagctgaggtacagatatactcttgacgatctgtatcccatgatgaacgcattgaaactgagagctgaatcctacaatgaatgggccctcaatgtaaatgaagcactggaggccaaaattaacaagaagaagagcttagtatcttttaaggccctgatcgaggaatcagagatgaaaaagttcccagacaacgatcttctgcgtcatcttagactggtaacccaggatgccgagaaatgtgccagcgttgcgcagcagttgctaaacggcaaacgccagacccgctatagatctggcggaggaaagtcacagaatcaactcactgtgaacgagttgaggcaatttgtaacacaactgtatgcactaccgtgcgtcctgtcccaaaccccactgctgaaagatctactcaatagggtcgaagattttcaacagcactctcagaaactgttgagcgaggagacaccatcagctgcagaattgcaggacttattggacgttagttttgaattcgacgttgagctccctcagttagccgaaatgcggatcagactcgagcaggccaggtggctggaggaggtgcagcaggcttgcctagatcctagcagtctgacattggatgacatgcgtcggctgatcgatttgggagtgggccttgctccctactcggctgtggaaaaggctatggctcggttacaagagctgctgaccgttagtgagcactgggatgacaaggccaaaagtctactgaaggctcgccctcgacactcgttgaacagccttgccaccgctgtcaaagagattgaggagatccctgcctatctgccaaacggagctgcccttaaagattcagttcagcgagcaagggattggcttcaggatgttgaggggttgcaggccggtgggagagtgcccgtcctggacacgctcatcgagcttgtgacaagggggaggagcatacccgttcacctgaacagtctgcctaggctagaaactctggtcgctgaagttcaggcttggaaggagtgcgccgtcaatacatttctaacagaaaattccccctacagtttactggaggttctttgtccgagatgtgacatcggactgttagggttaaagcggaaacaacgcaagctcaaggagccgttgccgaacggcaagaagaagtccactaaactagagtcactgagcgacctggaacgagcattgacagagtcaaaggagaccgcttctgcaatggctacattgggcgaggccagactccgggagatggaagccctgcagtccctccggctggccaatgagggtaaactgttaagtccactccaagacgtggacatcaaaatctgcctctgtcagaaggccccagctgcccctatgatacaatgcgagctgtgccgggacgcttttcacacctcctgcgtggctgtcccctcgatctcccaaggccttagaatttggctctgcccgcattgtcggcgaagtgaaaagcctcctctggagaagatcttacccctgctcgctagtctccagagaattagggtccggttgcctgagggtgacgcccttcgctatatgattgagcgcacagtgaattggcaacaccgagctcaacagctgctgtcaagtggcaatctgaagttcgtgcaagacagggtgggctccggtctcctctatagtcgatggcaggctagtgctggtcaggtctccgatactaacaaagtgagtcaacccccaggaacaacatcattttccctgccagacgactgggacaatcgaaccagctatctgcatagtccgttttctaccggcaggtcctgtatccctcttcacggggtatcaccagaggtgaacgagcttctcatggaggcacagctgctccaggtaagcttacccgaaatacaagaactgtatcagaccctcctagcaaaacccagccccgcacagcaaacagaccggagctcaccggttcggcctagctcagaaaagaacgactgttgtcggggaaagcgcgatggcatcaattccctggagcgcaagctcaagagaaggctggaaagggagggactgagcagcgagcgctgggaacgggtcaaaaagatgagaactcccaaaaagaagaaaataaaactgagccatcccaaggatatgaataactttaagttagaaagagagaggtcttacgagctggtaagaagcgccgagacgcacagcctgccaagcgataccagttatagcgaacaggaggatagtgaggatgaagatgccatctgccccgctgtttcctgccttcaaccagaaggagacgaagtcgactgggtccaatgtgacgggagctgcaaccagtggtttcaccaagtatgcgtgggagtctcccctgagatggcagaaaaggaggattatatctgcgttagatgcactgtgaaggacgctcctagtcgtaagtag

SEQ ID NO: 229083 - DNA, 933 bp, synthetic construct
  misc_feature 1..933: note = Description of Artificial Sequence: Synthetic coding sequence
  source 1..933: mol_type = other DNA
atgatatgcaagatggccagcaaggccgacgtgctggatgtggtggtggccagtacagtacaaaaggacatggctattatgatcgaagacgagaaggcactgcgcgagactgtgagaaagctgggcgtcattgactcggaacggatggacttcgagttattaccagatgatgagagacagtgtgtgaaatgcaaaaccacctgcttcatgtcagcgatctcctgctcctgcaagccagggcttctggtttgccttcatcacgtgaaggaactttgttcttgccccccatacaagtataaacttcggtatcggtatacattagacgacctctatcctatgatgaacgccctcaagcttcgagcagagtcatacaatgagtgggcacttaatgtgaacgaagcgttagaggctaagatcaataagaaaaaatccctcgtgtctttcaaggccctaattgaggaaagtgagatgaaaaaattccctgataacgatttgctgcgacaccttagattggttactcaggacgcagagaagtgcgcttctgtcgctcagcaactgctgaatgggaaacggcagacacggtaccgttccgggggaggtaagagccagaatcagctgaccgttaacgaactgcgacaatttgtgacacagctgtatgcccttccatgcgtgctgtcccagaccccgctgctgaaggacctgctgaaccgcgtagaagacttccagcagcacagtcaaaagctcctgagcgaggagacgccatccgctgccgagctgcaagacctgctggacgtgtccttcgagtttgacgtcgagcttccccagctggctgaaatgcggatccggctggaacaggcaaggtggctggaagaagtgcagcaggcttgtctggatccaagcagcctgacgctcgatgacatgagggtgagctag

SEQ ID NO: 229084 - DNA, 4674 bp, synthetic construct
  misc_feature 1..4674: note = Description of Artificial Sequence: Synthetic coding sequence
  source 1..4674: mol_type = other DNA
atggaaccagggagcgacgatttcctgcccccacccgaatgcccagtgttcgaaccaagttgggccgagtttcgagatcctctgggctatatagctaaaattaggcccatcgccgagaagtccggcatttgcaagatccgacccccagccgattggcaaccccctttcgccgtcgaagtggacaactttaggtttacacccagaatccagcgacttaacgaactggaggcacagactcgcgtgaagcttaactatctagaccagattgcgaagttctgggagatccagggcagcagcctaaagatacctaacgtggagaggcgcattctcgacctctactcactgtccaaaattgtggtcgaggaggggggatatgaggcaatatgcaaggatcggaggtgggcgagagtcgcccagcggctcaactatccgccagggaaaaatatcgggtcactcctgaggagtcactacgagcggatcgtttacccatatgaaatgtatcagtccggagccaacctggtccagtgtaacactcggccatttgacaacgaggagaaggataaagaatacaaaccccactcgattcctctgcgccaatcagtgcagccgagtaaattcaacagctatggcagacgggcaaagcggctccaaccagatccagagcccacggaagaagatatcgaaaaaaaccccgaactgaagaagctgcagatttacggggctggccctaaaatgatgggcctgggactgatggccaaagacaagactctcagaaaaaaagacaaggaaggccctgaatgcccccctacagtggttgtcaaagaagaactaggtggcgatgttaaggtggagagcacatcccccaaaaccttcctggaatccaaggaggaactcagtcacagccccgaaccatgcaccaagatgacgatgcgactcagacggaaccatagcaatgcacagtttatcgaatcctacgtgtgtcgtatgtgctcccggggtgacgaggatgacaagctactgctgtgcgacggatgtgacgacaactatcatatattttgcctgctaccccctttgccggagatcccgaagggtgtatggcgatgtcccaagtgcgtcatggctgagtgtaagcggcctccagaagccttcgggttcgagcaagcaacacgggagtatactctacaaagctttggggagatggctgactcattcaaagcagattacttcaacatgccggtgcacatggtgcccactgagctcgtggagaaggaattctggcgactggtgaactccattgaagaggatgtgaccgtggaatacggcgctgatatacattcaaaggaatttggaagcggcttcccagtttctgatagtaagaggcacctcacccctgaggaggaagagtacgcaaccagcggctggaatctgaatgttatgcctgttctagagcagtctgtgctctgccacataaatgcggacatctccggcatgaaggtgccttggctgtatgttgggatggtgttctccgctttttgttggcacatcgaggaccattggtcatactcaataaactacttgcactggggggaacccaaaacctggtatggcgtgcccagcctcgccgcagagcacctggaagaagttatgaagaagcttacgccagagctattcgactctcaacctgacttactgcatcagcttgtgaccctgatgaaccccaatactctgatgtcacatggtgtgcctgtggtgcggactaatcaatgtgccggagagttcgtcatcaccttccctcgggcttaccactctggcttcaaccagggctacaattttgctgaagctgtgaacttttgcaccgccgactggcttccggctggacggcaatgtatcgagcactataggcgactacggagatactgtgtattcagccacgaggaacttatctgcaaaatggctgcgtgtccagagaagttagatttaaatctggccgcagcagtgcacaaggaaatgttcataatggtacaggaagaacgcaggcttcgtaaagcactgctagagaagggaatcactgaggccgagcgcgaggcattcgagctgcttccagatgatgagagacagtgtattaaatgcaagaccacatgctttctgtctgctttagcctgttacgattgtcctgatgggttggtatgtctttcacatatcaacgacctctgcaaatgctcaagtagcagacagtaccttagatatagatacaccctagatgagctcccagccatgttacacaagttgaaagtccgcgctgagtccttcgatacttgggcaaacaaggtcagggtggccctcgaagtagaggatgggaggaagcgctcgcttgaggagctacgcgctctggaaagcgaagctcgggagcggaggttccccaacagcgagctgcttcaacaactgaagaactgccttagtgaagccgaggcctgtgtctcgcgtgccctgggcttggtcagcggccaggaggctggccctcacagggtagccggacttcagatgacacttaccgaacttagagcatttctggaccagatgaacaatctgccctgcgctatgcatcagatcggtgatgtcaaaggcgttttagaacaggtggaggcgtaccaggccgaagcacgggaggccctggcgtcactccctagtagtccgggtttacttcagagcttgctggagcgcggaagacagctcggagtggaggttcctgaggcccagcagttgcagcgacaggtcgagcaggctaggtggcttgatgaggttaagcggacactggctccctccgcgagacgcggtaccctggcagtaatgcggggattgctggttgcgggagcctccgtagccccttcacccgcagtggacaaggcccaggcagagctgcaggagctgctgacgatcgcggaaagatgggaggagaaggcccacctgtgtctcgaagcaaggcagaagcatccacctgccaccctcgaggcaatcattagagaggcagaaaatattcctgtacaccttccaaacatacaagctctgaaagaagcgctggctaaggccagagcatggatagcagacgtcgacgaaatccaaaatggagatcactatccatgcctggacgatctcgaaggattagtagcggtcggccgtgacctcccagtcgggttggaggagctgcgccaactggaactgcaggtgctgactgcacactcatggagagaaaaagcgtctaagacgttcctgaaaaaaaactcgtgttacacacttctggaggtcctgtgtccctgcgccgatgcaggtagcgactctactaagcggtctcgctggatggaaaaggagctgggactttacaagagcgacaccgagttgctgggcctttcggctcaggatctgagggaccccggttcggtaatcgtggccttcaaagaaggagaacagaaggaaaaggagggcatccttcaacttcggaggactaactcagccaaacccagccccctggccagcagttctacagcatcatcaacaacttccatctgcgtctgcggacaggtgcttgcgggtgcaggtgcactccagtgcgacctgtgccaggattggtttcacggccgttgtgtcagtgtgccaagacttctttcttcaccgaggcctaacccaacctccagcccactactcgcctggtgggagtgggatacgaaattcctctgtccactatgcatgcggtcaagaagaccccgacttgagactattctggctcttctggtggccctgcagagattgcccgtccggctacccgagggcgaggctctgcagtgcctgaccgaaagagcaatctcttggcagggaagggccagacaggccctggcatctgaggatgtgaccgccctgctgggcaggctggcggaactgagacaaaggctgcaggccgagccaagacctgaagagcctcccaattatcctgccgctcccgctagcgacccactcagagagggttcagggaaggatatgcctaaggtacagggactgttggagaatggagattccgtaacatctcccgagaaggtggcacctgaggagggtagcgacttagaactcctgagctcactattaccccagttgacgggccctgtcttggaactgcccgaagcgactagagcgccactggaggaacttatgatggaaggagacctactcgaggtcaccctggatgagaatcactccatctggcaactgttacaagccggacagcctcccgacctcgagaggatcaggacattgctcgagctggagaaagcagaaagacacggaagtcgcgcaaggggtagagccctggagagaagaaggcgcaggaaagtggaccggggtggcgaaggagacgaccccgctcgtgaagaactggaacccaagagagtgcggtcatcaggccctgaggcagaggaggtccaggaggaagaggaactggaggaggagactggcggtgaagggcctcctgcgccaatcccgaccaccggctccccgagtacccaagaaaatcaaaatgggttggagcccgcagaaggcacgactagcggcccttccgccccttttagtaccttaacccccaggttacacctcccctgtccacagcagcctccacagcaacaactttag

SEQ ID NO: 229085 - DNA, 4551 bp, synthetic construct
  misc_feature 1..4551: note = Description of Artificial Sequence: Synthetic coding sequence
  source 1..4551: mol_type = other DNA
atggaacccggaagtgatgactttctgcctcctcctgagtgcccggttttcgaaccctcttgggccgagtttcgagacccattgggttatatcgctaaaattcgccctattgctgaaaagtccggcatttgtaagattcgcccacctgccgactggcagcctccttttgcggttgaggtggacaactttaggtttacccctaggatccaaaggctgaacgagttggagatcgttgttgaggaggggggatacgaagctatctgcaaggaccggaggtgggccagagttgcacagagacttaattacccgcctggcaagaacatcggctctctgctcagatcccactacgaacgcattgtgtacccatacgagatgtatcagtccggggctaatttggtccaatgtaatacaaggcctttcgacaatgaggaaaaggataaggagtataaaccccactccataccactaaggcaatctgtgcagccttccaaattcaatagctatggccgaagagcgaaacgtttacagcctgatccagagccaactgaggaagacatcgaaaaaaaccccgagctgaagaaattgcaaatctatggagccggacccaagatgatggggctgggccttatggccaaagataaaaccctgcgcaaaaaggacaaagagggacccgagtgcccccctacagtggttgtgaaagaagagttggggggtgacgttaaggtcgagtctacctctcctaaaacttttttggaaagcaaggaggagctttctcactcgcctgagccatgcacgaagatgacaatgagattgcgccgaaatcatagcaacgcacagttcattgagtcatatgtttgcaggatgtgctccagaggagatgaggacgataaactgctgctgtgtgatggctgtgacgataactaccacatcttttgcttgttaccacctctgccggagatccccaagggggtgtggcggtgccctaagtgcgtcatggctgaatgcaagcgcccacctgaagccttcggcttcgaacaggccacccgcgagtacactttacagtccttcggggaaatggctgactcattcaaagctgactacttcaatatgcccgtgcacatggtgccaacagaactggtcgagaaagagttttggagattagtgaacagcatcgaggaggatgtgacagtggaatatggggctgatatccattccaaagaatttggaagtggattccccgtttccgacagtaagcggcatctaactccagaggaggaggaatatgccacaagtggttggaatctgaacgtcatgcctgtcttggaacagagtgttttgtgtcatattaatgctgatatcagcggaatgaaagtgccttggctgtacgttggcatggtgttttccgcattttgttggcatatcgaggatcactggtcatatagtataaactacctgcactggggagagcccaaaacttggtatggggtgccaagcttggctgccgagcatctggaggaggtgatgaaaaaactcaccccagagctcttcgattcccaacctgacttgcttcatcagttggtaaccctcatgaatccaaacaccctgatgtcccacggtgttcctgtagtgcgtaccaaccaatgtgcaggagagttcgttattactttccccagagcctatcattccggattcaaccagggctacaacttcgcagaagcagttaatttttgtactgccgactggctcccggcaggtcggcagtgcatcgagcactaccgtagattaagaagatactgcgtttttagccacgaggaactgatatgtaaaatggctgcctgccctgagaagctggatctgaaccttgctgccgcagtgcacaaagagatgttcataatggtacaagaggaacgcagactgagaaaagccctgcttgagaagggaattaccgaggcagagcgggaagctttcgagctgttaccagatgacgagcggcagtgtatcaagtgcaagaccacctgttttctctccgctcttgcgtgctatgactgccccgacggcttagtgtgcctctctcatattaatgatctgtgcaaatgtagcagctcccggcagtatcttaggtaccgttacacactcgacgagctgccagccatgctacacaagctcaaagtccgcgctgaatcctttgatacctgggccaataaagtccgcgtggcgctggaagtggaggatggacggaagcggagcctcgaggagctccgcgctttggaatcagaagccagagagagacgcttcccgaatagcgagctgctgcaacagctaaaaaactgtttgagcgaggctgaagcgtgtgtttctcgggctcttggcctggtgtccggtcaggaagctggcccacacagagtggccggactccaaatgacactgactgagctaagggccttccttgatcaaatgaacaatctgccttgtgcaatgcatcagataggagatgttaaaggggttttggaacaggtcgaagcctaccaggccgaagccagagaagcactcgcgtctctgccaagtagtcccggtctcctgcagagcctcctcgagagagggcgacagctgggagtggaggtgccagaggctcagcagttacagagacaggtggagcaggctcggtggcttgacgaggtgaaaagaaccctcgcaccgtctgcaaggagggggacactggctgttatgcggggtctgctcgtggcaggggcttccgtggctccatctcctgccgttgataaggcccaggccgagctgcaagaactgctcacaattgcggagcgctgggaggagaaagctcatttgtgcctagaagccagacagaagcacccccctgcaaccttggaggcaatcatccgggaagccgaaaacataccggtacatctccccaacattcaggccttgaaagaagcattggctaaagctagggcttggattgccgatgtcgacgagatccagaacggtgatcattacccttgtttggacgacctggagggactggtggccgtcgggcgtgacctgcctgtggggctggaagaactgcggcagctggagctgcaggtgctcaccgctcactcgtggcgtgagaaggcctccaagacctttctgaagaaaaactcctgttacactctcctggaggtgctgtgtccttgcgcagatgccggaagcgattcaactaagaggtccaggtggatggagaaagagcttggcctgtacaagtccgacaccgagctacttggtctgtccgcccaggatcttagagatcccggttcagtgattgtcgcctttaaggagggcgagcagaaagagaaggaggggatcctgcagctgcggaggaccaacagtgcaaagccctctcctctggcttccagttcaactgctagtagcacgacgtctatctgtgtgtgtggtcaggtcctcgctggggctggggctctgcagtgtgacctgtgccaagactggttccacggaagatgtgtgtccgtcccccgattgctgagttctcctcgtcctaatcctaccagtagccccctcctcgcctggtgggagtgggacaccaaattcttgtgtccactctgcatgcgatcacgaaggccaagacttgaaacgattctggcgctcctggtggccttgcagagactccctgtccgactgcccgagggagaagcactacagtgtctgactgagcgagcaattagctggcaagggcgagctagacaggcccttgcttccgaggatgttactgccttactggggcgactcgcggagctcaggcagagattgcaagccgagccgcgtcccgaggaaccccctaattatcctgcagcccctgcctcagacccactgcgcgagggcagtggtaaggacatgccgaaggtacagggtctcctggagaatggggactcggtaacatccccggaaaaggtggcacctgaggaagggagcgacctggaattgttatctagcctgctgccgcaactaaccggtccagtcttagagctccctgaggcaacaagggctccccttgaagaattgatgatggaaggggacctgcttgaggtgaccctggatgaaaatcactccatctggcagttacttcaggccggacagccaccagatttggagagaattcggaccttgctggagctggagaaagcagagagacatggttctagggccagaggacgcgcactcgagcgacgccgtaggaggaaagtcgaccgtggaggtgaaggagacgatcccgctagagaggaattagaacctaaacgtgtgcggtcgtcagggcctgaggcagaagaagtgcaggaggaagaagaacttgaagaggaaactggcggtgagggaccccctgcccctatcccaaccacaggatctccctccacacaagaaaaccagaacggtcttgagcctgcagagggcacaaccagcggcccatccgccccattctcaactcttaccccccgactccaccttccctgtccgcaacaaccacctcaacagcagctatag

SEQ ID NO: 229086 - DNA, 4683 bp, synthetic construct
  misc_feature 1..4683: note = Description of Artificial Sequence: Synthetic coding sequence
  source 1..4683: mol_type = other DNA
atggagcccggttccgacgattttctgcctcccccagaatgccccgttttcgaaccctcatgggccgagtttcgagatccgctgggctacatcgcaaagattaggccaatcgctgagaagtctgggatctgtaaaattcgccctcccgcagactggcagcctcccttcgctgtagaggtggacaatttcagattcacaccacgcatccagcgtttgaacgaattggaagcacagacccgtgtgaagctcaactatcttgatcagattgccaagttttgggagatacagggctcaagcctgaagatcccgaatgtagagcggaggatattagacttgtacagtctgagtaaaattgtggtcgaggaaggtggatatgaagccatatgcaaagatcgcaggtgggcgcgtgtggcccaacggctcaattacccccctggcaagaacatcgggtctctactacggagccattacgagaggatcgtttacccctacgagatgtatcagagtggcgctaatctggtgcagtgcaatacaaggccgtttgataatgaggagaaagataaagaatataaaccccactctattccattgaggcagagcgtacagccttccaaattcaactcatacggccgaagggcgaaacggctgcagcccgacccagagcctaccgaggaagacatcgagaagaacccggagcttaaaaagctgcagatttacggtgccggtcccaaaatgatgggtctcggcctcatggcaaaggataaaaccctaagaaagaaggacaaagagggacctgaatgcccgcctaccgtagtggttaaggaagaactgggaggtgatgtaaaagtggaaagcacctcccctaagacattcctggagagcaaagaggaactgtcgcactctccagagccctgcaccaagatgaccatgcggttgaggagaaatcactcaaacgcacagttcatcgagagttacgtgtgccgaatgtgcagtcggggagatgaagatgacaaactgttgttgtgcgatggctgcgatgataattatcatatcttctgccttttgccccctctacccgaaatccctaaaggggtgtggagatgtccgaaatgtgtgatggcagagtgcaagcggcctcctgaggccttcgggttcgagcaggctacccgagaatatacactccagtccttcggcgagatggccgactcctttaaagcagactacttcaatatgcccgtgcacatggtccctactgagctagtagaaaaggaattttggcgtctagttaattccatagaggaagatgtcactgtcgagtatggggcagatatacattccaaggagtttgggagcggttttcctgtctctgactcaaaacgccatttgactcccgaggaggaggagtatgcaaccagcgggtggaatctaaacgtgatgcctgttttagagcagtccgttctatgccatattaacgccgacatttctggcatgaaagtaccctggctgtacgtaggcatggttttttccgccttctgctggcacatcgaagaccattggtcttacagtataaattacctgcactggggtgagcccaagacctggtatggcgttccttctctggcagcggagcacctggaggaagtgatgaagaaactgacgccagagcttttcgatagtcagccagacctgctgcaccagctggtaacactcatgaatcccaacacacttatgagtcacggagtgcccgtcgtacggactaaccaatgtgcgggtgaattcgtgattacatttcctcgcgcatatcacagtggtttcaatcaggggtataattttgcagaagcagtgaatttctgtactgcagactggctgccagcaggacgacaatgcatcgagcattacagacgcttgaggaggtactgtgtgtttagtcacgaagaacttatttgtaagatggccgcttgtccggaaaagctggatctgaatctcgccgcagccgtgcacaaagagatgttcatcatggtacaagaggagcgtaggctgagaaaagcccttcttgagaaaggcatcaccgaagccgagcgggaggcctttgagctcctccccgatgatgagaggcagtgcattaagtgcaagacaacttgcttcctcagcgccttggcctgctacgattgccctgacggcttggtttgcttatcccacatcaatgacttatgcaaatgctctagcagcaggcagtacctcaggtaccgttatacactggatgagctacccgctatgcttcataagctgaaagttagggccgagtcattcgacacctgggcgaataaggtgcgcgtggctctggaagttgaagatggcagaaagcggtctctggaggagctgcgcgctttagaatcagaagcaagagagaggagattcccaaactccgagctcctacaacagctcaaaaattgcctcagcgaagcggaggcctgtgtgtcacgggcactgggattggtctcagggcaggaggcaggaccgcaccgtgtggcgggactgcagatgactctgacggaattaagggcctttctagatcaaatgaacaatttgccttgcgccatgcaccaaattggtgacgtgaagggggtgctggagcaggtggaagcctaccaggcagaggctcgagaagccctggcttccctgccgtcgtccccaggattgctccagtccttgctggaacgcggacgccagcttggggtggaagtgccagaggcacagcagctgcagcgccaggttgagcaggcaaggtggctggatgaagtgaagcggacactcgccccaagcgcaaggcggggaaccctcgccgtgatgagagggctactcgtggctggtgccagcgtcgctccatctcccgcagtggataaggctcaagcggaattacaggaactgctcacaattgccgagcgctgggaagaaaaagctcatctttgtctagaggcacgccagaagcacccccctgccacgctcgaggccatcatccgagaggcagagaacatccccgtccacctcccaaatatacaggcgctaaaggaagcactggctaaagcaagagcctggatcgcagacgttgacgaaatacagaatggcgatcactatccctgcctcgacgatttagagggactagttgcagtcggcagagacctccctgttggtctcgaggagctacgccagctcgagcttcaagttctaacagctcactcttggagagaaaaagcttctaagaccttcctaaagaaaaattcatgttacaccttactcgaggtgctctgtccttgtgcggacgcgggatcggactccacaaaacggtctcggtggatggaaaaagagctcggtctgtataaatctgacacagaactgctaggcctgtcggcacaggatctccgcgaccccggttccgtgattgtggcattcaaagagggcgaacagaaagagaaggaggggatattgcagctgcgcaggacaaattcagcaaaaccgtcgccactggcctcatcctctactgcctcatctaccacttcaatttgtgtttgtggacaggttttggccggtgccggtgcactgcagtgcgacctctgccaggactggtttcatggtcgctgtgtgtcggttcctagactgctctcttctcctagaccaaatcctacatctagtcccctgcttgcctggtgggagtgggacaccaagtttctgtgccctctgtgtatgagatcacggaggccccgactcgaaacaattttggctctgctggtcgccctgcagcgtcttcctgtgcggctcccggaaggagaagctctgcagtgtctgaccgagagagccatttcatggcagggacgcgctcggcaggcccttgcgagcgaggacgtcacagccctcctgggcaggctcgccgaactacgccaacggttacaggctgagcccaggcctgaagagcctcctaattatcctgctgcacctgcatcagatcccctccgggagggtagcggcaaggacatgcccaaggttcagggtttgttagagaacggggactctgtgacatccccggaaaaagtggcacctgaggagggctctggcaagagggatctcgaactgctgtcttcgctcctaccacagctaacgggaccggttctcgaacttccagaggccaccagagctcccctggaagaacttatgatggaaggcgaccttctggaagttacattagatgaaaatcacagcatatggcagctactgcaagccggtcagcctccagatctggaaaggattcgcactctcctggagttagaaaaagctgaacggcacggcagcagggctcgaggcagagctcttgagcggcgaagacgcagaaaggtggaccggggaggcgagggagacgatccagctcgtgaggagctcgagcctaaacgcgtgagaagctccggacctgaggcagaagaagtgcaggaagaggaggaactggaagaggagacaggcggtgaaggaccgcctgcacctattcctacgacaggaagcccctctacccaggagaatcagaatggactggaaccagccgagggaactacgagtggcccttccgcgcctttctctacactcactccgcgtcttcacttgccttgtcctcagcagccgccacagcaacagttatag

SEQ ID NO: 229087 - DNA, 4680 bp, synthetic construct
  misc_feature 1..4680: note = Description of Artificial Sequence: Synthetic coding sequence
  source 1..4680: mol_type = other DNA
atggaacccggatcagatgacttcctcccccctcccgaatgtcctgtgtttgaaccttcctgggccgaatttcgtgaccctttagggtatattgcaaagataagacctattgccgaaaaatccggaatttgcaagattaggcctccagctgactggcagccccctttcgcggttgaagtagataatttccgattcaccccacgcatccagaggctcaacgagctcgaggcacagaccagagtgaagctcaattatctcgatcagattgccaagttctgggagatccagggctcctctcttaaaatacctaacgtagaacggaggatccttgacctctattctctgagtaagatcgtggtggaagagggcggttatgaggctatatgtaaagacaggagatgggccagggtggcacagaggctgaactacccaccaggcaaaaatattggcagcctgctgagaagccactacgaaagaatcgtgtacccatatgagatgtatcaatctggagctaacctcgtgtgtaatacacgaccctttgacaacgaggagaaggacaaggaatacaagccccattctatcccactccgccagagcgttcagccatcgaagttcaacagttatggcagaagagccaagagacttcagcccgatcccgagcctacagaagaggacatcgagaagaatcctgaactgaaaaaacttcagatttacggtgccggaccgaaaatgatgggactcgggttgatggccaaagataaaactctgcggaaaaaagataaagaaggtcctgaatgccctcctaccgtggtggtgaaggaggagcttggtggagatgtaaaggtcgagagtaccagcccaaaaacctttctcgaaagcaaggaggagctctctcactctccagagccatgcaccaaaatgaccatgagacttcgaagaaatcactcaaacgcccagttcattgagtcttacgtttgtcggatgtgcagccgtggagatgaggacgacaaactgctgctttgcgacggctgtgacgacaactaccacattttctgtctgctgccacccctcccagagattccaaagggcgtgtggcgctgtccgaagtgcgttatggccgaatgcaaaagaccacccgaggcatttggtttcgagcaagctaccagagaatacactctccagagcttcggtgaaatggcagactccttcaaggccgattattttaatatgcctgtccatatggtgccaactgagttggtggagaaagaattctggcgtctggtcaactccatagaggaggatgtcacagtggaatacggagccgacatccactctaaagaattcgggtcgggctttcccgtctccgatagtaagagacatctgacgcctgaggaagaagagtacgccacatcaggttggaacttaaatgtcatgccagtgctcgagcaatccgtcctgtgtcacatcaatgctgatatctcgggcatgaaggtaccctggttgtatgtgggcatggtcttctctgctttctgttggcatatcgaggaccattggtcatatagtatcaactatttacattggggagaaccaaagacatggtacggcgtaccctcactggctgcagaacatctggaagaggttatgaaaaagctgaccccagagctgtttgatagccaaccggatctgctgcatcagcttgttactctgatgaatcccaatacacttatgtcacatggagtgcctgttgtgaggacgaatcagtgtgctggagaattcgtcattacctttcccagagcctaccattccgggtttaatcagggctacaattttgcggaagccgtgaatttttgtaccgcggattggctgcccgctggcaggcaatgcattgaacactatcgaagacttaggcgatactgtgtgttctcccacgaagagcttatttgcaaaatggcagcttgccctgaaaagttggacctgaatctggccgctgccgtccataaagagatgttcatcatggtgcaagaagagcgcagattgagaaaggccttacttgaaaaggggataaccgaagccgaaagagaagccttcgaactgctgccagatgatgaaaggcaatgcatcaaatgcaaaactacctgcttcctgagtgcactggcatgctacgattgcccagacgggctggtatgtctatctcatattaacgacctgtgtaagtgcagctcttcccgccagtaccttcgttatcgttataccctagacgaactaccagccatgttgcacaagctgaaggttcgcgctgagagtttcgatacctgggctaacaaagtccgcgtggctctcgaagtggaggacggacggaagaggtcactggaagaacttcgcgcactggagagtgaggcaagagaaaggagattcccaaacagcgaactgctgcaacagctcaagaattgtctctcggaggcagaagcatgtgtgtcacgggcactaggtttagtgagcggccaagaagccggtccacaccgagttgctgggttacagatgaccctgactgagttacgggcttttctggatcagatgaacaacttaccgtgcgccatgcatcagatcggagatgttaagggtgtcttagaacaggtggaggcataccaggccgaagccagggaagcactggcaagcttaccctcctctccgggattgctgcagagcctgctggaaaggggtaggcaactgggtgtcgaggtgcccgaggcacaacagcttcaacgccaggtggagcaggcaaggtggctggacgaggtgaaaaggacacttgcaccctccgccagacgcggaactctggccgttatgagaggtctgctcgtcgccggtgcgtcagtggctccttcaccagccgtggataaagcccaggcagagttgcaggagctcctaacaatagccgagcggtgggaagaaaaagcccatctgtgtctcgaggcacgccaaaagcacccaccagccacgttggaggctatcattcgggaggctgagaatatccctgtccatctgcctaatattcaggccctcaaagaagcgttagccaaggcacgtgcatggattgctgacgtcgatgagatccagaacggggaccactacccatgtcttgacgatttagaaggactggtcgcagtcggccgtgacttgcctgtcggcttggaagaattgagacagttggaactgcaggttctcactgctcactcttggagggagaaagcttctaaaaccttcctcaaaaagaatagctgttacacattactggaggtcctatgtccttgtgcagacgctgggtctgactccacaaaacgcagcaggtggatggaaaaggaattgggactgtacaaatcagacaccgaactgctgggcctgtctgcccaggacctccgggatccgggaagtgtgatcgtagcatttaaagaaggggaacagaaggaaaaggagggtatcctgcagctacgtaggactaacagcgctaagccttcccccctggcatcatcctcgaccgcgagcagcactacttccatttgcgtgtgtggccaagttctggcgggagcgggtgcccttcagtgtgacctttgtcaggactggtttcacgggagatgtgtgtcagttcctagactgttatcttcccccaggcccaacccaacaagctcgcctctgctagcctggtgggaatgggacactaagttcttgtgcccgctgtgcatgagatcaagacggccaagactggagactatcctcgccctgttagtcgccttgcagagattgccggtgaggctgcccgagggcgaggcacttcagtgtctgacggagagagccatttcttggcaaggcagagccaggcaagcccttgcaagtgaagacgtcacagcactgttaggccgtctagcggaactcagacagcgcttgcaagccgagcccagacccgaggaaccacccaactaccctgcagcccctgcgtctgaccccctacgggaaggctctgggaaggacatgccgaaggttcagggcctgttagagaatggagactctgttaccagccctgaaaaagtggctcccgaagagggaagcgggaagcgcgacttggaactgttgagtagccttctgcctcagcttacaggacctgtgttagaactgccggaggcgaccagagcccctctggaagagctaatgatggagggggacctgctggaggtcacccttgatgaaaaccattccatctggcagctgttgcaggctggacagccaccagatctggagagaatacgcacgctgctggagctggaaaaggcggaacgacatggatcgcgagctaggggcagagctctggagaggaggcgcaggagaaaggtcgatagggggggtgagggtgatgatcccgcacgagaagagctggagcctaagcgtgtcaggagcagtggcccagaggcggaggaggtccaggaagaagaagaactggaggaggaaacaggtggcgaaggccctcctgcgccaattccaaccacaggctctccttcaacccaggaaaatcagaacggcttggaacctgcagaaggcaccaccagcggtccaagtgcaccgtttagcacccttaccccccgattgcatctcccttgtccacagcagcctccccagcagcaactatag

SEQ ID NO: 229088 - DNA, 4140 bp, synthetic construct
  misc_feature 1..4140: note = Description of Artificial Sequence: Synthetic coding sequence
  source 1..4140: mol_type = other DNA
atggagccgggttctgacgactttttgcccccacccgaatgtcccgtattcgagccctcctgggctgaatttagagatcccctggggtacatagccaaaatccgccctattgctgaaaagtcggggatttgtaagatccgaccacctgctatagtagtggaggagggtggctatgaggccatctgcaaggataggcggtgggccagggttgcacagcgactgaattatccgccaggaaagaatattggcagtttactcagaagccactatgagagaattgtgtacccttacgagatgtaccagagtggtgcaaacctcgtgcagtgtaatactaggccattcgacaatgaggagaaagataaggagtataaaccgcattccatccccctgaggcagagcgtacagcccagcaaatttaattcttatggcaggcgagcgaaacgcctgcagcccgaccccgagcctacggaggaagatatcgaaaagaaccccgaactgaagaaattgcagatctacggtgccggtccgaagatgatgggcctgggacttatggccaaggataaaaccctaagaaaaaaggataaagagggtcccgagtgtccacccacagtggtggttaaggaggaactaggcggagatgtgaaggtggaatcaaccagccccaagaccttcttggagtccaaagaagaactgtcccacagcccagagccatgcacaaagatgactatgagattaaggaggaaccacagcaacgcgcagtttatcgagagttacgtctgccgaatgtgtagcagaggcgacgaagacgataaactgctgctgtgtgacggctgtgacgacaactatcatatcttctgtctcctgccacccttgcctgaaatccctaaaggcgtttggagatgcccaaagtgcgttatggcagaatgcaaacgcccacctgaggccttcggatttgagcaagccacacgcgaatacactctgcaatcctttggggaaatggctgacagtttcaaagccgactatttcaacatgcctgtgcatatggtgcctacagaactcgttgaaaaggaattctggcgcctcgtcaactccatcgaagaagatgtgaccgtcgagtatggtgctgatatccatagcaaggagtttggctccggcttccccgtgtctgattccaagagacacctcactcctgaggaagaggaatacgccacaagcggttggaaccttaatgtgatgcctgtgctggaacagtcagttctttgtcacattaacgccgacataagtgggatgaaggtgccttggttgtacgtggggatggtattttcagccttctgctggcacattgaagatcactggagctattccatcaactacctgcattggggcgaacccaagacttggtacggggttccatcgttagctgcagagcatctcgaggaagttatgaagaaactaactccggaactttttgacagtcagccggacctgctgcaccagctagtcacattaatgaaccccaatacccttatgtcccatggcgtgccggtggttcggactaatcagtgtgccggagagttcgtgatcacattcccacgggcttatcactcaggtttcaaccagggctataatttcgcggaagccgtgaatttttgcactgctgattggctgcccgcagggcgacaatgtatcgaacactaccgcaggttaagacgttactgcgttttctctcacgaagaattgatttgcaagatggctgcctgtcccgaaaagctcgacctgaacctagctgccgcagtacacaaagaaatgtttatcatggtccaggaagagagacgcctgcggaaagccctgctcgaaaagggtattactgaggcggagagagaggccttcgagcttctgcctgatgacgagcggcagtgtattaaatgcaagaccacatgtttcctatccgctttggcctgttacgattgtcctgacgggctcgtgtgtttatcacacataaacgacctgtgtaagtgttctagttcacggcagtacctgcgctatcggtacacgctggatgagctccccgctatgctacataagctcaaagtgcgcgctgaatccttcgacacctgggcaaataaagtaagagttgcactcgaagtagaagacgggaggaagcggtccttggaggagctccgcgcactagaatctgaggctcgcgagcgcagattccctaattcggaactgctccagcaactaaaaaattgcctgtctgaagccgaagcctgtgttagtcgggcactcggcctcgtttcaggccaagaagcgggaccccacagggtggctgggttacagatgaccttgactgaactgagagctttcctggatcagatgaataatttaccttgcgcaatgcatcagatcggcgacgtgaagggagttttggaacaggtggaggcttatcaagctgaggctcgggaggccctggcaagccttccttccagcccgggtctgttgcagtccctgctggaacgcggtaggcagctgggggtggaagtgcccgaagctcagcagctgcagagacaggtcgagcaggccagatggttggacgaggtaaaacgaacgttggccccaagtgccaggcgcggaaccctcgccgtcatgagaggtctgcttgtcgccggagccagcgtcgctccttctcccgctgtggacaaagcacaggccgagttgcaggagcttctgaccatagcagaacgctgggaggagaaagcacatttgtgtctggaagcaagacagaagcacccacctgcgacgctggaggcaattattcgggaggctgaaaacatccctgtgcatctgcccaacatccaggccctgaaagaagcactagctaaggctcgggcttggatcgccgacgttgacgaaattcagaacggcgatcactacccatgtcttgacgatttagaagggctggtggcagtcggtcgcgatcttcccgtgggtcttgaagagctcagacagttagagctccaggtgctgaccgcgcacagttggcgagaaaaagcctccaaaaccttcctgaagaaaaattcttgctatacattattggaggtcctgtgtccatgcgcggacgctggctcggactcaaccaagagatctcgatggatggagaaggaactcggcctttataagtccgataccgaactgctggggttgagcgctcaggacctacgcgatcctgggtcagtaattgtggcattcaaagaaggtgagcagaaagaaaaggagggaatactacaattacgcaggacaaacagtgccaagcccagtcctctggcctcctcctctactgcgtcctctacgacctccatttgtgtgtgtgggcaggtgttagcgggtgccggtgctctgcagtgcgatctgtgtcaggactggtttcacggcagatgtgtgagtgtgccgaggctattatcatccccccgacccaaccctacaagctcaccacttctggcctggtgggaatgggacacgaaattcctgtgccctctttgtatgcgatccaggcgccctagactggaaacaatactggccctactggtggcccttcagagacttcccgtgcgactgcccgaaggggaggcgctccagtgcctcactgagagggctattagctggcaggggcgagcccgacaggcactggcttcagaggacgtaacggctcttctaggaaggctggcagagctccgtcagagactgcaggccgaacctcgcccagaggagccgccaaattaccccgctgctcccgctagcgaccccctccgtgaagggagcggcaaagatatgcccaaggtccaaggccttttggagaacggagattccgtgacatcaccagagaaggtggcgcctgaggaaggttccgatctagagctactgtcctcactcctcccgcagctgaccgggccagtgctggagcttccggaagctacgcgcgcacctctcgaagagttgatgatggagggcgatttgctggaagtgaccctggatgaaaaccactctattccagaatcccttgatttctgcatcttgaccccaagatactgcagtgacctctccagctggggaccagcacccggagtatttcctccctggtag

SEQ ID NO: 229089 - DNA, 4620 bp, synthetic construct
  misc_feature 1..4620: note = Description of Artificial Sequence: Synthetic coding sequence
  source 1..4620: mol_type = other DNA
atggaacccggatgcgatgagtttctaccaccccctgagtgcccggtgttcgaaccttcttgggccgaatttcaagatccactcggctacatcgcaaagatcagacctattgctgagaaatcgggaatatgtaaaatcaggcccccagcagattggcaacctcccttcgccgttgaagttgataacttccgttttacccctagggtgcagcggctcaacgaactggaggcccagacccgcgtgaagctcaattacctcgaccagatcgccaagttttgggaaatccagggaagctccctaaaaatccccaatgtagagcgcaagattctggatttgtactctttgtccaagatagtcatagaagaaggtggctatgaggccatttgcaaagaccggcgatgggctcgggtggcccagcggttgcactatccacctggcaaaaatatcggatccctgcttcgctctcactacgagagaataatctacccttacgagatgttccagagcggagctaaccatgtgcaatgcaacacacatccttttgacaacgaagttaaagataaggagtataagccacactctattcctctgcgacagtctgttcaacctagcaagttctccagttattctaggcgagccaaaagactccaaccggaccccgaaccgaccgaggaggacattgaaaagcatcctgaactaaagaagcttcagatttacgggcctgggcctaaaatgatgggcctgggtctcatggctaaggataaggacaagaccgtgcacaagaaggtgacctgccctcctacagtgacagttaaggatgagcaatcaggcggagggaatgtgtcaagcaccctgctgaagcagcacctctctctggagccctgtactaagaccactatgcagctgagaaagaaccatagcagcgcgcaattcatagactcctacatctgccaggtgtgctcccgtggcgacgaagatgacaagcttttattttgcgatggatgcgacgataattaccacattttttgcctcctccctccattacccgaaatcccaagaggaatctggcgctgtcccaagtgcattctggccgagtgcaaacaacctcctgaggccttcggcttcgaacaagccacacaagaatatagcttgcagtcctttggtgaaatggccgactccttcaagagtgactacttcaatatgcctgtgcacatggtcccaacagaactggtggagaaggagttctggcgccttgtgtcttccatagaagaggacgtgactgtcgagtacggggctgacatacactcaaaagagttcgggtcagggtttcctgtgagtaattcaaagcaaaacctgtcccctgaagagaaggaatatgccacgtctgggtggaacctgaacgtcatgcccgtcttagaccagagtgtattgtgtcatataaacgctgatatctctgggatgaaagtgccatggctttacgtgggtatggtcttcagcgctttctgctggcacattgaggaccattggagctactccattaattaccttcactggggagaaccgaagacttggtatggtgtccctagcctggccgcagagcatctcgaggaagtgatgaagatgcttacaccggagctgttcgactcccagcctgatctgctgcaccagttagtgacactgatgaacccaaacacactcatgagccacggggtgcctgtggtcagaacaaaccagtgtgcaggcgagtttgtaattaccttccccagagcctatcatagcggctttaaccagggatacaacttcgcggaagcggtgaatttctgcactgcagattggcttcccgctggacgtcagtgcattgaacactatcgacggcttcggagatactgtgttttcagtcacgaggaactgatctgcaagatggctgcatttccagaaaccctggacctgaatctcgcagtggccgtccacaaggaaatgttcattatggttcaggaggaacgtaggctgcgaaaagccctccttgagaaaggtgtgactgaagctgaaagagaggcctttgaattgctgccagatgacgaacgccagtgcatcaaatgcaaaaccacatgcttcctgtcggcattagcctgttacgattgtccagatggactcgtttgcttgagccatataaatgacttatgtaagtgcagcagctcacggcagtacctgagataccggtataccctcgacgaactgcccacgatgctgcacaagctaaaaatccgcgcagaatctttcgatacatgggcaaataaagttcgagtggctctggaagttgaggacgggagaaaacgctccttcgaagaattgagagccctggagtctgaagccagggagaggagattcccgaacagcgagctcttgcagagactcaagaactgtttgtcggaagttgaggcatgtatcgctcaagttcttggactggttagcgggcaggttgcaaggatggatacacctcagctgactctcactgagctgagagtcctcttagaacagatgggttccctgccctgtgccatgcatcagattggggatgtgaaggacgtgctcgagcaggtcgaggcttatcaggcagaggcacgtgaggcgctagccaccctgccgtcttcccctggactgctcagatctctgcttgagagaggacagcagttaggcgtggaggtgcctgaagcccatcagctgcaacagcaagtggaacaggcccaatggctggatgaggttaagcaagccttggctcctagcgctcaccgaggcagcttagtgataatgcaggggctccttgtgatgggggctaagatcgccagctctccttctgtggacaaagcacgggcagagcttcaagaactattgaccatcgccgagagatgggaggagaaagcacacttctgcctggaggccagacaaaagcatccacccgctacactggaagctattatccgcgagaccgaaaacattcccgtgcatctgcctaatatacaggctctaaaagaggccctgacgaaagcacaggcatggatcgctgatgttgatgagatacagaatggcgaccattatccgtgcttagacgatttagaagggttggtggctgtgggcagggacttgcctgtggggctggaagagcttcggcaacttgagctgcaagtgctgacagcacactcttggcgagaaaaagcttcaaagactttccttaagaagaacagttgctacactctgctcgaggtgctctgcccttgcgctgatgctgggtcggattccactaagcggtctaggtggatggagaaggctctgggcctctatcaatgtgataccgagttgctcggcctgtccgcacaggatttacgggatccaggctccgtgatcgtggccttcaaggagggtgagcagaaagagaaggagggaatcctccaactccgtaggactaattcggccaagccctcacccctggcaccctcgctcatggcatcctcgccaacgtcaatttgcgtctgtgggcaggtccctgccggagtcggtgtgttacagtgtgacttgtgtcaggactggttccatggccagtgcgtcagtgttccgcatctcctgactagccctaaaccatcccttacttccagtcctcttctagcctggtgggagtgggataccaaattcctgtgccccctgtgcatgcgctcccgtagaccccgtcttgaaacgatcttagccctgctggtggcactccaacgcctgccggttcgcctacccgagggagaggccctacaatgtttgacagagagggctatcggatggcaggatagagccagaaaagccctagcttcagaggatgtaacagcgctgttgcgacaattggccgagcttcgtcagcagcttcaagccaagcccagacctgaggaagcctctgtatataccagtgctacagcttgtgatcccatacgggagggcagcgggaacaatatatctaaggtgcagggactgctggagaatggtgatagtgtcacctctcccgaaaatatggctccagggaaggggagtgacttggagctcctatcttccctcctgccccagttgactggccctgtgctggagttacctgaggcaataagggctccactggaagagcttatgatggaaggggatctcttggaggtgacgctggacgagaaccactcgatctggcaacttctacaggccggtcaacccccagatttagaccggatccggacactgctggagctggagaaattcgagcaccaaggctcaaggacacggtccagagccctggaacgcaggagacgaagacagaaagttgaccaggggcgaaacgttgaaaacctcgtccagcaagagctgcagagcaagcgggcacgcagttcaggaataatgtcacaggtgggaagagaggaagagcactatcaggaaaaagccgatagggagaatatgttcctgaccccctccacagaccatagccccttcctcaaaggaaatcagaattcattgcagcataaggattcgggctcttctgcggcttgtccgtctttgatgccactgctccagctcagctactcggatgagcagcagctgtag

SEQ ID NO: 229090 - DNA, 4449 bp, synthetic construct
  misc_feature 1..4449: note = Description of Artificial Sequence: Synthetic coding sequence
  source 1..4449: mol_type = other DNA
atggagccagggtgtgatgagttcctaccaccacccgagtgcccagtctttgagccatcctgggcagaattccaagatccactgggctatatagctaagatacggcctatcgctgaaaaaagtgggatttgcaagattcgacctcccgctgactggcagccgccattcgccgtagaagtcgataactttagatttactccccgagttcagcgattaaatgaactggaggcccagacccgcgtgaagctgaactatctcgaccagattgctaagttctgggagattcagggttcctccctcaagatccccaatgttgagagaaaaattcttgatctgtactctttatcaaaacagtgcaatacccacccctttgacaatgaggtaaaggataaggagtacaagccccatagtatccctctccggcaatctgtgcaacctagtaagttttccagctactccagaagagctaaacgtctccagcctgatcctgaacctactgaggaagatatcgagaagcatccagagctgaagaaactacagatttatggtcccggacccaagatgatggggttaggcctgatggcaaaagacaaagataagactgtgcacaagaaagtgacctgcccacccaccgtgaccgttaaggatgagcagtccggaggcggtaacgtctcatccactctcctgaagcagcacctgtcactggaaccatgtacgaagactaccatgcaactccgaaagaaccactcttctgcccaattcatcgatagctacatttgtcaggtttgctcacgcggtgatgaagatgacaagttgctgttttgcgatggatgtgatgataactaccacattttctgcctgttacctccattgcctgaaattccacggggaatatggagatgtcctaagtgtatcctcgctgagtgtaaacagcctcctgaagctttcggctttgaacaggcaacccaggagtatagccttcagtctttcggggagatggccgactccttcaagagcgattacttcaatatgccagtgcatatggttcctaccgagttggtcgaaaaagaattctggcggcttgttagttctattgaagaggacgtcactgtggaatatggtgccgacatccactccaaagaatttggatccgggttccccgtttccaacagcaagcaaaaccttagcccagaagaaaaggagtatgccactagcggctggaacttaaatgtgatgccagtgctcgatcagtcagttctatgtcacattaatgctgacataagcgggatgaaagtcccatggctatacgtgggcatggtgttctcagctttttgttggcatattgaggaccattggtcttacagcatcaattacctgcactggggggaacctaaaacgtggtacggggtacctagtctcgccgctgagcatctggaggaggtgatgaaaatgctgacacccgagctcttcgacagccaacccgatttacttcatcaattagtgaccctaatgaacccaaacactctgatgtcacatggcgtcccagtggttagaacaaaccagtgcgctggggagttcgtcatcacattccctcgggcatatcactcaggattcaaccagggatacaattttgcagaggcagtgaacttttgcactgcagattggctccctgccggaagacagtgcatcgagcattatagacggctgaggaggtactgcgttttcagtcatgaggaacttatctgtaaaatggcagcatttccggagacattggacctcaatctggccgtggccgtccataaggagatgttcatcatggtacaggaggagcgcaggctgagaaaggcacttcttgagaaaggagttactgaggcagagcgtgaagccttcgaattgctgcccgatgacgagcgccagtgtataaaatgcaagacgacctgtttcctctcagctctggcatgttatgactgcccagacggcttggtgtgtttatcccacataaacgacctctgtaagtgctcgagcagtaggcagtatttgcgctaccgctacacactcgatgagttaccgacaatgctgcacaagttgaaaatcagagctgaatcctttgacacctgggcgaacaaagtgcgggtcgccctggaggtcgaagacggacgcaagagatcgtttgaagagttgagagccttagaatctgaagccagggagcgcagattccctaattccgagctgcttcaacgtctgaagaattgcctttccgaggtagaggcttgtatcgctcaggtcctgggactcgtttctggtcaagttgccaggatggacactcctcagctgactctcacagaactcagagtgttgctagagcagatgggtagcctcccttgcgccatgcaccagatcggggatgtaaaggatgtccttgagcaggttgaagcctaccaggccgaggcccgagaggccctcgcaacgctccctagttcccctgggcttctacgctcgctgctcgagcgcggacagcagctgggcgtcgaagtgcccgaggcccaccagctccagcagcaggttgagcaggcacagtggttagacgaagttaaacaggccctggcacctagcgcccacagaggttctcttgtgattatgcaaggtctcctggtgatgggagctaaaatcgcgagctcgccgagtgtggacaaggccagggctgagcttcaagaattgctaacaatcgccgagagatgggaggaaaaggcccatttttgtctcgaggccaggcagaaacaccctcctgctaccctggaggccatcatcagggagacagaaaatattccggtgcatctgcccaacatacaggctctaaaggaagccctgaccaaggcacaggcctggatagctgacgtggatgagattcaaaacggagatcattatccttgtctcgacgacctggagggattagttgctgtgggaagagacctccccgtggggctggaggaactccgacagcttgaactgcaagtgctgaccgcgcacagctggcgtgagaaagcatctaaaacattcctgaagaagaattcgtgctacactctattagaagtcctgtgcccttgcgccgatgccggttcagattcaactaaacgctctagatggatggaaaaggcactaggcctctatcagtgtgacaccgagctcttggggttatccgctcaagacttgcgagaccctggcagcgtcatcgtggcattcaaagagggggagcaaaaggaaaaggaggggatactccagctcaggcggactaactcagctaagccatcgccacttgctcctagcctgatggcctcaagcccaacctccatatgtgtttgtggccaggtgcccgctggtgttggcgtgctgcaatgcgatttgtgtcaggattggttccatggacagtgcgtcagcgtgccgcatctgctgacctcccccaagccttcactgaccagctctccactactggcctggtgggagtgggatactaagtttttgtgtccattgtgtatgcgctcccgtcgtccgcgtcttgaaacaatcttggcactgctcgttgctctgcagagactgcctgtccgcctgccggagggcgaggccttgcagtgtctgaccgaaagggcaatcggatggcaggatcgcgctcgcaaggccctggcttctgaggacgtgacggctctgctgagacagctcgcggaactgcgccagcaactccaggccaaacctaggccagaggaggcaagcgtgtatacatctgctacagcttgtgacccaatccgagaaggcagcgggaataacattagtaaagtgcagggcctgttggaaaacggagacagcgtgaccagtcccgagaatatggctccgggaaaaggttctgatctcgaattgctcagttcacttttgccgcaactgaccggcccagtgctcgagttgcctgaagccattcgagcccctttagaggagctcatgatggagggcgatcttttggaagtgaccctggacgagaaccactcaatatggcagttattgcaggccggtcaacccccagacttagatagaattcggaccttgctggagctggagaagttcgagcaccaaggttctagaacccggtctagggctctggagcggaggcggaggcgccagaaggtggaccaaggacgcaatgtcgagaacctggtccaacaggaactgcagtcaaagcgggctagatcctctggtattatgtcccaagtcggcagggaggaggaacactatcaggagaaggccgatcgggaaaacatgttcctgaccccgagcacagatcattctcccttcttaaaggggaaccagaactcactgcagcacaaggattctggttcctccgccgcatgcccctctctcatgcctctgttgcagctgtcttactccgacgaacagcagctttag

SEQ ID NO: 229091 - DNA, 882 bp, synthetic construct
  misc_feature 1..882: note = Description of Artificial Sequence: Synthetic coding sequence
  source 1..882: mol_type = other DNA
cttcccaatatacaggctctcaaggaggcgctgaccaaggcgcaagcgtggatcgcagacgtggacgagatccagaatggggatcactacccctgtctagacgatttggagggcctagtggccgtgggaagagacttacctgtcgggcttgaggagctgaggcagctcgagctgcaggttctttgcccttgtgctgatgccggtagcgactcaacgaagcgttctagatggatggagaaggctctggggctctatcagtgtgataccgagctgctgggcttatctgcccaggatctgagagatcccggttcagttatcgttgcattcaaggaaggggagcagaaggaaaaagagggaattctgcagcttcggaggaccaacagcgctaagcctagtcctctagccccttctctgatggcctcatctcccacgagcatatgtgtctgcggccaggtgcccgctggtgtgggggtgctgcagtgcgacctgtgccaggattggtttcatggacagtgcgtttccgtaccacacctgctgactagccccaagcctagcctgaccagtagccccttgctggcatggtgggagtgggacacgaaatttctttgtcctctgtgcatgcgatcaagacgccctcgactagaaacgatcctcgcactcctcgtcgcattacaacggttgcccgtccgtttgcccgaaggcgaagctcttcaatgcttgacagagcgggctatcggatggcaagatagggctcgaaaggccctcgcaagcgaggacgtcactgctctgcttcgacaactggcagaactgcgacaacagctccaggcgaagcctaggccagaggaggcctctgtgtatacaagcgccacggcgtgtgactag

SEQ ID NO: 229092 - DNA, 4431 bp, synthetic construct
  misc_feature 1..4431: note = Description of Artificial Sequence: Synthetic coding sequence
  source 1..4431: mol_type = other DNA
atggagcctgggtgcgatgaatttctaccccctcccgagtgcccagtttttgagccatcctgggcagagttccaggacccactgggctatatcgccaagatcagaccaatcgcagaaaagagtggcatctgcaagattagaccccctgccgactggcagccaccattcgctgtcgaggtagataacttccgcttcacaccgagagtgcaaagactcaatgaactggagattgtaatcgaagaaggtggctacgaggccatctgcaaagaccggaggtgggctcgagtggctcagcgtcttcattatcctccagggaaaaacattggctccttgctacgatctcactacgaacgtatcatctatccttatgagatgttccagtcaggcgcaaatcacgttcagtgcaacacgcacccttttgacaatgaggtgaaggataaagagtataagccacactcaattcccctcagacagtccgttcagcccagcaaatttagttcctactcccggagggccaagcggctccagcctgatcccgaacctacagaggaagacatcgagaagcaccccgagctgaagaagctccagatatatggccctggcccaaagatgatgggcttgggactaatggccaaagacaaggacaagaccgtacacaaaaaggtgacctgccccccaaccgtgaccgtgaaggatgagcagagcggaggaggaaatgttagttccactttgctgaagcagcacttgtcattagagccctgcactaagactacaatgcagctaaggaagaaccactcttccgctcagtttattgatagctatatttgccaggtgtgcagccgcggagatgaggatgacaaactcctcttttgcgatgggtgcgacgataactatcatatcttctgtttgctaccccctctgccagagattcctcgagggatctggcgctgtcctaagtgtatcttggccgagtgtaagcagcctcctgaagcctttgggtttgaacaggccacccaggagtacagcttacaatcttttggagaaatggctgactcctttaaatccgactactttaatatgccggtgcatatggtgcccactgagttggtcgagaaagagttctggcgcctggtttcctccatagaggaggacgtcactgttgagtacggcgcagatatccattcaaaggagttcggcagcggtttccccgtctcaaatagcaagcaaaacctgagccctgaagagaaagagtatgccacctccggatggaaccttaatgttatgcccgttttggatcagagcgttctctgccacatcaatgccgatatctccggtatgaaagtcccatggctgtacgtagggatggtcttctcagcattctgctggcacattgaggatcattggtcctattccatcaactacctgcactggggtgagccaaagacctggtatggagtgccaagtttagccgcagagcatttggaagaggtcatgaaaatgctaacccctgaactgttcgacagtcagcctgacctgttgcaccagctggtaaccttaatgaacccaaacacccttatgtcccacggggtcccggtagttaggaccaatcagtgcgcgggtgagttcgttatcacttttcccagggcttatcatagcggctttaatcaaggttataactttgccgaggccgttaatttctgtactgccgattggctgcccgcagggcgtcagtgcattgaacattacagacgcttacggaggtactgtgtgttctctcatgaggaactcatctgtaaaatggccgctttcccagagacactggacttgaacctcgccgtggccgtgcacaaagaaatgtttataatggtgcaagaggagcgcagacttagaaaggcccttctcgagaagggtgtgacggaggccgagcgcgaagcctttgaactgctccccgacgacgaaaggcagtgcattaagtgcaaaactacctgcttcctgagtgcactggcatgctacgactgcccggacgggctcgtatgtctctcacacataaacgatctctgtaaatgctccagctccagacagtacttgaggtataggtatacactcgacgagctccctaccatgctacataaattaaagattagagccgagtcatttgatacctgggccaacaaggtgagggtggcgcttgaagtcgaagacggacgcaagcgaagcttcgaggagttgcgtgccctggagtccgaagctagggagcgaaggttccccaacagtgaactgcttcaacgactgaaaaactgtctgagcgaagtggaggcctgtatcgctcaggtgctgggcctggtaagcgggcaggtcgctaggatggatactcctcagctgacactaaccgaactcagagtcttgctcgaacagatggggagcctgccatgcgccatgcatcaaattggcgacgttaaagatgtcctggagcaagtcgaagcctaccaggctgaagcacgagaagccctggccaccctcccttcttcaccaggacttttgaggtccctgctagaaagaggacagcagctgggagtggaggtaccagaggcacaccagctgcaacagcaggtggagcaagcacagtggctcgacgaggtcaagcaggccctcgccccatccgcacacagaggctctctggttattatgcaaggtctgctcgtgatgggagccaaaattgcaagcagcccatccgttgataaagctcgggcagagctgcaagagctgttgaccatcgccgaacggtgggaagagaaggcacatttctgtctggaagcacgacagaaacacccacctgctaccttggaggctataatcagagagacagaaaatattccagtccacctccccaacatccaggctttaaaggaggctctgacgaaggcacaggcctggatagctgatgttgacgagatacagaacggtgatcactatccctgtctggacgatctggagggtttggtagcagtgggcagagaccttcccgttggcctcgaggagttgcgtcaactcgagctgcaggtactgacggcacactcttggcgtgaaaaggctagcaagaccttcctcaaaaagaactcctgttatacactcctggaggtcctctgcccatgcgccgatgcaggatcggacagtacaaaacgatcgagatggatggagaaggcgctgggcctctaccagtgtgatacggagctcctggggctttccgcacaggacctgagagatcccggatctgtgatcgtcgctttcaaagaaggggagcagaaggaaaaggaggggatactgcaactcaggaggacgaactcagcaaagccttctcctctggcgccatccctgatggcttcctctcccacgtctatttgtgtgtgtggacaagtccccgctggcgtcggagtgctgcagtgcgacctttgtcaggactggttccacggccagtgtgttagcgtcccccatctgctgaccagccccaaaccatctctgacttcatcccctctgctggcctggtgggaatgggacaccaaatttctgtgccccctttgtatgcggagcaggcggccacggcttgagacaatactggccttacttgtagctcttcagaggttaccagtgcggcttcccgagggcgaggcactccagtgcctcacggagcgcgcaatcggatggcaggacagggctaggaaggcactcgctagtgaagatgtgaccgcattactgcgacagctggccgaactgaggcaacagctacaggcgaagccacggcctgaggaggcaagcgtgtacaccagtgcaactgcctgtgatccgatacgtgaggggtcaggaaacaacatttccaaagtacagggcctgctggagaatggtgacagcgtcacttcacccgagaatatggcacccggaaaggggagcgacttagagctgttgtcaagtctcctcccacagttgaccggccctgtcctagaactacccgaggcaatccgcgctcccctcgaggaactgatgatggaaggtgatttactggaggtaacgttagacgagaatcattcaatttggcaactgcttcaggcagggcaacctccagatcttgacagaatcagaacactgctggaactcgaaaaatttgaacaccagggctctagaacgcggtcaagggcactcgagcgcaggcggagacggcagaaagtcgaccagggacgcaatgtagaaaacttggtgcagcaggagctccagtctaaacgggcaaggtcctctggaattatgtcccaggtagggagggaggaagaacactaccaggagaaggcagatagagagaacatgttccttacaccctcgaccgatcactcaccctttctgaaaggcaaccagaattccctccaacacaaggacagcggttag

SEQ ID NO: 229093 - DNA, 1278 bp, synthetic construct
  misc_feature 1..1278: note = Description of Artificial Sequence: Synthetic coding sequence
  source 1..1278: mol_type = other DNA
atggaacctggttgtgatgaatttctgcccccacccgaatgccctgtcttcgagccctcttgggccgagtttcaagatccgttaggctacattgcaaagattcgccctatcgcggaaaaatctggcatctgcaagattagacctcccgcagattggcaacctccgttcgctgttgaagtagataattttagattcactcctagggtccaacgtcttaacgaattagaggcacaaacgcgcgtgaaactgaattacttagaccagatcgccaaattctgggaaattcagggcagctccctcaagatcccaaacgtggaacgtaagatattggacttgtattctctgtcaaaaattgtgatcgaagaaggcggttacgaagctatctgcaaagaccggcgatgggctagagtcgctcagcggctccactatccacccggtaaaaacatcggaagtctcttgcgctcccactatgagcggatcatttacccctacgaaatgtttcagagtggggctaaccacgtaccagaaccaaccgaagaagacatagagaagcatccagagctcaagaagctgcagatctatgggccaggtccaaaaatgatgggcctcggactgatggcaaaagataaggataagaccgtgcacaaaaaggtcacgtgccccccaacagtcaccgtgaaggacgagcaatctgggggagggaatgtctcgagtacgcttttgaagcagcaccttagtctggagccctgcaccaagacaaccatgcagcttcgtaaaaaccatagctcagctcaatttatagatagttacatatgtcaggtgtgtagcaggggcgatgaggatgacaaactcttgttctgtgacggatgtgatgacaattatcatatcttttgcttgctgccacccctgcctgaaatccccagggggatctggcgatgtcctaagtgcatactcgcagagtgtaaacagccccctgaagctttcggttttgaacaggctactcaagagtacagcctacagtcattcggagagatggccgattcattcaaaagcgattattttaacatgcctgttcacatggtgccgacggaactcgtagagaaggaattttggcggctggtgtcctccattgaagaggacgtaactgtggaatacggagccgacatccattctaaggaattcgggtctgggtttccagtttccaactctaaacagaacctctctcccgaagagaaagaatatgccacaagtggatggaacttgaatgtgatgccatag

SEQ ID NO: 229094 - DNA, 2667 bp, synthetic construct
  misc_feature 1..2667: note = Description of Artificial Sequence: Synthetic coding sequence
  source 1..2667: mol_type = other DNA
atggagcctggctgcgacgaattcttgccaccccctgagtgccccgtgttcgagccatcatgggccgagtttcaggaccccctcggctatattgcgaagattcgccctattgccgaaaaatcaggcatctgcaagatcagaccccctgctgactggcagccgccatttgccgtagaggtggacaatttcaggttcaccccaagagtgcagcgacttaacgaactggaggcccaaacccgtgtgaagctcaattacctcgaccagattgcgaaattttgggagattcaaggcagctcattaaagataccaaatgtggagcgtaaaattctcgatctctactccctctcaaaaatcgtgattgaggagggcggatacgaggccatctgcaaagacaggcggtgggccagagtggcgcagaggctgcactatccaccgggtaaaaacatagggagcctacttcgatcccattacgaaaggattatttatccatacgaaatgttccagtccggagctaatcacgtgcagtgcaacacccatccattcgataacgaagtgaaagataaagagtacaagccccacagtatcccattgcgacagtctgttcaaccctctaaattctcctcctactctaggcgggcaaagcgcctgcagcccgacccagaacctactgaggaggacatcgagaagcaccctgaacttaaaaagttacagatttatggtcctggaccaaaaatgatgggcctaggactgatggcgaaggataaggacaagaccgtgcacaaaaaagtcacatgtcctcctaccgttaccgtgaaggacgagcagtcaggcggtggcaatgtgagttccacgctcctcaagcagcatctatcccttgaaccatgtaccaaaaccaccatgcaactcagaaagaaccatagcagcgctcagttcattgattcctatatttgtcaagtctgtagcagaggagatgaggatgataagctattgttttgtgacggatgtgatgacaactaccacatcttttgtctgttgcctccccttccagaaatcccacgtggcatctggagatgtcctaagtgtattctggcagagtgtaaacagcccccagaagcttttggattcgagcaagctacacaggaatactctctgcagagtttcggagagatggctgactctttcaaaagtgattactttaacatgcccgtgcatatggtgcccacggagctggttgagaaggagttctggcgcctagtcagttccatagaagaggacgtgactgtagagtatggtgctgatatccattctaaggaattcggctcaggttttcccgtgtctaattccaaacagaatctctctcccgaggagaaggaatacgccacaagcgggtggaacctcaatgtgatgcccgttttggaccagtcagttctctgccacataaatgctgatatttcaggcatgaaggtcccatggctgtatgttggcatggtgttttccgcattctgctggcatatcgaggatcattggagctactcaattaattatctgcattggggtgaacccaaaacatggtacggcgtcccttcccttgcggctgagcacctggaagaggtgatgaaaatgcttacgcctgagcttttcgattcgcagccagacctactgcaccagctcgtgaccttgatgaaccccaatacacttatgtctcatggagtccccgtggttcggaccaaccagtgtgccggagagttcgttattacatttccacgggcttaccactctggcttcaatcagggctacaactttgccgaagctgtgaacttctgcaccgcagattggctgcccgctggtcgtcaatgtatcgagcattacagacgacttcgaagatattgtgtgttttcccacgaagagttgatctgcaaaatggctgccttccccgagaccctggacttgaatctcgctgttgctgtccacaaggaaatgttcatcatggtacaagaggaacgtagactgaggaaagcactcctggagaagggcgtcactgaggccgaaagggaggccttcgagctcctgcccgatgatgaaagacagtgcattaaatgtaagaccacttgttttctgtctgctctggcctgctacgactgcccagacgggctggtctgtctgagccacatcaacgatctgtgtaagtgtagttcgtcccgccagtatctgaggtatcgatataccctggacgaactgcccacgatgctccacaagctgaaaatcagagcggaaagttttgacacttgggcgaacaaggtccgagtagcactagaggtcgaggacgggagaaagagaagttttgaagagctgcgggcactcgaatcggaggccagggagcgccgtttccccaattccgagctgctgcagaggctgaaaaactgcctttctgaggtagaggcctgcatcgcacaggtcctcgggttggtgtccgggcaggtggcacggatggacactcctcagttaacacttacagagctacgagtgctgctggagcagatgggaagcctcccttgcgctatgcatcagattggcgacgtgaaggtgttgagctggaaatggaggagatacgtgttcccataccacctgtgtgtgtattcaatgcaggggaatatcctgcccgattag

SEQ ID NO: 229095 - DNA, 4713 bp, synthetic construct
  misc_feature 1..4713: note = Description of Artificial Sequence: Synthetic coding sequence
  source 1..4713: mol_type = other DNA
atggagccagggtgcgatgaatttttgcctcctcctgagtgtcctgtttttgagccttcatgggcagaattccaggatccccttggttacattgcaaagattcgccctattgccgaaaaatctggaatttgtaagatacggcctccagcggattggcagcccccattcgctgttgaagtagacaatttcaggttcacaccccgagtgcagcggctgaatgaactggaagcgcagacaagggttaaactgaattacttggatcagattgccaagttttgggaaattcaggggtcttctctgaagatccccaacgtcgagcggaagatcctcgatttatatagcttgtccaagattgtcattgaagaggggggatatgaggccatctgcaaggaccgaaggtgggctcgcgtggcacagaggctccattaccctccaggcaaaaacatcggctccctgctccggtctcattacgaaaggatcatatatccgtatgagatgtttcagtctggcgctaaccatgtgcagtgtaacacgcatccattcgacaacgaagttaaagacaaggaatataagccacattctattccactgcgtcaaagtgtccagccatccaagtttagctcttatagccgtcgcgctaagcggttacaacccgatccagagcccacggaggaggatatcgaaaaacatcctgagctcaagaaactgcagatctatggccctggaccaaaaatgatgggcctagggttaatggctaaggacaaggacaagacagtgcacaagaaagtgacttgtccacctaccgtgacagtgaaggatgagcagagtggaggtggcaatgtgagctccacccttttgaaacagcacctatccctcgaaccttgcactaaaacaacaatgcaactgcgcaagaatcacagttccgcgcagttcattgacagctatatttgtcaggtctgttcccgaggcgacgaagacgataaactccttttctgtgatggatgtgacgataattatcacatattctgccttctgcctccactcccggaaattcctagaggaatctggagatgccccaagtgtattctcgctgagtgtaaacagccaccagaagcctttggttttgaacaggcaacccaggaatactctttacagtcatttggggagatggcagactccttcaagtccgattattttaatatgcccgtccacatggtgcctaccgaactggttgagaaggagttctggaggctggtcagtagcatcgaggaagatgtaaccgttgagtacggcgctgatatccactcgaaggagtttggctctgggttccctgttagtaattcaaagcagaaccttagccccgaagaaaagcgccagagtctcacagtgctgacaaggttgatttcaagtttctgggcacaggctgttttgcctccatggcctccaaaggtcctaggactgcaggagtatgccactagcggttggaacctgaacgtgatgcccgtgcttgatcaaagtgtgttgtgtcacatcaatgccgacatttcaggaatgaaggtgccatggctgtatgttggcatggtgttttcagcgttttgttggcacatcgaagaccattggtcatactcaatcaactatctccactggggagagcctaagacctggtacggcgtgccctctctcgccgctgagcacttggaggaggtaatgaagatgctcacccctgagctatttgacagccagcccgacctgttacaccaactagtgactctgatgaatccaaacaccctgatgtctcacggtgttcccgttgtgcggacgaaccaatgtgccggagagtttgtgattacctttccgagagcataccacagcgggtttaaccagggctataacttcgctgaagctgtcaatttttgcaccgctgactggctccccgcaggacgccaatgcatcgaacattacaggcggcttagaaggtactgtgttttctcccatgaggagctgatctgcaaaatggcagcatttcccgaaacactcgacctcaacctcgccgtagctgtacacaaagaaatgttcattatggttcaagaggagagacgcctgcgcaaagctctcctggaaaaaggagtcactgaagcggaaagggaagcgttcgaactcctgcctgatgatgagagacagtgcatcaagtgtaagactacgtgtttcctctccgcactagcttgttatgattgcccggacggactggtctgtctcagccacattaatgatctgtgcaagtgcagttcatctaggcagtatttacgttaccgctatactttggatgagctcccaacaatgctgcataagttaaaaatccgcgcagagagcttcgatacttgggcaaacaaggttcgtgtggcactggaggtcgaagacggacgtaaacgtagcttcgaagaattgagagccctggaatccgaggcccgagagcgaagattcccgaacagcgagctgctacagaggctcaaaaactgtctcagcgaggtggaagcatgtatcgcccaggttttgggtctcgtcagcggccaggtggctaggatggatacaccacagctaacgctcacagagcttcgcgtgctcctggagcagatggggtctttgccttgcgcaatgcaccagattggcgacgtgaaagacgttctggaacaggtggaggcatatcaggctgaggcacgtgaagcactcgcgactctgccttcctcgcccggtctcctgcggtccctactggagcgcggacagcagcttggagtggaagtacctgaagctcaccagttgcagcagcaagtggaacaagcccaatggttagatgaagtcaaacaagccttggctccaagtgcacaccggggaagtttggtcatcatgcagggcctgttggtgatgggagctaaaatagcatccagtcctagcgtggacaaagcacgggctgagctccaggaacttctgactattgccgagaggtgggaagagaaggcccatttttgcctcgaagccagacagaaacacccccctgctacactggaagcaataataagagagactgaaaacattccagtccacttaccaaatatccaggccctcaaggaagccctcaccaaagcccaagcatggatcgcagatgtcgacgaaattcagaacggcgaccattacccatgcttagatgacttggaaggcctcgtggctgtgggaagagacctcccagtgggcctcgaggagctgcggcagctggagctccaagtcctgacagcccactcatggagagagaaggcctcaaaaaccttcctgaagaagaactcttgctacaccttgctggaggtgctctgtccttgtgccgacgctggctcagactcaaccaaaagaagtcgttggatggagaaggctctgggactgtatcagtgtgacaccgagttgctgggtctgagtgcccaggacctccgagatcccggatcagtgattgtggcattcaaagagggagaacagaaggaaaaagaggggatactgcaactcagaaggactaattcagccaaaccctcacctctggccccatctctgatggcctcatccccaacaagtatctgcgtctgcggacaggttccggctggtgttggcgtcttacagtgtgacctctgtcaggactggtttcacggtcaatgcgtgtcagtgcctcatctcctaacctcacctaagccctcgctgacttcatcccctctgctagcctggtgggagtgggacactaagttcctctgtccactctgcatgagaagtcgcaggcctaggctggagacaattctcgcactgctggttgccttgcaacggttgcctgttcgtctccccgagggggaggccctgcagtgcctcactgagagggcaataggatggcaggacagggctcggaaagccctcgcaagcgaggatgtgaccgcgctgttaaggcagctcgcagagctgcggcagcaactgcaggctaaaccaaggcctgaagaggctagtgtgtatacttcagcaaccgcctgtgatccaattagagaaggctcaggaaataacatttcaaaggtgcagggcttgctagaaaacggcgactcagtcacctcacccgagaacatggccccaggcaagggatccgatttagagctgctgtctagtctcttgcctcagcttacaggcccagtgctggaactgccagaagctatcagggccccactagaggagctcatgatggaaggggatctgcttgaagtcacgttggacgagaatcattcgatttggcagctgctgcaggccggacaaccaccagatctggacaggatacgtaccttattagagctcgagaaatttgagcaccaagggagtaggaccagatctagagccctcgaacgcaggaggaggagacagaaggtggatcaaggaaggaatgtggagaatttggtccagcaggagttgcagagcaagagggccagaagttccgggattatgagccaggtcgggagggaagaggagcattaccaggagaaggctgatcgggaaaacatgtttctgacgccaagcactgatcactcccccttcctgaagggaaaccagaattctctgcagcataaggatagtgggagctccgcagcatgtcccagtctgatgcccttgctgcagttgagttactctgatgagcagcaattgtag

SEQ ID NO: 229096 - DNA, 3297 bp, synthetic construct
  misc_feature 1..3297: note = Description of Artificial Sequence: Synthetic coding sequence
  source 1..3297: mol_type = other DNA
atggacttagggacactttacgaatcctgcaatcagccccaagacgcgatcaagtgctacctcaacgctacccggtctaagtcttgctcgaatacctcagcattggccgcaaggatcaagtacctacaggctcagctgtgtaacctgccccaggggagcttgcagaataaaacaaagctgttaccttcaatcgaagaggcgtggtccctgcccattcctgcagaattgacaagccgacaaggtgccatgaatacagcccagcaggcctgtaaaccccatcatcctaatacagagcccgtactgggtctgtcccaaacaccaataagccagcaatcgctgccgctccacatgataccttcctcccaagtggacgatttaagtagcccagcaaagcggaagagaacttccagtccaacaaagaacacctctgataactggagcggagggcacgccgtgagtcatcctcctgttcagcagcaggcccacagctggtgcctgacacctcagaagctgcagcacctcgagcagctgcgagcgaatagaaacaaccttaacccagcccagaaacttatgctcgagcagctggaaagccaatttgtactaatgcaacaacaccagatgcgtcccacaggcgtggctcaagtgagatctacaggaatacccaacgggccaaccgcagactcaagtctgcccaccaacagcgtgtccggtcaacagcctcagctcgccctgacacgtgttcccagcgtttcccagccaggcgtgcgacccgcttgtcccggtcagcctctagcgaatggaccctttagcgctgggcacgttccgtgctccacaagccgcacattggggtctactgacactattctgataggcaacaatcacatcacgggcagtggatctaatgggaacgtaccatacctgcagaggaatgccctgacattgcctcataacaggacaaacctgaccagtagtgcggaggagccctggaagaaccagctgtctaattccactcaaggcctgcacaagggccaatctagccattccgcgggacccaatggcgagaggcctctctcttccacagggccttcacagcacctccaggctgctgggtctggtattcagaaccagaacgggcaccctacattaccatcgaactcggtgactcagggagcagccctcaaccatctctccagtcacaccgctacctccggcggacagcagggaattacacttactaaggaatccaagccaagcggaaatattctgacagtgccagagaccagccgccacacgggggagacccccaattccaccgcctctgtagagggcctcccaaatcatgtccaccaaatgacggctgatgccgtgtgctcaccttctcatggggatagcaaatctccaggactgctgagctcggataatccacagctttccgcccttctcatgggcaaagctaacaacaatgtcggcacaggtacatgtgacaaggtcaataacatccacccagcagtgcataccaaaacggacaactcagttgccagctcccccagcagcgctatcagtactgctacgccgtcacctaaaagcacagagcagacgacaaccaactcggtcacaagcctcaactccccacactccggtctgcacactattaatggagaggggatggaagaatcccagtcacccatgaaaaccgacctgctattagtgaatcacaagccgtctcctcagattattccatccatgagtgtatcgatataccctagcagtgctgaggtgctgaaggcctgcagaaatttgggcaagaacggcctgagcaacagttccatactgttggataagtgtccgcctcccaggccgccatcctctccataccctccgctccctaaagataaactcaatcctcctacaccaagcatctacctcgaaaacaagagagacgcattcttccccccactgcaccaattctgtaccaacccaaacaatcccgtgaccgttatacgtggattggccggtgcgctgaaattggatttgggtctgttcagtaccaagacactcgttgaagcgaacaatgaacatatggtcgaggtccgtactcagctcctgcagcccgctgatgaaaattgggaccctacgggcaccaagaaaatttggcactgtgaatcaaatcgatctcacactacaatagcaaaatatgctcaatatcaagcaagttccttccaggagtcattacgtgaagaaaatgagaagcggtcccatcacaaagaccatagcgactccgagagtacatcttcggacaattccggacgaagaaggaaggggcctttcaagacaatcaagtttggaactaacatcgatctgtcagacgacaagaaatggaagttacagctacacgagctaacaaagctgcctgctttcgttcgtgtggtgagtgccggtaacttgctcagccacgtcgggcacactattctggggatgaataccgtgcagctgtatatgaaggttcctggttctcggacaccaggacaccaggagaataacaatttttgttccgtgaacatcaatatcggacccggagactgtgaatggtttgtcgtcccggaaggctattggggcgtgctgaatgatttttgcgagaaaaataaccttaatttcttgatgggctcttggtggccaaacctggaagatctgtacgaagctaatgtgcctgtgtacagattcattcagagacctggcgatctggtgtggattaacgccggaaccgtgcattgggttcaggccattggctggtgtaataacatcgcatggaatgtgggtcctctcaccgcctgtcagtacaaactagccgtggagcgatacgagtggaacaaactgcaaagtgttaagagcatcgtccccatggtccatctgtcttggaatatggccagaaatatcaaggttagcgaccccaagctatttgagatgataaagtactgtctgctccgaaccctcaaacaatgccaaacactgcgggaggcactgattgcagccggaaaggagataatttggcacggcaggaccaaagaggaacccgcacactattgcagcatatgtgaggtcgaagtgtttgatctgttatttgtgactaacgagtccaatagcagaaagacatacatcgtgcactgccaggactgcgcaagaaagacgtctgggaatctcgaaaattttgtcgtcctggagcagtacaagatggaagacctgatgcaggtctacgaccagtttacactggccccacccctgcccagcgctagctcttag

SEQ ID NO: 229097 - DNA, 4206 bp, synthetic construct
  misc_feature 1..4206: note = Description of Artificial Sequence: Synthetic coding sequence
  source 1..4206: mol_type = other DNA
atgaaatcctgtggcgtgtccctcgccactgcagccgcagccgcagcagccttcggagacgaagaaaagaaaatggctgctggcaaggcttcaggggaaagcgaggaggcctctccctccctgactgctgaggagcgcgaggctctgggcggtttggacagtcggttgttcggtttcgtccggtttcatgaggatggagctagaaccaaagcactgctgggaaaggctgtccgctgctacgagtccctcatccttaaagcagaggggaaggttgagtctgacttcttttgccagctgggacacttcaatctgctcctcgaagattaccccaaagccctctctgcttaccaacggtattattccctacagtcggactactggaagaatgctgcattcctctatggcctaggacttgtatacttccactataacgcttttcagtgggcaattaaggcgtttcaggaggtgttatatgtagatccgagcttttgtcgagccaaagaaatccatctgcgattgggactgatgtttaaggttaataccgattatgagtcgagcctgaagcatttccagctggcactggtggattgtaatccttgtaccctgtccaatgctgagattcagtttcacatcgcccatctatatgagacccagcgaaaatatcattctgctaaggaagcctatgaacagctgcttcagaccgaaaatcttagtgctcaagttaaagccacggtgcttcagcagctagggtggatgcaccataccgtggacctgctgggcgataaagccacgaaagagtcatacgctatccaatacctgcagaaaagcttggaagcggacccgaattcagggcagtcttggtattttctcggacgttgttacagttccattggaaaagtgcaggacgccttcatctcctatcgacagagtattgacaagtctgaggcctcagccgatacatggtgctcaattggggtgctgtaccagcagcagaaccagccgatggacgctctccaggcctatatctgtgcagtccagcttgatcacggacacgcagccgcatggatggacctgggcacactttacgaatcctgcaaccaaccgcaggatgcgataaagtgctacttgaacgcgactcgcagtaaaagctgtagtaacacttcggccttggccgcaaggatcaagtatttgcaagcccaactgtgtaacctccctcaggggagtctgcagaacaaaaccaagctgctgccctcaatcgaagaggcctggtccctgccaattcccgctgaactgacaagcaggcagggggctatgaatacagctcagcagaacacatccgacaattggtctggaggccatgccgtgagtcaccccccagtgcagcagcaggctcactcatggtgcctcaccccacagaagctgcagcatttagagcagctgagagccaataggaataacctgaatccggctcaaaagttgatgctggagcagcttgagagccaattcgttctgatgcagcaacaccagatgaggcctaccggcgttgctcaagtgaggagtaccgggatccccaacggtcccacagccgactcatcattgccaacaaactcagtgagtggacagcagccgcaactagctctcaccagagttccttccgtctctcagcccggagtccgccctgcctgcccgggacagccactggccaacggaccctttagcgccggacacgtaccttgttctactagcagaactttaggatctactgataccatactgataggaaataatcacattacggggtccgggtccaacggcaatgtgccctatttgcagcgcaacgccctcacactgccccacaatagaactaatttgacttccagcgccgaggagccttggaagaatcagctgagcaattctacccaggggctgcataaaggacagtcaagccacagcgcaggcccaaatggcgaacgtcccctctccagcactggcccaagtcagcatttacaagctgccggtagtggcatacagaatcagaacgggcatcccactctgcctagcaattctgtgacgcagggcgctgccctgaatcacctctcctcccacaccgcgactagtggagggcagcagggaatcacgctcaccaaagaatcaaagccatcagggaatatcttgacggtgcccgaaacctctagacacacgggggagactccaaattccacagccagtgtagaaggcctgcccaatcatgtgcatcaaatgacggccgacgcagtgtgtagcccttcccacggggattctaagtcccccggtctgctatcatcagacaatccgcagctctcagctctgttgatgggtaaggccaataacaacgtcgggactggaacttgcgataaggttaataatattcaccctgccgtgcatactaagacagacaacagcgtcgcaagctctccgagctccgcaatttctactgccacaccctcgccaaagagtactgaacagacaacaactaattctgtgacttctttaaacagccctcactcagggctgcacaccataaacggcgagggaatggaggagtctcagtcccccatgaagaccgacttattactcgtgaaccataagccctctccacagatcattccgagcatgtctgtgagcatatacccatcttcggctgaagtcctgaaagcgtgccgcaatttgggaaagaacggcctatccaactcttcaatcttgctcgataaatgtccacccccaagacctccatcctcaccttatccacctctaccaaaagacaaactgaatcctccgactccgtcaatctatttggagaacaaacgggacgcgtttttccccccacttcaccagttttgtactaacccaaacaatcccgtcacagtgattcggggtttggcaggggctctgaaactggatttggggctcttctcaaccaagacgctcgtcgaggccaataacgagcatatggtggaggtacgcacacagctcctgcagcccgctgacgaaaattgggatcctacagggaccaaaaagatctggcactgtgagtctaatcggtctcatactaccatcgccaaatatgcgcagtatcaggcatcaagctttcaggagtccctgagagaggagaatgaaaaacggtctcaccacaaagatcactctgattcagaatccacaagttccgataactccggtcggagacgaaaggggccatttaaaacaatcaagttcggtacaaacatcgacttgtcagacgacaaaaaatggaagcttcagctacacgagctgacaaaacttcctgcatttgtgcgggtggtcagcgcgggtaacctgctctcccatgtagggcataccatcttgggcatgaacaccgtgcagctgtatatgaaagtccctgggagcaggactcctggtcaccaggagaacaataacttctgctcagtgaatataaatatcgggcctggagactgtgagtggttcgtagttcccgagggctactggggggtactgaacgacttttgcgagaagaataatttgaactttttaatgggttcatggtggccaaacttggaagatctgtatgaggctaatgttcccgtgtatcgcttcatccaacgccctggcgacttggtgtggataaacgccggtaccgttcattgggtgcaggccattggctggtgcaataatatcgcctggaatgtcggcccattgaccgcatgtcaatataagctggcagtggagcgctatgagtggaataagctacagtcggtgaaaagcattgtccctatggtgcatttatcttggaacatggctagaaacattaaagtcagcgacccaaaattattcgagatgattaagtattgtcttttgcgcactttgaaacagtgccagacattgagggaggctctgatcgcggctggcaaagaaatcatctggcacgggcgtacgaaggaggaacccgctcactactgcagtatctgcgaggtagaggttttcgatctgttgttcgtgaccaacgagtctaactctcggaagacatacatcgtacattgtcaggactgcgccaggaagacctctggcaatctcgagaatttcgtggttttggaacagtataagatggaagatttgatgcaggtctatgaccaatttactctggccccaccactgccgtccgcatcgagttag

SEQ ID NO: 229098 - DNA, 4227 bp, synthetic construct
  misc_feature 1..4227: note = Description of Artificial Sequence: Synthetic coding sequence
  source 1..4227: mol_type = other DNA
atgaaatcctgcggcgtgtcactggcaacggcagccgctgctgccgctgccttcggggatgaggaaaagaaaatggccgctggcaaggcaagcggtgaaagcgaagaggcgagtccgtcactaacagccgaggaacgcgaggccctgggtggactggacagtaggctgttcgggtttgtccgattccatgaagacggcgctaggaccaaagcgcttctaggtaaagcagtgcggtgctacgagtctttgattctcaaagccgaagggaaagtggaatccgacttcttttgtcagttgggacactttaacctactgctggaggactaccctaaagcactctcggcataccagcgctattacagcctgcagtctgactactggaagaatgcagcctttctctacgggttgggactagtctattttcattacaacgcttttcagtgggctattaaagccttccaagaggttttgtatgtggacccttcattttgccgggctaaggaaattcacctaagactgggactaatgtttaaggtgaataccgactatgagtcttcgctgaagcactttcaactggccttggttgattgcaacccctgcacgctgtcgaatgctgaaatccaattccacattgcccacctctatgaaacgcagaggaagtaccactctgctaaggaggcttatgaacagctgctgcagacagagaacctatctgcccaagtgaaggcgaccgttctgcaacaactgggatggatgcaccatacagttgatctgctcggagataaagccaccaaggaatcttacgccatccaatacctgcaaaaaagtctggaggctgaccccaattcaggtcagtcctggtactttctaggtcgctgctattcgtccattggtaaagttcaagatgcctttatctcctatcgacagtctatagacaaatcagaggccagcgccgatacctggtgttcaattggtgtgctgtaccaacagcagaatcagcccatggatgcattacaggcctacatttgcgcggtgcaacttgatcacggccatgcagccgcttggatggacctcggtacactctacgagtcctgtaatcagcctcaggacgctattaagtgctatctcaacgcgactagaagcaagtcttgttcgaatacctccgccctcgccgctaggataaagtacttacaggcctgtaagccccatcacccgaacacagaaccagtacttggactgtctcagactccgatcagtcagcagtccctgccactacatatgattcctagctcgcaggtcgatgatttgtcatcccccgcaaagcgtaagcgaaccagcagtcccaccaagaatacgtcagacaattggagtggtggacacgcagtctctcatccgccagttcagcagcaggcgcactcatggtgtctgactccacagaagttgcagcatctcgaacagttgagggccaataggaataacctgaatcctgctcaaaaactgatgctggagcagctcgaaagtcagtttgtactgatgcagcagcaccaaatgcgccctactggagtggctcaggtgagatccactggaattccaaacggacccactgcggactcatccttgccaacaaactccgtgtctggccaacagccccagctggcattgacccgcgttccatctgtgtcacaaccaggcgtgcgccctgcttgcccaggacagcctcttgctaacggacccttctctgctggccacgtcccgtgcagtacaagccgcaccctcgggtccaccgatacaattctgattggaaataatcatatcactggttccggcagcaatgggaatgtcccatacctgcagagaaatgcactaaccttaccacacaataggaccaatctgacaagtagtgcggaagaaccgtggaagaaccagctctcgaacagcactcagggcttgcataagggacagtcaagtcattcagctggccctaatggcgaacgacctttatcatctaccggacccagtcagcacctccaggcagcgggaagcgggatacaaaatcaaaatggccacccaaccctgcctagcaactctgtgacccaaggcgcagctttaaatcacctgagtagccacactgcaacctccggcggtcagcagggtataactctcaccaaggagtcgaagcccagcggcaacattctcacagtgcctgaaacttcaaggcacaccggagagacaccaaactctacggcatcagtagagggcttgcccaaccatgttcatcaaatgacagctgacgctgtgtgcagcccaagccacggggacagcaagtccccgggtctactttcgagtgataaccctcaactctccgctctcttgatgggtaaagcaaataacaacgtggggaccggcacctgtgataaggtgaacaatattcatcctgctgtgcacactaaaaccgacaatagcgtggccagttcacccagtagcgccatctcaactgcaaccccaagtcctaagtccactgaacagactaccactaactctgtcacgtcactgaacagtccccactctggtttgcatacaatcaatggagagggcatggaggagagccaatcaccgatgaagactgatcttttacttgtgaaccacaaaccttctccccagattattcccagtatgtccgtgtccatttacccttctagtgccgaagtgctgaaagcctgtcgcaatctggggaagaatggactcagtaattcgtctattttgctcgataagtgtccccctcctcgacccccatcctcgccctatcctccactcccaaaggacaaactcaacccccctacaccgtcaatttatctggagaacaaaagagacgccttctttccaccactacaccagttttgtactaacccaaacaatccagtgacagtgattagaggtctagctggagctctgaagctggacttgggtctcttttccaccaagacactagtagaggcgaacaatgagcacatggtagaggtgagaacgcagcttctgcagcctgccgatgagaattgggatcctacagggactaagaaaatttggcactgcgagtctaacagatcacataccaccattgcaaagtacgctcaatatcaggcatcctcattccaggagtcattaagagaagaaaatgagaagcggtcccatcataaagaccacagcgacagcgagagtacctcatccgacaactctggccgtcgccgaaaggggccattcaaaacgattaaatttggtaccaacatcgatctgtctgacgataagaaatggaaactgcagctccacgaactaacaaaactgcccgcttttgtgagggtggtgtcagctggaaatctgctgagccatgtaggccataccatcctaggcatgaacactgtccagctgtacatgaaagtgcctggctctaggactcctggccaccaggagaacaacaacttctgtagcgtgaacattaatattggcccaggcgattgcgaatggtttgtggtgccagaggggtactggggcgtacttaatgatttttgtgagaaaaataacttaaatttcctcatgggtagctggtggcccaatttagaagatctgtacgaggcaaacgtgccagtatataggtttattcaaaggccaggcgacttagtgtggattaatgccggaaccgtgcactgggtgcaggccatcggatggtgcaataatattgcctggaatgtaggccctcttacagcttgccagtataaattagccgtcgaaaggtacgagtggaacaaacttcaaagcgtgaagtccatagtccccatggtacatttgagttggaatatggcgcgtaacattaaggtttcagatcccaagttattcgagatgattaagtattgtcttctccgcacactgaaacaatgtcagacattgagagaggccctgatcgccgctgggaaggaaatcatctggcatggacgtactaaggaggagcctgcacactactgtagcatttgtgaagtagaagtcttcgatctactattcgtcacaaacgaaagtaacagtaggaaaacctacatcgtgcactgtcaagattgtgccagaaaaaccagtgggaacttagagaatttcgtcgtgctggaacaatacaagatggaagatctgatgcaggtctacgaccagttcacgctagcccctcctctgccatctgcgtcatcatag

SEQ ID NO: 229099 - DNA, 3000 bp, synthetic construct
  misc_feature 1..3000: note = Description of Artificial Sequence: Synthetic coding sequence
  source 1..3000: mol_type = other DNA
tagggcaccctctacgaatcttgtaaccagccacaggatgctattaaatgctacctgaatgctactagatccaagagctgctctaacactagtgccctggccgcacggatcaagtacctacaaaacacctcggacaactggtccgggggtcacgctgtgtctcaccctccagtccaacagcaggcacacagctggtgtctgacaccccagaagctgcagcatttagagcagctgcgcgctaaccgtaacaatttgaaccccgctcagaaacttatgctggagcagcttgagagccaatttgtgctgatgcagcagcaccagatgaggcccactggcgtcgcccaggtccgtagtactgggattcccaacggacctacagccgatagctcgctgccaactaattccgtcagcggccaacagccacagctggcacttactcgggtgccctcggtgtcacagcccggagtgagaccagcatgccccggtcaaccactcgccaacggcccattttccgccggtcacgtcccatgtagcacatcaagaacactgggctcaacagacacaattcttataggcaataatcatatcactggctctgggtctaatgggaatgtcccctatctgcaaagaaatgccctgaccctcccacataatcgcaccaacctgaccagttcagcggaggagccgtggaagaatcagctctctaacagtacgcagggcttgcataagggtcagtccagccattccgccggaccaaatggagaacgtccactgtcatctacagggccatcccagcacctgcaggccgcaggatccgggattcagaatcagaacggtcacccaactctgccatcgaactctgtgactcagggcgcagccctgaaccatctgagctctcatacagccacctcaggcggtcagcagggcatcaccttgacgaaggaatccaaaccctcaggtaatatcctgaccgttccagagacatctcgacataccggggagactcctaacagtactgcctccgtggaggggctccccaatcacgtacatcagatgacagctgatgcagtgtgctcaccctcacatggggactccaaatcccctggcctcctctccagcgacaatccccaattgagtgccttactcatgggtaaagcaaacaacaatgtgggcaccggcacttgtgacaaggttaacaatatacatcctgccgtgcatactaaaacggataattcagtggcgtctagccctagctcagccatctcaacggccaccccatctcctaagtccactgagcaaacgaccacgaacagcgtcaccagcctgaacagccctcattctggccttcacaccattaacggcgagggaatggaagagagccagtctcctatgaagacggacttgctgctggttaatcacaagccctcacctcagatcataccttccatgtctgtgagcatataccctagtagcgccgaggtgctgaaggcatgtaggaatctgggcaaaaatgggctgtctaattcttctatactcttggataaatgtcccccacctcgccctccatctagtccttatccacccttgcctaaagacaaactgaatccaccgaccccaagcatctacttggaaaataagcgggacgcatttttccctccattacaccagttctgcaccaacccgaacaacccagtgacagtgataaggggactcgcaggagccctaaagttggacctggggctcttcagtacaaaaactctggtggaagcaaacaatgaacacatggttgaagtcagaacacagttgttacaaccagccgacgagaattgggatcctaccggcaccaaaaaaatctggcactgtgagtccaacaggagccatacaacaattgcaaaatatgcacagtaccaagcttcctctttccaggaatctcttagagaagaaaacgaaaagaggtcacatcataaggatcactctgactctgaatccactagttccgataactcagggaggaggcgcaaaggcccatttaaaaccattaagtttgggacaaatattgacctgtctgacgacaaaaagtggaagctgcagttgcatgagctgacaaagctccccgcatttgtgagagtggtgagcgccggaaatctcctgtcacatgtcggacacactatcctgggcatgaataccgtgcaactctacatgaaagtgcccggatccaggacccccggtcaccaggaaaacaacaatttctgctcagtgaatataaacatcggaccaggcgactgtgaatggttcgtggtgcctgagggttattggggggtcctgaacgacttttgtgagaaaaacaacctcaattttctgatgggtagctggtggcctaatctggaggatctatatgaagcgaatgtgcccgtctaccggtttatccagagacccggagacttggtgtggattaacgccggaacggtgcattgggtccaagctataggctggtgcaacaacatcgcatggaatgtcggcccactgacagcctgccagtacaaactggccgttgagcgatacgagtggaacaaacttcagtccgttaagtcaattgttcccatggtgcacctgagctggaacatggctcgaaacattaaggtatcagaccctaagctcttcgaaatgatcaaatattgtctgctccggacgctgaagcagtgtcagaccctgcgcgaagctttgatcgcggcagggaaagagatcatctggcacgggcgaacaaaagaagaaccggcacattactgctcaatttgcgaggtggaggtatttgatttgctcttcgtgacaaacgagtcgaacagtaggaaaacatatatcgtgcattgtcaggattgtgcaaggaaaacaagcggcaatttggagaatttcgttgtgctggagcagtataagatggaggatctcatgcaggtgtacgatcaattcacactggctccccctctcccatccgcatcatcttag

SEQ ID NO: 229100 - DNA, 486 bp, synthetic construct
  misc_feature 1..486: note = Description of Artificial Sequence: Synthetic coding sequence
  source 1..486: mol_type = other DNA
tgagccagaaacattaaggtttctgatcccaagctttttgaaatgattaagattttctccctgagtcccaattttagagcggagaagtgcttgagagaccatctcgtccagccattgaggtctaatggagagcctgagcccctgagatttacgggcgagtattgcctgctccgtaccctgaagcagtgtcagacactgcgagaagcattaatcgctgcgggaaaggaaataatttggcatgggaggacaaaggaagaaccggctcactactgctccatctgcgaagttgaagttttcgacctgctcttcgtaactaacgagtcaaactcacgcaagacctatattgtccactgccaggattgtgcccgaaagacgtccggcaacctcgaaaacttcgtggtcttagagcagtacaagatggaagacttaatgcaggtgtatgatcagttcacgttagctcctcccctgccgagcgccagttcatag

SEQ ID NO: 229101 - DNA, 3135 bp, synthetic construct
  misc_feature 1..3135: note = Description of Artificial Sequence: Synthetic coding sequence
  source 1..3135: mol_type = other DNA
taaaacaagacaaaactgctaccgagcattgaggaagcctggagtctcccgattcctgcagagctgaccagccggcagggcgctatgaacactgcacagcaagcctgcaaaccacaccaccccaataccgagccggtgctcggattatctcagacccccatctctcaacagtctttgcccctgcatatgatcccttcctcgcaagtcgatgatctgtcctctcctgcgaagaggaaacgtactagcagccccaccaagaacaccagcgataactggtccgggggtcacgccgtcagccatcccccagtgcaacagcaagcacacagttggtgcttgacaccccaaaaacttcaacacctggaacaattgagagcaaatcgcaacaacctaaacccagcccaaaagttaatgctggaacagttggagagtcaattcgttttaatgcagcagcaccagatgagaccaactggtgtcgcccaggttcggagcaccggcatacctaacggaccgactgcagactcaagcttgcctacaaactcagtgagcggccagcaacctcagctggctctgactagagtgccttcagtctctcagcctggggtgcggcctgcatgtcctgggcagcctctcgctaatggccctttttccgctggacacgtaccgtgctccacaagcagaacactcggaagcaccgatactatcctcatcggcaacaaccatattactggcagtggatctaatggtaacgtgccttacctgcagcggaatgctctgacccttcctcacaataggactaatttaaccagttctgctgaagagccctggaagaatcagctgagcaactctactcaggggctccataagggtcagtcatcacatagcgcaggtcctaatggggagcgaccccttagctccacagggcctagtcaacatctacaggctgctggctctgggatccagaaccagaacggtcatccaactttgccgtcaaactccgtgacccagggcgctgcactgaaccacctctctagccacaccgccacttctgggggacagcaggggataactcttactaaagaatccaagccaagtggtaatattttaaccgtccccgagacctcccgacacaccggcgagacacccaacagtaccgcctccgtagaggggctcccaaaccatgttcaccagatgacggccgatgccgtgtgcagcccgagccatggagacagtaaaagccccggtctcttgtcatcagacaacccacagttatcggcactgttaatgggcaaagcgaataacaacgttggcacgggcacgtgtgataaagtgaacaacatccaccctgccgtccacaccaagacagataatagtgtggctagcagtccatcctcggccatttctactgccactccgtccccaaagagcacggagcagaccaccactaattcagtgaccagcctaaattccccccactctggcttacataccatcaacggcgaggggatggaggaatcccagagccctatgaagactgatctcctgcttgtgaaccataagccctccccacagataatcccgtccatgtccgtgtcaatttatcctagctccgcagaggtactgaaagcgtgcagaaacctcggcaagaacggcctgtcaaacagttccatactcctcgacaagtgccccccacctcggccaccttcgagcccatatcctcccctgccaaaagacaaactgaatccacctaccccctccatttatttggagaacaagcgggatgcctttttccctcctctacaccagttttgcacgaaccctaacaaccccgttactgttattcgcggactcgctggtgccctgaaacttgacctaggcttattttccacaaagaccctcgtggaggcgaataacgaacacatggtagaggtaaggactcagttgttgcagccagcggatgagaactgggatcctactggcaccaagaaaatatggcattgcgaaagtaataggtctcacacaactattgcaaagtatgcgcagtaccaggcctcttcctttcaggaatccctgcgggaggaaaacgaaaaacgaagtcaccataaagatcactccgacagcgaatcaacgtcaagcgacaacagcggtaggaggcggaagggcccttttaagaccatcaaattcggtacgaacattgatttgagcgacgataagaaatggaaactgcagttgcacgaactgaccaagctgcccgcttttgtgcgcgttgtgagtgcaggaaacttactctcccacgttggacacaccattctagggatgaatacagtgcagctttacatgaaggtgcctggatcgagaactccaggccatcaggagaataacaatttttgctccgttaacatcaatatcggtcccggtgattgcgagtggtttgttgtcccagagggttattggggggtactgaatgacttctgcgagaaaaataatttaaattttctaatggggagctggtggccaaacctcgaagacctctatgaggccaacgtaccagtttatcggttcatccagcgtcccggagatctggtgtggataaatgctgggacggtgcattgggtgcaggccattggctggtgtaacaacatcgcttggaacgtggggcctctcacagcttgtcagtacaaattggccgtggaacgttatgaatggaacaagctccagtctgttaagtcaatcgtgcccatggtgcacctcagctggaatatggccagaaatatcaaggtgtctgatcccaagttatttgaaatgatcaaatactgtctacttcggacccttaagcagtgtcagaccctgagagaggcccttatcgcggcaggcaaggaaattatctggcacggccgaaccaaagaggaaccggctcattactgtagcatttgtgaggttgaagtgtttgacctgttgtttgtgacaaacgagagcaatagccgtaagacatacattgtacattgtcaagactgcgctcgtaagacttccgggaatctggagaactttgtggtgctagaacagtataaaatggaagatcttatgcaggtgtacgaccagttcacactcgcaccccctctgccgtccgcaagcagctag

SEQ ID NO: 229102 - DNA, 675 bp, synthetic construct
  misc_feature 1..675: note = Description of Artificial Sequence: Synthetic coding sequence
  source 1..675: mol_type = other DNA
taacttcaagcatatatttgtgccgttcagctcgatcacggccatgccgcagcttggatggaccttggaactttatacgaatcttgtaaccagccccaggacgcgatcaaatgttacctgaatgctacacgttcaaaaagctgttccaataccagcgcattggccgcacgcattaaatacctgcaggctcagctgtgcaatcttccccagggatccttgcagaacaagacaaaactgctcccttcaattgaagaggcctggtccctccctatccctgccgagctcacatctcggcagggcgctatgaatacagcccaacagaacacttctgacaattggagcggaggtcacgcagtctcacatcctccagtgcagcaacaggctcattcctggtgcctcactccacagaaattacagatgaggcccactggagtggcccaagtgaggagtaccggcattccaaacggaccaactgcggacagcagcctgccaacaaatagcgtgtccggccagcaacctcagcttgccctgacgagggtacccagtgtctcccagcccggtgttaggcctgcctgccctggccagcccttagcaaatggaccattcagtgctggccatgttccatgctctaccagccgaaccctaggctccacagatacaatactcattggttag

SEQ ID NO: 229103 - DNA, 516 bp, synthetic construct
  misc_feature 1..516: note = Description of Artificial Sequence: Synthetic coding sequence
  source 1..516: mol_type = other DNA
tcgctgcagaataagacaaagttgcttccttcaatcgaggaggcttggtcattacccatcccagctgaacttacaagcaggcagggtgcaatgaacacagctcagcagaatacgtccgacaattggtccggtggtcacgccgtgagccaccctccggtccagcagcaggctcacagttggtgcctgacaccgcaaaaactccagcatttggagcagctcagagcaaaccgcaacaatctaaatcctgctcaaaagctcatgctagagcaactggaatcccagtttgttcttatgcagcagcatcagatgcgccctactggcgtggcacaggtgcgatccacaggaatcccaaatgggccaactgccgacagttcactccctaccaacagcgtgtcagggcaacagcctcagctggccctgactcgggtgccatctgtgtcccagcccggtgtccgacccgcttgccctggccagcccttggcgaacgggccattttgcagaccctgttctctgtag

SEQ ID NO: 229104 - DNA, 4071 bp, synthetic construct
  misc_feature 1..4071: note = Description of Artificial Sequence: Synthetic coding sequence
  source 1..4071: mol_type = other DNA
atgaaatcctgtggtgtctctctcgccactgccgctgccgctgccgcagcttttggcgatgaggagaaaaaaatggcagccggaaaagctagtggggaaagcgaagaagctagcccctccctgactgccgaagaaagggaggcactgggtgggttggactcaaggctgttcggatttgtgaggttccatgaggatggggctcgcacaaaggcgctgctggggaaggccgtgagatgttatgaaagccttattctaaaagcggagggaaaagtcgagtccgattttttctgtcagcttggtcattttaacctgctcctcgaagactatcctaaagccctctctgcctaccagcggtattattctctgcagtctgattactggaaaaatgccgcatttctgtatggtctgggccttgtgtattttcactacaacgcctttcagtgggccataaaggctttccaggaagtgctttatgtggacccctcattttgccgcgctaaagagatacacctgaggcttggactcatgtttaaagtgaataccgattacgaaagcagcttaaagcacttccagctcgcactggtggattgcaacccctgtacactgtccaatgctgaaatacagtttcacattgcgcacctctacgagactcagcgcaagtatcacagtgccaaggaagcctacgagcagctgctgcagactgagaacttatccgcccaagtcaaggctaccgtgctgcagcagttgggctggatgcaccatactgttgacctcctcggggataaagccactaaggagtcctacgctatccaatacctccagaagtcgctggaggccgaccccaacagcggacagtcatggtattttctgggcaggtgctatagcagcataggtaaggtgcaggacgcctttatcagctataggcagagtattgacaaatccgaggcctccgcggacacgtggtgttccattggcgtgctgtatcagcagcagaaccagccaatggatgccctgcaagcgtatatttgcgcggtacaactcgatcacgggcacgcggctgcatggatggacctgggcaccctgtatgaatcttgcaatcagccacaggacgccataaagtgctacctaaacgcaacacggagtaaatcctgctccaacacctcagctctagcagccagaataaaatacctgcagaacacatctgataactggagcgggggacacgcggtgagccacccccctgtgcagcaacaggctcactcatggtgcctgactcctcagaagctccagcaccttgaacagctgagagccaaccgcaataaccttaatcccgctcagaaattgatgttagagcaattggagagtcagtttgtgctcatgcaacagcaccagatgcggccaactggagttgcccaggttaggagcacagggatccccaatggcccaaccgcagacagcagcctgcctactaattcggtgagcggccagcagcctcagctggctctcacccgcgtgccttcagtgtcacagccaggtgttcgcccagcctgtcccggtcaacccctggcgaacggacccttcagcgccggtcatgttccatgttcaacttcacggactctcggatcaaccgatacaatcctcatcggcaacaaccatattacgggatcgggaagcaacggcaatgtgccatacctacagaggaacgctctgacgttgccccacaatcgcaccaacctcacctcgtctgcggaggagccctggaagaatcagctcagcaacagtactcaggggctgcataagggccagtcttcccattccgcaggaccaaatggggaaagacctctttctagcacagggccttctcaacacctccaggctgctgggtcaggcatccagaatcagaacgggcaccctacattaccctccaactcagttacgcaaggggcagccctcaatcatcttagcagtcacaccgctacaagtggaggtcagcagggcatcactctgacgaaggaaagtaagcccagcggtaatatcctgactgtcccagaaacatcaagacacacaggagagacccccaattctacggcatctgtcgaaggacttcccaaccatgtacatcagatgaccgctgatgcggtgtgctctccctcacatggcgacagtaagtctcccggactactctcttccgataacccacaattgagcgccctgctcatgggtaaggctaacaataatgtaggtacaggaacttgtgacaaagtgaacaacatccatccagcagtgcacactaagaccgacaactccgtggccagctccccctcctctgccatttctaccgccacacccagcccaaagtcaactgaacagacaacgaccaatagcgtcaccagtctgaacagccctcactctggactccatactatcaatggtgaaggtatggaggaatctcagtcaccgatgaagaccgatttgctgctggttaaccacaaacctagtccccaaatcattccgagcatgtccgtctctatttatccgtccagcgccgaggtgcttaaagcttgccggaatctggggaagaatggtctttctaacagctccattctgctcgataagtgtcccccaccacggcctccctcttctccgtacccgcctctcccaaaggataagctgaatccaccgactccctcaatctacctagagaataaacgcgacgctttttttccccctcttcatcaattttgcacgaatcctaacaaccctgtgacagtaatccggggtctagcaggcgcactcaaactggatctgggactgtttagtactaaaactcttgtggaggccaacaacgagcatatggtggaggtgcgcacccaattgttgcagcccgcagatgaaaattgggaccccaccgggactaaaaagatttggcactgcgaatctaacaggtcacacactaccatcgcaaaatacgctcagtaccaggccagcagtttccaggaatctcttagggaagagaatgaaaagaggagtcaccacaaggatcactctgatagcgagtctaccagcagtgacaattcgggacgccgtaggaagggcccttttaagacaattaagtttggtaccaatatagacctgtccgacgacaagaaatggaaattacagctgcatgagttgacaaagcttcccgcatttgtgagagtagttagcgcaggaaacctcctgagccatgtcggtcacaccattctcggcatgaacacagtacaactgtatatgaaagtccccggttctcggaccccaggccaccaggaaaataataatttctgcagcgtgaacattaatatcggaccgggagactgcgaatggtttgtggtgcctgagggttattggggcgtactcaatgacttctgtgagaaaaacaatctgaattttctgatgggctcttggtggccaaatctcgaagacctgtacgaagctaatgtgcccgtgtatcgattcatccagcgacctggcgacctggtctggatcaatgctggtaccgtgcattgggtgcaggccatcggttggtgcaataacatcgcatggaatgtgggcccactcactgcctgccagtataaactggccgtcgagcgctacgaatggaacaaactgcagagtgtgaagagtatagttcctatggtccacctgtcctggaatatggcaaggaacatcaaagtatcggatccgaagctatttgagatgataaaatattgtcttctgcgcactttaaagcaatgtcagactctgcgcgaagccttgattgcagccggaaaagagatcatctggcacggacgaactaaagaagagcctgcacactactgctcaatatgtgaggtggaggtgtttgaccttctgtttgtgaccaatgagtcgaactctcgcaagacatatattgtgcattgtcaagactgtgccagaaagacaagcggtaacctcgagaactttgtagtactggagcagtacaaaatggaagacctcatgcaggtgtatgaccagtttaccttagcaccgccactaccaagcgcaagcagctag

SEQ ID NO: 229105 - DNA, 675 bp, synthetic construct
  misc_feature 1..675: note = Description of Artificial Sequence: Synthetic coding sequence
  source 1..675: mol_type = other DNA
atgaaaagttgtggggtgtccttagccactgcggcagctgccgcagccgctttcggcgatgaagagaagaaaatggccgctggcaaggcatccggggagtcagaggaggcaagtccgtcccttactgccgaagagcgcgaggcccttgggggactcgactcgcgattatttggctttgtgaggtttcacgaggatggcgctagaacaaaggccctgcttggcaaagcggtgcggtgctacgaaagtttgatattaaaagccgaaggaaaagtggaaagcgactttttttgtcaactcggccacttcaacttgctgctggaggattacccaaaggcactgagcgcctaccagcgatattattctctgcagtcagattactggaagaacgccgctttcttgtacggtcttggactcgtttatttccactacaatgccttccagtgggctatcaaagcctttcaggaggttctgtacgtcgatccgagcttctgcagagccaaagaaatccatttgcggctgggtcttatgtttaaggtgaacaccgattacgagtcgtccctcaaacacttccagctcgctttagtcgattgtaatccctgtactctatccaacgccgaaatacagttccacatcgcccatttatacgaaactcaggttggttgcattaccttgtag

SEQ ID NO: 229106 - DNA, 3969 bp, synthetic construct
  misc_feature 1..3969: note = Description of Artificial Sequence: Synthetic coding sequence
  source 1..3969: mol_type = other DNA
atgaagtcatgtggcgtcagtctagcaaccgccgcagctgccgctgcggcatttggcgatgaggagaagaagatggcagccggtaaggcgtctggcgaaagcgaagaggcaagcccctccctgacggccgaggagcgggaagcattagggggactggactctagactgttcggctttgttcgattccacgaagatggcgctcgtacaaaggctctgttgggaaaggccgtgagatgttacgaaagccttatactcaaggctgagggtaaggtggagtctgatttcttttgccagctgggccacttcaacctcctgttagaggattacccaaaggccttaagcgcgtaccagcggtactattcccttcagagcgactattggaagaacgctgccttcttatacggcttaggactggtgtacttccactataacgcattccagtgggccatcaaggcatttcaggaagtcctttatgtcgacccaagcttctgtagggccaaggagatccatctgcggctcggattgatgtttaaggtcaacactgattacgaatccagtctaaaacatttccagcttgccctggtagactgtaacccctgtaccctgtccaacgcagagatccagttccatatagctcacctatacgaaacgcagaggaaataccactcggccaaagaggcttatgagcagttgcttcaaacagagaacctgtcagcgcaggtgaaagcaacagtcctgcagcagctgggctggatgcatcacacggttgacctgctgggcgacaaagctacaaaggagagctacgcaatacagtatctgcagaaaagcctggaggccgatcccaattccggccagtcctggtattttcttggacgttgttacagctccatcgggaaggtgcaggatgcctttattagctaccgacaaagtatcgataagtcagaggcatctgctgacacttggtgctctattggcgtgttgtaccagcagcaaaaccagcctatggacgccctgcaagcctacatctgcgccgtgcagctggatcatggtcacgcggcagcctggatggatctcggaactctgtatgagtcctgtaatcagccacaagacgcgatcaagtgttatctcaacgccacaagaagcaagagttgctctaacacctcagctctagcggctcgaataaaatatcttcagaatacgagcgacaactggtctggtgggcacgccgtatctcatccacccgtccaacagcaagcccattcttggtgtttgactcctcagaaactacagatgaggcctacgggcgtggcacaggttcgttcaactgggattccgaacggcccaaccgccgattcatccctgcccacgaactcggtcagcggccagcagccgcagttagctctcaccagggtgcccagcgtgtctcagccaggagtgcgcccagcgtgtcctggacagcccttagccaacggtccctttagtgccggtcatgtgccatgcagcacatcaagaacactgggatccaccgatacaatcctaattggcaataaccatatcaccggtagcggctcgaatgggaacgtgccctacttacagcggaacgccctgactctgccgcataaccgcacgaatctgacaagttccgccgaagagccatggaaaaaccagctctccaattccacccagggcctccataagggtcagtcaagccatagtgctggaccaaacggggaaagaccactgagttccacaggtccatctcagcatctccaagcggcaggatccggaattcagaaccaaaacgggcatcccactttgccctcaaactctgtgacccagggtgccgcactcaaccatctttccagtcacacagctacttctgggggtcaacagggaattactctcaccaaggagagtaagcctagcggaaacatactgacagtgcccgagacgtcccgccatactggagagacgcccaatagtacagcttccgtagaagggctgcctaaccacgtgcatcagatgactgccgacgctgtgtgtagtcctagtcacggggatagcaaatcccctggcttactgtcatccgataacccccagctctccgccttactgatggggaaagctaacaacaatgttggtactgggacatgtgataaggtgaacaatatccacccagcagtgcacacaaagaccgacaacagcgtggcaagttccccctcaagcgctatatccactgccacaccatcaccaaagagtaccgagcagaccacaaccaatagcgtgacaagcttgaactccccccactcagggttgcacactataaacggcgagggcatggaagagtcccagagcccgatgaaaacggacctactcttggtgaaccataaaccaagtcctcaaattatcccatccatgtctgtcagtatctacccatcatctgctgaagtgctgaaggcctgcagaaacctcgggaagaacgggctctcgaactcatccattttattggataaatgcccgcctcccagaccacctagtagcccgtaccccccactgcccaaggataaattaaatcctcccacgcctagcatctacctggagaacaagagagacgccttctttcctccactccatcagttctgcactaatcccaacaaccccgtaactgtcattcgcggtctcgctggtgcgctcaaactcgacctgggcctttttagcactaaaactctcgttgaggccaacaacgaacacatggttgaggtccgaactcagctcttgcaacctgccgacgagaactgggatcctaccgggacaaagaaaatctggcattgcgaaagcaatagatcacacactaccatagcaaaatacgcacaatatcaggctagctcattccaggagagccttagggaggagaacgaaaaacgctctcatcacaaggatcacagcgacagtgaatctacaagcagcgataattccggcaggaggcgcaaaggacccttcaaaacaatcaagttcgggacaaacatcgatctgagcgacgataaaaaatggaagctgcagttacacgaactgaccaagctgcctgccttcgtgagagtcgtctcggctggcaacctgctatctcacgtgggacacaccatcctcggaatgaacactgtgcagctctacatgaaggttccagggagcagaacacccggacaccaggaaaataacaatttttgctccgttaatataaacattgggcctggggattgtgaatggttcgtcgtgcctgagggatactggggagtactcaatgacttctgcgaaaagaacaatctgaattttctgatggggtcttggtggccaaatcttgaggacctgtacgaagccaacgttcctgtgtataggtttatacagagacctggcgacctggtttggatcaacgctggaaccgtgcattgggtgcaggcaattgggtggtgcaataacattgcctggaatgtaggacccctgaccgcctgtcagtacaaactggctgtggagagatacgaatggaataagctgcaatccgttaaatctatagtacctatggtacacctgtcttggaacatggccaggaatataaaagtgtccgaccccaagctcttcgagatgattaagtactgcctgctacggactctgaagcaatgtcagaccttgagggaggcacttatcgctgccggtaaggaaatcatctggcacgggaggacgaaagaagaacccgcacactattgttcgatctgtgaggtagaagtcttcgacctgctgtttgtgaccaatgagtcaaacagtcggaagacctacatcgtccattgccaggattgcgccaggaaaacttccggaaacttagaaaatttcgttgtgcttgagcagtacaaaatggaggatctcatgcaagtgtatgaccaattcaccctcgctccgcctttgccctcagcaagttcttag

SEQ ID NO: 229107 - DNA, 5049 bp, synthetic construct
  misc_feature 1..5049: note = Description of Artificial Sequence: Synthetic coding sequence
  source 1..5049: mol_type = other DNA
atgcaccgggcagtcgacccacctggagcgagggctgctagggaagcattcgctctggggggtctctcctgtgcgggagcttggtcttcttgcccaccccatccccctccaagatctgcctggctccctggcggtaggtgtagcgctagcataggccagccccctctgcccgcaccgctgcctccatctcacggaagttctagtggccacccatccaagccatactacgccccaggtgctcccacgcctcgaccgctgcacgggaagttggagtccctccatggttgcgtgcaggccttactgagagaacctgctcagcccggtctgtgggaacaactcgggcagctttacgagagcgaacacgacagcgaggaggccacgaggtgctaccactccgctctcagatacggtggtagctttgcagagcttggaccccgaatcgggcgtctgcaacaggctcagctgtggaattttcacaccgggtcatgccagcatcgtgccaaagtcctgccaccactggagcaggtatggaacctgctgcatttagaacacaaacgcaattacggagccaagcggggaggcccacctgttaaacgcgctgctgaacctccggttgttcagcctgttcccccagccgcactcagcggcccttctggtgaagaggggttgagccccggtggtaaaaggagacgaggttgtaactccgagcagactggccttcccccaggtctacccctgcctcccccaccattgccccctcctcctcctccccctccaccgcctccgccaccacttccagggttagctacttccccaccattccaactcacgaaaccaggactctggtctacccttcacggagacgcttgggggccagaaaggaaaggtagcgcccctccggaaagacaagagcagcggcactcccttccccatccatacccatacccagctccagcctacacagcccatcccccaggccaccgtctggttcctgcagcccctccagggcctgggccaagaccgcctggcgcagagagccatgggtgtctgcctgcaacaagacctcccggatccgatctccgcgaaagtagagtgcagcgctccaggatggatagttccgtcagccccgctgccacaacagcctgcgtgccctacgccccaagccgcccaccgggactgccagggaccaccacatcctcatctagttcctccagcagtaatactggccttagaggcgtggaaccgaacccaggcatcccaggcgcagaccattaccaaacaccagccctggaagtctcacaccatggcaggttggggccttccgcccactcatcccgtaagccattcctgggagcacctgccgctacacctcacttaagtctgcccccaggacccagcagtccccctcctccgccatgtcctcgattgctcaggccaccaccaccccctgcttggctcaagggtccggcatgtcgagccgctagagaggacggagagatactcgaggagctgtttttcggtaccgaaggcccaccccgacctgctcctccccctttgccacaccgcgaagggttcctcggacctcctgcatctcggttttccgtgggtacacaagatagccatacgccccctacaccccctacacccactacatcgtcgagcaacagcaactcaggttcccatagctcttcacccgctggaccagtttcttttccccctcctccctacttagctcgaagcatagatccccttccgcgtcccccatcccctgctcagaaccctcaagatccgcctctggttccactgactcttgctcttccccctgcccctccatccagctgccatcagaatacctcgggatccttccggagaccagaatctccacgacccagggtcagctttcccaaaacaccggaggtgggccctgggccacctcccggtcctttatccaaggcacctcagcctgtgccccctggcgttggagagcttcctgccagaggccctagattatttgactttcccccaacccccttggaggatcaatttgaagaaccagcagaattcaagatcttaccagacggtctcgctaacatcatgaagatgctggatgagtccattagaaaagaagaggagcagcaacagcatgaggcgggagtggccccacaacccccactgaaggagccgttcgccagtctccagtccccatttcctactgacacagccccaactaccactgctcccgctgtagctgtgacgactactaccacaaccactacaaccacgactgccacccaggaggaggagaagaagccacccccagctctgcctccaccccctccgctggcaaagttcccaccaccttctcagccacaaccacctccaccaccccctcctagtcctgcctctcttctcaagtccctggcatctgttttggaaggtcaaaaatattgctacaggggaacaggagccgctgtgtcaacgcgtcctggccctctgccgaccactcagtattctcctggaccacctagcggggcaaccgctctgccgccaacttctgccgctcctagcgcacaaggatcaccccagccctctgcctcctcgagttctcagttttcaacctctggcggaccatgggctcgggagcgcagagcaggcgaagaacctgtgccgggacccatgactcctacacagccgcctccgccactctcactgccccctgcccgttcagaatccgaagtcctggaggaaatatcacgcgcttgcgaaactctggtggagcgggttggcaggtctgctacggaccccgctgatcctgtcgacaccgccgaacctgccgattcagggacagagcggttactcccccctgctcaggccaaagaggaagccggaggcgtcgccgcagtgagtgggagttgtaagcggagacagaaagagcatcaaaaggagcaccggagacacagacgggcttgtaaagattccgtaggccgaagacccagagagggcagggcaaaggccaaagctaaagtgcccaaggagaagtccaggcgagtgctgggtaaccttgatctgcaatccgaggaaatccagggtagggagaagagtcgacccgacctgggtggagccagcaaggccaagcccccaactgcccctgccccacccagtgccccagcaccaagcgcacagcccacacccccatccgctagtgtacctggcaagaaggcacgcgaggaggcccctggaccccctggcgtctctcgagcagacatgctgaaattgcggagtctgagtgaaggaccacctaaagagctaaaaattcgattgattaaggtggagtctggcgacaaggaaacctttattgccagtgaggtggaggaaagaagactaaggatggccgatctgacaatatcgcactgcgctgctgacgtcgtgcgggcatcaaggaatgctaaagtgaaggggaagttccgagagagttatctctctcctgcccagtccgtaaaacccaagatcaacaccgaggagaaactccctcgggagaaacttaatccccctacgccttcaatctacctggagagcaagcgagacgctttcagccccgtgctgctgcaattttgtacagacccacgtaaccccataaccgtcatcagaggactggcgggatcactgcgactcaacttggggcttttcagcaccaagactctggtcgaagcatccggtgagcatactgtagaggttcggacccaggtgcaacagcccagcgacgagaattgggacctgacaggcacgcggcaaatttggccatgtgaaagctctcggagccacactaccatcgcaaaatatgctcaataccaagcgtccagcttccaggagtccttacaagaggagaaggagtcagaagatgaggaatccgaagaaccagactctacgaccggtacccccccatcctctgcccctgacccaaagaatcatcacatcattaagttcggtactaatattgatctgtccgacgcaaagcgttggaaaccgcaactgcaggaactcttgaagctgcccgcatttatgagggtcacaagcactgggaacatgctgagtcacgtagggcataccattctgggcatgaacactgttcagctctatatgaaggtccccggatccagaactccaggacatcaagaaaacaataatttctgtagcgtgaacattaatattggcccaggtgattgcgaatggtttgccgtccacgaacactactgggagaccattagcgctttctgtgatagacatggggttgattacttgacgggctcctggtggcctatcctggatgacttgtacgcttctaacattcctgtctaccgcttcgtgcagaggccgggagatctggtgtggattaacgcgggaacagtgcattgggttcaggccaccgggtggtgcaacaatatcgcgtggaacgttggtcccctgacagcgtaccagtatcagttggcgctcgaaagatatgaatggaacgaagtgaaaaatgttaagtccatcgtgccgatgatccatgtcagctggaacgttgcacgcaccgtgaaaatatctgacccagatctcttcaagatgataaagttctgtctgcttcagagcatgaagcattgtcaggtccagagagaatctctggtgcgggctggtaagaagatcgcataccagggccgtgtaaaggacgaaccagcatattactgtaatgagtgtgatgtggaggtgttcaacatactgttcgtgacaagcgaaaatggctctaggaacacatacctggtgcattgtgagggatgcgcccgacgacggtcagcgggacttcagggtgtggtcgtgttggagcagtataggaccgaagagcttgctcaggcgtatgacgccttcacactagtccgcgctcgtagggcacgaggacagcgtcggagagctctgggccaggctgcgggaactggatttggatctcctgcagcgccattccccgaaccccctcctgcgttttcccctcaggctcccgcatccaccagccgctaa

SEQ ID NO: 229108 - DNA, 4932 bp, synthetic construct
  misc_feature 1..4932: note = Description of Artificial Sequence: Synthetic coding sequence
  source 1..4932: mol_type = other DNA
atgcaccgcgcagtggacccccctggcgcacgagcggctcgagaagcctttgctctcggtggcctgtcctgcgccggagcatggtcttcatgccctcctcacccccctcccaggagtgcttggttaccaggaggcaggtgtagtgcctccatcggccagccccctcttccagcgcctctgcccccatcccacggaagctcatccggacaccccagcaagccatactatgcaccaggcgcacccacgccgcgacccctccatggcaagctcgagtccctccatggatgtgtgcaagcgctactcagggagccagcccaaccaggcctctgggaacagctgggtcagttgtatgagtctgaacatgactctgaggaagcaacgaggtgttatcacagcgccctacgatacggtggatctttcgccgagctgggcccaaggatcggtaggttacagcaggcccagctctggaactttcacaccggaagttgccagcatagggccaaggtgctgccaccactggaacaggtttggaatttactccaccttgagcataagcgaaattatggggctaaaagaggaggtcctcctgtgaagagagctgctgaacccccagtggtgcagcccgtgcccccagctgccttatcgggaccgtctggcgaggaaggcctttcccctggaggcaagcgtaggaggggttgcaattccgaacaaacaggcttaccaccgggtctgcctctcccaccgcctcctttgcccccaccacctccaccaccccctccacctccgcctcccctgccagggctcgcaacgtccccaccttttcaactgaccaaacctggtctttggagtaccctccacggtgatgcttgggggcctgagcgcaagggctcagctccaccagaacggcaggaacagagacattcactgccccacccctacccttatcctgcgccagcttatactgcgcacccccctgggcacagactagtgccagctgcgccacctggccctggacctcggccacccggagccgaaagccacggatgcctccctgcaacacgaccacccggaagtgatctgagagaatcgagagtgcagcgttcgcggatggactcgagtgtgtcccctgctgcgactactgcttgcgtcccatacgctcctagtaggcctcccggactgcctggcactaccacctcctcatcatcttcgtcctcttccaacacaggcctccgtggagtggagcctaaccccggaatccctggcgctgatcattaccagacccccgctctggaggtgagtcaccatggcaggctgggccctagcgcccatagctcaaggaagccattcttgggggcacccgctgctactccccacctgtcactcccacctgggccaagcagcccccctccaccaccatgccctcggctgcttaggcctccacccccaccagcatggctgaagggccctgcctgccgcgctgctcgtgaagatggggagatacttgaagaacttttcttcgggaccgaaggccctcctcggccagctccgccaccactgcctcatagggagggcttccttggacctccagcgtccagattctcggtcggtactcaagattcacatactcctcctactccaccaacacctactacatcttccagtaactctaattctggaagccactcctcatcacctgcgggacctgtcagctttccccctcctccctatttggcgcgatctatagatcctctcccacgcccacccagtccagcgcagaacccccaagaccccccattggtgcctttgaccctggcacttcctccggcaccacccagttcttgccatcagaatacttcaggctcattccgtagacctgaatcccctagacctcgagtgagtttcccgaaaacgccggaagtcggccctggccctccaccgggacccctgagtaaagctcctcaaccagtgccacctggcgttggcgagctgcctgcgagaggaccccgtctgttcgatttcccaccaaccccacttgaagatcagttcgaggaacccgctgagtttaaaattctccctgatgggctcgcaaatataatgaaaatgctggatgaatccatcaggaaggaagaggaacagcagcagcacgaagcaggtgtagctccgcagccacccctaaaagagccattcgcttctctgcagtcgccgtttcctactgatactgctcccacaacaaccgccccagccgtcgcagtgactacaacaacaacgacaacaaccacgacaactgctactcaagaggaggaaaagaagccgcctccagcgctgccaccgcctccccctttggccaagtttcctcccccaagccaacctcagcccccacctccccctcctccatctcctgctagtctgcttaagagcctggccagcgtactggaaggacagaaatactgttatcgtggaaccggggctgcagtttctactaggcccggacctctccctacgactcaatactctcctgggcctcctagtggggctaccgctctgccccctactagcgcagctccgtccgcccaggggtcacctcagccttccgcttctagcagctctcagttttccacatccgggggtccttgggccagggaacgaagggctggtgaggagcctgtgcccggacctatgacccctacgcaacccccaccaccgctgtcacttccacctgctcggagcgagagcgaggtgctggaggaaatttctcgtgcttgcgagactctggtcgaaagggtgggcagatcagccactgatccagcggaccctgtggacactgccgagcccgctgactctggaaccgagagactgctcccacccgctcaggccaaggaagaagctggaggggtagcagccgtgagcggatcctgcaaaagaaggcaaaaggagcaccagaaagagcaccgccgtcaccgcagagcgtgtaaggattccgtagggagaagaccccgtgagggacgggcaaaagccaaagccaaagtccctaaggaaaagtcccgacgggtcctcggcaatctcgatctgcagtctgaggaaattcaaggaagagaaaaatccaggcctgacttgggaggcgcttcaaaagctaagccacccacggcccctgctcccccaagcgctcctgccccaagtgctcagcctacaccacctagcgcgagcgttcctgggaagaaggccagagaagaggctcccggaccaccgggagtgagcagggcggatatgttgaaactgcggagcctgagtgaaggaccccctaaggagctaaagataagactgattaaagtggagtctggtgacaaagaaaccttcatcgcgtcggaggtggaggaaaggcggctaagaatggccgatctgactatcagtcactgcgcggctgatgtggtccgagcctcccggaacgcaaaggtgaagggcaagttccgcgaatcttacctgagtcccgctcagagcgtgaaaccaaaaatcaataccgaggaaaagcttccacgggagaaactaaaccccccaactccttccatctacctggaatcgaagagggatgctttctctcccgttctgctgcagttctgcacagaccccaggaatccaataactgtgattcgaggcctcgccggaagcctgcggctcaatctcggtctgttctcaacgaagacacttgtggaggcctcaggcgagcataccgtggaggtcaggacacaggtccagcagccctctgatgagaattgggacctgacaggtacccgccagatctggccctgcgaatcttcaagatcccacaccacaatcgcaaaatatgcacaatatcaggcaagcagctttcaggaatcattgcaggaagagaaagagtccgaggacgaagaatccgaggaaccagactccaccaccggaacaccgcctagctcggctccggaccccaagaaccaccatattattaagtttggcaccaacatcgacttgagcgatgctaagaggtggaagccgcagctgcaggaattacttaagctccctgcatttatgagggttacctctacaggaaatatgctcagtcacgtgggtcatactattctgggaatgaataccgtccagctgtacatgaaggtgcctggttcacgaacacctggtcaccaggagaataacaacttctgttcagttaatatcaatatcggacccggagactgtgagtggttcgctgttcacgaacactattgggagacaatttcagccttctgtgaccgccatggagttgattatctgacaggatcttggtggccaatcctggatgatctctacgcctccaatatccctgtctataggtttgttcagcgcccaggagaccttgtctggattaacgcaggtacagtgcattgggtacaggcaacagggtggtgcaataatatagcctggaatgtgggccctctcacggcatatcagtatcagcttgcgctcgagaggtatgagtggaacgaggttaaaaacgtaaagagtattgtccctatgatccacgtgtcatggaacgtggccaggacagttaagattagcgatcctgacctcttcaaaatgattaagttttgtctgctacagagtatgaagcactgccaagtccagagggagagcctggtcagggcagggaaaaaaatcgcctaccaggggcgagtgaaggatgaaccagcatactattgtaatgagtgcgacgtggaggtgtttaacatcctcttcgtaacctccgaaaatggttcgaggaatacctacctggttcactgtgaagggtgcgcccgacggagaagtgctggattacagggcgtcgtggttcttgagcagtatcgaaccgaggagcttgcccaggcatatgatgcgtttaccctggcccctgccagtacctcgcgttag

SEQ ID NO: 229109 - DNA, 1245 bp, synthetic construct
  misc_feature 1..1245: note = Description of Artificial Sequence: Synthetic coding sequence
  source 1..1245: mol_type = other DNA
atgcattcccgaggcagagagattgttgtcctactcaatccatggtccatcaacgaagctgtgtcatcttactgtacttacttcattaaacaagacagcaagtcgtttggaattatggtgtcgtggaaaggtatctacttcattttgactctcttctggggctcctttttcgggtcgatctttatgttgagcccttttcttccactcatgtttgtcaacccatcttggtaccgctggatcaacaataggctggtcgccacatggctaacactgcccgtggctttgcttgagaccatgttcggggtgaaggtgattatcaccggagacgcctttgtgcccggtgagcggagcgttatcataatgaatcaccggacaagaatggactggatgttcctgtggaattgccttatgaggtacagctatctgaggcttgagaagatctgcttgaaggccagtctcaagggggtaccgggttttggttgggccatgcaggccgctgcttacatcttcattcataggaaatggaaggatgataaaagtcacttcgaggacatgattgactacttctgcgacatccacgagccccttcagctgctgatttttcctgaaggcactgacctgaccgaaaacagtaagagtcgctcaaatgccttcgccgagaagaatgggttgcaaaaatatgagtacgtcctgcatccacggacaaccgggttcacgtttgtcgtggaccggcttcgcgaggggaagaaccttgacgccgtgcatgacatcactgtggcctacccacacaatattcctcagagcgagaaacacctgctacagggggatttccctagggagattcacttccatgtgcaccgttatcccattgacacactcccgacctcaaaagaggatctacaactttggtgtcataaacgatgggaggagaaagaagaacgactcaggagtttctaccaaggcgagaaaaatttctattttaccgggcagtcagttatacccccatgtaagagtgagttgcgcgttctcgtagtcaagctgttgagcatattgtactggacactattttctcctgccatgtgtttgttgatctacctgtatagcctcgtgaagtggtactttataataaccatcgtcatctttgtgctgcaggagaggatcttcgggggactcgagatcatcgagctggcctgctatagattgctacataagcagcctcaccttaatagcaaaaagaatgaatag

SEQ ID NO: 229110 - DNA, 927 bp, synthetic construct
  misc_feature 1..927: note = Description of Artificial Sequence: Synthetic coding sequence
  source 1..927: mol_type = other DNA
atgcacagtagaggcagggaaattgtcgtcctgctcaacccgtggtccataaacgaagctgttagctcttattgtacctatttcatcaaacaagactccaaaagttttggcataatggtcagttggaaaggtatctacttcattctgactctcttctgggggtccttctttgggtcaatctttatgctaagcccatttctaccactgatgtttgtgaatccttcctggtaccgatggatcaacaatcggctcgttgcaacctggttgactttgcccgtggccctacttgagaccatgttcggcgtgaaagtcattataacaggcgatgcctttgtcccgggagagagaagtgtgatcattatgaaccacagaacaagaatggactggatgttcttatggaattgtcttatgcgctactcctacttacggctggagaagatttgtctcaaggcaagcctgaagggggtcccaggctttggatgggccatgcaggccgctgcttacattttcatccacaggaaatggaaagatgataagtcacacttcgaagacatgattgattacttttgcgacatccatgaaccgctgcaactcctcatcttccctgagggcacggacctcactgagaactcaaagtccaggtctaatgcatttgccgagaagaacggactgcaaaagtatgaatatgtgcttcatccccgaaccacaggattcacattcgttgtggaccgtcttagagaaggtcggaggcaatcagaggggagtaagggccctttacagggggaactgcagatcaccgcacaaggaaatcagcggggacataagcagatggagaagcattcaatgttgatggactggaagaaccaatatcgagagataggtcatactgcacagagtaacctgcagatacagtgctattcgcactag

SEQ ID NO: 229111 - DNA, 927 bp, synthetic construct
  misc_feature 1..927: note = Description of Artificial Sequence: Synthetic coding sequence
  source 1..927: mol_type = other DNA
atgcattccagaggccgagaaatagtcgtgctgcttaatccctggagcatcaatgaggcagtgtccagctattgcacgtatttcattaagcaggatagcaaatctttcggtatcatggtttcctggaagggtatctacttcatactgactcttttctggggatcttttttcggctccatattcatgctgagtccctttctgcctctgatgttcgtgaacccaagctggtacagatggatcaataaccgcctggtggccacctggttgaccctgcccgtcgccctgcttgagaccatgttcggcgtcaaggtgataattaccggagatgccttcgtgcccggtgagcggagcgtgatcatcatgaaccaccggaccaggatggactggatgttcctgtggaattgcctgatgcgttacagctacctccgccttgaaaaaatatgcctgaaagctagcctgaagggggtgccaggcttcgggtgggccatgcaggccgctgcgtatattttcatccatcgcaagtggaaggacgacaagtcacactttgaggatatgatagactatttctgtgatatccacgaacctctgcaactgctcatcttccctgaagggactgatctcacagagaacagtaagtcacggtcaaacgcatttgctgagaaaaacggactgcagaagtatgagtacgttctgcaccctcgaaccaccggtttcacatttgttgtcgacaggttgcgcgagggccgaaggcaaagtgagggctcaaaagggccacttcagggagaactgcagatcacagcacagggaaaccaacgcggtcataaacagatggaaaagcattccatgctgatggattggaagaaccagtatagggaaatcggacacaccgcacagagcaatctacagatccagtgctactctcactag

SEQ ID NO: 229112 - DNA, 1131 bp, synthetic construct
  misc_feature 1..1131: note = Description of Artificial Sequence: Synthetic coding sequence
  source 1..1131: mol_type = other DNA
atggtatcgtggaaaggcatctatttcattctgactctgttttggggtagcttttttggaagcatcttcatgctgtctcctttcctcccattgatgttcgtgaaccctagctggtaccgctggattaacaacagacttgtagccacctggttgactttacctgtagcattactcgaaacaatgtttggagtgaaagtgatcatcactggagatgcttttgtgcccggtgaaaggagcgtgatcatcatgaaccatcgcactagaatggattggatgttcctgtggaattgtctgatgaggtatagctatctccgcctagaaaagatatgtctcaaagcctcattaaagggggttccaggatttggttgggctatgcaggcggcagcctacatctttatccataggaaatggaaagatgataagagccacttcgaggacatgattgactatttttgcgacatccatgaacctctgcagcttctgatctttcctgagggcactgaccttaccgaaaattccaagagcagatctaacgcctttgccgagaaaaatgggctccagaagtatgagtatgtgctacacccacggaccacaggatttacctttgtggtggaccggctcagagagggcaaaaacctggacgcggtccacgacattacggtcgcttatccccacaatattcctcagtcagagaagcatttgctacagggtgatttccccagggaaattcattttcatgtacacaggtacccgattgatactctgccaacttccaaagaggatctccagctctggtgccataaaaggtgggaggaaaaagaggagaggttaaggagcttttaccagggcgagaagaatttctactttaccggccagagtgtgattcccccatgtaagagcgagctgcgggtgctggttgtgaaattgctgtcaatcctatattggaccctgttctctcccgctatgtgtttactgatttacttgtactccttggttaaatggtacttcatcatcacaattgtgattttcgtgctccaagaacgcatctttgggggactggagattattgagctcgcatgctatcggctcctccacaagcagccccacctgaattccaaaaaaaacgagtag

SEQ ID NO: 229113 - DNA, 993 bp, synthetic construct
  misc_feature 1..993: note = Description of Artificial Sequence: Synthetic coding sequence
  source 1..993: mol_type = other DNA
atggtaagttggaagggcatttattttatcctgactctattttggggttctttctttgggagcattttcatgctcagtccgttcctgcctttgatgtttgttaaccccagctggtacagatggattaataaccggcttgtggctacctggctgacactgccagtagcccttttagagaccatgtttggagtcaaagtcatcatcactggggatgctttcgtgccaggggaacgctcagtcattatcatgaatcatcgtactagaatggactggatgttcctgtggaattgtctgatgcgctatagttatttaagactggaaaaaatatgcctcaaggcaagcttaaagggcgtccctgggtttggatgggcgatgcaagccgctgcttacatttttattcatcggaaatggaaggacgataaatcccactttgaagacatgatagactacttctgcgatattcatgagccgcttcagttactgatctttccagagggcacagacctcactgagaatagcaagtcccggagtaatgcctttgctgagaaaaatggcctacagaagtacgaatacgtgcttcatccgaggaccactgggttcactttcgtggtagataggctgcgcgaagggaagaatcttgacgctgtccacgatattacagtcgcttacccacacaacattcctcagtcggagaaacacttgctgcagggagacttcccacgggagattcatttccacgtgcatagatatcccatcgatactctgccgacgtctaaggaggacctccagctgtggtgccataaaagatgggaggagaaagaggagaggttacgtagtttctaccagggcgagaagaacttttatttcaccggtcagagcgttataccaccctgcaagagtgagcttagagtgctggtggttaagctttacacggtactcgaccctgtacagccttgcaatgttcccacccatatcttcgtacagagttgttag

SEQ ID NO: 229114 - DNA, 462 bp, synthetic construct
  misc_feature 1..462: note = Description of Artificial Sequence: Synthetic coding sequence
  source 1..462: mol_type = other DNA
atgcactcccgcggtcgcgagattgtggtgctgctgaacccatggagcataaatgaagctgtatcaagttactgcacctactttattaagcaggatagcaagtccttcgggatcatggtatcctggaaagggatatattttattctcaccctcttttggggttctttcttcgggagtatcttcatgctgtcaccttttctacctttgatgttcgtaaacccatcatggtacaggtggatcaacaacagactcgtggcaacctggcttactctacccgtggcgttgttggagacgatgttcggagtaaaggtaataataactggtgatgcatttgtgcccggagagcgctctgtcatcatcatgaaccaccggacacgtatggattggatgttcctttggaattgcctgatgagatatagctatctgaggctggaaaagatatgcctgaaagcctcgctttag

SEQ ID NO: 229115 - DNA, 1131 bp, synthetic construct
  misc_feature 1..1131: note = Description of Artificial Sequence: Synthetic coding sequence
  source 1..1131: mol_type = other DNA
atggtgtcctggaaaggcatctactttatcttgaccctgttctggggcagcttttttggttcaatttttatgctcagcccgtttcttccactcatgttcgtcaacccctcatggtacagatggatcaataaccggctggtggcgacatggctgaccctacctgtggccctgcttgagactatgttcggagtgaaagtgattatcactggtgacgctttcgtaccgggagagcgctcagtgatcattatgaaccaccgcacccgaatggattggatgttcttgtggaattgtctgatgcggtatagttacttacgactagagaaaatatgcttgaaggcttcccttaagggagttcctggattcggctgggccatgcaggcagccgcatatattttcatccatcgcaagtggaaagatgataaatcccacttcgaagatatgatagattacttctgtgatatccacgagcccctgcagctgctgatctttccagaggggaccgatctgaccgaaaattcaaaaagccgctccaatgcttttgctgagaagaatggattacagaaatatgagtacgtcctgcaccctaggaccacaggctttactttcgttgtggacagactgcgggagggtaagaatctggacgctgtccacgacatcaccgttgcatacccacacaacatccctcagagcgagaaacacctattacaaggagactttccacgtgagatccactttcatgtgcatcgataccctattgacaccctcccaacctcgaaggaggacctccagctgtggtgtcataaaagatgggaggagaaggaggagcggctgcgcagcttttaccagggtgagaagaacttctatttcaccggacagtcagttattccgccatgcaagtcagaattgcgcgttctcgtcgtgaaactcctgagtatactgtattggacattgttctcccccgctatgtgtttgctgatctatctttacagcctggttaagtggtattttattataacaatagtaatcttcgtgctgcaagagagaatctttggaggattagagataatcgagctggcctgttaccggcttcttcataagcaaccccacctgaacagcaaaaaaaacgaatag

SEQ ID NO: 229116 - DNA, 1095 bp, synthetic construct
  misc_feature 1..1095: note = Description of Artificial Sequence: Synthetic coding sequence
  source 1..1095: mol_type = other DNA
atggctgcaatctctacctctattccggtgatctctcagccacaatttactgccatgaacgagccccagtgcttttacaatgaaagcatagctttcttctataacagaagtggaaagcacttggcaacagaatggaacaccgtcagcaagctggtgatggggctgggaataaccgtctgcattttcataatgctcgctaatttactagtgatggtcgccatctatgtgaacagacggtttcatttccccatctattacttaatggccaacctggctgcggcagatttcttcgcagggctcgcctacttttacctgatgtttaacacaggcccaaataccagaagactcactgtgagcacatggcttttgcggcaaggccttatcgacacgtctctcactgccagtgtggccaacctgctggccattgccatcgaaaggcacataactgtgttccgcatgcagcttcacacacgcatgtccaaccgcagagttgtcgtggtaatcgtggtgatttggaccatggccattgtgatgggagccattcctagcgtgggctggaattgcatatgtgacatcgagaattgctcgaacatggcacccctgtactcagactcatacttagtgttctgggccatttttaacctcgtgacctttgtggttatggtcgttctgtatgctcacatctttggatacgtcagacagaggaccatgagaatgtctcgtcacagctctggacccaggaggaatcgtgataccatgatgtctttactcaaaacagtagtgatcgtgctgggcgcttttattatctgctggacccccggtttggtactgctcttactggatgtgtgctgtccacagtgcgacgtcctcgcatacgagaagttcttccttctgttagctgagttcaactccgcaatgaaccctataatttactcgtatcgcgacaaggagatgtccgccacatttagacagattctatgttgccagcgttcggagaatcccaccggtcccacggaagggtccgacagaagcgccagctcattaaaccatactatactggccggtgtgcatagcaacgaccactcagttgtttag

SEQ ID NO: 229117 - DNA, 1095 bp, synthetic construct
  misc_feature 1..1095: note = Description of Artificial Sequence: Synthetic coding sequence
  source 1..1095: mol_type = other DNA
atggcagcgatttccacctctatccccgtgattagtcaaccccagtttaccgcgatgaacgagcctcagtgtttttacaacgaatcgatagccttcttttataatcggtcgggcaagcatttagcaacagagtggaacaccgtgagtaagttggtgatgggcctggggataaccgtctgcattttcattatgctagctaacctgcttgtgatggtggctatttacgtcaatagacgatttcactttcctatctattatctgatggccaacctggcagctgccgacttcttcgccggtctggcctacttctacctgatgttcaacactggccctaatacaaggaggttgactgtgagcacttggttacttcggcagggccttatcgacaccagcctgacagcgtccgttgctaacttgctcgctattgcaatcgaacggcacattaccgtcttccggatgcagctgcatactcggatgtcaaatcgcagagtcgtggttgtcatagtggttatctggactatggctattgtaatgggtgctattcccagtgtcggttggaactgcatctgcgacattgagaactgctcgaatatggcccctttgtacagtgatagttatctggtattctgggccatcttcaacttagtgactttcgtcgtcatggttgtcttgtatgcacacattttcggatacgtgagacagagaactatgcggatgagccggcattcctctggacccagacgaaatagggatacgatgatgtccctgctgaaaacagtggttattgtcctcggggcatttatcatctgttggactcctggactcgtgctcttgctgttggacgtgtgttgcccacaatgcgacgtactcgcttacgagaagtttttcctgctgctggccgagttcaattctgctatgaacccgatcatctattcatatagggataaagagatgtcggcaactttcagacaaatcctgtgctgccagcgctcagaaaatcctaccggcccaaccgaaggatcagatcggtccgcaagttctttaaatcacactatcctcgcgggagtccactccaacgatcactcagtggtctag

SEQ ID NO: 229118 - DNA, 1095 bp, synthetic construct
  misc_feature 1..1095: note = Description of Artificial Sequence: Synthetic coding sequence
  source 1..1095: mol_type = other DNA
atggccgcaatttctacatctatccccgtcatctcacagcctcagttcaccgccatgaatgagcctcagtgcttttacaacgagagtattgcctttttctacaatagaagtggaaagcatctggcaacggagtggaacacggtgagcaaactcgttatggggctcgggattacagtgtgcatttttatcatgcttgcgaatcttctcgtaatggtggccatctacgtgaacaggaggttccactttcccatttattatcttatggcgaatcttgccgcagctgacttttttgccggtctggcctacttctacctgatgtttaatacaggcccaaatactaggcgcctgaccgtctccacctggttactacgccagggactgattgacaccagcctaacagctagcgttgccaatctgctcgccatcgcaatagagcgccacatcaccgtcttccgcatgcagctgcacacaagaatgagcaaccggagggtggtggtggtgattgtcgtgatctggaccatggccatcgtgatgggtgccattcccagcgtaggctggaactgcatctgcgatatcgaaaattgctcaaatatggcgcctctgtatagtgactcatatcttgttttctgggcaatttttaacttggtcacattcgtggtgatggttgtgctgtacgcccacatattcggatatgtgagacagagaacaatgcggatgtcccggcactcatctgggccacgacgaaaccgtgacaccatgatgtcgctccttaaaaccgttgtgatcgtcctgggcgcatttatcatttgctggacccctgggctagtgcttttactgttagacgtctgctgtccgcagtgtgatgttttggcttatgaaaagttttttctcctgctggccgaattcaactctgctatgaatcccattatatatagctaccgagacaaagagatgtctgcaacttttagacagatcttatgttgccagagaagcgagaatccgacggggcctaccgaggggtccgataggagcgccagcagcctcaaccacactatcttggctggagtccacagtaacgaccattcggtagtctag

SEQ ID NO: 229119 - DNA, 549 bp, synthetic construct
  misc_feature 1..549: note = Description of Artificial Sequence: Synthetic coding sequence
  source 1..549: mol_type = other DNA
atggccgctatatctacctctataccagtcatctctcagccgcagttcacagcaatgaatgaacctcagtgcttctacaacgagtcaatagcattcttctacaacagatctggaaagcatctagccaccgagtggaatactgtgtccaagctggtcatggggctcggaattactgtctgtatctttattatgctggccaacctgttagttatggtggccatttacgtgaaccgcaggttccactttcccatatactatctcatggctaacctcgcagcagctgatttctttgctgggcttgcgtacttttatctaatgttcaatacggggccaaatacacgccgtcttaccgtatctacctggctcctcaggcaagggctgatagataccagtctgacggccagcgtagccaacctgctagcaattgccattgaaaggcatattactgtattccgaatgcagcttcataccaggatgagtaaccgacgcgtggtcgtggtgattgtagtgatttggactatggcgattgtaatgggtgctattccgtag

SEQ ID NO: 229120 - DNA, 1041 bp, synthetic construct
  misc_feature 1..1041: note = Description of Artificial Sequence: Synthetic coding sequence
  source 1..1041: mol_type = other DNA
atgaatgagccacagtgcttttataatgaatctatcgccttcttttataatcggtctgggaaacatctggccactgaatggaacaccgtgtctaaactggttatggggcttggaattaccgtgtgtattttcattatgctggctaacctgttagtgatggtggcaatctacgtgaacaggcgttttcattttcccatttactatctcatggctaatctcgccgctgctgattttttcgcgggtttggcttatttctatctgatgttcaatacggggcctaacacaaggcggcttactgtttctacatggttactaagacagggcctgatcgacaccagtttgacggcctccgtcgcaaacttgctcgccatcgccatcgaacgccacatcaccgtgttcagaatgcaactacatacacgaatgtcaaatcggagagttgtggtcgtgatcgtggtcatatggacaatggctatagtcatgggtgccattcctagcgtggggtggaattgcatttgcgacattgagaattgtagcaacatggccccactttactctgatagctatctagtcttttgggctatcttcaatctggttacgtttgtcgtcatggttgtgctgtatgcacacattttcgggtacgttaggcaaaggaccatgcgcatgagtagacactcttcaggaccacgtagaaaccgggatactatgatgagcttactcaagacagtggtcatcgtgctgggcgcattcatcatctgctggacccctgggctcgtgcttttgctactggacgtatgctgcccacagtgcgacgtgctcgcgtatgagaaattttttttgctgttggctgagttcaacagtgccatgaaccctatcatttatagttaccgagacaaagaaatgagcgccacgttcagacaaattctctgttgccagagatccgaaaacccaaccggaccaactgaaggctctgaccgctcagctagcagcctaaatcatactattttagccggagtccatagtaacgatcatagtgtagtctag

SEQ ID NO: 229121 - DNA, 1098 bp, synthetic construct
  misc_feature 1..1098: note = Description of Artificial Sequence: Synthetic coding sequence
  source 1..1098: mol_type = other DNA
atggaggagggagcccagcggtccggagctctgggagccccacaccagttcacagctatgaatgagcctcagtgcttttacaacgagtccatcgcatttttttataatcgttctgggaaacatctcgccaccgaatggaatactgtgtctaagctcgtgatgggtctggggatcaccgtttgcatattcatcatgctggctaacttgctagtcatggtggctatttacgttaatagaaggttccatttcccgatctactatctgatggctaacttggccgcagctgatttttttgcgggacttgcctatttctatcttatgtttaatacgggaccgaacacgaggagactgactgtcagtacctggctgctgcgacagggactgatcgacacatctctgacagcctccgtggcaaacctccttgccatcgcaatagagcgacatatcaccgtgttcagaatgcagctgcacacacggatgagcaaccggagagtggtggtggtcatcgtggtcatctggacaatggccatcgtcatgggtgcgatacctagtgtgggatggaactgcatctgtgatatcgaaaactgttcaaacatggcgccactatactcagactcatacctcgtgttctgggctatctttaatctggttacatttgtagtgatggtggttctgtacgcccatattttcggctacgtccgacagagaacaatgcgtatgtcacggcattcctcgggaccccgacgcaatagggataccatgatgtccctgctgaagaccgtcgtaatcgtgctcggagcttttatcatctgttggacccctggcctagtgctgctcctccttgatgtatgttgcccccagtgcgatgttctggcatacgagaaattttttttgcttttggccgagtttaacagcgcaatgaaccctatcatctattcctatagagataaagaaatgtcagctacctttcgccagatcttgtgttgccagcggtctgagaatcctactgggccaacagagggaagtgatcgaagcgcctcttccctgaatcatacaatcctcgctggggtgcactccaacgatcactccgttgtttag

SEQ ID NO: 229122 - DNA, 1098 bp, synthetic construct
  misc_feature 1..1098: note = Description of Artificial Sequence: Synthetic coding sequence
  source 1..1098: mol_type = other DNA
atgcttctgctgctgatccctgctcactctagtgttctagagaatgaatttaccgctatgaacgagccgcagtgtttctacaatgaatccatcgcttttttttataatcgctctggcaagcacctggctactgagtggaatacggtctctaagctggtgatgggactgggcatcacggtctgcatatttatcatgcttgcaaacctcttggtgatggttgctatttacgtcaaccggaggttccattttcccatttactacttgatggcaaatctcgctgccgctgacttctttgcagggctggcttacttctatttgatgtttaacacaggacccaacacccggcgactgaccgtttcgacatggctccttcgccagggtcttatcgacaccagtctcaccgcatctgtggccaacttgctggcaatagccattgagcggcatatcacagttttccgcatgcagttgcatactaggatgagtaaccgcagagtggtggttgtgatcgtcgtgatctggactatggctatagtgatgggggcaatccctagcgtgggctggaactgtatttgcgacattgagaattgttccaacatggcccctctatattctgatagttatctggttttttgggccatcttcaatctagtgactttcgttgtgatggtggtcttgtacgctcacatattcggatacgtcagacagagaacaatgcggatgtcccgccatagctctggaccaaggaggaatagggatactatgatgtccctgctgaaaaccgtcgtcatcgtcctaggtgcatttataatatgctggacgcccggtctggttttgctcctgctggacgtgtgctgtccacagtgcgacgtgctggcctatgagaaattcttcctgctgctggccgagttcaatagcgctatgaaccctataatatactcttaccgcgacaaggaaatgagcgctacttttcggcagatcctgtgttgccagcgctctgaaaaccctacgggacctacagaaggatcggatcggtccgcttcatctttgaatcatactattcttgccggagtccacagtaatgaccatagcgtggtgtag

SEQ ID NO: 229123 - DNA, 1056 bp, synthetic construct
  misc_feature 1..1056: note = Description of Artificial Sequence: Synthetic coding sequence
  source 1..1056: mol_type = other DNA
atggtgatcatgggtcaatgctattataatgagaccattgggttcttttacaataattctgggaaagaactgagtagccattggcgccctaaggacgtcgttgtggtcgccttaggcctgactgtgtctgttctcgttctgctgacaaacctcctggtgattgcagctatcgcctcaaaccgcaggtttcatcagcctatatattacttgcttggaaatttggctgccgctgatctgtttgccggagttgcttatctgttcttaatgtttcacaccggtccaagaacagcccgactgtccttagagggctggttcctgagacaaggactgttggacacatctttgaccgcctccgtggccaccctgctggccattgcagttgaaaggcaccggtccgtcatggccgtccagttgcacagcaggctcccgcgtggccgtgtagtcatgttgatcgttggagtttgggtggccgctctcggactgggcctgcttcccgcacactcctggcactgtctctgtgccctcgacagatgctcccgcatggctcccctgctgtccaggtcatacttggccgtatgggctctgtccagtcttcttgtgttcctccttatggtggctgtgtacaccagaatatttttttacgtgcggagaagggtacagagaatggctgagcacgtcagttgccacccccgttaccgagagacaaccctgagtctggtgaagaccgttgtgatcatcctgggagcctttgtcgtatgctggacgccgggtcaggtcgtcctcctgttggatggactcggctgcgagagctgcaatgtgctagcggttgaaaaatattttttgctgctcgcagaggccaacagtctggttaatgccgctgtgtactcttgcagggacgccgaaatgcggaggacatttaggcggttactgtgctgcgcttgtctccgccagtcaacgcgcgagagtgtgcattatactagctcagcccaaggcggagcaagtactaggatcatgctgccagagaacgggcatcctctgatggatagcacattgtag

SEQ ID NO: 229124 - DNA, 1056 bp, synthetic construct
  misc_feature 1..1056: note = Description of Artificial Sequence: Synthetic coding sequence
  source 1..1056: mol_type = other DNA
atggtgatcatgggccaatgctactataatgagaccatagggtttttctacaacaactccggtaaggaactgagttcccactggaggcccaaagatgttgtcgtggtggctctcggcctgaccgtgtccgtgctggtactgttaactaatctattggtgattgccgctatcgcttccaatcggagatttcaccaaccgatatattatctgctgggcaacttggccgctgccgacctgttcgccggtgtggcttatctcttcttaatgttccatacgggaccccgaacagcaagactatccctcgagggatggtttctgaggcagggattgctcgacacctctctcactgcctctgtggctaccctgctcgcgatcgccgtggaacgccatagatcggttatggcagtgcagctccacagtcggttaccaagagggagggtcgtaatgcttatcgtaggcgtgtgggtggcagcccttggtctcggcctcttgccggcacacagctggcactgtctttgtgctcttgatagatgttcgcgaatggcacccctgcttagccgatcatacttagctgtgtgggctctgagctctctcttggtattcttacttatggtggccgtctatacacgtatcttcttctatgtcaggaggcgtgtccagcgtatggcggagcacgtatcatgccatcctcgttatcgggaaactacgttaagtctggttaaaactgtggtgatcattcttggagcctttgtagtgtgttggacccctggccaggtcgtcctactgttagacggcctggggtgcgaatcctgtaatgtgttagctgtggagaagtactttctgctgctagccgaagcaaactcgctcgtcaacgcagctgtctattcatgtagggacgctgaaatgcgcagaacatttagaagactcctgtgctgtgcttgtctgcggcagtccactcgtgaatccgttcactacaccagcagtgcccaaggcggagcctcgactagaattatgctgcccgagaatgggcatcctctgatggattccacactgtag

SEQ ID NO: 229125 - DNA, 1062 bp, synthetic construct
  misc_feature 1..1062: note = Description of Artificial Sequence: Synthetic coding sequence
  source 1..1062: mol_type = other DNA
atgaatgagtgccactacgacaaacatatggactttttttacaatagatcaaacacagataccgttgacgattggacaggtaccaagctcgtgatcgtgctttgcgtgggcacatttttttgtttgttcatcttcttctctaactcactggtcattgccgctgtgattaaaaatagaaaattccacttccctttttactatctcctggcaaatctcgcggctgccgactttttcgccggaattgcctatgtgttcttaatgttcaacaccgggcctgtaagcaaaacactgacagtgaaccgatggtttctgaggcagggattacttgatagtagtttgaccgcaagcctgaccaatctcttagtcatcgcagtggagaggcatatgtctattatgcgtatgagggtccactctaatttgaccaagaaacgcgttactctcctcattctacttgtctgggcaatcgctatcttcatgggcgcagttccgacactgggatggaactgtctgtgtaacataagtgcatgcagcagcttggccccaatttatagtcgcagttatctggtgttttggacagtcagcaacctcatggccttccttattatggtagtggtgtatctgagaatttacgtttatgtgaaacggaaaaccaatgtgctatcaccacatacgtccgggtcaattagccgcagacggactccaatgaagcttatgaagaccgtgatgacagtgctgggcgcattcgttgtttgctggacccccggtctggtggtacttttactagatggcctcaattgtaggcaatgcggagtacagcatgttaaacgatggttccttctgctagccttgctgaacagtgttgtgaatccgatcatctactcttacaaggatgaggatatgtatgggacgatgaagaagatgatctgctgtttttcccaggagaaccccgagaggcgcccttcccggatcccaagcacagtcctcagtagaagcgacactgggtcccagtacattgaagacagtatttctcagggcgcagtgtgtaacaagtccacatcatag

SEQ ID NO: 229126 - DNA, 1062 bp, synthetic construct
  misc_feature 1..1062: note = Description of Artificial Sequence: Synthetic coding sequence
  source 1..1062: mol_type = other DNA
atgaatgagtgccattatgacaagcatatggattttttttataataggtccaatacagacacggtagacgattggacaggaactaaattggtgattgtactctgcgtggggacatttttctgtctttttatcttcttcagcaattcactcgtaattgcagctgtaatcaagaatagaaaatttcactttcccttctactacttactcgccaacttagccgctgcggattttttcgcaggaatcgcctacgtgtttctcatgttcaataccggccctgtctcaaaaaccctcacagtcaataggtggttcctgcggcagggactgctcgatagcagtctaactgcttcactgactaatctgctagtgatcgctgtggaacgccatatgtcaattatgaggatgcgagtgcactctaatttgacaaagaagcgagttaccctgctgattctcttagtgtgggccatcgccatttttatgggcgcagtgccaactctcggctggaactgcctctgtaacatcagtgcatgtagctctctggcacccatctattcacggagttacctggtcttctggacagtgagcaatctaatggcattcttaatcatggtggtagtgtacctgaggatttacgtgtacgtgaaacggaagacaaatgtgctgagcccgcacacttccgggagcatttcaagaagacgtacgcccatgaagcttatgaagacagtcatgacggtactgggagccttcgtagtatgttggactcctggtctggtggtgctcttactcgatggtctgaactgtcgccagtgtggcgtgcagcacgttaagcggtggttcttgctgctggcccttctcaactctgtggttaaccccatcatttacagctataaggatgaagacatgtacggaacaatgaaaaaaatgatttgctgtttctcccaggaaaatcctgaaagaagaccgtcccgcataccatcgaccgttctgtcgagaagtgacaccgggtcccagtacattgaagattctatcagtcagggtgcagtctgcaacaagagcacttcctag

SEQ ID NO: 229127 - DNA, 1113 bp, synthetic construct
  misc_feature 1..1113: note = Description of Artificial Sequence: Synthetic coding sequence
  source 1..1113: mol_type = other DNA
atgggcgaccggaggttcatcgactttcagtttcaggattccaactcctcattaagacctcgtcttggaaatgccactgcaaataatacatgcattgtggacgacagcttcaaatataatttgaatggcgcagtgtattctgtcgtgtttatcctgggcctgatcactaattctgtgtccttgttcgtgttctgtttccgcatgaaaatgagatcagagacagccattttcattaccaatcttgccgtgtccgacctgctgttcgtatgtaccttgccctttaaaatcttttacaacttcaaccggcattggcctttcggggatactctctgtaagatcagtgggaccgcctttctaactaacatttatgggtcaatgctgtttctaacctgtatcagcgtagatcgcttccttgccatagtgtacccatttaggtcacggacgattaggaccaggagaaacagtgccattgtctgtgcaggagtgtggatcttggttctatctggcggaatatcagcaagtctgttctctacaaccaacgttaacaacgctacaactacatgcttcgaagggttttcaaagcgtgtatggaaaacttatctcagcaaaatcaccatcttcatcgaagtcgtgggctttataatccctcttattctaaatgtttcatgttctagcgttgtgctccgaacacttcgtaaacctgcgaccctgtctcagattggcacaaataaaaaaaaggtcctcaagatgattacagtacatatggcagtgtttgtggtgtgcttcgtcccctacaactcagtgctgttcctgtatgctctcgtgcggagccaagcaatcactaattgctttttggagcggttcgccaaaattatgtatcctataacactttgcctggcgacgctaaattgctgcttcgaccctttcatctactacttcacactcgagtcctttcagaagagcttctacatcaacgcacacattcgtatggaaagcctgtttaaaacggagacccctctcaccaccaaaccatctttgccagctatccaggaggaagtctcggaccaaacaacgaataatggaggagaactgatgctggaatccaccttctag

SEQ ID NO: 229128 - DNA, 1113 bp, synthetic construct
  misc_feature 1..1113: note = Description of Artificial Sequence: Synthetic coding sequence
  source 1..1113: mol_type = other DNA
atgggagaccggaggttcatcgacttccaattccaggattctaacagcagtctgagaccgcgactcgggaacgctaccgcaaataacacctgcatcgtagatgattcttttaagtataacttaaatggagctgtatatagcgtggtattcattcttggcctcataaccaactccgtttccctttttgtgttttgtttccgaatgaaaatgcgatctgagactgccatttttatcaccaacctggccgtgtctgacttgctgttcgtctgtacccttcccttcaagatcttttataacttcaatcgacactggccctttggagacacattgtgcaagatctctggtaccgcattcttaaccaatatctatggcagcatgttatttctgacctgcatatcagtagatagattcctcgctattgtatatcctttcaggtccagaacgatacgaaccagaagaaatagtgccattgtgtgcgccggtgtgtggattctggtcctgagtgggggaattagtgcaagcctgtttagcacaacaaatgtcaacaacgcaacaacaacctgctttgaggggttctcgaaacgggtgtggaagacctatttgagtaaaattacaatttttatagaggtggtcggcttcattatccccctcattctgaacgtgagttgctccagtgttgtgttacgcactctcaggaagcctgcaaccttgtcacagatcggaacaaacaagaagaaggtacttaaaatgatcactgttcacatggctgtgtttgttgtatgtttcgtgccgtacaatagcgtgcttttcctgtacgcactggtcaggagccaggccattacgaactgtttcttggaaaggttcgcaaagattatgtatcctataacgctgtgcctggccaccttgaattgctgcttcgatcccttcatatactactttacattggaatcgtttcagaaaagcttttatatcaacgctcacataaggatggaatccctgtttaaaacggagactccactgactaccaaaccgtctctcccggcaatccaagaggaggtatccgatcaaaccacgaataacgggggagaattgatgttagagagtactttttag

SEQ ID NO: 229129 - DNA, 1119 bp, synthetic construct
  misc_feature 1..1119: note = Description of Artificial Sequence: Synthetic coding sequence
  source 1..1119: mol_type = other DNA
atgctggctaattctagcagcacaaattctagcgtcctgccatgcccggattataggccaacgcaccggttgcatctggtcgtgtacagcctcgtgctggctgctggcctgccactcaacgctcttgcactgtgggtattccttcgtgccctgcgagtgcacagtgtggtctcagtttacatgtgtaacctagctgccagtgacctgctattcactctgagcctgcctgtgcgtttatcgtattacgcccttcaccactggcctttccctgatttgctatgtcagactactggcgctatattccagatgaatatgtacgggtcctgtattttcttgatgttaataaacgtggatcgttacgctgccatcgtccatcccctcagactccggcacctcaggcgcccacgtgtggctagacttctttgcctcggcgtctgggcactgatcctcgttttcgctgtcccagctgccagagtccacaggccctcccggtgtaggtaccgcgacctggaggtcaggctgtgttttgaaagcttcagtgacgaactctggaaaggaaggcttctccctctggttctgctggcagaagccctcggcttcctgctgcccctagcagccgtcgtgtattcatccgggagggtattttggaccttggctcgacccgacgccacccagtcccagaggcgccgaaaaaccgtcaggctactgctggccaacctggtgatctttctcctctgcttcgtgccttataattccactctggccgtgtacggactgctacgatcaaaactggtcgctgcttctgtgcccgctagggatagggtccggggtgtgctgatggtcatggttcttctggcgggagctaattgcgtcctggatccccttgtttactatttttctgctgaaggattccgcaacaccctccgtggccttggtacccctcaccgagccagaactagcgccacaaacggcaccagagctgcgctggctcagagtgaaaggtctgccgtaactaccgacgccaccaggcctgatgccgcttcgcaggggctcttgaggccttccgattctcacagcttgtccagcttcactcagtgtccacaggatagcgccctgtag

SEQ ID NO: 229130 - DNA, 1119 bp, synthetic construct
  misc_feature 1..1119: note = Description of Artificial Sequence: Synthetic coding sequence
  source 1..1119: mol_type = other DNA
atgctggccaactcatctagtaccaacagtagtgtcctaccctgccccgactaccggccaacgcacaggctgcatcttgtggtatatagtctggttcttgctgcagggctgcccttaaacgccctggccctctgggtgttcttaagggctctgcgagtgcactccgtggtgagcgtttacatgtgtaacctcgcagcgtcagatttgctgttcacactttccctgcccgtcaggctttcctattatgcccttcaccactggccctttccggacctgctgtgtcagacaaccggggctattttccagatgaacatgtatgggagttgtatattcctgatgctgataaatgttgatcgctatgctgccatagtccaccctctcagactccgccacctgcgccgtcccagggtcgcgaggctgctgtgcttgggagtgtgggctttgattctcgttttcgccgtgcccgcagctcgggttcaccgtccaagtcggtgtcgttaccgagatttggaagtccggctatgctttgagtcattttcagacgaactctggaaagggcgtctgctgccactggtactcctcgcagaggctctgggctttctcctgccactagccgcagttgtgtactcatcaggcagggtgttctggacactcgcccgaccagacgcgacccaaagccagcggagacgcaaaacagtgcgactgctgctggcaaacttagtgatctttctcttatgcttcgttccatacaactcaaccctggccgtgtatggactgcttcgttctaaactggtggcagcttcagttccagccagggatcgggtccgcggtgtgctgatggtaatggttttactggccggagcaaattgcgtcttggaccccctcgtttattattttagcgctgagggcttccgaaacaccttgcggggtcttggcacgcctcatagggcccgaaccagcgctacaaatggaactcgcgctgcgctcgcgcagtccgagagatcagcagtcacaactgatgctactagacccgacgcggctagtcagggcctgctccgtccgtccgacagccactcactcagttctttcacccagtgccctcaggacagcgccttgtag

SEQ ID NO: 229131 - DNA, 1290 bp, synthetic construct
  misc_feature 1..1290: note = Description of Artificial Sequence: Synthetic coding sequence
  source 1..1290: mol_type = other DNA
atgctggccaattcctcctcaacaaacagttccgtgcttccatgccctgactacagaccaacccaccgtcttcatctggtcgtttactcgctggtattagcagcaggactccctctcaatgcactagccctgtgggtgtttctgcgggctcttcgtgtgcacagcgtggtgagcgtgtatatgtgcaacctcgccgcatctgacttgctgtttactctctcgcttcctgtgcggttgtcatactatgcactgcatcactggccattccctgacctgctgtgtcaaactaccggcgctattttccaaatgaatatgtatggatcttgtatctttctgatgctcatcaacgttgatcgctatgccgcaatcgtgcaccctctgagattacgacacctgagaaggcctagagtcgccagactactgtgtctcggcgtgtgggctttgatactcgtattcgctgtgccagctgcccgagtgcacaggccaagccggtgtcgctatagagacttggaggttagactttgctttgagagcttcagtgatgagctatggaaaggacggttactgcctctcgtcctcttagccgaggctctaggctttcttctgccactggctgccgtagtctattcctcagggcgagtcttttggactttagctcgtccggacgcgacacagagtcagcgcagacgaaagactgtgagactcctccttgctaatctcgtgatctttctgctatgctttgtcccatacaatagcactttggcagtttacggcctcctgagatcaaagcttgtagcagcgtccgttcccgcaagagatcgagtgcgcggagtgcttatggtgatggtcctgctcgcaggcgcaaactgtgtgttggacccgctggtttactacttcagcgctgaaggatttcgaaataccctgcgcggattaggaaccccccaccgagcacgaacgtccgcgactaatggtactcgggctgcgctcgcccaatccgaaagatctgctgttacgaccgacgcaaccaggcctgacgctgcaagtcagggattgttgaggccttccgactcacacagcctgagcagctttacccacgcgatcgctttaagcgtacccgattcacagaggttgagcttctgggaagcctacagggtctatacccaggagggtggattggggacttggacgtttggctggcagtttcagctgagcaacgcagaagaatacaaggtgtggaaacccggtccacgcgagggaagcgccgctggaaacggtttctttaaactgtag

SEQ ID NO: 229132 - DNA, 1605 bp, synthetic construct
  misc_feature 1..1605: note = Description of Artificial Sequence: Synthetic coding sequence
  source 1..1605: mol_type = other DNA
atgagactgcgaggatgcgggccacgcgctgcaccagctagtagtgcaggggcttcagatgcgaggctgttggcgcctcccggtcggaatcctttcgtccatgaactcagactgagcgctctccagaaagcacaggtcgctctgatgaccttaacactgtttcctgtgagactgctggttgcggctgctatgatgttactcgcttggcctctggctttggtggccagcctcggctccgcagaaaaggagcctgaacagccacctgcactttggcggaaagtcgtggactttctgttaaaagccatcatgagaacaatgtggttcgctggaggctttcatcgggtggcggttaaggggaggcaggcccttcctacagaggccgctatccttactttggctccccactccagctacttcgatgccattccggttacgatgaccatgagctccatcgtcatgaaagctgaaagccgcgacattcccatctggggcacactaattcagtacatccggccagtcttcgtgtctcgttctgatcaggactcacggcgtaagacagtggaggagattaagaggagggcccagagcaacggaaaatggccacagattatgatctttccagaagggacatgcactaatcgaacttgtctcatcactttcaagcccggagcattcatcccaggggctcccgtgcagcccgtggtgcttcgctatcctaataaactggacacgatcacatggacttggcagggtcccggtgcgcttgagatcctctggctgacgctctgccagttccataatcaagtagagattgagtttttgcctgtctacagccccagcgaggaggagaaaagaaaccctgctctgtacgcttccaacgtaagaagggtcatggccgaagccctcggtgtgtccgtgacagactatactttcgaggattgccaactggccctggctgaaggacagcttagattgccagccgacacttgccttctcgagttcgctcgtctcgtcaggggcctgggtctgaaacccgagaaactggaaaaagatctcgacagatattctgagagggcacgaatgaaggggggagagaagattggaattgccgagttcgctgctagcctggaagttccagtctctgacttgctcgaggatatgttctccttgttcgatgaatccgggagcggggaagtggacctccgcgaatgcgtggtggcactgtctgtggtgtgcagacccgctcgaactctggacactattcagctggccttcaaaatgtatggagcccaggaggatggctccgtaggcgagggagatttgtcttgtattctaaagacagccctgggggtggcagagctcactgttactgatctttttagagccatcgatcaggaagagaagggtaagattaccttcgctgacttccaccgattcgcagagatgtatccagccttcgccgaggagtacctgtatcccgatcagacacactttgaatcatgcgcggagacttctccggctcccattcctaatggtttttgcgcagactttagtcccgagaattcagatgcaggacggaagcccgtaagaaagaagctcgactag

SEQ ID NO: 229133 - DNA, 1605 bp, synthetic construct
  misc_feature 1..1605: note = Description of Artificial Sequence: Synthetic coding sequence
  source 1..1605: mol_type = other DNA
atgcggctccgcggatgtgggccaagggccgcacctgcatcctcggctggagccagcgatgcgagattactggcccctccaggccgtaatcccttcgtgcacgaactgcgactgagtgcccttcagaaggcccaagtggccctgatgactctcactctgtttcccgtgagattactggtcgccgcagcaatgatgctgctggcctggccccttgcactggtcgccagcttggggtccgcagagaaggaacccgaacagccgcctgcactgtggaggaaggtcgtggatttcttgttaaaggccataatgcgcaccatgtggtttgctggaggattccaccgagtggcagtgaagggaaggcaggctcttccaacggaagctgcaatcctgacgctcgcaccccatagctcctacttcgacgctattccggttacaatgacaatgtcctccatagtgatgaaggcagagtccagagatattcctatctggggaacactgattcaatacatccgtcccgtattcgtgagccgctcagatcaggacagtaggaggaaaactgttgaagaaataaagagaagggctcaatcaaatggcaaatggccccagatcatgatcttcccggaaggaacgtgtactaacaggacatgtttgattacctttaagcccggagcctttatacctggtgcgcctgtccagcctgtagtgttgaggtacccaaacaaactggatacaatcacttggacgtggcaaggccctggagctttggaaatactgtggctgaccctgtgtcagtttcataaccaggtcgagattgaatttttgccagtgtacagtccaagcgaagaggaaaagagaaatccggcactgtacgccagcaatgtcaggagagtgatggccgaggcgctgggagtgagcgtgactgactatacatttgaggattgccaattagcgctcgccgaggggcagctccgactgccagctgacacctgtctcctcgaatttgccaggctcgtacgaggactcggccttaaacccgagaagttggagaaggacctcgaccgctatagcgagcgggcaaggatgaagggcggtgaaaagatcggcattgctgaatttgccgcttccctggaggtgccagtgtccgatctcctggaagacatgttctctttgtttgatgaatcaggatctggcgaggtggacctgcgcgaatgtgtggtcgccttgtctgttgtttgccgccctgcccgaactctggataccatccagttagcttttaagatgtacggggctcaagaagatggatctgttggggaaggagatctgtcatgcatcctgaaaaccgctctgggggtggccgaactgacagtcacggatctcttcagagccatcgaccaggaggagaaaggaaagatcacattcgccgacttccaccggtttgcagagatgtatccggcatttgcagaagaatacctgtatccggatcagactcattttgagagctgcgccgagactagccccgctcccatccctaacgggttttgtgcggacttttctccggagaatagcgacgcgggtcgcaagccagtccgcaaaaaactggattag

SEQ ID NO: 229134 - DNA, 1464 bp, synthetic construct
  misc_feature 1..1464: note = Description of Artificial Sequence: Synthetic coding sequence
  source 1..1464: mol_type = other DNA
atggcaagcagtgcagaaggtgacgagggtactgtggtggccttagccggagtactccaatcaggctttcaagagctgtccttgaacaaactcgcaacaagcttgggggcttcagagcaagcgctgaggctgatcatttccatcttcctgggttatccgttcgctcttttttacaggcactacctgttctacaaggaaacctacctcattcacctgtttcacacttttactggcttgagcatcgcttacttcaacttcggtaaccagctgtaccacagtctgctgtgcatcgttctccaatttcttatactgagacttatggggcgtactattacagcggtcctaactacattttgctttcaaatggcatatctcctcgccggttattattacacagcaacaggcaattatgatatcaaatggacaatgccgcactgtgtcctgacactgaaactaattggccttgccgtggactactttgatggagggaaagatcagaatagcctcagttcagagcagcagaagtatgctattagaggtgtgcctagtctactggaagtcgccggtttctcatacttctacggggctttcctagtgggtccacaattttcgatgaatcactatatgaagctcgttcagggggaactgatcgatataccgggtaagatacctaactcaatcattcccgcattgaagcgcctctctctgggcctgttttacctcgttgggtacactctgctctccccacatattaccgaggattatttacttacagaagactacgacaaccaccccttttggtttagatgcatgtacatgctgatttggggaaagttcgtcttgtataagtacgtcacatgttggctggtgactgagggcgtgtgcattcttacagggctgggtttcaacggttttgaggagaaggggaaagctaaatgggacgcatgcgcaaacatgaaggtatggttgttcgaaacaaatccacgtttcactggaactattgcctcattcaatataaataccaatgcatgggtcgcgaggtatatattcaaacgactgaagttcctgggaaacaaagaactctcccaaggactcagcctgctgttcctggctctttggcacggattgcactcaggctatttagtgtgttttcagatggagtttctgatcgtcatcgttgaacggcaggcagcgagactgattcaagagtcaccaaccctctccaaattggccgcaatcacggttctgcaaccgttttattacctggtacaacaaaccatacactggctgttcatgggctattctatgacagctttctgcctcttcacttgggataaatggctgaaggtgtacaagagcatttactttctcggtcatatattcttcctgtccttgctgttcatcctaccctacatccataaagcaatggtccctaggaaggagaagttaaaaaagatggagtag

SEQ ID NO: 229135 - DNA, 1575 bp, synthetic construct
  misc_feature 1..1575: note = Description of Artificial Sequence: Synthetic coding sequence
  source 1..1575: mol_type = other DNA
atgagccaggggagccccggagactgggcgccactggaccctacacccggacctccagcatccccgaatccattcgtacacgagctgcatctgtcacgacttcagagagtaaagttctgcctcctgggggcacttctcgcaccgataagagtcctcctcgccttcatcgtactttttttgctctggccgttcgcatggctgcaggtggcaggcttgagcgaagagcagcttcaagagcccatcacagggtggagaaagactgtctgccacaacggggtgctcggtctgtcaagactgctgtttttcttgctggggtttttgaggattagggtacggggacaacgagcatcccggttgcaggcccctgtgctcgtggccgctccccattcaaccttcttcgaccccatagtgctgttaccctgcgacttacctaaggttgtaagccgggctgaaaacctcagcgtacccgtcattggcgcactcttacgatttaaccaagcaattctggtgtcacggcacgatcccgctagccgacgtcgggttgtggaggaggtcagacggagagcaacctcgggcggaaagtggccacaggtcctcttctttcccgaaggtacatgttcaaacaaaaaggctctcctgaaattcaagcccggagctttcattgccggtgtgcctgtgcagcccgtgctgattcgttaccccaactcgctggacacaacctcctgggcgtggcgaggcccaggcgtcctgaaggtactttggctgactgcgtctcaaccatgctctattgtggacgtagaatttttgcctgtctaccacccctcaccagaagagtcccgggatccaacgctgtacgctaacaatgtccagagggttatggcccaggctctgggtatcccagccaccgagtgtgagttcgtgggtagcctcccagtgatcgtcgtaggaagattgaaggttgctttggagccccagctgtgggaactggggaaggttttgaggaaagcgggattgtcagcgggatatgttgacgcaggcgctgaaccaggtcggtctagaatgatctctcaggaggagttcgcaagacaactgcagctgagcgatccgcagactgttgcaggcgcttttgggtatttccagcaagataccaagggcttagttgatttccgggatgttgccctagcactcgccgctcttgatggaggaaggagtctcgaagaattgacgcggttagccttcgaattatttgctgaagaacaggctgaaggaccaaaccgacttctgtataaggatggcttctcaacaatactacacttgttgcttggctccccgcatcctgcagcaactgctcttcatgctgagctctgtcaagccggatcctcacagggactgtcactgtgccagtttcaaaatttcagcctccacgaccctctgtatggcaagctgttcagcacttaccttaggcctccacacacgtccaggggtacttcacaaacccctaacgcttcatcaccaggtaatcccacggccttggccaacgggacggtgcaggcacctaagcagaaaggagactag

SEQ ID NO: 229136 - DNA, 693 bp, synthetic construct
  misc_feature 1..693: note = Description of Artificial Sequence: Synthetic coding sequence
  source 1..693: mol_type = other DNA
atgtgcgggaacaacatgagtacccctttgcctgcaattgtgccggctgctcggaaggccaccgccgctgtgatctttcttcatggactgggagacactggacacgggtgggctgaagcatttgccggtattagaagctcgcatataaagtacatctgccctcatgcccctgtcagacccgtgacactcaacatgaacgttgccatgccaagctggttcgacatcatcggtctcagtccggatagtcaagaggatgagagtggcataaagcaagcagcagagaatataaaagccctgatagatcaggaggtgaagaatggcatcccatctaacagaataatcctgggcggattttctcagggaggggctctctccctatataccgcgctgacgacacaacaaaagcttgccggtgtgactgctttgtcatgctggttgccactgcgggctagcttcccccaggggcctatcggtggcgcaaatcgggacatatcgatcctgcagtgccacggtgattgcgatccactcgtccccctaatgtttggatccctgactgtggagaagctgaaaaccctcgttaacccagccaacgtgaccttcaaaacttatgagggcatgatgcacagctcatgtcagcaggagatgatggatgttaagcagtttatcgacaaattacttcctcctatagactag

SEQ ID NO: 229137 - DNA, 645 bp, synthetic construct
  misc_feature 1..645: note = Description of Artificial Sequence: Synthetic coding sequence
  source 1..645: mol_type = other DNA
atgtgcgggaacaatatgtctacaccactgcctgcaatcgttcccgcagcacgcaaggccactgccgcagtgattttcctgcatggcttgggcgacaccgggcacggatgggctgaggccttcgcaggaattagaagctcgcacataaagtatatctgtcctcacgccttcgatatcatcgggctcagcccagattcccaggaggacgagagcggaataaaacaggctgcggaaaacattaaagccctgatcgatcaggaagtgaaaaacggaatcccttctaaccgcattatcctgggaggcttcagtcagggcggagccttgagcctctacaccgcgctgactactcaacagaagctggccggtgtgacagctctgagctgttggctaccgctcagagcctcgtttccgcagggccctatcggtggggctaatcgagatatctcaatccttcagtgtcacggcgattgtgaccccctggtcccccttatgtttggatctctcactgtcgaaaagctcaagacactagtaaaccccgcaaacgtcactttcaaaacgtacgagggcatgatgcattcctcttgtcagcaggagatgatggacgtcaagcagtttatagacaaattgcttcctccgatcgactag

SEQ ID NO: 229138 - DNA, 1092 bp, synthetic construct
  misc_feature 1..1092: note = Description of Artificial Sequence: Synthetic coding sequence
  source 1..1092: mol_type = other DNA
atggaattgcatgagagacctgacgaacgacgtaaagctcggaccagtacccaggggaggttgggggattggcgccgtgttcatgcagatgggtttacacatagggtctggagcagctcttcatggcttgaaccggcaatgacctctcggactcgcgtgacttggccgagcccacccagaccattgccagtgccagccgcagccgcagttgccttcggcgcaaagggaaccgatcctgcagaagctcgcagcagtcgcggtatcgaggaggcaggccctagagctcatggcagagcaggccgagagcccgaacgccgtagaagcaggcaacagcgcagaggagggctccaggctaggcgcagtactctccttaaaacatgcgccagggctagggccacagcccctggagctatgaagatggtggccccttggacacgattctattcaaattcttgttgcctgtgctgtcatgtgaggacagggaccattttattaggggtgtggtacctcattatcaacgcagtcgtcctgctgatcctgctttccgctctcgccgaccccgatcaatataacttttcctcttcagaactggggggtgacttcgagttcatggatgatgcaaacatgtgtatcgctatcgcaattagcctattgatgatcctcatctgtgctatggcgacctatggagcttacaagcagcgcgctgcatggatcattccttttttctgttaccagatattcgattttgccctaaacatgttggttgctataacagttttgatctaccccaatagtatacaggaatacattcgccagctgcccccaaattttccatacagggatgatgtgatgagtgttaatcctacttgcctggtcctcatcatactcttgttcatttctatcatactcacttttaaagggtatcttattagttgcgtgtggaactgttatcgttatatcaacggcaggaactcaagcgatgtgcttgtgtacgtcacaagcaatgataccacagtcctgctccctccttacgacgacgcaactgttaacggggcagccaaagaaccccctccaccctatgtgagcgcatag

SEQ ID NO: 229139 - DNA, 954 bp, synthetic construct
  misc_feature 1..954: note = Description of Artificial Sequence: Synthetic coding sequence
  source 1..954: mol_type = other DNA
atgacttctcggactcgtgtgacatggcctagcccacccaggcccctgcccgtacctgctgctgcggctgtggcattcggtgccaaaggcactgacccagcagaagctaggtccagtagaggtatagaggaggccggtccaagagctcacgggagagcgggacgggagccagagagacggcgaagcagacaacaaagaaggggtggactccaggccaggcggtccacattactgaagacttgcgcacgggctagggccaccgcacccggagcaatgaaaatggtggcgccatggacacggttctatagcaattcctgctgtctgtgctgtcacgtgcgtactggcaccattctcctcggggtctggtatctgatcatcaacgcagtggtgcttcttatccttttatctgcgctcgccgatcctgatcagtataacttcagtagctcagagctcggaggtgactttgaattcatggatgatgccaacatgtgtattgccattgcaatctctttgctcatgatcttgatatgcgctatggccacatatggagcatacaagcaacgtgccgcttggattattcccttcttttgctaccagatctttgacttcgcgctgaatatgctggtggcaattaccgtacttatatatcccaacagtatccaggagtatattcgtcaactcccaccaaactttccttacagggacgatgtgatgtcagtcaaccccacctgcctggtcctgatcatcctcttgtttatatcaattattctcacatttaaagggtacttgattagttgtgtttggaattgctataggtacataaacgggcgaaattcctctgatgtgcttgtgtatgttaccagtaatgataccactgttctgttgcccccatacgacgatgccacagttaatggggcagctaaggagcctcctcccccatacgtaagtgcctag

SEQ ID NO: 229140 - DNA, 681 bp, synthetic construct
  misc_feature 1..681: note = Description of Artificial Sequence: Synthetic coding sequence
  source 1..681: mol_type = other DNA
atgaaaatggttgccccttggacccggttttactcgaactcctgttgtctgtgctgtcacgtgagaacgggcacaatccttctgggtgtctggtacctcatcatcaacgctgtggtccttctgatcctccttagcgcccttgccgatccggatcagtataatttctcatctagtgagctcgggggagatttcgaatttatggatgacgcaaatatgtgtattgctatcgcgatctctttactgatgatcctgatttgcgccatggctacatatggggcttataagcagagagccgcatggattattccattcttttgctaccagatctttgatttcgccctcaacatgctggtagctatcacagtgttaatctacccaaatagtatccaggagtacattcggcaactgcctcccaactttccctaccgtgatgatgtgatgtccgtcaatcctacttgtctggttcttataattttgctctttatatcaattattctaacattcaaaggctacctaattagctgtgtgtggaattgctatcgctatataaacggcagaaactcaagcgacgttttggtttacgtgacttctaacgatactacagtgctcctgcctccttatgacgacgcaactgtgaacggggcagctaaggaaccacccccaccttacgtgagcgcatag

SEQ ID NO: 229141 - DNA, 789 bp, synthetic construct
  misc_feature 1..789: note = Description of Artificial Sequence: Synthetic coding sequence
  source 1..789: mol_type = other DNA
atggatccacgactttccaccgttagacagacatgctgttgctttaatgtccggatcgctactactgccctcgctatataccacgtgatcatgtctgtgctcctgtttattgaacactcggtagaggtggcccatggcaaggcgagttgcaaactgagtcaaatggggtatctgcgtattgctgacttgatttcttcctttttactaattaccatgctgttcatcatctcactgtcactgctgatcggggtagtcaaaaatcgcgagaaatacctactacctttcttaagccttcagatcatggattatctgctttgcctgctgactctgcttggatcctatatagagctgcctgcatatctgaagcttgcatctcggagccgggcttcatccagtaagtttccgttgatgactctgcaattgctcgatttctgtttaagcattctgaccttatgtagcagctacatggaagtccctacttaccttaattttaaatcgatgaatcatatgaactacttgccgagccaggaggatatgccgcacaatcagttcatcaagatgatgattattttctctatcgcatttattaccgtactcatatttaaggtctacatgtttaaatgtgtctggcggtgttacagactgattaagtgtatgaacagcgtcgaggagaaacgtaatagtaagatgcttcaaaaggtggtgctgccatcctacgaggaggctctgtcgttgccctctaagacacccgaggggggaccagcccctccaccatattccgaagtttag

SEQ ID NO: 229142 - DNA, 873 bp, synthetic construct
  misc_feature 1..873: note = Description of Artificial Sequence: Synthetic coding sequence
  source 1..873: mol_type = other DNA
atggatccacgtctgtcaacggtgcggcagacatgttgctgcttcaatgtacgcattgccacaacagcactggccatctaccatgtaattatgtccgtcctgctgttcatagaacacagcgttgaggtggcacatggcaaggcatcctgtaaactgtcacaaatggggtatcttagaatcgcagatttaatctctagtttcctcctgattactatgcttttcattatctctctaagcctccttataggcgtggtaaagaatcgcgagaagtatcttcttccatttttgagcttacagattatggactacctattatgtctgctgacgctcctgggaagttacattgagctacctgcctaccttaaactggctagccggtcacgcgcttcatcatctaagttcccattgatgaccctgcagctcctagatttctgtttgagcatcttgactttatgtagctcttacatggaagtacccacctatcttaattttaagtctatgaatcacatgaattacctgccatcacaggaagacatgccacataaccaattcatcaagatgatgattattttttctatcgcttttatcacagtcctcatcttcaaggtctacatgttcaagtgtgtgtggcgttgctatagactgatcaaatgtatgaattctgtcgaagagaaaagaaactcaaagatgctccaaaaggttgtgctgcccagctacgaggaggccctatctcccgctggtccggtgtcttgctcgcagcttgggcaacgctttagactgtctcacagctcagggctgagcataatccaaccaaacaacgcctggttcatcagcatatcctcagatacttgcctggacgactggcctttttag

SEQ ID NO: 229143 - DNA, 11406 bp, synthetic construct
  misc_feature 1..11406: note = Description of Artificial Sequence: Synthetic coding sequence
  source 1..11406: mol_type = other DNA
atgtccaccgactctaattcactagccagagagtttctgaccgatgtcaatcgcctttgcaacgcagtggtacagcgcgtcgaggctagagaagaggaggaagaggagacacatatggctaccctgggtcagtacctagttcacgggagaggcttcttactacttacaaagttgaatagcataattgaccaggccctgacatgcagggaagagctgctcaccttgttgctgtcactgttgcctctggtgtggaagattcctgtgcaggaggagaaagccactgactttaacctgccattgtctgcagacataatactcactaaggaaaagaacagcagctcgcagagatccactcaggaaaaactacatctggagggctcagcactttctagccaggtctcagcgaaggttaatgtgtttaggaaatccaggcggcaaagaaagattacacacaggtactcagtgcgggatgctcggaaaacacagctcagtacctcagactctgaagctaattcagacgagaaaggcatagcgatgaacaagcatagacgccctcacctgttgcaccattttttgacctcctttcccaaacaggaccaccccaaggcaaaactggatcgtctggcaacaaaggaacagacgcccccagacgctatggcactcgagaattccagggaaatcattccaaggcaagggtctaacacagatattttgtcggagccagctgccttaagcgtgattagcaatatgaataactcccccttcgacctctgtcatgtgctgttatcattgctcgagaaagtatgtaagttcgacgtgacgctgaatcataatagccccctcgctgcctcggttgtacccacgctgactgagttcctggccggttttggtgactgctgttctctgtcagataacttggagagccgcgtggtgtccgccggatggactgaagagcctgttgctctgattcagaggatgctgttccgcaccgtgcttcacctcttgagcgttgatgtcagcacagctgagatgatgccagaaaacctccgaaagaatcttaccgagctgcttagggcagcattgaagatccgtatatgcctggagaagcagcccgatccgttcgccccacgacaaaagaagactttacaagaggttcaggaggactttgtcttctccaaataccggcatagggctctgcttcttccagagctactcgaaggagtcctgcagatcctgatttgttgtttgcagtccgcagcctctaacccattttatttttcgcaagccatggatctggtacaggagtttatccagcaccacggtttcaatctcttcgaaaccgcggtcttacagatggagtggttggttttgagggacggtgtacctccggaggccagcgagcacctcaaggcgctcatcaattcagtgatgaaaatcatgtctaccgtgaagaaggtaaagtcagaacagctccaccatagcatgtgcaccaggaagaggcatcgacgatgtgagtattcgcacttcatgcaccatcatcgggacttaagcggactcctcgtttccgcctttaagaaccaagtgagcaagaatccgttcgaggagactgctgacggggacgtatattaccccgaacgctgttgttgcatcgcagtctgcgcccatcagtgcctccgactcctccagcaggctagtctttcgagcacgtgcgttcagatactttccggggtgcacaatattggaatttgttgttgcatggaccctaaaagtgtgatcattcctctgttgcatgcatttaagctgcccgctctgaaaaactttcagcaacacatcctgaacattctcaacaagttaatcctggaccagttaggaggtgccgaaatatctcctaagatcaaaaaagcagcctgcaatatctgtactgtggactccgaccagctggcacagctcgaagagactttgcagggcaatttgtgcgacgcggaactctcaagctccctgtcttcaccctcctatcggtttcaaggcatcctgccttcaagcgggtcagaggacctgctctggaagtgggatgcgctgaaggcctaccagaacttcgtttttgaggaggaccgcctacactcaatccagatcgctaatcatatttgcaatctcattcaaaagggaaacatcgtggtgcagtggaagctgtataattacatattcaatcccgtgctgcagcggggtgtagagctcgctcaccactgtcagcacttatcagtgacttctgcccagtcacacgtgtgttcccaccataatcagtgtctcccacaggatgtgctccaaatttacgttaagactctgcccattttgctgaaatcaagggtgatccgagacctcttcctaagttgcaatggcgtctcgcaaatcatagagctgaattgcctgaacggcatcaggagccactctcttaaggctttcgaaaccttgatcatctcacttggcgagcagcagaaagacgcatctgtgcctgacatagatggcatcgacatagagcaaaaagagctctcatccgtgcatgtggggacaagcttccaccatcaacaggcctatagtgactcaccacagtcactgtctaaattttacgccggactgaaggaagcctaccctaaacgacggaaaaccgtgaatcaggacgttcacataaacaccattaatctgtttttatgcgtggcctttctatgcgtgtcaaaagaagcggagagcgaccgggagtctgcaaacgactccgaggacacttctgggtacgattcaaccgcctctgagccactcagccatatgctgccctgcatcagtttggagtcactggtgctgccttcccccgaacacatgcatcaggccgcagatatttggtctatgtgtcggtggatctatatgctcagctctgtgttccagaaacagttttacagacttggcggttttagggtgtgtcataaactgatctttatgattatccagaaactgtttagatcccataaagaggaacagggaaaaaaggaaggtgatacatctgttaacgaaaaccaggatcttaaccgtattagtcaacctaagagaacaatgaaagaggacctgctgagcttggccatcaagagtgatcccatccctagcgaactggggagtctgaagaagagcgcggatagccttgggaaattagaacttcaacacattagcagtattaacgttgaagaagtgtccgccacagaggctgctcctgaagaagccaagttgttcacctcccaggagtcagaaacctcattgcagtcaattaggctgttggaggctctgctggccatttgccttcatggggcacggaccagccagcaaaaaatggaactggaactgcctaaccaaaacctgtcagtggagagtattctgtttgagatgcgggatcacctgtcacaatcaaaggtgatcgaaacccagttggcgaaaccgctgtttgacgcactgctccgcgtggccctgggcaactattcagccgactttgaacataacgatgcaatgaccgagaagagccaccagagtgctgaggagctcagctcccagcctggcgatttttcggaagaggctgaagacagccagtgttgctccttcaagctgctcgtagaggaagaagggtacgaggccgactcggaatcgaaccctgaagacggagaaacgcaggacgatggagttgacctgaaatccgagactgagggtttctcagctagctcctctcccaacgacctgcttgagaacctgacacagggggagattatatatcccgaaatttgtatgctcgaactaaacctgctaagtgcatctaaagcaaagctcgatgtgctcgctcatgtgttcgagtccttcttaaagattatccgccagaaagagaagaatgtgttcctgctgatgcagcaggggactgtgaaaaatttgctcggcggattcctttctattttaacccaggacgatagtgattttcaagcctgccagagggtgctggtcgatttgctagtatctcttatgtcctcgagaacgtgctcggaggagctcacattgttgttgaggatcttcctcgagaagagcccgtgtaccaagatacttctcctgggaattcttaagatcattgaaagtgacaccacaatgagcccttctcagtacctgacctttcctctcttgcatgcccctaacctgagcaatggcgtttctagccagaagtatccaggaattctgaattctaaagccatgggcctgttgcgcagggccagggtctcgagatcgaaaaaggaggccgaccgcgaatcgttcccacatcggttactgagttcatggcatatagcaccggtgcatttgccactattgggccagaattgctggccacatctctccgaaggattttccgtgtcactgtggtttaacgttgagtgtattcatgaggctgaatcaaccaccgagaagggcaagaagatcaaaaagaggaataaatcactgatcttgcctgactcctcctttgatggtacggaaagcgacaggccggagggggcagagtacattaatcctggagaacgcctgattgaggagggctgcatccatatcatttctctcggatccaaagccctgatgatccaggtgtgggcagatcctcacaacgccacgcttattttcagagtgtgcatggatagcaacgacgatatgaaggctgtgctgctcgctcaggtggagagccaagagaatatattcctccctagcaaatggcaacacttagttctgacctacctacaacagccgcaagggaagaggaggattcacggcaaaatttctatctgggtatcgggccagcggaagcctgacgtcacactagactttatgctccccagaaaaaccagtctgagcagtgattccaacaagaccttctgtatgatcggccactgtctgagttcccaggaggaattcctgcagctggccggtaaatgggatttaggtaacctactactgttcaacggcgcaaaggttggtagccaggaggcattttacctgtacgcatgcggaccgaaccacacttcagtcatgccttgcaaatacggcaaaccagtgaatgactatagcaaatacatcaacaaggaaattcttcgatgtgaacaaatcagagaacttttcatgacgaaaaaggacgtcgacatagggctcctcatcgaatcactctctgtggtgtataccacatattgcccggctcagtatactatctatgagccagttatcagactaaagggtcagatgaaaacgcagctttctcagcgccctttttcatccaaagaagtccaaagcatactgttggaaccacaccatctcaagaaccttcagcctaccgagtacaaaacaatccagggcattctccacgagatcggcggaacgggcatcttcgtcttcctattcgcgagagtagtggagctgtcctcctgtgaagaaacacaggctctcgctctccgtgtaatcttgtccttaataaagtacaatcaacagcgcgtgcatgaactagaaaactgcaatgggttatcaatgatacaccaggtgctgatcaaacaaaagtgcatagttggattctacatcttgaagaccttgttggaagggtgctgtggagaagacattatctatatgaatgagaacggagaatttaagcttgatgtggatagcaacgccattatccaggatgtcaagctcctggaagagctcttgcttgactggaagatctggtcgaaagccgaacagggagtttgggaaacactactagcagccctcgaagttctgatcagagctgatcatcaccagcagatgtttaacattaagcaacttctcaaggcccaagtagttcatcattttctgctgacgtgccaggtgctacaagagtacaaagaaggacagctgacgcctatgcccagggaggtgtgccgaagcttcgttaagatcatcgctgaagtgctgggctccccccctgaccttgagctattgaccatcatttttaatttcctgctcgccgtgcatccacccacaaatacctatgtttgccataatcccaccaacttttatttctctctacacattgatggaaagatattccaagagaaagttcggtcgataatgtacctgaggcactcatccagcgggggtcggtctctaatgtcgcccggatttatggtcatttccccatccggttttactgcttctccatacgagggcgagaactcaagtaacatcattccacagcagatggccgcacatatgttgagatcacgctcattgcctgctttccccactagtagcctccttacccaatcccagaagctcacaggcagcttgggttgttcaatcgaccgcctgcagaatatagctgacacgtatgttgcaacacagagtaagaagcaaaactccctgggctcttccgacacactgaaaaagggcaaggaagacgctttcatttcatcttgtgagagcgctaagaccgtatgcgagatggaggcagtcttgagcgcacaagtctccgtatccgatgtgccaaagggggtactgggattccccgttgtcaaggctgatcataaacaactcggcgctgagccaagaagcgaggacgattcccccggagacgagagctgcccccgacgacccgattacttgaagggcctggcttcctttcaacgtagtcacagcacgattgcaagtttgggccttgcattccccagtcagaatgggtctgccgctgtggggagatggccctctctagttgaccggaataccgacgactgggagaactttgcgtattctctgggatacgagccaaattacaatcgcaccgcctccgctcactccgtaacagaggactgcctcgtcccgatctgctgcggcctctatgaattgctttcaggagtgctcctgatactcccagacgtgttgctagaggacgtgatggataaattgatccaggccgacaccctcctggtgctggtgaatcacccctctcctgctatacagcagggagtgatcaaactgctcgatgcctatttcgccagggcttctaaagagcagaaggataagttcctcaagaatcggggattctctctcctggccaatcagctgtacctccacagagggacgcaggaactcctcgagtgtttcatagaaatgttttttggacgacacatcggactggatgaagaattcgaccttgaggatgtgaggaatatgggactgtttcagaagtggtcggtgattcccatcttgggattgatcgagacatcactttacgacaatattctcctgcacaatgcgttactgctgttgttgcagattctgaatagttgctctaaagtggccgacatgttactggataatggcctgctgtacgtgctttgtaacactgttgccgctctgaatggcctcgagaaaaatataccaatgtctgaatacaagttattggcttgcgatatccaacagctctttatcgccgtcactatccacgcttgctcaagttcaggttcacagtattttagagtgatagaagatctcatcgtgatgctgggatatctccagaattccaagaacaaaagaacccaaaatatggccgtggccttgcaactgcgggttttgcaggctgccatggagtttattagaacgaccgctaatcatgactctgaaaacctaaccgacagcttgcaaagcccttcagcaccacaccacgccgtggtgcaaaagagaaagtccatagctggccctcggaaattccccctcgcccagacagaatccctgctgatgaagatgaggagcgtggccaacgacgagctccacgttatgatgcagagaaggatgagtcaggaaaatcccagtcaggccactgagactgaactcgcccagaggctccagcgcctgactgtgctcgcagtgaaccgaattatttatcaggaatttaatagcgatataatcgacatcctccggacacctgagaatgttacacaaagcaagaccagtgtgtttcagacagagattagcgaggagaatattcaccacgagcagagctctgtcttcaacccattccagaaagaaatcttcacttaccttgttgagggtttcaaggttagcatcggcagctccaaagctagcggctcaaaacagcaatggacaaaaatactatggtcgtgtaaggagacctttcgtatgcagcttggccgactgctggtgcacattctgtctcctgcccacgccgcacaagagcgtaagcaaatttttgagattgtgcacgagcccaaccaccaagagatcctgagagattgtttatcaccttcattacagcatggagccaagctggtgctctacctgagtgagcttatccataatcatcaaggtgaactcactgaagaggagttaggcacagccgagctcctgatgaacgcattgaagttgtgcgggcataagtgcattcccccaagcgcgtccactaaggctgacctgatcaaaatgattaaagaggagcagaagaagtacgagacagaagaaggggtcaataaggccgcttggcagaagactgtgaacaataaccaacaaagcctcttccagcgcctggattccaaaagcaaagatatatctaagatcgctgcggacatcacacaggctgttagtctgtctcagggcaacgagcgcaaaaaggtgattcaacatattaggggaatgtacaaagtggaccttagtgccagtcgacactggcaagagttaattcaacagctgacccatgacagagcggtgtggtacgacccaatctactacccaacatcctggcagctggaccctacagagggtcccaaccgcgagcgccgaaggctccagcgttgctacctgactattcctaataaatacctgttgagagatcggcaaaagtcggaagatgtggtaaaacctcccctcagttacctgttcgaggataaaactcattcctctttcagctccactgtgaaggacaaggccgcaagcgagtccatccgtgtgaataggcggtgtatatccgtagcaccgtcacgcgaaaccgcgggagaactgctgctgggtaagtgtggaatgtattttgttgaggacaacgccagtgatactgtggaaagcagttccctccagggggagctcgagccagcttccttctcatggacctacgaggagatcaaagaagtacacaaacgctggtggcagttgcgcgataacgcggttgagatttttctaactaacggtcggacgctgctcctcgcttttgacaataccaaggtgagggacgacgtttaccacaacattttaaccaataacctgccaaatctcctggagtacggcaatatcacagctcttacgaatctgtggtataccggccagatcacaaactttgaatatcttactcacctcaataagcatgccggacgaagtttcaacgacttaatgcagtaccccgtctttccgtttatactggctgattatgtatcggaaaccctcgatctgaacgacctgttaatataccgaaatctgagcaagcccattgccgtacaatacaaagagaaggaagacagatatgtggacacttataagtatctggaagaagaataccggaagggtgcacgggaagatgaccctatgcctcctgtgcagccctaccattatgggtctcactattcaaactcggggacagtgctccacttcttagtgcgtatgccgccattcacaaagatgttccttgcctatcaggatcagtcatttgacattcccgatcgcacttttcactcaacgaataccacctggaggctcagttcattcgagtcgatgactgatgttaaagaactcatacccgagttcttttacctgcctgaatttctggttaaccgggagggctttgatttcggcgtgcgccagaacggcgagcgcgtgaatcatgtcaacctgcccccatgggctaggaacgacccaagactttttattctcattcaccggcaggcactcgaaagtgactacgtgtcccagaacatctgccagtggatcgacttagtcttcggctataaacagaagggcaaggcctctgttcaagcgatcaacgtctttcatcccgctacatattttggtatggatgttagtgcagtcgaggatcctgttcagcggagagccttagagactatgatcaaaacatacggtcagacgcccaggcaactattccatatggctcatgtgtcccgacctggcgctaaactgaatatcgagggcgagctcccggcagcagtagggctattggtacagtttgcttttcgcgagaccagagaacaggtgaaagagatcacatatccgtcacccctaagctggataaagggcctcaagtggggcgagtacgtggggtctccctcagcccctgtccctgtcgtgtgcttctctcagccccatggcgagcggttcggctctttacaggccctgcccacaagggcgatatgcggactgtcaaggaatttttgtctgcttatgacctattcgaaagaacaaggcgtgcgcagtatgaatagtacagacatccagtggagcgctattctgtcctggggatatgccgataatatactgagactgaagagtaagcagagcgagcccccagtgaatttcatccaatcttcacaacagtaccaggttacctcctgcgcttgggtccctgatagttgtcagctcttcacggggagtaaatgtggcgtcattacagcctacaccaatagattcaccagctccacaccttctgagattgagatggagactcaaatccatctctacggtcacacggaagagatcacttcgcttttcgtatgtaagccctactccatactaatcagcgtgtcgcgggacgggacctgtataatttgggatctgaatcgactgtgttacgtgcagtcattggccggacataagtctcccgtgacagccgttagcgcatccgaaaccagcggcgatattgctacagtatgcgattctgccggaggcggttccgacctccgactgtggactgtcaatggcgatcttgttgggcacgtgcattgtcgagagattatttgtagcgtggctttcagcaaccagccagaaggagtgtccatcaacgtcattgcaggaggtttagagaacggaatcgtacggctgtggagcacgtgggatctgaagcccgttagagagattacttttcccaaatctaacaagcccattatttctcttaccttttcttgtgacggccaccacctgtacacggctaactccgatggaactgtgattgcttggtgtcgcaaagaccagcagcgtttgaagcagcccatgttctacagttttttgtcctcgtacgccgctggctaa

SEQ ID NO: 229144 - DNA, 11406 bp, synthetic construct
  misc_feature 1..11406: note = Description of Artificial Sequence: Synthetic coding sequence
  source 1..11406: mol_type = other DNA
atgagcacggacagcaacagccttgcccgagaatttctcacggatgtgaaccgcttgtgcaatgctgtcgtgcagcgggttgaagctcgagaagaagaggaggaggagacacacatggcgaccctcggccaatacctcgtgcacggtcgcggattcctgcttctcaccaagctgaactccattatcgaccaggcactcacttgccgggaagagctactcaccttacttttgagcctccttccactggtttggaagatccctgtgcaggaggagaaagccacggattttaacctgcccctgtccgccgacataatccttacgaaggagaagaatagcagctcgcagcgttccacacaggaaaaactgcacctggagggatctgcacttagctcccaagttagtgccaaagtgaacgtcttcagaaagtcccgcaggcagagaaagatcacacaccgctatagcgtgagggatgccaggaagacccagcttagcacttccgactctgaggcgaactcagacgagaagggaatcgcgatgaataagcaccgacggcctcacctgctgcatcactttctgacttccttcccgaaacaggaccaccccaaagccaagttggatcggctggcgaccaaggaacaaactccgccagacgcgatggcactagagaattcccgcgaaatcatccccaggcagggtagcaatactgatatcctcagtgagccagctgcactttccgttataagcaatatgaataattctccatttgacctttgccacgtgttgctgagcctgctggagaaagtgtgcaagtttgatgtgacccttaatcataattcccctctcgcggctagcgtcgtgcccactctgacagaatttctggcgggatttggggactgctgttcccttagtgacaacctggagagcagagtggtgtcggccggatggactgaggaaccggttgcgctaattcaacgaatgctgtttaggactgttttgcacctcctgagtgtggacgtgtcaactgcggagatgatgcccgagaatctgagaaagaacctgaccgagctgctaagagccgcattgaaaattcgtatatgcttagagaaacagccagatcctttcgcaccaaggcagaaaaaaacgctgcaggaagttcaggaggattttgtgttttccaaatatagacatagggctctgttactgcctgagctgctcgagggcgtccttcaaattctgatctgctgccttcagagcgccgcttccaaccccttttattttagtcaggctatggacttggttcaggaattcatacagcatcacggcttcaatctgtttgaaacagcagttcttcagatggaatggcttgtcttgcgagatggggttccgcctgaagcctcagagcacctgaaggctttaatcaactccgtgatgaaaattatgtccacagtgaagaaagtgaaaagtgaacagttgcatcattccatgtgtacccgtaagcggcaccgcagatgtgaatacagccactttatgcaccatcatagggacctctctgggctgctggtctctgctttcaagaatcaagtctctaagaaccctttcgaagaaacagccgatggtgatgtatactacccggaacgatgctgctgcattgccgtatgcgcccatcagtgcctgaggcttctccagcaggcgtccttaagcagcacctgcgtgcagatcctgtcaggcgtgcacaacattggaatttgttgctgcatggacccgaagagcgtcatcatacccttgcttcacgccttcaagctgccagctttgaagaactttcagcaacacatcttaaatatcctgaataagctgattctcgatcagctgggaggcgcagaaatctctcccaagattaagaaggccgcttgcaatatctgcaccgtggacagcgaccagctggcccagctcgaggaaacattgcaggggaatctttgtgacgctgaactgtcatcttccctgtcttctccatcctaccgattccaaggcatcttgccatcctccggctccgaggatctactttggaaatgggacgcactgaaggcatatcaaaacttcgttttcgaggaagatcgactacatagcatccagatagcaaaccatatttgtaacctgattcagaaaggaaacattgttgtgcaatggaaactctataattacatttttaaccccgttctccaaagaggcgtggaacttgcgcatcactgtcagcatttatctgtgacttctgcccagtcacatgtgtgtagtcatcataatcagtgcttgccccaggacgttctgcagatttatgtcaaaacgttgccgattttgctgaagtcaagagttatccgcgacctgtttctgtcttgtaatggggtgtcccaaattattgaacttaactgcctgaatggaataaggtcacatagcctgaaggccttcgaaaccctgatcatcagtctcggggaacagcaaaaggatgcctcggtacctgacattgacggaattgatattgaacaaaaagagctgtctagcgtacacgtggggacctcatttcatcatcaacaggcctactccgattcaccccagagcctttccaagttctatgctggcctgaaggaggcttatcccaaacgtaggaagactgtcaaccaggacgtgcacattaatacaattaatttattcctttgcgtggcttttctgtgcgtgtccaaagaggctgagagcgatagagagtcagcgaatgactctgaagacacctccggctatgacagtaccgcatcggagccgcttagtcacatgctgccttgtatttcactggaatcacttgttctgccttcgcctgagcatatgcaccaagccgcagacatatggagcatgtgccgctggatctatatgctatccagcgtctttcagaagcagttttaccgcttgggaggatttagagtttgccacaaactcattttcatgatcatccagaagctgttccgctcccacaaggaagagcagggcaagaaggagggggacacgagcgtgaacgaaaaccaggatctcaatcggatctctcaaccaaaacggactatgaaggaggatctcctttccctggctatcaagtccgacccgatccctagtgaactcggcagtctgaagaagtctgccgacagtctgggcaagcttgaattgcaacacatcagctcgataaacgtggaggaggtgtcggccacagaggcagcccctgaagaagcaaagctgttcacatcccaggagtctgaaactagcctgcaatctatacgcctcctcgaggctctgctggcaatttgtctccatggagcacgaacttcccagcagaagatggagctggaactgccgaaccaaaatttgagtgtcgaaagtattttatttgagatgcgagatcacctgtcacaatcaaaagttattgagactcaactcgctaagccactgtttgatgctctgctcagagtggcgctcggcaattacagcgcagacttcgagcacaatgatgctatgacagagaagagtcatcagtccgccgaagaactttcctctcagcccggagactttagcgaggaggccgaggactctcagtgttgtagtttcaagctgctggtcgaagaggaaggttatgaagccgacagcgaatctaaccccgaggatggtgagacgcaagacgatggtgtagacctgaagagcgagacagaggggttctctgcctccagcagtccgaacgatttgctagagaatcttacccaaggagagatcatttaccccgaaatttgtatgttggaacttaacttgctttcagctagcaaagcaaaacttgatgtcctagcccacgtcttcgagagttttcttaagatcatccgccaaaaggaaaaaaacgttttcctccttatgcagcaaggcacagtgaaaaatctactgggtggctttctgtccatcctgacgcaggacgatagtgacttccaggcatgtcagagagtcttagtggacctgctggtatcattgatgtcaagtagaacttgcagtgaggagctcaccttacttctcagaatttttctagaaaaatccccctgcaccaagatcttacttctgggaatccttaagattattgaatctgataccacgatgagcccatctcaatatttaactttccctctgttgcacgctccgaacctaagtaatggggtgtcgtcgcagaagtatcccggtattctgaatagcaaggccatgggtctgttgagaagggccagggtgtccagatccaaaaaagaggcggatagggaatcattccctcatcgcttgcttagcagctggcacatcgcgccagtccaccttccccttctgggtcaaaactgttggcctcacctgtccgagggtttcagcgtgtccctgtggttcaatgtggagtgtattcacgaggccgagagtacgacagagaagggaaaaaagatcaagaagcggaataaaagcttgatacttccagattcatcgttcgacggaacagaatccgaccggcctgaaggtgctgaatacataaatcctggcgaacggctgatcgaggagggctgtatacatattatcagtctcggaagcaaagcactcatgattcaggtctgggccgacccccacaatgctactttaattttcagagtttgtatggacagcaatgacgacatgaaagctgtactgctggcccaggtggaaagccaagaaaacatctttcttccatcaaaatggcagcacctagtgctgacgtatctgcaacagcctcaaggcaaacggagaattcatggtaaaatttcgatatgggtctcaggtcagagaaaacccgacgttactctggactttatgctgcctaggaagacatccctgtctagcgacagtaataaaaccttttgcatgatcgggcattgcctgtcctcacaggaggagttcctgcagttggccggtaagtgggacctgggcaacctgttactttttaacggggctaaagtgggaagccaggaagcgttttatttgtacgcctgtgggccaaatcatacatccgtgatgccttgtaaatacgggaaacctgtgaacgattactctaagtacatcaataaggaaatcctgcgctgcgagcagattcgggagttgttcatgaccaaaaaggacgtcgatatcggcctgctgatagagagtcttagcgtggtgtacaccacgtactgccctgcacagtacaccatttatgagcccgtgatcagactcaagggccagatgaaaacacaactttcccaacgacccttctccagcaaggaagttcagagcatcctgctggaaccccaccacctgaagaatctgcagccgacagagtacaagacgattcagggtatattgcatgaaatagggggaacggggatattcgtcttcctttttgcccgtgtagtagagctgagcagctgtgaggaaacccaagcccttgccctgagagtcatcctcagcttaattaagtacaaccagcagcgcgtccacgaactcgagaattgtaacggcctgtccatgatccatcaggtgttaatcaagcaaaagtgcattgtcggcttctacatacttaagaccctgctggagggatgttgcggcgaggatatcatttatatgaatgaaaatggggagttcaaattagatgtggactctaacgccattatccaggacgtaaagcttttagaggaattgctgctggactggaagatctggagcaaggccgagcagggggtgtgggagaccctgttagcagctttggaggtattaatccgggcagaccatcatcagcagatgtttaacatcaaacagctgctaaaggcacaggtggtccatcactttctccttacttgtcaggtgttgcaggagtacaaagaaggtcaactgactcctatgccaagggaggtctgccggtcctttgttaaaatcattgccgaggtgctgggttctccacccgacctggaattgctgaccatcatctttaacttcctgctggcagtgcacccacctactaacacttacgtctgccacaatccaacgaatttctacttcagcctgcatattgacggcaaaatatttcaggagaaggtgcgaagcatcatgtaccttagacattccagtagcggcggtagatccctaatgtctccaggtttcatggttatctccccttcagggttcaccgcctcaccctatgaaggcgaaaatagtagcaatataattccgcaacagatggctgcccacatgttgaggagccgtagtttgcccgcattccccactagttcactgctgacccaatcccaaaagttaaccggatctctaggctgcagtatcgatcggctccagaacattgcggacacctacgtagcaactcagagcaagaagcagaactccctgggctcctcagacaccctgaagaagggcaaagaggacgccttcatctcttcctgcgagagcgccaagactgtctgcgaaatggaagcagttctctcggcacaggtgtccgtaagcgatgtccctaagggagtgctcggattcccagtggtgaaagctgatcacaagcagttgggcgctgagcccaggtccgaggatgactcaccaggtgatgagtcctgcccacggaggcccgattatctgaaaggcctggctagttttcagcgcagtcactcaaccattgctagcttggggctcgcctttccatcccaaaacggcagcgcggctgttggaaggtggccctccctcgtggatagaaataccgatgactgggaaaacttcgcatactctcttgggtatgagcctaactataacagaacagcttccgcccattccgtcaccgaggactgcctggtacccatttgttgtggtctctatgagctgctgagcggggttctgctcattcttcctgacgtgctgctggaggatgtgatggacaagctgatccaggccgataccctgttggtgctagtgaatcacccaagcccagctatccagcagggagtgatcaaactcttggatgcctactttgcccgtgctagcaaggagcagaaagacaagttcctgaaaaaccgtggcttttctttgctggccaaccagctgtatcttcatcggggaacacaggaactgttagagtgttttatagaaatgttcttcggccgacacattggcctggacgaagaatttgatttagaggacgtacggaatatgggcctattccagaaatggtcagtgatccccatactgggactaatcgaaacatcgctgtacgacaacattctactgcataacgcactacttctactgttgcaaattttgaatagctgtagcaaggttgccgatatgctcttggataatggccttctgtatgtgttatgtaacacagtggccgcactaaacgggttagagaaaaacatacctatgtctgagtacaagctcctggcctgtgacatacagcagttgttcatcgcagtaacaatccatgcctgctcctcatctggatcccagtacttccgcgttattgaggacttgatcgtcatgttggggtatctccaaaattctaaaaacaagcgcacacagaatatggcagtcgctcttcaattgagagttctccaagctgctatggagtttattaggactaccgctaatcatgacagtgaaaacctcacagactctctacaatccccctcagctcctcaccacgccgtggttcagaaacgtaagagcatagccggacctagaaagtttcccctggcgcagaccgagtcattgctgatgaaaatgagaagcgtcgctaatgatgagctgcacgtgatgatgcagagaaggatgtcccaggaaaaccccagccaggccaccgagaccgaactggcgcagagattacagcgcttaacagtgctcgcggtcaatcgaatcatatatcaagagtttaacagcgacatcatagatattctcagaacccctgagaatgtgacacagtcgaaaactagcgtgttccaaactgaaattagcgaggaaaatatacaccacgagcagtccagcgtattcaatccattccaaaaagaaatcttcacctacctggtggaaggattcaaagtcagcattggctcttctaaagccagcggctccaagcagcagtggacaaaaatactctggagctgtaaagaaaccttccgtatgcagctggggcgactccttgtgcatatcttatctcctgcccacgccgctcaggaaagaaaacagatattcgagatcgtacatgaaccgaaccatcaggagatcctgcgagattgtctgtctccaagtctgcaacacggcgcaaaactggttctttatctgtcagaactcatccataaccaccaaggggagctgaccgaggaggagttggggaccgcagagctactgatgaacgccctgaaattatgcggtcacaaatgcatcccacccagcgccagcacaaaggccgatcttattaaaatgatcaaagaagagcagaaaaaatacgagaccgaggaaggtgtgaataaggcggcttggcagaagacagttaacaacaaccagcagtcattgttccagagactggacagcaaaagtaaagacatctcaaaaatagctgccgatatcacacaagcggtaagcctgtcccaggggaacgagcgcaaaaaggtaatccaacacataaggggaatgtataaggtggatttgtcagcttctagacactggcaggaactaatacagcagctgacacacgatagggccgtgtggtacgaccctatatattatcctaccagttggcagctggatccaactgagggacctaacagggagcggaggcggttgcaacggtgttacctgaccatccccaataaatatcttttacgcgacagacagaagtcagaagacgtggtgaaacctcccttgtcctatctgtttgaggacaagacgcatagcagcttttcaagcaccgtcaaggacaaggcagcgagcgagagcattagggttaatagacgctgcatatcagttgcacccagtagggagacagccggtgaactattgctggggaagtgtggaatgtattttgtggaggacaatgcctccgacaccgtggagtcatcatctttgcagggcgaacttgaaccagcctcctttagttggacatatgaagaaattaaggaggtgcataagaggtggtggcagctgcgagacaatgccgtcgaaatcttcctcacaaacggacggacacttctcttggcatttgataacacgaaggtccgggatgacgtgtatcataatatcctgacaaacaatttaccgaatcttcttgagtacggcaacatcactgccttgaccaacctgtggtatacgggacagatcaccaacttcgaatatctgacccaccttaacaagcacgctgggcgtagctttaacgacctcatgcagtacccagtgttccctttcatcctggccgactatgtcagtgagacactcgatctgaatgaccttctcatttaccgcaatttaagcaagcccatcgcagtgcagtacaaagaaaaagaggataggtacgttgacacttacaagtacttagaagaagagtatcgcaagggtgccagggaggatgatcctatgcccccagtacaaccgtatcactacggctcgcactattcaaactcaggaactgttttacactttctggtgcggatgcctccattcactaaaatgtttctagcctaccaggatcaaagttttgacatccctgataggaccttccactctacgaatactacttggaggctctcatcgttcgagagcatgacggatgtcaaggaactgattccggagttcttttacctgccagaattcctcgttaaccgcgagggcttcgattttggcgtgcgacaaaacggagagagggtgaaccacgttaatctgcccccttgggccaggaatgatccacgactgtttatcttgattcatagacaggcactggagtccgattacgtcagccagaacatatgtcagtggatcgatctagtgttcggctacaaacagaagggaaaagcatccgttcaggccattaatgttttccacccggcaacctacttcggcatggacgtttcagccgtcgaggatcccgtgcagaggagggctcttgagaccatgataaagacttacggccaaacccctagacagctttttcacatggcgcatgtgagcagacccggtgccaaactgaacattgagggcgaacttccagcagctgtgggactgctcgtgcagttcgccttccgcgagactagagagcaggtcaaggaaattacttatccatcccccctttcttggatcaaagggcttaagtggggcgagtacgtgggttccccgtcagcacccgttcccgtcgtctgcttcagtcagcctcatggcgaaaggttcggtagcctccaggccctgccaacaagggctatctgtggactctcgcgtaacttctgcctgctgatgacctactcgaaagaacaaggcgtccgatcaatgaacagcacagatatccagtggtccgcaatcctctcttggggctacgccgataacatcctgaggctgaagtcaaaacagtcggagcccccagtaaattttatccagtcttcacaacaataccaggtgactagctgcgcatgggttccggacagttgtcagctcttcactggttcaaagtgcggagtgattaccgcatatacaaacagattcacttcctctacaccctctgaaattgagatggaaacccaaatacatttgtatggccatacagaggagattacaagtctctttgtgtgcaaaccctacagcattcttatctccgtctcacgggatggtacttgtatcatctgggaccttaatcgactgtgctatgtgcagtccctcgccggacataaatcacctgtgactgcagtgtccgcatccgagacgagcggagacatcgctaccgtatgcgattctgctgggggaggcagcgatctgcggctttggaccgtcaacggggatcttgttggacacgtgcattgccgcgaaatcatttgttccgtcgcattctcaaaccagccggaaggcgtgagcatcaatgtaatcgcgggaggactggaaaacggcatagtcagactgtggagtacgtgggacctcaaacccgtgagggagattacctttccgaagtccaacaaaccaattatttctttaacattctcctgcgatgggcaccatctgtataccgctaactcagatggtactgtgatagcttggtgtcgcaaggaccagcagcgccttaagcagcctatgttttactcatttctgtccagctatgcggcaggctac

SEQ ID NO: 229145 - DNA, 4149 bp, synthetic construct
  misc_feature 1..4149: note = Description of Artificial Sequence: Synthetic coding sequence
  source 1..4149: mol_type = other DNA
atgtccacagacagtaatagcctcgctagggaatttctgaccgacgtgaaccgcctttgtaacgcagttgtacagagagtagaagcccgagaagaagaagaggaggagacacacatggcaacgctgggccagtacctggtgcacgggaggggtttcctgctcctaacaaagcttaattctatcattgatcaggctctaacatgtcgcgaggagctgctgacgttgctgctgtctctgctgcctcttgtttggaaaatccctgtccaggaagagaaggcgacagattttaacttacctctgtcagctgacataatcctcaccaaagaaaaaaatagcagttcgcaacggagcactcaggagaaactccacctggagggcagtgcactttcatctcaggtctcagctaaggttaacgtatttaggaagtctcggcgtcagcgaaaaatcacccataggtacagtgtgcgggatgctcgtaagacgcagctctcgactagcgattcggaggccaatagtgacgagaaggggattgcgatgaacaagcatcgtcggcctcatctgttgcaccacttcctgacttcttttccaaagcaggaccatcctaaggcaaaacttgatcggcttgcgactaaggaacagacccctccggatgcaatggctctggagaacagtagggaaattatccctcgacagggctccaataccgatattctcagtgagccagcagccctctccgttataagcaatatgaacaatagtccttttgatttatgtcatgtgctactgtctctcctagagaaagtgtgtaagttcgatgtcacgctcaatcacaattcacccctcgccgcaagcgttgttccgacattgacagagttcctggcaggatttggtgattgctgctccctttccgacaatctggaatctcgggtggtgtccgccggatggacagaagaacccgtggctctgattcaacgcatgctctttagaactgtgctccacctgctgtcggtggacgtatccactgcagagatgatgcccgaaaacctgcggaagaacctgactgagttgctccgcgcagcactgaaaattaggatatgcctcgaaaaacaacctgatccatttgcaccacggcagaaaaagaccttgcaggaagtccaggaggatttcgtcttcagcaaatataggcatcgtgccctccttcttcctgaactcctcgagggagtgctccagatcctgatctgttgtttgcagtccgccgctagcaatcccttctacttttcccaggccatggacctcgtacaggaatttattcagcatcacggcttcaacctcttcgagaccgccgtattgcagatggaatggctcgtcctccgggatggggtcccccctgaggcatcggaacacctgaaagctctgatcaacagcgtcatgaaaatcatgtccactgttaagaaggtaaagagcgagcaattgcatcacagtatgtgtacacgtaagcggcaccggcgatgtgagtattctcacttcatgcaccaccacagggatctaagcggcctgttggtgtccgctttcaagaaccaagtgtccaagaacccatttgaagagactgctgatggggacgtgtattatccggaacggtgctgctgcatagcagtgtgcgcccaccagtgcctcaggcttctgcagcaggctagcctctcctccacctgtgtccagatactgagtggggtgcacaatatcggcatatgctgttgcatggatcccaaatccgttatcatacctttgctgcacgccttcaagctgccagccctgaagaacttccagcagcatattctcaatatattgaataaactgattctagaccagttgggcggtgctgaaatcagccccaagattaaaaaagccgcttgcaatatctgcacagtggattccgaccagctcgcccaactggaggaaactctgcaggggaacctatgtgacgctgaactgtcctctagtttatcttctccgtcctaccggttccaaggtattttgccctctagtggctcggaggatctgctttggaagtgggacgcccttaaagcctatcagaacttcgtttttgaggaggacaggctccactcgatacagatagcaaaccacatttgtaaccttatccagaagggtaacatagtggtccagtggaagttatataattatatcttcaaccctgtgctgcagcggggtgtcgagctggctcaccactgccaacatctgtccgtgacctctgcccaaagccatgtgtgttcccaccataatcagtgtctgccacaggatgtgctgcagatttacgtgaaaacgcttccaatacttctgaagtcacgagtgattcgagatttattcctatcatgcaacggagtttcccagataattgagctgaactgccttaacggcatccgatcccactctctgaaggcatttgaaacactcattatcagcctgggcgagcagcaaaaggatgctagtgttccagatatcgatggtattgacatcgagcagaaggagctatccagtgtgcacgttggcacatcgttccatcatcaacaggcatacagtgacagccctcaatctctgtccaagttttatgccggtctgaaagaggcataccctaagcgtcgcaaaactgtgaatcaagacgtgcatataaatacgattaacttgttcctgtgtgttgccttcctgtgcgtttcaaaagaggcagaatcggaccgggaatcagctaacgatagtgaagatacgtccggctacgactccaccgcctctgagccacttagtcacatgctgccctgcatttcactcgagtcccttgtcctgcctagtcccgaacatatgcaccaggccgctgatatctggagtatgtgccgatggatttatatgttgtcatccgtattccagaaacaattctatcgcctcggagggtttcgggtatgtcataagctgatcttcatgattattcagaagttgtttcgcagccacaaggaagagcagggcaaaaaagaaggagacacgtccgtgaacgagaaccaagacctgaacagaatctcccaaccgaaaaggactatgaaggaggaccttctgagtctggccataaaatccgatccaattccatctgaactggggagcctgaagaaaagcgctgattctttgggcaaactggagttgcagcacattagttctatcaacgtggaggaggtctcagcaaccgaggccgctccagaggaagccaagcttttcacatcccaggagagtgagaccagtctgcaatcaataagactcctggaggcgctgctggccatttgccttcacggtgcacgcactagtcaacagaaaatggagctggaacttcccaatcagaacctgtcggtcgaaagcatcctgttcgagatgagggatcacctcagccaatcgaaggtcatcgaaacacagctcgccaaaccattgtttgatgcccttcttcgcgtggctcttggaaactattctgcggacttcgagcacaacgatgctatgacagagaaatcccatcagagtgctgaggaactgtcttctcaacctggcgatttctctgaggaggcagaagactctcagtgctgctcttttaaattgttagtggaggaggaaggttatgaggccgacagcgaatccaacccagaagatggcgaaactcaagatgatggcgtggatctaaagagtgagacagaaggcttcagcgcgtccagttcaccgaacgatctgttggagaacctgacacagggcgaaatcatataccccgaaatctgcatgctcgagttgaacctcctgagcgcctcaaaagccaaattggacgtcctggcacacgtattcgagtctttccttaaaataattcggcaaaaagagaagaacgtttttttgttgatgcagcagggcactgtcaagaatctcctaggaggttttttgtctatcttgacgcaagatgacagcgattttcaggcttgccagagggttttggttgatcttctcgtgtcactgatgagcagcagaacttgttccgaagaattgacgctattgctccggatcttcctggagaaatccccatgcaccagagcaacggatcagaaggtgcaaagcacctag

SEQ ID NO: 229146 - DNA, 1254 bp, synthetic construct
  misc_feature 1..1254: note = Description of Artificial Sequence: Synthetic coding sequence
  source 1..1254: mol_type = other DNA
atggcagccccaggttctgctcggcgtccactgctgctgctgttgctgctgctcctgctggggttgatgcactgcgcttctgccgctatgttcatggttaagaatggcaatggcaccgcatgtataatggctaacttctcagcagcgttctccgtaaattacgacaccaaaagcggtccaaagaatatgacattcgatctcccaagcgacgccactgttgtgctgaatcggtcctcttgcggcaaggaaaatacttccgatccatctctggtcatcgcctttggcaggggacatacacttactctcaacttcacaaggaatgctacacgttattcggtgcagctcatgtctttcgtttataacctctcagacacccacttattccccaacgcctcttctaaggagattaagaccgtggagtctattaccgatatccgggcagatattgacaaaaagtaccgctgtgtcagtggtacccaggtacacatgaacaacgtcaccgtgactctgcatgacgccaccatacaagcctacttgtcgaacagcagcttttcaaggggggagactagatgcgagcaggatcgcccttccccaactacagcacctcctgcacccccaagtccctcgccctccccggttcccaagagccctagtgtcgacaagtataacgtgtcaggcaccaacggaacttgccttttggcatctatgggcctgcaactaaacctgacatacgagagaaaggacaacaccaccgtcacccggctgctcaatatcaacccgaataagacgtctgcttccggatcttgcggagctcacctggtgacccttgaattgcactctgagggtaccaccgtgctgctgtttcagttcgggatgaatgcatcctccagccggtttttccttcagggaatccagctcaacacaatcttgccagacgctagagaccccgctttcaaagccgctaacggttcactcagggccctgcaggctaccgtggggaactcttacaagtgtaacgctgaagagcacgtgcgagttacaaaggcctttagcgtgaatatttttaaggtttgggtgcaggcctttaaggtagaagggggacagttcggcagtgtcgaggaatgccttctcgacgagaacagcatgttgatccctatcgccgtgggaggagcccttgcaggactggtcctgatcgtattgatcgcctatttagttggacgcaaaagatcacacgctggctatcagacaatttag

SEQ ID NO: 229147 - DNA, 1095 bp, synthetic construct
  misc_feature 1..1095: note = Description of Artificial Sequence: Synthetic coding sequence
  source 1..1095: mol_type = other DNA
atggcggcacccggaagtgcgcgacggcctctgctgctgctccttctgttgcttctactgggcctgatgcactgcgcttcagccgcaatgttcatggtgaaaaacgggaacggaacggcttgtataatggctaacttcagcgctgccttctcagtcaactatgacaccaaatccggtcctaagaacatgaccttcgatctccctagcgacgcaaccgtggtactcaaccgtagctcttgcggtaaggagaatacatcggaccctagcctagtcatcgctttcggcaggggccacacccttaccctaaactttacaaggaatgccacaagatattctgtccagctgatgagcttcgtctataacttgtctgacacccaccttttccctaatgcgtcctccaaggagacaagatgtgaacaggacaggccatcaccaactacagcgccacctgctccaccttccccctcacccagccctgtacccaaaagcccttccgtagacaagtacaatgtatctggaaccaatggcacctgcctgctcgccagcatggggctgcaacttaacctcacttatgaaagaaaggataacactactgtcaccagactgctcaatattaatcccaacaagacttctgcctccgggtcctgcggtgctcacttggtaaccctggaactgcacagcgaaggtacaacagtgctacttttccaatttggcatgaatgcttcctctagccggttcttcctgcaaggaatccagctgaataccattctccccgacgcacgcgatcctgcattcaaggccgcaaacggcagtcttcgcgcactgcaagctactgtaggcaacagttataaatgcaacgctgaagaacacgttagagtgaccaaggccttttccgtcaacattttcaaggtttgggttcaggccttcaaagtcgagggcggacagttcgggtccgttgaggaatgccttttagatgagaactccatgttaatcccaattgcagtgggaggcgctctcgcagggctagtgttgatcgtcctgatcgcatacttagtaggacgtaagcggtcacacgcaggctatcagaccatctag

SEQ ID NO: 229148 - DNA, 1233 bp, synthetic construct
  misc_feature 1..1233: note = Description of Artificial Sequence: Synthetic coding sequence
  source 1..1233: mol_type = other DNA
atggtgtgttttagacttttccccgttcccggaagcggactcgtgttggtgtgtctagtgctgggagctgtgaggagctacgctctggaattaaatctaacagattcagaaaacgccacatgtctgtatgctaagtggcaaatgaattttacggtgcggtatgagactaccaacaagacctacaagaccgtcaccatctcagatcacggaactgttacttacaatggatccatttgcggggatgaccagaacggccctaagatagcggttcagttcggacctgggttcagttggatagcgaactttactaaagctgcttccacatattctatcgattccgtgagtttttcttataataccggcgacaatacgacttttccagatgctgaagataagggcatcctcaccgtggatgaactgctggctatccgtatccccctgaacgacctcttcaggtgtaactctctcagtacccttgaaaaaaacgatgtcgtacagcactactgggatgtcctggtgcaggcattcgtgcagaatggtaccgtttcgacaaatgagttcctttgcgacaaggacaaaacttccactgtcgcacctacgatacataccaccgtgccaagtccaactacaacccctacccccaaagaaaaacccgaagcagggacctatagcgtcaacaacggcaacgacacatgtttgttggcaacaatgggcctgcagctgaacatcacacaggataaggtagctagtgtgattaacataaatcccaacactacccatagcacgggttcctgccgatcacacacagcactactgcggctaaattcctcgaccattaaatacctggatttcgtgttcgccgtaaaaaacgaaaatagattttatctaaaggaagttaatatcagcatgtatctggtcaacggctcagtcttctctatcgcaaataataacctatcttattgggacgctcccctcgggagctcttatatgtgtaacaaggaacagacggtatctgtgagcggggctttccagatcaataccttcgacttgagagtgcagccttttaacgtcacacagggcaagtactctaccgcccaggattgctccgcagacgacgacaactttcttgtaccaatcgcagttggcgcagcactcgcaggagtgctgatactggtgctgctcgcttactttattggtctgaagcatcatcacgcagggtacgaacagttctag

SEQ ID NO: 229149 - DNA, 1233 bp, synthetic construct
  misc_feature 1..1233: note = Description of Artificial Sequence: Synthetic coding sequence
  source 1..1233: mol_type = other DNA
atggtctgctttaggctatttccagtgcccggtagtggcttagtcctcgtatgcctggtgctgggcgctgtccgaagctacgcactggagcttaacctgactgactccgaaaacgcgacctgcttgtatgcaaagtggcaaatgaattttaccgtcagatatgagaccaccaataaaacttacaagaccgtgacaatctccgatcatggcactgtgacttataacggctctatttgcggggatgaccagaatggcccaaagattgctgtgcagtttggcccaggcttctcgtggatcgccaatttcactaaagccgcatccacttattcaatcgactctgtgtcatttagctataacacaggcgataacaccactttcccggacgcggaggataaggggatcttgacagtcgacgaactgttagcaatcagaatcccgctgaatgacttgttcagatgcaactccttgtccacccttgagaagaacgacgtcgtgcagcactattgggacgtgcttgtgcaagcattcgtacaaaatggcactgtcagtaccaacgaatttttgtgcgacaaggacaaaacaagtaccgtagccccaactatccacacaactgtgccatccccgacaactactcctacgcccaaagagaaacctgaagctgggacctacagcgtgaacaatggcaacgacacttgtctgcttgccaccatggggctccaactcaatatcacacaggacaaggtggcttcagtgatcaatataaatccaaataccactcactctacaggctcttgccgcagtcacaccgcactgctccgactgaattccagtaccatcaagtacctcgattttgtctttgccgtcaagaatgaaaaccgcttttacttaaaggaggttaatatttctatgtaccttgtgaatggatctgtgttctctatcgctaataacaacctgtcctattgggatgcaccgcttggatcaagctacatgtgtaataaggagcagacagttagcgtgtcaggagcattccagatcaacacttttgatttaagggtgcagcctttcaatgtgacgcaaggcaagtactcaacagcacaagaatgtagcctcgatgatgataccatcctgattcctatcatcgttggagccggactgagcgggttgatcattgtgattgttatcgcctacgtgatcgggaggagaaagagttacgctggctaccagacactgtag

SEQ ID NO: 229150 - DNA, 1236 bp, synthetic construct
  misc_feature 1..1236: note = Description of Artificial Sequence: Synthetic coding sequence
  source 1..1236: mol_type = other DNA
atggtctgcttccgtttgtttccagttcctgggtcagggcttgttttagtgtgcctggtcttaggtgcagtaagatcatacgccctggaactgaacctgactgattcagagaatgccacctgtctgtacgccaagtggcagatgaactttaccgtgcgatatgaaacaacaaacaaaacgtacaagaccgtgactatttccgatcacggaaccgtgacttataacggcagtatttgcggcgacgatcaaaacgggcctaaaattgccgtgcagtttggtcccggattcagctggatcgctaacttcacgaaagccgcatccacttatagcatcgattcagtctccttttcttacaatacaggggacaacacaacatttccagacgcagaagataaaggaattctgaccgttgacgaactcctggctatcagaatcccactgaatgacctgttcagatgcaattcactatctaccctagagaaaaacgatgtcgtgcagcattactgggacgtcctggtgcaggcttttgtccaaaacggcaccgtttccacaaacgagttcctctgcgataaggacaagacctcaacggtagctccaaccatacataccacagtaccttccccgaccaccacacccacacccaaagagaagccggaagcaggcacatactctgttaataatggaaacgacacctgcctgctagctacaatggggctacagcttaacattacccaggacaaagtggcttccgtgattaatattaatcccaacaccacccactccactggatcatgtcggagccacaccgcgctcctgagattaaatagttccactatcaaatatcttgactttgtgttcgccgttaagaacgagaatcgcttttacttgaaagaggtgaacatctccatgtacttggtgaatgggtccgtcttctctattgcaaacaacaacctctcctattgggacgcaccgctgggctcctcatacatgtgcaacaaggaacagaccgtctccgtttccggagcctttcagattaatacctttgacctccgcgtgcagccttttaatgtgacacaaggtaaatattccaccgccgaggagtgctcagcagacagcgatctgaactttttgatccccgttgcagttggggtggcactgggatttctaatcattgtggtctttatctcgtacatgattgggcgacggaaaagccgcacggggtaccaatcagtgtag

SEQ ID NO: 229151 - DNA, 903 bp, synthetic construct
  misc_feature 1..903: note = Description of Artificial Sequence: Synthetic coding sequence
  source 1..903: mol_type = other DNA
atggtatgctttaggctgttccctgtgcctgggtctggtctggtccttgtctgcctcgtgttagggatcctgacggttgacgagctgctggctatcagaatcccactgaacgacttattcaggtgcaactccctttcaactctcgagaagaacgatgtggtccaacattactgggatgtactggtgcaggcctttgtccaaaatggcacggtctccaccaacgaattcttgtgcgataaggacaagacctcgaccgtcgctcccaccatccacacgactgtgccttccccaacaacaacccccacaccaaaagagaaaccggaggccggaacttactccgtgaacaatggaaacgatacctgcctgttggccacaatgggattacagctgaacattacccaggacaaggttgccagcgtaatcaacattaaccccaacactactcattctactggcagctgccggagccacaccgcactcctccgcctgaacagttcaactatcaaatacctcgatttcgtctttgccgtgaagaacgaaaatagattctatctcaaggaggtcaacatctcgatgtatttggtgaacgggtccgtattctctatagcgaataataacttaagctactgggacgcgccactgggttcctcgtatatgtgtaacaaagagcagaccgtctcagtgtccggggcattccagatcaatacttttgacctgcgggtgcagccattcaatgtgacgcagggcaagtactccacagctgaggagtgctcagcagactctgacctcaacttcctcatcccagttgccgtcggagtggcccttggtttcctgattattgtcgtcttcatctcttacatgatcggcaggcggaagtcccgaacaggctaccagtcagtctag

SEQ ID NO: 229152 - DNA, 1092 bp, synthetic construct
  misc_feature 1..1092: note = Description of Artificial Sequence: Synthetic coding sequence
  source 1..1092: mol_type = other DNA
atgaacttcactgttagatacgagacgacaaataagacatacaaaacagtgactattagcgatcatggaacagtcacttacaatggcagcatctgcggcgacgaccagaacggacctaagatcgctgtgcagtttggtccgggtttcagttggatagctaattttaccaaagccgcttccacatattcaatcgactcagtgagcttctcatataataccggtgataacactaccttccccgatgccgaggacaagggtattctcacagtggatgaactcttagcgattcgcattcctctgaacgacctttttagatgcaattccctgagcacacttgaaaaaaacgacgtggtccaacattattgggatgtgcttgtgcaggctttcgtgcagaatggaacggtcagcacgaacgagttcctgtgtgataaagataagacctcaacagttgccccaacaattcacaccactgtgccctcaccaaccaccacccctactccgaaggagaaacccgaggccggaacctatagcgtcaataatggaaacgacacgtgtctcttagccaccatgggactacagctgaacataacccaagacaaggtcgccagcgtcatcaatattaatcctaataccacccactcaactggcagctgccgttcacacacagcacttctgaggctcaactcctctaccattaagtatctcgacttcgtctttgcagtgaaaaatgaaaatcgtttttacctgaaagaggtgaacatctccatgtacctggtgaacggctccgttttcagcatagcaaacaacaatttatcttactgggatgcccctcttggcagtagttatatgtgcaacaaagaacagactgtttccgtgagcggcgcttttcagattaatacctttgacctgcgggtgcagccttttaacgtgacgcaaggcaaatatagtaccgcacaggaatgtagtctggacgatgacacaattctgatcccaataatcgtcggcgcaggactgtcaggccttataatcgtgatcgtgatcgcatatgtgatcgggaggaggaaatcatatgccggttaccagaccctgtag

SEQ ID NO: 229153 - DNA, 447 bp, synthetic construct
  misc_feature 1..447: note = Description of Artificial Sequence: Synthetic coding sequence
  source 1..447: mol_type = other DNA
atgaaggccctcattgtcctagggttagtgctgttatccgtgaccgtacaagggaaggtcttcgagcgctgcgaacttgctcggacgctgaaacgtctgggaatggacggataccgcggtatctccttagccaattggatgtgcttagcgaagtgggaatccggatataatactagggcaactaattataacgccggagatagatctaccgattatggtattttccagatcaactccagatattggtgtaacgatggaaaaacacctggggctgtcaacgcctgccatctatcttgcagtgctctccttcaggacaacatagcagatgcagtggcctgcgctaaaagggttgttcgggacccgcaaggcatccgcgcttgggtcgcttggaggaacagatgtcagaaccgggatgtgcgacagtacgttcaggggtgcggtgtgtag

SEQ ID NO: 229154 - DNA, 585 bp, synthetic construct
  misc_feature 1..585: note = Description of Artificial Sequence: Synthetic coding sequence
  source 1..585: mol_type = other DNA
atgcaagacgcccctctgagctgtctgtcccccaccaagtggtcttcagtttcctctgctgactctactgaaaagagtgcctctgccgctggaacacgtaatctgccattccagttttgcctccgccaagcgctgagaatgaaagctgccggaatcttgaccttgattggttgtctggtgaccggtgctgagagcaagatctatactcgctgtaagctagccaagatcttttcccgcgctggcctggacaattattgggggttttcgctaggaaattggatttgtatggcctattatgagtctggctacaacacaacagctcagaccgtcttggatgacggcagcattgactacggcatctttcaaatcaactcttttgcatggtgcaggcgaggtaaactgaaagaaaacaaccactgtcacgtggcatgtagtgccctcgtgacagatgatctgaccgacgccatcatctgcgcaaaaaagatcgtgaaggagactcagggaatgaattactggcaaggatggaagaagcactgcgagggaagggatctgtctgactggaaaaaggattgcgaggtatcctag

SEQ ID NO: 229155 - DNA, 441 bp, synthetic construct
  misc_feature 1..441: note = Description of Artificial Sequence: Synthetic coding sequence
  source 1..441: mol_type = other DNA
atgaaagctagcgttgtcttgtctcttttgggctacctagtagtcccttccggcgcatacattctcggacggtgtacggtggctaagaaactgcacgacggtgggctcgactactttgaggggtactctcttgaaaattgggtgtgtctggcctacttcgaaagcaaattcaacccaatggccatttacgaaaatactcgagaaggctacacaggattcggcctgtttcagatgcgaggaagcgattggtgtggcgatcacggaaggaacaggtgccatatgagctgttctgcacttttaaaccctaatcttgaaaagacgattaaatgtgccaagaccatagtgaaaggaaaagagggcatgggcgcttggccaacctggagcaggtattgccagtacagcgacactctggctcggtggctggacggatgtaagttgtag

SEQ ID NO: 229156 - DNA, 441 bp, synthetic construct
  misc_feature 1..441: note = Description of Artificial Sequence: Synthetic coding sequence
  source 1..441: mol_type = other DNA
atgaaagcctctgttgtcctgagtctgctgggttacctcgtggttccaagcggggcatacatactgggtaggtgcactgttgcgaagaaattacacgatgggggactggattattttgaaggctattctctcgaaaattgggtatgtttggcgtattttgagtcaaaatttaacccaatggccatctatgagaatactcgtgaagggtacacagggttcggcctttttcaaatgcgtggctccgactggtgcggtgatcacggacgtaaccggtgtcacatgtcctgctcagccctgttgaacccaaaccttgagaagacaattaagtgtgctaagaccattgtgaagggtaaggaagggatgggggcatggccaacatggtcccgatactgccaatattctgatacgctggctaggtggctggacggctgcaagttgtag

SEQ ID NO: 229157 - DNA, 447 bp, synthetic construct
  misc_feature 1..447: note = Description of Artificial Sequence: Synthetic coding sequence
  source 1..447: mol_type = other DNA
atgacaaaggctcttctgatatacttggtttcatctttcctagccctaaatcaggctagtctgattagcaggtgtgatcttgcacaggtcctgcagctggaggacttagatggatttgaaggctatagcctgagtgactggttgtgtctcgcttttgtggagtctaagttcaacattagtaagatcaacgaaaacgcagacggatccttcgactacggtttgtttcagatcaactcacactactggtgcaatgattacaagtcatactctgagaacttgtgtcacgtggactgtcaagacctcctgaaccctaatttacttgcgggtatccattgcgccaagaggatcgtgtcaggagccaggggtatgaacaactgggtggaatggcgcctgcattgctccgggaggcccctgttttattggctgacggggtgccgcctgcgctag

SEQ ID NO: 229158 - DNA, 447 bp, synthetic construct
  misc_feature 1..447: note = Description of Artificial Sequence: Synthetic coding sequence
  source 1..447: mol_type = other DNA
atgacgaaagctttactcatatacctcgttagctcgttccttgccttaaaccaggcttccctgatctccaggtgcgatcttgcccaggtgttgcagctggaagacttagatggatttgaaggatacagcctcagcgattggctgtgcctagcttttgttgaatctaaattcaacatctcaaagattaatgaaaacgccgacgggagttttgactacggcctcttccaaataaatagccattactggtgcaatgactacaagagttattctgagaatttgtgccatgtcgactgccaagacctgctaaacccgaacctgcttgccggaatacattgtgcgaagcggattgtgtcaggagcaagaggaatgaataactgggtggagtggagattgcactgctctggaagaccgctcttttactggctcactggctgtaggctgaggtag

SEQ ID NO: 229159 - DNA, 447 bp, synthetic construct
  misc_feature 1..447: note = Description of Artificial Sequence: Synthetic coding sequence
  source 1..447: mol_type = other DNA
atgaccaaggctcttttgatatacctcgtgagttcctttcttgctttaaatcaggcgagcctcatttccaggtgtgacttagctcaggtattgcagctggaagatcttgatggctttgagggttatagcctctcagactggctttgcctggcctttgtggaaagcaaatttaacatcagcaagattaacgagaacgctgatggctcatttgactatgggctgtttcagataaatagccattactggtgcaacgactacaaatcttatagcgaaaacctttgtcacgtcgactgccaagatctccttaatcccaacctcctggctggaattcactgcgctaaaagaatagtgtccggagcgagaggcatgaataattgggtagaatggcggctacactgtagcggtcggccacttttctattggctgaccggatgtcggctcagatag

SEQ ID NO: 229160 - DNA, 2952 bp, synthetic construct
  misc_feature 1..2952: note = Description of Artificial Sequence: Synthetic coding sequence
  source 1..2952: mol_type = other DNA
atggaaatgaagttacctggccaagaaggttttgaggccagctcagccccacgtaacatcccctcaggcgagctggatagtaaccctgaccccggaactgggcctagtcccgatggaccatcagacacagagagtaaggaactgggtgttcctaaggaccccctgcttttcatccagctaaatgaattgcttggatggcctcaggcactcgagtggcgagagactggtagcagttcagcctccctgctgctggacatgggcgagatgcccagtattactctgagcacgcacctccaccacagatgggtcttattcgaggaaaagctcgaggtggccgctgggagatggagtgcgcctcacgtacctacgttagcgcttccaagcctccagaaacttcgaagcctgctggcagagggattggttctgctggattgtcctgcccaatctttgctcgagctcgtggaacaagtgactagagtggagtcactaagtccagaactgagaggacaactccaagccttactcctgcagcggcctcagcattacaaccaaacaactggaaccaggccatgctggggatccactcaccctagaaaagcgtccgacaatgaagaagccccactgcgtgagcagtgtcagaatccattgagacagaagctgccccctggcgctgaagcaggcactgttctggcaggcgagctggggttcctggcacagcctcttggagcatttgtgcggctgagaaaccccgtcgtccttgggagcctgaccgaggttagtctcccttcaaggtttttctgcctgctgctgggcccttgcatgctgggcaaagggtatcatgagatggggcgtgctgctgccgttttgctgtccgatcctcagtttcagtggagcgtccgtagggcatctaatctgcacgaccttttagcagctttagatgcattcttggaggaggtcaccgtgctccccccaggacggtgggatcccaccgccaggataccccctcctaaatgcctcccgtctcagcataaaagattaccctcccagcagcgggaaatcagaggtccggctgtccccaggcttacctccgcggaggaccgccaccgccacgggcctcacgctcacagtcccgagttgcagcgcaccggacggttatttggcggactaattcaggatgtgcgccgaaaggtgccttggtacccttcagatttcttggatgccctgcacttgcaatgtttcagcgccgtgctgtacatataccttgctaccgtcactaacgcgatcactttcgggggactgctaggtgatgctacggatggtgcccagggggtgctggaatcttttctcggtactgcagtcgcaggtgcagcgttttgtctgatggctggtcagcctctgactatacttagtagtacaggtccagtactggtgtttgagcgtctgctcttctccttttccagggattactctctcgattatctgcccttccggctgtgggtcggtatctgggtcgctactttttgcctggtgctggtcgctacagaagcaagcgttctggtccggtattttaccagattcacagaggaggggttttgtgccttgatatccctgatttttatttatgatgccgttgggaaaatgcttaatctcacacatacgtatcctatccagaagcccggatcctccgcctatggctgtttgtgccagtatccaggccctggcggaaatgagtcacagtggataagaacacgccctaaggaccgggatgacatcgtgtcgatggatttagggcttatcaatgccagccttcttccgcctccagagtgtactcgacaggggggacatccaaggggacctgggtgccacactgtgccagacatagcattcttttccctgcttttgttcttgacatccttcttcttcgccatggcgcttaagtgcgtgaagaccagcagattttttcctagcgtggtgaggaaaggcttatcagacttctcctctgtcctagcaatccttttgggttgtggtctcgatgcttttctgggcctagcaacacctaagcttatggtgccccgagagttcaaacccacactacctgggagaggatggctggtgtcccccttcggagcgaacccatggtggtggagcgtggctgctgccttgcctgctctcttgctttcgatcttaatttttatggaccagcaaatcaccgccgtgattttaaatcgaatggaatacagactgcaaaaaggtgccggtttccatctcgatttattttgcgttgccgttctgatgttgctaaccagtgctcttggcctcccctggtatgtgagcgccactgtgattagtctggcccatatggactcgctgagacgcgagagtcgcgcttgcgccccaggtgaaagacctaattttttaggaatccgagaacagaggctgacaggactcgtggtctttattttgacaggcgcatccattttcctggcgccagttctgaaattcatcccaatgcccgtattgtatggcatcttcttgtatatgggggttgctgctctgtctagtatacaatttaccaatagagtcaagctgctgttgatgccagctaaacaccagccggacctcctactcttacgacatgttccactgactagagtgcaccttttcactgctatccagcttgcgtgcctcggcctcctgtggattattaagtccacaccagctgctatcatctttccactaatgctgctcggtctcgtgggagtgaggaaggcactggagcgagttttctccccccaggaactgctctggctggacgaattaatgcccgaggaagagagaagcattcctgaaaagggactcgaacctgaacacagtttttctggatccgactccgaggacagcgagctgatgtatcagccaaaagcgcctgagataaacatctcggttaactag

SEQ ID NO: 229161 - DNA, 123 bp, synthetic construct
  misc_feature 1..123: note = Description of Artificial Sequence: Synthetic coding sequence
  source 1..123: mol_type = other DNA
atgcgcttcgcgtggactgtgctgttactgggtccgcttcagttgtgcgccctcgtccattgtgcccctcctgctgctggacagcaacagccaccccgagagcccccagctgctccagggtag

SEQ ID NO: 229162 - DNA, 1134 bp, synthetic construct
  misc_feature 1..1134: note = Description of Artificial Sequence: Synthetic coding sequence
  source 1..1134: mol_type = other DNA
atgagattcgcttggactgtgttgctgttgggacccctccagctgtgcgctctggttcactgcgcacctcctgcagccggacagcagcaacccccaagggagcccccagccgcacctggagcagcttccgcccagcagcctcgcaccccgatccttctaatacgagataacaggaccgcggctgcgagaacccggacagctggttcatctggggtcacagcaggcagaccacgaccaaccgcacggcattggtttcaggccggatattcaaccagtagagcaagagaagcaggtgcctctagggctgaaaatcagacagccccaggcgaggtgcctgccctgagcaatctacgccctcccagcagagttgatggcatggtcggagatgacccttacaacccctataaatactctgatgataacccctactacaattattacgatacctacgaacgtccgcgaccagggggacgttaccgcccaggttacggcactggttacttccaatacggccttcccgatctggttgctgacccatattacattcaggcgtccacctacgtccaaaagatgtcgatgtacaacttgagatgtgctgccgaggagaattgtctagctagtacggcctaccgggctgatgtccgggactatgatcacagggtgctgttacgcttcccacagagggtcaagaaccaaggcacaagcgacttcctaccatcgagacctagatactcttgggaatggcactcttgtcatcagcactatcactccatggatgagttctctcactatgacctcttggacgccaacacgcagcggagggtagctgaaggccataaggcctcgttctgcctggaggatacctcatgtgattatgggtatcaccgcagatttgcttgtacagcccatacccagggactctcgcctggatgctacgatacatatggcgctgacatcgactgtcagtggatcgacattacagacgtgaagccaggtaactatattctcaaggtgagtgtgaacccgagttatctcgtgccagaatcagattacactaataatgttgttcgctgtgacataaggtacactgggcatcatgcatacgccagcggctgcactatttcaccctattag

SEQ ID NO: 229163 - DNA, 2325 bp, synthetic construct
  misc_feature 1..2325: note = Description of Artificial Sequence: Synthetic coding sequence
  source 1..2325: mol_type = other DNA
atggaaagaccgctttgcagtcatctgtgtagctgtctggccatgctggctctcctctcacctctgtcactcgctcaatacgattcctggccccattatcccgaatattttcagcagccagcaccagagtatcatcagcctcaggctcctgccaacgtggccaagattcagttgcgcctggcaggacagaagagaaaacattctgaaggacgggtggaggtgtactatgacgggcaatggggcaccgtgtgcgacgacgatttctccattcacgcggctcacgtggtgtgtagagaactgggttatgtggaggccaagagctggacggctagcagcagttacggcaagggagaaggccctatttggcttgataatttacactgtactggtaatgaggcaaccttggctgcgtgcaccagtaacggctggggcgtgaccgactgcaagcatacagaggacgtaggggtggtatgctccgataagaggattcctggcttcaagtttgataattccttaatcaaccagatcgagaacctcaatatccaggttgaagacattagaatcagggcaattttgtcgacctacaggaagagaactcctgtgatggagggatatgttgaggtgaaggagggcaaaacttggaaacagatttgcgacaagcactggacagcaaagaattctcgcgtcgtctgtggcatgtttggttttcccggagagaggacctataacacaaaagtgtacaaaatgttcgcatcccggagaaaacaaaggtactggccatttagcatggattgcaccggtactgaggcacacatttccagttgcaagctgggtccccaagtttcattggaccctatgaaaaatgtcacgtgcgaaaacggcttacccgctgtcgtgagctgcgtccccggtcaggtgttttcacctgatgggccatctagattcagaaaggcatataagcccgagcagcccctggtgagattacggggtggagcctatattggcgagggtagagtcgaggttcttaagaacggcgaatggggcacagtctgtgatgataagtgggatctggtgagcgccagcgtggtgtgccgggagctggggtttggttctgctaaggaagcagtgacaggcagtcgactgggccagggcatcggccctatccacctcaatgagatccaatgtaccggtaatgagaaatccatcattgattgtaagtttaatgccgagagtcagggatgcaatcacgaggaagatgcaggcgttcgttgtaatactccagcaatgggtctccaaaagaaattaaggctgaacgggggtaggaacccatacgagggccgtgtggaggtgctggttgagcggaatgggtctctggtgtggggtatggtgtgtggccagaactggggcatagttgaggcaatggtcgtgtgtcggcagcttggcctgggtttcgctagcaatgcttttcaggagacctggtattggcatggagacgttaattctaataaggtcgttatgtccggtgtgaagtgttctggcactgagctgtctctagcgcactgcagacatgacggggaagacgtagcttgtccccaaggtggcgtgcagtatggggcaggcgtggcctgctccgagaccgctcctgacctcgttctgaacgcggagatggtgcagcagacaacctacctggaggatagaccaatgtttatgctacagtgcgcaatggaagaaaattgcctgtcagcttccgccgctcagacagatccaacaaccggctatcggaggttgcttagattcagcagccaaatccacaacaacggccagtctgactttaggccgaaaaatggaaggcatgcgtggatctggcatgactgccatcgccactaccactcaatggaggtcttcacgcattacgatctgctaaacttaaatggaactaaggtcgctgagggtcacaaagcttccttttgtctcgaagatacagaatgcgaaggggacatccagaaaaattacgaatgtgcgaactttggagatcaggggatcaccatgggatgctgggatatgtaccgccatgatatcgactgccagtgggttgatattaccgacgtgccacccggagactacctgtttcaggttgtgataaatccaaactttgaggtcgcagaaagcgattactctaataacattatgaagtgtcggagtagatacgatggccacagaatatggatgtacaactgtcacatcggtgggtcattctctgaagagaccgaaaagaaatttgagcacttctccggccttctcaacaatcaattgtcgccgcagtag

SEQ ID NO: 229164 - DNA, 456 bp, synthetic construct
  misc_feature 1..456: note = Description of Artificial Sequence: Synthetic coding sequence
  source 1..456: mol_type = other DNA
atggagcggccattgtgctctcacctgtgcagctgcctggctatgttagctttgttgagcccactgtccctggcccagtacgattcttggccacactacccagaatactttcaacaacccgctcctgagtatcaccagccgcaggctccagctaatgtcgctaaaatccagcttcgactggcaggacaaaaaagaaaacatagcgaagggagggtggaggtgtactatgatgggcagtggggaacggtttgtgacgatgacttcagtatacacgccgcacatgtcgtctgccgggaactcggttatgtggaagcgaagtcctggacagcaagctcctcctacgggaagggcgagggtccaatttggttagacaatctgcactgtactggaaacgaggcgaccttagcggcttgcacctccaatggatggggtgtgactgactgcaagcacacgtag

SEQ ID NO: 229165 - DNA, 291 bp, synthetic construct
  misc_feature 1..291: note = Description of Artificial Sequence: Synthetic coding sequence
  source 1..291: mol_type = other DNA
atggagaggcccctatgtagccacctgtgtagctgcctcgcaatgctggccctgctctctcccctgagcttagctcagtatgattcttggcctcattatcctgagtactttcagcagccagcacctgagtatcatcagccccaggccccagcaaatgtggctaagattcagcttcgccttgccggtcaaaagcggaaacactccgaaggtagggtggaggtttattatgacggccagtggggcacggtgtgcgatgatgatttttccattcacgccgcacatgtcgtctag

SEQ ID NO: 229166 - DNA, 420 bp, synthetic construct
  misc_feature 1..420: note = Description of Artificial Sequence: Synthetic coding sequence
  source 1..420: mol_type = other DNA
atggaaaggcccctgtgttcccatctctgctcttgccttgctatgttagctctgctgagcccactcagtctggctcagtacgacagctggccccactaccccgaatactttcaacaacccgctcctgagtaccaccagcctcaggccccagccaacgtggctaagatccagctgaggttagcagggcaaaagcgaaagcactcagagggaagggttgaagtgtattacgatggccaatggggcaccgtatgtgatgacgattttagcatacacgcagctcatgtggtttgccgagaactggggtacgttgaggccaaaagctggaccgcttcgagtagctacggcaagggtgagggccctatttggcttgataacctgcattgtacaggcaatgaagctacactagcagcatgcacatag

SEQ ID NO: 229167 - DNA, 2262 bp, synthetic construct
  misc_feature 1..2262: note = Description of Artificial Sequence: Synthetic coding sequence
  source 1..2262: mol_type = other DNA
atgcgacctgtatctgtatggcagtggtccccgtggggccttctgttgtgcctgctttgcagtagttgcctgggaagtccgtccccctctactggcccagaaaaaaaggcgggatcacagggcctgaggttcaggcttgcaggtttcccgaggaagccctatgagggccgagtggagattcagcgagctggcgagtgggggactatctgtgacgacgacttcactctgcaggccgctcacatcttgtgccgcgagctgggatttaccgaggccacagggtggacacattcagcgaaatatgggccaggcactggaagaatctggcttgacaacctgtcatgtagcggcactgaacagtccgttaccgaatgtgccagtcggggatggggaaacagcgactgcacacacgatgaggacgccggagtcatctgcaaggaccagcgcctccccggtttcagcgattctaatgtcattgaggtcgagcatcacctgcaggtggaagaggtccggataaggccagccgtcggatggggacgccgaccactacccgttaccgaggggctcgtcgaggtcagactacctgacggttggagccaggtctgcgataaggggtggtctgcccacaatagccatgtcgtctgcggaatgctgggttttcctagcgagaagagagtcaacgcggctttctaccgccttctagcacagcgacaacagcactcatttggacttcacggtgtggcctgcgtcgggactgaggcccatctctccctgtgcagtttagagttctatcgtgcaaacgacacagcaaggtgccctggcggtggaccagcagttgtgagctgcgtgcccggacctgtctacgcagcctcgtctggccagaagaagcagcagcagtcaaagccacaaggcgaagccagggtgcgtttgaagggaggggcacaccctggcgaaggtagggtcgaggtgttgaaagcgtcaacttggggtactgtatgcgaccgcaagtgggacctccacgccgctagcgtggtatgccgggaactgggatttggatcagctagagaagcgctgagcggtgcgagaatggggcaaggcatgggggctattcacctgtccgaggtgcggtgctccggccaggaactttctctgtggaaatgtcctcacaagaacataactgctgaggattgctcccatagccaagatgccggtgtcagatgtaatcttccgtacacgggcgctgaaacacgcattcggctgtctggagggagatcacagcacgagggcagggtcgaggtgcaaatcggcggacccggacctttgcgctggggtctcatctgcggtgatgactggggaactctggaggctatggtggcctgtagacagctggggctgggatacgctaaccacggactccaggaaacttggtactgggattcagggaacataactgaggttgttatgtctggggtgcgctgtaccggaaccgagctttccctggatcagtgtgcacaccacggcacacatataacatgcaaacgcaccggcaccagatttactgctggagtgatttgctcagagacagcatcagacctgctcctgcactctgcccttgtgcaggaaactgcttacattgaggatcgacccctccacatgctgtattgcgccgcagaggaaaattgcctggcgtcgagcgctaggagtgccaactggccttatggacataggcgccttctgcggttctcaagtcaaatccataacctgggcagggccgattttcggccaaaggcagggagacatagctgggtgtggcatgagtgtcacggacactaccattcgatggatattttcactcactatgatatcttaacacctaacggtaccaaagtggccgaaggccacaaggctagcttctgtctagaagacacagagtgccaggaagacgtgtctaaacgctatgagtgcgccaacttcggggagcaaggcattaccgtgggctgctgggacctgtatcggcacgatatcgattgtcagtggatcgatataacagatgtgaagcctggtaactatatcctgcaggtggtcatcaatcctaacttcgaagtggccgaaagtgacttcaccaacaacgcaatgaagtgtaactgtaaatatgacggtcaccggatatgggtgcataattgtcatattggcgacgcctttagtgaggaggctaatagaaggtttgaaagataccctggccagacctccaatcagataatctag

SEQ ID NO: 229168 - DNA, 1827 bp, synthetic construct
  misc_feature 1..1827: note = Description of Artificial Sequence: Synthetic coding sequence
  source 1..1827: mol_type = other DNA
atgcgccctgtttcagtttggcagtggtccccttggggtctcctgctatgcctgctctgctccagctgtttggggtcccctagtccctccactgggccagaaaagaaagctggttcccagggcctacggtttcgcctcgctggattccctcgcaagccctatgagggacgggtggaaattcagcgtgcaggggagtgggggactatttgcgacgacgattttactctgcaggcagctcatattctgtgccgcgaactcgggtttactgaagctacaggttggactcactccgccaaatacggcccaggaactggccgaatctggctcgacaatttgagctgttcagggactgaacaatccgtgaccgagtgtgcttctcgtggctgggggaattccgactgcacccacgatgaggacgctggtgtcatctgtaaggaccagcggctgcctggattttcagatagcaatgttatagaagctcgcgtaaggttgaagggaggagctcatcctggggaaggtcgggtcgaagtcttaaaagcctcgacgtgggggacggtgtgcgaccggaaatgggatctacacgctgccagtgtggtttgccgggagctcggcttcggaagtgctcgtgaagctttgagcggtgctcgaatgggtcaaggaatgggcgcaatccacttatccgaagtgcgatgtagcgggcaggagctgtcgctgtggaaatgtcctcataagaacatcacagccgaagattgcagtcattcccaggatgccggtgtaagatgcaatctgccttatactggggctgaaactcgtatcagattgtccggtggcagatcccaacacgaagggagagtggaggtgcagattggcggtcctggtcctcttcggtggggtttaatttgcggggatgactggggaacgctggaagcaatggtggcgtgccggcaacttggtctaggctacgcaaatcacggattacaggagacctggtactgggactcaggaaacatcacagaggttgtaatgagtggggtccggtgcactgggacagagctcagcctggatcagtgcgcccatcatggcacccacatcacgtgcaagaggacaggcacacgctttactgcaggtgtgatatgttccgaaaccgccagtgacctgctcctccacagtgccctagtccaggagacagcctacatcgaggatcggccattacacatgctttactgcgccgcagaggagaactgtctcgcctcttcggccagaagcgcgaattggccttacggccaccggcgtttactcaggttctcctcccagatccacaatttgggcagggctgatttccggccaaaggcaggacgccattcgtgggtgtggcatgagtgtcatggccactatcactccatggacatcttcacccactacgacatcctcacccctaacggtaccaaggtggcggagggacataaggcatcattttgtctggaggatactgaatgtcaggaggatgtcagcaaacgctacgagtgtgcaaacttcggggaacagggcatcaccgttggctgctgggatctttacaggcacgacatagattgtcagtggattgacatcacagacgtgaagcccggtaactacatccttcaagtggtgatcaatcctaactttgaggtggcagagtctgatttcacaaacaatgcaatgaaatgtaattgcaagtacgatggacacagaatttgggttcataactgccacatcggggacgcctttagcgaagaagcaaatcgtcggtttgaacgttacccaggccagacatcgaatcaaatcatttag

SEQ ID NO: 229169 - DNA, 2094 bp, synthetic construct
  misc_feature 1..2094: note = Description of Artificial Sequence: Synthetic coding sequence
  source 1..2094: mol_type = other DNA
atgcggcctgtctccgtttggcaatggagcccctgggggctgctgttgtgtctcctgtgttcatcatgcctgggcagcccttccccaagcaccggacctgagaagaaggcaggttcccaaggattgcgttttcggctggccggttttccccgaaagccatatgaggggagagtggagattcagagagctggagaatggggaaccatctgtgatgacgacttcacattgcaagccgctcacatcctttgccgagagctggggtttactgaagccaccggctggactcatagcgcgaaatatggtcctgggactggtcgcatctggcttgacaacctttcatgttcaggaacagagcaaagtgtgaccgagtgcgcatcgagagggtggggcaactcagattgcacacacgatgaggacgctggggtgatctgcaaggaccagcgtctcccaggctttagcgactctaatgtaatcgaggttgagcaccacctgcaggtggaggaagtgcggatacggcctgcagtcgggtggggcagacgaccattgcccgtcacagagggactggtcgaagtccgactgcccgatggttggtcgcaggtgtgtgataaaggatggtcggcccataattcccatgtagtgtgtggaatgttggggttcccttccgagaaaagagttaacgcagctttctaccggctcttagcgcagaggcaacaacactcatttggattacatggcgtcgcatgtgttggaactgaggcccacttgtccctctgttcactcgaattttaccgcgctaatgataccgctagatgtcctgggggtggtccagctgtagtgagctgcgtgcccggaccagtctacgcagcttcttcaggtcagaagaaacaacaacagtctaagccacagggagaggctcgggtgagactgaaggggggtgcccatccaggcgaaggccgagtcgaggtgttgaaagcctcaacttggggcactgtatgcgatcggaagtgggatctgcacgcggctagcgtggtttgtcgagagctggggttcggcagcgccagggaggcgctctccggggcaaggatgggccagggcatgggggcaattcacctctctgaggtccggtgttcgggacaagaactgtctctttggaagtgtcctcataaaaatatcacggctgaggattgcagccactctcaagatgcgggtgtgcgctgcaacctgccttataccggcgctgagactagagagacctggtactgggacagcggaaatataacggaggtggtgatgtctggcgtcagatgtaccggcaccgagctgagcctggaccagtgtgcgcatcacggcacgcatatcacatgcaagcgcactgggaccaggtttaccgctggcgtgatctgcagcgaaacggcctctgacttgctgcttcattcagccctagtgcaggagaccgcatatatagaagaccgcccactccatatgctgtactgtgccgctgaagaaaactgccttgctagctccgcacggagcgcaaactggccctacgggcacaggagacttttgcgcttcagttctcagatacataatctcgggagagcggattttagacccaaagcaggacggcattcttgggtttggcatgaatgtcacggccactaccactccatggacatctttacccattacgacatcctcacacctaacggcactaaagttgctgagggtcataaagctagcttctgccttgaggataccgaatgtcaggaagacgtctctaaacgttacgagtgtgctaactttggcgagcagggcattacagtaggctgttgggatttatataggcacgacatcgactgccagtggatcgacattaccgacgtaaaacctggaaactacatactacaagtcgtgatcaaccccaactttgaagtggctgagtcagattttacaaataatgctatgaaatgcaactgtaagtacgatggacaccgaatttgggtgcacaactgccatataggggacgctttttcggaagaagccaacagaaggttcgagagatacccaggtcagacaagtaaccagataatatag

SEQ ID NO: 229170 - DNA, 912 bp, synthetic construct
  misc_feature 1..912: note = Description of Artificial Sequence: Synthetic coding sequence
  source 1..912: mol_type = other DNA
atgcggccagtgtcggtgtggcagtggtctccctggggcctactcctttgtttgctgtgctctagctgcttagggtcgccctcaccctcaacggggccagagaaaaaggccggatcacagggtctgcgctttagattagccggttttccacggaagccctatgagggacgcgtggaaattcaacgcgctggcgaatggggcactatctgcgatgacgacttcacgctccaggctgctcatatcctttgcagagaactggggttcaccgaagctaccggatggacccatagcgctaaatacggtcctggaacaggcaggatctggctggacaacctttcctgcagcggcacagagcagagcgttacagagtgcgcttccaggggttggggcaattctgactgtactcatgacgaagacgcaggcgttatctgtaaagatcaaagattgccgggtttctcagactcaaacgtgatcgaggtagaacatcatctgcaggttgaggaagtacgcatcaggcctgccgtcggctggggaagacgtcccctccccgtcactgagggccttgtcgaggttcgcctacccgacggttggtctcaggtgtgtgacaagggctggtcagcgcacaacagccacgtcgtctgcgggatgctcgggttcccatccgagaagagagtgaatgcggctttctatcgcctgttggcccagaggcaacagcatagttttggcctgcacggagtggcatgtgtgggcactgaagcgcatctcagtctttgttccctggaattctaccgcgcaaatgacaccgctagatgtccagggggaggccctgcagtggtttcctgcgtgcccggtcctgtctatgctgcctctagtggccagaagaagcagcagcagtccaaacctcagggctag

SEQ ID NO: 229171 - DNA, 2271 bp, synthetic construct
  misc_feature 1..2271: note = Description of Artificial Sequence: Synthetic coding sequence
  source 1..2271: mol_type = other DNA
atggcgtggagcccccctgcgaccctgttccttttcctccttttacttgggcagccgccaccctcacgaccccagtccctgggcaccacaaaactgcggctcgtcgggccagagtcaaagccagaggaggggcgacttgaggttttacaccagggccaatggggaaccgtctgtgacgacaacttcgcaatacaagaggccaccgttgcttgcaggcaactggggttcgaagccgctctgacttgggcccactctgctaaatacggccagggagaggggcctatttggctagacaatgtaaggtgtgtaggcaccgaatcttcactggatcaatgtgggtcaaacggttggggagtgagtgattgtagccactcagaggatgtcggcgttatttgtcatcctagacggcatcgcggttatctgagcgaaaccgtgtctaacgccctcggaccacaaggaaggagactagaggaagtgcgcctgaagcctattctcgcctcagccaaacagcattcccctgtaactgagggggctgttgaggtcaagtatgagggccactggcgtcaggtgtgtgaccaaggctggaccatgaataactctcgcgtggtgtgtggtatgctcggcttcccaagtgaagtccctgtcgattcccattattacaggaaagtatgggatttaaaaatgagagacccgaaatcacgcttaaagtctttgacaaataagaattccttctggatccaccaggtgacatgtttagggacagaaccccacatggccaactgtcaggtccaggtggcccctgccagaggaaaactgcgacccgcatgtcctggaggcatgcacgccgttgtgtcatgcgttgccggacctcactttcgacctccaaagaccaaacctcagagaaaagggtcatgggcggaagaaccacgagtgagactgcgatcaggagctcaggtgggcgaagggagagtcgaagtgctgatgaaccgacagtggggcactgtttgcgaccaccggtggaatctaattagcgcctcagtggtttgcaggcagttgggtttcggaagcgctagggaggctctgttcggggcaagattaggccagggcttagggccaattcatctcagcgaggtgaggtgcagagggtatgagcgcaccctctccgactgccctgctctggaaggaagccagaatggttgtcaacatgaaaacgacgctgctgtccgatgtaatgttcccaacatgggcttccagaatcaggtgagactggcaggaggcagaatacccgaggaaggattactggaggtccaagtcgaggtgaatggggtgcccagatgggggagtgtctgttccgagaattgggggctgaccgaagcaatggtggcttgccggcagctggggctcggctttgcaattcacgcctataaagagacctggttttggtcgggaactccacgagcccaagaggtcgtgatgtcaggcgtgaggtgctccggcactgagttagccctgcagcagtgtcagcgtcacggcccagtacactgtagccacggcggtgggagattcttggccggagtttcctgcatggacagcgccccagacttagttatgaatgctcagctggtgcaggaaacagcatatctggaagatcgacctttgagtcagctctactgtgcccatgaggaaaactgtctgtctaaaagcgccgatcacatggactggccttacggataccggcgtttgctgaggtttagtacgcagatttacaacctaggaagaaccgactttagaccgaagacaggccgagattcatgggtttggcaccaatgccataggcattatcattctatcgaggtcttcactcattatgacctgctcacacttaatgggagcaaagtggccgaaggccataaagcatctttttgcctggaggatacgaactgccccactggactccaacgtaggtatgcatgtgctaatttcggggagcagggagtgacagtaggctgctgggacacttatcgtcatgacatcgattgccagtgggtggatataaccgatgtgggaccaggcaactacatctttcaggtgatagtcaatcctcattatgaagttgccgaatcggatttttccaacaatatgctgcagtgtagatgtaaatacgatggccacagagtttggctgcataattgccacacaggcaactcctaccctgctaacgccgaattatctctcgagcaggaacagcggctgaggaataatctaatttag

SEQ ID NO: 229172 - DNA, 1794 bp, synthetic construct
  misc_feature 1..1794: note = Description of Artificial Sequence: Synthetic coding sequence
  source 1..1794: mol_type = other DNA
atggccgcagtgcaagccgcagaagtgaaagttgacggctctgaacctaaactgtctaagaacgagctgaaacgacggcttaaagctgagaaaaaagtcgccgaaaaggaagccaagcagaaagagttaagcgaaaaacagctttctcaggctacagccgctgcgaccaaccacacaactgacaacggcgtcggtcctgaggaggagtctgtggacccgaatcagtactataaaatccgttcacaagccatccaccaactcaaagttaatggcgaagacccatacccccacaaattccacgtggatatatcgctcacagacttcattcagaaatacagccatttgcagccgggtgaccatctcactgacatcactttgaaggttgccggacgcatccacgcgaagcgtgcgtccggagggaaacttattttctacgacctccgcggagaaggcgtgaaacttcaggtgatggctaattcacggaactacaagtcagaggaggaattcattcacatcaataataagcttcggcgaggagacattattggcgttcagggcaaccccggaaaaacgaagaaaggcgagttgagtattatcccctatgagattacactgctctctccatgcctacacatgttacctcacttgcattttgggttgaaggacaaggaaactagataccgtcagagatatctcgatctcatcctgaatgatttcgtgcgccagaagtttatcattagaagcaagatcatcacatacatcaggtcttttctggacgaacttgggtttctggagattgaaacgccaatgatgaatataatacccggaggggcagtggctaaacccttcatcacataccacaatgagctggacatgaatctgtacatgcgcatcgcacctgaattgtatcacaaaatgctagttgttggcggtatcgatcgtgtgtacgaaatcgggagacagttccgcaacgagggcatcgacctcacacacaaccccgagttcacaacctgtgagttctatatggcttatgccgactaccatgacctgatggaaatcacagaaaagatggtatcagggatggtcaaacacatcacggggagctataaggttacctatcaccccgacgggcctgagggccaagcctacgatgtggactttacaccacccttccggagaatcaatatggtagaggaactggagaaagcattggggatgaaactgccagagacgaatctcttcgaaacagaagaaactagaaagatcctggatgacatctgcgtagccaaggcagtggagtgtccaccaccgcgaactacagcacgcttgctcgacaagctagtcggcgagtttctcgaggtgacatgcattaatcctactttcatttgcgaccacccccagataatgtcccctctcgccaagtggcataggtccaaagagggcctcaccgaacgcttcgaactgtttgtaatgaagaaggagatttgcaatgcttacaccgagctaaatgaccctatgcggcagcgacagttgttcgaggagcaggccaaagctaaggccgcaggggatgatgaggctatgtttattgatgagaatttctgtacggcgctagagtatggcctaccacctaccgcgggttgggggatgggaatagatagggtagccatgtttcttacggatagcaataatattaaggaggttctgttgttccccgcaatgaagccagaagataagaaggaaaacgtggcaactacggacactctcgagagcacgaccgtcggtacttcagtgtag

SEQ ID NO: 229173 - DNA, 1878 bp, synthetic construct
  misc_feature 1..1878: note = Description of Artificial Sequence: Synthetic coding sequence
  source 1..1878: mol_type = other DNA
atgttgacgcaggctgctgtgcgccttgtgagaggttctctccgtaagacctcctgggcggaatggggccatagagaactcagactaggtcaactggcccctttcactgcaccgcacaaggacaagtccttttccgaccaaaggtcagagctaaaacgtcgtctaaaggcggaaaagaaagtggcggagaaggaggccaagcaaaaagagctcagtgagaagcagttgagccaggccaccgccgctgcaacgaaccataccaccgataatggagtaggaccggaagaggaatctgtagaccctaaccagtactacaagatcaggagtcaggccatccatcagctcaaggtgaatggcgaagacccatatccacacaagttccacgttgatatttccctgactgactttattcaaaaatactctcacctacagcccggtgatcatctgactgatattaccctgaaggtggcgggacggatacatgctaaaagggctagtggcggaaaactgattttctacgacctccggggagagggtgtcaaactccaggtaatggcgaactctaggaattacaagtcagaggaagaatttattcatattaacaataagctgcgaaggggggatattattggagtgcaggggaatcccggtaaaactaaaaaaggggaattgagcattatcccctacgaaattactctcctctctccatgtctgcacatgctccctcacctgcacttcggcctgaaggacaaggaaacaaggtaccggcagcgttatctcgacttaatccttaatgacttcgtgaggcagaaattcattatacggtcaaagattatcacatatattcgcagcttcttggacgagctcggattcctggagatcgagacacctatgatgaatatcatccccggaggcgcagtggctaagccattcattacatatcacaacgagcttgatatgaatttatatatgaggattgcccctgaactctatcataaaatgctggttgtgggtggcatagaccgcgtttacgaaatcggcagacagtttcgaaatgagggtattgacctaacacataaccccgaattcactacatgtgagttctacatggcatatgctgattaccatgacctcatggagattacggagaagatggtgtctggtatggttaagcatataacagggagctacaaggtaacttaccatcccgacgggccagaaggacaggcatacgatgtggattttaccccaccattcagaagaattaacatggtagaggagctcgaaaaagccctggggatgaagttgccagaaaccaatctgtttgagacagaagaaactcgtaagatcctggacgatatttgtgtggcaaaggctgtggagtgtccaccaccccgaactactgcccgactccttgataagctcgtgggggaattcttagaagtcacctgcatcaacccaacattcatctgtgatcacccccaaatcatgtcccccttggccaaatggcatcgaagcaaggaaggcctgacggaacgttttgagttgttcgtgatgaaaaaagagatttgtaacgcatacactgagctaaatgatcctatgcggcaacggcagctcttcgaggagcaagccaaagccaaagccgcaggcgatgatgaggccatgtttattgatgaaaatttttgtacagcattagagtacggcttaccgcctacagccggatggggcatgggaattgatagagtggcgatgtttctcactgatagcaacaacatcaaggaagtgctgcttttcccagccatgaagccggaggacaagaaggaaaacgtggccactaccgacacattagagtctaccactgttggtacaagtgtttag

SEQ ID NO: 229174 - DNA, 1569 bp, synthetic construct
  misc_feature 1..1569: note = Description of Artificial Sequence: Synthetic coding sequence
  source 1..1569: mol_type = other DNA
atgcagccctggcacggcaaagctatgcagcgcgcatctgaggcaggcgctaccgcccctaaggcctctgctcggaacgcccgaggcgcacctatggacccaaccgagtcccctgctgcaccagaagctgccttgcctaaagccggtaagttcgggccagctcggaaatccggctcccgacagaagaagtctgcgccagacacccaagaacggccacccgtgcgcgctactggtgcaagggccaaaaaggctccccagcgggctcaggatacacaaccctccgatgctacatcagctcccggagccgagggcctcgagccaccagccgctagagaacccgcactcagtcgggcaggttcatgccgccagcggggtgcacgctgctccactaaacccaggccaccgccaggaccttgggacgtgcctagtccgggtctcccagtgagtgccccaatattggtgcggagagatgctgcccctggggcttccaagctccgcgcagtgctcgaaaagctgaagctctcacgagatgacatcagcaccgccgcagggatggtgaaaggcgtggtggatcacctgctgctacggctcaagtgcgatagcgcctttagaggggttggcctcctgaacacaggatcttactatgagcatgtgaagatctcagcacccaacgagtttgacgtcatgttcaagctagaggtgcctaggatccagctcgaggaatattctaacacacgggcatattatttcgtgaaattcaaaaggaatcccaaggagaatcccttaagtcagttcttggagggagagatcctctcagcaagcaagatgctgtccaagtttcgtaaaatcattaaggaagagatcaacgacattaaggataccgatgtcataatgaaaagaaagagggggggtagccctgccgtgacgctactgattagtgagaaaatttctgtggacatcacgttagcgcttgagagcaaatcaagctggccagcctcaacgcaggaaggactgagaatccaaaactggttgagtgcaaaagtccgcaagcagttgagactgaagcctttctacctagtgcctaaacatgccaaggaagggaacgggttccaggaggagacctggaggctctcattcagccacattgagaaagaaatcctgaacaaccacggcaagtccaaaacatgctgcgagaacaaggaagagaagtgctgcaggaaagactgcctgaaattgatgaaatacctgctcgagcagctgaaggagcgatttaaggataagaagcatctggataagttttcctcataccatgttaaaactgccttcttccatgtgtgcacccagaatccacaggattcccagtgggacaggaaggacctgggcttgtgttttgacaactgtgtaacttactttctgcagtgtctgcggacagaaaagttagagaattattttattcccgaatttaacttgttcagtagtaatctgatcgacaaaaggagcaaagaatttcttaccaaacagatcgagtatgaacgcaacaatgagttccccgtttttgatgaattctag

SEQ ID NO: 229175 - DNA, 1344 bp, synthetic construct
  misc_feature 1..1344: note = Description of Artificial Sequence: Synthetic coding sequence
  source 1..1344: mol_type = other DNA
atgcagccatggcacggcaaagcaatgcagagagcttcagaggccggagctaccgccccaaaagcaagtgcaagaaatgcacgcggagcgccaatggaccccacagagtctcccgctgctcctgaagcggctctgccaaaggccggtaaattcgggccagcccgaaaatcgggcagccgccagaaaaagtctgcgcctgacactcaggagaggccacctgttcgggctaccggtgccagggccaaaaaagcccctcaaagggcccaggatacgcaacctagcgatgctacaagcgccccaggcgcagagggtttggagcctccggctgcccgtgagccagcattgagtagagccggatcttgtaggcagaggggcgctagatgctccacaaagcctaggcccccacccggaccatgggacgtcccatctcctggtctcccggtctccgctccaatcttagttcgtagagatgccgctccaggggcttctaagcttagagccgtccttgagaaactcaagctctcacgggacgatatatccactgctgctggaatggtgaaaggcgtggtcgatcatctcctgctgcggctgaaatgtgacagtgccttcagaggagtaggtctgctgaataccggaagttattacgaacacgtcaagatcagcgccccaaacgagtttgacgtgatgttcaaactcgaggtacccagaatccagctcgaagaatactcgaacacacgtgcatattacttcgtgaagtttaaaagaaatcccaaggagaaccccttgtcacagtttcttgagggagagatcttgtctgcctccaagatgcttagcaagtttcggaagatcatcaaagaggagattaatgacattaaggataccgacgtgatcatgaagaggaaacggggagggtcccctgccgtgactttgcttatttccgagaagatctctgtagacattacactggctctcgagagtaagtcctcatggcccgcatctacccaggagggcctccgcattcagaattggctgtctgcaaaagtccggaagcaactgaggctgaagcccttctacctggttccaaagcacgcgaaggaaggaaatggctttcaagaggagacatggcgactgtcttttagtcacatcgagaaggaaattctgaacaaccacggaaaatcaaaaacatgctgcgaaaacaaggaggagaagtgctgcagaaaagactgtctcaagcttatgaaatatctgttggaacaactaaaggagcgctttaaagacaaaaagcatctggataagttttctagttatcacgtgaagacagccttctttcataggctctattag

SEQ ID NO: 229176 - DNA, 1080 bp, synthetic construct
  misc_feature 1..1080: note = Description of Artificial Sequence: Synthetic coding sequence
  source 1..1080: mol_type = other DNA
atgattgctgcccaggccaagctcgtctaccatctgaataagtattacaatgagaagtgccaggcccgtaaggcagctattgccaaaactatccgggaggtatgcaaggtcgtgtccgacgtgctgaaggaagtcgaggtacaggagcccagattcatctcatcgttgaatgagatggataatcgttatgaagggttggaggtgatttcccccaccgaatttgaggtagtcctttaccttaaccagatgggtgttttcaattttgtggatgacggatccttaccgggttgtgcagtattaaagctctccgacggacggaagaggagcatgtctctgtgggtcgagttcattactgcttccgggtatttgtccgcgagaaagattcggtctcgctttcagaccctggttgcccaggccgtggataaatgtagttacagggatgttgtaaagatggttgctgacacaagcgaggtcaagttgagaattcgggaccggtatgttgtccagatcaccccagcattcaagtgtacaggcatatggcctcgctctgctgcacactggcccctgccccacataccatggcctgggccaaacagggtggctgaagtgaaagcggagggatttaatctcctgtctaaagaatgtcactctttagcaggtaagcagtcttctgctgagtcggacgcttgggtgctgcaatttgcggaagccgagaatcggcttcagatggggggttgtcgcaagaagtgcttatctattctgaaaaccctacgggaccggcacctggagttgcctggccagccactgaacaattatcatatgaaaaccctggtcagctacgaatgtgagaagcaccccagagaaagtgattgggacgaaagttgtcttggggaccggctgaacgggatcctcctccaactcatatcctgcctacaatgtcgcaggtgccctcactacttccttccaaatctggatctgtttcagggaaagccacatagcgcactggagaacgcagcaaaacagacatggcgcttggcccgagaaatcttgaccaaccctaagagtctcgagaaactgtag

SEQ ID NO: 229177 - DNA, 1176 bp, synthetic construct
  misc_feature 1..1176: note = Description of Artificial Sequence: Synthetic coding sequence
  source 1..1176: mol_type = other DNA
atgtctggtcccgtgccctcccgggctagggtgtatacagatgtcaatacccacagaccacgtgagtactgggactatgagtcccatgtagtagagtggggcaatcaggacgattatcagcttgtcaggaaactggggcgaggcaaatacagtgaggtctttgaggccataaatatcaccaacaacgaaaaagtggtggtcaagatcttgaagcctgtgaaaaaaaagaaaatcaaacgggaaatcaagatcttagaaaacctaaggggtggtccaaacatcattacgttggccgatattgtaaaggatccggtctctagaacccctgcactggttttcgaacatgtaaataatacagattttaagcagctgtaccaaacccttaccgactacgatattcggttctatatgtacgaaatattgaaagccctggactattgtcatagcatgggtataatgcatagagatgtcaagccacacaacgttatgatagaccacgaacataggaaacttcggcttatcgattggggattagccgagttttaccatcctggtcaggagtacaacgtccgcgtcgcatcccgctacttcaaaggtccagaactgctggtggattaccagatgtatgattattcgttggatatgtggtccttgggctgtatgctagcatctatgattttccgtaaagaacctttttttcatggccacgacaactatgatcagcttgtgaggattgctaaagtgctcggaactgaagacctgtacgactacatcgacaagtacaatatcgagcttgaccccagatttaatgatattttgggtagacattctagaaagaggtgggagcgatttgtgcattcggaaaatcaacatctggtatctcctgaagccctggacttcctcgataaactgctgcgttatgaccaccagtccagactgaccgcccgagaggccatggaacatccatacttctatacagtggtaaaagaccaagcccgtatgggttctagcagcatgccaggtggctcaacacctgtttctagcgcgaacatgatgagtgggatctcctccgtcccaacaccatcccccttagggccactagcaggctcccccgtaattgcggcagccaatccactcggcatgccagtgccagcagctgcaggcgctcagcagtag

SEQ ID NO: 229178 - DNA, 1347 bp, synthetic construct
  misc_feature 1..1347: note = Description of Artificial Sequence: Synthetic coding sequence
  source 1..1347: mol_type = other DNA
atgtacccaagtaataagaagaagaaggtatggcgggaggagaaagaaaggctgctgaagatgactctggaagaaagacggaaagaataccttcgtgattacataccattgaactccatcctttcatggaaggaggaaatgaagggtaagggtcagaatgatgaagagaatactcaggagacatctcaggtgaaaaaatccttgacagaaaaggtgtccctgtatagaggggatatcactctactggaagtggacgccatcgttaatgctgccaatgcatctctgcttggaggcggtggagtggatgggtgcatacatcgagccgcaggaccttgtctgctggcggaatgtaggaaccttaatggttgcgacacaggccacgccaaaattacttgcggatatgatctgcccgctaagtacgttatacataccgtgggaccaatcgcgcgaggacacatcaacggatcacataaggaggatctcgctaattgttataaatcaagtctgaaactggttaaggagaacaatatccgcagcgtagcattcccgtgtatcagcacaggaatctacggcttcccaaatgaacccgctgccgtgattgcattaaacacaattaaagagtggctggctaaaaaccaccatgaagttgaccgcattattttttgcgtgtttcttgaggtggacttcaagatttataaaaagaagatgaatgaattcttttccgtggatgataataatgaggaagaggaggatgttgagatgaaggaagactccgatgagaacggtcccgaagagaagcagagtgtcgaggagatggaggagcagtcccaggacgccgatggagtgaacacggttactgttcctggacctgcctcagaagaggctgtcgaggattgtaaggacgaggatttcgccaaggatgaaaacataaccaagggcggtgaagtaactgaccactcagtgcgagaccaggaccaccctgatgggcaagagaacgatagcaccaaaaatgaaattaaaattgagactgagagtcagagctcctatatggaaactgaggaactgtcatcaaaccaggaagacgctgtgatcgtcgaacagcctgaggttatccctttgacagaagaccaggaggaaaaagaaggagagaaggcccctggggaggatacaccacgtatgccaggaaagtccgaagggtcttcggacttggaaaatactcccggacccgatgtggagatgaattctcaagtggacaaagtcaacgatccaacagagagccagcaggaggatcagttgatcgctggcgctcaagacgaagccaaggagcaacggaacggcactaagtag

SEQ ID NO: 229179 - DNA, 642 bp, synthetic construct
  misc_feature 1..642: note = Description of Artificial Sequence: Synthetic coding sequence
  source 1..642: mol_type = other DNA
atgaacgagtttttcagtgttgacgataacaatgaagaggaggaggatgtcgagatgaaggaggattctgacgagaacggtcccgaggaaaagcagagcgtcgaagaaatggaggaacagtctcaggatgcagatggagttaacacggtgaccgttcccggaccagcctcggaagaagcggtggaggattgtaaggatgaggattttgcaaaggatgaaaatatcacaaagggcggtgaggtgactgaccactccgttagagatcaggatcatccagatgggcaggagaacgatagtacaaaaaacgagatcaaaattgagactgaatcgcagagctcctatatggagacagaggaactgtcgtctaatcaggaagatgctgtcatcgtggagcagccggaagttataccgctgaccgaagatcaggaggagaaggaaggagagaaggcaccaggcgaagacacccctcggatgcccggaaagagtgaggggtcttctgacttggaaaacactcccggtcccgatgtggagatgaattcacaagtggataaagtcaacgatcccactgaaagtcagcaggaggaccagctaatagccggagcccaggacgaagccaaagagcagcgaaatggaaccaaatag

SEQ ID NO: 229180 - DNA, 642 bp, synthetic construct
  misc_feature 1..642: note = Description of Artificial Sequence: Synthetic coding sequence
  source 1..642: mol_type = other DNA
atgaatgagtttttctccgtggacgacaataatgaagaagaggaggacgtggagatgaaagaagattctgatgagaacggaccagaggaaaaacagtccgtggaagagatggaagagcagagccaggacgccgacggggtgaatacggtgaccgtgcctgggccagcttccgaagaggccgtagaggattgcaaggacgaggatttcgccaaagacgaaaacatcaccaaggggggtgaggtgacagatcactcagtaagagaccaagatcatcctgacggtcaggagaacgattccacgaaaaatgaaattaagatcgagaccgagtctcagagctcttatatggagaccgaagaactgtccagcaatcaagaggacgccgtcattgtggagcagcccgaagtcataccactgacagaggaccaagaggagaaggaaggcgaaaaggctcctggagaggatacaccgagaatgcccggtaagtccgagggctcttccgacctggaaaacacaccgggtcccgacgtcgagatgaatagccaggtggacaaggtgaacgatccaaccgagagtcagcaagaagatcaattaattgccggagcccaagatgaggccaaggagcaaaggaatggaacgaagtag

SEQ ID NO: 229181 - DNA, 1068 bp, synthetic construct
  misc_feature 1..1068: note = Description of Artificial Sequence: Synthetic coding sequence
  source 1..1068: mol_type = other DNA
atggccgtccaagagtccgccgcacagctgagcatgacccttaaggtgcaggaatacccaaccctgaaggtcccatacgagacactcaacaagcgcttccgggcagctcagaaaaacatcgatcgcgaaacctcgcacgtgacaatggtagtggccgaactcgagaaaacattgtctggttgtcccgctgtggactcagtcgtgtcactgctggacggagtcgtcgagaaactctccgttctgaagaggaaggcagtggagagtatccaagcggaagacgaaagcgccaagttgtgtaagagacgcattgagcacttgaaagagcactccagcgaccaaccagctgccgcttccgtctggaaacgcaagagaatggataggatgatggtggaacacctcctgcgttgtggttactataacacagcggtaaaactcgctagacagtctggaatcgaaagttgccttgagtttagcttaagaattcaggagtttatagaactgatccgtcagaacaagaggctggacgccgttagacatgccaggaaacacttttctcaagctgagggtagtcagctcgacgaggtacgccaggctatggggatgctggcgtttccacccgacactcatattagcccttacaaggatcttctggatcccgctcggtggcgtatgctgattcagcagtttaggtatgacaattaccgcctgcaccagctgggcaacaattcagtgtttacgttgacactgcaggctgggctctccgccattaagacgccccagtgctacaaagaggacggctcttccaaaagcccagactgccctgtctgtagcagatcactcaataaattggcacagcccctgcccatggcccactgcgccaacagccggctcgtgtgcaagatttccggagacgtcatgaacgagaacaacccccctatgatgctccctaacggctacgtgtacggctataatagcttgctgagtatacgtcaagatgacaaggtggtgtgtccacgcacgaaagaggttttccatttttcccaagctgagaaagtgtacataatgtag

SEQ ID NO: 229182 - DNA, 1191 bp, synthetic construct
  misc_feature 1..1191: note = Description of Artificial Sequence: Synthetic coding sequence
  source 1..1191: mol_type = other DNA
atggccgtgcaggagtccgccgctcagctgagcatgaccctgaaagtgcaggaataccctaccctaaaggtcccgtacgaaaccctcaacaaacgatttagggcagcacagaaaaatattgaccgggagaccagtcacgtgactatggtcgtggcagagctcgagaaaacactatccgggtgcccagctgtggactcggtggttagtctgcttgacggagttgtggagaagctctcagtgcttaagcggaaggcagttgagtctatccaggccgaagacgaatccgcgaagctttgcaagcgcagaatcgagcacttgaaagaacactcctcagaccaaccagccgcagcttccgtatggaagagaaaacggatggaccggatgatggtagagcatctccttaggtgcggatattacaataccgccgtgaagctcgccagacagtcaggcatagaggatcttgtcaatatcgagatgttcctaacagccaaggaagtcgaggagtcactggagagacgagaaacagcaacttgcctcgcctggtgtcacgataacaagtctaggctgaggaagatgaaatcatgtcttgaattctctctcagaattcaggagttcattgaactgattcgccagaacaagcgtctggacgctgtcaggcacgcacggaaacattttagccaggctgagggcagccagcttgacgaagtccgacaggccatgggaatgctggcattcccgccagacacccacatttccccctacaaagatctgctggaccctgccagatggcggatgctcatccagcagtttcgctatgacaattatcggctgcatcagttgggtaataactcggtgttcaccttaacactccaggccggtctgtccgccattaagacaccccaatgttacaaagaagatgggtcctcgaagtctcccgattgtccagtgtgctccagatccctgaacaaattggctcagcctctccccatggctcactgcgcaaatagcagacttgtatgcaaaataagtggggatgtaatgaatgagaataacccccctatgatgctccctaatgggtacgtttacgggtacaactctcttctctctattcgtcaggacgataaagtggtgtgtccacgaaccaaggaggttttccactttagtcaagcagaaaaagtgtacatcatgtag

SEQ ID NO: 229183 - DNA, 987 bp, synthetic construct
  misc_feature 1..987: note = Description of Artificial Sequence: Synthetic coding sequence
  source 1..987: mol_type = other DNA
atggctgtccaggaatccgctgcccagctatcaatgacactgaaggtgcaggagtaccctacattgaaagtgccctatgaaactttaaataaacggtttcgggcagcacagaagaacatcgaccgtgaaacatcccatgtgacaatggtggtagccgagcttgagaaaaccctgagcggctgtcccgctgtggactccgtggtctccttactggatggagtggtggagaaactctcagtcctgaagcggaaagctgttgagagtatccaagccgaagacgagtccgccaagctctgtaaacggaggattgagcacctcaaagaacatagcagtgatcagcccgcagccgctagcgtgtggaaacgaaagaggatggatcgcatgatggttgaacacctcctccgttgtgggtactacaacaccgctgtcaaacttgccagacagtccggaattgaaacctgcaaaaaggcattgcagccgtcacggagggagcctgccggtagaggagctcctggccacggccatgctggccttcccgctaggcacgctcatctgcctgtgcagggcccaagtggtccgtgcactgtcgctgacgccgaccccgcagtgcctgtccgtcagctgcctaccactcctgcgggaaagcagttctgtgtgcatcctcacccggcagggtggcctctgtcacaccaggagcagtgctacaaggaggacggcagcagcaaatccccggactgtccggtgtgttcccggagcttgaacaagctggcccaacctctcccgatggcccattgcgccaacagtagactggtttgcaagataagcggggacgtgatgaacgagaataacccgcctatgatgctcccaaacgggtatgtgtacggttacaactcccttctgtcaattaggcaggatgataaggtcgtttgccctcgaaccaaggaggtgtttcatttctcccaagccgaaaaggtctacattatgtag

SEQ ID NO: 229184 - DNA, 954 bp, synthetic construct
  misc_feature 1..954: note = Description of Artificial Sequence: Synthetic coding sequence
  source 1..954: mol_type = other DNA
atgacattaaaggttcaggaatatccaaccctcaaggtgccatacgagacgcttaataagcggttccgagctgctcagaagaacatcgaccgcgaaacttcccacgtcaccatggtcgtggccgaactagaaaaaaccctttccggatgcccggctgtcgacagcgtggtctctctgttagacggagtcgtggagaagctctccgttctgaagagaaaggacttagtgaatatagagatgttccttacagccaaagaggttgaagagtccctagagcggagagaaaccgcaacttgccttgcctggtgccacgacaataagtcaagattacgtaagatgaagtcttgcctcgagttcagcctgaggatccaggaatttattgagctcattcgccagaataagcgacttgacgcagttcggcacgcccgtaagcactttagccaggctgagggttcccaactggacgaagtgcgacaggcgatgggcatgcttgccttccctcctgacacacacatctctccctataaggacttactcgaccccgctaggtggagaatgctgatccaacagtttaggtacgataactataggctgcaccagttaggtaacaactccgtttttaccctcactctgcaggccggtctgtctgccattaaaacgcctcagtgctacaaagaggacggctcctcaaaatcacccgattgtcccgtttgttccaggtccttaaataaactggcgcagccgctgcctatggcgcattgcgcaaatagtagactcgtctgcaagataagcggggatgtaatgaacgaaaacaacccacctatgatgttgccaaacggctatgtgtacgggtataactctctgctgagcattaggcaggatgataaggtggtctgccctcgtacaaaagaagtctttcatttctcccaagccgagaaagtttacatcatgtag

SEQ ID NO: 229185 - DNA, 1305 bp, synthetic construct
  misc_feature 1..1305: note = Description of Artificial Sequence: Synthetic coding sequence
  source 1..1305: mol_type = other DNA
atggccgtgcaggagtccgcggcacagctgagcatgacactgaaagtgcaggaatatccgacactgaaggtaccatatgaaaccctcaacaagaggtttcgcgctgcccagaaaaatatcgatagagaaacctcacatgtaacaatggtggtggccgagttagaaaaaacgctgtctgggtgtccagccgtggattccgtggtcagcttgttggatggtgttgtagaaaaattatcagtgcttaagcgcaaggcagtagagagcattcaggccgaagatgaatcggccaagttgtgcaaacggagaatcgaacatctcaaagagcattcctccgaccagccagccgctgcgtccgtctggaaacgaaaaaggatggataggatgatggtggagcacctgctgcggtgcggctattataacacagccgtgaagctcgccaggcagagtggcatcgaggacctggtgaatatagaaatgtttctgacagctaaagaggtggaggaatccctcgagcggagggaaacagcaacttgccttgcttggtgccatgataataaatcgcggctgcgcaaaatgaaggggcgacagaataagcacgaggccaagacgggacgtaagtcacgggctgctagctcgtcacccaaggagtctctagatttgggtatggagactctgaagggtaaaccagaactttcctgtctggaattctctctgcgtatccaggagtttattgaactgatccgccagaacaaacgcctggatgctgttcgacatgctaggaagcacttcagccaggccgagggcagccagctagatgaggtgagacaggctatgggcatgttggctttccctcctgatacccatatttccccttacaaggatctcctggatccggctcggtggcggatgctcatccaacagttcagatatgataactatagattgcatcaactgggaaataactctgtcttcacattgacactccaggctggcctgtctgcgataaaaacaccccaatgttataaggaggacgggagctccaagagcccagactgtccagtgtgcagcaggagcttgaacaagctcgcacagcctcttccaatggctcattgcgccaactcccggctcgtgtgtaaaatttccggggacgtaatgaacgaaaataacccaccgatgatgctgccaaatggatacgtgtacggctacaattctctcctctcaatccggcaagacgataaagtcgtttgtccaaggacgaaagaggtcttccacttctctcaggccgagaaagtttatatcatgtag

SEQ ID NO: 229186 - DNA, 1047 bp, synthetic construct
  misc_feature 1..1047: note = Description of Artificial Sequence: Synthetic coding sequence
  source 1..1047: mol_type = other DNA
atggtggtggcggagctggagaaaaccctgtcggggtgtcctgctgtggactccgtggtttcactgcttgacggggtggtggaaaagctgtccgtgctgaagcggaaggcagtggaatccattcaagccgaggatgagtccgccaaactctgcaagcgtcgcattgaacacctcaaggagcacagtagcgatcagcccgctgcagcgtccgtgtggaagcgcaagcgcatggacaggatgatggtcgaacaccttctacgatgtggctactataacacagccgtcaaactggcccgacagtccggtattgaagaccttgtgaatatcgaaatgtttctgactgccaaagaagtggaggaatctcttgaacgccgtgagacagccacatgcttagcttggtgccacgataataagagcagactgaggaagatgaagtcttgcctggagtttagcctcagaatccaggaatttattgaactaattcgccagaataaaagactggatgccgtgaggcacgctagaaagcacttttctcaggcggaggggagccagctggacgaggtcagacaggctatggggatgctcgcattccctccggacacccatatttctccttataaagacttgctggatccagctcgatggaggatgcttattcagcagttccggtatgacaattacaggctgcaccagctaggaaacaattctgtctttacacttaccctgcaagctggcctaagtgcaattaaaaccccccagtgctataaggaggacggaagtagcaaatcgcctgactgtcccgtgtgctcccggagtctcaacaaactggcacaacccctgcccatggctcactgtgctaactcccggctggtgtgtaagattagcggggacgtgatgaatgagaacaaccctccgatgatgctccctaacggatatgtctatggttacaatagcctgctgagtatccgacaggatgacaaagtggtgtgtccgcgaacaaaagaggttttccacttctcccaggctgagaaagtgtacattatgtag

SEQ ID NO: 229187 - DNA, 1188 bp, synthetic construct
  misc_feature 1..1188: note = Description of Artificial Sequence: Synthetic coding sequence
  source 1..1188: mol_type = other DNA
atgtggacacttcgggctaccggtcgagaagtcggaagtagctcgtgcgaggacactgtggctcctgttccctacgaaacactgaataaaagattcagggccgcacagaagaatattgaccgcgagacgtctcacgtaactatggtggtggccgagctcgaaaaaacattaagcggctgcccagctgtggacagcgtggtatccctgctcgatggcgtcgtagaaaagctaagtgtactgaagaggaaggctgtggaaagcatccaagctgaggatgagagcgccaaactgtgcaagaggcgtattgaacatctgaaggaacactcctcagatcagccggcagcagccagcgtgtggaagagaaagagaatggacagaatgatggttgagcacctcctcagatgtgggtactataacaccgctgtgaaacttgctcgccagtcaggcatcgaagacctcgttaacatcgaaatgtttctcacagccaaggaagtggaggagagtctggagcgtcgggaaaccgctacctgtctcgcttggtgtcacgataataagtcccgcttgcgcaagatgaagtcttgtctggagttttccctcaggatccaggaattcatcgagctgattcgtcaaaacaaacgtctcgacgccgtcagacacgctcggaagcatttttcacaggctgaaggttcccagcttgatgaggtccggcaggctatgggcatgttagccttcccaccagatacccatatatccccttacaaggacctactagaccccgctcgctggcgaatgctgatccagcagtttaggtatgataactacaggctgcaccagctggggaacaattccgtgttcacactgaccttacaggccggtctgagcgccatcaaaaccccacagtgctacaaagaagacgggtcaagcaaatctcccgactgtcccgtttgttccaggagtctcaacaaattggctcagccattgcccatggcacactgtgctaactcacgtctggtctgcaagataagcggcgacgttatgaatgagaataatccacccatgatgttgccgaacggttatgtctatgggtataatagcttattgagtatccgccaggacgacaaggtcgtttgcccgcgaacaaaagaggttttccacttttctcaggctgaaaaggtgtacattatgtag

SEQ ID NO: 229188 - DNA, 987 bp, synthetic construct
  misc_feature 1..987: note = Description of Artificial Sequence: Synthetic coding sequence
  source 1..987: mol_type = other DNA
atggcggtgcaggagtccgccgctcaactttcgatgacgctgaaggttcaagaatacccgactctgaaggtaccatatgagactcttaataagcgctttcgtgccgctcagaagaatattgaccgggagacatcacatgtgacgatggtagttgccgaactcgaaaaaaccctgagtggctgtcctgcggttgactctgttgtcagcttgcttgacggggttgtggagaagttgtctgtgctgaagcggaaggccgtggagagcatacaggcggaagatgagagtgctaagctatgtaagcgacgcattgaacaccttaaggaacacagcagtgaccaaccagctgccgcaagcgtgtggaaaaggaaacgaatggatcggatgatggtggaacacttgcttcgctgcggttactacaatacagcagttaaattggcacgccagagcggaatcgagacctgcaagaaagccctgcaaccgagccggcgagagccagcgggacgcggagcccctggtcatgggcacgctgggctccccgctagacacgctcatttgccagttcagggcccttccggcccttgtacggtggcagatgccgaccccgctgtgcccgtacggcagctgcctactacccctgctgggaaacaattttgtgtccatccgcatcctgccggatggcccttgtctcaccaagacacgtgctataaggaggacggctcctcaaagtcccccgactgtcctgtgtgctcccgaagcctgaataagttggcgcagccccttccaatggcacactgtgctaactctcgtttggtctgtaaaattagcggcgatgtgatgaacgaaaataaccctcccatgatgttaccaaatggctacgtgtacggatataatagtctgttgtcgatccgtcaagacgacaaggttgtgtgccctcgcacaaaagaggtatttcacttttctcaggccgagaaagtctatattatgtag

SEQ ID NO: 229189 - DNA, 1128 bp, synthetic construct
  misc_feature 1..1128: note = Description of Artificial Sequence: Synthetic coding sequence
  source 1..1128: mol_type = other DNA
atggctgttcaagagtctgcagctcaactcagcatgaccctgaaggtgcaggagtatcccacactaaaggtaccctatgagactctcaacaaacggtttcgagctgctcaaaaaaacatcgaccgggaaacaagtcacgtgactatggtggtagcggaactggaaaaactcagcgtcctcaagaggaaggccgttgaatcaatacaggcagaggatgagtctgccaagttgtgcaagcggaggatcgaacacctcaaggagcattcatcagaccaaccggctgccgcttcagtctggaaaagaaaacgcatggacagaatgatggtggaacacctgctccgctgtgggtactacaataccgccgtcaagctggccaggcaatccgggatagaggatctggtgaacattgaaatgttcctcacagcaaaggaggtggaagaatcccttgaaaggcgggagacggccacttgtctagcatggtgccatgacaataagagtaggcttagaaagatgaagtcctgtctcgagttttccctgcggattcaagagttcatcgaactgataaggcagaataagcgcttagacgcagtcagacacgccagaaaacatttttcacaggccgagggctctcagttggatgaggtgagacaagccatggggatgctagcattccctcctgatacccacatctctccatacaaggacctcctggaccctgcacgttggcgcatgcttatccagcagtttcgatacgacaattacaggctccatcaacttggaaataattctgtgttcaccctcacactgcaggctggacttagtgcaattaaaacaccgcaatgctacaaggaggatggaagctcaaagtctcctgattgtcccgtttgctcccgctctttaaataagctcgcccagcccctgcccatggcccattgtgctaatagcaggcttgtttgtaagatatccggcgatgtgatgaacgaaaacaatccccctatgatgctgccaaatggctatgtgtatggttataactctctcctgtccatcaggcaggatgacaaggtggtttgtccacgtacaaaggaagtgttccatttctcgcaggccgagaaggtgtatattatgtag

SEQ ID NO: 229190 - DNA, 1467 bp, synthetic construct
  misc_feature 1..1467: note = Description of Artificial Sequence: Synthetic coding sequence
  source 1..1467: mol_type = other DNA
atggctccagctgcgtggctgcgctcggccgctgcccgagcactcctgccccctatgctgctgctcctgctccagcctcctcccctcctggctcgcgcactacctcccgatgcacatcaccttcatgccgaacgccgaggcccacagccatggcacgcagccttaccatccagccctgcccctgccccagcaactcaggaggctcccaggcccgcaagctcacttaggccgccacgctgcggagtgccagacccatcagacggtctcagcgctaggaatcggcagaaacggtttgtgttgagcggcggtagatgggagaagaccgatctcacatatagaattctgagattcccttggcagctagtccaggagcaggtaagacagaccatggccgaggctctgaaggtttggagcgacgtcaccccacttacctttaccgaagtccatgagggccgagccgacattatgatagacttcgccaggtattggcacggagacgacttgcccttcgatggcccaggcggtattttggcccatgcattttttcctaaaacgcatagggagggcgatgtgcactttgattatgacgagacgtggaccatcggcgatgaccaggggacggatttgttgcaggtggctgcccatgagttcggacatgtcctgggattacagcacacaactgctgccaaggcccttatgagcgccttctacacttttcggtaccccctttcactgtcccccgacgactgcaggggcgtgcaacatttgtatggacagccctggcctacagtaaccagcagaactcccgctctgggaccacaggctggtatagatacaaatgagatagcacccttggagccggatgcccctcctgatgcttgcgaagccagctttgatgcggtctctaccatcagaggagagttgttcttcttcaaggccggattcgtttggagattgcgcggtggtcaactacaaccagggtaccccgcactggcctctaggcactggcaaggtctgccgtccccggtggacgctgcctttgaagacgctcaaggacacatctggttttttcagggggctcagtactgggtgtacgacggcgagaaaccggttctggggcctgcccctctgacagagctcgggctggtgcgatttccagtgcacgcggctcttgtgtggggcccagagaaaaataaaatatacttcttcagggggagagattattggaggtttcacccctctactcggagagtggactccccagtgcctcggcgtgctactgattggcgtggggtcccttcagaaatcgatgcagctttccaggacgccgatggctacgcttatttcctcagagggaggctgtactggaagttcgaccctgtcaaagtcaaagctctcgaaggattcccaagacttgtggggcctgacttttttggctgcgccgaacccgctaacacattcctctag

SEQ ID NO: 229191 - DNA, 1563 bp, synthetic construct
  misc_feature 1..1563: note = Description of Artificial Sequence: Synthetic coding sequence
  source 1..1563: mol_type = other DNA
atgagaaataagaaaatcctgaaagaagacgagctgttatccgagacccagcaggctgcctttcatcagattgccatggagccattcgaaattaacgtcccgaagccgaagcgcaggaacggcgtcaatttcagtctggctgtggtggtaatatatctcatactcttgaccgcgggagccggattgcttgttgtgcaggttcttaatcttcaagccaggttaagagtgttggagatgtacttcctgaacgatacactggctgccgaagattctccctccttcagcctgctgcagtcagcccatccgggagagcatctggcacagggtgcatcccggctccaggtgctgcaagcgcagctcacatgggtgcgcgtgagtcatgaacatcttttgcaaagggtggataactttacccagaaccccggaatgttccgaattaaaggtgagcagggcgcaccaggtctccaaggacacaaaggcgctatgggcatgcccggtgctccagggcctcccggtcctccggctgagaagggtgctaagggcgctatgggcagagatggggcaaccggtccctccgggccacagggacctcctggcgtgaagggtgaggccggactgcagggaccgcagggcgctccaggcaaacagggggctactggcacccccggaccacagggggagaaggggagtaaaggggatgggggactgatcggcccaaaaggcgagaccgggaccaagggagaaaagggggatttggggcttcctggcagcaagggtgaccggggaatgaagggggacgccggagttatgggcccaccaggggcacaggggtccaaaggggactttgggcgaccaggtccacctggcctggccggtttcccaggggcaaaaggggaccaggggcagcctggcctccagggcgtccccggtccgccaggtgctgtaggacacccgggagcaaaaggtgagcccggatcggctggcagtcctgggcgagctggtctgcccggttccccaggctcgccaggcgcaacaggccttaaggggtccaagggcgacaccggcttgcagggtcagcagggcaggaagggtgaaagtggagtgcctggaccggctggcgttaaaggcgaacaaggcagccccggactcgcaggaccaaaaggagctcccggacaggctggacaaaagggcgaccaaggagtcaaggggagctcgggcgagcagggtgtgaagggggagaagggagaaaggggagagaatagtgtgtccgtaagaatcgtgggatcatccaatagaggcagagccgaggtgtattactcaggaacctggggaactatttgcgacgacgagtggcagaactccgatgcaattgtgttttgccggatgctgggctactccaaggggcgtgctctctacaaggtgggtgccggtacaggacagatctggctggataacgtgcagtgtaggggaaccgagtccactctctggagctgcactaaaaatagctggggacaccacgactgctctcacgaagaggatgcaggcgttgaatgctcagtgtag

SEQ ID NO: 229192 - DNA, 1329 bp, synthetic construct
  misc_feature 1..1329: note = Description of Artificial Sequence: Synthetic coding sequence
  source 1..1329: mol_type = other DNA
atgtacttcctgaatgatactctggcggcagaggactccccttcattttctctcctccagtccgcgcatccaggtgagcatctcgcacagggggctagcagacttcaggttctgcaagcacaactcacatgggtgcgggtctcccatgagcacttgctgcagagagtggacaactttactcagaaccccggaatgttcaggattaaaggggagcagggcgctccgggtttgcagggccacaagggagcaatgggaatgcccggtgcgcctggccctccaggccctccagcggagaagggagcgaagggcgcaatgggccgagacggtgcgacaggcccttctggaccacagggcccaccgggtgtgaagggcgaggcagggctacagggtccacagggtgccccaggtaagcagggcgcaaccggcactcccggaccccagggcgagaaggggtctaaaggggatggtggactgattggacccaagggagaaaccggtactaagggagaaaaaggagacctgggactacctgggagcaaaggcgaccggggtatgaaaggtgatgcgggtgtgatgggaccgccaggcgcacaaggatctaaaggggacttcgggaggcccggtccccctggactggccggttttcccggtgccaagggtgatcagggacaaccaggtctgcagggggttcccggtcccccaggggcagtaggccacccaggcgctaagggtgaaccaggcagtgctggatcaccaggcagagcaggtctaccagggtccccgggatctcctggcgctacaggcctcaaaggcagcaagggcgataccggactgcaaggacagcaaggtcgaaagggcgagtcaggggtccccggaccagctggggtgaagggtgagcagggcagcccaggactggccggtcctaaaggtgctccaggccaggcaggtcaaaaaggcgaccagggggtgaaagggagttctggtgagcagggagttaagggagaaaaaggcgaacgtggcgaaaactcggtgtcggtacgaatagtgggctcaagtaaccgaggtcgcgctgaagtgtattatagcgggacatggggcacgatctgtgatgacgaatggcagaatagcgacgcgattgtgttttgtaggatgctagggtactcaaagggacgagctctgtacaaggttggcgcagggaccggccagatatggctcgacaatgtccagtgccggggtaccgagagcacactgtggagttgtactaagaactcttggggtcaccacgattgctctcatgaagaggatgccggagtggagtgttcagtctag

SEQ ID NO: 229193 - DNA, 1356 bp, synthetic construct
  misc_feature 1..1356: note = Description of Artificial Sequence: Synthetic coding sequence
  source 1..1356: mol_type = other DNA
atggaacagtgggaccatttccacaaccagcaggaggatacagactcctgtagtgaatcggtaaaatttgacgccaggagtatgacagccctcctgcccccaaatcctaaaaattctccaagcttgcaggaaaaattgaagtcgttcaaggccgcactaattgcactttacctgctcgtttttgccgtgctcattcctctgataggcatcgtcgcagcacagcttttaaagtgggaaaccaaaaattgttccgttagctccaccaatgcaaatgatataacacagtctcttacaggcaagggaaacgactcagaggaggaaatgcgctttcaggaggtgttcatggaacacatgagtaatatggagaaacggattcagcacattctggacatggaggccaatttgatggacacagagcatttccaaaacttctcgatgacgactgatcaaaggttcaacgacatcctgcttcagctttccacgttattttcttcagttcagggccacggcaacgcaattgatgagatctcaaaatctctgatctctcttaatacaacattgttggacctccagttaaacatcgaaaacctgaatggcaagattcaggaaaatacttttaagcagcaagaagagatcagcaagctggaggagagggtgtacaatgtctctgccgagatcatggcgatgaaagaggaacaggtccatttggaacaagagattaaaggagaagtcaaggtgcttaataatatcaccaatgacttaaggctgaaagactgggagcattcccaaaccctcaggaatattaccctgattcaggggccacccggacccccaggcgagaagggtgatcgaggaccgacaggagaatctggccctagaggtttcccaggcccaattgggccaccgggattgaagggtgataggggagctattggatttcctgggagccgaggcctgccagggtacgccggacggccaggcaatagtgggcctaaaggccagaaaggcgagaaagggtctggcaatacgctaacaccatttacaaaggtccggctggtcggaggctcaggtccacacgagggacgagtcgaaatattacacagcggtcagtggggtactatttgtgacgaccgctgggaggttcgcgtggggcaggtggtgtgcaggtccctgggctatccaggtgtccaggccgtacacaaggccgcacacttcggtcagggtaccggcccaatctggctgaatgaggtcttttgcttcggcagagaaagttccatcgaagagtgtaaaattcggcagtgggggaccagagcttgtagtcattctgaagatgctggcgttacctgcacgctctag

SEQ ID NO: 229194 - DNA, 1167 bp, synthetic construct
  misc_feature 1..1167: note = Description of Artificial Sequence: Synthetic coding sequence
  source 1..1167: mol_type = other DNA
atggagcagtgggatcatttccacaaccagcaggaggatacagatagttgttcagagagtgtgaaatttgatgcgcgttccatgacggcactcttgccaccaaaccccaagaacagcccgtctctacaggaaaagctgaagagttttaaggctgcactaattgccttgtacctgctggttttcgctgtactgatccctttgattggcatcgttgctgcacagctgctcaaatgggagacgaagaactgctcggtgagtagtacgaacgctaatgatattacgcagtccttgaccggaaaaggcaatgacagcgaagaggagatgcgttttcaagaggtgtttatggagcatatgtctaacatggaaaaacgcatccaacacatcctggacatggaggctaacctgatggacaccgaacacttccaaaatttctctatgaccaccgatcagaggttcaatgatattttactacagctcagtactcttttttcttccgttcagggccatggtaatgcaatcgatgaaatctctaagagcctaatatccctgaatactaccctcctcgatcttcaactgaatatagagaatttgaacggaaaaattcaggagaatacctttaagcaacaggaggagatttcaaaactggaggaaagggtgtacaacgtatctgcagagatcatggccatgaaggaggagcaggtccatctggaacaggaaatcaagggcgaggttaaggtgttgaacaatattaccaacgacttgagactcaaagattgggagcactcgcagactctaaggaacataacgttaatccagggccctcccggtcctcctggggagaagggagacagggggccaactggggaatctggacccaggggttttccagggccaatcgggcctccgggtcttaaaggggaccggggagctattggctttcctggctcccgcggtctacctggctatgctgggcgacccggtaactccggccctaaggggcagaagggagaaaaggggagtggcaacacactgtcaaccggcccaatctggttgaacgaggtcttctgctttggccgagagtccagcattgaggagtgcaagattaggcaatggggaactcgggcatgttctcactctgaagatgctggagtgacctgtactctatag

SEQ ID NO: 229195 - DNA, 1167 bp, synthetic construct
  misc_feature 1..1167: note = Description of Artificial Sequence: Synthetic coding sequence
  source 1..1167: mol_type = other DNA
atggagcagtgggaccatttccataatcagcaggaggacaccgactcctgctctgaatctgtaaaattcgacgcccgtagcatgacagctctcctcccaccgaaccctaagaacagcccctccttgcaagaaaaacttaagagtttcaaagctgcccttattgccctgtacctgctcgtattcgctgtgcttattcctctgattggtattgtcgctgcccagcttcttaaatgggagactaagaactgtagcgtcagttcgacgaacgctaatgatatcacgcagtcgctgactgggaaaggcaacgattctgaagaggaaatgcgttttcaggaagtgttcatggaacatatgtccaatatggagaagaggatacagcacattcttgatatggaagccaatctcatggatacagaacacttccagaattttagtatgacaaccgatcagaggttcaacgacattctgttacaactgtccaccctgttctcatcggtgcaggggcatggaaacgcgattgacgagatttccaagtctctgatctctttgaacactacgctgctcgatctgcagttgaacattgaaaacctgaatgggaaaatacaggagaatacttttaagcaacaggaagaaatcagtaaactggaggaacgtgtgtacaacgtatcagctgagataatggcgatgaaagaggaacaggtccacctggaacaggagattaagggcgaagtgaaggtgctgaataatatcacaaacgacctgagactcaaagactgggagcacagccagacactgcgtaatattactttaatccagggaccgccagggcctccaggcgagaaaggagacagggggcctactggcgagtcagggcctcggggatttcctggacctatcggcccacccggacttaaaggcgacaggggcgcaatcgggtttccgggaagcagaggattacctggatatgcaggtcggcctggcaatagtggccctaaggggcaaaaaggtgagaaagggtccgggaatacactatctacagggccaatctggctcaatgaagttttctgtttcgggagagagtcatctatcgaggagtgcaaaatacgacaatggggaacaagggcatgctcacacagcgaggacgccggtgtgacctgtaccctttag

SEQ ID NO: 229196 - DNA, 1077 bp, synthetic construct
  misc_feature 1..1077: note = Description of Artificial Sequence: Synthetic coding sequence
  source 1..1077: mol_type = other DNA
atggaacagtgggaccatttccacaaccagcaagaggacacggactcctgcagcgagtctgttaagttcgacgcccgatcaatgacggcactcctgccccctaacccaaaaaactctccttccctgcaggagaagctaaagtccttcaaagcagccctgatcgcactgtacctgttggtttttgcagtgctcatccctctcatcggcattgtggcagcacaattgctcaagtgggagactaagaattgtagtgtgtcctccacaaacgccaacgacattacccagtccctaacgggaaagggaaatgacagtgaagaggagatgcgcttccaggaggtttttatggagcacatgagtaatatggaaaaacggattcaacatattctggatatggaagctaatctcatggataccgaacacttccaaaacttttctatgaccaccgaccaacgcttcaatgacatccttctgcagctgtcaacactgttcagtagcgtccagggccatggaaatgctatcgatgaaatctcaaagtcgcttattagtctgaataccaccctcttagacctgcagctgaatatagagaacctgaacggcaaaatccaggaaaacacatttaaacaacaggaagagatcagtaaactggaagagagagtctacaacgtttcggcggagataatggctatgaaagaagagcaggtgcacttggagcaagaaattaagggcgaggtgaaagtgctcaataatatcacaaatgatctgcgcctgaaagactgggagcactcccagactctgagaaacatcaccctgatccaggggcctcccggaccaccaggagaaaaaggagatcggggtcccaccggtgaatccggtcccagaggcttcccaggccctatcggcccaccaggtctcaagggtgataggggcgctatcggtttcccgggttctagggggttgcccggatacgcagggagacccggtaatagcgggccaaaaggccagaagggagagaagggctcaggaaacacactaaggccagtgcagctgaccgaccacatcagagccggacccagttag

SEQ ID NO: 229197 - DNA, 1410 bp, synthetic construct
  misc_feature 1..1410: note = Description of Artificial Sequence: Synthetic coding sequence
  source 1..1410: mol_type = other DNA
atgtgctacctgtctgccatcatcagtattagcctccttaacaaaaaaccatccatggagcagtgggaccacttccataatcagcaggaagataccgactcctgcagtgaatctgtgaagtttgacgctagaagcatgaccgccctgttgccacctaatccgaaaaattccccttccctgcaggaaaagcttaaatctttcaaggctgccttgattgcactgtacctactggtcttcgccgtgctcatacccttaatcggcatcgtcgcagcacagctgttgaagtgggagaccaaaaattgttcggtgtcttctaccaacgctaatgatatcacgcagtcgttgaccggcaaaggcaatgattctgaggaggaaatgcggttccaagaggtgttcatggagcacatgagtaatatggagaagcggatccagcacattctcgacatggaggctaatctcatggacaccgaacactttcaaaatttcagtatgactaccgaccaacgtttcaatgacatcctgctgcagctgtccaccctgttcagctctgtacaggggcatggaaatgcgatagacgaaataagcaagtcccttatttcactgaacacaactctattagacctgcagctgaacattgaaaatctgaatgggaagatccaagagaatacatttaagcagcaagaggagatttccaaactggaggagcgcgtttataatgtgagtgcggaaatcatggcaatgaaagaagaacaagtacacttagagcaggagataaaaggcgaggttaaggttcttaacaatatcaccaatgacctaagactgaaagactgggagcatagccagacactgagaaacattacgctcatacaaggcccacccggaccaccaggagagaagggggaccgaggtccaacgggtgagagtggaccgaggggcttcccaggtcctatcggccctcctggccttaagggagatagaggcgcaattgggttcccaggttccagggggctgccaggctacgccggtaggccgggaaattccgggcctaaaggccaaaaaggggagaaaggctctggcaatacattgaccccctttacaaaagttcgcttggttggcggaagtggccctcatgaaggacgcgttgaaattcttcactctggtcagtgggggacaatctgtgacgatcggtgggaggtgcgcgttggtcaggtggtgtgtcgctctctggggtacccgggtgtccaagcagtgcataaagctgctcacttcgggcagggcacaggccctatctggctgaatgaagtattctgtttcggaagggagtcgagcattgaagaatgtaagatccgccagtgggggactagggcctgtagccactccgaggacgccggagtaacttgcacactgtag

SEQ ID NO: 229198 - DNA, 195 bp, synthetic construct
  misc_feature 1..195: note = Description of Artificial Sequence: Synthetic coding sequence
  source 1..195: mol_type = other DNA
atggagcagtgggaccactttcataatcagcaagaggacacagattcttgcagcgaatcggtcaaattcgatgcgcgatcaatgaccgctctgctcccaccaaatccaaagaactcaccttcactgcaggagaagctgaaatcattcaaggcggctctcattgcgctgtaccttctcgtgttcgcggtcctctag

SEQ ID NO: 229199 - DNA, 399 bp, synthetic construct
  misc_feature 1..399: note = Description of Artificial Sequence: Synthetic coding sequence
  source 1..399: mol_type = other DNA
atggctatgaaagaagaacaggtccatcttgagcaggagattaagggcgaggtcaaggtgctgaataatattactaacgatctgcgacttaaagattgggaacacagccagactttgaggaatatcacactgatccaaggcccaccagggcctcctggagaaaagggcgatcgcggtccaacaggtgagagtgggcctagagggtttccgggacccattggtccccctggactgaaaggcgatcgcggagcaatcgggtttcctggttccaggggactgccgggttacgctgggaggcctggcaactcagggccaaagggccagaaaggagagaaggggtcagggaacacgctgagaccagtacaactcaccgaccacattagagctggtccctcatag

SEQ ID NO: 229200 - DNA, 4203 bp, synthetic construct
  misc_feature 1..4203: note = Description of Artificial Sequence: Synthetic coding sequence
  source 1..4203: mol_type = other DNA
atggagctgctcccccctctgccacagagtttcctgctactccttcttctgcccgctaaacctgctgctggggaggattggcagtgcccacggacaccatatgctgcttctagagactttgacgtgaaatacgtggttccctcattttctgctggtggactggtacaggccatggtgacatatgagggagatcgtaacgagagtgccgtgtttgtcgccatcagaaacagactccacgtgcttgggcctgatctcaaaagcgtgcagagcctcgctaccggtcccgcaggagatccaggctgtcaaacctgtgctgcttgtggtcccggaccccatggcccaccgggtgacacagacaccaaggttctcgtgctggatccagccctgcctgccttagtgtcctgtggaagcagccttcagggacggtgcttccttcatgacctcgagccacagggcaccgctgtgcaccttgctgcacctgcttgcctgttttcggctcatcataacagacctgacgattgtcctgactgcgtggccagcccgctggggactagagtgaccgtcgtggagcaagggcaagccagttatttttatgtcgcatctagcctcgacgcagccgtggctgcaagctttagtcccaggagtgtctccattaggagactgaaagccgacgcctctggattcgctccaggtttcgtcgctctctcagttctcccaaaacacctagtttcatattcaatagagtatgtgcatagctttcacacaggcgcttttgtctatttcctcacggtgcagccggcttccgtgacagatgaccctagtgccctgcacacgagactggccagactgtctgctaccgaacctgaattgggagactatcgcgagctcgtcctggattgtcggtttgctccaaagaggagacgtcgtggcgctcctgaggggggtcagccttatcctgtgctacgtgtggcccactccgcccctgttggagcacagcttgccaccgagctgagcatcgctgaaggccaagaggtgcttttcggggttttcgttacaggaaaggacggtgggcctggtgtggggcctaattccgtcgtgtgcgccttcccgattgatttgttagacaccctgatcgatgaaggagtcgagcgatgctgcgagtccccagtccatccagggcttcgaagaggactggacttcttccagtctcccagtttctgccccaacccccctggcttggaggcgttatcacctaatacttcctgccgtcactttccactgctcgtctcctcctctttctcccgagtggacctgttcaatggcctcctgggccctgtgcaggtaaccgccctttatgtgacccgattggacaacgttactgtggcacatatgggcactatggatgggagaatcctgcaggtcgaattagtccggtccctcaactaccttttgtatgtgtccaatttttccctcggagattctggacaaccagttcagcgggacgtgtctaggcttggggaccatctacttttcgctagcggcgatcaggtgttccaggtgcccatccaagggcctggttgccgccattttttaacatgcggcaggtgtcttcgcgcatggcattttatgggatgtgggtggtgcggcaacatgtgcggtcagcagaaggagtgccccggaagctggcaacaggatcactgccccccaaagctcacagagttccaccctcacagcgggccactgcggggatctacccggctcactttatgcggctcgaatttttatttgcatcccagcggactcgtacctgaaggcacacatcaggtgactgtggggcagtccccatgcagacctttgcctaaagactccagtaagttgcggcctgtgccgcgtaaggactttgttgaggaattcgagtgcgaactggagcccctgggtacccaggccgtaggcccaactaacgtgtctttaaccgtgaccaatatgccacccggaaagcactttcgagttgatggtacctctgttcttcggggattctccttcatggagcctgtgttaatcgctgtgcagccactgtttgggcctcgtgccggtggaacctgcctcaccctcgaagggcagagccttagcgtggggacctctcgggcagtgctagttaacggcactgaatgtttacttgcacgggtcagtgaaggtcagcttctctgtgccactcccccaggtgcgacagtggcctcagttcccttaagcttgcaggtggggggtgcccaggtgcccggatcctggacattccagtatcgtgaagatcctgtagtcctctccatcagcccgaattgtggatacataaatagccatatcacgatttgcggacagcacctaactagcgcatggcacttggtgctttcctttcacgatgggctaagagccgttgagagccgctgtgaacgccaactgcccgagcagcaactgtgtaggctgcccgaatacgtagtgcgcgatccgcagggatgggtcgccggaaatctgtctgctcggggagacggggctgctgggtttaccctccctggatttagatttttgccgccacctcatccaccatccgcaaacctggtgcctcttaagcccgaggaacacgctatcaagtttgagtatattgggcttggtgcagtcgccgattgtgtgggaatcaatgtgacagtaggcggagagtcatgccagcacgagttccgtggcgatatggtggtttgccctctgcccccatcattgcagttagggcaggatggggcacccctccaggtgtgcgtggacggggaatgtcatatcctgggcagagtggtaaggcccggaccagatggcgttccacagtccaccctgctcggcatcctcctgcctctgctgcttctggtcgccgcactggccactgcactggtgttttcatattggtggcgccgaaaacagttagtcttgcctccaaatctaaacgaccttgcaagtttggaccagactgctggggcaacaccgctgccaattttgtactccgggtccgattaccgcagcggcctggctctgcccgctatagacggccttgatagcactacatgtgtgcatggggcttcattcagcgacagcgaggacgaaagttgcgtgccactgcttcgcaaggagtcaattcagctgagggacttggactcagctctcttagcagaagtgaaagatgttttaattccccacgagagggtagtgacacattcggaccgggtgatcggaaaaggccacttcggcgtggtgtaccacggggaatatatcgaccaggcccagaataggatccaatgtgcgatcaagagtctgagtcgaattactgaaatgcagcaagtggaggccttcctgcgagagggattgctcatgcggggactgaatcatcctaacgtcttggccctgatcggaatcatgcttcctcctgaaggtctcccacatgtgctgctcccatacatgtgtcacggtgacctgcttcagtttatccgcagcccccagcggaatcccaccgtaaaggacctcatttcttttggtctgcaggtggcacgttcgatggaatacctggcggagcagaaattcgtccacagagacctggccgctcgcaattgtatgctagacgaatccttcacagtgaaggttgctgactttgggctggctcgcgatattttagacagagagtattactccgtgcagcagcaccgccatgccaggttacctgtgaagtggatggctttggagagcttacagacatatcgcttcacaacaaagagtgacgtttggtcctttggcgtcctactgtgggagttacttactagaggggctcccccatatcggcatatcgatccattcgacctgacacactttctagcccagggcagaaggctaccccagcccgaatactgtcccgatagcctataccaggtgatgcagcagtgctgggaagcagacccagccgtgcgtcccaccttccgcgtgcttgtcggtgaggttgaacaaattgtctcagccctcctgggggatcactatgtccagctccccgctacatacatgaacctgggacccagcacatcacatgaaatgaatgtccgccctgaacagcctcagttttccccaatgcctggcaacgtgcgcagacctcggccactgagcgagccaccacgacccacctag

SEQ ID NO: 229201 - DNA, 4056 bp, synthetic construct
  misc_feature 1..4056: note = Description of Artificial Sequence: Synthetic coding sequence
  source 1..4056: mol_type = other DNA
atggagttgctccctcctctccctcagtcgttcttgctgctgctgctgctgcccgctaagcccgctgccggagaggactggcagtgccctaggaccccttacgccgcttccagagattttgacgtgaaatacgtggtgcccagcttcagcgcgggaggcttggttcaggcgatggtcacatatgaaggggaccgcaacgagtctgctgtgtttgttgccattcggaaccgcctccacgtattggggcctgatctcaagtctgttcagtccctggccacggggccagccggagaccccggatgtcagacatgtgcggcttgcggcccaggcccacatggcccaccgggagatacagataccaaggtgttagtactcgacccagctctacctgccctggtgtcatgcggcagttctctccaaggacgttgcttccttcatgatctggagccgcagggcactgctgtccaccttgcagcacccgcttgcttgttctcagcccatcacaatagacctgacgactgcccagattgtgtggcctctccgctcggcacacgcgtgacggtggtggagcagggccaagcctcctacttctacgtcgcgagtagcctagacgctgccgtcgccgcaagcttttccccccgttctgtgtccattcggcgattgaaggctgatgccagtgggtttgccccagggttcgtggcattgtctgtgctgcctaaacacctggtatcctacagcattgagtatgtgcactcattccacacgggagcatttgtctactttttgacagtccagcccgcaagtgtgaccgacgatcctagcgccctccacacccggctagccaggctgagtgctaccgaacccgagctgggcgattatagagaactggtgttggattgcagatttgcacccaaaagacggcgaagaggcgcacctgagggtggacagccttacccagttcttagagttgctcattccgctcccgtgggagcccagctggcaactgagcttagcattgccgagggacaggaagtactgttcggcgtgttcgtgaccggcaaggatggcggacccggagtaggcccaaattctgtggtttgcgcatttcccattgatctgctcgacacccttatagacgaaggagtggagaggtgttgcgagtctcccgtgcatcccggacttaggagagggttggactttttccagtccccctccttttgccccaatcctccagggcttgaagcactgtctccaaacacgagttgtcgccacttccctctgcttgtgagctctagcttctctcgcgtggacctcttcaatggcctgctgggcccagttcaggttaccgccttgtatgtgacaaggttggataatgtaaccgtggctcacatggggaccatggacgggagaattctccaggtcgaacttgtccgtagtctaaactacctgctgtacgtaagcaacttctcccttggggacagtggtcagccagttcagcgagacgttagccggctgggcgaccatctgttgtttgcttccggtgatcaggtgttccaggttcctatccaagggccaggttgtaggcacttccttacttgcggccgttgcttacgagcctggcactttatggggtgcggatggtgtgggaatatgtgcggccaacagaaggagtgtccgggttcatggcagcaagaccactgtcccccaaagctcacagagtttcatccccacagtggcccactgaggggtagtactcgcctgaccctctgcgggagtaatttttatctgcaccccagtgggcttgtgccagaaggtacccaccaagtcaccgtggggcaatccccttgtcggcctctgccaaaagattcatctaaactaaggccagtgcccagaaaagattttgtggaagagttcgagtgcgagttggagccacttggaactcaggcagtgggcccaacaaatgtgagcctgacagtgaccaacatgcctccaggcaaacacttccgtgtggatgggaccagtgtcttgcgtggcttcagctttatggaaccagtcctcattgcagtgcagcccctgtttggcccacgtgcaggaggaacctgtcttacactggagggacagtcgctatcagtgggaacaagcagagctgttctggtaaatggaactgagtgcttgctcgctagagtgtcagaagggcagcttctttgtgctacacccccaggcgctaccgtagcatccgtccccctctcacttcaagttggcggagctcaggtcccgggttcctggacctttcagtaccgcgaggacccggtggtgctgtccattagccccaattgtggttacatcaacagccacatcacgatctgtggccagcacttgacaagtgcctggcatctggtgcttagttttcacgatggtctgcgcgctgtggaatcccggtgtgaaagacaactgccagagcagcaactatgtaggctgcccgaatatgtggtccgcgacccacagggctgggttgctggaaatctcagtgcacgcggtgatggcgctgccggattcacattgcccggtttcagatttttgccacctccacatccaccctcagcaaatttagtgcccttgaagccagaggagcacgcaatcaagttcgaagtatgcgtggacggcgaatgccacatactgggccgtgtggttcgaccgggtccagatggcgtgccccaatccactctactagggatactcctgcctttgcttctactagtcgccgcactggccactgctctcgtcttctcctactggtggcgcagaaagcagttagtgcttcccccaaatctgaacgatttggcttctctggaccagacagcaggagcaacgccactgccaatcctgtactcgggttctgattaccggtcaggtctagccctgcccgctatcgacggactggattcaacgacatgcgttcacggggcaagcttttcagatagtgaggacgaatcttgcgtgccgctgcttaggaaagagtctatccaactgcgcgatctcgatagcgcgttgttggctgaagtcaaggacgtactgataccacatgagagagtagtcactcattctgatcgagtgattgggaaggggcattttggcgtggtgtaccacggggagtacatcgatcaggctcagaatcggatccagtgtgccattaagtctctaagtcgcattactgagatgcagcaggtggaggcctttttgcgcgaaggactgctaatgaggggactaaatcacccaaacgtgctggcgctgattggcattatgctgcctccggagggactgccccacgtgctcctcccttatatgtgtcacggcgacctcctgcaatttatcagaagcccccagcgaaatcctaccgtgaaagatctgatatctttcggcctgcaggtcgcaagatctatggaatatcttgcagaacagaaattcgtccaccgggatctcgctgcccgaaattgtatgctggatgagtccttcacagtgaaggtagcagatttcggcctcgccagggacatccttgacagggaatattacagcgtgcagcagcatcggcacgcccgtctcccagtgaaatggatggctctcgagtcactccagacgtaccgattcacgaccaaatctgacgtgtggagcttcggcgtactcttatgggaactgctcactagaggagcaccgccataccggcacattgacccatttgacttgactcacttcctggcacagggaagaagactcccgcagcccgaatactgtcccgattccttataccaggttatgcagcagtgttgggaagcagacccagcggttcgaccaacatttagggtgttagtgggggaggttgaacaaatagtgtctgctctgcttggcgatcactatgtacagcttcccgctacgtatatgaatctgggaccgtccacttctcacgaaatgaacgtaagaccggaacagccacaattcagtcccatgcccggaaacgtgcgccgaccccgaccactgtccgagccccctcggccaacttag

SEQ ID NO: 229202 - DNA, 2157 bp, synthetic construct
  misc_feature 1..2157: note = Description of Artificial Sequence: Synthetic coding sequence
  source 1..2157: mol_type = other DNA
atggaagacctgggcgagaacactatggttttatcgacactgcggagtctgaataactttatctcccagagagttgagggaggatcaggtcttgatatcagcacgagcgccccagggagcttacaaatgcaataccagcaaagcatgcagctggaggaacgcgcagaacagatccgaagcaaatcacacctgattcaggtagaaagagaaaaaatgcagatggaactgtcacacaaaagggccagagtggaactcgagagggctgcctcaacgtccgccaggaattacgaacgtgaagtggatcgcaaccaggaactcctgacacggattagacagctgcaggaaagagaggcgggagccgaggaaaaaatgcaggagcagctggagcggaacagacagtgtcagcagaatttggacgccgctagtaagcgactgagggaaaaagaagacagtctcgcacaggcaggagagacaataaatgcgctcaaagggcgtatcagtgagctgcaatggtcagtaatggatcaggagatgcgtgtgaagagattagaatccgaaaaacaagagctgcaagagcaacttgacctgcagcataaaaaatgtcaggaggcgaaccagaaaatacaggaacttcaagcctcgcaggaggcaagggctgaccatgagcagcaaatcaaagaccttgagcagaaactttccctgcaggagcaagatgccgcaatagtgaaaaatatgaaatcagagcttgtccgtctacctaggttagaacgagagctcaaacagctaagggaggagtccgcccacttgcgagaaatgagagaaaccaacggcctcctgcaagaagaactggaaggactgcaaaggaaactgggccgtcaggaaaagatgcaggaaacgctggtgggactggagttggaaaatgagcgccttttagctaagctgcagtcctgggagcgtctggatcagactatgggcttaagcatcagaaccccagaagacctcagtagattcgtggtagaattgcaacagcgggagcttgcactcaaggataagaatagcgctgtgactagcagcgctagagggttagagaaggccaggcagcaattgcaggaggagctcaggcaagtatcaggccagctgttagaggagagaaagaaacgcgaaactcatgaagcccttgccaggaggctgcagaaaagagttttgctgctgaccaaggagcgggatggcatgcgtgccatcttgggatcatacgacagtgaacttactcccgcagagtatagcccacagctcacacgcagaatgagagaagctgaagatatggttcaaaaagttcactctcattccgccgagatggaggctcagttatcccaggcccttgaggagcttggcggacagaaacagagagcagatatgcttgagatggagttaaagatgcttaagtcccaatcatccagcgcggaacagagtttcctattctctagagaggaggccgacaccctacggttaaaggtggaggagcttgaaggggaacgaagccgcctcgaggaagaaaaacgcatgctagaagcccagctggagcggagagccctgcagggtgattacgatcagtctagaacaaaagtgttgcacatgtctctgaatcccacaagcgtcgccagacagaggctgagagaagaccatagccaactccaggcagaatgcgaacggcttcggggactgctgagagccatggaacgcggaggcacagtcccagcagaccttgaagccgctgcagccagccttccatcgagtaaagaggtcgccgagctgaagaaacaggtcgagtcagccgagcttaaaaaccaaaggctgaaagaagttttccagactaagatccaggaattccgcaaagcctgctataccctgacgggttaccagatcgacatcaccaccgagaatcaataccggttaacgagcttatatgccgaacaccccggagactgcctcatcttcaaagcaacatcccctagcggctcgaagatgcagctgctagaaacagagttcagccacactgtcggagagctcatcgaggtgcacctcaggaggcaagatagtataccagcattcttgtcgagtctcaccctggagttgttctcccgacagacagttgcttag

SEQ ID NO: 229203 - DNA, 2157 bp, synthetic construct
  misc_feature 1..2157: note = Description of Artificial Sequence: Synthetic coding sequence
  source 1..2157: mol_type = other DNA
atggaggatctcggagagaataccatggtgttgagcacactcaggtccctgaacaattttatttctcaacgtgtggagggcggttcagggctcgatatctccacgagcgctccgggttctctccagatgcagtatcaacagagcatgcagttggaggagagggccgagcaaattcgatccaagtctcatctgatccaagttgaacgagaaaagatgcagatggagctttctcacaaaagagctcgggtggagctcgagagagcggcttctaccagcgcacgaaattacgaaagggaggtcgatagaaatcaggagctcctgacccgcataagacaactgcaagaacgggaagccggtgccgaggaaaaaatgcaagaacagctcgaacgcaaccgccaatgtcagcagaatctagatgcagcatcaaaaagattgcgggagaaggaagacagtctggcccaggcaggcgagaccattaacgccctgaaaggtaggataagcgagctccagtggagcgtgatggaccaagaaatgcgagtaaagagactggaaagcgagaaacaggaactccaggagcagctcgacctgcaacacaaaaagtgtcaggaggctaatcagaaaatccaagagctccaggccagccaagaagctcgcgctgaccacgaacagcagataaaggatctggagcaaaaactatcactccaggagcaggatgcagctatcgtcaagaacatgaaatctgaactggtcaggttgccaaggctggaacgagaactcaagcagctacgcgaagagtccgcccaccttcgtgagatgcgtgagaccaacggtctcctccaggaggagctcgagggcctacagcgcaaactgggtcgccaagaaaagatgcaagagaccttggttgggcttgagctcgagaatgagcgactactcgctaaactgcagagctgggagcggttggatcaaacaatgggcctctctatacgcacaccagaggacctgagtcggtttgttgtggaactacaacagagggagctggcactcaaagacaagaacagcgctgtgacgtcctctgcacggggattggagaaagcccgtcagcagttacaagaagaactgcgacaagtgtctggtcagttgctggaggaacggaagaagcgcgagacacacgaggctttggctcgccgtctccaaaagcgtgtcctgctgcttacaaaggagagagatggaatgagagccatactaggttcatacgatagtgagctgacacctgcggagtacagtccacaactgacaagaaggatgagggaggcagaagacatggtccagaaagttcattctcacagcgccgagatggaggcacaactgtctcaagccctcgaagagctggggggacagaagcaacgcgcagatatgttggagatggagctgaagatgttgaagtcacagtcctcctcagccgaacagagcttcctgttttctagagaagaggccgacaccctgcgattaaaagtcgaggagctcgagggggagagatcacggctggaagaagagaaaagaatgctggaagcgcagctcgagaggagggctttgcagggcgactatgaccagagtcgcacgaaggttttgcacatgagtttaaacccaacaagcgtagcgaggcaacgcctaagagaagaccactcccaattacaggcagaatgtgagcgcctccgcggtcttctacgggctatggaacgtggcggaacagttcccgctgatctggaggctgccgcagcatcgctgccctccagtaaagaggttgcggagctaaagaaacaggtggaatctgccgagttgaagaatcaaagactgaaagaggtatttcagacaaaaatacaggagttccgcaaagcatgttacactttgactggctaccaaatcgatatcacaaccgagaatcagtatcggcttactagcctgtacgcagaacaccctggcgattgtctgatttttaaggcaacctccccaagcggcagcaagatgcaactgctggagaccgagttttcacatactgtgggcgagctgattgaggtgcacctgagaaggcaggattccatccccgcttttctcagttctctgaccctcgaactttttagcagacagacggtggcctag

SEQ ID NO: 229204 - DNA, 1881 bp, synthetic construct
  misc_feature 1..1881: note = Description of Artificial Sequence: Synthetic coding sequence
  source 1..1881: mol_type = other DNA
atgctgcctgccagaggatgcgtaaggaagaggacagtctggcctcggctcgcgcgagtgttgatcgtaactctgcttacactagaactcagctacgctcccctgccctgtcagctaagtggtgtgccatacaacactggagatcctgttggtcgttgggcgagaccttgtatatggccatgtccctggcacacaactatcaatgcgcttaagggaagaatctccgaactgcagtggtcagtaatggaccaagaaatgagagtgaagcgacttgagtctgagaagcaggaactgcaagaacagcttgacctccagcacaagaaatgccaggaggctaatcagaagatccaggagttgcaggcgagccaagaggctcgcgcagatcacgagcaacagataaaggacctggaacagaaactgtctctccaggaacaggatgcagcaattgtcaagaatatgaaatccgaactagttaggctgcctaggcttgagagagagctcaagcagctccgcgaagagtcggctcacttgcgcgaaatgcgtgagaccaacggactgctccaggaagagttggagggactgcagcgcaagttagggcgtcaagagaagatgcaggagaccttggttggactggaacttgagaacgaaagactccttgctaaacttcagtcttgggagcggttagaccagaccatgggcctttccattcgcaccccagaggacttgtctaggtttgtagtcgaactgcagcagcgcgagctggccttaaaggataagaattccgcagtgacatcaagtgctaggggcctggaaaaagcacgccaacagctgcaggaggagcttcgccaggtgtctggtcaactcctggaagaacgaaagaaaagggagacccatgaggccctcgccaggcgcctgcaaaagagagtgctgctcttgactaaggagagagatgggatgcgggctattctcggctcctacgacagtgagctcacccctgccgaatatagccctcagctgaccagacggatgcgcgaagcggaggacatggtccagaaggttcactcgcattctgctgaaatggaagcccaactgagtcaagcacttgaagagcttggaggccagaaacagcgcgctgacatgctggaaatggagctgaagatgctcaagagccagtcttcatccgccgagcaaagcttcctgttctcacgcgaggaggccgacacactgcgcctgaaagtcgaggaactggagggtgaacgctcacgcctggaagaagaaaagcgtatgttagaagcccagctggagaggcgcgcactgcagggagactatgaccagtctcgcacgaaggtgctccacatgagcctgaaccccacctccgtggcccgacagcgactgcgtgaagaccactctcagctacaagccgaatgtgagagactacgaggtctcctgagggcaatggagagaggtggcactgtgcccgctgacctcgaggcggcagctgcttcactcccatcctcaaaggaggtagcagagctgaagaaacaggtggagagtgcggagttgaaaaaccaacggttaaaagaggtctttcaaactaagattcaagaattccggaaggcctgctatacactgacaggttaccagattgatatcacgacggagaatcagtacagactgactagcttgtacgcagaacacccaggtgattgtctgatctttaaagccacctctccaagcgggtcgaagatgcagctgctagaaactgagtttagccacactgtgggagagctcatcgaggtgcacctacgacggcaggacagcatcccagcattcctatccagcctgaccctggagttattttctcggcagaccgtcgcctag

SEQ ID NO: 229205 - DNA, 2157 bp, synthetic construct
  misc_feature 1..2157: note = Description of Artificial Sequence: Synthetic coding sequence
  source 1..2157: mol_type = other DNA
atggaagacctcggggaaaacaccatggtgctctcgacccttcggtctctgaacaacttcatctcacagcgggtggaaggcggatccgggttggatatctctacaagcgctcctgggagcctgcagatgcagtaccagcaaagcatgcagctggaagaacgtgcagagcaaattcgctccaaatctcacctgatccaggttgagagggagaaaatgcagatggagctgagccataagcgggcaagagtggagctggaacgagctgcatctacatccgccaggaactacgaaagagaagttgatagaaatcaggaattactgacacgcattagacagctacaagaacgggaggccggtgcagaagaaaagatgcaggagcagttggagcgaaaccgccagtgccaacagaacctcgacgcagcatccaagcggctgcgagagaaggaggactccctagcacaggcaggagagacgataaacgcactgaagggacgaatttccgagctccagtggtctgtgatggaccaggaaatgcgcgtaaagcgcctagagagcgagaagcaggaattacaggagcaactcgacctgcagcacaaaaaatgccaggaggcaaatcagaaaatccaagaactgcaagcttcccaggaggctcgggctgatcacgagcaacagatcaaagacctagagcagaagctgagcctgcaagaacaggatgccgcaatcgttaaaaacatgaaatccgaactggtgcgactcccgcgtttagagagagagctgaaacagctgcgggaagaatcagctcatctgagggagatgcgggaaacgaacggactcctccaggaggagctcgaagggctgcagaggaaactgggcagacaggaaaaaatgcaggaaaccctggtcggcttggaattggaaaacgaaagactattagcaaaactacagagttgggaacggctggatcaaacaatggggctgtcaatccgaacacctgaagatctgagtcggtttgtggtcgagttgcagcaacgtgaacttgctctgaaggataagaattctgctgtcacatctagcgccaggggcttggagaaggcacgacagcagctgcaggaagagcttcggcaggtttccggacagcttctggaagaaagaaagaaaagggaaacgcacgaggctctggccaggcggctgcagaagcgcgttctgctgttgaccaaggagcgagacgggatgcgtgctatcctgggctcatatgattcggagctcacccctgctgaatatagccctcaactgacacggcgaatgagggaagccgaggacatggtgcagaaagtccacagccacagcgctgaaatggaagcccagcttagtcaggctttggaggagctcggagggcaaaaacagcgcgctgacatgctggagatggagctcaagatgctcaagagtcagagctcaagcgctgagcaatcttttctgtttagccgggaggaagcggacactctccgcctcaaggtcgaggaattagaaggcgagaggagtcgcttggaggaggagaagaggatgctggaggcccagctggagagacgtgcgctgcagggggactacgatcaatcccgcaccaaagtgctgcatatgtccctgaacccaacatctgtggctaggcagcggttacgggaggaccactcacaactgcaggccgagtgcgagcgcctaagaggcctcctgagagctatggaaagagggggtactgtgcctgcagacctggaagccgcagcagcctcgttgccttcatccaaggaggtggctgagttgaagaagcaggtggaatccgcagaacttaagaaccagcgactcaaggaagtgttccagactaaaattcaagagttccgaaaggcctgttacacactgacgggttaccagatcgacatcacaaccgagaatcagtacaggctcacctccttatatgccgagcacccgggtgactgtcttatctttaaggccactagtccgagtggctcaaagatgcagttactggagacggagttctctcacactgtgggagagctcattgaagtgcatctgaggcggcaggattcgattcccgcattcctgtctagcctgaccctggagctcttctctaggcagaccgtggcttag

SEQ ID NO: 229206 - DNA, 474 bp, synthetic construct
  misc_feature 1..474: note = Description of Artificial Sequence: Synthetic coding sequence
  source 1..474: mol_type = other DNA
atggaggatcttggagagaatacaatggttctatcaacactgcgcagcctcaacaacttcatctcccagcgggtcgaggggggttcgggacttgatatttcaacaagtgcccctggcagcttacagatgcagtaccagcagtcgatgcagctggaggaaagggcagagcagattcggtctaagagccatcttatccaggttgaaagggagaagatgcaaatggagctgtcccataagcgcgctcgcgtagagctggagcgcgctgcttctacatccgctaggaactacgaaagagaagttgataggaaccaagaactgctgactcggattaggcagttgcaggaaagggaagccggagcagaagagaaaatgcaagagcagctggaaagaaataggcagtgtcagcagaacctggatgctgcatctaagaggttgcgggaaaaggaggatagcttagcccaggcgggtgaatag

SEQ ID NO: 229207 - DNA, 810 bp, synthetic construct
  misc_feature 1..810: note = Description of Artificial Sequence: Synthetic coding sequence
  source 1..810: mol_type = other DNA
atgcgtgagctcgagtttgccaagctggagtgctgtctagcatggcagctgcaagcttctagaagagagcttgagatggaacttaagatgctgaagtcacagtcctcctctgctgagcaatccttcctgttcagcagagaggaagctgacaccctgcggttgaaagttgaagaactggaaggcgaaagatcaagactggaagaggagaaaaggatgctggaggcccagcttgagaggcgtgccctacagggcgactacgatcagagtagaacaaaagtcttacacatgtccctcaatcccacatccgtcgctcgccagcgacttcgggaagaccattctcagctgcaagccgaatgcgaacgcctgcgcggtctcctgcgagctatggagagggggggtaccgtgcctgccgatctggaagctgccgcagcttcccttccgtcaagcaaagaagtagccgagctgaaaaagcaggtcgaaagcgccgaactgaagaaccaacggttaaaagaggtgtttcagacaaaaatccaggaattccggaaagcctgttatactcttacaggataccagatcgatattacgacagaaaatcagtaccggctgaccagtctctacgctgagcacccaggggactgcctgatctttaaagctaccagccccagcgggagcaagatgcagctattggaaaccgaatttagccacactgtcggagaactcatagaagtgcatctgcgtcggcaggactccatcccagcctttctgtcttcgctgactttggaattattttcaagacagacagtcgcgtag

SEQ ID NO: 229208 - DNA, 618 bp, synthetic construct
  misc_feature 1..618: note = Description of Artificial Sequence: Synthetic coding sequence
  source 1..618: mol_type = other DNA
atggccctgcagcttagtcgggaacaggggataacactgaggggcagcgcagagatcgttgccgagttttttagcttcggcattaatagtatcctttatcaacgagggatatatccgagcgaaacatttactagggttcagaagtatggcctgactcttttagtcaccacggatttggagctcatcaagtatctgaacaatgttgtggagcagcttaaggactggctgtacaaatgttcagtgcagaagttggtcgtcgtgatttctaatattgagtcaggtgaggttctagagagatggcaatttgatatcgaatgtgacaaaactgccaaggacgattcagcgcctcgcgaaaagtcacagaaggcaatccaagacgagatccgctctgtgattcggcaaatcacagcgaccgttacattcttgccactgttggaggtgtcatgctctttcgacttgctaatctacacagataaggacctggtcgttcctgagaagtgggaggaaagcggaccacagtttatcacaaacagcgaagaagttcgcctcaggagcttcaccaccaccattcacaaagttaactctatggtcgcttacaagatccctgtgaacgactag

SEQ ID NO: 229209 - DNA, 1212 bp, synthetic construct
  misc_feature 1..1212: note = Description of Artificial Sequence: Synthetic coding sequence
  source 1..1212: mol_type = other DNA
atgcctaataggaaggcaagtaggaatgcttattactttttcgtccaagagaagatcccggagttacgccgtagaggtctgccagtcgctcgggtggccgatgctataccctactgtagctccgactgggcaaaacctgtatttacaccgttgcggaggcccggaatgctcgtcccaaaacaaaatgtcagcccccctgatatgagtgctctaagcttgaaaggggatcaggccctgctcgggggtattttttacttcttaaacattttctcccacggggaactgcctcctcattgcgaacagagattcttgccatgtgagataggatgcgtgaagtactcgctgcaggaaggaatcatggccgatttccatagcttcatcaacccaggtgaaattcctagggggtttcgctttcattgccaggcagcaagcgactcatctcacaagatcccaatatccaacttcgagcgtgggcacaaccaggccaccgtgcttcagaacctttaccgcttcatccaccccaacccagggaattggccacccatctactgcaagtccgacgatcgcactcgtgtgaactggtgtctgaaacacatggccaaggcatccgagatacgacaggatctgcagctgttgaccgtggaagatctggtggtggggatttatcaacagaaatttcttaaagagccctctaagacttggattagaagtctgttggatgtggctatgtgggattactcctcaaatactagatgcaaatggcacgaggagaatgacatcctgttttgcgctctcgcggtctgtaagaaaatcgcctactgcataagtaattctctggccacccttttcggaatccaacttactgaagctcacgttcctctgcaggattacgaggcctctaattcggtcacccccaaaatggttgtcttggacgcgggtcgctaccagaaactacgtgttggtagcagtgggttctctcactttaattcttctaacgaggaacaaagatcgaacacgcccatcggggactatccatcccgagctaaaataagcggacagaactcctccgtgcgtgggagaggtattacaaggctgttggagagcattagcaattctagcagtaacatccacaaattctccaattgcgacacatccctctccccttacatgagccagaaggatggttacaagagcttttcatcactatcctag

SEQ ID NO: 229210 - DNA, 1305 bp, synthetic construct
  misc_feature 1..1305: note = Description of Artificial Sequence: Synthetic coding sequence
  source 1..1305: mol_type = other DNA
atgccaaaccgaaaagcgagccgtaatgcctattacttcttcgtgcaggaaaaaatccccgagttgcgaaggcgtggactccctgtcgccagagtcgccgatgcaatcccttattgctcctcagattgggctcttcttcgggaggaggaaaaggagaagtatgcagaaatggcacgcgaatggcgcgctgcgcaagggaaagacccaggaccgtccgaaaaacaaaagcccgtcttcactcctctccggaggcccggaatgctggtgcctaaacagaatgtgtccccccctgacatgtcagccttgtcattgaagggggatcaggccttactgggcggaattttttattttctcaacattttctcccatggggaactgccacctcattgcgaacaacgattcctgccctgtgagatcgggtgcgtgaagtactctctccaggaggggattatggccgatttccactcatttatcaatcctggtgagattcctcgcggatttcgcttccattgtcaagcagcttccgactcaagtcacaaaattcctattagcaactttgaacggggacataaccaggcaaccgtcctccagaacctgtatcggtttattcatcctaaccctggtaactggccacccatttactgcaagtccgatgatcggaccagagtaaattggtgtcttaagcatatggcaaaagcttccgaaatccggcaggacctccagttgttgaccgttgaggacctcgtggtgggtatttatcaacagaaatttctgaaggagccctctaagacctggattagatctctgttggacgtggctatgtgggattattcatcaaacacacgttgcaaatggcacgaggagaatgacatattgttctgcgcactggccgtgtgtaagaagatcgcttactgtatcagcaatagcttggcaaccctatttggcatccagttgactgaggcccacgtcccactgcaggattatgaggcatccaattctgtcacgccaaagatggtcgtgttagatgccggtcgatatcagaagctgcgggtcggatctagcggatttagccatttcaactcctcgaacgaggagcaaaggtcgaatactcccatcggtgactacccatcacgagctaagatctcagggcaaaattcctctgtgcgcggtagaggtattacccggctcctcgagtctatttctaacagctcaagtaatattcacaaattctctaactgcgacacctccctgtcaccctatatgtcacaaaaggatgggtacaagtcattctcatccttgagttag

SEQ ID NO: 229211 - DNA, 951 bp, synthetic construct
  misc_feature 1..951: note = Description of Artificial Sequence: Synthetic coding sequence
  source 1..951: mol_type = other DNA
atgccaaacaggaaagcttccaggaatgcttactacttttttgtgcaggagaaaattccagagctaaggcgtaggggcctccccgtagctcgagtggcagacgcaatcccctattgttcatcagactgggccaaacctgttttcacccccctgaggcgtcctggaatgctcgttcccaaacaaaatgtgtcacccccagatatgtccgcactctccctgaagggcgaccaagcactgcttggaggaatcttttatttcctcaacatcttctcacacggggagctgcctcctcattgtgagcaacggtttctcccatgcgaaattggttgcgttaagtactctctgcaggagggtattatggccgacttccatagttttatcaaccccggagagattcctcgagggttccgatttcattgccaggcagcttctgactctagccacaagatacctatcagcaacttcgaaaggggccacaatcaggccaccgtgctgcagaacctgtaccgctttatccatcctaacccgggtaactggccgccaatttactgtaagtcggacgatagaacccgcgtaaactggtgtctcaaacatatggccaaggctagcgagattaggcaggacctgcaacttctcactgtggaagatcttgtggtgggaatttatcagcaaaaatttctgaaagaaccgagtaagacctggatcaggtctctgcttgacgtggctatgtgggattatagctctaataccagatgcaagtggcatgaggagaatgatattcttttctgcgccctagccgtctgcaaaaaaatcgcatactgtatttccaattcactcgccaccctctttgggatccaactgactgaggcccacgtaccgctccaggactatgaggcctcaaactcagtcaccccaaagatggttgtgctcgatgctggcaggtatcaatag

SEQ ID NO: 229212 - DNA, 471 bp, synthetic construct
  misc_feature 1..471: note = Description of Artificial Sequence: Synthetic coding sequence
  source 1..471: mol_type = other DNA
ctgctgcaaaggtgcaagtggcatgaagaaaatgatattctgttttgtgcactggcggtgtgcaagaagatcgcatactgcatatctaactcgctcgctacactgttcggcatccagctcaccgaggcccacgttccactgcaagattatgaggcatcaaatagcgtgacaccaaaaatggtcgtgctcgatgctgggaggtatcagaaactcagggtgggctcatcagggttctctcactttaatagcagcaatgaagagcagaggtcaaacacacccattggcgactatccgtcccgggctaaaataagtggtcagaatagcagtgtgcgcggaaggggaattactcgcctgttagagtccattagtaattcttcgtccaacatacacaaattcagcaattgcgacacgagtttatcaccttacatgagtcagaaggacggttacaagtccttctctagcctatcctag

SEQ ID NO: 229213 - DNA, 747 bp, synthetic construct
  misc_feature 1..747: note = Description of Artificial Sequence: Synthetic coding sequence
  source 1..747: mol_type = other DNA
atggaccagagacagagacggatcctgggacagccactctctatccctacatcccaacccaaacagaaacgcacttcaatgatttcttttttcagcaaagtaagctggaaattacgctttcagaagcgcgagcctcttaaaaatgtgttttttatactagccgagagggccagggatccctcggctaagaaacgacatatggctatgcgcaacttagggaccatggcttatgaggcccctgacaaagtgaggaagtataaaaaaattgttctcgacctgctcgtgtatggtctctatgaccctgtgaacctggaggtgattcacgagtccatgaaaacgctgactgtggtcttgggcaaaatccagggcaagggcttaggctcatttttcatcgatatcacgctgcagactcggaccctcctcgacgatgagaacgactcattgcggtacagcgcctttgtgctgttcggccagctggctgctttcgccggacgcaaatggaagaagtttttcacatctcaggtaaaacagacaagggatagcctacttattcacctgcaggatagaaatccacaggttgcgaaagcgtgtaaaacaacctttcaagcctgctctccatatttaaagttgaaggaagagtactcctttcaatctgaagaggatcagcgcaatactaaactctatcaacaactgagtcactatcatccagagattctgcaattcttctacgcaaataagattttgtag

SEQ ID NO: 229214 - DNA, 747 bp, synthetic construct
  misc_feature 1..747: note = Description of Artificial Sequence: Synthetic coding sequence
  source 1..747: mol_type = other DNA
atggaccagagacagcgacgcatcctcggacagcccctgtcaataccaacaagccagccaaaacaaaagcgcacttctatgatctctttttttagcaaggtgtcctggaaattgcgcttccagaaacgcgagcccttgaaaaacgtgtttttcattttggcagaaagggcccgtgacccatctgccaagaagaggcacatggcgatgcgcaacctcggcaccatggcctacgaggcgccagacaaagtgcgaaagtacaagaaaatcgtgctggacctgcttgtgtacggtctatacgaccccgtcaacctcgaggtaatacatgaaagcatgaaaaccctgacagtggtgctcgggaaaatacagggtaagggcttaggatcattcttcattgacattactctacagacgaggaccctgctcgacgatgagaacgattctcttcggtattctgcctttgttctgttcggtcagcttgcagcattcgctggtagaaagtggaaaaagttcttcacatcccaagttaagcaaaccagagattccttactcatccacctacaagaccgcaatccccaggtggctaaggcttgtaagactacctttcaagcctgctcgccatatctcaagcttaaggaggagtattcctttcagagtgaagaggatcaacgcaacactaaattgtatcagcaactgtcccattatcaccccgaaattctccagtttttttacgcgaataagatcctatag

SEQ ID NO: 229215 - DNA, 591 bp, synthetic construct
  misc_feature 1..591: note = Description of Artificial Sequence: Synthetic coding sequence
  source 1..591: mol_type = other DNA
atggatcagcgccagagaaggatcctgggccagccactttctatacccaccagccagcctaagcagaagagaacttctatgatttcctttttttccaaagtctcttggaagttgcggtttcagaaacgggaacccttgaaaaacgtgttttttattctggccgagcgcgctcgagatccgtcagctaagaagagacacatggcgatgcggaatttagggacaatggcttatgaggctcctgacaaggttcggaagtataagaagatcgtactggacttgctggtgtacggcttgtacgacccagtgaatttggaggtgatccacgagagcatgaaaacgttgacagtagtgctgggcaaaattcagggaaagggtcttggatctttttttatcgatatcaccctccaaaccaggactctcctagatgatgcctgcaagacaacattccaggcatgttccccttatttaaaattgaaggaagaatattctttccaaagtgaagaggatcaacggaacacaaaactgtaccagcagttaagccactatcacccagaaatcttgcaatttttctacgctaacaaaatactgtag

SEQ ID NO: 229216 - DNA, 633 bp, synthetic construct
  misc_feature 1..633: note = Description of Artificial Sequence: Synthetic coding sequence
  source 1..633: mol_type = other DNA
atggcttggggttcgaaaggaatccagggctgggagaatttagcagagagctctcatctggctacaacacgggagtcaagcccacctgaatcagggaccgggagcgggtccagcaggggctcaaggctacaggagccgcaggtttcgtggaagcttcgttttcagaagcgcgagcctctaaaaaatgttttttttatcctagcggaacgggctagagacccctcagctaagaagcgccacatggccatgagaaacctcggtaccatggcctacgaggcccctgacaaggtccgtaagtataagaaaattgtgctggacttgcttgtatacgggctgtacgatccagtaaacttggaggtgatccacgagtccatgaagaccttaacagttgtgctgggcaaaatccaaggtaaggggttgggcagcttcttcatagacatcactcttcagactagaaccctgttggacgatgcgtgcaaaaccaccttccaggcgtgctccccctatctcaaattgaaggaagagtactccttccaatccgaggaggatcagaggaataccaagttgtatcaacagctctcccattatcaccctgagatcctccagtttttctacgccaacaaaatcctgtag

SEQ ID NO: 229217 - DNA, 789 bp, synthetic construct
  misc_feature 1..789: note = Description of Artificial Sequence: Synthetic coding sequence
  source 1..789: mol_type = other DNA
atggcctggggatccaaaggtattcagggctgggaaaatctcgcagagtcctctcacctcgccactacccgggagtcatctccccctgaaagcgggactgggagcggaagctcaagaggtagccgattgcaagaaccccaggtctcttggaagctgaggttccagaagagggagcctctgaagaatgtgttcttcatattggccgagagagcacgggacccaagcgctaagaagaggcacatggccatgagaaacttaggcactatggcttatgaagccccagataaagtcaggaagtataagaagattgtcttggaccttctcgtttacggcctgtatgatcccgtgaatcttgaggtgattcacgaatctatgaagactctgactgtcgtgctcggcaagatccagggaaaggggctcggcagtttttttatagatatcaccctacagactcggacacttctcgacgacgaaaatgattccctcaggtatagcgcatttgttctgttcggtcaactcgctgcttttgctgggcgaaaatggaagaaattcttcacgtcccaggtcaaacagacgcgggattccctgctgatccacttacaggatagaaacccacaggttgctaaagcatgcaaaactaccttccaggcttgtagtccgtatcttaaactaaaagaggagtattctttccagtctgaagaggaccagagaaataccaaattatatcagcagctatcgcattatcacccagagatcctgcagttcttttacgcaaacaaaattctctag

SEQ ID NO: 229218 - DNA, 591 bp, synthetic construct
  misc_feature 1..591: note = Description of Artificial Sequence: Synthetic coding sequence
  source 1..591: mol_type = other DNA
atggaccaacgtcagcgcaggattctaggtcagcctctgtccatccctactagccagccaaaacagaagcgcactagtatgattagtttcttttcaaaggttagttggaagctgagatttcagaaacgggagccacttaagaatgtgtttttcatcctggctgaacgcgcacgcgacccatcagctaaaaagcgtcatatggccatgcgaaacctaggaaccatggcatatgaagcacctgataaagttcgcaaatacaagaaaatagtgctagatctgttagtgtacggtttatacgatcctgtgaatctggaggtgatacacgagtcgatgaaaacactgactgttgtcctgggtaaaatacaggggaaaggactggggagcttcttcatcgacataaccttacagactcggaccctcctcgatgatgcgtgtaaaacaacatttcaggcctgttccccctatttgaaactgaaagaggaatacagttttcagtccgaagaggatcagcgcaatactaagctgtaccaacaactgagccactatcaccctgagatcctgcagttcttttacgccaacaaaatcctatag

SEQ ID NO: 229219 - DNA, 771 bp, synthetic construct
  misc_feature 1..771: note = Description of Artificial Sequence: Synthetic coding sequence
  source 1..771: mol_type = other DNA
atgaaactcctggagaatagctcctttgaagcaattaacagtcagctgacagtagagactggcgatgcccacattatcggtagaatcgagagctattcttgcaaaatggccggtgatgataagcacatgttcaagcagttctgccaagagggccaaccacacgtgctggaggccctaagcccaccgcaaacctccggtctttcaccgtccaggctatccaaatctcaggggggagaggaggaggggccactgagtgataaatgtagtagaaagactttgttttatctaattgccaccctcaacgagtctttccgccctgactacgacttttctacagcgagatcccacgagttctctcgggagccttccctgtcgtgggtcgttaatgccgtaaattgttcccttttttcggcggtgagggaggatttcaaagatttgaagccgcagctttggaacgccgttgatgaagagatttgcctcgcagagtgcgatatctactcgtataacccagacctggactctgatccatttggagaggatggtagcttgtggtcatttaactatttcttttataacaagagactgaagaggatcgtctttttttcatgccgcagtataagcggatccacgtataccccctcagaagccggaaatgaactggacatggaactgggggaggaggaggtggaagaagagtctaggtcaggaggatctggcgctgaagaaacatccacaatggaggaggacagagtgcccgtgatttgtatatag

SEQ ID NO: 229220 - DNA, 213 bp, synthetic construct
  misc_feature 1..213: note = Description of Artificial Sequence: Synthetic coding sequence
  source 1..213: mol_type = other DNA
atgaaacttctggaaaattctagttttgaagccataaatagccagcttaccgtggaaactggggacgcccacataattggcagaatcgagtcttacagctgcaagatggcaggcgatgataaacatatgttcaagcagttctgtcaggagggccagcctcacgtgctggaggcacttagtcctccccagacctccggcctatccccatcttag

SEQ ID NO: 229221 - DNA, 771 bp, synthetic construct
  misc_feature 1..771: note = Description of Artificial Sequence: Synthetic coding sequence
  source 1..771: mol_type = other DNA
atgaagctgttagagaactcctcttttgaggctataaactctcaactgacggtagagactggtgatgcacatattatcggtcgtatcgagagctactcctgcaaaatggccggagacgataagcacatgttcaagcagttctgtcaggagggccagccacacgtgttagaagccctgtctcccccacagacctccggcctcagcccctcacggctgtcaaagagccagggcggagaggaggaagggccactgtcagacaaatgctcaaggaaaactctcttctacctgattgcaactctgaacgaaagtttccgcccagattatgattttagtacagcaaggtcgcacgaatttagccgagagccttcattatcctgggtcgtgaacgccgtcaattgtagtttattttcagccgtgagagaggacttcaaggacctgaagcctcagctctggaatgcggttgacgaggaaatctgtcttgccgaatgtgacatttacagttacaacccggacttagactctgacccttttggcgaagacggatccctgtggtcctttaattactttttttataacaagagactaaagcgcatagtcttttttagctgtagatcaatttctggctccacatatactccttcagaggctgggaacgagctagatatggagctcggcgaggaggaggttgaggaggagtcacggtccgggggtagcggcgctgaggagactagtacaatggaagaagacagagtgcccgtgatctgtatatag

SEQ ID NO: 229222 - DNA, 1104 bp, synthetic construct
  misc_feature 1..1104: note = Description of Artificial Sequence: Synthetic coding sequence
  source 1..1104: mol_type = other DNA
atgagaaaaggaaagggtcctatatgtctgtttagtagacccacactcaggcccagtcggagtaaagtgtcgctgatagagggaagaggcgctaatatggccgctcggtggcgattttggtgtgtatcagttacaatggtggtggctctgctgatcgtgtgtgacgtccctagcgcttctgcccagaggaaaaaggagatggtattaagcgaaaaggtctctcagttgatggagtggaccaacaaaaggccagttattcgaatgaatggggacaaattcagacgtttggtgaaagcaccacctagaaattattccgtgattgtcatgttcacggcgctccaattgcatcgtcagtgcgtcgtttgtaagcaggcagacgaagaattccaaatcttggctaatagctggcgctattcatctgctttcacgaatcgaatttttttcgcaatggttgacttcgacgagggatcagatgtcttccagatgcttaatatgaactccgcccctacgttcattaacttcccagccaagggtaagcccaaaagaggcgatacatacgaacttcaggtgagaggattcagtgccgagcagattgcacgctggatcgcggaccggaccgatgtaaacattagagtaatcagaccccctaattacgctggccctctgatgctaggactgctgctggctgtgattggcggactcgtgtatctgcgcaggtccaacatggagttcctgtttaacaaaacaggctgggcttttgcagctctgtgctttgtcctggccatgacaagcgggcagatgtggaaccacattcgcggaccgccatatgcacataaaaacccgcacaccgggcacgtcaattatatccacgggagctctcaggctcagtttgtcgctgagactcacatcgtgttgttgttcaatggcggagtgacattaggaatggtccttctctgcgaagccgcaacctcagacatggatatcggaaagcgtaagattatgtgtgtagctggcatcggtcttgtcgtcctcttttttagttggatgttgagtatttttaggtccaaataccatggttacccctactccttcttaatgagttag

SEQ ID NO: 229223 - DNA, 657 bp, synthetic construct
  misc_feature 1..657: note = Description of Artificial Sequence: Synthetic coding sequence
  source 1..657: mol_type = other DNA
atggtggacttcgacgagggatctgacgtcttccagatgctgaacatgaatagcgcccctacatttatcaactttccagctaagggcaagcctaagcgcggagacacctatgagttgcaggttcgcggtttctccgcggaacagattgccaggtggatagcggatcgaactgacgtaaatataagagtgattcggcctccaaattatgccggacccctcatgcttggactgctcctcgccgtcatcggcggtctcgtctatctgcgacggtccaacatggaattcctgtttaacaagactggatgggctttcgctgcattgtgcttcgtattagccatgacctccgggcaaatgtggaaccatatcagaggcccaccctatgcacataaaaatccccacaccgggcatgtgaactatattcacggttcgtcacaggcacagttcgtggccgagacacacatagtgttgttatttaatggtggagtgaccctgggtatggtgttgttatgtgaagcagcaactagcgacatggacatcggaaagaggaagattatgtgtgtggccggaatcggtctggtggtgttgtttttctcgtggatgctctctatctttaggagcaagtatcacggctatccgtattccttcctcatgagctag

SEQ ID NO: 229224 - DNA, 330 bp, synthetic construct
  misc_feature 1..330: note = Description of Artificial Sequence: Synthetic coding sequence
  source 1..330: mol_type = other DNA
atggagtctgacttctaccttcgctattacgtgggccacaagggaaagttcggccatgagtttctcgagtttgagttcagaccagacggcaaactgcgctacgccaacaactcaaactataagaatgacgtgatgattaggaaagaggagttagaaatcgtgataggggacgaacatatatcatttacgacctctaaaatcggatcgctcatagacgtaaaccagagtaaagaccccgaaggactgcgcgtcttttattatctggtgcaggatctaaaatgtcttgtatttagcttaattggtctccacttcaaaattaagcccatatag

SEQ ID NO: 229225 - DNA, 441 bp, synthetic construct
  misc_feature 1..441: note = Description of Artificial Sequence: Synthetic coding sequence
  source 1..441: mol_type = other DNA
atggaaagtgatttctacctgcgctattatgtgggccacaaaggcaagtttgggcacgagttcctcgagttcgagtttagacctgacggtaaactcagatatgctaacaactccaactataagaatgacgtcatgatccgcaaagaagcatatgttcataaaagcgttatggaggagctgaaacggatcatcgacgattccgagatcacaaaagaagacgacgctctctggccacctccagatcgggttgggcgtcaggagttggagattgtgattggggatgagcacattagttttaccaccagtaagattggatctcttatagacgtcaaccagagtaaggaccccgagggcctacgagtgttttattaccttgtgcaagacttgaagtgtcttgtgttctctctgatcggcctgcactttaaaatcaaacctatctag

SEQ ID NO: 229226 - DNA, 1731 bp, synthetic construct
  misc_feature 1..1731: note = Description of Artificial Sequence: Synthetic coding sequence
  source 1..1731: mol_type = other DNA
atgggctcgatactgagtaggagaattgccggagttgaggacatcgacatccaggctaactccgcttaccgctatccccctaagagcggaaattattttgcatcacactttttcatgggaggtgagaaattcgacacgccccatccagagggttatctcttcggagagaacatggacctaaattttctcggatctcgacccgtccaattcccttatgtcacgcccgcaccacacgagcccgtcaagacccttcggtccctcgttaacataaggaaagactccctgcgactcgtacgctataaggatgatgccgattcacctacagaggatggggacaagccgagggttctgtattccctcgaatttaccttcgacgccgatgccagggtggccatcacgatttattgtcaggccagtgaagagttcttgaacggtagagcggtgtattcccctaagtcgccttccctacaatccgaaactgttcattacaaacgcggagtgtctcagcagtttagtctaccatccttcaagatcgacttttctgaatggaaggatgatgaactgaattttgatttggaccgcggtgtcttcccagtcgtgatccaagccgttgtagacgagggagacgtggtggaggtgactgggcacgcccatgtgctgttggccgctttcgagaagcacatggatggctctttctcggtcaagcccctgaaacagaaacagattgtggacagggtatcatacctcttacaggaaatatacggcatcgagaataaaaacaaccaagaaacaaagccatcggacgacgaaaattcagacaacagcaatgagtgtgtagtttgcttaagcgatttacgggataccttaatcctgccctgccggcatttatgcctctgtacatcctgtgcggatactctcaggtaccaggcaaataactgtccaatctgcagactgcccttccgggctctgctgcagattagagctgtgaggaagaagccgggtgccctttcaccggtctctttctctccggtactggcacagtcgctcgagcatgacgagcattcatgcccttttaagaaaagtaaaccgcaccccgcttccttagcatctaagaagcctaagcgcgagacaaatagcgatagtgtgcctcccggatacgagcctatttcattactggaggcactcaacggacttcgagcggtctcacctgcaattccctccgctccattatatgaggagattacctactctggaatctctgacggcctctcacaggcaagttgccccctggccgcaatcgatcatattttggattccagtcgtcaaaaaggcagacctcagtccaaagctcccgattctacactgagatccccatcaagcccaattcacgaggaagacgaggaaaagctgagcgaggacgtggacgcaccaccgcctctgggcggtgcggagcttgcacttcgagagagcagctcccctgagtccttcatcaccgaggaagtcgacgaatcatcgtcaccccagcagggaactcgggcagcatcaattgaaaacgtgttgcaagacagctcccctgaacactgtggcaggggcccaccggctgatatttacttgccgggtcggcctactagcatggagaccgctcacgggctagctacaactagtcccacttggcccccactgggcggacccagtccagatcctagcgccgctgagctaacacccctctag

SEQ ID NO: 229227 - DNA, 1659 bp, synthetic construct
  misc_feature 1..1659: note = Description of Artificial Sequence: Synthetic coding sequence
  source 1..1659: mol_type = other DNA
atgggatccatcttgagccgaagaatcgccggagtggaggacattgatatccaggcaaattccgcttaccgctaccctcccaaatccggcaactacttcgccagccacttctttatgggaggcgagaagtttgataccccacatccggaagggtacttgtttggcgagaatatggacctgaactttcttgggtcacggccagttcaattcccctacgttacaccggcaccccacgagcctgtgaagaccttaaggagccttgtcaacattcgaaaagactccctgcgcctggtgcggtataaggatgatgcggactccccaaccgaagacggagataagcctcgggtcctatactcattagagtttacttttgatgctgacgcgagggtcgcgatcacaatttattgccaggctagcgaggaatttcttaatggtcgggctgtctatagtcctaagagtcctagtctccagtctgagacagtgcactataagcggggtgtctcccagcagttttccctgccctcattcaaaatcgatttttctgagtggaaggatgatgagttaaatttcgatctggaccggggagtcttcccagtagttatccaggctgttgtcgatgagggagacgttgtggaagtcactggtcacgcccacgtcctacttgccgctttcgagaaacatatggacggcagcttttcagtcaagccattaaaacaaaagcagattgtggacagagtgtcatacttgctgcaggaaatttatgggatcgagaataaaaacaaccaggagacgaaaccttctgacgacgaaaattctgacaacagcaatgaatgtgtggtttgtctctcagacctgcgggacacactgatactgccatgtaggcatctttgtctgtgtacctcatgcgctgatactctgcgataccaagcaaataattgccccatctgccgactcccttttcgagctctgttacagattcgggctgtcaggaagaaacccggagcactctcccctgtctctttcagtcctgttcttgcgcagagtctggaacatgatgagcacagctgtccctttaagaagtccaaacctcaccccgctagcctggctagtaaaaaacctaagagagagacaaattcagattctgtgccccctggctacgagccaatcagtctgctggaggcattgaacggcctaagggccgtctccccagctataccttccgcaccactgtacgaggagattacctacagtggtattagtgacggcctctctcaggccagttgtccactcgctgcaatcgatcacatcctggacagttctagacagaagggtcgacctcaatccaaggcaccagattccaccctgcggtcaccaagcagtcccatccatgaagaggacgaggagaagctctccgaggacgtagacgccccaccccctctggggggtgcagagcttgctcttcgggaatcgtccagcccagagagctttatcactgaagaggtggatgaatcatcatccccccagcaaggtactagggcagctagtatcgagaacgtcctgcaggattcatctcctgagcactgtggaagggggcctcccgctgacatatatctgcccgctttaggcccagactcttgctctgtgggcattgatgaatag

SEQ ID NO: 229228 - DNA, 1596 bp, synthetic construct
  misc_feature 1..1596: note = Description of Artificial Sequence: Synthetic coding sequence
  source 1..1596: mol_type = other DNA
atgggatccattttgtccaggaggatcgcaggcgtcgaggacatagacatccaagccaacagcgcctaccggtacccacccaaaagcgggaactattttgccagtcacttcttcatggggggagaaaagtttgacactccccatcccgagggttacctgtttggagagaatatggatctcaatttcctcggatcccgcccagtgcagttcccatacgtgacgccagctccccacgaaccagtgaagacgcttaggagcctggtgaacatccgcaaggatagtttgcgcttagttcgctacaaggatgatgccgactcccctaccgaagacggcgacaagccacgggtactgtactccttagagtttacgtttgacgcagacgctcgggtggccattaccatctattgccaggcctccgaggagtttctgaacggccgtgccgtttatagccccaagtcccccagcttacagtccgagacagttcactacaaacgcggagtgtcccagcagttttcactgccttcattcaagatagactttagcgagtggaaggacgatgaactgaatttcgaccttgatagaggcgtcttcccagtggtcattcaggctgtcgtagatgaaggcgatgctgttgttgaggtgacgggccacgcccacgtcctgctcgccgctttcgaaaagcacatggatggctcattctccgttaagcctctgaagcagaagcagatcgtggatcgcgtatcttatcttctgcaagagatctatggtatcgagaacaaaaataaccaagagactaagccgtcagacgatgagaattctgataacagcaacgaatgtgtggtgtgcctgtctgatctgcgcgacactctcatcctgccctgtcgacatctgtgtttatgtacatcatgcgcggacacactcagataccaggctaacaattgccctatctgccggctccccttccgcgctctgttgcaaattcgggctgtccgcaagaaacctggcgctttaagccccgtaagcttctccccagtcctggcgcaatcacttgagcacgacgaacacagcaacagtgatagcgtcccgcctggttacgaaccaatttctctacttgaggcacttaatggccttagagcagtttcccccgcaatcccctcagcacccctctatgaagaaattacctactctgggataagcgacggcctgtctcaggccagttgccccctcgccgctattgaccacattctggatagctctcgccaaaagggcaggccccagtctaaggccccagactcaaccctaaggagtccttcctctccaatccatgaagaggacgaggaaaaactgagcgaagatgtcgacgcgcctccccctctaggtggagctgaactcgctctccgggaatcttcttcccccgaaagcttcattacagaagaggtggatgaatcctcaagcccccagcaaggaacccgagctgcctcgattgagaatgtgctgcaagattcctcccctgaacactgcggccgaggcccaccagccgatatctatttgccagcgctgggtcccgattcctgtagcgtcgggatagacgaatag

SEQ ID NO: 229229 - DNA, 963 bp, synthetic construct
  misc_feature 1..963: note = Description of Artificial Sequence: Synthetic coding sequence
  source 1..963: mol_type = other DNA
atgggctctatcctatcacgcagaatcgcaggcgtcgaggatattgatatccaagcaaacagtgcttacagatatcccccaaagtctgggaactattttgcctctcatttttttatggggggagaaaaattcgacacgccacatcccgagggctatctgtttggagagaatatggacctgaacttcttggggtcccgccctgtccagttcccctacgtaacacctgcccctcacgaacccgtgaagactcttaggtcactggtgaacatacgtaaggactctctccgcctcgtgcggtacaaggatgatgctgactccccaacagaagatggcgacaaaccccgagtgctgtactccctagagtttacattcgatgcggacgctagggtggccattaccatttactgccaggcctccgaagagttcctcaacggcagagcagtgtactcccccaagagtcccagtctccaaagcgagactgtgcactataaacgtggagtgagccagcagttttcactgccttcctttaaaatcgactttagcgagtggaaggacgacgaactgaattttgatctggatcggggagttttcccggtggtaatccaggctgtagtggacgagggtgatgtcgtggaagtgaccggccacgcgcacgtgctgttggcagccttcgaaaaacacatggatggaagcttttctgtgaagccccttaaacagaagcaaatcgtggatagagtgtcatacctgctgcaagaaatttacggcatcgagaacaagaataatcaggagactaagccttccgacgacgaaaattccgataacagtaatgagtgcgtggtctgcctctctgacctgcgcgacaccctgatccttccctgcagacatctgtgcttgtgcacgagttgcgcggacaccctcaggtatcaagccaataattgccccatctgtaggcttcagctctag

SEQ ID NO: 229230 - DNA, 1632 bp, synthetic construct
  misc_feature 1..1632: note = Description of Artificial Sequence: Synthetic coding sequence
  source 1..1632: mol_type = other DNA
atggcaaaaggagaaggggcagaatctggctcagccgcagggctgctgccgactagtattctgcagagtaccgagcgtcccgcacaggtcaagaaagagcctaagaagaaaaaacagcaactgtctgtctgcaacaaattatgctacgctctgggcggtgccccttaccaggtcaccggatgcgctttgggcttttttctccagatctatctgttggacgttgcccaaaaagatgaagaagtagtcttttgcttttcctcatttcaggtcggccctttctccgcgtccatcatccttttcgtgggtcgcgcatgggacgctatcaccgatccactggtggggctgtgtatcagcaaatccccttggacatgcctggggagactaatgccgtggattatatttagcactcccctggcagttatcgcatacttcctcatttggtttgttccagacttcccccacggacagacctactggtacctccttttttactgcttgttcgaaactatggttacctgcttccacgtaccctattccgccctgactatgtttataagcaccgagcagacggagcgtgattcagctactgcatacaggatgaccgtagaggtcttgggaaccgtgttgggcacggccatccagggccaaatcgttggccaggcagacacaccttgttttcaagacttgaacagctctaccgtagcaagccaaagcgccaaccacacccacggtaccacttctcatagggaaacacaaaaggcatacttgctcgccgctggtgtcatcgtatgtatctacattatctgtgccgtgatcctgattttaggcgtccgcgagcagcgagaaccctacgaggcccagcagtctgaacccatcgcttacttccgcggactgagactggtaatgtcacacggaccctatattaagctgatcacgggcttcctgtttaccagtctcgcctttatgctggtggagggcaacttcgtgctcttttgcacctacacactgggctttagaaacgaattccaaaatttattgctcgccatcatgctttcggccaccctgactatacctatttggcagtggtttcttacacggtttggcaagaaaaccgctgtatatgttggcatatcatctgccgttccctttctgattttggtggctctgatggagagcaatctgattatcacatatgccgttgctgtggctgccggaatctctgtggcggcagcttttctgttgccctggagtatgttacccgatgtcattgacgacttccatctgaagcaaccacatttccacggaacggagccaatattcttctctttctatgtgttcttcacaaaatttgcctctggagtttcactgggtatcagcacgctgtctctcgactttgccggataccagacacgagggtgttcccaacccgagagggttaagtttactctgaacatgctagtcaccatggcacctatcgttctgatcctcctcgggctgttattgttcaagatgtatccgatcgacgaggagagacggagacagaacaaaaaagcgttacaggccctccgggatgaagcgtcttcatccgggtgtagcgagacagacagtacagaacttgcctcgatcctgtag

SEQ ID NO: 229231 - DNA, 1593 bp, synthetic construct
  misc_feature 1..1593: note = Description of Artificial Sequence: Synthetic coding sequence
  source 1..1593: mol_type = other DNA
atggcgaaaggcgagggcgctgagagcgggtctgctgccggtctccttcccactagcatactgcagtccaccgaaaggccagcccaggttaagaaggagccaaaaaagaaaaaacaacaactgagtgtgtgtaataaactgtgttatgccctggggggtgcgccttaccaggtgacggggtgtgcgctgggtttttttctgcagatttatctgttagatgttgcgcaggtaggtccattttccgccagcataatactattcgtcgggagagcctgggacgcaatcacggaccctctcgttggtttgtgtatctcaaagagcccctggacatgcctcggccgtctgatgccatggatcatctttagcacaccactggcagtcattgcatactttctgatctggttcgtgccggatttcccacacggccaaacctactggtacctgctgttctattgtctttttgagaccatggtgacttgttttcatgtaccttacagcgctctgaccatgttcatttcaaccgaacagaccgagagggactctgctaccgcgtacaggatgaccgtcgaagtgcttggaaccgttttgggtactgcaatccagggccagatcgtcggtcaggctgacactccctgttttcaggatctcaatagtagcactgtggcttctcaatctgctaatcacactcatggaaccactagccatagggagacgcagaaggcctatttgctggccgcaggtgttatagtctgtatctacatcatctgtgccgtaatcttgattttaggagtgcgagagcagagagaaccatacgaggcacaacaaagcgaacccatcgcttacttcaggggcctccgactagtcatgtcccacggtccgtacatcaaactgatcactgggttcttatttacaagcttagccttcatgctggtagaggggaactttgtattgttctgtacttacacccttgggttcaggaacgagttccagaaccttttgcttgccatcatgctgtctgccacactgaccatccctatctggcagtggttccttacgcgcttcggtaagaaaaccgccgtgtatgtcggtatcagtagcgcagtaccgttcctgatcctggtcgctttaatggagagcaacctgattataacgtatgccgtggccgtggcagcaggcatctcagtggccgcagcattccttctgccttggtccatgctcccggatgtcatcgatgatttccatctaaagcagccgcacttccacggaactgaaccgatcttcttctccttttacgtcttcttcactaaattcgcttccggcgtgtctctgggaatttctactctgagtctcgatttcgccggttaccagactaggggctgctcccagccagaaagggtgaaattcacgcttaacatgctggttactatggcgcctattgtccttatccttttgggcctgctcctgttcaaaatgtatcctatagacgaagaaaggcggaggcagaacaaaaaggccctacaagctctgagggacgaagcctcctcctcaggctgctccgagaccgacagcaccgagcttgcgtcaatcctctag

SEQ ID NO: 229232 - DNA, 1125 bp, synthetic construct
  misc_feature 1..1125: note = Description of Artificial Sequence: Synthetic coding sequence
  source 1..1125: mol_type = other DNA
atggtgacatgcttccacgtgccttatagtgctctgacaatgttcatttccaccgagcagacagaacgggactctgctacggcctacagaatgacagtcgaggtactcggtaccgtgttagggacagcaattcagggacagatcgtcggtcaggcagataccccgtgcttccaggacctaaattccagcacagttgccagtcagagtgcaaaccatactcacggaacaactagccatagggagactcaaaaagcttatttattggcggcaggggtcatcgtctgtatctatataatttgcgccgttatcctgattctcggagtgagggaacagcgcgagccatacgaagcccagcagagcgagcccatcgcctatttccggggactgcggcttgtgatgagccatggcccatatatcaagttaatcactggtttcttattcacttcactggccttcatgctggtggaaggcaactttgtgctgttctgtacctacaccctcggttttaggaacgagtttcagaatttgctcttggccataatgctttcagcaaccctgaccatcccaatctggcagtggtttctgacacggtttgggaagaaaacagccgtttacgtagggatttcaagcgccgtccctttcctaatcctggtcgctctcatggaatctaacctgattattacctacgctgtcgctgtggcagccggtatttctgtagccgctgcatttctcttaccctggtctatgctgcctgacgtaattgacgattttcacctgaagcagccccactttcatggcactgagcccatattctttagtttctacgttttctttacaaagttcgcttccggagtgagccttggaatctccaccttgagcctcgattttgccggataccagactcgcggatgttcccagccagagcgagtgaaattcacactaaacatgctcgtgacaatggccccaattgttctgatcctattaggccttctgctgttcaaaatgtaccccattgacgaagagcgtcggagacagaacaagaaggctcttcaagctcttcgtgatgaagcaagttcctccggatgcagcgagacagactccaccgaactagccagcatcctgtag

SEQ ID NO: 229233 - DNA, 801 bp, synthetic construct
  misc_feature 1..801: note = Description of Artificial Sequence: Synthetic coding sequence
  source 1..801: mol_type = other DNA
atggcaaaaggcgagggcgcagagtctgggtctgctgcgggtctactgccaactagtatcctgcagtctaccgagcggcctgctcaaaaggaaccgaaaaagaaaaaacagcaactatcagtgtgcaacaaattatgctacgcactaggtggtgcaccataccaggtgacaggttgtgcccttggcttttttctgcagatctacctgctggatgttgcacaggtaggacctttctccgcctccattatcctttttgttggcagggcctgggacgccatcaccgatcctctggttggactgtgcatttccaaatccccctggacctgcctcggccgtctgatgccatggatcattttcagcactccactcgccgttattgcctattttctcatctggtttgttccggacttcccacacggccagacctactggtacctgctgttttattgcctttttgagacaatggtcacttgcttccacgtcccatatagtgcactgacaatgttcatctctacggagcagacagagcgggattccgccaccgcttatagaatgacagtggaagtgttgggcacagtgcttgggactgctatccaggggcagattgtagggcaagccgacactccctgttttcaggatttaaacagctccactgtggcgtcccagtccgcaaatcacacacatggaacaacctcccacagggaaacccagaaggcctacctgttggcagctggcgtgatcgtgtgtatctatattatttgcgctgttatcctgattttaggggtccgtgagcaacgctag

SEQ ID NO: 229234 - DNA, 2376 bp, synthetic construct
  misc_feature 1..2376: note = Description of Artificial Sequence: Synthetic coding sequence
  source 1..2376: mol_type = other DNA
atggccgatgataaggtcgccatccttactgacgacgaagaagaacagaaaagaaaatacgtgttagcagatccgtttaatggcattagcagggagcctgaacctcctagcaatgaaacgccaagttctaccgagacttccgccattcccgaggaagagatcgattggatcgaaaagcactgcgtcaagattaataacgatctgctcattagtaaggtcttttacttctttttttattccgcctacggatccctgtatccccttctcccagtatactataagcagctggggatgagcccttcacagtcgggtctcctcgtgggaatccgatatttcatagagttttgttctgcccctttctggggagtggttgctgatcgcttcaagaaagggaaaattgttcttcttttctctctcctgtgttgggtgctgtttaatttgggaatcggattcgtgaagcctgccacgctaaggtgtgtgcccaaaatcaggcccaccacccacccaactaatgcatcgcatcagctgaccattttacctacgaactcttcttttacttccttcctcacaatctcccctaagatgagagagaagagaaatctgctcgagacacggttaaacgtctcagatactgtaacactgccaaccgctccaaacatgaattccgaaccaacacttcaaccgcaaaccggcgaaataacaaacagaatgatggacttgacactgaatagctctaccgctactcccgtatccccaggatcagtcaccaaggaaacaacgacagtcatcgtcaccaccactaagtccctgccatcagaccaagtgatgctcgtatacgaccagcaggaggtggaggcgatcttcttagtaatcctcgtggttgttataattggagagttcttcagcgcaagtagcgttacaatcgtggataccgtgactctgcagtacctgggtaagcaccgtgataggtatggcctccagcgaatgtgggggtctctgggatgggggcttgccatgttgagcgtggggattgggattgactatacgcatattgaggttctcatcgatggtaaggggtgtaagccaccagaatatcggaattaccagatcgtcttcatcgtgttcggcgtgctaatgaccatggcgctgattgtcgctacccagtttcgtttcagatacaatcatttcaagaacgatgactcaaaaggcaaggaggtggagattccccaggttgagagaaataattcaacagagagcagtgaggagactcctaccactactagccatagtcaggcattcaacttctgggaccttatcaaactgctgtgctcagtgcaatatggctcagtgttgtttgtcgcgtggtttatgggctttgggtacgggttcgtcttcaccttcctatattggcaccttgaggatcttaacggaactactaccctgttcggcgtctgcagcgtgctgagccacgtgagtgaactcacagcatactttttcagccacaagctgatagaactaattggccatataagagtgttgtatatcggactggcctgtaataccgcacggtacatatacatttcatacctagagaacgcttggactgttttgcctatggaggtgctccagggcgtgacccacgcggctatttgggcagcttgtatatcctatttatctgctgctgtgccccctgagctgaggacctctgcccagggcatactgcagggtttacacctggggcttggccgagggtgcggcgcaatgatcggtggggtgctggtgaactactttggggctgcggcaaccttccgcggaattggaatggcttgtcttgtcatattgttgcttttcgctttgatccaatggctagccgtcccggacgaagaggaagacaagactatgcttgctgagcggatacctgtgccatctagcccagtgcctattgccaccatcgacctcgttcaacagcagactgaggatgtcatgcccaggatagaacctcgcttaccccctaagaagacaaaacatcaggaagagcaggaagacgtgaacaaacccgcttggggcgtttcaagtagtccttgggttacgttcgtatacgccctttatcaaattaaggagatgatgcagttaacccgcgataatcgggcatccgaaatacagcctcttcagggcacaaatgagaatcgcgagaattcccctgctggacgcgcacagccggtgccctgtgagacacactccgacccctcccgcaatcagccctctcctgacgcggcagctagccaaacacaaaccagtccggctcatcccagcgtggacccatgtaccgaggaatccgaagagcagcaggcacaactcgccgcaggaggacattag

SEQ ID NO: 229235 - DNA, 2376 bp, synthetic construct
  misc_feature 1..2376: note = Description of Artificial Sequence: Synthetic coding sequence
  source 1..2376: mol_type = other DNA
atggccgatgacaaggttgcaatactgactgacgacgaggaggagcagaaacgtaagtatgttctcgccgacccatttaacggcatttcccgcgaaccagagccaccgtctaacgaaacaccctcaagcaccgagacttctgcaatacccgaggaagaaattgactggattgaaaagcactgtgtgaaaatcaacaatgaccttctgatctccaaggtgttctatttttttttttatagtgcctatggatcgttgtatccactcctgcctgtctattacaaacagctggggatgtccccatcccagtctgggttgctggttggtataaggtactttatagagttctgctccgctccattttggggggtcgtggcagacagattcaagaagggcaaaattgttctgctattcagtttgctttgctgggttctattcaacctcggcattggctttgttaagcccgcaaccctcaggtgtgtgcctaagatacgccctaccacacacccgacaaacgcctcacaccagctcaccattcttcctacaaacagcagctttacctcgtttctaacaatatctcccaagatgcgagaaaaacgcaatcttttggagactcgcttgaacgtcagtgacaccgtgacactgccaacagccccaaatatgaatagcgaaccaactcttcagcctcagaccggggaaatcacaaaccggatgatggatttaaccctcaattcctcaacagccactcccgtaagcccgggttcagtcaccaaggagacaacgacagttatagtaactacaacgaagtcactgccaagcgaccaggtgatgcttgtctatgaccaacaagaggtggaagcaatctttctcgtgattctggtcgtggtgataattggcgagttcttttctgccagctcagtcacaattgttgacaccgtgacgctgcagtatctgggcaagcaccgggataggtacggccttcaacggatgtgggggagtctgggttgggggctcgcaatgttatctgtgggcataggcatagactatacacatatagaggtcctcattgatggcaaaggatgtaaacctcctgagtacagaaattatcaaatagttttcattgtgtttggggtgctcatgacgatggcactgattgtcgctactcagttcaggtttcgctacaatcattttaagaacgacgattcaaagggaaaagaagtggaaattccccaggtagagaggaacaactccacagaaagctcggaggagactccaactaccaccagccattcacaggcattcaatttttgggacctcatcaagctactctgctccgtccagtacggcagcgtgttgttcgttgcttggtttatggggtttggctatggattcgtctttacatttctgtattggcacttggaggacctgaacggaaccaccacactttttggcgtgtgctcagttctatcccacgtgtctgagctcacagcttactttttctctcataaactcattgagctgataggacacatccgcgtcctatatataggtctggcatgcaacaccgccagatacatctacatatcctatcttgagaatgcctggaccgtgctcccaatggaggtcctccagggcgtcactcacgcagccatctgggccgcatgtatcagctatctgtcagctgccgttccacctgaactgcgcacctccgctcagggtatacttcaaggactgcacctggggcttggacgaggatgtggtgcaatgatcggaggcgtgctggttaactactttggagccgcagcgacctttcggggaattgggatggcctgtctcgtgattctattgttgttcgcattgattcagtggctggcggtccctgacgaggaagaagataaaacgatgctggctgagcggatcccggtcccctcttcccccgtgccaatcgccacgatagatttggtccagcagcagacggaagacgtgatgcccagaattgagccgaggttgcccccaaaaaagactaagcatcaggaggaacaggaggacgtgaacaagcccgcatggggcgtgtcttccagcccttgggtgacctttgtttacgctctttatcagatcaaagagatgatgcagctgacacgagataaccgcgcatcagaaatccagccgcttcagggcaccaatgagaaccgggagaatagccccgctggaagagcgcaacctgtgccctgcgagacacactctgatcctagccgaaatcagcctagcccagacgcagctgcatcccagacgcagacctcacccgcacacccgagtgttgacccctgcaccgaggagtccgaagagcagcaggctcaattagcggcaggaggccattag

SEQ ID NO: 229236 - DNA, 129 bp, synthetic construct
  misc_feature 1..129: note = Description of Artificial Sequence: Synthetic coding sequence
  source 1..129: mol_type = other DNA
atggctgacgataaggtggccattctcacagacgatgaggaagagcagaaacggaagtacgtgctagcagacccttttaacggcatatcccgggagcccgaaccccctagcaatgaaaccccttcctag

SEQ ID NO: 229237 - DNA, 345 bp, synthetic construct
  misc_feature 1..345: note = Description of Artificial Sequence: Synthetic coding sequence
  source 1..345: mol_type = other DNA
atggcagatgataaagtagctatactcactgatgatgaagaggagcagaagagaaagtacgtcttagctgacccttttaacggcatttcaagggagcccgaaccccctagcaacgaaaccccctcgtccacagaaactagcgctattcccgaagaggagattgattggatcgagaaacactgtgtgaaaatcaacaacgatttactgattagtaaagtcttttatttttttttttacagcgcatacggctcactgtacccactattacccgtgtactataagcagctgggcatgagtccatcccagtctgggttgctggtgggcattcggtacttcatagagtag

SEQ ID NO: 229238 - DNA, 471 bp, synthetic construct
  misc_feature 1..471: note = Description of Artificial Sequence: Synthetic coding sequence
  source 1..471: mol_type = other DNA
atggctgacgataaagttgcgattctaacggatgacgaggaagaacagaaacgcaaatacgtgctggccgacccgttcaatggcatttcccgggagcctgaacctcccagtaacgagaccccaagctctactgagacatcagctatccccgaagaggaaatcgactggatcgagaagcattgtgtgaagattaacaatgacctgttgatctcaaaagtgttttatttctttttctattctgcgtatggaagtctgtatccgctgctgccagtatattacaaacagcttgggatgtccccaagtcagagcgggttgctggtgggtatccgatattttatagagttttgtagcgctccgttctggggtgttgtcgcagaccgattcaaaaaaggcaaaatcgttttactcttcagtctgctgtgttgggtgttattcaatctgggcattggtttcgtaaaacctgcaacttag

SEQ ID NO: 229239 - DNA, 762 bp, synthetic construct
  misc_feature 1..762: note = Description of Artificial Sequence: Synthetic coding sequence
  source 1..762: mol_type = other DNA
atggaggtgctgcaaggagtcacacatgcagcgatttgggcagcctgcatctcttacctgtccgcagccgtgccacccgagttaagaacgtcagcccagggcatcctgcagggtttgcatcttggcctgggtcgaggctgtggcgctatgatcggcggtgtcttggtgaactactttggagccgcagccaccttccgaggaatcggaatggcctgtttggttattctgcttttgttcgcccttattcagtggcttgctgtccccgacgaggaagaggataaaaccatgttggccgaaagaatccctgtgcccagcagcccagtccctatcgcaacaatcgacttagtccagcaacagaccgaagacgtgatgccaagaatcgagcccaggttgccccctaagaagaccaagcaccaggaagaacaagaagacgtgaataagcctgcctggggcgtgtcatctagcccttgggtgactttcgtctacgccctctatcagattaaagaaatgatgcagttgactcgggacaatagagcatcagagattcagcctctgcaggggaccaatgaaaaccgagaaaattcacccgcaggacgggctcagccagttccttgtgaaacacacagcgatcctagccgcaaccagcctagccccgacgcagccgctagccagacgcaaacgagtcctgcccatccttccgtggatccatgcaccgaggaatccgaggaacagcaggcgcagctagctgctggcggtcactag

SEQ ID NO: 229240 - DNA, 696 bp, synthetic construct
  misc_feature 1..696: note = Description of Artificial Sequence: Synthetic coding sequence
  source 1..696: mol_type = other DNA
atggaggtactccagggcgtgactcacgccgcaatttgggcagcctgtatttcctacctgagtgcagccgtgcctcctgagttacgaacttcagcccagggcatcttacagggcctccacctgggcctcggtcggggatgtggtgcaatgatcgggggagtcttggtaaattattttggtgccgctgctacctttagaggtattgggatggcctgtctggtaatcctgctgctctttgcacttatccagtggctggccgtccctgacgaagaggaggataaaacgatgctggcggaacgcatcccagtcccaagtagtcctgtgcccatcgctacaatcgacctcgtgcagcagcagactgaggatgtgaacaagccagcatggggtgtctccagcagcccctgggtgacattcgtctacgcactgtaccagattaaagaaatgatgcagttgacgcgtgataatcgagctagcgaaatacaacccctgcagggtactaacgagaaccgagaaaattctcctgctggaagggcacagccggtcccatgcgaaacccattctgatcccagcagaaaccagccttcccccgatgccgctgctagtcagacacagacatcaccagcgcacccctcagtagacccctgcacggaggagtctgaggaacagcaggcacagctggcagctgggggtcattag

SEQ ID NO: 229241 - DNA, 1557 bp, synthetic construct
  misc_feature 1..1557: note = Description of Artificial Sequence: Synthetic coding sequence
  source 1..1557: mol_type = other DNA
atggcaggtctgcggaacgagtcagagcaggagcctcttctcggcgatacacccggatctcgggaatgggacatattggagaccgaggagcattataagtcaagatggcgctcgattcggatcctttatcttaccatgtttctttcttccgtaggtttctctgtggttatgatgagcatctggccttacctacaaaagattgatccaaccgcagatactagtttcctgggttgggtgattgcctcgtattcactcggtcagatggtggccagcccaatttttggattgtggtcaaactatcgtcctaggaaagagcccctcatagtatctatccttatttccgttgctgctaactgtctgtatgcgtatctgcatatccctgcctcacataacaagtattatatgcttgtagcgagaggcttgctcggcatcggcgcaggaaatgtcgctgtagtgagaagctataccgctggcgcaacttcactgcaagaacgtactagttctatggccaacatcagtatgtgtcaggccctcggattcatcctcggacccgtgttccagacctgctttacgttcttgggcgagaagggagtcacatgggacgtgataaaactgcagataaatatgtataccacacccgtcctgttaagtgcattcttgggcattctcaacatcatcttgatcctggccattcttcgcgagcaccgagtagatgatagtgggcgtcaatgcaagagtatcaattttgaggaggcgagcacagacgaagcccaagtgccacagggaaatatcgatcaggtggctgtcgtggccatcaacgtcctgttctttgtcacactgttcatatttgcacttttcgaaaccattataactcccctgacaatggacatgtacgcatggacccaggagcaagcggtgctgtacaacggcatcatactggctgctctcggggtcgaggcagtggtgatttttctgggagttaaattactttccaagaaaatcggagagcgggcaatactgttgggaggcctgattgtcgtttgggttggattcttcattctcctgccctggggaaaccagttcccaaagatccaatgggaagacttgcacaataattctatccctaacactacattcggtgagatcatcatcggattgtggaaatccccaatggaggatgacaatgagcgacctacggggtgtagtattgagcaagcctggtgtctgtacactcccgtgatccacctagcacagtttctgacatctgctgttctgatcggactaggataccctgtctgcaacctaatgtcgtatactctttacagcaaaattctgggaccaaagccacagggggtgtacatggggtggctgacggcatccgggtctggtgctagaatcttgggccctatgtttatctcccaggtttacgctcactggggccctcgatgggccttctccctagtgtgtggaatcatcgttctcactatcactctccttggcgttgtgtacaaacgtctgattgcccttagcgtgcgttatggtcggatacaagagtag

SEQ ID NO: 229242 - DNA, 462 bp, synthetic construct
  misc_feature 1..462: note = Description of Artificial Sequence: Synthetic coding sequence
  source 1..462: mol_type = other DNA
atgttcctctcatctgtaggcttttccgtcgtcatgatgtcgatttggccctatttgcaaaagatcgatccaacggctgacaccagcttcctaggttgggtaatcgcttcctattcactggggcagatggtggcgagccctattttcggcttgtggtctaattaccgtccccgaaaggaacctctcattgtgagcatcctcatctccgtggctgccaattgtctctacgcttatctccatatccccgcaagccacaataaatactacatgctggtcgctcgtggactgctgggcattggtgcggtctttcagacatgcttcaccttcttgggcgaaaaaggcgttacttgggatgtgattaagctgcagatcaacatgtatactaccccggtcttgcttagcgctttcctcgggatccttaacatcatcttgatcttggctattctgagcaagtataggtag

SEQ ID NO: 229243 - DNA, 555 bp, synthetic construct
  misc_feature 1..555: note = Description of Artificial Sequence: Synthetic coding sequence
  source 1..555: mol_type = other DNA
atgttcctgtcctccgttgggtttagtgtcgtgatgatgtccatttggccctatttgcaaaagatcgaccccacagctgacacctcattcctgggctgggtcatcgcatcctatagcttggggcagatggtggcttctcccatcttcggcctgtggagcaactaccgcccacgaaaggaacccctgattgtgagcatcctgatctctgtggctgccaattgtctttacgcctacttgcatatccccgcttctcataacaagtactacatgctggtggctcgcggtctgctcgggatcggcgctgggaacgtggcggtggtccggtcctacaccgcgggagcaactagcctccaagaacggacatcttccatggccaatattagcatgtgccaggccctcggcttcatcctggggcctgagaacatagtttggatgacccaggaggactcggttaaagtgcttatattgaaaaagcaggtgcagatgaagctgcgcttcccgaaggagatactgacgcgtctcctcctgtggccaagcatgttttgtttcctctag

SEQ ID NO: 229244 - DNA, 750 bp, synthetic construct
  misc_feature 1..750: note = Description of Artificial Sequence: Synthetic coding sequence
  source 1..750: mol_type = other DNA
atgggggaactgatggctttccttcttccacttatcatcgtccttatggtcaagcatagcgactcccgcactcacagtctccgatacttccgcctgggtgtgagcgatccgatccatggcgtgcccgaattcatcagcgtagggtacgtggactcccatccaatcaccacgtacgacagcgtgacccgacagaaggaacctagggccccttggatggcggaaaatctcgctccggatcactgggagaggtacactcagcttctgcgaggctggcaacaaatgttcaaggttgagctcaaacggctgcaaaggcattataatcacagcggctcacacacctatcagcgtatgataggctgcgaactgcttgaagacggctccaccactgggttcctacagtatgcctacgatggacaggacttccttatcttcaacaaagacacactgtcgtggctcgccgttgacaatgttgctcatacaataaagcaggcatgggaggctaaccagcatgaattgctttatcagaaaaattggctggaggaagaatgcatcgcctggttgaaacggttcctggaatacggcaaggacacactacagcggacggaatccgaaacaatcccactggttatgaaagccgtatcgggtagcatcgtgctcgttatcgtgctagccggagtgggagtgctggtgtggagacgaaggcccagggagcagaacggcgcaatctacctgccgaccccagatcgctag

SEQ ID NO: 229245 - DNA, 783 bp, synthetic construct
  misc_feature 1..783: note = Description of Artificial Sequence: Synthetic coding sequence
  source 1..783: mol_type = other DNA
atgaggcctgaagaccgaatgttccacatcagagctgtaattcttcgcgcattatcacttgccttcctccttagcctcaggggtgccggagccataaaagctgatcacgtgtccacctacgctgcattcgtccagacccacaggccaaccggagagttcatgttcgagttcgacgaggacgagatgttttacgtcgacttggataaaaaagaaacagtctggcacctagaagagttcggtcaggctttcagcttcgaggcccaaggtgggttggccaacattgccattcttaataataacctaaataccctaattcaaagatctaatcatacccaggctacgaatgatcctccagaggtgaccgtttttcccaaggaacctgtggagttaggacaacccaataccctgatctgtcatattgataagttctttccccctgtactgaatgtcacttggctgtgtaacggggaactggttaccgagggagtagctgaaagcctgttccttcctcgaacagactacagttttcacaaattccactacctcacattcgttccctctgccgaggatttttacgattgccgagtggagcattggggactcgaccagcctctgcttaaacattgggaggcacaggagcctattcagatgccagaaaccacggagactgtcctatgtgcgctgggactagtgttgggcctggtgggtattatagtaggcaccgttctcataattaaaagtcttaggtccggacacgatccccgtgcccaaggcacactttag

SEQ ID NO: 229246 - DNA, 783 bp, synthetic construct
  misc_feature 1..783: note = Description of Artificial Sequence: Synthetic coding sequence
  source 1..783: mol_type = other DNA
atgcggcctgaagacaggatgttccatatcagagcagttatccttagagctcttagcctggcgtttctactgagcttgagaggtgctggagccattaaagctgatcatgtgagcacatacgctgccttcgttcagactcacagacctacgggcgaattcatgttcgaattcgatgaggacgaaatgttttacgtggatctggacaaaaaggaaactgtttggcacctggaggaatttggacaagccttcagttttgaagcacagggaggactggccaacatcgcaatcttgaacaacaacctgaataccctgatccagcgctccaaccatactcaagctactaatgacccacctgaggttacggtctttccgaaggagccagtggagcttggacaaccaaacactttgatttgccatattgataaatttttcccccctgtgctcaacgttacctggctgtgcaatggtgagctggtgacagaaggagttgctgaatccctatttctgccaagaactgattattcctttcacaagtttcactatctgaccttcgtgcccagcgccgaagacttttatgactgtagagtggagcactggggcctcgaccaaccactcctgaagcactgggaagcacaagagcccattcaaatgcccgagacaaccgagactgtcttatgcgcactcggtttagtgctcggcctcgtcggtattattgtagggacagtcctcattattaagtcactgcgcagtgggcacgatccaagggcacagggtacactttag

SEQ ID NO: 229247 - DNA, 72 bp, synthetic construct
  misc_feature 1..72: note = Description of Artificial Sequence: Synthetic coding sequence
  source 1..72: mol_type = other DNA
atgcgaccggaagacaggatgttccacatcagagctgtaatattacgggcattatcgctggctttcctgtag

SEQ ID NO: 229248 - DNA, 387 bp, synthetic construct
  misc_feature 1..387: note = Description of Artificial Sequence: Synthetic coding sequence
  source 1..387: mol_type = other DNA
tgaaataccttaatttgtcacattgataaatttttcccgcctgtgctcaacgtaacgtggctctgcaacggtgagctggtaaccgagggcgtagcagaaagcctgttcttaccaaggaccgactatagctttcacaaatttcattacctcacctttgtgccatctgccgaggacttctatgactgccgcgtagagcactggggactcgatcaacccctgctcaagcactgggaagcccaagagcccatacagatgcctgagacgaccgagaccgtgctgtgtgcccttggactggttctaggcctggtcggaatcatcgtcggaactgtgttaataattaagtcgctgagaagcggccacgacccgagggcacagggaacgctctag

SEQ ID NO: 229249 - DNA, 630 bp, synthetic construct
  misc_feature 1..630: note = Description of Artificial Sequence: Synthetic coding sequence
  source 1..630: mol_type = other DNA
atgagaccagaggatcgaatgttccacatcagggcagtgatcctgagggctttatctctggccttccttctgtctttgaggggtgccggagccataaaggcagaccatgtgagcacctacgctgcatttgtgcagacccatcggcctactggagaattcatgtttgagtttgatgaggatgagatgttctatgttgatttagataaaaaggagaccgtttggcacttagaagaattcggacaggccttttcttttgaggcacaggggggattagccaacatcgccatcctcaacaataacctgaatacactcatacagagatccaaccatacccaggctaccaatgatccacccgaagtgacagtcttccctaaagaaccagtggagctgggacagcctaataccttgatctgccacatcgacaagttcttcccccctgttctcaacgtgacctggctgtgtaacggcgagttagtaactgaaggtgtggcagaaagcttgtttttgcccagaacagattacagcttccacaaattccattaccttacgtttgtcccctccgccgaggatttctacgattgtcgagtggagcactgggggcttgatcagccactgctcaaacactggtag

SEQ ID NO: 229250 - DNA, 783 bp, synthetic construct
  misc_feature 1..783: note = Description of Artificial Sequence: Synthetic coding sequence
  source 1..783: mol_type = other DNA
atgagacccgaagaccggatgtttcacattagagcagtcatcctcagggctctcagtctggccttcctgctgtccctaaggggggctggcgctattaaagccgatcatgtttctacgtacgcagcctttgtacaaactcaccgcccaacaggcgaatttatgttcgagtttgatgaggatgaaatgttttacgttgacctcgataagaaagagactgtgtggcacttggaggagtttggacaagccttcagtttcgaggcacagggcggactagcaaatattgctatcttaaacaataatttgaacaccttaatacagcgtagtaatcacactcaggccacaaacgaccctccggaggtgaccgtctttccaaaagagcctgtggagcttggccagcccaatactttaatatgtcacatcgacaagttctttccgcctgtgcttaacgtgacctggctgtgtaacggcgagctcgtcactgagggagttgcagaaagtctctttttaccgagaactgactatagcttccacaaatttcattatcttacattcgttccatccgctgaggatttttatgactgcagggttgaacattggggacttgatcagccacttctgaaacactgggaggctcaggaacctattcaaatgccagagaccacggaaactgttctgtgcgcactgggtctggtgctgggcttggtaggcatcatcgtcggtactgtgttgataataaaaagtctaaggtcaggacatgatccacgggcacagggtacattatag

SEQ ID NO: 229251 - DNA, 72 bp, synthetic construct
  misc_feature 1..72: note = Description of Artificial Sequence: Synthetic coding sequence
  source 1..72: mol_type = other DNA
atgcggccagaggatcgcatgtttcatatcagggcggtgatcctgcgcgctcttagcctggcttttctatag

SEQ ID NO: 229252 - DNA, 783 bp, synthetic construct
  misc_feature 1..783: note = Description of Artificial Sequence: Synthetic coding sequence
  source 1..783: mol_type = other DNA
atgaggccagaagacaggatgttccacatcagggccgtgatcctgcgcgcactgtctctggcttttctgcttagcctgcgtggcgcaggcgcaatcaaggcggatcacgtgagcacctacgcagcctttgttcagacgcaccgtccaactggggagttcatgttcgagttcgacgaggatgaaatgttctatgtagacctcgacaagaaggagaccgtgtggcacctggaggagttcgggcaggctttcagttttgaagcacagggtggactggcaaacatcgctattttaaacaacaacctgaacaccctgatccaacggagcaatcacacccaggctacaaatgaccctcctgaggtgacagtcttccccaaagagccagtcgaactgggacagccaaacacattaatttgccacatcgacaagttcttccctccagttctgaatgtgacctggctgtgcaacggcgagttggtgaccgaaggtgttgcagagagtctgtttctccctaggaccgactattcatttcacaagtttcattacctgaccttcgtgcctagcgccgaggatttctatgactgtagggtggaacattggggcttagatcaaccacttctaaagcattgggaggcccaggagcccatacagatgcccgagactacggaaaccgtgctgtgcgcgctggggctcgttctcggcctggtcgggatcatcgtgggcacagtgcttatcattaaatctctgaggtccggccacgaccccagggcacagggcaccctgtag

SEQ ID NO: 229253 - DNA, 387 bp, synthetic construct
  misc_feature 1..387: note = Description of Artificial Sequence: Synthetic coding sequence
  source 1..387: mol_type = other DNA
tgaaacaccctgatttgccatattgataaatttttccccccagtgcttaatgtgacgtggctctgcaatggtgaacttgtgactgagggtgtggccgaatctttgttcctccctaggactgattacagttttcacaaatttcattaccttacgttcgtgccctctgcggaagacttttatgactgtcgcgtggagcattggggacttgatcaacccttgctgaagcactgggaggcccaggagcccattcagatgcctgagactactgagactgtcctatgcgccctgggccttgtgcttggcttagttggcataatcgtgggaacggttcttatcataaagtccctcaggtcgggacacgacccccgagcccagggcaccctgtag

SEQ ID NO: 229254 - DNA, 783 bp, synthetic construct
  misc_feature 1..783: note = Description of Artificial Sequence: Synthetic coding sequence
  source 1..783: mol_type = other DNA
atgcggccagaagatcgcatgttccatatcagggcagtcatcctccgagccttgtcattggccttccttctgtcattacgtggggctggggctatcaaggcagaccacgtgtcaacgtacgcagctttcgtgcagactcataggcctaccggtgagttcatgttcgaattcgacgaggatgagatgttttatgtcgatttggacaaaaaggagacagtgtggcatttagaagaattcggtcaggcttttagctttgaggcccagggcggactcgcgaacatcgcgattctaaataacaacctgaacacactgatccagcggagtaatcatacccaagcgactaatgatcctccagaggtcacagtgttcccaaaggagcctgtggaacttgggcagcctaacactctaatctgtcatatcgataaatttttcccacccgtgttgaacgtcacttggctttgtaacggcgagctcgtgactgaaggcgtggccgagagcctgtttttgcctaggaccgattattccttccataaattccactatctaacatttgtaccctccgccgaagatttttacgattgtagggttgagcactggggcctggaccagcccctcctgaaacattgggaggcacaagaaccaatccagatgcctgagaccaccgagacggtcctctgtgccttaggactggtgctggggctggttgggattatcgtgggaactgtgctaattatcaaatctctccgcagcggacacgatccaagggcccagggcacactgtag

SEQ ID NO: 229255 - DNA, 72 bp, synthetic construct
  misc_feature 1..72: note = Description of Artificial Sequence: Synthetic coding sequence
  source 1..72: mol_type = other DNA
atgcgcccagaagatcgaatgttccatattagagccgttattctgagagccctttcactcgccttcttgtag

SEQ ID NO: 229256 - DNA, 630 bp, synthetic construct
  misc_feature 1..630: note = Description of Artificial Sequence: Synthetic coding sequence
  source 1..630: mol_type = other DNA
atgcgcccagaagaccgaatgttccatattcgagccgttatcttaagagccctatcgctggctttcctactttccctgcggggtgcaggagctatcaaagcagaccacgtgtccacatatgcagctttcgtgcagacccataggccaaccggggaattcatgttcgaattcgatgaggacgagatgttctacgtcgacctggacaagaaggaaacagtgtggcacttagaggaatttggccaggccttctccttcgaagcgcagggaggattggcgaacatcgcaatacttaataacaatttaaatacgctcatccagcggagcaaccacacccaggcaactaatgatcctccagaggtcaccgtcttccccaaggagcccgtggagttgggccagcccaacacactcatctgccatatagacaagttctttccccctgtcctcaacgtgacgtggttatgtaatggcgaactcgtgacagagggcgtggccgagtctttgtttctgccaaggacagactatagttttcataagttccattaccttaccttcgtcccttctgcagaagatttctacgattgccgggtggagcattggggcctcgaccagccgttgctgaagcattggtag

SEQ ID NO: 229257 - DNA, 72 bp, synthetic construct
  misc_feature 1..72: note = Description of Artificial Sequence: Synthetic coding sequence
  source 1..72: mol_type = other DNA
atgagacctgaagatagaatgttccatatcagagctgttatcctgcgggcactgtcattggccttcctatag

SEQ ID NO: 229258 - DNA, 387 bp, synthetic construct
  misc_feature 1..387: note = Description of Artificial Sequence: Synthetic coding sequence
  source 1..387: mol_type = other DNA
tagaatacgctaatttgccatattgataaatttttccctccagtgctgaacgttacctggctatgtaacggtgagctggttaccgaaggcgtcgccgaatccttattcctgccaaggacagattacagctttcacaagttccattatttgacatttgtcccatcagctgaggacttttatgactgcagagtcgagcattggggcctagatcagccattacttaagcactgggaagcccaggagccaatacagatgcctgaaacaactgagaccgtgctatgcgctcttggattagttttgggattggtcggaatcatagtgggcacggtgcttattattaaaagtctgcgtagcggccacgacccaagagcccagggtaccttgtag

SEQ ID NO: 229259 - DNA, 783 bp, synthetic construct
  misc_feature 1..783: note = Description of Artificial Sequence: Synthetic coding sequence
  source 1..783: mol_type = other DNA
atgcgacccgaggatcgcatgttccacatccgcgcagtcatcttgagagccctttctctggcattcctgctgagcttgagaggagccggagcaattaaggccgaccatgtcagcacatacgccgctttcgtccagactcacagacctacgggggaatttatgttcgaatttgatgaggatgagatgttctatgtggacctggacaagaaagagacagtgtggcatctggaagagtttggacaggcatttagcttcgaagcccaaggtggactagccaacatcgccattctcaataataatctgaatactctgatccagcgttctaaccatacgcaggccactaatgaccctccagaggtgactgtttttccaaaagaaccggttgagctgggacagcccaatactttaatctgtcatattgacaaatttttccctccagtgctaaatgtgacctggctgtgcaatggtgagctcgttacagaaggcgtggcagaatccctttttttaccacgaactgactactcatttcacaagttccattacttaactttcgtcccttcagcggaagatttttacgactgccgagttgaacactggggactggaccagcctttgcttaagcactgggaagctcaagagccaatccagatgccagagactacagagaccgtgttatgcgcactcggactggtgttaggccttgtgggaatcatagtggggaccgtactgatcataaaatcccttcgctcagggcacgatcccagggcccaggggaccctctag

SEQ ID NO: 229260 - DNA, 387 bp, synthetic construct
  misc_feature 1..387: note = Description of Artificial Sequence: Synthetic coding sequence
  source 1..387: mol_type = other DNA
tgaaatactctgatctgtcacatcgacaagttcttccctccagtcttaaacgtgacttggctttgcaacggcgaattggtgaccgaaggtgttgcggagtccctgttcttgcctcgcacggactacagctttcacaaatttcactacctgacatttgtaccctctgccgaggacttttacgactgtcgggtagagcactggggtcttgatcagccgctcttgaaacactgggaggcacaggaaccaattcagatgcctgagacaaccgagaccgtcctgtgtgccttagggctcgtgctgggactggtgggcataatcgtggggactgtgttaatcattaagagtctgaggagcggacacgatcctcgcgctcagggcactctgtag

SEQ ID NO: 229261 - DNA, 72 bp, synthetic construct
  misc_feature 1..72: note = Description of Artificial Sequence: Synthetic coding sequence
  source 1..72: mol_type = other DNA
atgcgccctgaggatagaatgtttcacattcgcgcagtcatcttgcgggctctatctctcgcctttttgtag

SEQ ID NO: 229262 - DNA, 630 bp, synthetic construct
  misc_feature 1..630: note = Description of Artificial Sequence: Synthetic coding sequence
  source 1..630: mol_type = other DNA
atgcgccctgaagatcgcatgtttcatattcgcgctgtcattttgagagcccttagcctggctttcctacttagccttagaggcgctggagctatcaaggctgaccacgtgagtacatacgcagccttcgtccaaacccatagacccactggagagttcatgttcgagtttgacgaggatgaaatgttctatgtggatctggacaagaaagagacagtgtggcacctcgaagaattcggccaagccttctcttttgaggcgcaaggcggactggctaacattgcaatactcaacaataatctaaacacactcatccagagaagcaatcatacccaagctacaaacgaccccccagaggtgacagtttttcctaaagagcccgtagagctggggcagcctaacaccctcatatgtcatattgataagttcttcccacctgtcctgaacgtaacctggctttgcaatggagagcttgtgacagaaggggttgcggagtccctcttcctcccacggacagactattccttccacaagtttcattatctaacgtttgtcccatctgcagaagatttttatgactgcagggtggaacattggggcctggaccagccactcttgaaacactggtag

SEQ ID NO: 229263 - DNA, 639 bp, synthetic construct
  misc_feature 1..639: note = Description of Artificial Sequence: Synthetic coding sequence
  source 1..639: mol_type = other DNA
atgaggcccgaggacaggatgttccatattcgagcggtgatccttagagcgctcagtctggcctttcttctgagtctacgaggagctggcgcaatcaaagccgaccacgtgtcaacctatgccgcttttgtgcagacccacagacctacaggagagttcatgttcgagtttgacgaggatgagatgttttacgtcgatttagacaagaaagagaccgtgtggcacctggaggaattcgggcaggcatttagcttcgaagttaccgtgtttcctaaggaaccagttgagctggggcagcctaacacgctgatctgtcatatagacaaattcttcccaccagtgttaaacgtgacatggctctgtaacggtgaactggttactgaaggcgttgctgagagcttatttcttcctcgcacagactattccttccataaatttcattacctcaccttcgtgccaagtgccgaggatttttatgattgccgggtagagcattggggccttgaccagcctctcctaaaacattgggaggcccaggagcctatacagatgcctgagaccacggagaccgtcctctgcgccctgggcttagtgctgggtttggttgggatcatcgtgggaacggtgctcattatctag

SEQ ID NO: 229264 - DNA, 639 bp, synthetic construct
  misc_feature 1..639: note = Description of Artificial Sequence: Synthetic coding sequence
  source 1..639: mol_type = other DNA
atgcgccctgaggaccggatgtttcacattcgcgctgtcatactcagggctctgagtctcgccttcctattgtccctgagaggagcgggtgcgatcaaagcggatcacgtgtcaacttatgctgccttcgtacagacacacagacctaccggtgagttcatgttcgagttcgacgaggacgagatgttttacgtcgatctggataaaaaagaaactgtgtggcacctggaagaatttgggcaggcatttagcttcgaggtaacggtgttcccgaaggagcctgttgaactgggacaaccaaacaccctgatctgccatatcgataagttctttcccccagtgctaaacgtaacctggctctgtaatggagagctcgttaccgagggggttgccgagagtctgttcttgcctcggaccgattacagttttcacaaattccattatctgacgtttgtgccaagtgccgaggacttctatgactgtcgagttgagcattggggcttggaccagcctcttctcaagcattgggaggcccaggaaccaatccagatgccggagacaacggaaactgtgctatgcgccctcggattagtgttgggcctcgtcggcattatcgtcggtacggtcctaataatttag

SEQ ID NO: 229265 - DNA, 387 bp, synthetic construct
  misc_feature 1..387: note = Description of Artificial Sequence: Synthetic coding sequence
  source 1..387: mol_type = other DNA
tagaatactttgatatgtcatatagataagttctttcctccagtgctgaacgtaacttggctgtgtaatggtgagctggttaccgagggggttgctgaatccttgttccttccccgtaccgactactcctttcataaattccactatctgactttcgtcccctccgctgaagatttctatgactgtcgcgtcgaacattgggggctggaccagccattactgaaacactgggaagcccaagagcctattcaaatgcccgagacaacggaaaccgtgctctgcgcattgggcctggtcctgggtctggtggggattatcgtcggtaccgtcttgatcatcaaatcgctccgttctggtcacgatcctcgggctcagggcactttgtag

SEQ ID NO: 229266 - DNA, 639 bp, synthetic construct
  misc_feature 1..639: note = Description of Artificial Sequence: Synthetic coding sequence
  source 1..639: mol_type = other DNA
atgcggccagaggatcgcatgtttcatataagggccgtgattctccgcgctctttcacttgcattcttactgtcactccggggtgccggagctatcaaggcggaccacgtgtcaacgtatgctgcatttgttcagacccatcggccaacaggagagttcatgttcgagtttgacgaggacgagatgttttacgttgaccttgacaagaaggagactgtgtggcatctggaagaattcgggcaagcattcagttttgaagtcacggtcttccctaaggagcccgtcgagctgggccagccgaacacgctcatttgtcacatagacaagtttttcccgccagtgctcaacgtaacttggctctgtaacggtgagctagtgacggagggcgtagcagagagcctcttcttgccaagaacagactacagcttccacaagtttcattaccttaccttcgtgccaagtgcagaggacttttatgattgtcgtgtcgagcattggggactcgaccagccattgcttaaacactgggaggcacaggagcctatacagatgcctgaaactaccgaaacagtgttatgcgctctagggctggttctcggactggttggcattatcgtgggtactgtgcttataatttag

SEQ ID NO: 229267 - DNA, 630 bp, synthetic construct
  misc_feature 1..630: note = Description of Artificial Sequence: Synthetic coding sequence
  source 1..630: mol_type = other DNA
atgagacctgaggatcgtatgtttcacatccgtgccgtgattctccgcgcattgtctttggcattcttgctcagcttgaggggagctggtgccataaaggcagaccacgtgtccacctacgctgcctttgtccagactcaccgccctactggggagtttatgtttgaattcgacgaggacgaaatgttttatgtcgatctggataagaaggagaccgtctggcacctggaggagtttgggcaggctttctctttcgaggctcagggcggattggctaatattgccatcctaaacaataacctgaatacactcatccaaagaagcaatcacacgcaagctacaaacgatcctcccgaggtgaccgtcttccccaaagaaccggtggagctgggccagcctaacacccttatttgccatattgacaagttctttccacctgtcttgaacgtaacatggttatgtaatggggaactcgttacagaaggagtggccgagagccttttcttgcctcggaccgattatagtttccacaagttccactacctgacctttgtccccagtgctgaagacttctacgattgccgcgtcgagcactgggggctggaccagccgctgcttaaacactggtag

SEQ ID NO: 229268 - DNA, 72 bp, synthetic construct
  misc_feature 1..72: note = Description of Artificial Sequence: Synthetic coding sequence
  source 1..72: mol_type = other DNA
atgcgtcccgaagatagaatgttccacattcgagccgtgattctgcgggctctgagcctggcttttctgtag

SEQ ID NO: 229269 - DNA, 639 bp, synthetic construct
  misc_feature 1..639: note = Description of Artificial Sequence: Synthetic coding sequence
  source 1..639: mol_type = other DNA
atgcgtcctgaagacaggatgttccatatccgcgcagtgatcttacgtgcactgagcttggcattcctgctctccctgaggggagccggtgccattaaggctgaccacgtgagcacatacgctgcatttgtgcagacgcacaggccaaccggagagttcatgttcgaattcgacgaggatgagatgttctatgtcgatctggacaaaaaggaaacggtgtggcatctcgaggagtttggacaggccttctcttttgaggtgacagtttttccgaaagaacccgtggagctcggccagcctaatactctgatctgccatatagacaagttctttcctccagtgctcaacgtcacgtggctttgcaacggtgagcttgtaaccgagggagtggcggaatctctgttccttccccgaaccgattactcatttcataaatttcactatctcaccttcgttccgtccgcagaagacttctatgactgccgcgtagagcactgggggctcgaccagcccctgctgaagcattgggaagcacaagaacccatccagatgcccgagactacggagacggtcttatgtgctctcggcttagtgctgggtttagtgggaatcatcgtaggaacagttcttataatttag

SEQ ID NO: 229270 - DNA, 630 bp, synthetic construct
  misc_feature 1..630: note = Description of Artificial Sequence: Synthetic coding sequence
  source 1..630: mol_type = other DNA
atgcgccctgaggacaggatgtttcatatcagagccgtaattctccgagctttgagcctagcctttcttctatcacttcggggagccggtgcaatcaaagccgaccatgtgagcacttatgccgctttcgtgcagactcataggccaacaggcgagtttatgttcgaatttgatgaggacgagatgttttatgtggacctcgacaagaaggaaacagtctggcatttggaggaattcgggcaggctttctcatttgaggcgcagggaggccttgccaacatcgccattctcaataacaacctgaacacacttatccagaggtccaaccatacgcaggccacaaacgacccacctgaagtaacggtctttccaaaggagcccgtagagctggggcagccaaataccctgatatgccacatagacaagttctttccccctgtattgaatgtgacatggttgtgcaacggagagttggtcactgaaggagtagcggagagcctgttcctgccgagaactgactactcttttcacaagttccactacctgacatttgttcctagcgccgaggatttctatgactgccgtgtcgaacattggggtttggatcagccgttgcttaaacactggtag

SEQ ID NO: 229271 - DNA, 387 bp, synthetic construct
  misc_feature 1..387: note = Description of Artificial Sequence: Synthetic coding sequence
  source 1..387: mol_type = other DNA
tgaaatacattaatttgccacattgataagtttttccctcccgtactgaacgttacgtggctgtgcaatggtgagctggtaactgagggggtggcagagtctctgtttcttcccagaacagattattcatttcataagtttcattatcttaccttcgttccaagcgccgaagacttctatgattgccgcgtggagcactggggccttgatcagcccctactgaagcattgggaggcccaggaaccaatccaaatgccagagacgactgagaccgttctgtgcgcccttggactggtgctaggtctggtgggtatcatcgtaggcaccgtcctgatcataaaatctctgcggtcagggcacgatccgagggctcagggaaccctgtag

SEQ ID NO: 229272 - DNA, 783 bp, synthetic construct
  misc_feature 1..783: note = Description of Artificial Sequence: Synthetic coding sequence
  source 1..783: mol_type = other DNA
atgcgcccagaggacaggatgtttcacatcagagctgttatactccgggcactgtctctcgcttttttactatcattgcggggagccggagccatcaaggccgaccacgtatctacctacgccgctttcgtccagactcatcgccctacaggcgaattcatgttcgagttcgacgaggacgagatgttttacgtcgacctagacaagaaggaaacagtgtggcacttggaggagtttgggcaagcgttcagtttcgaagcccaggggggactggcgaatattgccatcctgaataataatctcaacacactgatacaacggagtaatcatacacaggctactaatgatccacctgaggtgaccgtcttccctaaggaaccagtggaacttggacagccgaacactttaatctgtcacatcgacaagttttttccaccggtgctcaatgtgacctggctgtgcaatggggagttggtgaccgagggcgtagcagaaagcctcttccttcctaggaccgattactctttccacaaattccattaccttacatttgtaccatccgccgaggatttttatgactgtagggtggaacactggggcctggatcaacctctgctgaaacattgggaagctcaggagccaatccaaatgccagagacaaccgagactgtcctgtgcgccctggggctggttctcgggcttgtcggtataatcgtgggcacagtgctgattattaagtcccttagatccgggcacgatccacgggcacaaggaactctctag

SEQ ID NO: 229273 - DNA, 639 bp, synthetic construct
  misc_feature 1..639: note = Description of Artificial Sequence: Synthetic coding sequence
  source 1..639: mol_type = other DNA
atgcgaccggaagaccgcatgttccacataagggcggtgattttgcgtgcactgagcctcgcctttttgctgtccctgaggggagcaggagccatcaaggctgaccacgtctctacatacgccgcattcgtccagactcatcggccaacaggcgagttcatgtttgaatttgacgaagatgagatgttctacgtcgaccttgacaaaaaagaaacggtctggcatcttgaagagtttggccaggcatttagctttgaggtcacagtgttccctaaggaacccgtggaactgggccagccaaacacactgatctgtcatattgacaaattttttccccctgtgctcaatgtgacctggctgtgcaatggcgaacttgtcaccgagggagtggctgagagcctgtttctgccaaggaccgactacagtttccataagttccattatctgaccttcgttccaagtgcagaggatttctatgattgccgcgtcgagcactgggggctggatcagccgttactgaagcattgggaggcacaggagccgatacagatgcctgaaactaccgagaccgttctttgtgccttggggctcgttttgggactggtggggatcatagttgggacagtccttatcatctag

SEQ ID NO: 229274 - DNA, 72 bp, synthetic construct
  misc_feature 1..72: note = Description of Artificial Sequence: Synthetic coding sequence
  source 1..72: mol_type = other DNA
atgcgaccagaagacaggatgttccacattagggccgtaatcctgcgggctctatctctggctttcttgtag

SEQ ID NO: 229275 - DNA, 639 bp, synthetic construct
  misc_feature 1..639: note = Description of Artificial Sequence: Synthetic coding sequence
  source 1..639: mol_type = other DNA
atgcgacccgaggatagaatgttccacatcagagccgtgatcctcagagctttgtccctcgctttccttctaagcctgaggggagccggagcaatcaaggccgatcacgtctccacgtacgcagcgtttgttcagacacatcggcctactggcgagttcatgtttgagtttgacgaagatgaaatgttctacgttgacttggacaagaaggagacggtttggcatttagaggagtttggtcaggcgttcagctttgaagtgaccgtgttcccaaaggagccagtcgagcttggtcagccgaacacgctcatctgtcacattgataaattttttccacctgtattgaacgtgacatggttgtgtaatggcgaacttgtcactgagggtgtggctgaatccctgtttttgcctcggacagattactcatttcataagttccactatctgacattcgtcccttcggctgaggacttttacgactgccgcgttgagcattggggccttgatcagcccctgttaaagcattgggaagcccaagagcccattcagatgcctgagactaccgagactgtgttatgcgcgctgggactggtgctaggactggtcggtatcatagtcggtacagtgctgataatctag

SEQ ID NO: 229276 - DNA, 72 bp, synthetic construct
  misc_feature 1..72: note = Description of Artificial Sequence: Synthetic coding sequence
  source 1..72: mol_type = other DNA
atgaggcccgaagatcgcatgtttcatatccgagccgtgattctgcgcgctctttctctggccttcttatag

SEQ ID NO: 229277 - DNA, 639 bp, synthetic construct
  misc_feature 1..639: note = Description of Artificial Sequence: Synthetic coding sequence
  source 1..639: mol_type = other DNA
atgagacccgaggacagaatgttccatatcagggcagtcatactgagagccctatctctggcgttcctgcttagccttcggggtgctggtgctatcaaggccgaccatgttagcacatacgctgctttcgtccagacccatcgacccacaggcgaatttatgttcgaatttgatgaggacgaaatgttttacgtcgaccttgacaagaaagagacggtgtggcatcttgaggagttcggacaggctttttccttcgaggtgactgtgtttcccaaggaaccagttgagcttgggcaacctaacacccttatttgtcacattgataaattcttcccacctgtgttgaatgtgacatggctgtgcaatggggaattagttacggaaggcgtggccgaaagtctgttcctgccacgcaccgactattcgtttcacaaattccactatttaactttcgtgcctagtgccgaagatttctacgactgcagagtggagcattgggggttagatcagccgctgttgaagcactgggaggctcaagaacccatccagatgccagagactacagagaccgtattatgcgccctgggtctcgttttgggtctagtgggcatcatcgtgggcaccgtcctcattatttag

SEQ ID NO: 229278 - DNA, 387 bp, synthetic construct
  misc_feature 1..387: note = Description of Artificial Sequence: Synthetic coding sequence
  source 1..387: mol_type = other DNA
tagaacacactcatctgccacattgacaagtttttccctcccgtcctcaacgtgacatggctatgtaatggagaactggtcaccgaaggtgtcgccgagtctcttttcttgcctcgcacagattactctttccacaagtttcactatcttacctttgttccgagtgccgaagacttttacgactgtcgggtggaacactggggcctcgatcagcctttgctgaagcattgggaggcacaggaacccatccaaatgccagaaaccactgagacagtgttgtgcgccctggggctcgtgctgggccttgttggcattatcgttggtactgtgctcatcattaagtccctgcgttctggtcatgacccacgggcacagggcacactgtag

SEQ ID NO: 229279 - DNA, 630 bp, synthetic construct
  misc_feature 1..630: note = Description of Artificial Sequence: Synthetic coding sequence
  source 1..630: mol_type = other DNA
atgcgcccagaagatcgtatgttccatattcgagctgttatcctgagggcactttctcttgctttcctcctgtcactgcgcggtgccggagccattaaagccgatcatgtttccacttacgccgctttcgttcagacccacagacctaccggggagtttatgttcgagtttgacgaggacgaaatgttctacgtcgacttggacaaaaaggaaacagtctggcatctcgaggagtttggccaggccttttcctttgaggctcagggcggactggccaacatcgcgattctgaacaacaacttgaatacacttattcagaggagcaaccacacccaggccaccaacgacccacctgaggttaccgtgttccccaaggaacctgtggaactggggcagccaaatacactaatttgtcacattgataaattcttcccaccagtgctgaacgtgacgtggctttgcaatggcgaactggtaacggagggggttgccgaaagcttattcctgcctcgtacggactacagcttccacaagttccactatctaaccttcgttccatctgccgaggatttttacgattgccgagtggaacactgggggttggaccaacccctgcttaagcattggtag

SEQ ID NO: 229280 - DNA, 783 bp, synthetic construct
  misc_feature 1..783: note = Description of Artificial Sequence: Synthetic coding sequence
  source 1..783: mol_type = other DNA
atgaggccagaggaccggatgttccatatccgcgctgtgatcctaagggcgttgagccttgcctttctgctatctctgcggggtgcgggagccatcaaggccgaccatgtttccacgtacgccgcttttgtgcagacccacagaccgactggagagtttatgtttgaatttgacgaagatgagatgttttacgtggacctggacaagaaagaaacagtctggcacttagaggagttcggccaggcatttagcttcgaggcccaaggcggactagctaatattgctatcctgaataacaatctaaacaccctgattcagaggtcaaaccatactcaagcaacgaacgaccccccagaggtgacggtgttcccaaaggaacctgtcgagctgggtcagccaaatactttaatttgccacattgacaagtttttcccgcctgtgctgaatgtgacatggttgtgtaacggagagctggttaccgaaggagttgccgagtctctgtttttgccccgtaccgactactcattccacaagtttcattaccttactttcgtgccatcagcggaagatttttatgactgccgagtggagcactggggcctggaccaaccactcttaaaacattgggaagcccaagagcctatacagatgcctgaaaccacagagaccgttttgtgtgccttgggcttggtgctgggcctcgtgggaattattgtgggtacagtgctcatcataaagtctctgaggtccggtcacgacccccgagcgcagggaaccctgtag

SEQ ID NO: 229281 - DNA, 387 bp, synthetic construct
  misc_feature 1..387: note = Description of Artificial Sequence: Synthetic coding sequence
  source 1..387: mol_type = other DNA
tagaacaccttgatctgccatatcgacaagttctttcctccagtgctcaatgtaacgtggctgtgtaacggggagcttgtgaccgagggcgtggccgaatctctcttcctacctcgcaccgactactcctttcacaaattccattacctgaccttcgtgccgagcgcagaggacttctatgactgtcgagtggaacactggggattggaccagcccctgctgaagcactgggaagcccaggaacccatacagatgcctgagaccacggagaccgtgctgtgcgccttggggctcgtcctaggattagtgggaatcatcgtggggaccgtattgattatcaagagcttacggagtggtcacgaccctagggcccaaggcactctatag

SEQ ID NO: 229282 - DNA, 630 bp, synthetic construct
  misc_feature 1..630: note = Description of Artificial Sequence: Synthetic coding sequence
  source 1..630: mol_type = other DNA
atgcggccagaagatcggatgtttcacatcagggccgtaatcctccgggctctgagcctggcatttcttttatccctcagaggcgctggagcgatcaaggcggatcacgtgtctacatatgcggcttttgtccagactcataggcctactggggaattcatgtttgaattcgacgaagacgagatgttttatgtagacctcgataaaaaggaaaccgtctggcacctagaggaatttggccaggcgttctctttcgaagctcaaggtggactcgctaacatagccatcctgaacaacaatttgaacactctgattcagaggtccaaccatactcaggccaccaacgacccacccgaagtgaccgtctttcccaaagaaccagtagagctggggcagccaaacacactaatctgccacattgataagttctttcccccagtcctgaatgtgacatggctgtgcaatggcgaactggtcaccgaaggggttgctgaatccctgtttctgcccaggactgattactctttccacaaattccactacttaacattcgtgcccagtgccgaggatttctacgactgccgagtggagcactggggattggatcagccactactcaagcactggtag

SEQ ID NO: 229283 - DNA, 630 bp, synthetic construct
  misc_feature 1..630: note = Description of Artificial Sequence: Synthetic coding sequence
  source 1..630: mol_type = other DNA
atgagaccagaagacaggatgttccacataagagccgtgattctgcgtgcattatctctcgcctttctgctgtccctccggggagctggcgctattaaagctgatcatgtcagtacctacgcagcctttgtgcaaacacatcggccaaccggcgaatttatgttcgaattcgacgaggatgagatgttctatgtagacctggataaaaaagagactgtctggcatctcgaagaattcggtcaggcgttctctttcgaggcccagggcggtcttgcaaacatcgccatcctgaataacaatctgaacacgctcatccaaagatctaatcacacccaggcaaccaatgatcccccagaggtgactgtgtttccaaaagagcccgtcgagttaggccagcctaacaccctcatctgtcacattgacaagttcttcccccctgttctcaacgtgacatggctgtgtaacggagaactggtcacagagggcgttgcagaatcactctttcttccccgtacggactactccttccataagttccactaccttacttttgtgccctctgccgaggacttctacgactgcagggtcgagcattggggcctcgatcaacctctgctgaagcattggtag

SEQ ID NO: 229284 - DNA, 783 bp, synthetic construct
  misc_feature 1..783: note = Description of Artificial Sequence: Synthetic coding sequence
  source 1..783: mol_type = other DNA
atgagaccggaggaccgaatgtttcacatcagggcggtgatactgcgcgctctatctctggcctttctgctttctctacggggtgccggagcaataaaggccgatcatgtttccacatacgcagccttcgtgcagacccatcgacccacaggagagttcatgttcgagtttgacgaggacgagatgttctacgtggacctcgacaagaaagagacggtgtggcatctggaagagtttggacaggcattcagcttcgaggcccaggggggtctggccaacattgctatattaaataacaacctgaataccttgatacaacgctccaaccatacccaggccacaaatgatcctccggaagtcacggtattcccaaaggagcccgtggagctcggccagccaaacaccctcatctgccacatcgacaagtttttccctccagtcttgaatgtcacatggctgtgcaatggcgaactagtcaccgagggcgtggcggagtccctgtttcttccgaggaccgactacagctttcataaattccattacctgacttttgtccccagtgctgaggatttctatgactgtagggtggaacattgggggctggatcagccacttctgaaacattgggaggcacaggaaccaatacagatgcccgaaacaaccgaaactgtgctgtgcgcccttggtctggtgctggggctggtgggaatcatcgtgggcaccgtcctgattataaagtcactgcgcagcggacatgatccgagagcgcaaggaactctctag

SEQ ID NO: 229285 - DNA, 639 bp, synthetic construct
  misc_feature 1..639: note = Description of Artificial Sequence: Synthetic coding sequence
  source 1..639: mol_type = other DNA
atgcgtccagaggataggatgttccacattagagccgtgatcctgagagcgttgtctctcgcgtttctgctctctctgagaggggcaggcgctatcaaggcagaccatgttagcacttatgccgcattcgtgcagacccacaggccaacaggagagtttatgtttgagtttgacgaggatgaaatgttctatgtggatttggacaaaaaggagactgtgtggcatcttgaggagttcgggcaggctttcagtttcgaggttacagtctttcccaaagaaccggtcgaactgggacagcctaataccttgatctgtcatatcgacaagtttttccccccagtgctcaacgtcacttggctgtgcaatggggaactggttactgaaggcgtggcagagagcctgttcctgcctagaacggattatagtttccataaatttcactatctgacatttgtaccttctgccgaggatttttatgattgccgcgtggaacattggggcttagatcaacccctcttaaagcattgggaagcccaggagcccatccagatgcctgaaactactgagaccgtcctctgtgccctgggcctcgttttgggcctcgtcggaatcattgtcgggaccgtactgatcatctag

SEQ ID NO: 229286 - DNA, 783 bp, synthetic construct
  misc_feature 1..783: note = Description of Artificial Sequence: Synthetic coding sequence
  source 1..783: mol_type = other DNA
atgaggccggaagaccgcatgttccacatccgtgccgtgatcctccgggcactgtcacttgcatttttacttagcctgcggggagccggtgctattaaggcagatcatgtgtcaacatatgccgctttcgtgcagactcataggccgacaggcgagtttatgtttgagtttgatgaggatgagatgttttatgtggatttggacaaaaaggaaaccgtgtggcacttggaggagttcggtcaagcgttttcctttgaggcccagggcggactggcaaatattgctattctgaacaacaaccttaacaccctcattcaacgcagcaaccatactcaggcaaccaacgaccccccagaagttactgtttttcctaaggagcccgtggaactcggacaaccaaacactttgatctgtcacatcgataagttcttccctcccgtgctgaatgtcacttggctatgcaacggagagttggtcactgaaggcgtcgcggaaagcctgtttcttccacgtacagattacagtttccataaattccattacctcacgttcgtacccagcgcagaggacttttacgattgtcgggtggaacactgggggctggatcaaccactactcaagcactgggaggcacaagagcccattcaaatgcctgaaacgactgaaacagtactgtgtgctctaggtttggtgctggggttggttggaatcattgtaggcaccgtgcttataattaagtccctgcggtccggacatgatccgagggcccagggaaccttatag

SEQ ID NO: 229287 - DNA, 783 bp, synthetic construct
  misc_feature 1..783: note = Description of Artificial Sequence: Synthetic coding sequence
  source 1..783: mol_type = other DNA
atgcggcctgaagacaggatgttccatataagggctgtgattctgagggccctctcactcgcttttcttctgagcctgcggggtgccggagctattaaggcagatcatgtctcaacatacgcagcctttgtgcagacccatcgcccaaccggcgagtttatgttcgagttcgatgaggatgaaatgttttatgtggacctcgataaaaaggagaccgtctggcatctcgaggagttcggtcaggccttttctttcgaggcccaagggggactggccaacatcgccattcttaataacaacctcaacacacttattcaaaggagcaaccatacccaggctacaaacgaccctccggaggtcactgtcttccccaaagagcccgtagagctcggacagcctaatactctgatatgtcatatagacaagttttttccgcctgtcctgaatgtgacatggctgtgcaacggagagcttgtcactgagggcgtggccgaatctctgtttctgcccagaactgactactcattccacaagttccactatttgacgttcgtcccttcagctgaggatttttacgattgccgggtcgaacattggggcctcgaccagccgctccttaaacattgggaggcccaggaaccaatacagatgccggagactacagagaccgtgttgtgcgctctgggcctggtgctcggattggtgggtattatcgtggggactgtgctgattattaaatccctccggtccggacacgaccctcgggcacagggaaccctctag

SEQ ID NO: 229288 - DNA, 783 bp, synthetic construct
  misc_feature 1..783: note = Description of Artificial Sequence: Synthetic coding sequence
  source 1..783: mol_type = other DNA
atgagacctgaagaccggatgtttcacatccgcgctgtgattctcagagctctgagccttgcgtttctgttgagcctgcggggagccggtgctatcaaagccgatcatgtctctacttacgctgcttttgtacagacacatcgccctacaggcgagttcatgtttgagttcgacgaagatgaaatgttctacgttgacttggacaagaaagagaccgtgtggcacctggaagagttcgggcaggcattcagcttcgaggcccagggcggattggcaaacatcgccatcttgaacaataatctaaacaccctgattcagcgctctaaccacactcaagctacaaatgaccctccagaagtaacagtgtttccaaaggagccagtggaactgggccagccaaataccctcatctgccatatagataaattttttccccctgtgctcaatgtgacttggctctgcaacggagagcttgtgaccgaaggcgtggctgaaagcctgttccttccgcgaaccgactacagcttccacaaatttcactatctcacattcgttccatcggccgaggatttttatgactgccgggtggagcattggggcctggaccagcctcttctcaaacactgggaggcacaagagcccatccagatgccagagacaactgaaaccgtcctgtgcgctctgggcctcgttctgggcttggttggaataattgtcggaacagtgctcatcattaagagcctcaggagcggacacgacccaagggcccaaggcactctctag

SEQ ID NO: 229289 - DNA, 783 bp, synthetic construct
  misc_feature 1..783: note = Description of Artificial Sequence: Synthetic coding sequence
  source 1..783: mol_type = other DNA
atgcggcctgaagatcggatgttccacattagagcagtcatcttaagggcactctcactagcgtttctgctgagcctgcggggagccggagccatcaaggcagatcacgtatccacctatgccgctttcgtgcagacacaccgtcccaccggagagttcatgttcgagtttgacgaggatgaaatgttttacgtcgacctcgacaagaaagagaccgtctggcaccttgaggagtttggccaggcctttagcttcgaggcccagggtggcctggccaacattgctatcctgaacaataacctcaatacactgattcagaggtcaaaccacactcaggctacaaacgatccccctgaggtgacggtctttccgaaagaacctgttgagctcggacagccgaatacacttatatgccacatagacaagtttttcccacccgtgttgaacgtcacctggttgtgcaatggagagttagtgaccgaaggtgtggccgagagtctgtttctcccaagaacagactactccttccataagttccattacctcaccttcgtgccttcggcagaggatttctatgattgtcgcgtcgagcactggggcctggaccagccattactcaagcactgggaagcccaggagcccattcagatgcctgagaccactgagaccgtactgtgcgctctgggcctggtgctcggcctcgttggaataattgtgggaaccgtgctcatcatcaaatctttgcggagcggccacgatcctagagcccagggcaccctgtag

SEQ ID NO: 229290 - DNA, 783 bp, synthetic construct
  misc_feature 1..783: note = Description of Artificial Sequence: Synthetic coding sequence
  source 1..783: mol_type = other DNA
atgcgcccagaggatagaatgttccatatcagagcagtgatcctcagagccctgagtctggcttttctgctctctctgagaggtgctggcgcaattaaggctgaccatgtatccacctacgccgcatttgttcagacccacagacctacgggcgagtttatgttcgaatttgatgaagacgagatgttttatgttgatctcgataagaaggaaacagtgtggcatctcgaagaattcgggcaggccttctcatttgaggcacagggcggacttgccaatatcgccatactgaataacaacctcaacacacttatccaaagatcaaatcacacacaggccacaaacgatccgcctgaggttactgtatttccgaaagagcccgtggagctcgggcaaccgaacaccctgatttgccatatcgataagtttttcccaccagtgctgaatgttacatggctgtgtaatggagaattggtgacagaaggggttgcggaaagcctctttctgccacgaaccgattatagctttcacaaatttcactatttaactttcgtaccaagcgccgaggatttctatgattgccgcgttgagcactggggattagaccaacctttgctcaaacattgggaggcccaagagcctatccagatgccggagactacagagacggtgctttgcgcccttggcctggtgttgggactcgtcggtattatcgttggcactgtcttaatcatcaagtccctgcggagtggacacgatcccagggcgcaaggaaccttgtag

SEQ ID NO: 229291 - DNA, 783 bp, synthetic construct
  misc_feature 1..783: note = Description of Artificial Sequence: Synthetic coding sequence
  source 1..783: mol_type = other DNA
atgcgtccagaggatcggatgttccacatacgagctgttatcttgcgggctctgtcccttgccttcctgcttagcctgcgaggcgctggggcaattaaagcagatcacgtgtctacttatgctgccttcgtgcagacccatagacccacaggggaatttatgttcgaattcgatgaagatgagatgttctatgtggatctggacaagaaagaaactgtgtggcatctcgaagaatttggccaggccttcagcttcgaagctcaaggcggactggctaatatcgccattctgaacaacaatttaaatactctgatacaacgctccaaccatacgcaggcaacaaatgatccgccagaggttactgtgttccccaaggaacctgtggaattgggacaacccaataccttaatctgtcacattgataaattcttccccccagtgctgaatgtgacctggctttgcaacggcgagttagttaccgagggggtcgctgaatccctgtttctgccgcgtacggactactctttccataagttccattacctgaccttcgtccctagcgcagaggatttctatgactgccgggttgagcactgggggttagatcagcccctgttaaagcattgggaggctcaggaacctatccagatgcctgagactactgagaccgtgttgtgcgcgctggggcttgtccttggcctcgtggggatcatcgtgggaaccgtgctcatcatcaagtccttacggagtgggcacgatccccgagcgcaggggacactgtag

SEQ ID NO: 229292 - DNA, 777 bp, synthetic construct
  misc_feature 1..777: note = Description of Artificial Sequence: Synthetic coding sequence
  source 1..777: mol_type = other DNA
atgatggtcttacaggtctctgctgcgccaaggacagtggcattaacggcactcctgatggtgttacttacaagcgttgtacaggggagagctacgccggaaaattatgtataccaattacgacaagagtgttacgcctttaatggaacacagagatttctggaacgttatatttacaacagggaggagtttgtccgtttcgactctgacgtgggggaattcagagcagtgacagaactgggtagacctgatgaggattactggaactctcagaaagatctgcttgaagaaaaacgggcagtgccagacagggtctgccggcacaactacgagctcgacgaggcagtgaccctgcaaaggagagttcagcctaaagtgaacgtgtcgcccagcaagaaggggccacttcagcaccacaacctgcttgtgtgccacgttactgacttctatccgggtagcattcaggtgcgctggttcctcaatggccaggaggagacagcgggtgtggtctccacaaaccttatcaggaacggcgactggaccttccaaattctggtcatgctggagatgacacctcagcagggagatgtctatatctgccaggttgaacatacgagcttggatagtccagttactgtcgagtggaaggctcagtcagactctgcgaggagcaaaaccctcactggcgctggcggattcgtgctgggcctcattatctgcggggtgggaatattcatgcaccgcaggtcaaagaaagtacaaagaggtagcgcatag

SEQ ID NO: 229293 - DNA, 687 bp, synthetic construct
  misc_feature 1..687: note = Description of Artificial Sequence: Synthetic coding sequence
  source 1..687: mol_type = other DNA
atgatggtgctgcaggtgtctgccgctcccaggaccgtggcactgacggccctgctgatggtcctgttaacctcggtggtgcagggtcgggctaccccggaaaattatctatttcaaggaaggcaggaatgctacgcattcaatggaacccaacgctttcttgagcgctacatttataatagggaagaactggttagattcgattcagatgttggtgagtttagggccgttaccgaactggggaggccagaggccgaatactggaatagccagaaggatatactggaagaagaaagagccgtgccagatcgcatgtgccgccataactatgaattgggtggcccaatgactctgcagcggagaggcagcattcaggtgaggtggttcctgaatgggcaggaggagaccgccggtgttgtgagcaccaacctgatacggaatggagactggacattccagatcctggtcatgctggagatgacaccccaacagggagatgtgtatacatgccaggttgagcatactagtctggattctccagtgaccgttgagtggaaggcccagtccgattcagccagatccaaaaccctgacaggggctggtggcttcgttctcggactgatcatctgtggagtgggaatcttcatgcacaggcggtcaaaaaaggtgcagagaggctccgcgtag

SEQ ID NO: 229294 - DNA, 777 bp, synthetic construct
  misc_feature 1..777: note = Description of Artificial Sequence: Synthetic coding sequence
  source 1..777: mol_type = other DNA
atgatggtgctccaggtgagcgccgctcccaggaccgtcgcactgacagcgctgttaatggtcctcttaacctccgtggtgcagggcagagcaacaccggagaattatttgtttcagggtcgccaggaatgttatgcctttaacggcacacagcgtttcctggaacggtacatctacaaccgcgaggagctcgtgagatttgatagtgacgtcggcgagtttagagccgtcactgagctgggacgacccgaggctgaatactggaactcacaaaaggacatactcgaggaggaacgcgcagtgcctgaccgaatgtgccgccacaattacgaactggggggtcccatgacacttcagcgccgtgtacagccgagggtaaatgtgagtccatctaagaaaggaccgttgcagcatcataacctgttggtctgtcatgtaaccgacttttacccgggaagcattcaggtgagatggtttctgaatggtcaggaggagactgctggcgtggtgagcacgaacctcatcagaaatggggactggacgttccaaattcttgtgatgctcgaaatgacaccccagcagggggacgtgtacacctgccaggtcgaacacaccagtctcgactcaccagttacagttgaatggaaagcccaaagcgatagtgccaggtccaaaacactgaccggagcaggaggcttcgtccttggtcttataatctgcggggttggaatattcatgcatcggagatctaaaaaagtacagagaggaagcgcctag

SEQ ID NO: 229295 - DNA, 690 bp, synthetic construct
  misc_feature 1..690: note = Description of Artificial Sequence: Synthetic coding sequence
  source 1..690: mol_type = other DNA
aagcaggcatggagaggctctgccacaagactgggccctcaaaacagcgggaggcaagagtgttatgcctttaacggtacccaaaggttcctcgaacggtacatatacaacagggaagagctggtacgcttcgactctgacgtgggggagtttcgggctgtaacggaactggggcgacctgaagccgaatattggaactctcaaaaggacatcctagaagaagaacgggctgtgcctgataggatgtgcaggcataactacgagctgggcggtcctatgacattgcagagaagggtacaaccccgtgttaatgtatcaccttccaaaaaaggccctctgcagcatcataatctcctcgtctgtcacgtgaccgacttttacccaggcagtatccaggtgaggtggtttctgaatggtcaggaagagaccgccggagtcgtaagcaccaatctcatacgcaatggggattggacttttcaaatcctggttatgctggaaatgacaccgcagcaaggcgacgtgtacacttgccaggtggagcatacatctttggacagccccgttactgtggagtggaaggcacagagcgatagcgcgaggagtaagactttgacaggcgcaggcggatttgtgctcggactgatcatttgcggggtcgggatcttcatgcaccgacgttccaagaagtag

SEQ ID NO: 229296 - DNA, 687 bp, synthetic construct
  misc_feature 1..687: note = Description of Artificial Sequence: Synthetic coding sequence
  source 1..687: mol_type = other DNA
atgatggtactgcaggtttccgccgcacctagaactgtcgccctgaccgcactgttaatggtcctcctgacctccgtggttcagggacgcgctacgccagaaaattatctgttccagggaagacaagagtgctatgctttcaatggcacccaacgcttccttgaacgctacatatacaaccgagaggaattcgcacggtttgattctgatgtgggagaatttcgggctgtgaccgaactggggagaccggcagcggagtattggaattcacagaaagacatcctagaggagaagagggccgtccctgataggatgtgtcgccacaactacgagctggggggaccaatgactctgcagcgacgaggctcaatacaggtccgctggttccttaacggccaggaagaaactgccggagttgtcagcacgaacctgattaggaatggggattggacattccagatacttgtgatgttagaaatgacgcctcagcagggagacgtgtacacttgtcaggtagaacacaccagcctcgatagcccggtgacggtcgaatggaaggctcaatcggactctgcacgctcgaagaccctcactggggctgggggttttgtactggggctcatcatttgcggcgtgggcatattcatgcaccgacgaagtaaaaaagtgcaaaggggaagtgcttag

SEQ ID NO: 229297 - DNA, 687 bp, synthetic construct
  misc_feature 1..687: note = Description of Artificial Sequence: Synthetic coding sequence
  source 1..687: mol_type = other DNA
atgatggtactgcaagtctccgcagcccctcgaacagtggctttgaccgccctgctgatggtcttactcaccagcgtagtccaaggacgcgctacccctgaaaattacctatttcagggaagacaggaatgttacgcattcaacgggacccagagatttcttgaacgatatatttataacagagaggagtttgtgagatttgattctgatgtgggtgagttccgagcagtgacggaactgggacgcccagacgaagaatactggaactcacaaaaagacattcttgaagagaaacgggcagtgcctgatcgcatgtgtcggcataactatgagttaggcggtccaatgacactgcagcgaaggggaagcattcaggtgcggtggtttcttaacggccaggaagagacagccggagtggttagcaccaatctgatccgcaacggcgactggacatttcagattctggtcatgctggagatgacaccccagcaaggggacgtgtatacttgccaggtggagcatacctcaatggactctcctgttacggtggaatggaaagcacagtccgactcagccaggtcaaaaacacttacaggtgctgggggtttcgtgcttggactgataatctgtggggtgggtatattcatgcacaggaggagcaaaaaggtgcagcggggatctgcctag

SEQ ID NO: 229298 - DNA, 708 bp, synthetic construct
  misc_feature 1..708: note = Description of Artificial Sequence: Synthetic coding sequence
  source 1..708: mol_type = other DNA
tgaaattacctcttccaggggcgtcaggaatgctatgccttcaacggcactcagagattcctcgagcggtatatttacaaccgcgaggagtttgtccggttcgacagcgacgtgggagagttcagagccgtcaccgagctgggaaggccagatgaggagtactggaattctcagaaagatattctggaggaaaagcgggcagtgccagaccgaatgtgccggcataattatgagcttggcggaccgatgacgctccagcgtcgggttcagcccagagtaaatgtctcaccctcaaagaaggggcctctgcagcaccacaatctgctcgtttgtcacgtgacagacttctatcccggatccattcaagttcgatggtttctgaacggccaggaagagactgccggtgtcgttagcacgaacctgatccgaaatggggattggacattccagattctagtgatgttggagatgacgccccagcaaggggatgtatatacttgccaagtagaacacacctcgatggattcccccgtcaccgtggaatggaaagcccaaagcgattccgcacggtccaagactttgaccggagctggaggctttgtgctgggcctgataatttgcggcgtcgggatctttatgcaccggagatccaaaaagggggagaaggcctgtaggttcaacgaagacctgcataagcagggtagctag

SEQ ID NO: 229299 - DNA, 777 bp, synthetic construct
  misc_feature 1..777: note = Description of Artificial Sequence: Synthetic coding sequence
  source 1..777: mol_type = other DNA
atgatggttcttcaggtctccgccgcacctagaactgtggctttaaccgcactgctgatggtcttgctgaccagtgtagttcagggtcgcgcaaccccagagaattacctgttccaggggcgacaggagtgctatgccttcaatggtacccagcggtttttggaacgctacatttacaaccgtgaggagttcgtcaggttcgatagcgacgtgggcgaattccgggcagtgacagaattgggtcgccctgacgaagagtactggaacagccagaaagacatcctcgaagagaagagagctgtaccagaccggatgtgtagacacaattacgaattaggtgggccaatgactctccagcggagagtgcagcccagagtcaatgtttcaccatccaagaaggggcctctgcagcaccacaatctcctggtttgtcacgtgaccgacttctaccccggaagtatccaggtcaggtggttcctgaatggccaggaagaaacggccggagtggtgtccaccaatctaatccgtaatggagattggactttccagattttggtcatgttggagatgactccacagcagggtgatgtttacacgtgccaggttgaacacacgagcatggacagtcccgtcacggtagagtggaaagcacagagtgacagcgccagatcgaagacactgactggagcaggcggatttgtgctggggctgatcatctgtggtgtgggcatttttatgcaccgcaggtctaaaaaggtccaaagaggctcggcttag

SEQ ID NO: 229300 - DNA, 687 bp, synthetic construct
  misc_feature 1..687: note = Description of Artificial Sequence: Synthetic coding sequence
  source 1..687: mol_type = other DNA
atgatggtgctgcaggtatcagccgcacctagaactgtggcgctgactgccttgcttatggtccttcttacaagcgttgtacagggacgcgcaacaccagagaattatctttttcaagggagacaggagtgttatgccttcaatggaactcagcgcttcttggagagatatatctacaatcgggaagaatttgcacgtttcgactccgatgtcggggagtttcgggctgtcaccgaactcgggcgtccagcagccgagtattggaactcccagaaggatatcctagaggagaagcgtgccgtgcctgaccgcatgtgcaggcataattatgaactaggcggacccatgacgctacagaggaggggtagtattcaggtgcgttggtttctaaacggccaggaggaaacagccggagtcgtgtcaaccaaccttatccggaacggagactggacctttcagatactcgtaatgctggaaatgactcctcaacagggtgatgtctatacttgtcaggtggagcatacatcgttagacagccctgttacagtagaatggaaggctcaaagtgacagcgctagatctaaaaccctgaccggtgccggtggcttcgttttggggctgatcatctgtggcgtcgggatcttcatgcatcggagatcaaagaaggttcaacgaggttctgcttag

SEQ ID NO: 229301 - DNA, 690 bp, synthetic construct
  misc_feature 1..690: note = Description of Artificial Sequence: Synthetic coding sequence
  source 1..690: mol_type = other DNA
aagcaggcctggcgcggaagcgctactaggctaggaccgcagaattctggcaggcaggagtgttatgctttcaacggcacacaacgctttttggaacggtacatatataaccgcgaggagttcgtaagatttgattctgacgtgggcgaattccgcgcagttaccgagttaggacgacccgacgaggaatattggaactcccaaaaggatatcctggaggaggaacgagccgtgcccgaccgaatgtgtcggcacaattatgaactaggtggtcctatgaccctgcagaggcgtgtgcagccacgagtgaacgttagtccatccaaaaaaggcccactgcagcaccataatttgcttgtgtgtcacgtgacagacttctatccaggctcaattcaggtgcgttggtttctgaatggacaggaggagacggccggtgttgtctccacgaatctcatccgtaatggcgattggaccttccagattttggtcatgcttgagatgacccctcaacaaggagacgtttacacctgtcaggtcgagcacacatcactggactctcctgtgactgtggagtggaaggcacaatcagacagcgcacggtccaaaaccctgactggggctggcggtttcgtgctaggtctgataatttgcggggtcggtatcttcatgcatcgtcgctctaagaaatag

SEQ ID NO: 229302 - DNA, 777 bp, synthetic construct
  misc_feature 1..777: note = Description of Artificial Sequence: Synthetic coding sequence
  source 1..777: mol_type = other DNA
atgatggtgttgcaagttagcgcagcacccaggaccgttgctttaaccgccctgcttatggtacttctcacatctgttgtgcaggggagggccacccccgagaactatctgtttcagggcaggcaggaatgctacgcctttaatggcacacagagattcctcgaaaggtatatttataaccgcgaagagttcgtacggttcgactctgacgtgggagagttccgggcagtcactgagttaggccgacccgatgaggaatactggaacagccagaaggacatcttagaggaagagcgggcagtccccgatcggatgtgcaggcataactacgagctgggcggacctatgacactccagcggcgagtgcagcccagggtcaatgtgagtccctccaaaaagggcccattgcaacatcataacctccttgtgtgccatgtgaccgacttctaccctggatctattcaagtgagatggtttctcaatggacaggaggaaactgccggagtggtctccacgaatctgatcaggaacggcgactggacttttcagatcctggtgatgcttgagatgacgccccagcaaggtgacgtctacacctgccaggtggagcacacgtccctggacagtcctgtcaccgttgagtggaaagctcagtctgattctgctagatccaagaccttgaccggcgcaggcggattcgtgttggggctgatcatatgtggcgtgggtatcttcatgcatcgccgtagcaaaaaggtacaacggggatccgcttag

SEQ ID NO: 229303 - DNA, 708 bp, synthetic construct
  misc_feature 1..708: note = Description of Artificial Sequence: Synthetic coding sequence
  source 1..708: mol_type = other DNA
tgaaactatctgttccagggcaggcaggaatgttatgcatttaacggtacccagcgctttctcgaaaggtatatatacaaccgcgaggagtttgctcggtttgacagtgatgttggagagttcagggcagtcacagagctcgggagacctgcagcagagtactggaactcccagaaggacatactggaagagaaaagagcagtgccagaccggatgtgtcggcacaactatgagttggggggtcctatgacacttcagcgaagagtgcagcctcgcgtcaatgtgtcgccgagcaaaaaaggacctctccagcatcataacctacttgtgtgtcacgttaccgacttctatcctgggtccatccaggtcaggtggttcctgaacgggcaagaggaaacagcaggcgtggtgtctactaaccttatcaggaatggagattggacttttcagattctcgtaatgctggagatgacgccacagcagggagacgtttacacgtgtcaggtcgagcatactagcctggactctcccgtgacagtggagtggaaggcccaatctgactcagcgcgatcaaaaacactgactggtgccggtggcttcgtgctgggtttgattatttgtggcgtggggatttttatgcaccgaaggagcaaaaagggcgaaaaagcgtgcaggttcaacgaggaccttcacaagcaaggctcatag

SEQ ID NO: 229304 - DNA, 690 bp, synthetic construct
  misc_feature 1..690: note = Description of Artificial Sequence: Synthetic coding sequence
  source 1..690: mol_type = other DNA
aaacaggcatggcgcggatctgcaactcggcttggccctcagaatagtggaaggcaggagtgttacgcgtttaacggtacacaaagatttcttgagcgatatatttacaacagggaggagttcgccaggttcgactccgacgtcggcgaatttagagcggtgaccgaactcgggcgacctgcagcggagtactggaactcccaaaaagatattctggaggagaagcgagccgttccggaccgcatgtgccgccacaactatgaactcggtggtccgatgaccctgcagcgccgagtccagcctcgcgtaaatgtttctcctagcaagaaaggtcccctgcaacatcacaatctgctcgtgtgccacgtgacggacttttatcctggctctattcaggtgaggtggttcctaaatggccaggaggaaaccgccggagtcgtcagtacaaacctgattcggaatggcgattggacattccaaattctggtcatgctggagatgaccccacaacaaggcgatgtgtacacttgccaagtggaacacacaagcctggactcgccagtgacagttgagtggaaagcacagtctgactccgccaggagtaaaacactgaccggggctgggggatttgttctgggtcttatcatctgcggcgttgggatctttatgcaccgtcgatctaagaaatag

SEQ ID NO: 229305 - DNA, 777 bp, synthetic construct
  misc_feature 1..777: note = Description of Artificial Sequence: Synthetic coding sequence
  source 1..777: mol_type = other DNA
atgatggtattgcaagtgtcagcggctccacgcacggttgccttgacagccctgctcatggtgctgttaacatctgtggtgcaaggaagagctactccggaaaattatttgtttcagggacgccaggaatgctatgcctttaacggtacccaacgtttcctcgagagatacatttacaatcgggaggagtttgctcgcttcgattccgacgtgggcgagttcagagccgtcacagagcttggaagacccgctgccgagtactggaactctcagaaagacatcctggaagagaaaagggccgtgcccgaccggatgtgtcggcacaactacgaactcggcggtcctatgaccctgcaacgccgagtgcagcctagggtcaacgtgagcccttctaagaaaggaccgctgcaacaccacaatcttttggtgtgccatgtgacggatttctatcccggttcgattcaggtgcgatggtttttaaatggacaggaggaaactgccggtgtggtgtctaccaatcttattcgcaacggtgactggacattccagatcctggtgatgctggagatgacaccccagcagggcgacgtatacacgtgccaagtggagcataccagtttagatagtcccgtgacagtcgagtggaaagcacagagcgactccgctcgatctaagacccttacaggagcagggggttttgtcttaggcttaatcatatgtggagtggggatttttatgcacagacggtctaagaaagtgcagagagggagcgcatag

SEQ ID NO: 229306 - DNA, 249 bp, synthetic construct
  misc_feature 1..249: note = Description of Artificial Sequence: Synthetic coding sequence
  source 1..249: mol_type = other DNA
atgactccacaacagggagatgtttatacatgtcaggtggaacatacgtcactggacagccctgtaactgtggagtggaaagctcagtctgatagcgcaagaagtaagactctcaccggcgcaggcggtagggctggcgcacaccacctgtggagtggtcatctgcatgctcaagaggagcaggaaagctcaacccgcatctgtattaatcgagtgcccgaacttactgaaaaaacaatagtgccatag

SEQ ID NO: 229307 - DNA, 777 bp, synthetic construct
  misc_feature 1..777: note = Description of Artificial Sequence: Synthetic coding sequence
  source 1..777: mol_type = other DNA
atgatggtgctgcaagtgagcgccgcacccagaacagtggcactgacagcccttctgatggttttactcacttcagtggtccagggacgcgcaacaccagagaattacctgtttcaggggaggcaggagtgctatgcattcaacgggactcagcgttttttggagcgttatatttacaaccgagaagaatttgtccgatttgactccgacgtaggcgagttccgagcagttacggaactggggagaccagatgaggagtattggaattcccaaaaagacattcttgaagaaaagcgcgcagtgcctgaccggatgtgccggcacaattacgagctggggggacccatgacgctgcagcgccgtgtccagcccagggttaacgttagtccctccaagaagggacctctgcagcatcataatctgttggtgtgccacgttacagatttctaccctggttccattcaagtcagatggtttctgaatggccaagaagaaacagctggggtggtgtcaactaacctgatccggaacggggattggacctttcaaatccttgtaatgctggaaatgacaccacagcagggagacgtatacacctgccaggtcgagcataccagcatggattcaccagtgacagtggagtggaaggcccaatctgactcagctaggtctaaaactttaacaggggctgggggattcgtgctcggacttattatatgcggcgtgggcatctttatgcatcggagaagcaagaaagtgcaaaggggatcggcctag

SEQ ID NO: 229308 - DNA, 690 bp, synthetic construct
  misc_feature 1..690: note = Description of Artificial Sequence: Synthetic coding sequence
  source 1..690: mol_type = other DNA
aagcaggcgtggcggggtagcgccacgcgactgggcccacagaactcaggccgtcaggaatgctacgcattcaacggcactcaaagatttttagaaaggtacatctacaatcgagaggaattcgccaggttcgattccgatgtcggcgaattcagggctgtgacggagctgggtagacctgcagccgaatattggaactctcaaaaggacatcctggaggagaaacgggcagtgccagatcggatgtgccggcacaactatgagctgggcggacccatgacactgcagaggcgggtacagcctcgcgtgaacgtttctccctctaagaaagggcctcttcagcatcacaatcttctcgtatgccacgtcacggatttctaccccggttccatacaggtgcgttggtttcttaatggccaggaggagacagctggcgtggtttcaaccaacctcataagaaacggcgactggactttccagatactcgtcatgcttgaaatgactcctcagcaaggggatgtgtatacctgccaggttgaacacaccagcctagactctcccgtgactgtcgagtggaaagcccagtctgactctgccaggagtaagacattaacaggcgcaggagggttcgtgctgggcctgattatttgcggtgtaggcatattcatgcatagaagatctaagaaatag

SEQ ID NO: 229309 - DNA, 708 bp, synthetic construct
  misc_feature 1..708: note = Description of Artificial Sequence: Synthetic coding sequence
  source 1..708: mol_type = other DNA
taaaattacctgttccagggcagacaagagtgctacgctttcaacggaacccagcgctttctcgagaggtatatctacaatagggaggagctcgtgcgcttcgactcagatgtcggcgagtttcgggctgtgacagaattgggacggccagaagccgagtattggaactcccaaaaggatattttagaagaagaaagagccgttcctgataggatgtgtcggcacaactatgagctcggaggtcctatgactttacagcgccgtgtgcaacccagggtgaacgtctcaccgagcaagaaaggcccactccaacaccataacctgctggtatgccatgtcactgacttttaccctggcagtatccaggtcagatggtttctaaacggtcaagaagaaaccgcaggggtagtgtccacgaacctgatacgaaacggtgactggactttccagatcctcgtcatgcttgagatgaccccccagcaaggagacgtctacacttgtcaagtcgagcacaccagcctcgacagccctgtgaccgtggagtggaaagcgcagtcagacagtgcaagatcaaagactttaactggggctggcggatttgttctgggtctgatcatttgcggcgttggaatctttatgcaccggaggagcaagaaaggtgagaaggcttgtcgatttaacgaagatttgcacaagcaaggctcttag

SEQ ID NO: 229310 - DNA, 777 bp, synthetic construct
  misc_feature 1..777: note = Description of Artificial Sequence: Synthetic coding sequence
  source 1..777: mol_type = other DNA
atgatggtcctccaggtttcagccgcacccagaacagtcgctttgacggccctgctaatggtgctccttacctctgtagtgcagggcagagctactcctgaaaactatctgttccagggaaggcaggaatgttacgcgttcaacggcactcagagattcctggaacgctatatttataatcgtgaggagttcgccaggttcgactcagacgtgggggagtttcgggctgtgaccgagctgggtcggcctgctgccgagtactggaactcacagaaagatattctggaggaaaagcgcgctgtgcccgatagaatgtgtagacataactacgagctgggtgggcctatgacactgcagaggcgggtccagccacgtgtgaacgtgtctccatcaaaaaaaggtcccctgcagcaccataacctgctggtttgccacgtcaccgatttctaccccggttctatccaagtcaggtggtttctgaatgggcaggaagagactgccggtgtagtctcaaccaacttgattcgcaatggagactggactttccagatcctagtgatgctagagatgacaccacaacagggggatgtctatacctgtcaggttgagcacacctctctcgacagccctgtcactgtggaatggaaagctcagagtgatagcgccaggagcaagacgttgacgggggcaggaggctttgtgttgggtctcatcatatgcggggttggaatctttatgcacagaagatctaagaaggtgcagcggggttcggcttag

SEQ ID NO: 229311 - DNA, 708 bp, synthetic construct
  misc_feature 1..708: note = Description of Artificial Sequence: Synthetic coding sequence
  source 1..708: mol_type = other DNA
tagaattacgtctaccagctacggcaagaatgttacgctttcaacggaactcagcggtttctggaaaggtacatctacaatagggaggaattcgtgcggtttgacagtgacgtgggcgagtttagggccgttacagaacttggaagacccgatgaagactattggaattcccagaaagacctgctggaagagaagcgggcagttcctgatagggtttgcagacacaactacgagcttgacgaagcagtgacactgcagcgaagggttcaaccaaaagtgaatgtttcccctagcaagaaggggcctttgcaacaccataacctgcttgtgtgtcacgtgaccgatttttacccaggatcaatacaagtgcgatggtttcttaacgggcaggaggagaccgcgggagtagtctctaccaatttgatccgcaatggcgattggaccttccagatcctcgtaatgctagagatgacaccccagcagggggacgtttatatctgccaagtggaacacaccagcctggacagcccggtgactgtcgaatggaaggcccagtccgacagtgcacggagtaagacccttacaggcgcaggtggattcgtcttgggtctcatcatctgcggggttggtatttttatgcacagacggtcaaaaaagggtgagaaggcatgtaagttcaacgaggatctgcacaagcaaggatcctag

SEQ ID NO: 229312 - DNA, 690 bp, synthetic construct
  misc_feature 1..690: note = Description of Artificial Sequence: Synthetic coding sequence
  source 1..690: mol_type = other DNA
aaacaagcctggaggggttccgccacccgcctgggccctcagaatagtggacgccaggagtgttatgcttttaatggcacccagagattcctagagaggtacatttacaaccgcgaggagtttgttcgattcgactccgatgtgggtgagtttcgcgctgtcaccgagcttggccgacccgatgaggagtattggaattcccagaaggacattttggaggagaagcgggcagtgccagacaggatgtgcagacacaattatgagttgggaggtcctatgaccctccaacgaagagttcagccccgtgtgaatgtgagtccctcaaagaagggtccgctacagcatcacaacctgctcgtgtgccatgtaacagatttttatcccggaagtattcaggtgcggtggttcctgaatggccaagaggagacagccggagtggtttccacaaacctgattagaaacggagattggacatttcagattctcgtcatgctcgaaatgacccctcagcagggagatgtgtacacgtgccaggtggagcacacctccatggactcaccagtcactgtagaatggaaggcacagagcgactcagcccgatctaaaacgttaacaggggcaggcggttttgttctggggctgattatttgcggggtgggcatctttatgcaccgccgttccaaaaaatag

SEQ ID NO: 229313 - DNA, 687 bp, synthetic construct
  misc_feature 1..687: note = Description of Artificial Sequence: Synthetic coding sequence
  source 1..687: mol_type = other DNA
atgatggtcctccaggttagcgcagctccccgaacagtggcacttacagcccttcttatggtgctgctgacatccgtcgtccaaggaagggccacacccgagaattacgtgtaccagctccggcaggaatgttacgctttcaatggcactcagcggttcctcgagaggtatatttataatcgggaggaattcgtgcgcttcgattccgacgtcggtgaatttcgcgcagtgactgagctaggtcggccagacgaagactattggaattcacaaaaggacctgctggaggagaagagggctgttccggatagagtttgtaggcataattacgagctggatgaggctgtcacattgcagcggaggggatccattcaagttcgttggttcctcaacggacaagaggaaactgctggagtagtctcgaccaatttaatacggaacggagattggacattccagatcctggtcatgcttgagatgactccccagcaaggggatgtatatatttgtcaggtcgaacacacaagccttgactcacccgttaccgtcgagtggaaagcacagtccgacagcgccagaagtaaaacgcttaccggggctggtgggttcgtgctggggttgatcatatgcggagtcggcatcttcatgcatcggagaagcaaaaaggtccagagaggtagcgcctag

SEQ ID NO: 229314 - DNA, 687 bp, synthetic construct
  misc_feature 1..687: note = Description of Artificial Sequence: Synthetic coding sequence
  source 1..687: mol_type = other DNA
atgatggtgctccaggtgagtgcggctcccagaacagtcgcacttacagctctgttaatggttctactgaccagtgtggtacaggggagagcaactcctgagaactacctgtttcagggtagacaagagtgttatgccttcaacggaactcagcggttcctggagagatatatttataaccgggaggagtttgtcagatttgactctgatgtgggcgagttccgcgcagtcaccgagttgggaagaccagatgaggagtattggaactctcagaaggacattcttgaagaaaagagagccgtgccagatagaatgtgtaggcacaattatgagctgggtggacccatgaccctccaaagaaggggatcaattcaggtgcgctggttcctgaacggccaggaggagactgccggagtcgtgtcgactaacctcataaggaacggggactggacgttccagatcttagtcatgctagaaatgactccccagcaaggagatgtgtacacgtgccaggtagagcacaccagcatggacagcccagtaaccgtcgagtggaaggcccagagtgattcagcccgtagcaagacactgaccggagcgggaggatttgtcctgggccttatcatttgtggagtgggaatcttcatgcatcgccgttccaagaaggtgcagcgaggtagtgcatag

SEQ ID NO: 229315 - DNA, 687 bp, synthetic construct
  misc_feature 1..687: note = Description of Artificial Sequence: Synthetic coding sequence
  source 1..687: mol_type = other DNA
atgatggttcttcaggtctccgctgcccctagaaccgtggcactcacggctctcttgatggtgctgctgacaagtgtcgttcagggtcgggctaccccggagaattacttattccaaggacggcaggaatgctacgctttcaatggcacacagcgattcctggagcggtatatctacaatagagaggaatttgcaagattcgacagcgatgtgggcgagtttcgcgctgtcactgaactgggccgaccagcggctgagtactggaacagtcagaaagatatccttgaggaaaaaagggctgtccctgataggatgtgccggcataactacgagctgggaggcccaatgactctgcaacgcagggggtcgatccaggtgaggtggttccttaacgggcaagaggagacggcgggagtagtctctacaaatttaatccgtaacggcgactggactttccaaattcttgttatgcttgagatgacgccgcagcagggcgatgtgtacacttgtcaggtggagcacacatctctcgatagccctgtgaccgtcgagtggaaagctcagagcgatagtgcgaggtcaaagaccctcaccggcgctggaggatttgttctcggcctgattatatgcggagtgggtatcttcatgcaccggagaagcaagaaggttcaaagaggaagcgcttag

SEQ ID NO: 229316 - DNA, 690 bp, synthetic construct
  misc_feature 1..690: note = Description of Artificial Sequence: Synthetic coding sequence
  source 1..690: mol_type = other DNA
aagcaggcctggaggggatccgccaccagattgggccctcaaaactctggtaggcaagaatgctatgcattcaatggtacacagagatttctcgaacggtatatctacaatcgcgaagagtttgtccgattcgacagtgatgttggagagtttagagccgtaaccgagttaggcagacctgatgaggaatactggaactcgcagaaagacatcctggaagaaaaaagggctgtccccgaccgtatgtgccgacacaactatgagctggggggaccaatgacattacaacgcagagttcagccacgggtcaatgtgagcccatccaagaaggggcctctccagcaccacaatcttctggtctgccacgtgaccgatttttaccccggttcaattcaggtacggtggttccttaacggccaagaggagaccgcaggggtagtgtctaccaatctgatacgtaacggcgactggacctttcagattttagtaatgctcgagatgacaccacagcagggagacgtctacacatgtcaggtcgaacacaccagcatggatagccccgtgacagtggagtggaaggctcagtctgacagcgcacggtccaagacattgactggggctggaggatttgtcctgggcctgataatctgtggggtgggaatatttatgcacagaagatccaaaaaatag

SEQ ID NO: 229317 - DNA, 708 bp, synthetic construct
  misc_feature 1..708: note = Description of Artificial Sequence: Synthetic coding sequence
  source 1..708: mol_type = other DNA
tgaaactacttgttccagggcagacaggagtgttatgccttcaatggcacccagagattcctggaacggtacatttataatcgtgaggagttcgtgcgctttgatagtgacgtcggcgagtttcgagcagtgaccgaactcgggcgtcctgacgaggaatactggaacagtcagaaggacatcctagaggaagaacgggctgtgcccgacagaatgtgtcgccacaactatgaacttggcggacccatgaccttgcaaagacgagtccagccgagggtcaatgtttcccccagcaagaaaggtccattacagcatcataacctgctggtgtgccacgtgactgacttttatcccggaagcatccaagtccggtggttcttaaatggtcaggaagaaaccgcgggtgtcgtcagtacgaacctgatcaggaacggcgattggacctttcagattctggtcatgttggagatgaccccacaacagggcgatgtctatacctgccaggttgagcacactagcctggactctccggtgacagttgaatggaaggcacaaagtgatagtgccagatccaagaccttgacaggtgcagggggtttcgttctcggcctgatcatatgcggggtgggtatcttcatgcacagaagatccaaaaaaggagagaaagcctgccggttcaacgaagatctgcataagcaggggtcttag

SEQ ID NO: 229318 - DNA, 708 bp, synthetic construct
  misc_feature 1..708: note = Description of Artificial Sequence: Synthetic coding sequence
  source 1..708: mol_type = other DNA
taaaactatctgttccaggggaggcaggaatgctacgctttcaatggaactcagagattcctggagaggtatatttataatagggaggagtttgctcgctttgactctgatgtgggggagtttagagcggtgactgagctcggcagacccgctgcggaatactggaacagccaaaaggatatactggaggagaaaagagcggttcccgatcgaatgtgcaggcataattacgaattaggcggacccatgactctccagcgcagagtgcaacccagggtgaatgtcagccctagcaagaaggggccactacagcaccacaatctgctagtttgccatgtgacagacttctaccccggtagcattcaggttcgctggttccttaatggtcaggaagagacagcaggcgtcgtgtccacaaacctgataagaaacggcgattggacctttcagatcctggtcatgcttgagatgacaccccagcaaggcgacgtttatacttgtcaggtggagcacacttcactagattccccagtgaccgtcgagtggaaggctcaatccgacagtgcacgcagtaagaccctgacgggagcgggtgggttcgtactggggctaatcatttgcggcgtgggaatcttcatgcacagacgtagcaagaaaggagagaaagcgtgtaggtttaacgaagatcttcacaaacagggctcatag

SEQ ID NO: 229319 - DNA, 687 bp, synthetic construct
  misc_feature 1..687: note = Description of Artificial Sequence: Synthetic coding sequence
  source 1..687: mol_type = other DNA
atgatggttctgcaggtctccgctgcacccagaactgtcgccctgaccgctctgctaatggtgctcctgacaagcgtggtgcaggggagggctactcctgaaaactacctgttccaggggagacaggaatgttacgcatttaatggtacacagagatttctcgagagatacatctataacagggaagagtttgtccgatttgatagcgacgttggcgaattccgcgcagtgacggagctgggacgacccgatgaggaatactggaacagccagaaggatatcctggaagaggagagggctgtgccggaccgcatgtgtcggcacaattacgagctgggcggacccatgaccctgcagagacggggaagcattcaggtccggtggttcctcaacgggcaggaggaaacggctggcgttgtcagcacaaacttaattcgaaatggagattggactttccagatcctggtgatgctagagatgaccccacagcagggcgacgtttatacttgccaggtagagcatacgtctttagattctcctgttacagtcgaatggaaggcccagagtgactctgcaagaagtaagacgcttacaggggctggcggatttgtgttgggacttataatttgcggcgtcggcatctttatgcaccgtcgatccaagaaggtgcaaagaggctccgcatag

SEQ ID NO: 229320 - DNA, 690 bp, synthetic construct
  misc_feature 1..690: note = Description of Artificial Sequence: Synthetic coding sequence
  source 1..690: mol_type = other DNA
aaacaggcctggcgtggctctgcgacaaggctgggccctcaaaactccctgcgtcaggaatgttatgcgttcaatggaacccagcgctttttggagcggtatatttataacagagaagaatttgtaaggtttgatagtgatgttggcgagtttcgtgctgtgaccgaattgggtcgtcctgacgaagattattggaactcgcagaaagacctcctcgaggaaaaacgtgctgtgccggacagggtttgcaggcataattacgaactggatgaagcagttaccctgcagcgcagggtgcagcctaaggtcaacgttagcccctctaagaagggacccttgcagcatcataatctgctcgtgtgtcatgtcacagatttctacccaggtagtatccaggtgcgatggttcctgaatgggcaggaagagaccgcaggggtggtgtctaccaaccttatcagaaacggcgattggaccttccagatcctggttatgctggagatgaccccacagcagggggacgtctatatctgccaggtggagcacacgtcactggattctccagtgacagtagaatggaaagctcaaagcgactccgcaaggtctaagactcttaccggcgcaggcggtttcgtgctggggctgataatctgcggcgtgggcatctttatgcaccggagatcaaaaaaatag

SEQ ID NO: 229321 - DNA, 777 bp, synthetic construct
  misc_feature 1..777: note = Description of Artificial Sequence: Synthetic coding sequence
  source 1..777: mol_type = other DNA
atgatggtcctgcaggtgagtgccgctccgagaaccgtggcactcacggctctgctgatggtgctgctcactagcgtggtgcagggcagagccacacccgagaattaccttttccagggtcgacaagagtgctatgcatttaatgggacgcagcggttccttgagaggtatatttataatcgggaggaatttgccagatttgactccgatgtcggcgaattcagggcagtgaccgagctgggcagaccagcagcggagtattggaattcacagaaggacatcctggaggagaaaagggccgtgcccgacaggatgtgccgccacaactacgagcttgggggtccaatgacattacagcggagagtccagccgagggtgaatgtgtcacccagcaagaaggggccattgcaacaccataacctgcttgtgtgtcatgtgacggacttctatcccggatccatccaggtaaggtggtttctgaacggtcaggaagaaaccgccggtgtagtgtctacgaatctgatccgaaatggtgattggaccttccagatcctggtgatgctcgaaatgacgcctcagcaaggagatgtgtacacctgtcaggtcgagcatacctcccttgatagtcctgtgaccgttgagtggaaagcgcagtcagatagtgctcgtagcaagactctgacgggcgctggcggatttgtattgggactgataatctgcggcgttggaatctttatgcatcggagatccaagaaagtgcaaagggggagcgcctag

SEQ ID NO: 229322 - DNA, 708 bp, synthetic construct
  misc_feature 1..708: note = Description of Artificial Sequence: Synthetic coding sequence
  source 1..708: mol_type = other DNA
tagaattatctcttccaaggcagacaagagtgctacgctttcaacggcacccaacgttttctcgagagatacatatacaaccgcgaggagttcgttaggttcgatagcgacgttggagaattccgcgctgtcaccgagctggggagacccgatgaagaatattggaattctcagaaggatatactagaggaaaaacgggctgtgcccgacagaatgtgtcgtcataattacgaactgggcggacccatgacgttacagcggagagtgcagcctagagttaatgtgagcccttcaaaaaaaggcccactgcaacatcacaatttgttagtgtgccatgtcaccgatttctatcctggatcaatccaggtgagatggttccttaacggtcaggaggagacagcaggagtagtgtccacaaacctgattagaaatggcgattggaccttccagattctcgtgatgctggagatgacgcctcagcagggtgacgtgtacacatgccaggtagagcatacgagtatggatagcccagtgacagtcgagtggaaggcccaatctgattcggcccgaagcaagaccttgacaggggcagggggattcgttctggggctgattatatgtggtgtgggaatctttatgcacaggagaagtaagaagggagaaaaagcgtgtagattcaatgaggacctgcacaagcaggggagctag

SEQ ID NO: 229323 - DNA, 690 bp, synthetic construct
  misc_feature 1..690: note = Description of Artificial Sequence: Synthetic coding sequence
  source 1..690: mol_type = other DNA
aaacaggcctggcgcggatccgctacccggttgggacctcagaattctggacgccaggaatgttacgcttttaacggtacacagcgattcctggaacgatatatctacaacagggaggagtttgcacggtttgacagtgacgtgggcgagttccgggcagtgactgaattaggtcggcctgccgctgaatattggaacagccagaaggatatcctggaagaaaagagggccgttcctgacaggatgtgtaggcacaactatgaactcgggggtccaatgacattgcaaaggagagtgcagccgagggtgaacgtctccccgtccaaaaagggccctttgcaacatcataatttacttgtttgtcacgtaacggacttctatccaggatccattcaggtgcgatggtttttaaatgggcaagaagaaacagctggtgtggtatcaactaatttaattcgcaacggcgattggactttccagattttggtaatgctggaaatgactcctcagcagggagacgtctacacatgtcaggttgaacatacatctctggatagccccgtaacagtagaatggaaagcccagtccgactcagcccgaagtaagacactgacaggggctggaggattcgtgctgggattgatcatttgtggggtagggatcttcatgcatagacggagtaagaaatag

SEQ ID NO: 229324 - DNA, 708 bp, synthetic construct
  misc_feature 1..708: note = Description of Artificial Sequence: Synthetic coding sequence
  source 1..708: mol_type = other DNA
tagaactatctgttccagggtaggcaggagtgctatgcttttaatggcacgcagcggttcctcgagcgctacatctacaatcgggaggagttcgccaggttcgattctgacgtgggagaatttagagcggtgaccgagctgggcaggccagcagcagaatactggaatagccagaaagacatccttgaggaaaagagagctgtgcccgataggatgtgtcgacataattatgagctgggtggaccgatgactctccagaggcgagtccagcctcgcgttaacgtgagtcccagcaagaaaggccctctccagcatcataatctgctggtttgccatgttactgatttctaccccggaagcatccaagtccgatggttcctgaatggacaggaagagacagcgggtgtcgtgtccaccaacctgatccgcaacggggattggactttccagatactggtgatgctggagatgacaccccagcagggggacgtgtacacatgtcaggtggagcatacatcattagattcccccgtaactgtggagtggaaagcccagtccgattcagcacgcagtaagaccttaactggcgctggtgggttcgtcctggggctgatcatttgtggagtcggcatctttatgcataggcggtctaaaaaaggggaaaaggcctgtaggttcaatgaagatcttcacaagcagggctcctag

SEQ ID NO: 229325 - DNA, 372 bp, synthetic construct
  misc_feature 1..372: note = Description of Artificial Sequence: Synthetic coding sequence
  source 1..372: mol_type = other DNA
atgatggtcctgcaggtgtccgccgcacccaggaccgtagccctgacagctcttctcatggttctgctcacgtctgtagttcagggtagagccacgcccgagaattacctgtttcaggggaggcaggagtgctatgccttcaatggaacacaacgattcctcgagaggtatatctacaatcgcgaggaattcgccagattcgactcagacgtgggggaattcagagcagttactgaactgggcagacccgctgcggagtattggaactcacagaaggatatactcgaagagaagagagcagtgcccgatcgtatgtgcaggcataattacgagttgggtggacctatgaccctccaacgcagaggggagtag

SEQ ID NO: 229326 - DNA, 249 bp, synthetic construct
  misc_feature 1..249: note = Description of Artificial Sequence: Synthetic coding sequence
  source 1..249: mol_type = other DNA
atgactccccagcagggggatgtgtacacatgtcaggtggaacatacttccctcgacagcccggtcaccgttgagtggaaggcgcagagtgatagtgctcgatccaagacacttactggagcgggaggcagggcaggggctcaccacctctggagcgggcacctccatgcccaggaagagcaggagtccagcacccgaatctgcatcaaccgggtgccagagttaaccgagaaaactatcgtgccgtag

SEQ ID NO: 229327 - DNA, 249 bp, synthetic construct
  misc_feature 1..249: note = Description of Artificial Sequence: Synthetic coding sequence
  source 1..249: mol_type = other DNA
atgacgccccagcagggtgatgtgtacacatgtcaggtcgagcatactagcctggacagccctgtgaccgtcgaatggaaagcccagtcagatagtgctcgttccaaaacccttaccggggcagggggtcgcgcaggggctcaccacttatggagcggccacctccacgcccaggaagagcaggaatcgtccacacggatttgcattaacagagtgcccgaacttacggagaagaccatcgtaccttag

SEQ ID NO: 229328 - DNA, 372 bp, synthetic construct
  misc_feature 1..372: note = Description of Artificial Sequence: Synthetic coding sequence
  source 1..372: mol_type = other DNA
atgatggtgctgcaggtatcagccgctcctagaacagtggcgttgaccgccttgctgatggtgctcttgaccagtgttgtgcagggtagggctaccccggagaattatctgtttcaggggcgacaggagtgctatgccttcaacggcacccagagattcttggagcgatacatctataatcgcgaggagttagtgcggttcgactcagatgtgggagagttcagagccgtgacagagctcggtcgccctgaggcagagtattggaactcacagaaagacattctagaagaggagagagctgtgcccgatagaatgtgtcggcacaattatgaactgggcggaccgatgaccctgcagcgccgaggcgagtag

SEQ ID NO: 229329 - DNA, 372 bp, synthetic construct
  misc_feature 1..372: note = Description of Artificial Sequence: Synthetic coding sequence
  source 1..372: mol_type = other DNA
atgatggtactgcaggtatctgccgcaccaaggacagttgctctgaccgctttactcatggtgctgttgacttccgtcgttcaggggcgagcgacacctgagaactatctatttcagggtcgtcaagaatgttatgcgttcaacggaacccagagatttctagagagatacatctacaaccgtgaagaatttgtccggttcgattctgatgtcggtgagttcagagcggtgacagagctgggaaggcccgacgaggagtattggaacagtcagaaggacatcctggaggaaaaaagggccgtccctgatagaatgtgccgccacaactatgaactcggtggccctatgaccctccaacggaggggtgagtag

SEQ ID NO: 229330 - DNA, 372 bp, synthetic construct
  misc_feature 1..372: note = Description of Artificial Sequence: Synthetic coding sequence
  source 1..372: mol_type = other DNA
atgatggtactccaggtgagcgcagcccctagaaccgtggccctgacagcactcctgatggtgctgttaaccagcgttgtgcaaggccgagccaccccagagaactacctgtttcagggtaggcaagagtgttatgctttcaatggtacccaacgtttcctggaaaggtatatctataacagagaggagtttgtcagattcgattcggacgtaggagagttccgggcagtgaccgaactgggccgtccagatgaggaatattggaatagccagaaagatatcttagaggaggaacgcgcagtcccagacaggatgtgtcggcacaattatgaattaggtgggcctatgacccttcagaggcggggagagtag

SEQ ID NO: 229331 - DNA, 750 bp, synthetic construct
  misc_feature 1..750: note = Description of Artificial Sequence: Synthetic coding sequence
  source 1..750: mol_type = other DNA
atggtgctcctgacaagcgttgtccagggcagagccacccctgagaactatgtatatcaactccggcaggaatgctatgcttttaacggaacacaacggttcctcgagaggtatatttacaacagagaggaattcgttagattcgactctgatgtcggggaatttagggccgtgactgaattaggacgccctgatgaagattattggaactcccaaaaggatctgctggaagagaaacgggcagtccccgaccgtgtgtgtcgccataattacgaacttgacgaggcggtaacgctccagagacgggtccagcccaaggtaaacgtctcccccagcaaaaaaggccctctgcaacaccacaacctgctggtctgtcatgtgacagatttctaccccggttcaattcaagtaaggtggttcctgaacgggcaagaagagactgcaggcgtggtcagcaccaatctgatcagaaacggggactggacgttccaaattctggtgatgctggaaatgaccccccaacagggggacgtatacatttgccaagtagaacacaccagtttggactccccagtgaccgtagaatggaaagcacagagcgattccgccaggagtaagacgctcacaggagcagggggattcgtgcttggcctaatcatctgcggcgttggtatatttatgcaccggaggagcaagaaaggggaaaaggcctgcaagtttaatgaggaccttcacaagcagggttcctag

SEQ ID NO: 229332 - DNA, 249 bp, synthetic construct
  misc_feature 1..249: note = Description of Artificial Sequence: Synthetic coding sequence
  source 1..249: mol_type = other DNA
atgacaccacaacagggtgatgtgtacacttgccaggtagagcatacctctctggatagccccgtgaccgtcgagtggaaggcccagtcagactcggctcgctcaaagaccctgactggagcgggagggagggcgggagctcaccacctctggagcggacaccttcatgcgcaggaggaacaggaaagttctactcgcatttgtattaaccgggtcccagaactcacagagaaaaccattgtgccttag

SEQ ID NO: 229333 - DNA, 372 bp, synthetic construct
  misc_feature 1..372: note = Description of Artificial Sequence: Synthetic coding sequence
  source 1..372: mol_type = other DNA
atgatggtcctccaggtctctgctgcacctcgcacagttgccctgacagctctgctcatggtgttgttgaccagtgtagtgcaaggaagggctactccagagaattacttatttcagggacgccaagagtgttacgctttcaacggcacacaaagattcttggagagatacatctataacagagaggagttcgccagattcgacagcgatgtgggggagttccgggcagtcaccgagcttggcaggcctgccgctgaatattggaatagccagaaagacatcctggaggagaaaagagcggtgccggacagaatgtgtcgccataactacgagctgggcggaccaatgacattgcaacgccgaggagaatag

SEQ ID NO: 229334 - DNA, 372 bp, synthetic construct
  misc_feature 1..372: note = Description of Artificial Sequence: Synthetic coding sequence
  source 1..372: mol_type = other DNA
atgatggttttgcaagtgtccgctgctccacgcaccgtagccctcactgctctgctgatggtgctgcttacgagcgtggtgcagggtagggccacgcctgaaaactacctgtttcaagggagacaggaatgctatgcttttaacggaactcagcggtttctcgagagatatatctataaccgagaagaattcgccagatttgattctgatgtgggagagttccgcgctgtgactgagttggggagaccagccgctgagtattggaatagccagaaagacatactggaagagaaaagagctgtgcccgaccggatgtgcagacacaactacgagcttgggggacctatgaccctccagagacgaggtgagtag

SEQ ID NO: 229335 - DNA, 198 bp, synthetic construct
  misc_feature 1..198: note = Description of Artificial Sequence: Synthetic coding sequence
  source 1..198: mol_type = other DNA
atggactcgccagtcactgtggagtggaaggcacagagtgattccgcccgtagtaagacactcactggggctgggggacgggcaggtgcacaccatttatggtcaggtcacctgcatgcccaagaagaacaggagtcatccacgagaatatgcattaacagggtcccggaactgacggaaaagaccatcgttccgtag

SEQ ID NO: 229336 - DNA, 381 bp, synthetic construct
  misc_feature 1..381: note = Description of Artificial Sequence: Synthetic coding sequence
  source 1..381: mol_type = other DNA
atgatggttctgcaagtgtccgcagctcccagaactgtcgcactgactgcgctgctgatggtgctactgacttccgtcgtacaaggcagggcgaccccagagaattacgtctaccaactgaggcaggaatgttacgctttcaatgggactcagcgtttccttgagcggtatatttataacagagaagaatttgtacgatttgactctgacgtaggggaattcagggctgttaccgagctggggcgacccgacgaagattactggaacagccagaaggatctgttggaggagaaacgagccgtgcccgacagagtttgccggcataactacgagctggacgaggcagtaacactccagcgcagagagcgcggaaagaaatag

SEQ ID NO: 229337 - DNA, 249 bp, synthetic construct
  misc_feature 1..249: note = Description of Artificial Sequence: Synthetic coding sequence
  source 1..249: mol_type = other DNA
atgaccccgcagcagggggatgtatatatttgtcaagtcgaacacacttcattggactctcccgtcacagtggagtggaaggcccagagcgattcagccaggagtaaaacactgaccggcgcagggggtcgggcaggcgctcaccatctctggagcggccatcttcatgctcaggaggagcaagagtccagtactagaatctgcatcaatcgagtgccagatctgactgaaaagactaatgtcccgtag

SEQ ID NO: 229338 - DNA, 249 bp, synthetic construct
  misc_feature 1..249: note = Description of Artificial Sequence: Synthetic coding sequence
  source 1..249: mol_type = other DNA
atgactccacaacaaggagatgtctatacctgtcaggttgaacacacctcgctggacagccctgttacagtggaatggaaggcccaaagcgacagcgccaggagtaagactctgaccggagcaggaggaagagccggtgcccaccacttgtggtcaggccatctgcacgcacaggaagagcaggagagttccacaagaatttgtattaaccgcgtgcctgagctgaccgagaaaaccattgtgccatag

SEQ ID NO: 229339 - DNA, 372 bp, synthetic construct
  misc_feature 1..372: note = Description of Artificial Sequence: Synthetic coding sequence
  source 1..372: mol_type = other DNA
atgatggttctgcaagtgagcgcagctccaagaacggtcgccctaactgccctattaatggtgctcctcacttcggtcgtacagggcagggctacaccagaaaattatttgttccaggggagacaggaatgctacgcttttaatgggacacagcgatttctggaaaggtacatctataatcgggaagagttcgtgcgctttgactccgatgtgggagagttcagggcagttacagagctgggtcggccagacgaagaatattggaattcccaaaaggacatactagaggagaagcgtgcagtccccgacagaatgtgccgacacaattacgagctgggtgggccaatgaccttgcaaagacgaggagagtag

SEQ ID NO: 229340 - DNA, 198 bp, synthetic construct
  misc_feature 1..198: note = Description of Artificial Sequence: Synthetic coding sequence
  source 1..198: mol_type = other DNA
atggactcaccagttacagtggagtggaaggcacagagcgatagtgcacgcagcaagacacttacgggggcaggtggaagagcaggcgcacaccacctttggtccggccaccttcacgcacaggaagaacaagaaagttctactcgaatttgtatcaatagggtgcctgaactgaccgagaagacaatcgtgccatag

SEQ ID NO: 229341 - DNA, 768 bp, synthetic construct
  misc_feature 1..768: note = Description of Artificial Sequence: Synthetic coding sequence
  source 1..768: mol_type = other DNA
atgatcttgaacaaggccttgctgctgggcgcactcgccctcactaccgtgatgtctccgtgcggcggagaagacatcgttgccgaccacgtcgcctcgtgtggtgtaaatctttatcagttctacggccctagtgggcagtatacccacgagttcgacggcgatgaacaattctacgtggaccttgagcggaaggagacagcatggcgatggcctgagttctccaagttcgggggattcgatccacagggagccttacggaacatggcagtggccaaacacaaccttaacatcatgatcaaacgctataatagtacagccgcaactaacgaggtgcccgaagtgaccgtgttttcgaaatcacctgtgacactgggccagcccaatactctgatctgtctggtggacaacatttttccccctgtggtgaatattacctggttaagtaacggccaaagcgtcacagagggcgtatctgaaacttcttttctgagtaaaagtgatcatagcttctttaaaataagctacctaacctttcttccgagtgcagacgagatatacgattgcaaagtagaacattgggggctcgatcagcctctgttgaaacattgggaacctgaaattccagctccaatgtctgagctgacagaaactgtggtgtgcgccttgggtctgtccgtcggcttaatgggcattgtggtagggactgtcttcattatacagggcctcaggagtgtgggcgcatctcggcaccagggaccactctag

SEQ ID NO: 229342 - DNA, 768 bp, synthetic construct
  misc_feature 1..768: note = Description of Artificial Sequence: Synthetic coding sequence
  source 1..768: mol_type = other DNA
atgatcctcaataaggccctgctgctgggcgcactggcactgactacagtgatgtcaccttgcggcggtgaggacatcgtggccgatcacgtggcaagttgtggcgtgaacctgtatcagttctatggaccgtcgggccagtatacccatgaatttgacggggacgagcagttctacgtggacttggaaagaaaagagacggcctggcggtggccggaattttctaagttcggcggattcgacccccagggggctcttaggaacatggcagttgcgaagcacaacctgaacattatgattaagcggtataatagcaccgctgcgacaaatgaagtcccggaggtgacagtcttctccaagtcccctgtgacgttagggcaacccaacacccttatatgtctggtggataatatttttccaccagttgtgaacattacatggctctccaacgggcagagcgtgacagagggagttagcgaaaccagtttcttaagcaaatcagaccacagtttttttaaaatctcatatctgacctttctcccttcagccgacgaaatttatgactgtaaggtggaacactggggacttgaccagcccctcctgaagcactgggagcctgaaatacccgcaccaatgtccgagctgactgagaccgttgtgtgtgccctgggcttgtctgtgggcctgatgggtatcgtagttggaacagtcttcattattcagggcttgcgctccgtgggagccagccggcatcagggtcccctctag

SEQ ID NO: 229343 - DNA, 765 bp, synthetic construct
  misc_feature 1..765: note = Description of Artificial Sequence: Synthetic coding sequence
  source 1..765: mol_type = other DNA
atgatccttaacaaggctctcatgctgggagccctggccctgacaaccgttatgtccccatgcggcggtgaagatattgtcgcagatcatgtggctagttacggggtgaatctttatcagagttatggtcctagcggtcagtatacccatgagtttgatggggacgagcagttttatgtggacctcgggcgaaaggaaactgtttggtgcctcccggttttgcggcagtttagatttgacccgcaatttgcactgaccaacatcgccgtgttgaagcacaatctcaatagtttaatcaagaggtccaactccacagccgctaccaacgaagtgcccgaagtgacagtgttttctaaatctccagtaaccctggggcagcccaatatcttaatatgtctagtggataacatctttccgccagtcgtcaatataacttggcttagtaacggccactccgtgacagaaggcgtgtccgaaaccagcttcttgagcaaatcagaccactccttcttcaagatcagctacctgaccctgctgcccagtgctgaagaaagttatgactgtaaggtagaacactggggacttgacaagcccctgctgaagcactgggagccggagattcctgccccaatgtcagaactgactgagactgtggtctgcgcccttgggctctcggtcggactggtaggaatcgtggttggtacagtctttattatccgcggactccgctctgtgggagcttctaggcatcagggcccactctag

SEQ ID NO: 229344 - DNA, 768 bp, synthetic construct
  misc_feature 1..768: note = Description of Artificial Sequence: Synthetic coding sequence
  source 1..768: mol_type = other DNA
atgatcttgaataaggcgctcctcctcggtgcgctggcactcacgacagttatgtctccatgcggtggcgaagatatagttgccgaccatgtggcatcctgtggtgtcaatctctatcagttttatggcccaagcgggcaatatacacatgagtttgacggcgacgaacagttttacgtcgacctagaacgcaaggagaccgcttggagatggcctgaattctcaaagtttggtggctttgaccctcaaggcgctctgaggaacatggcagttgccaaacataatctgaatatcatgatcaaacgttacaacagtacggccgctacaaatgaggtgccagaggtgaccgtctttagcaagtcacctgttactttgggacagccaaatacattaatttgcctggtggataacatctttccacctgtcgtgaatatcacctggctctcaaacggacaatcggtaaccgaaggagtctcagagacctcctttctttcaaagtcagatcactctttttttaaaatttcatacttgaccttcctgccctccgctgatgagatttacgactgcaaagtggaacactggggcctcgatcagcccctgctcaaacactgggaaccggaaattcctgctcctatgtcagagttaacggaaaccgttgtgtgtgccctggggcttagtgtggggttgatgggcatcgtggtgggaaccgtgttcatcatacagggcctgagaagcgttggagcctcccggcaccaagggcctctttag

SEQ ID NO: 229345 - DNA, 768 bp, synthetic construct
  misc_feature 1..768: note = Description of Artificial Sequence: Synthetic coding sequence
  source 1..768: mol_type = other DNA
atgattctaaacaaagcgcttttgcttggcgcattggccctcaccacggtaatgtccccatgcgggggtgaggatattgtggccgaccacgtagctagctgcggagtcaatctgtaccagttctacggccctagcggccagtatacgcacgaattcgatggcgatgaacagttctatgttgacctggagcgcaaggaaaccgcttggagatggcccgaattctcaaagtttgggggattcgaccctcagggtgcacttaggaacatggccgtcgctaagcacaatctgaatataatgattaaacggtataattccactgccgcaactaacgaagtcccagaggtcaccgtgttttccaagagtcctgtgactttgggacaacccaacacactgatctgtctcgtggacaatatctttccgccagtggtgaacattacatggctgtccaacggccagtcagtcaccgagggggtcagtgagacgtccttcctgtccaaatctgatcactctttcttcaaaattagctatctcacattcctgccttctgccgatgaaatttatgactgcaaagtcgaacattggggactggaccaaccactgctgaagcactgggagcccgagatacccgctcccatgtcggaactcacggagacagttgtgtgcgctctcggactatctgtcggtctgatgggtatcgtggttggcaccgtgttcattattcagggcttacgatcagtgggcgcatccagacaccagggccctctgtag

SEQ ID NO: 229346 - DNA, 765 bp, synthetic construct
  misc_feature 1..765: note = Description of Artificial Sequence: Synthetic coding sequence
  source 1..765: mol_type = other DNA
atgattctcaacaaagccttaatgttgggagcattggctctaaccacggtcatgagtccctgtgggggtgaggacatagttgctgaccacgtggcaagctacggcgtgaatttgtatcagtcatatgggccttcaggacaatacacgcatgagttcgatggagacgaacagttctatgtcgacttgggtagaaaagaaacagtgtggtgcctgcccgtgctgagacagtttcggttcgatccccagtttgcactcactaatattgccgtgctcaaacacaacttgaactctttgataaaacgtagcaacagtaccgcggcaacaaatgaggtacccgaggtgaccgtcttctctaaaagtcctgtaaccctgggacaacctaatattctgatctgcctggtagataacattttcccacccgtcgttaacatcacttggttgtccaacggccattctgtgacagagggcgtgtccgaaacctcattcctttcaaaatccgaccactccttcttcaagatctcatatctcactctcctcccctctgcagaggagagctatgattgcaaggtggagcattgggggctggacaagccactgcttaagcactgggagccagaaattccagctcccatgtctgagctcacagaaactgtggtctgcgcattaggtctgtcagtgggccttgttggaattgtggtcggtaccgtgtttatcatacgcggtctgcgatctgtaggggctagtagacatcagggaccactgtag

SEQ ID NO: 229347 - DNA, 765 bp, synthetic construct
  misc_feature 1..765: note = Description of Artificial Sequence: Synthetic coding sequence
  source 1..765: mol_type = other DNA
atgatactgaataaggccctcatgcttggagcactcgctttgacaactgtgatgtcaccctgcggaggcgaagacattgtggcagaccacgtggctagttatggagtgaacttgtatcagtcatatggcccttcgggacagtatactcatgagttcgatggcgatgagcagttctatgttgatctggggagaaaggagactgtgtggtgcctgcccgtgctcaggcagttccgtttcgatcctcaattcgctctcactaatattgccgtcctgaaacataacttgaacagtctcatcaagaggagtaattcaaccgccgctaccaatgaggtaccagaggtgactgtgttcagcaaaagcccggtgaccttgggccagcccaacatcctgatatgtcttgtggacaatatcttcccccctgtggtgaacatcacctggctctctaatggtcatagtgttacagagggggtgtctgagacatcgtttttgagcaagtcagatcattccttcttcaagatatcctatctgacactcctacctagtgccgaagaaagttacgattgtaaagtggagcattggggattggacaagccactcctgaaacattgggagcctgagatccccgctcccatgtccgagttaactgagacagtggtatgcgcactagggctgtcagtgggtttagtcggtattgtagtcggcacagtgttcatcattcgtggtctgagatccgtgggggctagtcggcaccagggacccttgtag

SEQ ID NO: 229348 - DNA, 75 bp, synthetic construct
  misc_feature 1..75: note = Description of Artificial Sequence: Synthetic coding sequence
  source 1..75: mol_type = other DNA
atgattttaaataaggcgctgatgctcggcgcactggcactcactacagtgatgtccccatgtggcggagaatag

SEQ ID NO: 229349 - DNA, 765 bp, synthetic construct
  misc_feature 1..765: note = Description of Artificial Sequence: Synthetic coding sequence
  source 1..765: mol_type = other DNA
atgattctaaacaaggctctaatgttaggcgcattggcactgactaccgttatgtctccctgcggtggcgaggatattgtagcagatcacgtcgctagctacggagtcaatttgtaccagagctacggcccaagcggacagttcacgcatgaatttgacggggacgaggagttctacgtggacctggagcgaaaggaaactgtgtggaagctccccctattccacagactcagatttgacccccagtttgcgctaactaatatcgcagtcctcaaacacaatctgaacatcctcatcaaacgcagtaacagcacagccgctacgaacgaagtcccagaggtcacagtctttagtaaatcacctgtcaccctcggacagcccaacaccttgatttgtttggtggacaatatcttcccccctgtcgtgaacataacttggctgagtaacgggcatagtgtgacggaaggagtgagtgaaacgtcttttctgagcaaaagcgaccacagctttttcaagatttcgtatctaacctttttgcctagtgctgacgagatttatgattgcaaggtggagcactggggtctggacgagcccctcctgaaacattgggaaccagagatccccgcacccatgtctgagctcaccgaaactgtggtctgcgcgttgggcttgtctgtcggactcgtggggattgtggttggcaccgtgctaatcatcagaggcctgcggtccgtcggagcgtctcggcatcaaggtcctctgtag

SEQ ID NO: 229350 - DNA, 768 bp, synthetic construct
  misc_feature 1..768: note = Description of Artificial Sequence: Synthetic coding sequence
  source 1..768: mol_type = other DNA
atgatcctgaacaaggctctcatgctgggggctttggcccttaccacggtcatgagtccctgtggaggcgaggacatcgttgcagatcacgtggcctcgtatggagtgaacctataccagtcctacggaccatctggacagtatagtcatgaattcgatggcgatgaggaattctacgtcgacttagagcgcaaagagaccgtgtggcagctgcccctattcaggcgatttagacgctttgatcctcagtttgcattgaccaacatcgcagtgctgaagcacaacctcaacatcgtgatcaagaggtccaacagtaccgctgctactaatgaggtgcccgaagttactgtgttcagcaagagtccagtcactctgggccagcctaacaccttgatctgcctggtggacaatatctttcccccagttgtgaatataacatggttaagtaacgggcactctgtgaccgaaggcgtttccgagaccagctttttatccaaatccgaccactccttcttcaagatatcctacctcactttccttccttctgctgatgaaatctacgattgcaaagtggagcattgggggcttgacgaacctttactgaaacactgggaacccgaaatccccacaccgatgtcagagttgaccgaaaccgtggtatgcgcgttaggcctgtctgtcgggcttgtgggtatcgtggttggcaccgtgttgataattagaggattacgaagtgtgggggcaagcaggcaccagggtcctctctag

SEQ ID NO: 229351 - DNA, 768 bp, synthetic construct
  misc_feature 1..768: note = Description of Artificial Sequence: Synthetic coding sequence
  source 1..768: mol_type = other DNA
atgattctgaacaaggcgcttatgctgggcgctctagccctaaccaccgtaatgagcccctgtgggggagaggacatcgtcgcagaccacgtcgcctcttacggggtgaatctgtatcagtcttatgggccttccggccagtactctcacgaatttgacggagatgaggaattctatgtggatttggaacgcaaggagactgtctggcaactgcctctgtttagacgatttagacggttcgacccgcagttcgccctgaccaacatcgctgtcctgaagcacaacctcaacatcgttataaagaggtctaactcgaccgcagccacgaatgaggtaccggaagtcacagtgttcagcaagtctcccgtgacactggggcagccgaataccctaatatgtttggtggataacatttttcccccagtagtgaacattacatggctgagtaatgggcactcagtgactgagggggttagcgagacatcatttctgtccaagagcgaccatagctttttcaagatatcatatctcacctttctgccgtctgacgatgaaatctatgattgtaaagtggaacattgggggctcgacgaaccacttctgaaacattgggagcctgagatcccaaccccgatgagtgaactcacggagactgtcgtatgcgcacttgggctgagtgttgggctggtgggcattgtcgtgggcacagtgcttattattaggggcctgcgcagcgtcggcgcaagtaggcaccaggggcctttgtag

SEQ ID NO: 229352 - DNA, 75 bp, synthetic construct
  misc_feature 1..75: note = Description of Artificial Sequence: Synthetic coding sequence
  source 1..75: mol_type = other DNA
atgatactgaacaaggccttgctgcttggggctttggctttgactaccgtgatgtctccctgtggtggagaatag

SEQ ID NO: 229353 - DNA, 768 bp, synthetic construct
  misc_feature 1..768: note = Description of Artificial Sequence: Synthetic coding sequence
  source 1..768: mol_type = other DNA
atgattcttaataaagcgctcatgttgggagcactggctctgacaaccgtgatgtcaccttgcggcggtgaggatattgtggctgaccatgtggctagctatggggtcaacctatatcaatcgtatggacctagcggacaatattcccatgagtttgacggtgacgaggaattttatgtggatttagagcggaaggagactgtgtggcagctgccactttttagaagattcaggaggtttgatccccagttcgccctgacgaacattgctgtgctcaagcataaccttaatatcgtgatcaaacggtctaacagcactgcggctactaacgaagtgccagaagtgaccgttttttcaaaatcgcccgtaactctgggccagcctaacaccctcatctgcctggtagataatatcttcccccctgtggtgaacattacgtggctgtcaaatggccacagcgttacggaaggtgttagtgaaacctctttcttgtccaaaagcgaccactccttctttaagatctcttatctaacatttctcccgagcgatgacgagatctatgattgtaaagtcgaacattggggactcgacgagcccctactcaaacactgggagccagagatccctactcctatgtctgagctcacggagacagtcgtgtgcgccctgggcctatctgtcggcttggtgggaatcgtcgtgggaaccgtgcttattattcggggtctccgctccgtcggcgcttcgcgtcaccaggggccactgtag

SEQ ID NO: 229354 - DNA, 765 bp, synthetic construct
  misc_feature 1..765: note = Description of Artificial Sequence: Synthetic coding sequence
  source 1..765: mol_type = other DNA
atgatcttgaataaagctcttatgctcggagcgctcgccctgaccactgtgatgtccccatgtggaggtgaagatattgtggcggaccacgtggcttcgtatggggtcaatttgtaccaatcttatggtccatcaggccagttcacacacgagtttgacggggatgaagagttttacgtggaccttgagcgtaaagaaaccgtctggaaactcccccttttccataggctaagatttgatccccagttcgcattgacaaacatagccgttttaaagcacaatttgaatattttgattaagcgcagtaattcaacagcggctacaaacgaggtaccagaggttacagtgtttagtaagtcccccgtcacccttggccagcccaacaccctcatatgcctggtcgacaacattttcccacctgtagtgaatatcacatggttgtctaacggccacagcgttacagaaggtgtctctgagacctccttcctgagcaagagtgaccatagctttttcaaaatcagctacctcacattccttccttctgcagacgaaatctacgattgtaaggtggagcactgggggctggatgaaccactgctaaaacattgggagccagaaattccagcccctatgagtgaactgaccgagactgtggtttgtgcactggggctctctgttggcctcgtaggaattgtggttggtacggtccttattatacggggactgagatcagtcggagcttcccgccaccaaggtccactttag

SEQ ID NO: 229355 - DNA, 765 bp, synthetic construct
  misc_feature 1..765: note = Description of Artificial Sequence: Synthetic coding sequence
  source 1..765: mol_type = other DNA
atgattctgaacaaggctttgatgttaggcgctctcgcccttacaactgttatgtcgccttgcgggggagaagatatcgtcgcagaccatgtggcatcctatggcgtcaatctttatcagtcgtatggtcccagtggccagttcactcacgagttcgacggagatgaggagttctacgttgacctcgagcgtaaggaaaccgtttggaaactcccattattccacaggctgaggtttgatccccagttcgcactcaccaacatcgcggtgttaaaacataatctaaacatcctcatcaaaagatctaatagcactgctgctacaaatgaagtgccggaggtgacagtgttcagcaagtcgccggtgactctcggacagcccaacacacttatctgtctggtggataatattttcccccctgtcgttaacattacctggttgtctaatggacatagcgtgacagaaggcgtctccgagacctccttcttgtctaaatcggatcactccttctttaaaatcagctacctcacattcttaccctccgctgatgagatctatgactgtaaagtggagcactgggggctcgatgagccgcttctcaagcattgggagccagagatccccgctccaatgagcgagttgaccgaaaccgttgtgtgcgctctaggcctctcagttggcttggtcgggatcgtagtgggtacagtcctgattatacggggtctgagatccgtgggagcaagcagacaccagggtccgctgtag

SEQ ID NO: 229356 - DNA, 765 bp, synthetic construct
  misc_feature 1..765: note = Description of Artificial Sequence: Synthetic coding sequence
  source 1..765: mol_type = other DNA
atgattttgaataaggctctcatgctgggggctcttgctcttacgaccgtgatgtctccttgcggcggagaggatatcgtggccgaccacgtggctagctacggggtgaacctatatcagagctacggaccctctgggcaatttacacacgagttcgacggggacgaggaattttacgtagatttggagaggaaggaaaccgtctggaagttacccctctttcaccgactgaggtttgacccgcagtttgccctgaccaatattgcagtgctgaagcacaacctgaatatcttgataaaacggtcaaattccaccgcggcaaccaacgaagtgcctgaagtgacagtgttctcaaaaagtcccgttacattgggacaaccaaatactctgatctgcctcgtggacaatatattcccacccgtagtcaacattacttggctgtctaatgggcacagcgtgaccgagggagtatcggagacatcctttctgagcaaaagcgaccacagcttttttaaaatctcgtatctgaccttcctgccgtccgcagatgagatctacgattgtaaggttgagcactggggtctagacgagcctctcctcaagcactgggagccagagattcccgctccaatgagcgagctgaccgagacggtagtgtgtgcattgggcctcagcgtggggcttgtgggtatagtcgtgggaactgtcctgattatccggggtttaaggtctgtgggagcgagccgacaccagggacctctgtag

SEQ ID NO: 229357 - DNA, 768 bp, synthetic construct
  misc_feature 1..768: note = Description of Artificial Sequence: Synthetic coding sequence
  source 1..768: mol_type = other DNA
atgattctgaataaagcactgatgctgggagcccttgctctcacgaccgtgatgagtccgtgtgggggtgaagatattgtggccgatcatgtggctagctacggggtaaacctgtaccagagctacggaccatccggccaatacagccatgagttcgatggcgatgaggagttctatgtagacttagaacgcaaagaaacggtttggcaattacccctcttcagaaggttcaggcgatttgatccacagtttgccttgaccaacatagccgtgctgaagcataacttaaacatagtgataaagagaagcaacagcaccgcagctaccaacgaggtcccagaggtgacagtgttttccaaaagtccggtcaccctaggacagcctaataccctaatctgcctggtggataacatttttccgccagtggtcaatatcacatggctctctaatggtcatagtgtgaccgagggggtgagcgaaacatcctttctctctaaaagcgaccacagctttttcaagatcagttatcttacttttctcccatctgccgacgagatttatgactgtaaggtcgagcactggggtcttgatgaaccattgctgaaacattgggagccagagattccaacccctatgtcagagttgaccgagactgtggtctgtgctctggggctgagcgtcggacttgtcggtatcgttgtcggtacagtgctaattattcgcggtttgaggagcgtgggcgcttccagacaccaaggcccattgtag

SEQ ID NO: 229358 - DNA, 75 bp, synthetic construct
  misc_feature 1..75: note = Description of Artificial Sequence: Synthetic coding sequence
  source 1..75: mol_type = other DNA
atgatcctaaacaaggcgttgatgctcggagccttagccctcactaccgtgatgagtccttgcggtggcgaatag

SEQ ID NO: 229359 - DNA, 75 bp, synthetic construct
  misc_feature 1..75: note = Description of Artificial Sequence: Synthetic coding sequence
  source 1..75: mol_type = other DNA
atgattctcaacaaggcacttatgctgggcgctcttgcattaactaccgtgatgagcccctgcgggggagagtag

SEQ ID NO: 229360 - DNA, 768 bp, synthetic construct
  misc_feature 1..768: note = Description of Artificial Sequence: Synthetic coding sequence
  source 1..768: mol_type = other DNA
atgatcttgaacaaagcattgatgttgggcgcattagcactaacgacagtgatgtctccttgcggaggggaggacatagtcgccgaccatgtcgccagctacggagtcaatttatatcagtcttacggcccatcaggacaatactcccatgagttcgacggagatgaagagttctacgtagatttggaacggaaagagaccgtatggcagctgccactgttccgcagattcaggaggtttgacccccagtttgccctgacaaacatcgcagtattaaagcacaacctcaatatcgtcatcaagaggtccaattctacagccgcaaccaacgaggtccccgaagtgaccgtgtttagcaaatcccctgtgaccctcggtcaacccaacacactgatctgcttggtggataacattttcccaccggtagtcaatattacttggctatccaatggacattccgtgacagagggtgtctcggagacatcttttctcagcaagtcggatcattctttctttaagatctcatatctgacctttcttccgagtgatgacgagatctacgactgcaaggtcgagcactggggtctggacgaaccactgttaaaacattgggaaccagaaatcccaacaccgatgagcgagctaaccgaaactgtggtttgtgcactagggctttctgtggggctggttgggatcgtcgtgggaaccgtactgatcatccgtgggttacgatccgtgggcgcatcacggcatcaagggccactttag

SEQ ID NO: 229361 - DNA, 765 bp, synthetic construct
  misc_feature 1..765: note = Description of Artificial Sequence: Synthetic coding sequence
  source 1..765: mol_type = other DNA
atgattctcaacaaggcgctgatgttgggcgctctggcgctgaccaccgtgatgtccccttgtgggggagaggacattgtggccgatcatgtggcaagctacggggtcaacctctatcagagctacgggccttcaggtcagtttacccacgagtttgatggggacgaggagttttatgtggacttagagagaaaagagacagtctggaagctcccgctctttcataggctgaggttcgatcctcagtttgcattgactaacattgctgttctgaaacataatctaaacattctcattaagaggagtaactccaccgccgcaaccaacgaggtgcccgaggtaacagtttttagcaaaagccccgtcaccctgggccaacccaatacgttgatttgtctggtcgataatatttttcctcccgtcgtcaatattacatggctcagcaacggacacagtgtgactgagggggtgtctgagacatccttcctgagcaaatcggaccattcctttttcaagattagttaccttactttcctcccaagcgctgatgaaatttacgactgtaaagtggagcattggggattagatgagcctctgctgaaacactgggaaccagaaattcctgcccctatgtctgaactcaccgaaacagtagtgtgtgcattgggcctctccgtgggcttggttggtatcgtcgtgggcacagtcttaatcattaggggtctgcgcagcgtgggcgctagtcgacaccaaggtccactatag

SEQ ID NO: 229362 - DNA, 765 bp, synthetic construct
  misc_feature 1..765: note = Description of Artificial Sequence: Synthetic coding sequence
  source 1..765: mol_type = other DNA
atgatccttaataaagcactgatgctgggggcactggcgttgaccacagttatgagtccatgtggcggagaggatattgtggccgaccacgtcgccagctatggtgtgaacctgtaccagtcttacggcccaagcgggcagttcacacacgagttcgatggtgatgaagagttttatgtggacctggagaggaaagagaccgtgtggaaactacccctttttcataggctccgattcgatccccagtttgctctgacgaacattgccgtgctgaaacataaccttaatatactgatcaaacgtagtaactccactgccgctacaaacgaggtacctgaagtcacggtgttctccaaatcacccgttacattgggtcaacctaacacccttatctgtttggtcgacaacattttccctccagttgtgaatatcacttggctgtcaaatggacatagcgtgacggaaggagtctcagagacatcctttctcagcaaaagcgaccacagtttctttaagatcagctacctcacattccttccctctgctgacgaaatctacgattgcaaagttgagcattgggggctggacgagccacttctgaagcattgggagcctgagatccctgcaccaatgagcgaactgactgaaaccgtagtatgcgcgcttggactctccgttggactagtggggatcgtggtggggaccgttctgattatccgcggactccgaagcgttggtgcaagtcggcaccagggccctctgtag

SEQ ID NO: 229363 - DNA, 765 bp, synthetic construct
  misc_feature 1..765: note = Description of Artificial Sequence: Synthetic coding sequence
  source 1..765: mol_type = other DNA
atgattctgaacaaagcacttatgctaggcgcactagctttgacaactgtaatgtcaccgtgcggcggagaagatattgtggccgaccacgtagcttcctacggtgtgaacctttaccagtcctatggcccttccgggcagtttactcatgaattcgatggtgatgaagagttctatgtggacttggaaaggaaagaaactgtttggaaactgccgctgtttcatcggctacgattcgacccccagttcgcgctgactaacatcgccgtacttaaacacaatttgaacatcctgataaagaggtccaattccactgccgctaccaacgaagtgccagaggtcactgtcttctccaaatcccccgtgaccctgggccagcccaatactctgatctgcctggtggataacatctttcccccagtggtcaacattacttggctgagtaatgggcacagtgtgacggaaggcgtgagtgagacctccttcttaagtaaaagcgaccactctttttttaaaataagttacctgacttttctgccaagtgcagacgagatttacgactgtaaggtcgaacactggggtctggatgagcccttacttaaacactgggaacctgagatacctgctccgatgtccgagcttactgaaacggtggtgtgtgccctgggcttgtcagtcggtcttgtagggatcgtggtgggaactgtactgatcatccggggactccgcagtgtaggagcaagtaggcatcaagggcctctctag

SEQ ID NO: 229364 - DNA, 768 bp, synthetic construct
  misc_feature 1..768: note = Description of Artificial Sequence: Synthetic coding sequence
  source 1..768: mol_type = other DNA
atgatattgaacaaggcattgatgctgggcgcactagccttgacaacggtgatgtccccctgcggcggtgaggacatcgtggccgatcacgttgcctcttacggtgtgaacctctaccagtcttacggccctagtggccaatactcccatgagtttgatggggatgaagagttctacgtcgacctggaaaggaaagaaacagtatggcagctgcctctgtttcgaaggtttcggcgatttgatccccaatttgccctgaccaatatagcagtgctgaagcacaacctcaacattgtaattaaacggtcaaactccactgcggctacaaatgaagtccccgaggtgacggttttctccaaaagccctgtgacattagggcagcctaacactctgatttgtctggtcgataacattttcccacctgtcgtgaacatcacatggttgtccaacgggcacagcgtcacagaaggcgtaagcgagaccagtttcctcagtaaatccgatcacagtttcttcaaaatcagctatttaactttcctgccttcagatgatgagatctacgactgtaaggtggaacattggggcttggatgagccgctactcaagcactgggaacccgagattcccacaccaatgtcggaactgactgaaaccgtcgtgtgtgctctcggattatcagtgggattggtcggtattgtggtcgggactgttctgatcatcaggggcttacggagtgtcggggcaagccgacaccaagggcctctatag

SEQ ID NO: 229365 - DNA, 765 bp, synthetic construct
  misc_feature 1..765: note = Description of Artificial Sequence: Synthetic coding sequence
  source 1..765: mol_type = other DNA
atgatcctgaacaaagccctgatgcttggggcattggctctcactaccgtgatgtcgccatgcggcggagaagatattgtcgccgaccatgtggcttcttacggagtcaacttataccagagttatggcccttccggacagttcactcacgagtttgatggggatgaggagttttacgtcgacctcgaaaggaaagagaccgtctggaaactaccactatttcacaggttgcgatttgatccacagtttgccctcacaaacattgccgtcctgaagcacaacctgaatatactgatcaagcggtccaactcgacagctgctacaaacgaggtacccgaagtgactgtgttctctaaatctcctgtgactctcggacagcccaacacactgatctgcctcgttgacaatattttcccccctgtggtaaatattacatggctgagcaacgggcactctgtcacagagggagtctcagagacctcatttctttccaaatcggaccatagtttcttcaaaattagctatctcacctttcttccctctgcagacgagatttacgattgtaaagtggagcactggggcctggatgaaccactgctcaaacactgggagccagagatacctgcccctatgtccgagctgaccgagactgtggtgtgtgctttgggtctgagcgtgggtttagtgggaatcgtggtaggaaccgtgctcattataaggggactccgctcggtgggagctagtcggcaccagggacctctttag

SEQ ID NO: 229366 - DNA, 645 bp, synthetic construct
  misc_feature 1..645: note = Description of Artificial Sequence: Synthetic coding sequence
  source 1..645: mol_type = other DNA
atgatacttaataaagcactgctgctcggggcactggctctcaccaccgtaatgtctccctgtggaggcgaagacatcgtcgccgatcatgtggcctcttgtggagtgaatttgtaccagttttacggcccatccggtcagtatacgcatgaatttgatggtgacgaacagttttatgtcgacttggagagaaaggagaccgcctggagatggcctgagttcagcaagttcggaggattcgacccccaaggagccttgagaaatatggcagtggccaaacataatctcaatataatgattaaaagatacaatagcactgcggcaacaaacgaggtgccagaagtcactgtcttctccaagtcacccgtcacactgggccagccgaatacactgatttgtctggtggataatatattccctccagtcgtcaacatcacgtggctgtcaaatgggcagagcgtcacagagggcgtctcagaaacgagcttcctttcgaagagcgaccattcattttttaaaatttcttatctaaccttccttccatccgccgacgaaatctacgactgcaaagtggaacattggggtctggatcaacctctactcaagcactggggcgcatctccctccaccggcgcagaagagtag

SEQ ID NO: 229367 - DNA, 576 bp, synthetic construct
  misc_feature 1..576: note = Description of Artificial Sequence: Synthetic coding sequence
  source 1..576: mol_type = other DNA
atgagcccttgtgggggagaggatatcgtggcggatcacgtggcctcatatggggttaatctctatcaaagttacggcccttcgggacagtactcgcatgaatttgatggtgatgaagagttttacgttgatcttgagagaaaagagaccgtatggcagctcccattgttccggagattccgtcgtttcgatcctcaatttgcactcacaaacatagccgtgctgaaacacaatctgaatattgtcataaaaagatctaactctacagccgcaaccaatgaggttcctgaagtcactgtgtttagtaaaagccccgttaccttaggacagcccaacacacttatctgtttagtcgataacatcttcccacccgtggtcaatatcacctggctgtccaacggtcactcagtgactgagggcgtctcagagacctcatttctgtctaagagcgatcattcattctttaagatctcctacttgacattcctgccgtcagcagatgaaatttacgactgcaaggttgagcattggggtctcgacgagcccctgttgaagcattggggactcttgcactag

SEQ ID NO: 229368 - DNA, 441 bp, synthetic construct
  misc_feature 1..441: note = Description of Artificial Sequence: Synthetic coding sequence
  source 1..441: mol_type = other DNA
atgatcctgaataaggccctgatgttgggggcactggcccttacaaccgtcatgagcccttgcggaggcgaggacatcgtggcagatcatgtggcatcctatggggtcaatctgtaccagagttacggtccaagcggccagtatacgcacgaatttgatggagatgaacagttctacgtggacttggggaggaaagagaccgtctggtgtctgcctgtgcttaggcagtttcgcttcgatccccaattcgccctcacaaatatgtgtatcgccatatacagaagccgaagggtggacctcctgcacgacctagcactctttagcggcccaatctaccacataccatttctgctccagatgtttctcctgtcccctctactatgggacctgaattgctatatctgctcagagctgactaacgcttttgagctattcccttag

SEQ ID NO: 229369 - DNA, 762 bp, synthetic construct
  misc_feature 1..762: note = Description of Artificial Sequence: Synthetic coding sequence
  source 1..762: mol_type = other DNA
gggtgcctgggtaagcggatgattctgaacaaggccctcatgctgggtgccttagcccttacaaccgtgatgtccccctgtggtggagaggatattgtggcagaccacgtggccagctatggagtgaatctgtatcagtcctatggaccatccggtcagtatactcacgagttcgatggagatgaacaattctacgttgatctggggaggaaggagacagtctggtgtctgcctgtgctccggcagtttaggtttgatcctcagtttgctctcaccaatatagctgtactcaaacacaatttgaactccttaatcaagaggtctaatagcaccgccgctacaaacgaggtgccagaggtgactgtgttttcaaaatctccagttacgctcggacagcccaatatcctcatttgtttagtcgataacatctttcctcccgttgtcaatatcacttggctgtcgaacgggcactccgtgacagagggagtctcagagactagttttctgtcgaaaagtgatcactctttcttcaagatctcttatctgacgctcctgccctctgcagaggagtcgtacgattgcaaagtagagcactgggggctggacaagccactcctgaagcattggggcaaagacgaattccaccattttctgatgctgtcttgcttgtcctcctcagaactgccggcattctacagctacatcccgaagctggtgttccacacctcctgggtgagctttttcttgatcttctttttttag

SEQ ID NO: 229370 - DNA, 603 bp, synthetic construct
  misc_feature 1..603: note = Description of Artificial Sequence: Synthetic coding sequence
  source 1..603: mol_type = other DNA
atgtctccctgtggtggtgaagacatcgttgccgatcacgtggcttcatacggcgtgaatctgtaccagagctacgggccttctggccagtactcccatgaatttgatggggatgaagagttttatgtggacttagagcggaaagaaactgtatggcagcttccactgttcaggcggtttcgccgtttcgatccacagtttgcattgacaaacatcgcagtgcttaaacataatctcaacattgtgatcaaacgatccaactccaccgccgctaccaatgaagtaccagaagtcacagtgttctcgaaatcccccgtgacgctcgggcaacccaacacactcatttgcttggtggacaacatctttcctccagttgtgaacattacttggttgtctaacgggcactccgtgactgagggggtgtcggaaacctctttcctatcaaaaagtgatcacagttttttcaagatctcttatctcaccttcctgccctccgctgatgagatatacgactgcaaggtggagcactgggggctggacgagccactcttaaaacactgggagagccagagtcgcgagagcgaagagtcaacaaaatcctag

SEQ ID NO: 229371 - DNA, 582 bp, synthetic construct
  misc_feature 1..582: note = Description of Artificial Sequence: Synthetic coding sequence
  source 1..582: mol_type = other DNA
atgagcccttgtggaggcgaagacatagtggcagatcatgtcgctagctatggcgtgaatctttaccaatcctatggccctagtggccagtacactcacgaattcgatggggacgagcagttttacgtcgatctggggaggaaagaaaccgtctggtgcctcccagtgttgcgccagttccgcttcgacccacagttcgcattaaccaacatcgccgtgttgaaacacaacttgaatagcttgataaagcgaagcaatagcactgcagcgactaacgaggtgcctgaagtcacggtgttcagcaagtcccctgtgacactagggcaacctaacattctgatctgtctggtggacaacatctttcctcccgtggtgaatataacatggcttagcaacgggcactcagtgactgaaggcgtgagcgagactagcttcctgagtaaatcagatcactcattctttaagatcagctatcttactttattaccttctgccgaagagagctacgactgtaaggtagagcattggggactggataagcccttacttaagcattgggtgcacggcttcctgagcttttag

SEQ ID NO: 229372 - DNA, 606 bp, synthetic construct
  misc_feature 1..606: note = Description of Artificial Sequence: Synthetic coding sequence
  source 1..606: mol_type = other DNA
atgtcaccatgcggaggggaagacattgtcgccgatcatgtggcctcttacggggttaacctgtaccagtcttacggaccctccggacaatacagtcatgagtttgatggcgatgaagaattctatgtggatctggagaggaaggaaaccgtttggcagttacctttgttccggaggttcaggcgctttgacccacagttcgctcttacaaatatcgcagtgttgaaacataacctgaatatcgtgataaaaaggtcaaattctacagccgctacgaacgaggttcctgaggtcactgtattttccaaatcacctgtaactctaggccagccaaatacactcatctgcctggtggataacatctttcctcctgttgtaaacatcacctggttaagcaatggccatagtgtcacagagggggtatccgagacgtcgttcctgtccaagagtgatcattcatttttcaagatttcctatctgacattcctgcccagtgctgatgaaatttatgattgcaaggtggaacattggggcctggacgaacctctcctgaagcactggggaatccaggccgaggagggtcagcggaggaaaaagctgggttag

SEQ ID NO: 229373 - DNA, 258 bp, synthetic construct
  misc_feature 1..258: note = Description of Artificial Sequence: Synthetic coding sequence
  source 1..258: mol_type = other DNA
aacacattgatttgtttagtggataacatatttcctcctgtggtgaatattacctggcttagcaacggccattctgtgacagagggcgtatccgagacctccttccttagtaaatcggaccactcgttctttaagatttcctaccttacttttttgccgtctgccgatgagatctacgactgcaaggtggagcattggggactggacgagcctttactgaagcattgggggaaggacttcatgagcttcttttattag

SEQ ID NO: 229374 - DNA, 390 bp, synthetic construct
  misc_feature 1..390: note = Description of Artificial Sequence: Synthetic coding sequence
  source 1..390: mol_type = other DNA
gggtgcctcggaaagagaatgatcctcaataaggcgttaatgcttggagcgctggcccttaccaccgtgatgagcccatgtggcggtgaggatatagttgctgaccatgtggcaagctacggagttaacctctatcagagttatgggcctagcggccagtattctcatgagttcgacggcgacgaagagttttacgtggatctcgagagaaaagagaccgtgtggcagctgccactgttccgtcgttttaggcgcttcgatccacagtttgccttaacaaacattgccgtgctgaaacataacctgaacatcgtcattaagcgttcgaactctactgctgccacaaacgaagtgcccgaggtcacagtcttttcgaagtcgccagtgtag

SEQ ID NO: 229375 - DNA, 768 bp, synthetic construct
  misc_feature 1..768: note = Description of Artificial Sequence: Synthetic coding sequence
  source 1..768: mol_type = other DNA
atgattctgaacaaagccctcctcctcggagcattggccctcactgcggtgatgagtccttgcgggggtgaagacatcgtcgcagatcacgttgcgagctatggcgtcaacttttaccagagccacggaccatcaggacagtacactcatgagttcgatggcgatgaagaattttacgtcgatctcgagaccaaagagacagtgtggcaactgccaatgttcagcaagtttatcagtttcgacccgcaatctgctcttaggaatatggcagtcggcaagcacactttagagttcatgatgcgacaatctaattccacggctgcgaccaacgaagttcctgaggtgaccgttttctccaagttccccgtcacactgggacagccaaacacactcatatgtctagtcgataacatcttcccccctgttgtgaacatcacatggctgagcaatggccacagcgtgaccgagggggtcagtgagaccagcttcctctcgaagtcagaccatagctttttcaagatatcatatctaacattcttgccaagtgcagatgagatctatgattgcaaggtagagcactggggactggacgagcctctgctgaagcattgggagccggaaatccccgcacccatgtccgaattaacagagaccctcgtttgtgccctggggctgtccgttggcctgatgggtattgttgtcggcacagtctttattatccagggcctcaggtctgtggacgcaagccgccatcaaggccttctctag

SEQ ID NO: 229376 - DNA, 768 bp, synthetic construct
  misc_feature 1..768: note = Description of Artificial Sequence: Synthetic coding sequence
  source 1..768: mol_type = other DNA
atgatcctcaacaaggccctgctgctgggcgctttggccctcaccgcagtgatgagtccatgtggcggtgaagacatcgtggcagaccatgtggcctcctacggggtcaacttttatcagtcccacggaccgagtggtcagtacacacatgaattcgatggtgatgaggagttttacgtagacctggaaaccaaggagacagtttggcagctgccaatgtttagcaaattcatctcgtttgacccgcagagcgccttaagaaacatggcggtagggaaacatactctggagtttatgatgaggcagtctaactctacggctgctactaacgaggtgcccgaagttacagtgttctcaaagtttccagtcaccttgggacagccaaacactctcatttgtctggtggataatatattccccccagttgttaacattacatggttatcaaatggccatagtgtgacagagggcgtcagcgagacatccttccttagcaaatccgatcatagttttttcaaaatttcctacctgactttcttgccttccgcagacgagatttacgattgcaaggtggagcactggggcttggatgaaccacttctgaagcattgggaaccagaaattccagcacctatgtccgaactgactgagacgctcgtgtgtgcgttgggcctgagtgtgggtctgatgggtatagttgtagggactgtgttcattatacagggattaagatcggtcggagcctcacgccatcaagggctgctctag

SEQ ID NO: 229377 - DNA, 768 bp, synthetic construct
  misc_feature 1..768: note = Description of Artificial Sequence: Synthetic coding sequence
  source 1..768: mol_type = other DNA
atgattctgaacaaggccttactgctcggggctttagcgctgacagcagtaatgagtccatgtggcggagaggatatcgttgccgaccacgtggcatcctacggcgtgaacttctaccaatcacacggacctagcgggcagtacacccacgaattcgatggcgatgaggaattttatgtggacttggagacgaaggaaaccgtatggcagctgcctatgttttcaaagtttatttcttttgaccctcagtccgcccttaggaatatggccgtagggaagcataccttggagtttatgatgggacagagtaacagtacagccgcaacgaacgaagtccctgaagtgaccgtcttttcaaaattcccagtgacattggggcagccaaacactctgatctgtctggtggacaacatcttcccccctgtggtcaacattacgtggctaagcaacggacattcggtaaccgagggtgtcagcgagacgagcttcctgagtaaatccgaccatagtttctttaagattagctatctcacctttttgccctctgcagacgagatctatgactgcaaagtcgagcattggggtctagatgagccattactaaaacattgggaaccggaaatccctgccccaatgtcagagctgactgaaaccctcgtctgtgcgcttggcttgtcagtcggcctcatgggtatagttgtcgggaccgtatttatcattcagggtttgcggtcagttggcgcttctcgccatcaagggttgctgtag

SEQ ID NO: 229378 - DNA, 768 bp, synthetic construct
  misc_feature 1..768: note = Description of Artificial Sequence: Synthetic coding sequence
  source 1..768: mol_type = other DNA
atgatcctaaataaggctctgttactcggagccctggcattgaccgccgtgatgtccccgtgtggcggtgaagatatcgtggccgaccatgtcgcctcctacggtgtgaatttttaccagagccatgggcctagtggccagtacactcacgaattcgatggagacgaggagttctacgtggacctcgagacaaaggagaccgtgtggcagctgcccatgttttccaaattcatatcttttgatccacagagtgctctgcggaacatggcagttggtaagcatacacttgagtttatgatgcgacagagcaactctaccgctgctactaacgaggtcccagaggtgacagtgttttctaagtttcctgtaaccctcgggcagccgaacacactgatttgcctggtggacaacatatttcctccggtggtaaatataacctggctgtccaacgggcactctgtaaccgaaggggtcagtgagacaagctttttgtccaagagtgatcactcgtttttcaagattagctatctgaccttcctgccctccgctgatgagatctatgactgcaaggtcgaacattggggtttagatgagcctcttctaaagcattgggaacccgaaatccccgcacctatgtcggagctgaccgagacactggtgtgcgcattaggcctttctgtcggccttatgggtatcgtagttggaacagtcttcattatccagggtttacgctcagttggagctagccgccaccagggcctcctctag

SEQ ID NO: 229379 - DNA, 768 bp, synthetic construct
  misc_feature 1..768: note = Description of Artificial Sequence: Synthetic coding sequence
  source 1..768: mol_type = other DNA
atgattctgaacaaagcattgctgctcggggcactcgccttgacagctgtaatgtctccttgtggcggagaagacatcgtggccgatcatgtggcttcatatggagtgaatttctatcaatcccacggaccatcgggacagtacacccacgagtttgacggagatgaggagttttacgtggatttagaaactaaggaaacagtgtggcagttgcccatgttcagcaagtttatcagtttcgatcctcagagcgcactccggaacatggctgtaggaaaacacacactagagttcatgatgaggcaatctaattctacagctgctaccaacgaggtgccggaggtcactgtgttctcaaagtttcccgtgaccctgggacaaccaaatacccttatctgcctcgtggacaatatttttccacccgttgtcaacatcacatggctttcaaatggacacagtgtgacagagggggtgagtgaaacctcatttctaagtaagtctgatcattcttttttcaagatttcatatctaaccttcttgccctccgcagacgaaatctacgactgcaaagtagaacattggggcctcgatgaacctcttctgaaacactgggagcccgagattcctgccccaatgtcagagttaactgagacgttagtttgtgctttaggcctgtctgctggactaatgggtattgtggtgggcacagtatttattatacaggggctgcgatccgttggcgcaagccggcaccaaggactcttatag

SEQ ID NO: 229380 - DNA, 768 bp, synthetic construct
  misc_feature 1..768: note = Description of Artificial Sequence: Synthetic coding sequence
  source 1..768: mol_type = other DNA
atgattctcaacaaagccctcttgctaggagcacttgctctgacagcggtgatgtctccttgcggcggtgaagacattgttgccgatcatgtcgcaagctacggagtaaacttctatcagtcccatgggccaagtggccagtatacacatgaattcgatggtgacgaagaattctacgtcgatctggaaaccaaggagacggtctggcagctcccaatgttttctaaattcataagcttcgatcctcagagtgccctcagaaatatggctgtgggtaagcatactctggagttcatgatgcgacagtctaatagcacagctgctactaacgaggtgcctgaggtcactgtctttagcaagttccctgtgaccctgggccaacctaacaccctgatttgcctcgttgacaatattttcccaccggttgtcaatataacttggctctcaaacgggcattcagtgacagagggggtgagtgagacgtcttttctgagcaagtccgatcattccttctttaaaattagttatctgacattcctgccgagcgctgatgagatatacgactgtaaggtcgagcattggggcctggatgagcctctactgaagcattgggagcctgagatcccggctccgatgagtgagcttaccgaaactctggtctgtgcattaggtctgagcgtgggactgatgggtattgtggtggggaccgtgtttattattcagggcctgcgctccgtgggcgcttcacgacatcaaggactcctgtag

SEQ ID NO: 229381 - DNA, 768 bp, synthetic construct
  misc_feature 1..768: note = Description of Artificial Sequence: Synthetic coding sequence
  source 1..768: mol_type = other DNA
atgattcttaacaaggccctgcttctgggtgcactggccttaaccgcagtcatgtctccttgcggtggggaagacattgtcgcagaccacgttgcgtcctatggcgtgaacttttaccaaagtcacggtccttccggacaatatactcatgaattcgatggtgatgaagaattctacgttgacctcgagactaaagagaccgtatggcagttaccaatgttcagtaagttcatctcattcgacccccagagcgccctccgtaatatggccgtggggaagcataccctagagttcatgatgcgacaatctaactcgacagccgctactaacgaagtccccgaagttacagtcttttcgaagttccctgtaacactgggtcagccaaataccctgatctgtcttgtcgataacatttttccgcctgtcgtgaacataacctggctctccaatgggcatagtgtgacagaaggagtgtctgagacaagttttttgagcaagagtgaccactccttcttcaagatctcttacttgacattcctgccatccgccgatgagatctatgactgcaaagtagagcattggggattggacgaacccctgcttaaacactgggaacctgaaataccggcacctatgtcagagttaacagaaacactcgtctgtgctctagggctctctgtggggttgatgggcattgtagtgggcacagtatttatcatacagggccttcggagtgttggcgcttcccgccaccagggactcctgtag

SEQ ID NO: 229382 - DNA, 768 bp, synthetic construct
  misc_feature 1..768: note = Description of Artificial Sequence: Synthetic coding sequence
  source 1..768: mol_type = other DNA
atgattctcaataaagccctactgttgggggcattggccctcacagcagtgatgtcaccctgcggcggtgaggatatcgtcgcggatcatgttgcttcgtacggagtgaatttctatcagagccacgggccatccggccagtacacccacgagttcgacggcgatgaggagttctatgtggatctggaaacaaaggagacagtgtggcagctgcccatgttcagtaagttcatctccttcgatccacagtccgcactcaggaatatggccgtaggcaagcacactctggagtttatgatgcgtcagagtaattctacagcagccaccaacgaggtgcccgaggtgaccgtgttcagcaaatttccagtgacactggggcagcccaacacactgatctgtctggtcgacaacatttttccccctgttgtgaacattacctggctgtcaaacggtcacagcgtcactgagggcgtttctgaaacctcattcttgagcaagtctgatcatagtttctttaagatcagctatttgacttttctgccatctgccgatgagatctatgactgtaaagtagagcactgggggctggacgagccactactcaagcactgggagcctgaaatccctgctccgatgagcgaactcacagaaactctggtttgcgccttgggcctaagcgctgggctgatgggcatcgtcgtgggcactgtgtttatcatccaggggctgcgatcagttggcgctagtagacaccaaggcctcttatag

SEQ ID NO: 229383 - DNA, 768 bp, synthetic construct
  misc_feature 1..768: note = Description of Artificial Sequence: Synthetic coding sequence
  source 1..768: mol_type = other DNA
atgatcctgaacaaagctttgcttctcggggctttagccctaaccgccgtaatgtctccttgcggaggggaggacatcgttgctgaccatgtggcctcctatggcgttaacttctaccagtctcacggcccttccgggcagtacacccatgagttcgatggcgacgaagaattttacgtggacttggaaacgaaagagacagtgtggcagctgccgatgttctcaaaatttatttcctttgacccccagtcagctctgcgtaatatggcagtgggaaaacatactcttgagtttatgatgcgacagtccaatagcaccgccgctaccaacgaggtcccagaagtgactgttttctccaagtttcctgtcaccctgggacaacccaatacactgatctgcctggtagacaacatattcccaccagtcgtgaatattacatggcttagcaacggccattccgtgacggagggggtgagcgagacaagtttcctctctaagagcgatcacagttttttcaaaatcagctatttgacgttcctcccctcagctgacgagatctatgactgcaaggtcgaacattggggactggatgagcccctgttgaagcactgggaaccagagataccagctccgatgtctgaactcaccgagacacttgtatgcgctcttggattatcggtgggcttgatgggtatcgtagtcggtaccgtgtttataattcagggattgaggagtgtgggagcctctagacaccagggtctactctag

SEQ ID NO: 229384 - DNA, 249 bp, synthetic construct
  misc_feature 1..249: note = Description of Artificial Sequence: Synthetic coding sequence
  source 1..249: mol_type = other DNA
gaccatgtcgcttcctacggagtgaacttctaccagtcccacgggccaagcggccagtatacccatgagttcgatggtgatgaggaattttatgtggacttagagacgaaggagacggtgtggcagttgcctatgttttccaagtttatatcattcgaccctcagagtgctctacgaaacatggccgttggcaaacacacactggaattcatgatgcgccagtcaaattccaccgccgctaccaactag

SEQ ID NO: 229385 - DNA, 768 bp, synthetic construct
  misc_feature 1..768: note = Description of Artificial Sequence: Synthetic coding sequence
  source 1..768: mol_type = other DNA
atgatcctgaacaaagctctgttgcttggggctttggccctgactgccgtgatgtccccatgcgggggtgaagatatcgtcgcagaccacgtggccagctacggcgtgaacttttaccagtctcacggcccatcagggcagtacacccacgagttcgacggcgatgaagaattctatgtcgatctggagaccaaggagaccgtctggcaactcccaatgttttccaagtttatttcattcgacccgcagtctgcactgaggaatatggccgtcggcaaacataccttggagtttatgatgcggcaaagcaatagtaccgctgccactaatgaggtgccggaagtcactgtgtttagtaaattcccagtaacattgggccagcccaacaccttgatttgtctcgtggacaatatcttccctcctgtagttaacatcacttggctctctaatggacattcagtgactgagggcgtaagtgaaacgagtttcttaagcaagagtgaccacagcttcttcaaaatttcctatctaacttttttgccatccgccgacgaaatatacgattgtaaggtcgaacattgggggctggacgaaccactattgaagcactgggagcccgagatccctgcgcctatgtctgagctcaccgaaactctggtctgcgctctgggcttatccgttggtttgatgggcattgtggtgggaacggtatttatcatccaggggctgcgatctgtaggcgctagcagacaccagggattgttgtag

SEQ ID NO: 229386 - DNA, 84 bp, synthetic construct
  misc_feature 1..84: note = Description of Artificial Sequence: Synthetic coding sequence
  source 1..84: mol_type = other DNA
atgatacttaacaaggcattacttctgggtgctctggctctgacagcagttatgtccccctgcgggggagaagatattgtgtag

SEQ ID NO: 229387 - DNA, 810 bp, synthetic construct
  misc_feature 1..810: note = Description of Artificial Sequence: Synthetic coding sequence
  source 1..810: mol_type = other DNA
atgtcctggaagaaagcgttgaggatccccggtgatctgcgcgtggctacagtcacactgatgctcgcaatgctgtctagcctgctggccgaaggcagagatagccctgaagatttcgtctttcagtttaaaggcatgtgctattttactaatggaacagagagggttcgactggtgaccaggtatatttacaatagagaggagtatgctaggttcgactccgatgtgggtgtctatcgggctgtgacaccgcagggccgacccgacgcagaatattggaattcccagaaggaggtgctagaaggaactcgagccgaactggatactgtatgtagacacaattacgaagtggcttttcggggtatccttcagaggagggtcgagcctaccgtgactatctccccctcacgtactgaggctctgaaccaccacaacctccttgtgtgttccgtgacggacttttaccctggacaaatcaaggtccgatggtttagaaacgatcaagaagagacagccggagtagtgtccacccctctcatccggaacggtgattggacgtttcagatcctggtgatgctcgagatgacaccccagaggggagacgtttacacatgccatgtggaacaccccagcctccagtcccctattaccgtggagtggagggcccagtctgaatccgcccaatctaaaatgctcagcggtgttggcggttttgtcctcggcctgattttcctcggcttggggctcataattcggcagagaagccagaaggggccacagggtccaccaccagccggtctgctccattag

SEQ ID NO: 229388 - DNA, 786 bp, synthetic construct
  misc_feature 1..786: note = Description of Artificial Sequence: Synthetic coding sequence
  source 1..786: mol_type = other DNA
atgtcttggaagaaggccttgcgcatcccgggaggtctgcgcgctgctactgtcaccctaatgctgagcatgttaagcactcctgtcgccgaaggacgggacagtccagaagacttcgtgtaccagttcaaaggaatgtgctacttcactaatggcacagagcgggtgagactagtcagtaggtctatttacaatagggaggagatcgtccgcttcgactccgatgtaggcgagttccgcgctgtaacccttctcggcctgccggctgcagagtactggaacagccagaaggacattctggagcgtaagcgcgctgctgtagatagagtttgccgtcataactaccagctggagctgaggacaaccctccagcgtcgagtggagcccacagttaccatctccccctcacgcaccgaggctcttaaccatcacaatctgttggtctgctcagttaccgatttttacccagcccaaataaaggtgagatggtttcggaatgaccaagaagaaacagccggagtcgtctccaccccactgattcgcaatggggattggacatttcaaatactggtcatgctggagatgactccgcagcgcggagacgtgtacacctgtcacgttgaacaccctagcctccaatcgcccattactgtagagtggcgtgctcagagtgagtccgcacagagcaagatgctctccggtattggcggatttgtgcttggattgatttttttgggtctgggactgattattcaccatcgctcacagaagggacttctccattag

SEQ ID NO: 229389 - DNA, 786 bp, synthetic construct
  misc_feature 1..786: note = Description of Artificial Sequence: Synthetic coding sequence
  source 1..786: mol_type = other DNA
atgtcttggaaaaaagctttacggattcccggaggactccgcgcagctacagttaccttgatgctgtcaatgctgagtacaccagtggcggagggtagagactcacccgaggatttcgtataccagttcaagggaatgtgttatttcacaaacgggactgaacgagtgagactcgtgtctcggagcatttataatcgtgaggaaattgtgcgttttgacagcgatgtgggggagttcagagcggtcacactgctgggcctgcccgcagctgagtactggaactcacagaaggatatattggagagaaagagagccgctgttgatagagtgtgtcgacacaattaccaactggaattgaggactactcttcagagacgtgtggagccgactgtgacaatctcaccaagcagaacggaggcgctgaatcatcacaatctccttgtctgtagcgttaccgatttctaccctgcgcaaattaaggtacgctggtttagaaacgaccaggaagagaccgcgggagtggtctcaacccctttgattcgaaacggcgactggaccttccagattctggtgatgcttgaaatgactccacaacggggagacgtttacacatgccacgtggagcatccatccctgcaatcgccaataacagtggaatggcgtgcacagagtgagtccgctcagtcaaagatgctgtcaggaattggcggatttgtgctaggactcatcttcttaggcttgggtctgatcattcaccaccgatcgcagaagggactgctgcactag

SEQ ID NO: 229390 - DNA, 810 bp, synthetic construct
  misc_feature 1..810: note = Description of Artificial Sequence: Synthetic coding sequence
  source 1..810: mol_type = other DNA
atgtcatggaaaaaggccctgcggataccaggaggactgcgcgctgccaccgtgactctgatgttagccatgctgagtactcccgtggctgaggggagagactcccccgaagatttcgtctatcagttcaaagccatgtgctatttcacaaacgggacggagagggtccgttacgtgactcgttacatttacaatcgggaagagtatgcccgtttcgactcagacgtcgaagtttacagggctgtcacacccctaggcccaccagacgccgagtattggaattctcagaaagaggtgttggaacgcaccagagccgagttggatacagtctgcaggcataactatcagttagaactgaggacaacattacagcgcagggtcgagcctaccgtgacaatcagcccctcccggacagaagcccttaatcatcacaacctattggtatgcagcgtgacagacttctaccccgctcaaattaaggtcagatggtttaggaacgatcaggaggaaacaacgggcgtcgtgtccacccccctaatccgcaacggagactggacgttccaaatcctggttatgctggaaatgacgccccagcacggcgacgtgtacacatgccacgtggaacaccccagcctacagaaccccattacagtggaatggagggcgcagtcagaatcggcccagtctaaaatgctgtccgggattggtggttttgtcctgggactcatctttctgggcctgggtttgatcattcaccaccgctctcagaaaggcccacagggcccacctccagcaggtctgcttcactag

SEQ ID NO: 229391 - DNA, 810 bp, synthetic construct
  misc_feature 1..810: note = Description of Artificial Sequence: Synthetic coding sequence
  source 1..810: mol_type = other DNA
atgagttggaagaaagctctaaggatcccgggtggactaagagttgctactgtaactctgatgctggccatgctgagtacccccgtcgctgaaggcagagactcccctgaggactttgtctaccagttcaaaggtatgtgctatttcactaacgggacagagcgtgtcagactggttaccaggtacatctacaaccgggaagagtacgctagattcgactccgatgtaggcgtctatagagctgtgaccccgctggggccacccgacgccgagtattggaacagccagaaagaagtcctggagcggacccgggcagagctcgacaccgtgtgccgacataattatcagttggagctgcgcaccacgctgcagagacgagttgaacccactgtgactatcagtccatcaagaacggaggcacttaaccaccataacctgcttgtgtgttctgtcaccgatttctatccggcacaaatcaaggttcggtggtttaggaatgaccaggaggagaccacaggtgttgtttccacacccctaatccgcaatggagactggaccttccaaatactggtcatgctcgagatgacaccgcaacgcggtgatgtttacacatgtcacgtggagcacccgagcctccagaaccccatcattgtggaatggagggcgcagagtgaaagtgctcaatcaaagatgctttccggaatcggcggattcgtcctgggcttaatctttttaggactgggtttgatcatacaccaccgatcgcagaagggtcctcaggggccaccgccagcgggtctgctgcattag

SEQ ID NO: 229392 - DNA, 675 bp, synthetic construct
  misc_feature 1..675: note = Description of Artificial Sequence: Synthetic coding sequence
  source 1..675: mol_type = other DNA
atgtcatggaaaaaagccctgcgcatccccggagacttgcgggttgctacagtgactctgatgctggctatgctttctagtctcttggctgaggggcgtgatagtcccgaagatttcgtgtttcagttcaagggtatgtgttattttacgaacggcaccgaaagagtgcgcctcgtgacccgttatatttataatcgagaggaatacgcaagatttgatagtgacgttggcgtgtatagggccgtcactccccaggggcgaccagacgccgaatactggaatagccagaaggaagtcttggaaggcacgagggctgagcttgatacagtatgcaggcataattacgaagtcgccttccggggtattcttcagcgcagggtggagcccactgttactatctcccccagccgaacagaggctcttaaccatcataatctgctggtgtgtagcgtgacagatttttaccccggtcagatcaaggtccggtggttcagaaacgatcaagaagaaactgcgggagttgtgtcaacccctctcatcaggaacggcgattggaccttccagatactggtgatgctggagatgactccccagaggggtgatgtgtacacatgtcacgtcgaacacccgtctcttcaatcacctatcactgtcgaatggcgacttcttcattag

SEQ ID NO: 229393 - DNA, 786 bp, synthetic construct
  misc_feature 1..786: note = Description of Artificial Sequence: Synthetic coding sequence
  source 1..786: mol_type = other DNA
atgagctggaagaaagcactgagaattccaggcgaccttagggtggccacggttacactgatgctggctatgctctcatcactgctcgccgaggggcgtgatagccctgaggattttgtgtttcagtttaaagggatgtgctacttcactaatggcactgaacgcgtgcggctggtgacccgctacatttacaatcgcgaggagtacgccaggttcgactcagacgtaggagtgtatagagctgttaccccccaggggcgtcccgacgctgaatactggaactcacagaaagaagtgctggagggcacccgcgcagaacttgacaccgtttgccgccacaactacgaagttgctttccggggtatccttcagagacgcgtagaaccaactgtgacaattagtccgtcccgaacggaggcccttaatcaccacaacctgctcgtgtgcagcgtgactgatttctaccccggtcaaatcaaggtacgctggtttcggaatgaccaggaggagacagccggagtagtcagtactcccctgattagaaacggagactggacattccagattctcgtgatgctggaaatgacaccacagcgcggagacgtttatacttgccacgttgaacacccgtccttgcagtcacccattacagtggaatggagagcccagagcgagtccgctcagagcaagatgttgagtggagtggggggtttcgtgctcggtctcatcttcctgggcctgggcctcatcatacggcagagaagtcagaagggcttgctccactag

SEQ ID NO: 229394 - DNA, 786 bp, synthetic construct
  misc_feature 1..786: note = Description of Artificial Sequence: Synthetic coding sequence
  source 1..786: mol_type = other DNA
atgtcctggaaaaaggccttgcgaatacccggaggactgcgcgctgccaccgtgacgctcatgctggcgatgctgtcaacaccagtagccgagggacgcgactctcccgaggactttgtgtaccagttcaaggcgatgtgctactttaccaatggcacagagcgggtgcgctacgtgactaggtacatctacaacagggaagaatacgcccgattcgatagtgacgtggaagtttatcgggcagtcactccactgggtcctcccgacgcggaatattggaactcgcagaaagaagtactagaacgaacaagagccgagctagatacggtgtgcagacataactaccagctagaactgcggacgaccctccaacgtcgtgtagaacctaccgtcaccatctcaccaagccggaccgaagccctgaaccatcacaacctgctggtctgctctgtgacagatttctaccccgctcagataaaagtcagatggtttaggaacgatcaggaagagacaaccggtgtggtcagtacccccttaatccggaacggtgactggacattccagatcctggtgatgcttgaaatgacccctcagcacggtgacgtttacacctgtcatgttgagcacccctcactccaaaatccaattacagtggaatggagggcccagtcggaaagcgcacagtccaagatgctgtctgggattggtggctttgtgctggggttaatcttcttgggcttgggcctaattatccaccatcgtagccagaaaggcctcctacactag

SEQ ID NO: 229395 - DNA, 675 bp, synthetic construct
  misc_feature 1..675: note = Description of Artificial Sequence: Synthetic coding sequence
  source 1..675: mol_type = other DNA
atgagctggaaaaaggccctcaggattcccggtgggctgcgggcagccacggtcacactgatgctctcaatgctgtcaacccctgttgctgagggtagagactctcccgaggatttcgtatatcagttcaaaggtatgtgctatttcactaatggtaccgagcgtgttcgtttggtgtctcgatctatttataatcgcgaggagatcgtcaggttcgattccgacgtgggcgagttccgagctgtcactctgttgggcctgcccgcagcagagtattggaatagtcaaaaggacatcctggagcgaaagagggccgcagtcgacagagtctgcagacacaactaccaattggaactgaggacgactctgcagagaagagtagagcccacagtgaccatcagtccttctagaacagaggcactaaatcatcataatttactggtgtgcagcgttacagatttctatccagcccagatcaaggtgagatggttccggaatgatcaagaggagacagccggagtggtgtctacgccacttatccgaaatggcgattggacttttcaaatactcgtgatgctggagatgacgccccaacgaggcgacgtgtacacctgccatgtggagcacccctcgttgcaaagccctatcaccgtggagtggcgtcttctccactag

SEQ ID NO: 229396 - DNA, 786 bp, synthetic construct
  misc_feature 1..786: note = Description of Artificial Sequence: Synthetic coding sequence
  source 1..786: mol_type = other DNA
atgtcttggaagaaggcactgcgtattcctgggggtctgcgggctgcaacagtcactcttatgttggctatgctttctacgcccgtggccgagggacgagattctccggaggactttgtttatcagtttaaggcgatgtgttacttcacaaatggcactgagcgggtgaggtacgtcactagatatatttacaatagagaggagtatgcgagatttgattctgacgtggaggtctacagggctgtcaccccactgggcccacctgatgccgaatactggaatagccagaaggaggtactggaacgcacccgggcagagctggacacagtgtgtagacacaattaccagctagaacttagaaccacgctgcagcgtcgcgtcgagcccactgtgaccatcagccctagccgaactgaggccctcaaccatcacaacctgctggtgtgctcggttacagatttttacccggctcagataaaagtgcgttggttccggaatgaccaagaggaaacaaccggagtagtgtccacgccattgatcagaaacggtgattggaccttccaaatactggtcatgctggagatgaccccgcagcacggagacgtgtatacatgtcatgtagaacatcccagccttcagaatccaataaccgttgaatggagggcccagtcagaaagcgcccagtccaagatgctaagcggaatcgggggatttgtgctgggactcatctttctggggctgggcctaatcattcatcacagatcacaaaaagggctgctgcactag

SEQ ID NO: 229397 - DNA, 786 bp, synthetic construct
  misc_feature 1..786: note = Description of Artificial Sequence: Synthetic coding sequence
  source 1..786: mol_type = other DNA
atgtcttggaaaaaggctctaagaatccccggtggtttgcgggtcgccactgttacactcatgctcgctatgctgtctacacctgtggcagaaggcagagatagtcccgaggactttgtttaccagttcaaggggatgtgctacttcacaaatggcaccgaacgggtgcggggtgttacccggtacatctacaaccgcgaagaatatgcgagatttgacagcgacgtgggcgtgtaccgggctgtaacccctctgggtcctcccgctgccgagtattggaactcacaaaaagaggtgctggagagaaccagagcagagttagacacagtgtgtagacacaattatcaattggagctcagaactacactgcaacggcgtgttgaacctacggtgaccatttctcctagtcgcaccgaggctctcaatcaccacaatttgctggtgtgcagcgtcactgatttctatcccgcacagattaaagtccgatggtttcgtaacgatcaagaggaaactactggggtggtgagtaccccgttaattagaaatggcgactggactttccagatcctggtaatgctggagatgaccccacagagaggagacgtttatacttgtcatgtcgaacatccgtctctccagaatcctatcatcgtggagtggagggcacaatccgagagcgcacagagcaagatgctgagtggaattggtggctttgtgcttggcttgatctttctgggactcggcctcattattcaccatcggagtcagaaaggcctgctccactag

SEQ ID NO: 229398 - DNA, 675 bp, synthetic construct
  misc_feature 1..675: note = Description of Artificial Sequence: Synthetic coding sequence
  source 1..675: mol_type = other DNA
atgtcttggaagaaagcgctccgtatacccggtgggctcagggcagctacggtcacgttaatgcttagtatgctatctacgccagtcgctgaaggcagagactctcctgaggatttcgtttaccagttcaaaggcatgtgttatttcactaacggaactgagcgcgtcagactcgtgtcaagatccatttataatcgagaggagatcgtgaggtttgactcagatgtgggggagtttcgtgccgttacactgctggggcttcctgctgcagagtactggaactctcagaaggatatcctggagagaaaacgcgctgccgtggaccgcgtgtgccggcataattaccaactggaattaaggactaccctgcagcgtcgggtcgaacctactgtgacaatcagccccagtagaaccgaagccctgaatcaccacaacctcctcgtctgcagcgtgactgacttctacccagcccaaattaaggtgagatggtttaggaacgggcaggaagagaccgccggagtagtcagcacgcctcttattcggaacggcgattggacttttcaaattcttgtgatgctggagatgacccctcaacgaggcgacgtttacacttgtcatgtggagcatccgagcctgcagtctccgatcacggtggagtggagactgcttcactag

SEQ ID NO: 229399 - DNA, 786 bp, synthetic construct
  misc_feature 1..786: note = Description of Artificial Sequence: Synthetic coding sequence
  source 1..786: mol_type = other DNA
atgagctggaagaaggcccttaggattccgggaggtttgagggtggccaccgtgactcttatgctggccatgctcagtactcctgtggctgagggcagggactcccctgaggattttgtgtatcaatttaagggaatgtgttacttcactaacggaacagagcgggttaggttagtaacccggtacatttacaacagggaagagtatgcccgttttgacagcgacgtgggagtctaccgtgctgttaccccgctcgggccacctgacgctgaatactggaattctcagaaagaagttctggagcggaccagagcagaactcgataccgtctgtcgccacaactatcagcttgaattgaggacgactctgcagcgcagagttgaacccactgtgaccatctcccctagtcggacagaggcactcaatcaccacaaccttcttgtgtgtagtgttactgacttctatcctgcgcaaattaaggtcagatggtttaggaacgaccaggaggagaccaccggggtggtttcgactcccctgattagaaacggggattggacattccaaattctcgtcatgctggagatgactccacagcggggtgatgtctacacttgtcacgtggagcatccttccctgcaaaatcctataattgtggaatggcgtgcccagagcgaaagcgcccagagcaagatgctgtcagggatcgggggttttgttctggggcttatctttctggggctcggactgattatccatcaccgctcccagaaggggctgctgcattag

SEQ ID NO: 229400 - DNA, 786 bp, synthetic construct
  misc_feature 1..786: note = Description of Artificial Sequence: Synthetic coding sequence
  source 1..786: mol_type = other DNA
atgtcgtggaaaaaggctctgcgcattcccggagggttgcgagcagccaccgtgactttgatgctcagtatgttgagcacaccggtggctgaggggagggactccccagaagacttcgtgtatcagttcaagggaatgtgttacttcaccaatggcacggagcgtgtgcgcctcgtaagccgcagcatttataatcgcgaagagattgtgcggttcgatagcgacgtgggggagtttcgcgcagtaaccctcctgggactccccgctgccgaatactggaactcgcagaaggacattctcgagcgcaagagagcagcagttgacagggtgtgtaggcacaattaccaactggagctgcgcaccacactgcagcggagggtagagcccaccgtaactatcagtccttccaggacagaggccctgaaccatcacaatctcctcgtttgctccgttacggacttctatccagctcagattaaggtcagatggtttagaaacgggcaggaagagaccgccggagtggtgtctaccccgcttatccgaaacggcgactggacattccagatcctcgtgatgttggaaatgactccccaacggggtgacgtgtatacatgccacgtcgagcatccatccctgcaaagcccaattactgtggaatggagagcccagtcagagagcgcgcagtccaaaatgttgagcggcattggcggtttcgttctcggcctcatttttctaggcctggggcttatcatccaccatcgtagccagaagggcctcctgcactag

SEQ ID NO: 229401 - DNA, 810 bp, synthetic construct
  misc_feature 1..810: note = Description of Artificial Sequence: Synthetic coding sequence
  source 1..810: mol_type = other DNA
atgtcctggaaaaaggcactgagaattccgggtggactccgagccgctacagtaactctgatgctgagcatgctcagcacccccgttgccgaaggtagggacagtcccgaggatttcgtgtatcaattcaaaggtatgtgttactttaccaatggaacagaaagggtgaggcttgtgtctaggtccatttacaatagggaggaaatagtgcgctttgattctgacgtaggggaattccgagctgtgacactgctggggttacccgctgctgagtattggaattcgcagaaggatatattggagcgcaagcgcgcagcggttgaccgcgtgtgccgccacaactaccagctggagctccgaacaacgctacagagacgagtagagcctactgtgaccatctctccgagtcgcaccgaagctctgaaccaccacaatctgttagtgtgcagcgtgactgacttctaccccgcacagatcaaggtgaggtggtttagaaatggacaggaagaaaccgccggagttgttagcacacctctgattcggaacggcgactggactttccagattcttgtgatgctcgagatgactccgcaaagaggggatgtttacacctgccatgtcgagcacccttcgctgcagagtcctataaccgtggaatggcgcgctcagagtgaatccgcccagagcaaaatgttgagcggcattgggggattcgttctgggcctcatctttttgggtttgggcttaataatacatcaccggtctcagaaaggtccacagggtcctccaccggcaggccttctgcattag

SEQ ID NO: 229402 - DNA, 786 bp, synthetic construct
  misc_feature 1..786: note = Description of Artificial Sequence: Synthetic coding sequence
  source 1..786: mol_type = other DNA
atgagttggaagaaggcacttagaattccgggtgggctcagagttgccacagttacattgatgctggctatgctgagcaccccggtggcggaagggagagactccccagaggacttcgtctaccaattcaagggaatgtgttacttcaccaacggaacagaaagggtgcgtctggtgacacggtatatctacaacagggaagaatacgccagattcgatagtgacgtcggagtatacagggcagtcactccactcggccctccggacgctgagtactggaatagccagaaggaagtgcttgagagaacaagggctgaactggataccgtatgtagacacaactaccagctcgaactgcgtaccaccctgcagaggcgagtggaaccaacagttactatatcgccgtctcgaaccgaggccttaaaccatcacaacctcctcgtgtgttcagttaccgatttctatcccgctcaaattaaggtgagatggtttcgtaatgatcaggaggagacaaccggagtcgtgagtacgccactcattcggaatggcgattggaccttccaaatcttagtgatgctggaaatgactccacagcgaggcgacgtatatacctgtcacgtagagcatccgtcactgcagaatcctatcattgtagaatggcgcgcacagtccgagagtgcacagagcaaaatgctgtctggcatcggaggcttcgttttgggtttaatcttcctgggccttgggctgataatccatcaccgatcccaaaaaggtcttttgcattag

SEQ ID NO: 229403 - DNA, 675 bp, synthetic construct
  misc_feature 1..675: note = Description of Artificial Sequence: Synthetic coding sequence
  source 1..675: mol_type = other DNA
atgtcctggaagaaagcccttcggattccaggaggcctccgggcagctacagtgaccctcatgctcgcaatgctcagcacccccgttgcagagggcagggacagtccagaggactttgtgtatcagtttaaagcgatgtgttattttacaaatggcaccgaaagagttcggtatgtgacacgctacatctacaatcgagaggagtacgctcggtttgacagcgacgtggaagtgtatagggcggttacacccctcggtccgccagacgcagagtattggaactcccagaaggaggtgctggagagaaccagagcggagctggacacagtgtgcagacacaattaccagttggagctgcgcaccactctacagaggcgagtcgagccgacggtgactataagcccaagccgaaccgaagcactgaaccatcataacttactggtttgttccgtgacagatttttatccagcccagatcaaagtcagatggttcagaaacgatcaggaagagacgactggggtagtcagtaccccactgattagaaatggggactggacctttcagatcctggtaatgctcgagatgactccacagcacggagatgtgtatacctgtcatgtggagcacccatcgctacaaaatccaatcaccgtggaatggagattactccactag

SEQ ID NO: 229404 - DNA, 786 bp, synthetic construct
  misc_feature 1..786: note = Description of Artificial Sequence: Synthetic coding sequence
  source 1..786: mol_type = other DNA
atgagctggaagaaagcgctgcgcattccaggtggattgagggcagccactgtcacccttatgttgtccatgttaagtacccccgtcgccgaaggcagggactctccggaggactttgtgtatcagtttaaggggatgtgctattttactaacgggactgagcgcgtccgcttggtgagccggtccatatataatagggaagaaatagtacggtttgatagtgatgtcggagaatttagggcagtaacccttctagggcttcccgctgccgagtactggaactcccagaaggacatcttggaacgtaagagggcggcagtggatagggtgtgtagacacaactatcaactcgaattgagaacaaccctgcagagacgggtagagcccacggtgacgatctcacccagtaggactgaggccctaaaccatcacaacctgcttgtatgctctgtgacagatttttatccagcccagataaaagttaggtggtttcgcaatggccaggaagagaccgccggagttgtctcgacacctctcattagaaacggggactggactttccaaatcctggttatgttagagatgactccccagagaggggatgtgtacacgtgtcacgtagagcatccctctctgcagtctccaatcaccgtggagtggcgggcacagagtgaaagcgcgcagagcaagatgctctctggtatcggtggattcgtgctcgggctgatatttctgggcctggggctgatcatacatcatcggtcgcaaaaggggctcctccactag

SEQ ID NO: 229405 - DNA, 405 bp, synthetic construct
  misc_feature 1..405: note = Description of Artificial Sequence: Synthetic coding sequence
  source 1..405: mol_type = other DNA
atgagttggaagaaggcgctgaggatcccgggtggtctaagagctgccacggtgacgctgatgctgagtatgttatctactcctgttgccgaaggcagagatagtccggtggagcctaccgttacgatctcacctagtagaacagaggctctgaatcatcataatctgctggtctgttccgtgaccgatttctatccagcccaaatcaaagtccgctggtttaggaatgggcaagaggagaccgccggagtggtgtccaccccgttaattcgcaatggagattggacttttcagattctagtgatgctcgaaatgactcctcagaggggggacgtctacacctgtcacgtggaacatccttcactgcagtctccgattactgtggagtggagattgctgcactag

SEQ ID NO: 229406 - DNA, 405 bp, synthetic construct
  misc_feature 1..405: note = Description of Artificial Sequence: Synthetic coding sequence
  source 1..405: mol_type = other DNA
atgagctggaaaaaggctctcagaatccccggaggccttcgcgtcgcgactgtgactttaatgttagcaatgttgagtacccccgtggccgaggggagagatagccccgttgagccaacagtcacaatctcgccctctaggactgaggctctgaatcaccataatctcctggtgtgtagtgtgaccgacttttacccggctcaaatcaaagtgaggtggtttcgtaacgaccaagaggagacaacaggcgttgtgtcaacacctctgattaggaatggtgactggacgtttcaaatcctcgtcatgctggagatgaccccccagagaggcgatgtgtatacctgtcatgttgagcatccttcccttcagaaccctattatagtagagtggagactcttgcactag

SEQ ID NO: 229407 - DNA, 435 bp, synthetic construct
  misc_feature 1..435: note = Description of Artificial Sequence: Synthetic coding sequence
  source 1..435: mol_type = other DNA
atgtcttggaaaaaagcattgagaattcccggtggcctgcgcgtagcaaccgttacccctcttgggcctcctgatgctgagtactggaacagtcaaaaggaggtattggaaagaaccagggccgagctggacaccgtgtgcaggcacaactaccagttggaactgagaaccaccctccagagaagagtggagccaacggttaccatcagcccctccaggaccgaagccttgaaccatcataatttactcgtttgttctgtgactgatttttatcctgcccaaattaaagttcgctggtttagaaatgaccaggaggaaactactggggtagtgtccacccctctaattaggaacggggactggactttccaaattttagtgatgctcgagatgaccccacagagaggcgatgtgtacacttgtcacgtggaatag

SEQ ID NO: 229408 - DNA, 405 bp, synthetic construct
  misc_feature 1..405: note = Description of Artificial Sequence: Synthetic coding sequence
  source 1..405: mol_type = other DNA
atgtcttggaagaaggccctgcgcattcctggaggcttgcgcgctgccaccgtgactctgatgctcgccatgctgtcaacacctgtggccgagggaagggatagtcctgtggagccaacagttactattagcccatccaggaccgaagcgcttaatcatcacaacctgctcgtgtgttccgtcactgacttttatccagcccagatcaaggtgcgatggtttcggaacgaccaggaagaaacgactggagtcgtgtcaaccccgctcatcagaaacggggactggacattccaaattctcgtcatgttagagatgaccccccagcacggagacgtttacacctgccatgtagaacatccctctctccagaaccccatcacggtggagtggcggcttctccattag

SEQ ID NO: 229409 - DNA, 786 bp, synthetic construct
  misc_feature 1..786: note = Description of Artificial Sequence: Synthetic coding sequence
  source 1..786: mol_type = other DNA
atgagctggaaaaaagccctccgtataccaggggaccttagggtggctacagtgacattaatgctggcgatgttgagctcactcttagcggaaggcagggacagcccagaggattttgtatttcagttcaagggcatgtgctactttactaacgggactgaacgggttcggctggtcactcggtatatatataatcgagaggagtacgcgagatttgatagtgacgtgggagtgtatcgcgcagttacaccccagggaaggcctgatgccgaatactggaatagtcagaaagaagtccttgaaggtacacgggctgaactggacacggtgtgccgacacaattatgaagtagcctttcgaggcatactccagaggcgggtagagcccacagtgacaatttcgccaagtcgcacagaggcactgaaccatcataatctgctagtgtgctctgtgacagacttctaccctgggcagataaaagtccggtggttcagaaacgatcaggaggagactgccggagtagtctccacacctttgattagaaatggggactggacatttcagattctagttatgctggaaatgacgccccagagaggagatgtctatacttgccacgtagagcaccctagcctccaatcaccaatcactgttgagtggcgcgcacagtccgaatccgctcagagcaagatgctaagtggagtgggcggattcgttctgggcctgatctttttaggcctaggcctgatcatccggcagcggtctcaaaaagggctgctccattag

SEQ ID NO: 229410 - DNA, 675 bp, synthetic construct
  misc_feature 1..675: note = Description of Artificial Sequence: Synthetic coding sequence
  source 1..675: mol_type = other DNA
atgagttggaaaaaggccctgcgaatacccggtgggctcagagtcgcaacggttacgctgatgcttgccatgctcagcacgcctgtggccgaagggcgagattctcctgaagattttgtgtaccagttcaaagggatgtgctattttactaacggcactgaacgcgtgaggctggtgaccaggtatatctataatagggaggaatacgctcgttttgactccgatgtgggagtctaccgggctgtcacacccctaggcccacccgatgcagaatactggaatagccagaaggaggtgctcgaaagaaccagagccgagctggataccgtttgtaggcataattatcaactcgagctgagaactactcttcaacgccgagtggaaccaactgtgacgatcagcccctcacgaacagaggccctgaatcaccataacttattagtgtgctcagtgacagatttctatcctgcacagatcaaagttaggtggttccgcaacgatcaggaggaaaccaccggggtcgtttccaccccgctgataaggaacggagactggacctttcaaatcctggtaatgctggaaatgaccccacaacgaggggatgtttatacgtgccacgtggagcaccccagcttgcagaacccaataattgtggagtggaggcttctgcactag

SEQ ID NO: 229411 - DNA, 435 bp, synthetic construct
  misc_feature 1..435: note = Description of Artificial Sequence: Synthetic coding sequence
  source 1..435: mol_type = other DNA
atgagttggaagaaggctttgcgcattccgggtgatctccgtgttgctactgtgaccccgcaggggaggcccgatgcggaatactggaattctcagaaggaggttctggaaggtacccgcgcagaattggatacggtctgccgccacaactatgaggtagcattccgtggtatactgcagagacgggtagagcctaccgtgaccatcagcccatccagaacagaggccctgaaccaccacaacctgcttgtgtgctccgtaacagatttttatcccggtcaaattaaggttcgatggtttcggaatgaccaggaagagacggccggtgtcgtttccaccccactcatcagaaacggagattggacttttcagattctggtgatgctcgagatgaccccacagcgcggagatgtctatacttgtcatgtagagtag

SEQ ID NO: 229412 - DNA, 435 bp, synthetic construct
  misc_feature 1..435: note = Description of Artificial Sequence: Synthetic coding sequence
  source 1..435: mol_type = other DNA
atgtcctggaagaaggcactgcgaataccaggcggattgcgggctgcgactgtaactctgctgggactcccagctgccgaatattggaattcacagaaggacatcctggagcggaaacgtgcagctgtggatagggtttgtcggcacaattatcagctcgagctaagaactacactgcagaggcgcgtggaaccaacggtgactatcagcccatctaggaccgaagctctaaatcaccataatctcctcgtgtgctccgtaaccgatttctatccggcacaaatcaaggtcagatggtttcgaaatgggcaggaagaaacagccggagtggtatccactccgctcatcaggaacggggactggacctttcagatcctcgtgatgcttgagatgaccccccagagaggggacgtgtacacttgtcatgtcgagtag

SEQ ID NO: 229413 - DNA, 435 bp, synthetic construct
  misc_feature 1..435: note = Description of Artificial Sequence: Synthetic coding sequence
  source 1..435: mol_type = other DNA
atgtcttggaagaaggcactccgaattcccggaggcttgagggccgctacggtcacacctctgggcccacccgacgcggagtactggaacagccagaaggaggttttggaacggactagggctgaattagacaccgtctgtagacataactatcagttagagttgcgaactaccttacaacgtcgggtggagcctactgttacgatttcgccgagtcggactgaggccttgaaccaccacaacctgctcgtgtgttcagtcacagacttctaccccgcacaaattaaagtacgttggttcaggaacgaccaggaggagactacaggagtggtcagcacccctctcatccggaacggcgattggacattccagattctggtgatgctggaaatgacgccccagcatggcgacgtctatacctgccacgtagagtag

SEQ ID NO: 229414 - DNA, 411 bp, synthetic construct
  misc_feature 1..411: note = Description of Artificial Sequence: Synthetic coding sequence
  source 1..411: mol_type = other DNA
atgagctggaagaaggcccttaggatccccggtggtctgcgggctgccaccgttacgctcatgctgtctatgttgtctacacctgtggcagaggggagggacagcccagaggatttcgtctatcagtttaagggcatgtgttattttaccaacggcaccgagagagtcagattggtctcccggtccatctacaaccgtgaggagattgtgaggttcgactccgacgttggcgagttccgcgcagtcaccctgcttgggctccccgcagccgagtactggaacagccagaaggacatcctggagcggaaacgggctgctgtggacagagtttgccgccacaattaccagctcgagcttagaaccactctccagagaagaggcatggtcacaggcccatctcgcagttggtag

SEQ ID NO: 229415 - DNA, 411 bp, synthetic construct
  misc_feature 1..411: note = Description of Artificial Sequence: Synthetic coding sequence
  source 1..411: mol_type = other DNA
atgtcctggaaaaaggccctccgcattcctggtgggcttcgcgctgcaactgtcaccctcatgttagcgatgctgtcaacacccgtggccgaaggacgcgacagccccgaggattttgtataccaattcaaggccatgtgctattttacaaatgggacagaacgcgtgcgttatgttacaagatacatttacaacagggaggagtatgctagattcgacagcgatgtggaagtctatagggccgtgacccccctcgggccaccagacgccgaatactggaacagccagaaagaagtgctagaacgaacacgcgcagagttggataccgtctgtcgacacaattaccagcttgagctgcgcactactcttcaaaggcgcggaaccgtgacaggaccgtcccgctcatggtag

SEQ ID NO: 229416 - DNA, 411 bp, synthetic construct
  misc_feature 1..411: note = Description of Artificial Sequence: Synthetic coding sequence
  source 1..411: mol_type = other DNA
atgagctggaagaaagctttgaggatccctggcgaccttagagtcgcaaccgttactttgatgctggccatgctctcctctctactggcggaaggtcgtgattcccctgaagatttcgtgtttcagttcaaggggatgtgctactttactaacggaacggagcgagtgcgtttggtgacccgatacatctacaatagagaagaatacgccaggttcgactcagatgtgggggtttatcgagcagtgaccccccaggggaggcccgacgctgaatactggaactctcagaaggaggttctagagggtaccagagcagaactcgataccgtctgcaggcataattacgaggtagcttttcggggaattctgcaaagaagaggtatggtgacaggactctctcgtagctggtag

SEQ ID NO: 229417 - DNA, 717 bp, synthetic construct
  misc_feature 1..717: note = Description of Artificial Sequence: Synthetic coding sequence
  source 1..717: mol_type = other DNA
atgctgtcgacccctgtcgccgagggtcgcgacagccccgaagacttcgtttaccagtttaaaggcatgtgctatttcaccaatggcacagaacgcgtgcggttggtcagcagatctatatataatagagaagagattgtgcgcttcgactctgacgtgggcgaatttagggcagtgactcttttgggactccctgccgcagagtattggaactcgcaaaaagacattcttgaaaggaaaagggctgctgtagacagagtttgtcggcataactatcaacttgagttgagaaccacactgcaacggcgagttgagccaacagttactatttcaccctctaggacagaagcattaaaccaccataatctgctggtatgctcagtcaccgacttctatcccgctcaaatcaaagtgcgttggttccgtaacggacaggaagagactgcaggcgtggtgagcacgccactcatcaggaatggggactggacattccagatcctggttatgctcgaaatgactccccagagaggtgatgtgtacacttgtcatgtggaacatccatcgctgcagagtcccattaccgttgagtggcgagctcagtccgagtccgcccagagcaagatgctaagcggtataggcggattcgtcctgggattgatcttcctgggcctgggcctgataatccaccatagatctcagaagggattactgcactag

SEQ ID NO: 229418 - DNA, 543 bp, synthetic construct
  misc_feature 1..543: note = Description of Artificial Sequence: Synthetic coding sequence
  source 1..543: mol_type = other DNA
atgtgttacttcaccaacggaacggaacgcgtgcggggagtgactaggtacatttataatcgggaggagtatgctcgttttgactccgacgttggcgtctatcgggcagtgacgcccctcggtcccccagccgctgaatactggaactcccagaaagaggttctggagcgcacacgggctgagctcgatactgtgtgtcgccacaattaccagctcgagctgcggacaaccctgcagcggagggttgagcccacggttacgatctcgccatcccgtacggaagctctgaaccatcacaatttgctcgtctgctctgtcacagatttttatccagcacaaatcaaggtaaggtggtttaggaatgaccaggaagaaaccactggcgtcgtatctactcctctgattcggaacggagattggacattccaaatattggttatgctggaaatgactccccagcgtggcgacgtgtacacatgtcatgtggagcaccccagtctgcagaatcccattatcgtggagtggcgcatggatgagttttag

SEQ ID NO: 229419 - DNA, 717 bp, synthetic construct
  misc_feature 1..717: note = Description of Artificial Sequence: Synthetic coding sequence
  source 1..717: mol_type = other DNA
atgttgtcaacccctgtcgccgagggcagggacagccctgaggacttcgtgtaccaatttaaaggaatgtgttatttcacgaatggaaccgagcgcgtgagattggtgtcacgtagcatatataaccgcgaggaaatagtccgtttcgacagtgatgtgggtgaatttcgggcagtgactctactcgggctgccggctgcagagtactggaattcgcagaaagacatactggagcgtaagagggccgcagtcgatagggtttgtcgccataattatcaactggaattgcgaactacattacaaaggcgagtggaacctaccgtgaccatttccccatcaaggaccgaggccctgaatcatcacaatttattagtatgctctgtgactgacttttaccccgcacagatcaaagtgcggtggtttcgcaacgaccaggaggaaactgcaggcgtagtttcaacccccctcatccgaaatggtgactggactttccaaatcctggttatgctggaaatgactccccagcgtggagacgtctacacctgtcatgtcgagcatccctctctccagagcccaatcaccgttgagtggcgagcacagtccgaatcggcccagtcaaaaatgttgtcagggattgggggattcgtgctggggttgattttcctcggcctaggactcatcattcatcaccggtctcagaagggcttgctgcattag

SEQ ID NO: 229420 - DNA, 744 bp, synthetic construct
  misc_feature 1..744: note = Description of Artificial Sequence: Synthetic coding sequence
  source 1..744: mol_type = other DNA
atgttgtccactccagtggcagaaggcagggattcgccagaagacttcgtctaccaattcaaggggatgtgctacttcaccaacgggacagagagagtgagaggcgtaactaggtacatttacaaccgggaggaatacgctcgatttgactcagatgtcggggtgtaccgggcagttaccccccttgggcctccagctgctgaatactggaatagtcaaaaggaggtcttggaacgaacccgggcagagctagatacagtgtgtcggcataattaccaattggagcttagaactacccttcaacggcgagttgagcccactgtcactatcagccctagtagaacggaagcactcaaccaccataatctgctggtatgctcagtgaccgacttttatccggcacagatcaaggtgcgatggtttagaaacgatcaagaagagacaaccggagtggtgagtactcctttgatccgtaatggcgattggacatttcaaattctggtaatgctggagatgaccccccagaggggcgatgtatatacttgccatgttgaacatcccagcctgcaaaatcccatcatcgtggagtggagggcccaatcagaatcagcgcagtctaagatgcttagtggcatcggtggtttcgtccttgggctcatttttttgggcttgggcctgatcattcatcaccgtagccagaaggccctaccccagggaccccctccggctggagatatcagctag

SEQ ID NO: 229421 - DNA, 717 bp, synthetic construct
  misc_feature 1..717: note = Description of Artificial Sequence: Synthetic coding sequence
  source 1..717: mol_type = other DNA
atgctgtcaacacctgtagccgaaggccgagactcccccgaagatttcgtctaccagtttaaaggcatgtgctattttaccaacggaacggagagggtaaggcttgtgagcagaagcatttataaccgtgaagaaatcgttcggtttgattctgatgtcggggaattccgggctgtgaccctgctgggactacccgctgcagaatactggaactcccagaaagatatcctggaacgcaaacgcgctgccgtggacagagtctgccgacacaactaccaactagaactgcgcactaccctccagcggagggttgaacccaccgtcactatttctccttccagaacagaggcccttaatcatcacaacctgctagtgtgtagtgtcactgacttctatcctgcccagattaaagttaggtggttccgtaatgatcaggaggaaaccgccggagtcgtctctactccactgatccgcaatggggactggacattccagatcctcgtgatgctagagatgacgccccagcggggagacgtttacacttgtcatgtcgagcatcctagtctgcagagtcccattacggtggagtggagagcgcagtcagaatctgcacaatccaagatgctctcagggatcggtggcttcgtactggggctgatattcttgggcttggggcttatcatccaccaccgtagtcaaaaaggcctgcttcactag

SEQ ID NO: 229422 - DNA, 801 bp, synthetic construct
  misc_feature 1..801: note = Description of Artificial Sequence: Synthetic coding sequence
  source 1..801: mol_type = other DNA
atggtgtgtctccgccttcctggagggtcttgcatggctgtgctcacagtgacccttatggtgctgagttcccctctcgccctggcaggcgacaccaggccgagattccttgaatattccacctctgaatgccatttctttaatgggacagagcgggttcgctaccttgatcgttacttccataaccaggaggagaacgttcgcttcgactctgacgtgggtgaatttagggcggttacggaactaggtcggccagacgcagagtactggaactcccagaaggacctgttagaacaaaaacggggtagggtggataactactgtcggcacaactatggcgtggtagagagcttcactgtgcagcgcagagtgcacccaaaggtgaccgtttatccaagtaaaacgcaaccactgcaacaccacaatttgctggtatgtagcgtgagtggtttttaccccggttctatcgaggttaggtggtttcgtaatggacaggaagagaagacgggcgtggtaagcaccgggctgatacataatggtgattggacttttcagactctggtcatgctggagacagtgccaaggagcggggaggtatatacatgtcaggtcgagcatccctctgtgacttctccactgacggtagagtggcgcgcacgctcggagagcgcacagtcgaagatgctgtctggagttggcggattcgttctggggctgctgtttctaggggcaggccttttcatctacttccggaaccagaagggtcatagtggcttgcagccgcgaggattcctgtcctag

SEQ ID NO: 229423 - DNA, 801 bp, synthetic construct
  misc_feature 1..801: note = Description of Artificial Sequence: Synthetic coding sequence
  source 1..801: mol_type = other DNA
atggtgtgcctgaagttgcctgggggatcctgcatgactgccttaacagtgaccctgatggtcctctctagcccgctggccttgtcaggggacactcgccctcgatttctctggcagccaaaaagggaatgtcacttcttcaacggcacggagagggtgcggtttttggacaggtatttctacaatcaggaggaatcagtgcgtttcgatagtgatgtgggtgagttcagagcggtaaccgagctcggtagaccggacgccgaatattggaatagccagaaagatatcttggagcaagccagggcggcagtcgacacttactgccgtcacaactacggcgtcgttgagtcgttcaccgtccagagaagagttcaacctaaagtgacggtgtatccttcaaaaacccagcctctacagcatcacaaccttctggtgtgctccgtctctgggttttacccaggcagcatcgaagtgcgatggtttctcaatggacaggaggaaaaggctggcatggtgtcaacggggctcattcagaatggcgattggacgtttcaaacgctggtgatgctcgagaccgttcctcggtccggcgaggtatacacttgccaggtcgaacatccaagtgtgacatcgcctctgaccgttgaatggagggctcggtccgagagtgctcagtctaaaatgctgagtggagtcgggggtttcgtccttggtttgctctttctgggcgcaggccttttcatttacttcaggaatcaaaaaggccatagcggacttcagccaacagggttcctgtcatag

SEQ ID NO: 229424 - DNA, 801 bp, synthetic construct
  misc_feature 1..801: note = Description of Artificial Sequence: Synthetic coding sequence
  source 1..801: mol_type = other DNA
atggtttgtttgcggcttcccggaggctcttgcatggcagttctcaccgtgacactgatggtcctgtctagccctcttgcgctggctggggacactagaccacgcttcctggagtattcaaccagtgaatgccacttcttcaacggcaccgagagggtgagatatctggacaggtatttccacaatcaagaggaaaacgtgcgattcgatagcgatgtgggtgaattcagagcagtaacggagctcggcaggccggacgcagagtattggaactcacagaaggaccttctggagcagaagcgaggcagagtagataactactgtagacacaactacggcgttgtggagagttttaccgtgcagcgtcgcgtgcaccccaaagtgactgtgtacccatccaagacccagcctttacagcaccacaacctcttggtatgctcagtctcaggcttctatcccggttctatagaggtgaggtggttccggaacgggcaagaagagaaaaccggagtggtgagcaccggcttaatccataacggcgattggacattccagactttggtgatgcttgagaccgtgcctagatccggcgaggtgtacacctgccaggtggagcacccttccgtgacatcacccctaaccgtcgagtggcgcgctcggagtgagtctgcccagtcaaagatgctgtccggggtgggcggtttcgtgctggggctgctcttcctgggagctgggctgttcatctacttcaggaatcagaaaggacattccggcctccagcctagaggatttttatcttag

SEQ ID NO: 229425 - DNA, 753 bp, synthetic construct
  misc_feature 1..753: note = Description of Artificial Sequence: Synthetic coding sequence
  source 1..753: mol_type = other DNA
ctgcttaagctgacccgggacttcccccagcgacatgaaaaatatcagagctgggcgggaacctttcatctgtgcctgaagaagaacaagtatccagacagccgctctacctttatcaagcacgcgggaagctatctaaaacgcggtgagtttttgtctatccacactgccatcacatgtttcttcttgcagatttctgccagatttctggaacaggtgaaacatgagtgtcattttttcaatggcacagaaagggtgcgtttcctggatcgatatttttaccaccaggaggagtatgtacgtttcgatagcgatgtgggcgagtatcgggcagtaaccgagcttggacgtcccgatgccgagtactggaacagtcagaaggatctcttggagcagcggagagctgaagttgacacctattgccgccataattatggcgttgtggaaagcttcaccgtgcaacggcgtgtctaccctgaagtcacagtctacccggctaagactcagcccctccagcaccacaatttactggtttgttccgtgaatgggttctatccaggctccatcgaagtgagatggtttaggaatgggcaggaagagaaaactggcgtcgtgtctaccggcctgattcagaacggggattggacatttcaaacactggtcatgctggaaactgtccccaggtccggggaggtgtatacctgccaagtggaacatcccagtctgacttcaccactgactgtagagtggtag

SEQ ID NO: 229426 - DNA, 756 bp, synthetic construct
  misc_feature 1..756: note = Description of Artificial Sequence: Synthetic coding sequence
  source 1..756: mol_type = other DNA
tgactcctgaagctgacgcgggatttccctcagagacacgaaaaataccaatcctgggctggcactttccacttgtgcttgaaaaagaacaagtaccccgattcgcggtctacctttatcaagcacgccggttcctatttaaagcggggtgaatttcttgccatccacacagccataacttgttttttccgccagattagcgcaaggttccttgaatatagcacatctgagtgccatttctttaatggaaccgaaagggtgcggtacctagacagatattttcacaatcaggaggagaacgtgcgcttcgattctgacgtgggggaattcagagctgtgacagagctcgggagaccagacgctgaatactggaactctcaaaaggacctgctggagcagaagcggggtcgggtggataattattgtcgacataattacggagttgtggagtcctttacagtgcagcgtcgcgtgcaccccaaggtaaccgtgtacccatctaaaactcagccactccaacatcacaaccttctggtctgcagcgtgagcgggttttatccaggctctatagaggtgagatggtttagaaacggccaggaggaaaaaactggggtcgtctctacgggtcttatccataatggagattggactttccagacactcgttatgttggaaactgtgcccagaagtggcgaggtgtatacctgccaggtcgagcacccgtctgtgacaagccccctgaccgtggagtggtag

SEQ ID NO: 229427 - DNA, 801 bp, synthetic construct
  misc_feature 1..801: note = Description of Artificial Sequence: Synthetic coding sequence
  source 1..801: mol_type = other DNA
atggtatgcctgaaatttcctggcggatcctgcatggcggctctcaccgtgacgctcatggtacttagttcccccttggccctggccggtgatactcgcccacgattcctggaacaagtaaagcatgagtgtcacttctttaacggcactgagagagtccggtttttagacagatacttttatcaccaggaggagtacgtccgatttgacagcgacgtgggggagtatcgggcagtgaccgaacttggacggcctgacgctgagtattggaattcccagaaagacctgctagaacagagacgcgctgaagtggatacctactgcaggcacaactatggcgtggtcgagtcgtttaccgtgcaacggcgagtgtacccagaggtgaccgtatatcccgcaaaaacgcagccattgcagcatcataatctccttgtttgctctgtcaatgggttttatccaggaagcattgaggtgagatggtttcgaaacggacaggaggagaagacaggcgtcgtcagcactgggttaattcagaatggggattggaccttccagactctggtgatgctagagacagtcccaaggtccggagaggtgtacacatgccaggtggaacacccctcgcttacatcaccgttaacggtggaatggcgggctcgtagcgaatccgcccagtctaagatgctgagtggggtgggcggatttgtgctcgggttgttgtttctgggtgcgggactgttcatctactttaggaaccagaaggggcattcaggactccagcctaccggcttcctgagttag

SEQ ID NO: 229428 - DNA, 756 bp, synthetic construct
  misc_feature 1..756: note = Description of Artificial Sequence: Synthetic coding sequence
  source 1..756: mol_type = other DNA
tgactccttaagctaacgagggactttccacaacgccatgagaaatatcagtcatgggccggaactttccatttatgtttgaagaaaaataagtatcctgatagtcgaagcacattcataaaacacgcagggagttacctcaaacggggagagttcctcgcgatacacacagccattacatgcttttttcgtcagattagcgcacgttttctggagtatagtacatccgagtgccacttttttaacggaacagaacgagttcgatatttggaccggtactttcataaccaggaagagaacgttcgcttcgatagcgacgtgggtgagtttagggccgtcacagagttaggacgccctgacgctgaatactggaacagccaaaaggacctgctggaacagaaaagaggcagggtggacaactactgccggcacaactatggcgtggtggaatccttcaccgttcagcgtcgtgttcatcctaaggttacagtctacccgagcaaaacccagcctttgcagcatcataatcttctggtgtgctccgtgtccggcttctatccaggatcaattgaggttcgttggtttcgcaatggtcaagaagaaaagacaggggtcgtgagcacggggctgattcacaacggggattggaccttccagactctagttatgctggagaccgtaccacgctctggcgaagtgtacacttgtcaggtggagcatccctccgtgaccagtcccctgactgtggagtggtag

SEQ ID NO: 229429 - DNA, 753 bp, synthetic construct
  misc_feature 1..753: note = Description of Artificial Sequence: Synthetic coding sequence
  source 1..753: mol_type = other DNA
taactgctgaaactgacccgggattttccgcaacggcacgaaaagtaccagagctgggctggcaccttccacttgtgtctaaaaaagaacaaatatcctgatagtaggagtactttcatcaaacatgctgggtcatacctgaagcggggagagttcttaagcattcatacagctatcacctgtttttttcttcagatctctgccagattcctatggcagggcaaatacaaatgtcactttttcaacggcacagagagagtgcagttcttggagagactgttttacaatcaagaagagttcgtgagattcgatagtgacgtgggagagtaccgcgcagttaccgaactagggcgaccggtggccgaatcatggaatagccagaaagacattctggaagataggcgcggacaggtcgacaccgtatgccgccataattatggtgtgggagagagttttacagtgcagagacgggttcatcctgaggtgaccgtctacccggcaaagacccagcccctgcagcaccataatctacttgtttgctccgtcagtggattttatccgggttctatcgaggtaaggtggtttagaaatggacaggaagagaaggctggagtggtatcaacggggctgattcagaacggggattggaccttccaaacacttgtaatgctggagacggtgcctcggtcaggcgaggtgtatacatgccaagtcgaacacccctctgtgatgtctcctctcacagtagaatag

SEQ ID NO: 229430 - DNA, 801 bp, synthetic construct
  misc_feature 1..801: note = Description of Artificial Sequence: Synthetic coding sequence
  source 1..801: mol_type = other DNA
atggtgtgtctgaaactgccaggagggtcttgtatggccgcactaaccgttaccctgatggtgctgtcatctccactggcactggccggagacacacaacctcgattcctctggcagggcaagtacaagtgccactttttcaacgggactgagagagttcaattcttagagaggctgttttacaaccaggaggaatttgtacggttcgactctgacgtgggagagtacagggctgtgaccgagttggggagacctgtagccgaatcatggaactcacaaaaagacatcctggaggatcgacggggacaggtagacaccgtgtgtagacacaattatggagtcggggaatccttcactgtccagcgtcgcgtgcacccagaggtcactgtttatcctgctaagactcagcctctacaacaccacaacctgctggtgtgtagtgtgtcaggcttctaccccggatcaatcgaggtgcgctggtttaggaacggccaagaggaaaaggctggggtagtcagcacaggcctgatccaaaatggcgattggactttccagacactggtgatgcttgagacagttccacggtcgggtgaagtatacacctgtcaggttgagcatccatccgtgatgagccctctcaccgtcgaatggcgggctcgatccgagtcagcccagagcaagatgttgtctggcgttggtggttttgtcctgggtctgctttttcttggcgctggcctgttcatctacttccgaaatcagaaaggacattcaggcttgcagccaactggattcctgtcctag

SEQ ID NO: 229431 - DNA, 801 bp, synthetic construct
  misc_feature 1..801: note = Description of Artificial Sequence: Synthetic coding sequence
  source 1..801: mol_type = other DNA
atggtctgcttaaagcttccaggaggctcttgcatggcggctctgactgtgactctcatggttttgtcctcccctctggctctggctggggatacacagccaaggtttctgtggcagggaaagtacaaatgccacttcttcaatggtaccgaacgcgtacagtttctggaacgcctcttctataaccaagaagaattcgtgcggtttgacagcgatgtgggagagtacagagccgtcacagaactcggacgccctgtagccgaatcctggaacagtcagaaagatatcctcgaagatcgcagggggcaggttgatacagtctgtagacacaattacggggtaggggagtcgtttactgttcaacgcagagtccatccagaggtcacagtgtacccagctaagacccagccccttcagcaccacaacctcctggtgtgctccgtgagtgggttctatccgggaagcatcgaggtgcgctggtttcgcaatggccaggaggaaaaagcaggggtcgttagtaccggtctgatccaaaacggtgattggactttccagacgcttgtcatgctggaaaccgttcctcgtagcggtgaggtgtacacatgtcaggtggaacacccaagtgttatgtctccccttactgtagaatggagggcgcgttccgagtccgcccagtcaaaaatgttgtcgggcgtcggcggttttgtgctgggtctcctgtttctgggagcgggtctgttcatctacttccgaaatcagaagggccattccggactccagccgactggctttttgagttag

SEQ ID NO: 229432 - DNA, 810 bp, synthetic construct
  misc_feature 1..810: note = Description of Artificial Sequence: Synthetic coding sequence
  source 1..810: mol_type = other DNA
atgagttggaagaaagcattacggatccctggcggactgcgagtggcgaccgtcaccctgatgcttgctatgctgagcaccccggtggcggaggggagagactctcctgaggatttcgtttatcagtttaaggggatgtgttacttcaccaacggaaccgagcgcgtaaggggcgtgacccgctacatttacaaccgcgaggaatacgctcggtttgacagcgatgtgggtgtgtacagagccgtcacacccctggggccaccagcggctgaatattggaactctcaaaaagaggtcctcgaacgaacacgcgcagaactggacaccgtgtgtaggcataactaccaattggaacttcgcactacactgcaacggagagtctacccagaggtcacagtttaccctgctaagacccagcctttacagcatcacaacctgctcgtctgtagtgtgaatggcttctatcccggaagcatcgaagttcggtggtttaggaacggccaagaggaaaaaacaggagtcgtgagcaccgggctgattcagaacggcgattggacctttcagactcttgtgatgctggagaccgtgccacgctctggcgaggtgtatacatgtcaagtcgaacacccctccctgacctctcctcttaccgtcgagtggagggcccgatccgagagcgcccagagtaagatgttgtctggcgtcgggggatttgtacttggccttcttttcctgggagccggtcttttcatttatttcagaaaccagaagggtcattctggtcttcagcctacaggttttctctcctag

SEQ ID NO: 229433 - DNA, 792 bp, synthetic construct
  misc_feature 1..792: note = Description of Artificial Sequence: Synthetic coding sequence
  source 1..792: mol_type = other DNA
atggtgtgtctgaaattcccagggggaagctgtatggcagccctcaccgttacactgatggtgttatccagtcccttagccctagcgggagatactcggcctaggttcttggaacaggtgaagcacgaatgtcatttctttaacgggaccgaaagggtaagattcctcgaccgttatttttaccatcaggaagagtacgtgaggtttgacagcgacgtcggggaataccgagcagtcacagagttaggcaggccagatgcagagtactggaattcccagaaagacttacttgagcagagacgggctgaagtcgatacctattgtagacataattatggagtagtggagagctttacggtccagaggcgcgtttacccagaagtgaccgtctatccagcgaaaacacagccgttgcagcaccataatctgctcgtctgcagcgttaatggattctaccccggttcaatagaggtgcggtggtttcgcaatggtcaggaagaaaagaccggcgtggtatcaacaggacttattcaaaacggagattggacttttcaaacactcgtaatgttggaaacagtgcctagatccggtgaagtctatacttgccaggttgaacatccatcactcacttcccctttgacagtagagtggcgagccagaagtgaatcagcgcagtctaagatgctctctggcgtcggaggctttgtcctgggactgctgttcctgggcgcagggttatttatctattttcgcaaccagaaagggcacagcggcctgcagccaactgggtag

SEQ ID NO: 229434 - DNA, 141 bp, synthetic construct
  misc_feature 1..141: note = Description of Artificial Sequence: Synthetic coding sequence
  source 1..141: mol_type = other DNA
cactcgggccttcagcctaccgggaatacattctcatcctccctgcgaaatcggttcgggggacaggcccagcacgcctgtaacccatccactctggggggaagaggcggaagaatcatgagaatacctgagctcaagtag

SEQ ID NO: 229435 - DNA, 891 bp, synthetic construct
  misc_feature 1..891: note = Description of Artificial Sequence: Synthetic coding sequence
  source 1..891: mol_type = other DNA
atggtgtgtttgaagttcccgggtgggagctgtatggccgctctgactgtcaccctgatggtgctgagctctccgctggctcttgcaggggatacacggccaagatttctagagcaggtgaagcacgagtgccatttttttaatgggactgaacgagtcaggtttctcgaccgctacttctaccatcaggaggagtacgtgcgcttcgatagtgatgtaggtgaatatagggccgtcaccgaattgggacgtcccgacgccgaatattggaatagccaaaaggatctgctggagcaaagacgggcagaggtggacacgtattgccgacacaattacggcgtggtcgagtcttttaccgtccagcgtagggtataccctgaagtgaccgtttaccccgctaagacacaacccctccagcaccacaacctgctagtctgctctgtgaatggattctacccaggaagcatagaggttcgctggttcagaaacggacaggaggaaaaaactggcgtcgtgagtacaggactaatacaaaatggagattggactttccagactctggtaatgttggaaaccgtccctcggtccggcgaggtctacacatgccaggtggagcacccgtctttgacgtcacctctgactgttgaatggcgagcacgcagcgaatcagcacagtctaagatgctttcgggggtgggaggttttgtcctcggcctcctgtttttaggggctggattgttcatttattttcggaaccagaaaggtcattccgggctccaaccaaccggaaatacatttagctcttctctgcggaaccgctttggaggacaggctcagtggttgaccccagtcattccagctctctgggaggccgaggcgggtgagtcttag

SEQ ID NO: 229436 - DNA, 801 bp, synthetic construct
  misc_feature 1..801: note = Description of Artificial Sequence: Synthetic coding sequence
  source 1..801: mol_type = other DNA
atggtctgtttgaaactgcccggaggatcctcgttggcggcactcactgttacacttatggttctgtcaagtcgcctcgcttttgctggagacactagacccagatttttagagctcttaaaatctgagtgccatttcttcaacggaaccgagagagtgcgctttctagagcgacacttccataaccaggaggagtacgccaggtttgactctgatgtgggggaatatcgggcagtgcgcgagttgggtagacctgacgccgagtattggaacagccagaaggatctgcttgaacagaagaggggtcaggttgacaactactgtcggcataattatggagtgggagaatcttttactgtccagcggcgtgtccaccctcaggtgacagtgtaccccgctaaaacgcagcctctccaacaccataaccttctggtctgttctgtgagcggtttttacccaggtagcatcgaggtgcggtggtttagaaatgggcaggaggaaaaagcaggcgttgtaagcaccgggctgattcagaacggagattggaccttccagacactcgtgatgctcgaaacggttccacgtagcggtgaagtgtacacttgtcaggtggagcaccccagcgtgacgtcacccctgactgtggaatggagcgcaaggtccgagtccgcgcaaagcaagatgctttctggtgttggagggttcgtattaggattactgtttttaggcgcaggcctgtttatttactttcgcaatcaaaagggtcattcgggcctccagccaaccggatttctcagctag

SEQ ID NO: 229437 - DNA, 801 bp, synthetic construct
  misc_feature 1..801: note = Description of Artificial Sequence: Synthetic coding sequence
  source 1..801: mol_type = other DNA
atggtgtgcctgaaattgcccggagggtccagcctggccgctctcactgttaccctgatggttctttccagtcgactggcattcgcaggggatactaggcccaggtttctcgaactccggaaatccgagtgccatttcttcaacggcactgagcgggtgcgttacctcgaccgctacttccacaatcaagaagagttcctgcgatttgacagcgatgtcggggagtatcgggctgtgaccgagctgggtcggcctgttgcggaaagttggaatagccaaaaagacctcctggaacaaaaacgcggacgtgtagataactattgtcgacacaactacggtgtgggcgaatctttcaccgtgcaacgcagagtgcacccgcaggtgacagtgtatccagccaaaacgcagcctttacagcaccataatcttcttgtgtgcagcgtctctgggttctatcctggctcaattgaagtgcgctggttccgcaacggccaggaagagaaggcgggagtggtgagtactggactcatccagaatggtgactggaccttccagaccctggtaatgctggaaactgtccctcgctctggtgaggtatatacgtgccaggtggaacacccgtcagtcacatctgcactgaccgtcgaatggcgcgctagatctgaatcagcacagtccaagatgctctccggggttggcggatttgtgctagggctgctcttcctgggtgcgggtctgtttatttatttccgcaaccagaagggccacagcggccttcaacccactggttttttgagttag

SEQ ID NO: 229438 - DNA, 801 bp, synthetic construct
  misc_feature 1..801: note = Description of Artificial Sequence: Synthetic coding sequence
  source 1..801: mol_type = other DNA
atggtttgtttgaaactgcccggtggatcttccctagcagccttaaccgtcactctaatggtgctctcttctagactcgcatttgcaggcgatacacgaccgcgattcttggagttactcaagtcggaatgtcattttttcaatggcaccgaacgcgtgaggtttctcgagcgccactttcacaaccaggaggaatatgccaggtttgatagtgatgttggtgagtatcgcgcagtgagagagcttggtaggcccgacgctgaatactggaactcgcagaaagatttactagagcagaagcggggtcaggtcgacaattactgtcgtcacaactacggtgtcggggaatcttttacagtccagcgcagggtgcacccacaagtaaccgtgtatccagcaaagacccagcctcttcagcatcataacctgctggtatgcagcgtgtcaggcttctatcctgggtccattgaggtgcgctggtttaggaatgggcaggaggagaaggctggagtcgtctcaacaggcctaatccagaatggcgattggacctttcagacactcgtgatgttggaaaccgtgcccaggagcggggaggtgtacacctgccaggttgagcaccccagcgttacctctccactgactgtcgaatggagcgcccgttcagagagtgcccagtcgaagatgctctcaggagtcggaggattcgtcttgggtcttttgtttcttggcgcaggcttattcatctatttcagaaaccagaagggccactctggccttcagcctaccggcttcctgagttag

SEQ ID NO: 229439 - DNA, 801 bp, synthetic construct
  misc_feature 1..801: note = Description of Artificial Sequence: Synthetic coding sequence
  source 1..801: mol_type = other DNA
atggtgtgtcttaaattacccggaggatcttacatggccaagcttacagtgactttaatggtcctgtctagtcccttagcactggcaggggacacccgaccgcgattccttcagcaggataaatatgaatgtcatttctttaacggcacagagagggtccggttcctgcaccgagatatttacaaccaggaggaggacctgaggtttgacagtgacgttggtgagtatagagccgtgactgagctcggtaggccagacgcagagtattggaattctcaaaaagattttcttgaagatcggagagctgctgtggatacgtactgccggcataactatggtgttggcgagtctttcacagtccagcgcagagtggaaccaaaggtgactgtgtacccggcacgtacgcagacgttgcaacatcacaacttgctggtgtgcagcgtgaatggattctatccaggaagcatcgaagtcaggtggttccgcaactcccaagaggagaaagccggtgtagtgagtactggccttattcagaacggcgattggacttttcagacgttagtgatgcttgaaaccgttcctaggtcgggagaagtgtacacatgccaggtggagcatccatctgtcactagtccactgaccgtggaatggcgcgctcagagtgagtcagcccaatccaaaatgttgagcggcgtcggcggatttgtgctagggttgctcttcttgggggctgggttgttcatttacttcaagaatcagaaagggcactctgggctgcaccctaccggcctagtgtcgtag

SEQ ID NO: 229440 - DNA, 891 bp, synthetic construct
  misc_feature 1..891: note = Description of Artificial Sequence: Synthetic coding sequence
  source 1..891: mol_type = other DNA
atgggagagttaatggcctttctgctgccattgatcatcgtgctcatggtaaaacactccgactctaggacacactctctgcggtacttcagattaggggtcagcgatcccatccacggggtaccagagtttatttccgtaggttacgttgattcacacccgatcaccacatacgactctgtcacccgccagaaggaaccaagagctccctggatggcagaaaatttggcacctgatcactgggagcgctacacccaactcctgcgaggctggcagcagatgttcaaagtggagctcaagcgactgcaaagacactataatcattctgataacgtcgcccacaccattaaacaggcatgggaggctaatcaacacgagctcctgtaccagaagaattggcttgaagaggagtgtattgcttggctgaaaaggttcttagagtatgggaaggatacgctgcagcgtaccgaaccacccttggttcgtgtgaatagaaaagagacctttccaggcgtgacagccctgttttgcaaagctcacggattctatccaccagagatctatatgacttggatgaagaacggggaagagattgtgcaagaaatagattatggggatattcttccgagtggggacgggacgtaccaagcctgggctagtatagagttggaccctcaaagctccaatttatacagttgtcacgttgagcactgtggtgtgcacatggttcttcaagtcccgcaggaatccgagacgatccctctggtcatgaaggccgtgagcggatcaattgtcttagtaattgttctagctggggtgggagtgctcgtgtggcgcaggagaccacgcgaacagaatggtgcaatttatttacccacgcccgatcggtag

SEQ ID NO: 229441 - DNA, 1026 bp, synthetic construct
  misc_feature 1..1026: note = Description of Artificial Sequence: Synthetic coding sequence
  source 1..1026: mol_type = other DNA
atgggagaactcatggcatttctgttgccattaatcatagtgcttatggtgaagcactccgattcacgcacccactccctacgttactttaggcttggggttagcgatcccatccatggcgtacctgagttcatatctgttggctacgttgactcacaccccattaccacgtatgactccgtaaccaggcaaaaggagccacgggctccttggatggcagaaaacctggctccagatcactgggaacgctacactcaattgttgcgcggatggcaacagatgttcaaagtagagctgaaacgtttgcagaggcattataaccatagtggctctcatacctaccagcgaatgattggatgcgagctccttgaggatggaagcaccaccgggttccttcagtacgcctacgatgggcaggacttcctgatatttaacaaggacaccctttcatggcttgcggtggacaatgtggctcacactataaagcaggcctgggaggctaaccagcatgagttgctgtatcagaagaactggctagaggaagagtgtatcgcatggctaaaacgcttcctggagtacgggaaggatactttgcagcggaccgaacctcctcttgtgcgcgtgaaccgaaaagagacattccctggcgtcaccgctctgttctgcaaagctcacggtttttatccacctgagatctacatgacctggatgaagaatggagaagagattgtacaagagatcgattacggggacatccttcctagcggcgatggcacctaccaggcctgggcatcaattgaattggacccccagtcctctaatttatacagttgccatgttgagcactgcggagtgcacatggtgctccaagtgcctcaggaaagcgagaccatccccctggttatgaaagccgtaagtggcagcatcgtgcttgtcattgtgctggccggagttggagtgctagtctggaggcgcaggcccagggagcaaaatggagctatctacctacctacacccgaccgttag

SEQ ID NO: 229442 - DNA, 645 bp, synthetic construct
  misc_feature 1..645: note = Description of Artificial Sequence: Synthetic coding sequence
  source 1..645: mol_type = other DNA
atgggggagctcatggcctttcttctgcctttaattattgtgctgatggttaagcactctgactcacgtacacactcccttcgctacttccgccttggagtctcggatcccattcatggggtgccagaatttataagtgtcgggtacgtcgactctcatcctattacaacttacgactctgttacgagacagaaggaaccaagggcaccgtggatggcagagaatctggcgccagatcattgggagcgctatacgcaacttctgcgagggtggcagcagatgtttaaagtggaattaaagcgcttgcagagacattataaccacagcggcagccacacttatcagcggatgattggctgtgaacttctagaggacggaagcaccaccggatttctgcagtacgcatacgatggccaggattttctaatcttcaacaaggacacactttcatggctggctgtggacaacgtcgctcacacgattaagcaggcatgggaggctaatcaacatgagctcctgtaccaaaagaattggctggaggaggagtgcattgcgtggttgaagaggtttctcgagtatggtaaagataccctgcagaggaccgagcagaacggggctatctacctgcccacccctgacaggtag

SEQ ID NO: 229443 - DNA, 792 bp, synthetic construct
  misc_feature 1..792: note = Description of Artificial Sequence: Synthetic coding sequence
  source 1..792: mol_type = other DNA
atgtgggaacttcgcagcgccagtttttggagagccatcttcgcagaattcttcgccaccctgttctacgtgttcttcggactaggatcctcccttaggtgggcccctggaccgttacacgtgttacaggtagccatggcatttggcctcgcactggctacgttggtccagtccgtcggccatatctcaggcgcacacgtcaatccggcagtgacgttcgcctttctggtgggatctcaaatgtccctgctcagagccttctgctacatggctgctcagttactaggggcagtggcaggtgccgctgtcctgtatagcgtcacccctcccgcagttaggggcaacttagccctcaacaccctccacccagccgtgagtgtggggcaggccacaacagtggaaatcttcctaaccctgcaatttgtgctctgcattttcgcgacgtacgatgaacgccgaaatggccagctggggagtgtggccctcgccgtcggcttcagcctagccctgggacacctcttcggtatgtactataccggagctggtatgaaccccgcaaggagcttcgccccagcaattctgactggtaactttactaaccactgggtatattgggtgggaccaattatcggcggaggactgggttcactgctgtatgattttttgttgtttccaagactcaagtcaatttccgaacgcctttccgttttgaaaggcgctaagccagatgtcagcaatggacagcctgaggtcaccggcgaaccagttgagctgaacacgcaggctctgtag

SEQ ID NO: 229444 - DNA, 2682 bp, synthetic construct
  misc_feature 1..2682: note = Description of Artificial Sequence: Synthetic coding sequence
  source 1..2682: mol_type = other DNA
atggcaacagaggagtttatcattcggatccctccctatcactatattcacgtcttggatcaaaactcaaacgtgtctcgagtggaggtcgggcctaagacctatattcggcaagacaacgaaagggtgctctttgcaccaatgcggatggtcacagtgccacctagacactactgtaccgtcgcaaatccagtgagtcgggacgcccaggggctagtcctgttcgacgtgacggggcaagttaggttacgccacgcagacctggagataagattagcacaggatcctttccctctttatcctggagaggttttggagaaggacatcacgcctctccaggtggtactgcccaatacagcgttgcatctgaaggccctcctggactttgaggacaaggatggcgataaggttgtagccggtgacgaatggctctttgagggcccagggacatatatcccaaggaaggaagtcgaggtggttgagatcatacaggctaccataattcgccagaaccaggctctgcgactcagggctcgtaaggagtgctgggacagggatggtaaggagcgggtcacaggtgaagagtggctggttaccacggtgggggcttatctccccgctgtatttgaggaggtcctcgatcttgtcgacgccgtgattttgaccgaaaagactgctttgcacttgcgggcaaggcggaacttccgcgacttcaggggcgttagcagaagaaccggagaagaatggcttgtgacggtccaagataccgaagcccatgtgcctgacgtgcacgaggaggtcctcggagtggtgcctatcactacactcgggccacacaactactgcgtgattctcgatcccgttggtcccgatggcaagaaccagttaggacaaaaacgcgtggtaaagggagagaagagcttttttttgcagccaggcgagcagttggagcaagggattcaagacgtttatgtgttgtctgaacagcagggtctgctgttgagggcactgcaaccactggaagaaggggaagatgaagagaaggtttcccaccaggctggcgaccattggctgatcagagggcctctcgaatacgtgccctccgccaaggtggaagtggtggaagaaagacaagccataccactagacgaaaacgagggaatttacgtgcaggacgtcaagactggcaaggtaagggccgtgatcggatcaacttatatgttaactcaggacgaggtcctctgggagaaggagctgccccctggcgtcgaggagttgctgaataaaggccaggaccctctcgcagatcgcggtgaaaaggacacggctaagagcctgcagcctttggcccctagaaacaagacccgggttgttagctatcgcgttcctcataatgccgctgttcaggtgtacgattatagggaaaaacgcgctcgagtcgtttttggccctgagcttgtatcgctgggccctgaagagcagtttaccgtcctcagcctttccgcaggaaggcccaaaaggccccacgcccgtagagccctctgcctactgctgggcccagactttttcacagacgtcattaccatcgaaactgccgatcacgcccgtctgcagctgcaattggcatacaactggcactttgaggtgaacgacagaaaggacccccaggaaacagcaaaactattctccgtgcccgacttcgtgggcgatgcatgtaaagccattgcgtctagagtaaggggggcagttgcaagcgtgaccttcgacgatttccacaagaattccgcccgaatcatcagaacggccgtgtttgggttcgagacctctgaagctaaaggtccagacggaatggcactacccaggcctcgagaccaggctgtttttccacagaatgggctcgtggtgagcagcgtcgatgtgcagtccgtggaacctgtcgaccagaggactagagatgcgctacagcgtagcgtacaattggctatagagattacaactaatagtcaggaagccgctgcaaaacacgaggcccagcgcttagaacaggaggctcggggaagacttgaacgacaaaagatactggaccagagcgaggctgaaaaagccaggaaggaactgctagagctcgaagccctaagcatggccgtggaaagcaccggaaccgctaaagcggaggccgagtcgagggcggaagctgctcgcattgagggggaagggagcgtgctgcaagccaaattgaaggcccaggccctggcgatagagacagaagccgagcttcagagggtgcagaaagttcgggaattagaactggtttatgctagggcccaactggagctcgaagttagcaaggctcagcaactggctgaagtagaagtgaaaaaatttaagcagatgactgaagctattggaccctctacaatcagggatcttgccgtggctggccctgaaatgcaggtgaaattgttgcaatcgctggggctcaaaagcacgctcatcaccgatggatctacaccaatcaatctgtttaatacagccttcgggctgcttggcatgggcccagaagggcagcctctgggaagacgggtggcaagcggtccgtcacccggagagggcattagcccacagtcagcgcaagcgccacaggctcctggcgacaaccacgtcgttcccgttctgcgctag

SEQ ID NO: 229445 - DNA, 2682 bp, synthetic construct
  misc_feature 1..2682: note = Description of Artificial Sequence: Synthetic coding sequence
  source 1..2682: mol_type = other DNA
atggccacagaagagtttattattcggatccccccttaccactatattcacgtgttggatcagaactctaacgttagtcgcgtggaggtggggccaaagacatatatcagacaggataatgagagggtgctgttcgccccaatgcggatggtcacagtgcctcctagacactactgcacagtagcaaaccctgtctctagggatgctcagggcctggtcctctttgatgtgacggggcaggtaagactgaggcacgccgatctcgagatcaggttggcccaggacccctttcccctgtacccaggggaagttttagagaaagatataacccctctccaggtggtactacccaacaccgcccttcacctcaaggccctcttggacttcgaagataaagacggagataaagtggtggcaggcgacgagtggctatttgaggggccaggaacctacatcccaagaaaagaggtcgaagtagttgagatcatccaggccactatcattcggcagaatcaggcgttgcggctgcgcgcacggaaggaatgttgggaccgtgacgggaaggagcgtgtgactggcgaagaatggctggttaccacagtgggagcctatctgccagccgtgttcgaggaggtgctggatctggtagacgctgtaatccttactgaaaaaactgctcttcaccttagggctcggcgaaactttcgagacttccgcggagtttctagaagaacaggcgaagagtggctcgtaactgttcaagatactgaggcccatgtgcccgatgttcacgaagaggtgctgggcgtagtcccgatcactacattaggaccacataattattgcgtgatcctggaccctgtaggacccgacggaaagaaccagcttgggcagaagcgggttgtcaagggagagaaaagcttcttcctccaacccggtgagcagctagaacagggaattcaagatgtgtatgtgctgagcgagcagcaaggcctcctcttgagagctcttcaaccccttgaagaaggcgaagatgaggaaaaggttagtcaccaagccggagatcactggcttatccggggtccgctggaatatgttccttccgcaaaggtggaagtggtggaagagcgtcaggccattcccctggacgaaaatgaaggcatctatgtccaggacgttaaaaccggaaaagtgagagccgtgatcggtagcacctacatgttaacccaagacgaagttctgtgggagaaagagctcccgccaggtgtggaagaactgctaaacaaaggtcaggatcccctagctgaccggggtgagaaagacaccgccaaatcactgcaacctttggcaccccgtaacaagactcgggtcgtgagctacagagttccacataatgccgcagttcaagtgtacgactatagagaaaagcgtgccagggtggttttcggccctgaactggtgtctctaggtcccgaggagcaattcacagtgctctctcttagtgccggtagaccaaaacgtcctcatgcgagacgcgcactttgtctgctgttggggcctgacttcttcacagatgtgatcaccatcgaaacggccgatcatgcacgccttcagttgcaactcgcctacaattggcattttgaggttaacgatagaaaagaccctcaggaaaccgctaagttgttcagtgtgcctgactttgtcggagacgcgtgcaaagccatcgccagtagagtgcgtggcgctgtcgcttccgtaaccttcgatgatttccataaaaattctgctaggatcatccgcaccgcagtctttggatttgagacaagcgaagccaaggggcctgacggtatggcgctccctagaccaagagatcaggctgtgttcccccagaatggattggtagtgtccagtgtggatgttcagtccgtcgagcctgtggatcagaggactcgcgacgccctgcagagaagcgtgcagctcgcaattgaaataaccaccaactcccaggaggccgctgctaaacatgaggctcagcggctcgaacaggaggcaaggggcaggcttgagaggcagaagattctagaccagtctgaagcagaaaaagctcggaaggaacttctggaattggaggctctgtcaatggccgttgaatctacaggcaccgctaaagccgaggcagagtcccgtgccgaggccgcaaggatcgaaggggagggctccgtcttacaggctaaactaaaggcccaagctctagctatagagactgaagctgagctacagcgcgtgcagaaagtccgggagctggagttggtctatgcccgagctcagctcgagctcgaggtgagcaaagctcaacagctggcggaggtggaagtgaaaaagtttaagcagatgaccgaagcaattgggccatctactattagggaccttgcggttgctggacctgaaatgcaggttaagcttctacaatctttgggactcaaatccaccctcatcaccgacggatccacaccaataaatttgttcaatacggcctttggactgctaggaatgggacctgaggggcagccgctcggtagacgtgtcgcctcaggcccttccccaggggagggcatctctccccagtcagcccaggctccccaggctcctggcgataatcacgtcgtgccggtcctgcgctag

SEQ ID NO: 229446 - DNA, 480 bp, synthetic construct
  misc_feature 1..480: note = Description of Artificial Sequence: Synthetic coding sequence
  source 1..480: mol_type = other DNA
atgtgttggacccgaacagctacatgcccagtgtggcgcagcggtcagcgcccaacgagtggacgcacaatgcgaggcagcggtttcgggggacggcgtcacccgtatggcaaggattcaccagcccctccaggttctgctgagcttcctggtttgcagggatccgtaccaccgcactgggggggagttgctggaaacagcgccggacatcggggtccacgcgctcgctgccctagggggggagccggaggctgcgcccaccaccaccctgggcctcctcagcttctccgtgatagtcggccatgtagaacaggttggcaggagagcgcaggcgcagaggctaggggccagggaagggaagttttcttcccccctgccaggcgcgcagcgggtacgaggcatcccggttgtgtttgcgcagtgggagccgctggggcagccgctgaaggccctgcggcacccggaggcggaggcggatag

SEQ ID NO: 229447 - DNA, 1251 bp, synthetic construct
  misc_feature 1..1251: note = Description of Artificial Sequence: Synthetic coding sequence
  source 1..1251: mol_type = other DNA
atgtcaactaaacagatcacatgccgctatttcatgcacggagtctgtagagagggtagccagtgtcttttctcccatgacttagctaacagcaagccgtcgactatttgcaagtactatcagaagggctattgtgcttacggtactaggtgcagatatgatcatacacggccttcagctgcagctggaggcgctgttggcactatggcccattctgtgccatcgcccgcattccacagcccccaccccccaagtgaggtgaccgccagcattgtcaagaccaactcccacgagcctggcaagagggagaagcggactctcgtcctccgagatcgcaacctctccgggatggcagaacgaaaaacacagcccagcatggtctccaatccaggatcttgcagtgacccacagcctagtccagaaatgaagccacacagctacttagatgccatccggtctgggttagacgatgtggaggcctcaagctcttattctaacgagcagcaactgtgtccctacgccgctgccggagaatgcaggtttggtgacgcgtgtgtgtatctgcatggagaggtgtgcgaaatttgccggcttcaggtcctgcatccattcgatcccgagcaacgcaaagcccatgaaaagatctgcatgttgaccttcgaacacgagatggagaaagcatttgccttccaagcaagtcaggacaaggtgtgctccatctgcatggaggtgatcctagagaaggcctcggcatctgagaggcgctttggtatactaagtaattgcaaccacacgtactgtctgtcctgcatcagacaatggcggtgcgctaaacagttcgaaaatcctattataaaaagctgccccgagtgtcgagttatctccgagttcgtgatcccctcagtgtactgggtcgaggatcagaataaaaagaacgagcttattgaggcttttaagcagggaatgggtaaaaaggcctgtaagtactttgagcaggggaagggtacttgtcctttcgggtccaaatgtctgtacagacacgcttaccctgatgggaggctggcagaacccgagaaaccaaggaagcaactgtccagtcagggaactgttcgattctttaatagcgtaagactgtgggacttcattgaaaaccgtgaatcaagacacgtccccaataacgaagacgtggacatgactgagttgggggatctgttcatgcacctttccggagtggaaagcagcgagccctag

SEQ ID NO: 229448 - DNA, 1524 bp, synthetic construct
  misc_feature 1..1524: note = Description of Artificial Sequence: Synthetic coding sequence
  source 1..1524: mol_type = other DNA
atggaggaaccagctgcgccttctgaagcacacgaggctgcgggagcacaggccggtgccgaggcagcgagggagggagtcagcggcccagacctaccagtttgcgaaccctctggagagagtgctgctcctgactcagcattgcctcatgcagcccgtggttgggcaccgttccccgtggctccagtccccgctcatctccggaggggaggtttacgcccagcacccgcatctggtgggggtgcctggcccagccctctgccttcccggtcctcggggatttggactaaacagattatctgtcgttactacatccacgggcagtgtaaagagggagagaactgccgctacagtcatgatctctcaggacggaagatggccacagagggaggcgtatctccccctggagcttctgccggtggcggaccctctaccgccgctcatatcgaacctcccacccaggaagttgcagaggcaccacccgctgcgtcctcgctctccttgcctgtgattggtagtgcggctgagaggggattttttgaggcagaacgagacaacgctgacaggggcgctgcagggggtgcaggagtggagtcttgggctgatgccatagagtttgtgcctggtcaaccgtatagaggcagatgggtggcctcggctcccgaagcacccctacaatctagcgaaacagagagaaagcaaatggctgtgggctcaggactccggttctgctactatgccagccgcggagtgtgtttccgcggagaatcatgcatgtaccttcatggcgacatttgcgacatgtgtgggctgcagacactgcatcctatggatgctgcccagagggaggagcacatgcgggcatgtatcgaagctcacgagaaggatatggaactgagtttcgccgttcagagaggcatggataaggtatgtggtatctgcatggaggtggtgtacgagaaggctaaccctaacgaccggaggtttggaatcttaagcaactgcaaccatagcttctgtatacgatgcatccgccgttggaggagcgctagacagttcgagaatagaattgtcaaatcatgcccgcagtgtagagttacatcagagctggtcatcccctcagagttctgggtcgaggaggaggaggagaagcagaaactaattcagcaatacaaggaggccatgtctaacaaagcctgccgctatttcgctgaaggtagagggaattgcccgttcggtgacacttgtttttataagcacgagtatcccgagggctggggagatgagccgcctgggccaggtggcggatcttttagcgcatactggcatcaactggtggagccagtgcgtatgggagagggaaacatgctttacaagtccataaagaaggagctcgttgtcctgcgactggctagcctgctctttaaacgcttcctgtcactcagagatgaactacccttctcagaggaccagtgggatctcctgcattatgagctggaagaatacttcaacttgatactctag

SEQ ID NO: 229449 - DNA, 462 bp, synthetic construct
  misc_feature 1..462: note = Description of Artificial Sequence: Synthetic coding sequence
  source 1..462: mol_type = other DNA
atggccccagccgctgctacgggaggatcaactttgccatccggcttcagcgtattcacaaccctgcctgatctccttttcatcttcgagttcattttcggtggcctcgtttggattctggtcgcaagtagcctggtgccatggccccttgtgcagggatgggtgatgtttgtgtccgttttctgttttgtcgcaaccacaaccctcataattctgtacattataggagcccatggcggagaaacctcttgggtgacgctggatgcagcgtatcactgtactgctgcccttttctatctgtctgcctctgtgctggaggccctcgcaaccatcaccatgcaggacggattcacatatcggcactatcacgaaaatatcgcagctgtggtcttctcatatatagccactcttctatatgtggtacatgcggtgttctctttgattagatggaaaagcagctag

SEQ ID NO: 229450 - DNA, 168 bp, synthetic construct
  misc_feature 1..168: note = Description of Artificial Sequence: Synthetic coding sequence
  source 1..168: mol_type = other DNA
atggcgcctgccgcagccacaggaggctccaccctcccctccgggttctctgtcttcaccaccctgcccgacctgttgtttattttcgagttcgtgttctcttacatcgcaacacttttgtacgttgtgcatgccgttttcagtttaatcagatggaagtcaagctag

SEQ ID NO: 229451 - DNA, 336 bp, synthetic construct
  misc_feature 1..336: note = Description of Artificial Sequence: Synthetic coding sequence
  source 1..336: mol_type = other DNA
atggcccctgctgccgctaccggcggtagcacccttcccagcggcttcagtgtgttcaccactttacctgatctcctgttcatatttgagtttatttttggcggactggtctggatcctagtcgcaagctcactggttccatggcccttagtccaaggttgggtgatgttcgtcagcgttttttgtttcgttgccacgacaacacttatcattttatacataattggcgcacacgggggagagaccagttgggtaacactggtgttttcttacatcgctacactattgtatgtggtacatgcggttttttccttgatcaggtggaagtcctcttag

SEQ ID NO: 229452 - DNA, 294 bp, synthetic construct
  misc_feature 1..294: note = Description of Artificial Sequence: Synthetic coding sequence
  source 1..294: mol_type = other DNA
atggccccagccgcagcaaccggcggaagcaccctgccgagtgggtttagtgtgttcaccactctccccgatctgctcttcatctttgaatttgacgccgcatatcactgtacagctgcacttttttacctgagcgcgtccgtattagaggcactggccacaatcacaatgcaagatgggtttacctaccggcattatcacgagaatattgctgccgttgtgttctcttatatcgctacactcctctatgtcgtgcatgcagtgttctctctgattaggtggaaaagctcttag

SEQ ID NO: 229453 - DNA, 462 bp, synthetic construct
  misc_feature 1..462: note = Description of Artificial Sequence: Synthetic coding sequence
  source 1..462: mol_type = other DNA
atggcctcacccgaccctcctgccacctcttatgccccatccgacgtgccctccggggtggctttgtttctcacaatcccatttgcctttttccttccagaactgatctttggattcctcgtatggacgatggtggcagcgacccacatagtgtatccgcttttgcagggatgggtaatgtacgtgtccctcacctccttcctgataagtttgatgtttctgttgtcctatttatttggtttctataaacgattcgagagctggcgagtgttggatagtttataccacgggaccacaggaatactatacatgtctgcagctgtcttacaagtccatgccaccatcgtttctgaaaagctgctggatcccagaatttactacattaattcagccgcatcattttttgcatttattgcaaccctgttatacatactacatgcattttctatctattaccactag

SEQ ID NO: 229454 - DNA, 6216 bp, synthetic construct
  misc_feature 1..6216: note = Description of Artificial Sequence: Synthetic coding sequence
  source 1..6216: mol_type = other DNA
atggagttagcacactccctgttgctaaatgaggaggccctggctcagattaccgaagccaaaagacctgtgtttatcttcgaatggttacggtttctcgataaagttttagtcgctgctaataaaacagatgttaaagagaaacagaagaagctggttgagcaactgaccggcctgatctcgagtagtccagggcctccaactaggaagctgctggcaaagaacctcgcggcactctatagtattggtgatacatttaccgtgttccagaccctcgacaaatgcaacgatattatcagaaacaaagacgacaccgcagcctacctccccactaagctggctgccgtagcttgtgtaggtgctttctatgagaagatgggaaggatgctcggcagcgcatttcccgaaacagttaacaacctactcaagagcttaaaatcagcagaatcacaaggccgaagtgaaatacttatgtcattgcaaaaggtgttaagtggtctgggcggtgcagccgctagctcccacagagacatctacaagaatgcacgctctctgctgactgaccgcagcatggcagtaagatgcgccgtggcaaagtgtctgttggagttacaaaatgaagctgtgtttatgtggaccgctgagcttgagaacatcgcaaccctctgcttcaaagccctcgagaatagcaactacggggtgagagtcgccgtttctaaactgttaggtaccgttatggccaccgccttgatgccaaagcaggctaccgtcatgcgccagaacgttaagcgggcaacttttgacgaggtgctggagctgatggccaccggcttcctgcggggagggtccggcttcctgaagagcggcggagaaatgctcaaagtggggggatcagtgaatagggaagtacgtgtcggggtcacccaggcatatgtggtcttcgtaactacactggggggacagtggcttgagcgctcattcgctacattcttaagccatgtgctggacctagtttcccacccgagggccacccagactcatgttgaggcggtgtattcacggcgatgtgtgtcgttcattctacgcgctacggtcggatccctgctcggagaaaaggcccagattgccgcagctaaagagatttgtcaagccatcggcaagcagatgaaggctgtggaggcggtggtcaacgacacctccggagagaacaagtcaggagccgcagatatcgccgcttctcagcatgtcatggtctgtgcgttgcaggagctgggcagccttgtgcagagccttaacgctacggccagccctcttatacaggaagcttcaattggcctacttgaaattgtgactagcgtcctgctccacccatcaatggctgccagactcgcggcagcatggtgcctgagatgcgtggccgtagcactgcccttccaattgaccccattcctagatagatgtgctgagaggctcaacaatttgaagaccagccctgaagctgttagcgggtatagcttcgcaatggcggctcttctcggtggcgttcaccagtgccctctcggcattccgcatgccaagggaaagatggtagtttctattgccgaggacttgctccgtacagccgcacagaattccagactctctcttcagcgcacacaagccggatggctgctccttggggcattaatgaccctggggccatctgtggtgcggtaccacctgcccaaaatgttgctgctgtggaggaatgtgttcccgcgttctctgaaggaattagaggctgagaaggcccgtggtgactcgttcacttggcaggtcaccttggaaggaagggctggcgctctatgcgccatgcgaagttttgtcgcacactgccccgagctgctgactgaagatgtgatccgcaagcttatgacccctattgaatgtgccatgacaatgatgagtcatatacccagtgttatgaaggcccatggtgctcatctcaaagctagtgccgctatggtgcgactaaggttgtatgacattcttgctttgcttccacccaagacgtatgaagggtccttcaacgctctactccgagaattggtggcagagtttacactgaccgataactccgcgaacaccacaactagcctcttgcgcagtctctgccattatgatgattctgtgttgctggggagctggctgcaggagaccgaccataagagtatagaggatcagctccagcctaacagtgcttcaggaagtggtgcactcgaacacgaccccagcagtatctatttgagaatccccgctggggaggctgtcccaggaccactgccgctgggtgttagtgtcatcgacgcctcagtcgctctgtttggagtggtttttccccacgtttcatacaaacaccggctacaaatgttagaccactttgcagagtgcgtgaagcaggccaagggggtgaggcagcaagctgtccagttgaatatctttactgctgtgctgtcggccctgaagggtcttgcagagaataaatctacactgggccctgaggaggtgcggaaatcagccctgaccctggtaatggggcctctggataatcccaatcccatcctgagatgtgctgcaggagaagctctcggcagaatggcccaggtcgtgggagaggccacctttattgcaaggatggctcaatatagtttcgataaactcaagtccgcgagagatgttgtgtctcgcacaggccatagcctggcactcggctgtttgcatcggtacgtgggcggaatcggcagtggccaacacctgaagacatcagtgtccatcctcctggcactggcgcaggatggcacatcaccggaggtacagacgtggtcactgcattccctggccctcattgtggactcttccgggccaatgtaccgaggctatgttgaacccacactctcacttgtgctcacccttctgcttacggttccgccaagtcataccgaagtgcatcagtgcttgggcaggtgcctgggggcaataataacaacagtgggacctgagttacaagggaatggggctaccacctccaccatcaggagtagttgcttggtaggctgcgctattacacaggatcattctgatagcctcgtccaggccgcagccataagctgtctacagcagcttcacatgttcgctcctcgccacgtgaacctgagcagcctggtgccctcactgtgcgttcatctatgcagcagccacttgctcctgcgtcgagccgcagtggcatgcctcagacagctcgcccagagggaggccgctgaggtgtgtgagtatgctatgtccctcgccaaaaatactggagataaagagtccagtagcgccaacgtgagtcctttcgccccaggagtgtcatccaggactgacatccactgccggcatcagggggtgaatataactgagacaggcctggagggattgctgttcggcatgctcgaccgcgagacagatcggaaactgtgtagtgatattcatgacactctgggacacatgctttccagccttgcggtggagaaactgagtcactggctgatgctatgtaaggacgtgctggccgctagttcagacatgagtacagccacattgttgtctagtggaaaagacgaagaagccgaaaagaaggacgagatggacgatgatactatgttcaccacactcggagaagaggacaaatccaagcccttcgtggctccgcgttgggcaacccgtgtgtttgccgcagattgtctctgtcgcatcattaacctctgcgaaaatgctgatcaggcccacttcgacctagccctggcacgaagcgcaaagttgcggaaccctactaacgatctgctagtcctgcatctgagtgacctgatcaggatggcttttatggccgcaaccgaccactctaaccagctgaggatggcaggcctgcaggcactggaagatattatcaaaaaattcgccagcgtgcccgaaccggaattcccgggacacgtcattctcgaacaatatcaggctaatgtaggagctgcactgagacccgcattctcccaggatactcctagcgatataattgctaaagcctgtcaggtctgctcaacctggattgggagcggggtggtctccgaccttaatgacctaagaagagtgcacaacttgttggtgtcctccttagataaggtgcaggccggtaaaggcagctcttcgcagctgtacagagagagtgccacaaccatggaaaagctcgccgtcctgaaggcctgggccgaagtttatgtcgtagccatgaacattaaaaaggaagctgagtctaagccaaaaagagctattaagaacacagatgacgatgacgatgattgtggcacaatcgacgaattaccccctgattcgttaattacattggtgcagccagagctcccaactctcagtcgcctgtggctggccgctttgaaagactacgccctgcttaccctgcctgccgaattttcaagtcagctgcccccagatggaggcgcattttacacaccagagaccattgacaccgccaggctgcactaccgtaacagttgggcaccaatcctgcatgctgtggccttatggcttaattccaccggctttacctgctcagagagtacagaggctgccgctatctcaggcctgcagaaaagaagcacatccgttaacctgaaccaggccagcggagcggtcgggtccgcgaaaagcctgcccgaaatcaataaggatcggatgcacctgattctgggggtgagcattcaattcctctgctctccgagaccagaggaaccgattgaacacgtgaccgcttgcttacaggctctgcacacactcttagatagtccatacgccagggtgcatatcgctgaagaccagctgattggcgtagagctcctgtccgttctgcaccgattgctgctgacctggaatcccagttctgtccagctcttagtgacaggggtggtgcagcagatcgtgagggccgctcaggattacctgcaagaaaaaagaaacacactgaacgaagacgatatggagaaggaagcctgcaccgtcctgggagaaggtggggacagcggaggactgatccctggcaaaagcctggtgttcgcgactatggagttgttaatgttcattctggtccgccacatgccacatctctccaccaaagtctccgactctccaagtcacatcgccacaaagacgcgactttctgaggagagcgctcgcctggtcgccgctacagtaaccattctatccgatctcccaagcttatgttcccccgctggttgtatgaccattctgccaactatcctgtttctgatcgctagaattctgaaggacacggccattaagagtgccgacaatcaagtgcctcctccggtctcggcagctctgcaaggaataaagtccatagtcacattgagtatggccaagactgaagccggtgtgcaaaaacagtggaccgctctcatacgcagtactctcgcctgcatactggagtattctcagcctgaggattccgttcctacccccgatgaggtgtcaatgctgaccgctatcgctttgttcctctggagtgcgtcaaacgagatcattggagttcagtctcttcagaacggttgtatgaacaggttcaagaacgccctgaatagctgtgacccttgggtgcaggccaaatgttatcagctgttgctgtcggtgtttcaacattcgaaccgagctctgtctaccccatatatccattctttggcccctatcgtggtggaaaaactcaaggccgtggagaggaaccggccagctagcaacattgaattgctcgcggtccaggagggcattaaggtcctggagaccctggtggctctgggggaagaacagaatagagtgcagctgctcgccctcttagtgcccacgctcattagctacctccttgatgaaaattcctttgccagcgcctcctctgcctcgaaagacttacacgaatttgctctgcaaaacctgatgcacattggaccactttacccgcatgccttcaagaccgtgatgggagcagccccagagcttaaagtacgtttggaaacggccgtgagggcctcgcaggcctctaaggccaaggccgcagctaggcagccagcaccggctatccactccgctcctacaattaagctcaaaacaagcttcttttag

SEQ ID NO: 229455 - DNA, 1005 bp, synthetic construct
  misc_feature 1..1005: note = Description of Artificial Sequence: Synthetic coding sequence
  source 1..1005: mol_type = other DNA
atgagcgagcctattagggtccttgtcactggggcagcgggtcagatcgcttactcacttttgtactcgattgggaacggcagtgtttttggaaaagaccaaccgattattctggtcctcttggacattactcctatgatgggggtactcgatggggtgctcatggagctccaggactgtgccctgccacttctgaaagatgtgattgccactgataaagaggatgtggcctttaaggacctggacgtggccattcttgtgggttcgatgcccaggagggaaggcatggaacgaaaggacttgcttaaagccaacgtaaagattttcaaaagccaaggcgcagcacttgataaatatgccaagaaatcagtgaaggtaattgtcgtcggcaatcccgctaacaccaattgtctgacagccagcaaaagcgcgccatcaatccctaaggaaaattttagctgcctaacgagactcgaccataaccgggcaaaagcgcagattgccctgaaactcggcgtaaccgctaacgacgtgaaaaatgtgattatttggggtaaccatagctcaacccagtatccagacgtgaaccatgcaaaggtaaagttacagggcaaggaggtcggggtgtacgaagccttaaaagatgatagctggctgaagggagaatttgtgaccaccgtacaacaaagaggcgcagcagtgatcaaggctagaaagttgtctagcgccatgtctgccgcaaaggccatttgtgaccatgtgagggatatttggtttggtacacccgaaggggaattcgtgtcaatgggcgtgattagtgacgggaattcttacggggtgcctgacgacctgttgtacagctttccagttgtaataaagaacaagacctggaagttcgtcgaaggactacctatcaacgatttttctcgcgaaaagatggatctgactgcaaaggaactgacagaggagaaggagtccgccttcgaatttctttccagcgcctag

SEQ ID NO: 229456 - DNA, 1059 bp, synthetic construct
  misc_feature 1..1059: note = Description of Artificial Sequence: Synthetic coding sequence
  source 1..1059: mol_type = other DNA
atgagaaggtgttcctacttccccaaggacgtgacagtatttgataaggacgacaaatccgagcccatcagggtgctggtgactggagctgctggtcagatcgcctattcactgctgtacagcataggcaatggctctgtcttcggcaaagaccagccaatcatcctagtcctacttgatatcactcccatgatgggtgtgttggatggagtgcttatggaattacaggactgcgcactgccacttctgaaagatgtgatagctacagacaaggaggacgtcgcctttaaagatctagacgtggccattcttgtggggtccatgccacgccgagaaggcatggagagaaaagacctgctcaaagctaacgtgaaaatttttaagagccagggggcagccctggacaagtacgcaaaaaagtccgtgaaagtgattgttgtggggaaccccgctaataccaactgtttaactgcctctaagtccgccccatctatccccaaggagaactttagttgtctgacaaggctggaccataacagggccaaggcccaaatcgctctcaaattaggtgttaccgcaaacgatgtcaagaatgtgattatctggggcaaccattcctccacccaatatccggatgtgaatcacgccaaggtgaagctgcagggaaaagaggtaggcgtgtatgaagccctgaaagacgacagctggctgaagggcgaatttgtaaccacagttcagcagcgtggagccgcagtgatcaaggcaagaaaactcagtagcgctatgagcgctgccaaggccatctgcgatcatgtgagagacatctggtttggtactcccgagggggagttcgtttctatgggtgttatttccgacggcaatagctacggagttccggacgatctgctctacagctttccagtcgtcataaaaaacaagacttggaaatttgtggaaggcctacctattaacgacttctctagagagaagatggatctgaccgcaaaggaactcacagaggagaaagagtctgccttcgagttcttgtccagcgcctag

SEQ ID NO: 229457 - DNA, 738 bp, synthetic construct
  misc_feature 1..738: note = Description of Artificial Sequence: Synthetic coding sequence
  source 1..738: mol_type = other DNA
atgccgaggcgggaaggcatggaaagaaaggatctgcttaaagcgaatgttaaaatatttaagagccagggggcagctttagataaatatgcaaagaaatcggtcaaggtgattgttgtaggaaaccctgccaatacaaattgtctgaccgcaagtaaaagcgccccatccatacccaaagaaaacttcagctgcttaactaggctggaccataaccgcgcaaaggctcagattgctctgaagctgggtgtgacagctaacgacgtcaagaatgtgatcatctggggaaaccactcatccacgcagtatccggacgtgaaccatgcaaaggtcaagctacagggaaaagaagtgggagtttacgaagctctgaaagacgattcttggctgaaaggtgaattcgttacaaccgttcagcaacggggagcagctgtgattaaggctagaaaacttagctctgccatgtccgctgctaaagccatctgcgaccacgttcgcgatatttggttcgggactcccgaaggagaattcgtgtctatgggtgtcatttctgacggaaattcatatggagttccggatgacctgttgtacagtttccccgtcgtcatcaaaaataagacctggaagtttgtggagggtcttcccatcaacgacttttcccgcgaaaaaatggatctcaccgccaaagaactgactgaggagaaagagtccgccttcgaattcctaagctctgcatag

SEQ ID NO: 229458 - DNA, 1017 bp, synthetic construct
  misc_feature 1..1017: note = Description of Artificial Sequence: Synthetic coding sequence
  source 1..1017: mol_type = other DNA
atgttatctgccctggcgagaccagcttccgccgctttgcgacgctccttcagtacttctgcccagaataatgccaaggtagccgtgctgggagcttctggcggaattggccagcctctgtcactgcttctcaaaaacagcccactcgtgagccgcttgacgctgtatgacatcgctcatactcccggagtggctgccgacctatcgcacattgaaaccaaggcagcggtcaagggatacctggggcctgagcagttgcctgattgcctaaagggatgcgatgtggtagttattcccgctggggtccccaggaagcccggtatgacccgagatgatctctttaacacaaacgcaacgatcgttgccactctcaccgctgcgtgtgcacaacattgccctgaggccatgatctgtgtcatcgctaatcccgtcaattccacaattcctatcacagcagaggtctttaagaaacatggtgtttataatcccaataagatcttcggcgtcacaaccctggatattgtcagagctaacaccttcgttgccgagcttaaaggtctggaccctgctagggtgaacgtgccagtaattggcggtcacgccggtaagactatcattccacttatctcacagtgtacccccaaagtggattttccacaagatcagctgaccgccctgaccggcaggatccaggaggccggaacagaagtggtaaaagccaaagcaggcgcagggtccgcaacactcagcatggcctatgcaggcgctaggtttgtgtttagccttgtggacgccatgaacggaaaagaaggagtcgtcgagtgtagttttgtaaaatctcaggagactgaatgtacatacttttcgactcccctgctgctgggcaagaaaggaatcgagaaaaatctgggaataggaaaagtttcctcctttgaggaaaagatgatctcagacgccatcccagagctgaaggcaagtatcaagaaaggagaagattttgtgaaaacactcaaatag

SEQ ID NO: 229459 - DNA, 1872 bp, synthetic construct
  misc_feature 1..1872: note = Description of Artificial Sequence: Synthetic coding sequence
  source 1..1872: mol_type = other DNA
atgaacaggtacacgaccatgagacagctgggcgatggaacatatgggagcgtcctgatgggaaaatctaacgaaagcggtgagctggtcgctatcaaacgcatgaagcggaagttctactcctgggacgaatgcatgaatctgcgtgaagttaaatccctaaagaaattaaatcacgcaaatgtgattaagttgaaggaagtgattagagagaatgaccacctttacttcatctttgagtatatgaaggagaacctttatcaactcatgaaggatcggaataagctttttcctgaatctgttataaggaatattatgtatcagattttgcagggcctggccttcatccacaagcacgggttcttccatcgagatatgaagcccgaaaatctgttgtgcatgggcccagagcttgtgaaaatcgcagatttcgggctggctcgggagctgaggtcccagcccccatacacggactatgtttccacccgttggtatagggcacctgaggttctccttcgaagttccgtatattcctcacccattgacgtatgggctgtcgggagcattatggcagagctgtacatgctccgccctctatttcccggtacaagcgaggtagacgagatcttcaaaatttgtcaggttctcggcaccccgaagaagtccgattggccggaaggataccagctggctagtagcatgaattttagatttccccagtgtgtccccatcaatctgaagacactaattcccaatgcatcaaacgaggccatccagctgatgaccgaaatgcttaactgggatcctaagaagcgcccaaccgcatcccaggccttgaaacacccatatttccaagtgggccaggtgctggggcctagcagcaaccacctcgaatctaaacagtcgctcaataaacagctgcagcccttggagtcaaagccctcactagttgaagtggagcccaaaccgctgcctgatataatcgatcaagtggtgggccagccgcaaccaaagacctctcagcagcctttacagcctatccagccccctcaaaacttgagcgtccagcagccccctaagcagcagagccaggaaaaaccacctcagacccttttcccaagcattgtgaagaatatgccgacaaaacctaacggaactcttagccacaaatctggcaggcgtcgatggggccagaccatcttcaagtctggcgatagttgggaagagttggaagattacgatttcggagcttcccacagcaaaaagccttccatgggagttttcaaggagaaacggaaaaaggattccccattccgtctccccgagccggtaccatccgggtccaaccattcaacaggcgagaataagtcactccccgctgtgacctccctgaaaagcgattcagagctgagcacagcccctacgtcaaaacagtactatcttaagcagtccaggtatcttcctggggtgaatccaaaaaaagtgagcttaattgctagcgggaaagagatcaatccccacacatggagtaatcagctgtttcccaagtccctgggtcctgttggcgcagaacttgcttttaaaaggtccaacgcagggaatctcggtagttacgctacatataatcaaagtgggtacatcccttcatttttgaaaaaggaggttcagtccgctggtcagcgaatccacttggccccactgaacgctacggcaagtgaatatacttggaatactaaaacggggcgagggcaattcagtggcaggacatacaacccaaccgctaaaaatctcaacattgtgaaccgcgcacaacctatcccgagcgtgcatggtcgcactgactgggtggccaagtatgggggacaccgctag

SEQ ID NO: 229460 - DNA, 1872 bp, synthetic construct
  misc_feature 1..1872: note = Description of Artificial Sequence: Synthetic coding sequence
  source 1..1872: mol_type = other DNA
atgaatcggtacactaccatgagacagctcggtgacggcacatacggaagtgtcctgatgggaaaatcaaacgaatccggagagctggtagctattaagcggatgaaaaggaagttctactcctgggacgagtgcatgaatctgagggaagtgaaatcccttaaaaaactgaaccacgcaaacgtcatcaaactcaaagaggtcatcagagaaaatgaccatctgtactttatttttgagtacatgaaggaaaacctttatcaactcatgaaagaccggaacaagctgtttcctgagagcgtaatccgaaatattatgtaccagatccttcagggactggccttcatacataagcatggcttcttccacagagatatgaaaccggaaaacctgctctgtatgggccctgaattggtcaagatagctgatttcggcctggccagagagttaaggtctcagccaccctacaccgattatgtctctacgcgctggtatcgggctcctgaggttctgctaaggagctccgtatactccagtccaatcgacgtttgggccgtgggcagcattatggctgagctgtacatgctgcggccactgtttccaggaacctccgaagtggatgaaatcttcaagatatgtcaggtgctcggaacccccaagaaatcagactggcctgagggttaccaacttgcttctagtatgaactttcggttcccacagtgtgtgccgatcaatctcaagacactgatccccaatgcctcaaatgaagcaatacagctgatgactgaaatgctgaattgggatcccaagaaaagaccaacagcatcccaagctctgaaacatccatactttcaggttggtcaagttctcgggccatctagcaatcatttggagagcaagcagagtttgaataagcagttgcagccgctggaatctaaacctagtctcgtagaggttgagccaaaaccattaccagatatcatcgaccaggtcgtggggcagccgcagcccaagacctcccagcagcctttgcaaccaatccagcctccccaaaatctgtcagtacagcagcctccaaaacagcagagccaggaaaagccacctcagacactcttcccatcaatagtgaaaaatatgcctacaaagcctaacggaacactaagccataaatctgggcgaagacggtggggtcagaccatatttaagagcggagactcatgggaggagttggaagattatgacttcggcgctagccattctaagaagccttccatgggcgtgtttaaagagaaaaggaaaaaggacagcccattcaggcttcccgaacctgtaccctccggctccaatcatagcaccggcgagaataagtctctacctgccgttacttcgctgaagagcgactcagaactttctacagcacctacaagtaagcaatattacctgaagcagtcccgttatctgcccggtgtcaacccaaaaaaggtcagtctgatcgcgtccgggaaagagatcaacccacacacgtggtctaaccagctgttccccaaatcattaggccctgtcggcgctgaactcgcttttaaacggtctaacgctgggaacttaggctcctacgcgacctataaccagtccggatacattccatcttttctgaaaaaagaagtccagagcgctgggcagcggatccatcttgcgcctctgaacgctacagcttccgaatatacctggaataccaagaccggacgcggtcagttctccgggagaacatataatcccaccgcaaaaaaccttaatatcgtgaatcgggcacagcccattccgagcgtgcatgggaggaccgactgggtcgccaaatatggcggtcatagatag

SEQ ID NO: 229461 - DNA, 867 bp, synthetic construct
  misc_feature 1..867: note = Description of Artificial Sequence: Synthetic coding sequence
  source 1..867: mol_type = other DNA
atgaaccgctatactactatgcggcaactcggggatggcacttatggaagtgtgctcatgggtaagtcaaacgaatccggcgagctggtcgcaattaagagaatgaagaggaaattctattcgtgggacgagtgcatgaatctgcgcgaggtcaagtctctgaagaaattaaaccacgctaacgttatcaaactgaaagaggtaatccgcgaaaatgaccatctatatttcatctttgagtatatgaaagagaacctgtaccagttaatgaaagaccgcaataagctgttcccggagtctgttattaggaatattatgtatcaaattctccagggcttggcttttattcacaaacacggattttttcaccgagacatgaagcccgaaaacctgttgtgtatgggccctgagttggtcaaaattgcggacttcggactcgctcgggaactcagatcacagcctccatatacagattatgtctccactcgctggtaccgggcaccagaagtgttgctccgcagttcagtctattcctctcccatagacgtgtgggccgttgggtcaatcatggcggaactgtatatgctgaggcctctgtttccgggaactagtgaggtagacgagatattcaaaatatgccaggtgttggggacgcccaaaaagagcgactggcctgaaggctatcaactggcaagcagcatgaactttcgctttccccagtgcgtacctatcaatcttaagaccctaataccgaatgcctctaacgaggccatacagttaatgactgagatgctgaactgggatccgaagaaacgtcctaccgcgagtcagccctgctttctagtggaagttgaacgccctaactag

SEQ ID NO: 229462 - DNA, 1374 bp, synthetic construct
  misc_feature 1..1374: note = Description of Artificial Sequence: Synthetic coding sequence
  source 1..1374: mol_type = other DNA
atgaaccgatacaccactatgcgccagctgggggatgggacatacggatctgtattgatgggcaagtcaaacgagtcaggggaactggtcgccatcaaacggatgaaacgaaagttctattcctgggacgagtgcatgaacctgcgtgaagttaagagcttgaagaaactcaaccacgcgaacgtgatcaagctaaaagaggtgattcgagaaaatgatcatctttacttcatttttgagtatatgaaggagaatctctaccaactgatgaaagatcgcaataaactcttcccagagagcgtgataagaaatatcatgtatcagatcctgcaggggcttgcctttattcacaagcatggtttttttcatagggacatgaagcccgagaatctcctgtgcatggggcctgaactggttaaaatcgcggatttcggactggccagagagctgagatcccagcccccatacaccgattacgtctccacgcgctggtacagggcacctgaagtactactcaggtcctctgtgtattcgtcacccatcgacgtttgggcagtgggtagcattatggctgagctgtatatgctgcggccactgttcccagggacatccgaggtggacgaaattttcaaaatttgccaggtactgggcacaccgaagaagtctgactggcccgagggctatcagcttgcttcctcaatgaacttcaggtttcctcagtgcgtcccgatcaatttgaaaaccctgatccctaacgcctcaaatgaggcaatccaactcatgacagaaatgctgaattgggatcccaagaagcggcctactgcttcgcaagccctgaagcacccctacttccaagtgggccaggttttagggccatctagtaaccatctggagagcaagcaatccctgaataaacagctgcaaccgctggagtctaaacctagcctggtggaggtggagccaaaaccgttgccggatatcatcgatcaggttgtcggccagccgcagcccaaaacgtcccagcagccgctgcaacccattcagcctccccaaaacctatctgtgcaacaacccccaaagcagcaatctcaggaaaaacctccccaaacactgtttccaagcattgtcaagaatatgcccactaagcctaacggcaccctgtctcataaatccggacggaggaggtggggccagactatcttcaaaagcggcgactcctgggaagaattagaggattatgacttcggggcttctcactctaagaagccttccatgggcgtctttaaagaaaagcgtaagaaggacagtcccttccgccaacaggttaagatggcagtgatctccctgtcagcccaccagtttcccaccctatag

SEQ ID NO: 229463 - DNA, 942 bp, synthetic construct
  misc_feature 1..942: note = Description of Artificial Sequence: Synthetic coding sequence
  source 1..942: mol_type = other DNA
atggaggaaatgtcaggtgagtctgttgtctcatctgcggtgcctgccgcagccaccaggacaacctcatttaagggtacatcaccctcctcaaaatatgtcaagctcaatgtagggggagcgctgtactacacaaccatgcaaaccctgacaaagcaggatacgatgcttaaagcgatgttctctgggaggatggaggttcttacggatagcgaaggctggattctgatcgatcggtgtggcaagcatttcggcactatcttaaattatctgcgggatggagcggtgccactgccagagagcagacgagaaatagaggagctgctggcagaggccaagtactacttagtccagggtctggtggaggagtgccaggctgctctgcagaacaaagatacatacgagcctttctgtaaggtgccagttataactagctccaaggaggaacagaagctaatcgccacttctaacaagccagctgtgaaactcctctacaatcgatctaacaacaaatatagctatacctccaattcagacgacaacatgttgaaaaacatcgaactcttcgataaactcagtctccgatttaacggcagagtccttttcattaaggatgtgatcggcgacgagatctgttgttggtcattttacggacaggggagaaaaatcgccgaggtttgttgcacatccatcgtgtacgcaacggagaagaaacagactaaggtggaattcccagaggcccgaatttatgaagagacactgaacattcttttgtacgaggcccaggacggacgtggacctgacaatgctcttctggaggcaacaggcggagcggctggtcgatcgcaccacctagacgaggatgaggagagagagaggattgagcgggttaggcgtattcacataaaaaggcccgacgatcgggcacatctacaccagtag

SEQ ID NO: 229464 - DNA, 558 bp, synthetic construct
  misc_feature 1..558: note = Description of Artificial Sequence: Synthetic coding sequence
  source 1..558: mol_type = other DNA
atgggacctgaacgacatctttccggcgcacccgcacgcatggccacggtcgtattgggcggagacaccatgggacccgagcgaatctttcccaatcagactgaagagttaggacaccagggaccaagtgaagggaccggcgactggtcatctgaggagcccgaggaggagcaggaggagaccggatctggtcctgccggttactcttaccagcccctgaaccaggatcccgaacaggaagaggttgagctggcgccagtgggggatggggacgtggtcgccgatatccaggaccggattcaggccctgggattacacctccccgatcctccactggagtctgaagacgaagacgaagagggagctactgccctcaacaaccattcatctatacccatggatcccgagcatgtcgagttagtgaaacgtactatggccggtgtgtccctgcccgctccaggagtgccagcctgggccagagagattagtgacgcacagtgggaggatgtggtgcagaaagctctgcaagcacgtcaggcatctccagcgtggaaatag

SEQ ID NO: 229465 - DNA, 1719 bp, synthetic construct
  misc_feature 1..1719: note = Description of Artificial Sequence: Synthetic coding sequence
  source 1..1719: mol_type = other DNA
atggagcccgaggcacctcgaaggaggcatacacatcaacgcggatacctactgacacgtaacccccacctgaacaaggatctggccttcactctggaagaacggcagcagctgaatattcacggccttctgcccccatctttcaactcacaggaaatacaggttttgagagtcgtgaaaaatttcgagcacctgaattcggacttcgacaggtacctcctcctgatggatctgcaggaccgcaacgaaaaactgttctaccgggttctcacttcagacatcgaaaaattcatgccgatagtgtatacccctacagtcggcctggcctgccagcagtactcattagtgttccgtaagccgaggggcctcttcatcaccattcatgaccgtgggcacattgcttcagtgttaaatgcttggcccgaggacgttatcaaggccatcgtggtcactgacggtgagcggatcctgggattgggagacctggggtgcaatggcatggggatccccgtgggaaaactggcgctctacactgcctgcggcggaatgaacccgcaggagtgcctgcctgtgatcttggatgttggaacagaaaatgaggagctacttaaagacccactgtacattggtcttaggcagcgcagagtccgcggaagcgaatacgatgatttcctggacgagttcatggaagcagtgagtagcaaatatgggatgaattgtttaatacagttcgaagattttgccaatgttaacgcttttcggctcctgaataaatatcgcaatcaatactgcacattcaacgatgacatacagggaacagcgagcgtagccgtcgctggactgctcgctgccttacgcattacaaagaataaactgtccgatcagaccatcctgttccagggagccggagaagcagcactgggcattgctcatttaatagtgatggctctggagaaagagggcctgcccaaggaaaaagccattaaaaaaatttggctggttgactctaaggggcttatcgtgaagggtcgggcttctttaacccaggagaaagaaaagttcgcccacgagcacgaagagatgaagaaccttgaggccattgtgcaagaaataaagcctaccgctctgattggcgtggccgctatcgggggagctttctctgagcaaatcttgaaagatatggcggcattcaacgagaggccaattatatttgcgttaagtaacccaacttcaaaagccgagtgctcagccgagcaatgttacaaaatcaccaaaggacgggctatttttgccagtggttctcccttcgatcctgtgaccctgccgaatgggcagactttgtacccgggtcagggaaacaactcatatgtgttccctggcgtggctcttggcgtggtggcatgtggtctccggcagatcaccgacaatatctttttgactactgcggaggtgatcgcacagcaggttagcgataaacatttagaggaaggacgactgtatccccctctcaataccattagagatgtctcattgaagatcgccgagaagatcgtcaaagacgcctaccaggagaaaaccgcaactgtatatccggagccacagaacaaggaggcttttgtgagatcacaaatgtacagtaccgattatgatcaaattctacctgactgctactcctggcccgaggaggtacagaagatccagactaaagttgatcagtag

SEQ ID NO: 229466 - DNA, 699 bp, synthetic construct
  misc_feature 1..699: note = Description of Artificial Sequence: Synthetic coding sequence
  source 1..699: mol_type = other DNA
gtgaaggggagagcctctctgactcaggagaaggagaaattcgcacatgagcacgaggaaatgaagaatctggaggccattgtgcaggaaatcaagcccactgccctgatcggagtcgccgctatcggcggagcgttctccgaacaaattctgaaggatatggcagcattcaacgaacgcccaattatcttcgccctttcaaacccaacctccaaagctgagtgtagtgctgagcagtgctacaaaattacaaagggcagagccatttttgcttcaggaagtccgttcgatcccgtgaccctgcccaacggccagactctttaccctgggcaaggtaacaatagctacgtcttccccggagtagctttaggggtcgtggcatgtggactcagacagatcaccgataacatttttcttaccaccgccgaagtcattgcccagcaggtgagtgacaaacatcttgaagaaggacgtttgtaccctcccctgaacacaatacgagacgtttccctgaagatcgccgaaaaaattgttaaggacgcctatcaggaaaaaactgccactgtgtatccagaacctcagaataaggaagctttcgtgagatcccagatgtactctacagattatgaccaaatcttgcctgattgctactcctggcctgaggaggtgcagaagattcagactaaagttgatcagtag

SEQ ID NO: 229467 - DNA, 1221 bp, synthetic construct
  misc_feature 1..1221: note = Description of Artificial Sequence: Synthetic coding sequence
  source 1..1221: mol_type = other DNA
atgggcatcccagtggggaagctcgctctgtacaccgcttgtggcggtatgaatccccaggaatgcctgccagtcatccttgacgtaggtacagagaacgaagaactgcttaaggatcccctttatattggtctgcgccagaggcgggtccgaggcagcgagtatgacgatttcctggacgagttcatggaagctgtctcaagtaaatacggtatgaactgtctgatacagttcgaagacttcgccaatgtaaatgcattccggctcctcaacaaatatcgcaaccagtactgcactttcaacgacgacattcagggaaccgcctcagtggccgtagctgggctgcttgccgctctccgtattactaaaaataagctgtccgatcaaaccatcctctttcaaggcgctggcgaagcggctctcggcatagcacaccttatagtcatggccttagaaaaggagggcctcccaaaggagaaggccatcaagaaaatttggctagtcgactccaagggcctgatagtcaaggggagagccagccttacccaggaaaaggagaagttcgcccatgagcatgaagaaatgaaaaacctcgaagcaatcgtccaggaaataaagcccacggccttgattggggttgccgcaatcggcggagccttttccgaacagatactcaaagacatggctgcatttaacgagcgacctatcattttcgccttaagcaaccccacctcaaaagccgaatgcagtgccgagcagtgctataagatcaccaaaggcagagcaatctttgccagcggaagtcctttcgatccagtgaccctcccaaacgggcagacgttatacccagggcagggcaataatagctatgtcttcccaggtgtggcattaggagtggtcgcttgtgggctgaggcaaataaccgataacatttttttaacaactgccgaagtcattgcacaacaggtcagcgataaacacttggaagaagggaggctctaccctcctctgaataccatccgggacgtcagcttaaaaatcgccgagaaaatagtgaaggacgcgtaccaggagaaaacagctaccgtctatccggagccgcagaataaagaggccttcgttagatctcagatgtactctacggactatgatcagattctcccggactgctactcttggcccgaagaagtgcagaaaatccaaaccaaggtcgaccagtag

SEQ ID NO: 229468 - DNA, 1494 bp, synthetic construct
  misc_feature 1..1494: note = Description of Artificial Sequence: Synthetic coding sequence
  source 1..1494: mol_type = other DNA
atggatttacaggacaggaacgaaaaactcttttatagagtcttgacgtctgatatagagaagtttatgccaatcgtctacacaccaacggttggacttgcttgccagcagtacagtctcgtatttaggaaaccgagaggactattcattaccattcacgatagaggccacattgcctcagtgctgaatgcttggccagaggacgttatcaaagccatagtggtgacagatggcgaaaggatcctgggactcggcgatctggggtgcaacggcatgggcatacccgtgggcaaattggccctgtacaccgcctgcgggggaatgaatccacaggaatgtctcccagtgattctggacgtcggaaccgagaatgaggagctgctcaaggatccactgtacattgggttgcggcagaggagagtgcgcggtagtgagtacgacgatttcctggacgagtttatggaggccgtgagcagcaagtacggtatgaactgcttaatccagtttgaagattttgctaatgttaatgcctttcggctgctcaacaaatatcgcaatcagtactgcacatttaatgacgatatccaaggcaccgcaagtgtggcagttgccggactgctggctgcactgcgcattactaagaacaaattaagtgatcagaccatccttttccagggtgccggtgaggcagcattgggtatcgcacacctgattgttatggctctggagaaggaaggccttcctaaggaaaaagcgattaagaaaatctggctcgtcgactctaagggcctcattgtgaagggtcgggcttcattgacgcaagaaaaagaaaaatttgcacacgagcacgaggaaatgaaaaacctagaggcgatagttcaggaaatcaaacccactgccttgataggcgtggcagccattggtggggctttttctgaacagatcttgaaggatatggcagcatttaatgagcgaccaatcatttttgctctcagtaaccctacatctaaggccgaatgtagcgctgagcagtgttacaaaataaccaaaggcagggccatctttgccagtggctctccttttgatccagtgacactgccaaacggccagaccctctaccctggacaggggaacaatagttatgtgtttccaggagtagccctgggggtcgtggcctgtggcctacgacagattactgataacatctttttaaccaccgcggaggtcatcgcccagcaagttagtgacaagcatcttgaggagggaaggctctatcctcccctaaacaccatcagagacgtgtcactcaaaatcgcagagaaaatcgttaaggacgcctatcaagagaagacagctacagtctaccccgagcctcagaataaagaggccttcgttcgctctcagatgtattccacagactatgatcaaatccttccggactgctactcttggcccgaagaagttcagaagatccagactaaggtcgaccaatag

SEQ ID NO: 229469 - DNA, 1755 bp, synthetic construct
  misc_feature 1..1755: note = Description of Artificial Sequence: Synthetic coding sequence
  source 1..1755: mol_type = other DNA
atgttatctcgtctacgggtcgtaagcaccacttgcacattggcctgcaggcacctacatataaaagaaaaaggaaagccactaatgttaaaccccagaaccaacaaagggatggcttttaccctgcaggagcggcagatgctgggactgcagggcctgctgccccctaagatcgagacccaggatattcaagcactccggttccacaggaacctgaaaaagatgactagccccctagagaaatacatttatatcatgggcatccaggagcggaacgagaaactgttttaccggattctccaggacgacatagagagcctgatgcccatcgtatatacacccaccgtggggctagcttgctcacagtacggacatatttttcgcaggcccaaggggctgttcatcagcatttccgaccgaggtcatgtccgtagcatcgtggataactggcctgaaaatcacgtcaaagccgtcgtcgttacagatggagagagaatcttgggcctgggtgacctgggggtgtacgggatgggtattccagtgggtaagctgtgtctgtatactgcctgtgccggtatccggccagaccgctgtctgcctgtatgtattgacgttggaaccgataacattgcactgttgaaagaccccttttacatgggactctaccagaagcgcgatcgaacccagcaatatgacgatctgatcgacgagttcatgaaggctatcacggaccggtacggcaggaacaccctgatacagttcgaagatttcggcaaccacaacgcctttcgcttcctccgaaaatacagggaaaaatattgcaccttcaacgatgatatccagggtacggccgctgtggctttggccggactcttggcagctcaaaaggtaattagcaaacccatttctgagcacaagattctttttcttggggctggagaagcagcccttggtattgccaatctgatcgtgatgagcatggtcgagaatggcctgagcgagcaggaggctcagaaaaagatttggatgtttgataaatacggcttacttgtgaaggggagaaaggccaagatcgacagctaccaagaacccttcacacactctgcacctgaaagcatcccagacacgtttgaggatgcagtgaatatcctaaaaccttccaccattatcggagttgcgggagccggaaggctctttactccagacgttatacgggctatggcaagcataaatgagcggccagtgatctttgctctaagcaacccgacagcccaggctgaatgtaccgcggaagaagcctacactctgaccgaaggtagatgtcttttcgcttccggatccccttttggccctgtgaaactgaccgatggaagagtgtttacaccagggcaggggaacaacgtttatatattccccggagtggccctggccgtgattctttgtaatacaagacacatctccgactcagtgttcttagaagccgcaaaggcactgacaagtcaactaacggatgaggaacttgcccaaggtcgcctctatcctcctcttgcgaacattcaggaggtctccattaatatcgccattaaggtcacggagtatctgtacgcaaataaaatggcatttcggtaccccgaacccgaagacaaagctaagtatgtgaaggagaggacctggagatccgaatatgatagcctgctgcccgacgtctacgagtggccagaaagcgcaagctcaccccctgttattaccgagtag

SEQ ID NO: 229470 - DNA, 1440 bp, synthetic construct
  misc_feature 1..1440: note = Description of Artificial Sequence: Synthetic coding sequence
  source 1..1440: mol_type = other DNA
atgctgtccagacttcgggtggtctccaccacatgcactctggcctgccggcacctccacatcaaggagaaggggaagcctctgatgctgaatccccgaaccaacaaaggcatggccttcactctgcaggaaagacaaatgctcgggttacagggactcctgccacccaaaatcgagacccaggatatccaggccctgagattccaccggaatctcaagaagatgactagtcctctcgagaagtatatttacattatgggcattcaggaaagaaacgagaagttgttctacaggattcttcaggacgatatcgagagtttgatgccgatcgtgtacactccaaccgttggcctggcatgttcccaatacggccacatcttccgacggcctaaaggcctgtttatttcaatctcagaccgaggacacgtgagaagcatagtcgataattggcctgagaaccacgtgaaggcagtggttgtaaccgatggggaacgcattcttggactaggcgatctgggcgtgtatggcatgggaatccctgtcggcaaactttgcctctatacagcctgcgcaggtattcgacccgatcgttgtctgcccgtgtgcattgatgtcgggactgacaatattgcgttgctcaaggacccgttctacatgggtctgtatcagaaacgagaccgaacacagcagtacgacgacctgattgacgaatttatgaaagccatcaccgatcgatatggtcgaaatacactgatccagttcgaggatttcggaaatcacaatgcattcaggtttctgcgtaagtaccgcgaaaaatactgtacttttaacgatgacatccagggcaccgccgcagtggcattagcagggctgctagcggcacagaaagtgatctctaagcccatcagcgagcacaagatcttgttcctgggagctggcgaagccgctttaggcatcgccaatctgattgttatgagcatggttgaaaatggcctgtccgaacaggaggcccagaagaaaatttggatgtttgacaagtacggactcctagtgaaaggcagaaaggcaaagatagactcctatcaggaacctttcactcacagcgcaccagaaagtatacccgatacttttgaagacgccgttaacatcctgaaacctagcacaatcatcggggtcgctggggcaggccgtctgttcacgccagatgtgatccgagctatggcatcaattaatgaaagacccgttatcttcgcactgtccaacccgaccgctcaggccgagtgcacagcagaggaagcttataccctaactgagggtagatgcctttttgctagcggctctccattcgggccagttaaactgacggacggtcgtgtgttcacaccaggacaagggaataatgtctacatttttcccggatacaggattccgatctgctag

SEQ ID NO: 229471 - DNA, 780 bp, synthetic construct
  misc_feature 1..780: note = Description of Artificial Sequence: Synthetic coding sequence
  source 1..780: mol_type = other DNA
atggctttcacactcgaggagcggctacagcttggaattcacggcctgattcccccttgcttcctttcccaagatgtacagcttctgcgtattatgaggtattacgagaggcagcaatctgatctggataaatatataattctgatgaccctccaggatcgaaacgaaaaactcttctatcgggttctcacgtcagacgtggaaaaattcatgccgatcgtctataccccaaccgtgggccttgcttgtcaacactatggccttaccttccgtcggccaaggggtttgtttataactatccatgacaagggacacctggccacaatgctgaattcctggcccgaagacaatatcaaagccgtagtagtgaccgacggagagagaattttaggcctgggggatcttggttgctatggcatgggcattcctgtgggcaagttggctctgtataccgcatgcggcggagttaaccctcaacagtgtctgccagtgttgctagatgttggcaccaacaatgaggaactgctccgtgaccccctctatataggtttgaagcatcaacgcgtgcacggaaaggcctacgatgatcttttggacgagttcatgcaagccgtcactgacaagttcggaatcaactgtcttatccagttcgaggatttcgctaatgccaacgcttttaggctccttaacaagtatcggaacaaatactgcatgttcaatgatgacatccaggacgacttttcccggggtcccaagaggtcccagttgttctttaaatag

SEQ ID NO: 229472 - DNA, 1815 bp, synthetic construct
  misc_feature 1..1815: note = Description of Artificial Sequence: Synthetic coding sequence
  source 1..1815: mol_type = other DNA
atgggcgcagcccttggcactggcacaaggctagcaccctggcctggaagggcctgtggcgctttgcccaggtggaccccaacggctccagctcaaggctgccacagtaagcctggtccagcaagacctgtgccattaaagaagcgaggctatgacgtcacccgaaatccacatctgaacaaggggatggcattcacactggaagagcggctgcaacttggaattcacggactcatccccccatgtttcctgtcccaagacgtgcaactgctgcgcatcatgagatattacgaaaggcagcagagtgatcttgacaagtacataatcctgatgacactgcaggatcgcaacgaaaagttgttctaccgggtgctcacttctgacgttgaaaaatttatgcccattgtttacacaccgaccgttggtctggcctgtcagcattacggactcacgttcagacggccacgcggactgttcattactattcacgacaaagggcacctggcgactatgttgaatagctggcccgaagacaacattaaggctgtagtggtaaccgatggcgagagaatcctaggattgggcgatctggggtgctatgggatgggcatacctgtcggcaagctcgccctatacaccgcgtgcgggggtgtgaacccccagcaatgcttaccagtgctcctcgatgtcgggactaataacgaagaattgcttagagacccattatatataggactgaagcaccaaagggtgcacggtaaggcctacgatgatttattagacgaatttatgcaggccgtcacagataaatttggtattaactgcctcatccagttcgaggattttgccaacgccaacgccttcaggctgctcaataagtatcgcaacaaatactgcatgttcaatgatgacatccagggcaccgctagcgtggcagttgccggaattctcgctgctctcagaatcacgaaaaacaagctatccaaccatgtctttgtttttcaaggcgctggggaggccgcaatggggattgctcatcttttggttatggccctggagaaagagggggtgcccaaggccgaagccactcgaaaaatttggatggtcgattcaaagggtcttatagttaaggggaggagccatcttaatcatgagaaggagatgttcgcacaagatcaccccgaggtaaactcattggaagaggtcgtcaggttggtcaaacctacagctatcattggtgtggccgctattgccggagcattcacagagcagatcctgagggacatggcgtcatttcatgagagacctattatttttgctctttctaaccccacctccaaagctgagtgtacagccgagaagtgctatagagtgaccgaggggaggggcatatttgcgtccgggtccccgttcaagtctgttacgttggaggatggcaaaacctttatccccggacaaggtaacaatgcctatgtcttccccggtgtcgccctcggagtgatcgccggtggaatcagacatattcctgatgaaatatttttgctgacggcggagcaaatcgctcaggaggtgtcagagcagcacctgagccagggacgattgtacccccctctttctactatccgggacgttagcctaaggatcgctattaaggttcttgattacgcttataaacataatctcgcttcttactatcccgaacctaaggataaggaagccttcgtgagatccctagtgtacacccccgactacgattcttttactctggactcttacacatggccaaaagaggcaatgaatgtgcagaccgtgtag

SEQ ID NO: 229473 - DNA, 1815 bp, synthetic construct
  misc_feature 1..1815: note = Description of Artificial Sequence: Synthetic coding sequence
  source 1..1815: mol_type = other DNA
atgggggcagccctgggtactggtacccgcttagcaccatggccaggtcgtgcctgtggtgcacttccaaggtggactccaacagctccagcccaggggtgtcacagcaaacccggaccagccaggcctgtgcccttaaaaaaaagaggttacgatgtaacaagaaatcctcacctgaataagggaatggccttcacgctggaggagcgccttcagctgggaatccatggcctgattccaccttgcttcctgtctcaggatgtccagctgttacgcattatgagatactacgaacgccagcagtccgacctcgacaagtatataatattgatgaccctccaggacaggaacgaaaaactgttctacagggtgctgacttcagacgtcgagaaattcatgcccattgtgtataccccaacagtgggattggcttgtcagcactatggcctgacctttcgacggcctaggggactgttcattacaattcatgacaaaggtcatctcgctaccatgttgaattcatggcctgaagataatatcaaagccgtggtcgtaacagatggtgagagaattctgggacttggtgatctgggatgttacgggatgggaattcctgtgggaaagctcgcactgtacaccgcctgcggcggagtgaacccacaacagtgcttgccggttctccttgatgttggaacaaacaatgaagagctactgagagacccgctctacatcggcttgaagcatcagagggtgcacggaaaagcttacgacgacctgctggatgagtttatgcaggcagtcaccgacaagtttggcatcaattgccttatacagtttgaggatttcgccaacgctaatgcttttaggctactcaacaagtaccggaacaagtactgtatgtttaatgatgatatacaggggacagccagtgtggcagtggctggaatcctcgccgcacttagaattaccaaaaataagctctccaatcacgtgtttgtctttcagggcgcaggagaggctgccatgggcatcgcgcacctcctggtgatggccttagagaaagagggagtaccaaaagccgaggctactcgaaagatctggatggtggatagtaagggtctcattgtgaaggggaggagccacttgaatcatgagaaggaaatgttcgcccaggatcatcctgaggtgaattctttggaggaggtggtccgtcttgtcaagcccaccgccatcatcggggtggcggcaattgccggagctttcaccgaacagattctccgcgacatggccagttttcatgagcggccaattatcttcgcactgtcaaacccaacgagcaaggctgaatgtactgccgaaaagtgttaccgtgtcacggagggaaggggtatctttgctagcgggagcccttttaagagtgtgaccctggaagacggcaagactttcattcccggacaaggcaacaacgcttacgtctttcccggagtggccctgggcgtcatcgcaggaggtatccgtcatatccccgatgagatctttctgctgactgctgaacagatcgcccaagaggtgtccgaacaacacctttcccaagggagactgtaccctcccttgtcgactattagggacgtctccctgcgcatcgccataaaagtcctagactacgcatataagcacaacttggcctcttactatcctgagcctaaggacaaagaggccttcgtcaggagtcttgtgtacaccccggactacgactccttcaccttagactcatacacttggccgaaggaagccatgaacgtgcagacagtgtag

SEQ ID NO: 229474 - DNA, 1746 bp, synthetic construct
  misc_feature 1..1746: note = Description of Artificial Sequence: Synthetic coding sequence
  source 1..1746: mol_type = other DNA
atgggagccgcactcggcacaggtactaggctcgcaccatggcccggaagggcctgcggagccctgccacggtggacgcccacagcgccagcccaggggtgccacagcaaaccaggcccagcaaggcctgtgcctctcaagaagaggggttatgatgtgacccgaaacccccacctgaataaaggaatggcattcaccttagaggagcgcttacaattggggattcacggtctaattcctccctgtttcctgagccaggacgtgcaattgctccggatcatgagatactatgagcggcagcagtcagatttagacaaatatattattctcatgactctccaggatcgcaacgaaaaactgttttaccgcgttctcacatctgatgttgaaaagtttatgcccatcgtgtatacccctacggtaggcctcgcatgccagcactacggcctcacattcaggcggcctcgaggcctttttattaccatccacgacaaaggccatctggcaacaatgctgaactcatggcccgaggataacattaaggcggttgtggtcactgatggcgaacgcatcctagggctcggcgacctgggttgctacggaatgggtatccctgttgggaaactggctctgtatacagcttgtggcggagtgaacccgcagcagtgcctgcccgtgcttctggacgttggaacaaataatgaggagcttctgagggatcctctctatatcggtctaaaacaccaacgggtgcatggcaaagcctatgacgacctcctggacgaatttatgcaggcagtcaccgataaattcggaatcaattgcctcatccagttcgaagattttgctaacgcgaatgcttttcgactccttaacaaatatcgtaataagtactgcatgtttaatgacgacatccaggggactgcaagcgtggctgttgccggaattctggctgccctcagaatcacgaagaataaactgtctaaccatgtcttcgtcttccaaggcgctggcgaggcagccatgggcatcgcacacctactcgtcatggcactggagaaggagggggtccctaaggccgaagcaactcggaaaatttggatggtagacagtaaaggcctcattgtaaaaggacggtcacatctcaaccatgaaaaggagatgtttgcccaggaccatcccgaagtgaactctctggaggaagttgtgcgattagtcaagccgaccgctatcatcggggtggcagctatcgccggtgcgtttactgagcagatcctgagggacatggcttcttttcacgaacgccctattatcttcgcactttcaaacccgacctctaaggccgagtgtaccgctgaaaaatgctaccgcgttaccgagggccgtggtatttttgcgtccggcagtccctttaaatctgttaccctagaggatgggaagacatttatacccggacagggaaacaatgcgtacgttttcccaggagtggccctgggagttatagccggaggaatcaggcatattcccgatgaaatctttctacttaccgcggaacagattgctcaagaagtgtctgagcaacatcttagccagggacgactttaccccccactatctactattcgcgacgtctctcttagaatcgcaatcaaagtgctggattacgcgtacaaacacaacctagccagctattatccggagcctaaagacaaagaggctttcgtgcgctcactggtttacacctag

SEQ ID NO: 229475 - DNA, 1029 bp, synthetic construct
  misc_feature 1..1029: note = Description of Artificial Sequence: Synthetic coding sequence
  source 1..1029: mol_type = other DNA
atgggagccgctctggggaccgggacgcgcctggcaccgtggcccggacgggcatgcggggcactgcctcgctggaccccaaccgcacctgctcagggatgtcactccaaacccggtcccgctcgtcccgtgcctctgaaaaagcgtgggtacgatgtgactcgcaacccacatcttaataaaggcatggctttcacgttagaggagcgtctgcagctggggatccatggcctcattccgccatgcttcctttcccaagatgtgcaactgttgagaatcatgaggtattacgagagacagcagtcagacctggacaaatacataattctgatgactctccaagaccgcaacgagaaattgttctacagagtgctcactagcgacgtagagaaattcatgccaatcgtgtacactccaacggtcggcctggcttgccaacactacggactaacttttagacgacctcgcggactgttcattactattcatgacaagggccatttggcaactatgttaaatagctggcccgaagacaacatcaaggccgtcgtcgtaactgatggggaaagaattctgggactcggtgacttggggtgttacggaatgggtattccggtaggtaagctcgccctctataccgcgtgtgggggtgtgaacccacagcagtgtctaccagttctgctggacgtcggaaccaataatgaggaattgctgcgggaccccctgtatataggcctcaagcaccagcgagtccacggcaaggcctacgacgacctgctggatgaattcatgcaggctgtcaccgataagtttggaataaattgccttatccaattcgaagattttgccaacgcaaatgcatttcgactgctgaacaagtatcgcaacaagtattgcatgttcaacgacgacattcagggaacaacttgtcacactttttcatgcccctggcacctctgggcacaggtaatgttccagcatattcccggaccgatgggattcagcgaatggcttccccgtaacagttag

SEQ ID NO: 229476 - DNA, 189 bp, synthetic construct
  misc_feature 1..189: note = Description of Artificial Sequence: Synthetic coding sequence
  source 1..189: mol_type = other DNA
atgggtgccgcacttgggactggaactcgactggctccctggcccggtcgcgcttgtggggctcttcctcgctggactcctaccgctcccgctcagggatgtcatagcaagcctggtcccgcacgcccagtgcctctgaagaagcggggttatgatgtgactaggaacccacatttgaataaggtgtag

SEQ ID NO: 229477 - DNA, 186 bp, synthetic construct
  misc_feature 1..186: note = Description of Artificial Sequence: Synthetic coding sequence
  source 1..186: mol_type = other DNA
atgggagctgcactgggcaccggaaccagattagcgccatggccgggtagagcctgtggcgcattaccaagatggacccctaccgctccagcccagggttgccactccaagcctggtcctgccagaccagtgcctttgaagaagcgcggatatgacgttaccaggaacccccatcttaataagtag

SEQ ID NO: 229478 - DNA, 456 bp, synthetic construct
  misc_feature 1..456: note = Description of Artificial Sequence: Synthetic coding sequence
  source 1..456: mol_type = other DNA
atgggcgcagcactgggtactgggactcggctggcgccttggcccggtagagcatgcggagcgttaccgcgttggacaccaacggcccctgcacagggttgccacagcaaaccaggaccagcccgtcccgttccccttaagaaaagaggctacgacgtgactaggaacccacaccttaataaaggcatggccttcaccctagaggaacgcctccagctcggaattcacggtctgatcccaccttgcttcttgtcacaggacgtgcaattgctgcgcatcatgcgctactatgagcgccaacagagcgacttggacaaatatattattttgatgaccttgcaggacagaaacgaaaagctgttctacagggtcctgacctcagacgtagaaaagtttatgcctatcgtgtataccccaacagtaggccttgcttgtcaacattacgggctcacctag

SEQ ID NO: 229479 - DNA, 240 bp, synthetic construct
  misc_feature 1..240: note = Description of Artificial Sequence: Synthetic coding sequence
  source 1..240: mol_type = other DNA
atgggcgctgcactggggaccggaactcggctggctccctggccagggagagcatgtggcgctttgcctcgctggactcccacagcgccagcccaaggctgccattccaagccaggcccagcaagaccagtccccctaaagaagagaggctatgacgtcactcgtaaccctcatctgaacaaagtgatgggccaaagggccggacggccagcactcaggagcagagggtgtcggaagtag

SEQ ID NO: 229480 - DNA, 1815 bp, synthetic construct
  misc_feature 1..1815: note = Description of Artificial Sequence: Synthetic coding sequence
  source 1..1815: mol_type = other DNA
atgggagccgcactcgggaccgggactcgactcgctccttggccgggacgagcgtgcggagctctccctcgctggacaccgaccgctccagctcagggctgtcatagcaagcccggaccggctcgcccagtgcctctaaaaaagcggggatatgacgtcactcggaatcctcatttgaacaaaggcatggcattcacacttgaagaacggttgcagctgggtattcacggccttattccaccctgcttcctgtcccaagacgtgcagttgctgaggataatgcgctactatgagcgtcagcaatccgatctcgacaagtatattattctgatgacactacaggacaggaacgaaaaactgttctaccgagtgctaactagcgatgtggagaagttcatgcccatcgtgtacacgcctactgttggcctggcctgtcaacactatggcctcaccttccgtcggccacgagggttatttatcactatacatgataaagggcatctcgccaccatgctcaattcctggcctgaggacaatatcaaagccgtggtcgtcacagatggtgagagaatcttgggattaggggatctagggtgttatggaatgggcattcccgttgggaagctggccctgtataccgcatgcggtggagtcaatccccagcaatgcctgcccgtactgctggacgtgggcactaataatgaagaactgttaagggatcccctgtatattggtttgaagcaccagagagtacatggtaaagcttacgatgacctgctcgacgaatttatgcaagctgtcacagataaatttggcattaattgccttatacagtttgaggatttcgcaaacgctaacgcctttcggctcttgaataaatatcgaaataagtattgcatgttcaatgacgacatccaaggcacggcatctgtcgcggtcgctggtatcttggccgcactgagaattactaagaacaagctgagtaaccacgtattcgtctttcagggagcaggagaagccgcaatgggcattgcccatttgctagtcatggccttagagaaagagggcgtgcccaaggccgaggcaaccaggaaaatatggatggtggattctaagggcctcatcgtaaagggtaggtcacacttaaatcacgaaaaggagatgtttgctcaggaccatccagaagtgaatagcctggaagaggttgtccgccttgtgaagcccactgctattatcggcgtggccgcaatcgctggagccttcacagaacaaattcttcgagatatggcaagctttcatgagcggccaataatctttgcgttgagtaacccgacgtccaaggcagagtgcactgccgaaaagtgctatcgagtgacagaagggagaggaatatttgcatctggctcgcccttcaaaagtgtcacactggaggatggaaaaacatttattccagggcagggcaataacgcctatgtgtttccgggagtcgctctgggcgtgatcgccggaggaatcagacatatacctgacgagattttcctcttaaccgcagaacagatagcccaggaggtgtcagaacagcacctctcccaaggtcggctgtatccacccctttccaccattagagatgtcagtcttagaatagcaataaaggtgctggactacgcctataagcacaatttagcttcctattatccagagcccaaagataaggaggcctttgtacgaagcctggtttacacgccagactacgattccttcacccttgacagttacacatggccgaaggaggccatgaacgtccaaactgtgtag

SEQ ID NO: 229481 - DNA, 759 bp, synthetic construct
  misc_feature 1..759: note = Description of Artificial Sequence: Synthetic coding sequence
  source 1..759: mol_type = other DNA
atggcattcaccttggaggagagacttcaacttggcatccacggcttgattcctccatgttttcttagtcaggacgtgcaactgctgaggatcatgagatattatgaaaggcagcaatctgatctcgacaaatacattatactaatgaccctccaagatcgcaatgagaagcttttttatcgtgtgctaacaagcgacgtggaaaagttcatgcctatcgtttatacgcctactgtgggcctggcctgccagcactacggtttgacgttccgaaggccgagggggctttttattactatccacgataaaggacatctggccactatgctgaacagttggcccgaggacaatatcaaggcagttgttgtgacagacggcgaacgaatattgggtctcggggaccttgggtgttatggaatgggcattcccgtcggaaagctagcactgtacacagcttgtggtggtgtgaatccccagcaatgtctgcctgtgctcctcgatgtggggaccaataatgaggaactgctccgcgatccactctacatcggtcttaaacatcagagagttcacgggaaagcttatgatgacctcctagatgaatttatgcaggcagtcactgataagtttgggatcaactgtctgatccagtttgaagactttgcaaacgcgaatgctttccgtcttctcaataaatacaggaacaagtactgcatgtttaacgatgacattcaggcccctagtactgcccctgcaacctag

SEQ ID NO: 229482 - DNA, 1482 bp, synthetic construct
  misc_feature 1..1482: note = Description of Artificial Sequence: Synthetic coding sequence
  source 1..1482: mol_type = other DNA
atgcggggatttggtcccggactgacagcaagacggttattacccctcagactgccccctcgtccgcctggcccacgtctcgctagcggtcaagcagctggcgctctggaacgggcaatggacgaactcctgcgcagagccgttcccccaacgccagcatacgagttgagggagaaaacacctgctcccgcagaaggccagtgtgctgacttcgtcagcttctacggaggccttgctgagaccgcacagcgggcagagctgctgggcaggttagccaggggcttcggggtcgatcatggccaggttgccgaacagagtgccggtgttttgcacttacgtcagcagcagagggaggccgcagtcttgctgcaggccgaagatcgcctcaggtacgcacttgtcccacgctatcgtggcctgtttcatcacatttcaaaactcgacggtggggtcagatttctcgtccagttgcgggctgacctcctggaggcacaggccctgaagctcgtggagggccctgatgtgcgggagatgaatggtgtcctgaagggcatgctctccgaatggttctccagtggttttctcaatctggaacgcgtcacctggcacagtccctgtgaggttctccagaagattagcgaggccgaagccgtacaccccgtcaaaaactggatggatatgaaaagacgagtaggtccctataggcgatgctacttcttttcccactgtagcacacccggagagccattggttgtgctacatgtggcccttacaggggatatctctagcaatatccaagcaattgtgaaagaacaccctcccagcgaaactgaagagaagaacaagatcacagcggcaattttttactcaatctctctcacccagcagggcttgcagggcgtagaactggggacctttctaattaagagagtggtgaaggaactccaaagggaattcccccacctcggcgtattcagtagcctcagcccaataccaggttttaccaaatggctgctaggcctcctgaatagccaaactaaagagcatggccgtaatgaactgttcaccgattctgaatgcaaagagatatccgagattaccggcggacctatcaacgagaccctaaagttgctcctctcgtcaagtgagtgggtacagtccgaaaagctggtccgggcacttcagacacctctcatgagactctgcgcctggtatctgtacggggaaaaacatcgcggatatgcgctaaaccctgtcgcaaattttcaccttcaaaatggcgctgttctgtggaggattaactggatggctgacgtgagtctgagaggcatcacaggatcttgtggcctgatggccaactaccgatatttccttgaggaaactggcccaaactccacctcttacctcggatcgaagatcattaaagcttctgagcaggtgctgagcctcgtggcccaatttcagaagaattctaagctgtag

SEQ ID NO: 229483 - DNA, 558 bp, synthetic construct
  misc_feature 1..558: note = Description of Artificial Sequence: Synthetic coding sequence
  source 1..558: mol_type = other DNA
atggctagaaagaaactgaagaagtttaccactctggagatcgttctatctgtactattgctggttttgtttatcatcagcatcgtgcttatagtccttttagctaaagaaagtctcaaaagtacagccccagatccagggacgactgggaccccagatccgggaacgaccggtacgcccgaccctggcacgacggggaccactcacgcccgaacaacaggtccaccagatccaggaacaaccggaacaacccccgttagcgccgagtgtcctgtcgtgaacgagttggagcggataaactgtattcccgatcaaccacccactaaggccacgtgcgaccaacgcggatgttgttggaacccccagggagcggttagcgttccctggtgttactattccaaaaaccattcataccatgtcgagggtaatcttgtgaacaccaacgctggattcactgctcggctcaaaaacctaccttcgagtcctgtcttcggttctaatgtggataatgtgcttcttactgcagaatatcagacttccaatcgcttccacttttag

SEQ ID NO: 229484 - DNA, 4989 bp, synthetic construct
  misc_feature 1..4989: note = Description of Artificial Sequence: Synthetic coding sequence
  source 1..4989: mol_type = other DNA
gctgtgtctgtcccctggtgctactactcaaagaatcattcataccatgttgaagggaacctggtgaatactaatgccggatttactgcacggctcaagaaccttccctcaagcccagtattcggcagtaatgtagacaacgtgctgctgaccgcagagtatcagacctcaaatcgatttcactttaagctgacagatcagactaataacaggtttgaggtgcctcatgaacatgtgcagtcattttcaggaaatgccgcagcgtctctgacctatcaggtggagatatctaggcagccatttagcattaaagtcacgcgaaggagcaataacagggttcttttcgacagcagcatcgggccactcctgttcgccgaccaatttctgcaactaagcactcggctgccctccacaaacgtctacgggttgggggaacatgtacaccaacagtatcgccacgacatgaactggaagacctggccaatttttaatcgggacactactcccaacgggaacgggaccaatttgtatggtgctcagacatttttcttatgcttggaggacgcgtccggactgtcctttggggtttttctgatgaactcaaatgcaatggaagtcgtgctccaaccggcaccagcgatcacatatcgcacgattggtgggatcttagatttctacgtatttcttggcaatacaccagagcaggtggtccaggagtacttggagctgataggacggccagccctgccgagctactgggctctgggtttccatctgtctcggtacgagtatggaacactcgataatatgagggaggttgtggagcgcaaccgcgctgcacagctgccgtacgacgttcagcatgccgatattgattatatggatgagaggagagatttcacttacgattctgtggacttcaaagggttcccagagttcgtgaacgagctccataataatggccagaaactggtcatcatcgtcgatcctgcaatctctaacaattccagttcgtctaagccatatggcccttacgaccggggatccgatatgaagatctgggttaacagctccgacggagtgactcctcttattggcgaagtgtggcctggacagaccgttttccctgattacaccaacccaaactgcgctgtgtggtggactaaggaattcgaactctttcacaaccaggttgaattcgacggcatttggattgacatgaacgaagtcagcaacttcgtggacggaagcgtgtctggctgttcaaccaataacttgaataaccccccatttacacccagaattctggatggctatttattttgtaaaaccctgtgtatggatgccgtccagcactgggggaaacaatacgacatccacaacctgtatggctatagcatggcagtcgctacagcagaagctgctaaaaccgtgtttcctaacaaaaggagcttcattctcacccggagcacatttgcaggcagtggaaaattcgcagcccattggctaggtgacaataccgcaacatgggatgacctgaggtggtctatcccaggggtgttggagtttaatctctttggcatcccaatggtgggacccgatatctgtggatttgcattggacacccccgaagaactctgcaggaggtggatgcagctcggagctttttaccctttctctcggaaccataacggtcaggggtacaaagatcaggatccagcctcttttggagccgacagtctcctgctgaattccagccggcactatctgaacattaggtacactcttctgccttacctctacaccctatttttccgtgcccacagtcggggagacaccgtagctcgaccactgcttcatgaattctacgaggacaactctacatgggacgttcaccagcagttcttgtggggccctggtctgctgatcacgccggtgcttgacgagggggctgagaaggttatggcctatgtgcctgatgccgtatggtatgactacgaaaccggttcacaagtgcgctggcggaaacaaaaagtggaaatggagctgccaggtgacaaaataggcctccatctccgcggtggctacatcttccctacccagcagccgaacactaccactctggcctcacgcaagaatccactgggactgataattgctctcgatgagaacaaggaggcaaaaggcgaactgttttgggacaatggcgagactaaggataccgtggccaataaagtgtatctgctgtgtgaattctccgtaacgcagaatcgtctggaggttaacatatcgcagtccacctacaaagatccaaacaatttagcattcaacgagatcaagatacttggtaccgaggaaccaagtaacgtcacagtcaagcacaacggggtcccttctcagacaagtcctacggtaacctacgattcgaacctgaaggtcgcaatcataaccgacattgaccttttactgggagaagcctataccgttgagtggtcaatcaaaatccgcgacgaggagaaaattgattgctacccagatgagaacggcgcaagtgctgaaaactgtaccgcgagaggatgcatttgggaggctagcaacagcagtggtgtgcctttctgctatttcgtgaatgacttgtactccgtgtcagatgtgcaatacaactctcatggagctactgctgatatcagcctgaagtcaagcgtgtacgctaacgcgttccctagcacgccagttaacccactgcggctggatgtgacctatcacaagaacgagatgttacagttcaagatttatgaccctaacaaaaatcggtacgaagtgcccgtcccacttaacattccgtccatgccttcgtcaacacccgaggggcagctttacgatgtgttaatcaagaaaaatccgtttggaattgagatccggagaaagtccactggcacaatcatctgggattcacaactgttagggttcacgtttagcgatatgtttatacgcatcagcacaagattaccctccaagtacttgtacgggttcggtgagactgagcatcgctcgtacaggcgcgaccttgaatggcatacctggggcatgtttagccgggatcagccacctggctataaaaagaatagctatggcgtgcatccttactacatgggtctggaggaggatggttcagctcacggcgtcctgctcctaaattcaaacgctatggatgtaacattccagcctcttccagcccttacttaccgtactaccggcggagtgctcgatttttacgtctttctcggacctacacccgaacttgtcacccagcagtataccgagctgattggtcgtcctgtcatggtcccttattggtccctgggattccaattgtgtagatatggataccagaatgacagcgagatcgcctccttgtacgacgagatggtcgccgctcagatcccttacgatgtgcagtattcggatattgattacatggaacggcagctggattttacactctcccccaaatttgcaggattccctgcactgataaaccgcatgaaggccgacgggatgcgtgtgattttgatactcgatcctgcaatctcgggaaatgagactcagccttacccagcatttacacggggtgtagaagacgatgtcttcatcaagtaccccaacgatggggatattgtgtggggcaaagtgtggccggatttcccagacgtggttgtaaatggatccctagactgggactcccaggtggaactgtatcgggcttatgtcgcttttcctgatttctttcgaaacagcaccgcgaagtggtggaaaagagaaatcgaggagttgtacaataacccgcagaatcctgagaggtctctgaaatttgacggcatgtggattgacatgaatgagccctcttcatttgttaatggggcagtgagccccggttgccgcgacgcaagcctgaatcaccccccatacatgccacatttggaatctcgagaccggggactctcctcaaagacattatgcatggagtcccagcagattcttcctgacggatccttggtgcagcattataacgtgcacaacctttacggttggagccagacacgacctacatatgaggctgtccaggaggtcacagggcagaggggggtcgtgatcacacggagtacgttcccctcttctgggcgatgggccggacactggctcggcgataatactgcggcatgggatcaactgaagaagtctataataggtatgatggagttcagtctgtttgggatttcatatacgggggctgacatctgcggtttcttccaggacgctgagtatgaaatgtgtgtgaggtggatgcagctgggcgcattctaccccttctccaggaatcataacacgatcgggactcggagacaggatcctgtttcctgggacgccgcttttgtcaacatttctcggaacgtcttgcaaacacggtacacgctactaccctatttatacaccttgatgcaaaaggcacatacagaaggcgtgactgtcgtcaggcctcttctgcatgagttcgtttccgatcaggtcacctgggacatcgacagtcagttcctcctcggtcctgctttcttggtctctcccgtgcttgagaggaacgcacgtaacgtgaccgcctattttccacgcgcaagatggtacgattattacacaggtgtggatataaacgcacgcggagaatggaagacactgcccgctcctcttgaccacatcaacttgcacgtacggggtgggtatatcctgccatggcaggagcccgctctgaacacccacctctcaagaaagaaccccctaggtctcattattgctctggacgagaacaaagaggctaagggggagctgttctgggacgatggacagacaaaagatacagtggcaaaaaaggtttatctgctgtgtgaattcagtgtgacacagcaggtggtcttcctcaatatcgtgttcaattag

SEQ ID NO: 229485 - DNA, 5573 bp, synthetic construct
  misc_feature 1..5573: note = Description of Artificial Sequence: Synthetic coding sequence
  source 1..5573: mol_type = other DNA
atggctcggaaaaagttgaaaaagtttacgaccctagagattgtcttgtcggtgctgcttcttgtgctgtttatcatatcaatcgtgctcatagtgctattggcaaaggagtcactcaagtctaccgccccagatccgggtactacagggacaccagaccctggaactaccggaactcctgacccaggcacaaccggaacaacccatgctcgcacaaccggcccaccggaccctgggacaaccggcacaacaccggtatccgctgaatgccccgtggtcaatgagctggaacgcatcaattgtatccccgaccaaccaccaacaaaggccacctgcgaccaaagaggctgttgttggaacccacaaggcgcagtatctgtgccctggtgctactactcaaagaaccactcatatcacgtcgagggaaatctcgtcaatacaaacgcagggtttacagctcgccttaagaatctcccatcatctccagtgttcggctctaacgtggacaatgtgctgcttacagcggaatatcagacctccaacagatttcattttaaactgactgatcaaactaataaccgctttgaagtacctcacgagcatgtgcagagcttttccggaaatgctgccgcatccttgacctatcaggttgagatttccagacagccattctccattaaggtgaccagaaggtctaacaatagggttctgttcgacagcagcatcgggccactcctttttgcagatcagtttctgcagctttccaccaggctgccttcaacaaatgtgtacggactgggggagcacgttcatcaacaatatcgacacgacatgaattggaaaacgtggcctattttcaatcgagacactactcccaacggtaatggcaccaatctttatggcgctcagacgttcttcttgtgtttagaggacgccagcggattgagcttcggcgtgttcctgatgaactctaatgcaatggaggtcgtgcttcaacctgctccagccattacttatcgcacaattgggggtatcctggatttttatgtatttctgggcaataccccggagcaggtagtgcaggaatacctggaactgatagggagaccggctctgccttcctattgggcacttggctttcatcttagtcggtatgaatacggcacactcgacaatatgcgcgaggtggtggaacgaaatcgtgcagcccagctcccatacgatgtgcaacatgcagacatcgactatatggacgaacgaagggacttcacatacgactcagtcgatttcaaggggttccccgagttcgtgaatgaactgcacaacaacggccagaaacttgtgataatcgtggatccggcaatctctaataatagcagcagttccaaaccatacggcccatacgaccggggttctgatatgaagatttgggtaaatagctccgacggagtgacccctttaattggagaagtatggcctggtcaaacagtgttccccgattacactaatccaaattgcgcggtatggtggactaaagagtttgagctctttcacaaccaggttgagttcgacgggatttggatagatatgaatgaggtttccaacttcgtcgacggatccgttagcggatgttcaaccaacaatctgaataacccgcctttcacccccaggatcttggatggctatctgttttgtaaaacgctgtgtatggacgccgttcaacactggggcaagcaatatgatatccataacctctacgggtactctatggcagtcgccactgctgaggcagccaaaactgtcttccctaataaacggtcatttatcttgacccgatcaacattcgccggttctgggaaatttgctgcccactggctcggagacaacaccgcgacgtgggacgacttacgttggtccatcccaggagtattggagtttaatctcttcggaattcctatggtgggcccagatatttgtggatttgctctggatactccagaggagctctgcaggaggtggatgcagttgggggcattttatccgttctccaggaatcacaatggccagggttacaaggatcaagatcctgcatcatttggggcagattctttgctcctcaattcctccaggcactatctcaacatcaggtacaccttgctcccgtacctttatactctcttcttccgggcacacagtcggggagacactgtggctagaccactgctacacgaattctatgaggataatagcacctgggacgttcaccagcagtttttatggggcccaggactcctcattacacctgttctggacgaaggcgcagaaaaggtcatggcttacgtgccagatgccgtgtggtatgactatgagactggatcccaggttaggtggcgcaagcaaaaggttgagatggagctcccaggggataagattggactgcacctccggggtgggtacatcttcccaactcagcagcctaacaccaccacgctggccagcagaaagaacccactggggctcattatcgccctggatgagaataaagaggcaaaaggcgaactcttctgggacaatggtgagactaaagacacagtagccaacaaggtataccttctctgcgagtttagtgtgacccaaaacaggcttgaagtgaatatctctcagtccacatataaagatcccaacaacctggccttcaacgaaatcaagattctcgggacagaggagccctccaacgttaccgtcaagcataacggggtcccgtcccaaacatctcccaccgtgacatacgattccaatctaaaagtggccattataaccgacatcgatcttcttctcggtgaagcatatacagttgagtggagcatcaagatccgagatgaggagaaaatcgactgctaccccgacgaaaatggcgcatccgcggagaattgtacggccagggggtgtatctgggaagcctcaaattcctccggcgtgcccttctgttactttgttaatgacttgtactctgtatctgatgtgcagtacaattcccacggggctaccgccgacatcagtctcaagtcttcagtgtacgccaacgctttcccgtctaccccagttaaccccctcagactagatgtgacctaccacaaaaacgagatgctacagttcaagatctacgatcccaataagaaccggtatgaggtccccgtcccactaaacatacctagcatgccctcttccactccggaaggacagctgtacgatgtgctcattaaaaagaaccctttcggcattgagatacgacgcaagtccaccggtacaataatctgggatagccagctgctcgggttcacattttccgatatgttcatccggataagtacaaggctgcctagcaagtatttgtacggatttggagaaacggagcatcgatcatatcggcgagatctggagtggcacacttgggggatgttctcaagggatcagcctcccggatataagaaaaattcttatggcgtgcacccgtattatatggggctcgaagaagatggcagcgcccatggagtgctgctgctcaacagcaatgctatggacgtgaccttccaacctctccctgcattgacataccgcactactggaggggttctggatttttacgtcttcctaggtccgacccctgagctggtgacacagcagtacacagagctgatcgggcgacccgtcatggtgccctactggagtcttgggttccagctttgtcgctatgggtaccagaacgactccgagattgcctccctgtacgacgagatggttgctgcgcaaatcccttacgacgtgcaatattctgatatagattacatggagaggcaactagattttactctaagtcccaaattcgccggtttccccgctttaatcaatcgcatgaaggctgacggaatgagggtgatcctgattctggacccggctatctctggcaatgagacacaaccctaccctgcctttacccggggagtcgaagacgacgtgttcatcaaatatcccaatgacggggacatcgtgtgggggaaagtctggccggactttcctgacgtcgtggtgaacggctcgctggactgggactctcaagtggagctctaccgggcatacgtggcctttccggatttcttcaggaacagcaccgccaagtggtggaagcgggagatcgaggagctctacaataatcctcagaatccagagcggtccttgaagtttgatgggatgtggatcgacatgaacgagccatcctccttcgtgaatggggctgtaagcccaggatgccgcgatgcgagcctgaaccatcccccatatatgccacacttggaaagccgggaccgcggattgagcagtaagaccctctgtatggagtcgcaacagatcctccctgatggaagtcttgtgcagcactataatgtacacaatctgtacggctggtctcagaccaggcccacttacgaggccgtgcaggaggtcacaggacaacgcggtgtcgtcatcacccgctcaaccttcccaagttctggcaggtgggcgggtcactggctgggtgataacaccgctgcttgggaccaactaaaaaagtccatcatcgggatgatggagttcagtctctttggtatcagctataccggagccgacatatgcggattttttcaggacgccgaatacgaaatgtgcgtgcgctggatgcagctgggcgcattttaccccttctctagaaaccacaacaccattgggacacgacgacaagacccggtatcctgggatgttgcgtttgtcaacatatcaaggaccgtgctgcagacaaggtacaccctgttgccttatctgtataccttgatgcacaaggcccacaccgaaggtgtgacggtggtgaggcctcttcttcatgagtttgtttccgatcaggtgacttgggacatagattctcagttcctgctcggccctgctttcctggtgagtcctgtgttagaacgaaatgctcggaatgtgaccgcgtactttcctagagccagatggtatgattattacacgggtgtggatattaatgctcgaggggagtggaaaacactccctgctccgctcgaccacataaacctgcatgtgaggggtggatatatacttccatggcaggaacccgctctgaatacccatttgagtcggcagaaatttatggggttcaaaattgcactggatgatgagggcaccgcaggcggttggcttttttgggacgacggtcagtccatagatacctatggcaaggggttatactatttggcttcattctctgcgtcacagaatacgatgcagtcccatataatcttcaataactacatcacggggacaaacccgttaaaacttggttacatcgagatctggggcgtgggcagcgtgcccgttacgagcgtgtctatttccgtgtctggcatggtgatcacgccttcctttaataatgatcctaccacccaggtcctgtccatcgacgtcacagatagaaacatctccctccataattttacgtcgttaacttggatctccactcttta

SEQ ID NO: 229486 - DNA, 2061 bp, synthetic construct
  misc_feature 1..2061: note = Description of Artificial Sequence: Synthetic coding sequence
  source 1..2061: mol_type = other DNA
atgttactcagaggggtcctcctggctctgcaggccctccagctggccggagcactggacctacccgctggctcctgtgccttcgaggaatccacctgcggctttgactcagtgctggcatcccttccatggatccttaatgaggaaggtcactatatctatgtggacacgtctttcggtaagcagggggagaaagcggtacttctttctcctgacctccaggcagaagaatggtcctgtctgaggctagtatatcagattactacctcatcagaatcgctctccgacccatcccagttaaacctttacatgcgctttgaagacgaatctttcgatagattattatggagcgcgaaagaaccctcagattcatggctgatcgcctccctggatctgcagaactcaagtaaaaagttcaagatcttgatagaaggcgtacttggacagggtaacactgcgtctatcgccttgtttgaaatcaagatgaccacgggatactgtatcgagtgtgacttcgaggagaatcacctttgtgggttcgtgaaccgatggaaccccaacgtcaactggtttgttggtggcggatcgattagaaatgtacactccatcctgccacaggatcacacttttaagagtgaattgggacattacatgtatgtagactcggtgtatgtcaagcactttcaggaagtagcccagttgatttcgcccctgacgactgctcctatggctgggtgcctgagcttttattaccagattcagcaggggaatgacaatgtattttcattgtacactagagacgttgctggcctgtatgaagagatttggaaggctgaccggccaggtaatgcagcctggaacttggctgaggtggagttctccgcgccatatcctatggaagtcatctttgaagtggctttcaatgggcctaaaggcggatacgtagctctcgacgacatttcctttagcccagtgcattgtcagaatcagaccgaactgcttttttccgcagtggaagcttcttgtaacttcgagcaggacctgtgcaatttctatcaagacaaggagggtcccggttggacacgggtgaaggtgaaaccaaacatgtatcgagcaggcgatcatacaacagggctgggctactacctgctggcaaacacgaagtttacttcccaacccggatacatcggtaggttgtatgggccaagcctgcctggaaacctgcagtattgtttgcggttccattatgccatctacggatttctgaaaatgagtgatactcttgcggtgtatatattcgaagagaaccacgtagtccaagaaaagatctggtcagtgctcgaatcccctagaggagtctggatgcaagctgagatcacatttaagaagcccatgccaacaaaagtagtctttatgagcctgtgtaagagcttttgggattgcgggcttgttgctctggatgatattacaatccagctaggtagttgctcatccagcgagaagctcccacctcccccaggcgagtgcactttcgaacaggatgaatgcacttttactcaggagaagcgtaatcgtagctcatggcatcggagaaggggtgagacacctacctcttacaccggcccaaagggcgaccacactacaggagtagggtactatatgtatatcgaggcatcacatatggtgtatggccagaaggctaggctgctatcccgcccacttaggggggtatcaggcaagcactgtcttaccttcttttatcacatgtacggtggaggtacaggcttactgtctgtgtacctcaaaaaagaggaggacagtgaggagagcctgctgtggaggaggcgcggagaacagtctattagttggctgagggctctcatcgaatatagctgtgagcgacagcatcaaataatcttcgaagcgatcaggggggtgtcaattagatcagacattgctatcgatgatgtaaagtttcaagccggaccatgcggcgaaatggaggacactacgcagcagagctcaggttacagtgaagatctcaacgagattgagtactag

SEQ ID NO: 229487 - DNA, 2880 bp, synthetic construct
  misc_feature 1..2880: note = Description of Artificial Sequence: Synthetic coding sequence
  source 1..2880: mol_type = other DNA
atggaggttacgtgcttgctgttactcgccctgatcccctttcattgtagaggtcagggagtttacgccccagcccaggcccagatcgttcacgcaggccaggcatgcgtagtcaaggaagacaacatcagcgaaagggtgtacacaatcagggaaggggacaccctcatgctacagtgcttagtgaccggccacccccgaccccaggttagatggacgaagacagccggttcggcgtccgataagtttcaggagacctctgtgtttaacgagaccctgaggatagagcgaatcgcaagaacacagggcggtagatattactgcaaggccgaaaatggggtgggagttccagccatcaaaagcattcgggtcgatgtgcaatacctcgatgagcccatgttaacggtgcaccagacagtgtcagacgtgaggggcaatttctaccaagagaaaacggtatttttgagatgtaccgtcaatagtaatcccccagccaggttcatctggaagaggggatctgacacgctctcgcacagccaggacaatggggttgacatttacgagccgctgtacacccagggagagactaaggtcctgaaactgaaaaacctgaggccgcaggactacgcatcatacacctgccaggtctcagtgcgaaatgtgtgtgggatcccggataaggccatcacatttagacttacaaatacaaccgctccccctgccctgaaactgtcagtaaatgagacactcgtggttaatccgggagagaatgtaactgtgcagtgcctgctgaccggtggagatcctctgccccagctgcagtggtcgcacggaccgggaccgctccccttaggagcactggcgcagggaggaaccctctctatacctagtgttcaggcacgcgacagtggctactataactgtaccgcaacaaataacgttggtaatcctgctaagaagaccgtgaaccttttggtaagatctatgaagaatgcaaccttccagattacacccgatgtcattaaagagtccgaaaatatacagctcgggcaggatttgaaactgtcttgtcacgtcgacgctgttccgcaggaaaaggttacataccagtggttcaagaacggcaagcccgcaagaatgtctaagaggttgctagtgacccgcaatgatcctgagctgcccgcagttacttcctcgctggaactcatcgatctacacttttccgattatggcacatatctgtgtatggcatctttccctggggcacctgttcctgatctgtctgtggaagtcaatatctcttccgagactgttcctcccaccatcagcgtgccaaagggtagagctgtcgtaactgttcgggaaggcagcccggcagagctgcagtgtgaggttagaggcaagcccagaccccctgtcctgtggagtagggtggacaaggaggctgctctactcccatccggcttgccgcttgaggagacacccgatgggaaactcagattggagcgtgtgtcccgggacatgtctggcacatatcggtgtcaaactgcacggtacaatggctttaacgtgagacctcgggaggcccaggtgcaactgaatgtacagtccccttgcttcccacccgaagtcgagccaagcagccaggatgtgcggcaggcactcggcaggcctgtgctgcttcgctgttccctgttgaggggatccccacagaggattgcctcagccgtctggaggttcaagggccagctcctgccccctccccctgtggtcccagcagccgctgaagcccctgatcatgccgaactgagacttgacgctgtcaccagagatagtagtggatcttatgaatgcagtgtttcaaacgatgtggggtccgccgcatgcctcttccaagttagtgccaaggcctactcccccgagttttactttgatacacctaaccccacccggtcccacaagttatccaagaattacagctatgtactgcagtggacccaaagggagcctgacgcggtcgaccccgtactaaattatcgcctctccatacgacagctcaatcagcacaatgcggtggtgaaggccatccccgtgagaagggtggagaaaggccagcttttggagtacatcctcactgatctgcgggtcccccactcgtatgaggtgcgacttacaccatatacaaccttcggggctggcgatatggccagtcgcatcatccattacaccgagctgttagccctcaggactttgagctccgataatacatgccattttgaagacgaaaaaatttgcggctatactcaggacctaactgacaacttcgattggacccggcagaatgccctgactcagaatccaaagcgatcccctaatacggggccacccaccgacatctcagggacgccagaaggatactacatgtttatagagacctctcgccctcgtgaattgggcgatcgggcaagactcgtctccccactctacaatgcatccgcgaaattctactgtgtctcattcttttaccacatgtacggaaagcacattggcagcttgaatcttctggtgagatcccgcaacaagggggcacttgatactcacgcatggtccctgtcaggcaataaaggtaatgtatggcagcaggcacacgtccccattagccctagtgggccatttcagatcatttttgagggcgtgaggggacccggttatctaggggacatcgcgatcgatgacgtaaccctgaagaagggcgagtgtcctaggaagcagaccgaccctaataaggtggtggtgatgccgggaagcggcgctccgtgccagtcttctccccagctgtggggcccaatggcaatctttcttttggccttgcagagatag

SEQ ID NO: 229488 - DNA, 2868 bp, synthetic construct
  misc_feature 1..2868: note = Description of Artificial Sequence: Synthetic coding sequence
  source 1..2868: mol_type = other DNA
atggaggttacgtgcttgcttttgcttgccttgataccctttcattgccggggtcagggagtctatgcccctgcacaagcccaaatcgtgcacgctgggcaggcttgtgtagtaaaagaggacaatattagtgagcgcgtctatacaattagggagggggacactctcatgctgcagtgcttagtgactggccacccaagacctcaggtgcgctggactaagaccgcgggatcagcaagtgataagttccaggagacctccgtttttaatgagacccttcggattgaaagaatcgcaagaacacaaggaggcaggtactattgcaaagctgagaatggagtgggagtgcctgccatcaagtctatcagagtagacgtgcagtacttggatgaaccaatgctgacagtgcatcagaccgtgtcggatgttcggggtaatttctatcaggagaaaacagttttcctgaggtgtactgtcaattccaacccaccagcgagattcatatggaaaaggggctccgatactttgtcccatagccaggacaatggcgtggacatttatgagcctctttacacccaaggggagaccaaagtgctaaaactgaaaaatcttagaccacaggactatgcatcatacacttgtcaggtttccgtgaggaatgtgtgtgggatccctgacaaggccattacttttcgcctaacaaatacaaccgctccaccagccctgaaactgtccgtcaatgagacactggtcgttaaccctggcgaaaacgtgactgtgcagtgtctccttaccggaggggacccgttgccacagttacagtggtcccatggcccaggccctcttcctctgggagctctcgcccagggtggaactctctccattccatcggtgcaagccagagattcaggatactacaactgcacggcaacgaacaacgtcggcaacccagcaaaaaagaccgtcaacctcttggtacgctcaatgaagaacgcaacattccagatcacaccagacgtgattaaggaaagcgaaaatatacaattaggccaggacctgaaattgtcttgtcacgtcgacgctgtgccccaggaaaaagtgacctaccagtggttcaagaatggcaagcctgcgagaatgtctaagaggctactcgtgacccgaaacgacccagaacttcccgctgtgacctccagtctcgagctcatcgacctccacttttctgactatggaacctatctgtgtatggcatccttcccaggggcaccagtacccgatttgtcagtggaggtgaacattagctctgaaacagtaccacccaccatttcagtgccaaaggggcgtgcggttgtgaccgtgcgcgaaggcagtccggcagagctgcagtgtgaagttcgcggaaagcccagaccgcctgtgctgtggagtcgcgtggataaggaagccgctttgctcccaagcggcctgcccctcgaggaaacccctgatggtaaattacggttggaacgggtcagcagagacatgagcggcacgtatcggtgtcagactgccaggtataacggctttaacgtgcgcccacgagaagcccaggttcagctaaatgtgcaatttccgccagaagtggaacctagtagccaggatgtcaggcaggcgctggggaggccggttttgctgagatgttctctgctgagagggtctccacaacggattgccagtgcggtgtggagattcaagggccagctgctgccccctccccctgtggtgccagctgccgctgaagcacccgaccacgctgagctgcgtctggatgctgtaacccgcgatagcagcgggagctacgaatgttcggtgtctaatgatgtcggctccgctgcctgcctctttcaggtctcagctaaggcctacagcccagaattttactttgacactcccaatcctacccgcagccacaagctgtctaagaactactcatacgtgctacagtggacacaacgagagcctgatgctgtggacccagttctgaactacaggctatccattcgccagctcaatcaacacaatgctgtggtgaaggccatcccagtgcggcgagtggagaaagggcaactcctggagtatatactgaccgatctgcgcgttcctcactcttatgaggttagactaacaccttacactacctttggggctggagacatggcatcccggattatacactataccgagccaattaacagtcctaacctgtctgataacacctgtcactttgaggacgagaagatttgtggatacacccaggacttaactgacaacttcgattggacacgccaaaacgcacttacccaaaatcccaaacgctcgcctaatactggtccgcctactgacatttccgggacccccgaagggtactacatgttcattgaaactagccgtccacgtgagctgggagaccgcgctcgcttggtttctcctctgtataacgcttccgccaagttctattgcgtgtctttcttctatcacatgtatggcaagcatatcggctcacttaacctcctggttaggagtagaaataagggcgctctagacacccatgcttggtcactgagcgggaacaagggaaacgtgtggcaacaggcacatgtgcccatcagtccgagtggcccattccaaattattttcgaaggagtgaggggccctgggtatcttggagacatcgccatagatgatgtcacgctgaagaaaggtgaatgccccagaaaacagaccgatccgaataaggttgtggtgatgcctggctccggagctccatgccaaagctctccacaactgtggggacccatggccatttttctgctggcactgcagcgctag

SEQ ID NO: 229489 - DNA, 2922 bp, synthetic construct
  misc_feature 1..2922: note = Description of Artificial Sequence: Synthetic coding sequence
  source 1..2922: mol_type = other DNA
atggaggtgacttgtctgctcttgcttgcacttattccttttcattgccgaggccaaggtgtctatgccccagcccaggctcagatcgtacacgcaggccaagcctgtgtggtgaaggaagataacattagtgaacgtgtctacaccatcagggaaggggataccctgatgctacagtgtttggtgaccgggcacccgaggccacaggttcgctggacaaagacggctggctctgccagcgacaaatttcaagagacatccgtgtttaacgagacccttcgtatagagcgaattgccagaacacagggaggtaggtactactgtaaagccgagaatggtgttggcgtcccggcaatcaagtccattagggtcgatgtgcagtatctggacgagcccatgctgacagtccatcagactgtcagcgatgtccgagggaacttctaccaggaaaagaccgtgttcttacggtgtaccgtgaatagcaatcctcccgcacgattcatttggaagcggggttcagacacgctttcgcattctcaggacaacggggtagacatctacgagcctctctatacacaaggggaaaccaaggtcctaaaactgaaaaatttacggccacaagattatgcgagctacacttgtcaggtctcagtccggaatgtctgcggtatccccgataaggctatcacatttaggctcacaaacacaaccgctccccctgcactaaagctctcagttaatgagaccctggtggtgaaccccggtgagaacgtcaccgtccagtgtcttcttactggtggtgatccactgccacaactgcagtggtctcacgggcctggcccactgccccttggggctcttgcacaggggggaaccctatcaattccctcagtgcaagcgagagactctggctattataattgtacagcgacaaacaatgtcggaaaccctgccaagaagacagtgaacttgctggttaggagtatgaaaaatgctacgttccagatcaccccagacgtgattaaagagtctgagaacatacagcttgggcaagatctgaagttatcctgccacgtcgacgccgtacctcaggagaaggtaacataccagtggttcaagaacggcaaacccgctcggatgtctaagaggcttctggtgactagaaacgaccctgagctgccagctgttaccagttccctggagttaattgacttgcattttagtgactacggtacttacctgtgcatggctagttttcctggcgctcctgtccccgacctgtcagtagaggtgaatatatcctctgaaactgttccacctactatttcagtgcccaaagggcgagccgtggttacggtgcgggagggttctccagcagaacttcaatgtgaagtgagggggaaaccaaggcctcccgtcctttggtcaagagtggacaaggaggctgcattgctccctagtggcctgccactggaggaaacaccagatggtaaactgagactggaacgagtgtcccgcgatatgtccggaacataccgatgccagactgcaagatacaatgggtttaacgttaggcctcgcgaagcccaggtacaactcaacgtacaatttccacctgaggtcgagcccagttcccaagatgtgagacaagcgctggggagaccagttctgttgcgatgctcgctcctgagaggaagccctcagagaatcgcctccgcggtctggagatttaaggggcagctgctgcctccacctccagtggtcccagccgcagcggaggcccctgaccatgctgagcttcggctcgatgcggtcacccgggactcaagtgggagctatgaatgttcagtgtctaacgatgttgggtctgcagcctgcctctttcaggtgagtgccaaagcgtactcccctgaattctatttcgacacgccaaatcctaccaggtcccacaagctgagcaaaaattactcatacgttcttcagtggacgcaacgggaacctgatgcagtggatccagtgctaaactataggctgtctatcagacaactcaaccagcacaacgcagtcgtgaaagcgattccagtacggcgagtggagaaaggtcagttactggaatacattctaacagacctgagggtaccgcactcttacgaggtgagactgacaccctatacaaccttcggagccggagatatggcctctagaataatacattacacagaaccgattaatagccccaatcttagcgacaacacctgccatttcgaagacgagaagatttgcggatacacccaggacctgactgacaacttcgactggacccgccagaacgctctgacgcaaaacccgaaacggtcccccaacaccggccctcctaccgacatatccggtacccccgagggttattatatgttcatcgagacaagtcggccaagggagctcggagacagggcacgcctcgtgagtccactctataacgcatctgcaaaattctactgcgtttcgttcttttaccatatgtatgggaagcacataggcagcctgaatctgttggtcagatctcgtaataagggtgctttagatactcacgcctggtctctttccggcaataaaggcaatgtgtggcagcaggcacacgtccctatctcgccttccggcccattccagatcatcttcgaaggagtgagagggccaggctacctcggcgatatcgcaatcgatgacgtaactctaaagaagggcgagtgccccaggaaacagacagaccctaataagggagcaagaagggagggaggagggggagcagagtcagggggatcatgcgcctggagaggcttcctctccgtagaggggggttgccttggcttgaatcgaggaagtgaatgtctgagcgacggaaaccacgtggcacttaccgtttag

SEQ ID NO: 229490 - DNA, 2184 bp, synthetic construct
  misc_feature 1..2184: note = Description of Artificial Sequence: Synthetic coding sequence
  source 1..2184: mol_type = other DNA
atggtatcctttcgtctgtccaataaaaccgcttcccccagtattaagctgttggtggacgaccctatcgtggtgaatccaggcgaggcaattacccttgtatgcgtgacaactggcggagaacccgcaccctcactcacctgggtacggagcttcggtaccttgccagaaaaaacggtgctcaatggaggtaccttaacaatccctgccatcaccagtgacgatgctggaacatattcatgcatcgccaacaataatgtgggcaatcctgcaaagaaaagcacaaatatcatagtgagggcactgaaaaagggcagattctggatcacacccgacccataccacaaggacgacaacatacaaatcgggagagaggtgaaaatcagttgccaggtagaagccgtgcctagcgaggagcttaccttttcatggttcaagaacggaaggccattgcgctcttctgagcggatggtgatcacgcagactgaccccgacgtgagcccgggaactacgaatctggacattatcgaccttaagtttacagatttcggtacatacacatgcgtggctagtcttaagggcggaggcatcagtgatatctcgatcgacgtgaatatctcatcgtctacggtaccacctaatctgaccgtgcctcaggagaaatctcccctggtgaccagggaaggagatacgatagagttgcagtgccaggtaactgggaagcccaaaccaattattctctggtctagggccgacaaagaggtggccatgcccgatggcagtatgcagatggaatcttacgatggaacactccgcattgtgaacgtgagcagggaaatgagcgggatgtatcgctgtcagactagccagtataatggcttcaatgttaaacccagggaagccctggtgcagctgattgtccaatatccacctgccgtagagccagccttcctggaaattaggcaaggccaagaccgatccgtgacaatgagttgcagagtattacgcgcttaccctattagggttttgacatacgaatggcgccttgggaacaagttactgagaactggacagtttgactctcaggagtacaccgaatacgcagttaaaagtttgagcaacgaaaattatggcgtctacaattgtagtattatcaatgaggcaggtgccggacgatgttccttcctggtaacaggaaaggcctacgcccctgagttctattacgacacttataatcccgtctggcagaatcgccatagagtgtacagttattctctccagtggacccaaatgaaccccgatgctgtggacaggatcgtggcttatcggctcggcataagacaagctggccagcagcggtggtgggagcaggaaataaaaatcaacggcaatatccagaagggcgaattaataacttataatcttactgaactgatcaagcctgaggcatatgaggtacgcctcacacccctcactaaattcggagagggagacagcacaatccgggtgattaagtacagtgcccctgtgaaccctcacctgagagaatttcactgcggatttgaagacggcaacatctgcttgtttacgcaggacgacactgataattttgattggaccaaacagagtaccgctaccagaaacactaagtacacccccaatacagggccaaacgccgatagatcgggcagtaaggagggattttacatgtacattgagaccagcaggccccgattagagggggagaaggcccgattgctgtcccccgttttcagcattgctccgaaaaacccatacggcccaaccaatacagcatattgcttcagcttcttctatcatatgtacgggcagcacattggtgttctgaatgtctatttgcggttgaaaggacagaccacaattgagaaccccctctggtcctcttccggtaataagggccagcgctggaacgaagcacacgtgaacatttatcccataacaagtttccagctgattttcgaagggatcagaggaccaggtatcgagggcgatattgcaattgacgacgtgagcattgctgagggagagtgtgctaagcaggatctggcaacaaaaaatagtgtggatggcgcagtggggatcctggttcatatctggctgtttcctatcatagtgttaatctctatactttcgccccgacgctag

SEQ ID NO: 229491 - DNA, 477 bp, synthetic construct
  misc_feature 1..477: note = Description of Artificial Sequence: Synthetic coding sequence
  source 1..477: mol_type = other DNA
atgtacatcgagacatcccggcctcgactcgagggggaaaaagctcgccttctgtctccagtatttagcatcgcccctaagaatccttacggaccaactaacacagcctattgcttttcgtttttttaccatatgtatggccagcatatcggggtcttaaacgtgtacctgcggctcaaaggccaaactactatagaaaatcccctctggtctagctcgggcaataagggtcagaggtggaatgaagcacatgttaatatctatcctattaccagcttccagctgattttcgagggcatccgcggaccagggatcgagggcgacatagctatcgacgacgtctccatcgctgagggagaatgtgccaagcaggatcttgctactaaaaactccgtcgacggggctgtggggatcttggtgcatatatggctttttcctatcatcgttctcatatctattcttagcccacggagatag

SEQ ID NO: 229492 - DNA, 3078 bp, synthetic construct
  misc_feature 1..3078: note = Description of Artificial Sequence: Synthetic coding sequence
  source 1..3078: mol_type = other DNA
atgtctgtttggagcgctgggctccttcggagtgctcgaagaagaaggcgtggccgaactgatggcaggcgatttcttctgcgacgcgctgtgccaggacacctgggtctagcgagggccagagttgagagagcatggttggctgcaggactgctgaaagttcctctgaggacaccctgggcaggctacgtgcatgtccacgttaagatggacttgttatatgggttggtgtggcttctcactgtcctcctggaggggatcagcgggcagggggtgtacgcaccacctaccgtcaggatcgttcatagtggccttgcttgtaacatcgaggaggaacggtatagcgagcgagtctataccatccgcgagggggaaaccttggagctgacatgccttgtgactgggcaccctagacctcagatacgttggacaaagactgccggatccgccagcgaccgatttcaggactcgtcagtcttcaacgagacactcagaatcaccaatatccagcggcaccagggaggcaggtattactgcaaggcggaaaacggactcgggtcccctgcgattaaaagcattagggttgacgtatattacctcgatgacccagtggtaacagtgcaccagtcgatcggcgaggcaaaggagcagttttattatgagcggacagtcttcctgagatgtgtggcaaactctaatccgcctgtgagatatagttggaggagaggccaggaggttctcttgcaggggagtgacaaaggagtggaaatttacgagccgttctttacccagggcgaaacaaaaattctgaagctgaaaaacttgagacctcaagattatgctaattattcttgtatcgcatctgtgaggaacgtgtgcaatatcccagataagatggtgtcatttcggctttcaaacaaaacagcaagcccctcaatcaagttgctggtagacgatccaattgtcgtgaaccctggtgaggctattacattagtttgcgtgaccaccgggggtgaacctgccccttcactgacgtgggtgcgaagctttggcacacttcccgaaaaaactgtcctaaatggcggtaccctcacaatccctgccataacttcagacgacgccggaacctactcttgcattgccaacaacaacgttgggaaccctgccaagaaatcaaccaacataattgtaagagccctcaagaaaggcaggttctggatcacccctgacccttatcacaaggacgacaacatacaaatcggtagagaggtgaagatatcatgccaggtagaagccgtgccttccgaggagctgacctttagctggttcaagaacggaagacccctccgatctagcgaacgtatggtaatcacccagacagatcctgacgtgtcgcctggcacaaccaaccttgacattatcgacctgaaatttacagactttgggacgtatacatgtgttgcctctctgaaaggcggaggaatctctgatatcagtatagatgtgaatattagctcctcaactgtgccacccaacctgaccgtcccacaggagaagagcccacttgtgacacgggagggcgacacaattgagctgcagtgccaagtgactgggaagccaaagcccatcattttatggtctcgtgccgacaaagaggtcgccatgccagatggctctatgcaaatggaaagttacgatggtacactgcggatagtcaatgtttcacgggagatgtccggaatgtacaggtgccagacaagtcaatacaacgggtttaatgtcaaaccaagagaggccctggtacagctgatagtacagtatcccccagctgtcgagcccgcttttctggaaattagacagggtcaggacagaagcgtgactatgtcatgccgggtgctgagagcatatcccatccgggtgttgacttatgagtggagactgggtaacaagctgctccgcacaggtcaattcgacagtcaggaatacacggaatacgccgtgaagtcgctttctaacgagaattacggcgtctataactgcagtataatcaatgaagcaggagctggcaggtgttctttcctcgtgactggaaaagcctacgctcccgagttctactacgacacttacaatcctgtctggcagaacagacaccgagtatactcatatagtctccaatggacccaaatgaatcccgatgcagttgatcgcatcgttgcataccgcctggggatccgacaggcaggtcaacagcgctggtgggaacaggaaatcaaaattaacggaaatattcagaaaggagagttgatcacctataacttgacagagctgattaagccagaagcatatgaggttaggctgacaccattaaccaagtttggggagggagacagcacgataagggtgatcaagtatagcgccccagtgaacccgcatctgcgtgaatttcattgcgggttcgaggacggaaacatctgcctgttcactcaggacgacacagataattttgattggacaaaacagtccacagccacccgtaacaccaaatatactccaaatacagggccaaacgcggatcggtcaggttcaaaggaaggattttacatgtacattgagacttcgaggccccgactggaaggggaaaaagcccgtttactgtcaccagtgttcagtatcgctccgaagaacccctatggaccgaccaacaccgcgtactgcttctccttcttttaccatatgtatggccagcacatcggtgtgctcaacgtgtatctgcggctgaagggacagaccaccatagagaacccactgtggagctcctctggtaataagggccagcgctggaacgaggctcatgttaatatctaccctatcacctccttccaactgatattcgagggtataaggggcccagggattgaaggcgacatcgctatcgacgacgtgtcaatcgccgagggtgaatgcgccaagcaggaccttgctacaaagaactctgtcgatggcgctgtcgggatcctggtccacatttggcttttcccaatcatcgtactgatttcaattctgtcccctagacggtag

SEQ ID NO: 229493 - DNA, 2184 bp, synthetic construct
  misc_feature 1..2184: note = Description of Artificial Sequence: Synthetic coding sequence
  source 1..2184: mol_type = other DNA
atggtgagctttcgcctgagcaacaagactgcctctccttctatcaagcttttggttgatgaccccatcgtcgtgaacccaggagaagccattactctggtttgcgtaacaaccggaggggaacctgcgccatccctgacttgggtgcggtcatttggaacgttgccagaaaaaactgtgctgaatggaggaaccctgactatccccgctattaccagtgatgacgccggaacctatagttgtattgccaacaacaatgtcggcaatcccgcaaaaaaaagtaccaatatcattgtgcgagccctcaagaagggacgtttttggatcaccccagacccatatcacaaagacgacaatatacagatcggccgtgaagtcaagatctcatgccaagtggaagcagtcccatcagaggagctgacattcagctggtttaagaacggtcggcctctgcgtagtagcgaacgtatggtcattactcagaccgatcctgatgtcagtccaggcactaccaatctcgatataatcgacctcaagtttacagacttcggcacctatacatgtgttgcatcactaaaagggggtggcatttctgatataagtattgatgttaacatctcctcaagcaccgtgcccccaaacttgaccgtaccacaggaaaagagcccattggtgacaagggagggcgataccatagagctgcagtgccaggtgacagggaagcctaagcctatcatcctctggtcacgggcagacaaagaggttgcaatgccggatggaagcatgcagatggagtcatacgacggaactttgcgcattgtcaacgtttcacgagagatgtctggaatgtatcgatgccagacctcgcagtacaacggatttaacgtcaagcctcgcgaagctctcgtgcaactgattgtgcagtatcctcctgccgtggagcccgcatttctggagattcgccagggccaagatcgatctgtcactatgtcctgtcgggtacttagggcctacccgattagggttttgacttacgaatggaggctcgggaataagttacttcgaactgggcagtttgactcccaagagtacactgagtacgctgttaaatcattatccaacgagaactatggggtgtacaactgctcaataatcaatgaggcaggcgctggaagatgtagcttcctggtgactgggaaagcatatgcccctgagttttattacgacacttacaatccagtgtggcagaacaggcaccgagtgtactcctactcccttcagtggactcagatgaaccctgacgctgtggaccggatcgtggcctaccgccttggaatcaggcaagccggacagcagcggtggtgggagcaggaaatcaagatcaatggcaacatccagaagggggaactgattacctataatcttaccgagttgatcaaacccgaggcgtatgaggttaggctaacacctctcacaaaatttggcgaaggagattctacaatcagagtgatcaaatattccgctccagtgaacccccacttgcgagagttccactgcggcttcgaggatggaaatatttgtctgtttactcaagatgacacagacaattttgattggaccaaacaatcaaccgccacaaggaacactaagtataccccaaatactgggcctaacgctgacagatcaggaagcaaagaagggttttacatgtatatagagacttcaaggccccgtttagaaggggagaaagctcgcctcctgagtccagtgttttccatcgcaccaaagaacccatacggaccaaccaatactgcttactgtttttcatttttctatcacatgtacggccagcacatcggagtcctcaatgtctatctgagactgaaaggtcagacaaccatagaaaatccactgtggtctagctccggaaataagggtcaacggtggaatgaggctcatgtaaacatatacccaattacaagctttcagctgatttttgagggtatccggggtcccggaatcgaaggtgacatcgccatcgacgacgtgtccatcgcagagggcgaatgtgcaaagcaggatctggcaactaaaaatagtgtggatggtgcggtcggcatcttggtgcacatttggctctttcctatcatcgtgctgatctccatcctgtccccacgtaggtag

SEQ ID NO: 229494 - DNA, 2871 bp, synthetic construct
  misc_feature 1..2871: note = Description of Artificial Sequence: Synthetic coding sequence
  source 1..2871: mol_type = other DNA
atggacctgctttacggcctcgtctggttattgactgtcctgctcgagggaattagcggacaaggcgtctatgccccacctacagtcagaatcgttcacagtggactagcatgtaacattgaagaagagcggtattccgaaagagtgtacaccatccgcgagggggagaccctggaactcacttgtctcgtcaccggccacccacggccacagatacgatggaccaaaacagctggaagcgcaagcgacagattccaagattcctctgtctttaatgagacactccgcataactaacattcagcggcaccagggaggcagatattattgtaaagccgagaatggattgggctcgccagccatcaagagcattcgagtagatgtctactacctcgatgacccagtcgtgaccgtgcatcagtcaatcggtgaggccaaagagcagttctattatgaacggaccgtattccttcgctgtgttgctaactcgaatcctccagtgaggtattcctggcgacgtggacaagaagtgctgctgcagggctccgataaaggcgtcgagatctacgaacctttctttacccaaggcgaaacaaaaatcctgaagctgaaaaaccttcgccctcaggattacgccaattactcctgtatcgccagcgtgcggaacgtttgtaacatccccgataaaatggtgtccttccgcctgagcaataaaaccgcttctcccagcataaagctgcttgtggatgaccctattgtggttaacccaggagaagctattactctcgtgtgtgtaacaacaggcggtgagcccgcaccaagcctgacgtgggttaggagcttcgggacgttacctgagaagaccgtgctgaatggcggaactcttacaattccagctataacgagtgatgacgctggcacatattcttgcatcgctaacaataatgtgggaaaccccgctaagaagtctacgaacataattgtccgggcactgaaaaagggccgtttctggatcactccagatccatatcacaaagatgataatatacaaattgggcgagaggtgaaaataagctgtcaggtcgaagccgttccatcggaagagttgacattctcctggttcaaaaatggtcgccctctgcgttcctcagagagaatggtgattacacagaccgatcctgacgtgtcgcctggaaccacaaacttagacatcatagatttgaagttcactgattttggtacatacacttgtgttgccagtctgaaaggtggcggaatatctgacatctcaatagatgttaatatctcatcatctacagtaccccctaacctaactgtgcctcaggagaagagccccctggttacaagggaaggggacacaattgaacttcagtgtcaagtaacaggcaagcccaaacccattattttgtggtctcgagctgacaaggaggtcgcaatgccagacggatcaatgcagatggaatcctatgatggcacgttacggatcgtgaatgtgagtagagaaatgtcaggaatgtaccgctgccagaccagccagtacaacggtttcaacgtcaaacctcgagaggcattggttcaactgatcgtacagtatcctccggctgtagaaccagcatttctagaaattcggcagggacaggatcgttccgtgacaatgagctgtcgggtgctgcgtgcatacccaatccgagtgctaacttacgaatggcgactgggcaacaaactactccgcaccggacagtttgatagtcaggaatacaccgagtatgccgttaagagcctgtcaaatgaaaattatggggtctacaactgttcgatcattaacgaagctggagctggcaggtgctcattccttgtcaccggaaaggcttacgcacccgaattttactacgatacctacaacccggtctggcagaacaggcaccgtgtgtattcatactccctacagtggactcagatgaatccagatgccgtggaccggatcgtcgcgtaccggttaggcattcgccaagctggtcagcagagatggtgggaacaagaaattaagataaatggtaacatccaaaaaggagagctgatcacctacaacctcaccgagcttataaaaccagaggcgtatgaagtcaggctgacacccctcactaaatttggcgagggcgacagcacaattcgggtcattaaatacagcgcaccagtgaacccacatctgagggaatttcactgcggtttcgaagacgggaacatctgcctgttcacgcaggacgatactgataactttgactggactaaacagtccacagcaactaggaataccaaatacactcctaacactggcccaaatgcagaccgctccgggagtaaggaaggtttctatatgtatatcgaaacctctagaccaaggcttgagggagaaaaggctcggctgctctcacctgtattctcgatagctcccaaaaatccctatggccctacaaacacagcttactgcttcagcttcttttatcatatgtacggtcagcacatcggcgttctcaacgtgtacctgagactcaaggggcagacaacaattgagaaccctctctggagttcttcaggaaataagggacagagatggaacgaggcccatgtcaatatctaccccatcaccagtttccagctcatctttgaggggattcgcggacctggcatcgaaggggacatcgctattgacgacgtctctatcgccgaaggcgaatgcgccaaacaagacttggcaaccaagaatagcgtggatggagccgtcgggatcctggtgcatatctggctgtttcctatcatcgtgttaatttctatcttgagtcctagacgctag

SEQ ID NO: 229495 - DNA, 1143 bp, synthetic construct
  misc_feature 1..1143: note = Description of Artificial Sequence: Synthetic coding sequence
  source 1..1143: mol_type = other DNA
atgagatggctattgctgtactatgccttatgtttcagcctgtctaaggcgtcagcccacacagtagagttgaacaacatgttcggccagattcaatctcctggctatcctgatagttacccgtcggatagcgaggtgacttggaatatcaccgtgcccgacggatttaggatcaaactctacttcatgcattttaacctggagtcatcttacctctgcgagtacgattatgtgaaagtggaaactgaggaccaggttctggctactttctgcgggagagagaccaccgacaccgaacagacaccaggccaggaggtggtgctcagcccaggttcctttatgagcatcacttttcgatcagactttagcaatgaagaacgctttacagggtttgacgcccactacatggccgtggatgtggacgagtgtaaggagcgcgaggacgaggagctgtcttgcgaccattattgtcacaattatataggaggctactactgttcctgccgatttggatatattctgcacaccgacaacagaacttgtcgcgtagagtgttctgacaacctgttcacccaaagaacaggcgtgattactagtccagattttcctaatccctatccaaagagctcagagtgcctctacacaatcgaattagaggaaggcttcatggtgaatctgcagtttgaagacattttcgatattgaagaccaccctgaagtgccgtgtccatacgactacattaagatcaaggtaggcccaaaggtattggggcctttttgcggtgaaaaggccccagaaccaatcagcacacagagtcactcggtgcttattttgtttcatagtgataattcaggtgagaaccgcggttggcgcctgtcctaccgggcagccggtaatgagtgtcccgagttgcagcctcccgtacacggaaagattgagcccagccaagctaagtatttcttcaaagaccaggtgctggtttcctgtgataccggctacaaagtgctcaaggacaacgtggagatggacacattccagattgagtgtctcaaggacggaacatggagcaacaagatccccacctgcaagaaaaatgaaatcgacctggaatcagagctgaagtcggagcaggtgacagaatag

SEQ ID NO: 229496 - DNA, 2187 bp, synthetic construct
  misc_feature 1..2187: note = Description of Artificial Sequence: Synthetic coding sequence
  source 1..2187: mol_type = other DNA
atgagatggctgcttctgtactacgccttatgttttagtctgagtaaggccagcgcacacacagtggaactaaacaacatgtttgggcagatccagtcacccggttatccagactcataccctagtgatagtgaggtaacctggaatatcaccgtcccagacggatttagaatcaagttatattttatgcacttcaatctggagagttcatacctgtgcgagtacgactatgtgaaagtggagacagaagaccaggtgcttgctacattctgtgggcgtgagacaactgatacagagcagacacctggacaggaagtggtgctgtcacctggcagctttatgtcaatcaccttcaggtctgatttttccaatgaagagagatttaccggcttcgatgcgcactatatggcagtggatgtcgatgaatgcaaagagcgtgaggatgaggaactgagctgtgatcattactgccacaactatatcggtggctattattgctcatgcaggtttggatacattctccacaccgacaacaggacttgcagggtggagtgttctgataatctgtttacccagcggactggagttatcacgtctcccgactttccaaacccctatcccaagagttctgaatgtctctatacaattgagcttgaggagggttttatggtgaacctgcagttcgaagatatttttgatatcgaggatcatcccgaggtgccatgtccttatgattacatcaaaattaaggttggccctaaggtattaggacctttctgcggagagaaagcgcctgagcccataagtactcagtcacacagcgtccttattctgtttcactccgacaattcaggcgagaacagggggtggcggctttcctatcgggctgccggaaatgagtgtcccgagctgcaacctcctgtgcacggtaagatagaaccttcccaggccaaatattttttcaaggaccaagtgctggtctcttgtgatacaggttataaggttctcaaggacaacgtagaaatggataccttccagatcgaatgcctcaaggatggcacctggtcgaataaaatacccacatgcaagatcgtcgattgtagggcaccgggtgagctggagcacggtctgataactttcagcacacggaataatctcaccacttacaaaagcgagattaaatattcgtgccaggaaccttactataaaatgcttaacaataatacaggtatctatacctgcagcgcccagggagtgtggatgaacaaagtgctgggacgcagcctgccaacttgcttaccagaatgcggccagccttctcgatctctaccctccctggtgaagcgtatcattggtggcaggaatgcggaacccggtcttttcccctggcaggctctgatcgtggttgaggatacaagtcgcgtgccgaacgacaaatggtttggtagtggcgcacttctctcagccagctggatcctcactgctgctcacgtcctgcgcagtcagaggcgcgacacaactgttatcccggttagcaaggaacatgtgactgtctacctgggactgcacgacgtgagagacaaatctggagctgtcaattcctccgctgcgagggtcgtcctgcatcccgacttcaatatccagaactacaatcatgacatagccttagtgcaacttcaggagcccgtgcctctgggtccgcatgtgatgccagtgtgcctgcccagactcgaacccgaagggccagcccctcacatgctgggactggtcgcaggttggggtatctctaacccaaatgtcactgtagatgaaattatttcaagcgggaccagaactcttagtgatgtccttcagtacgtgaaactcccagttgtgccacacgcggagtgtaaaacttcatatgaatcgcggtccggcaactatagcgtaactgaaaacatgttctgcgctgggtactacgaggggggtaaggacacctgtctgggagattcaggaggcgcttttgtgattttcgatgacctctcgcagcggtgggtggtccaagggcttgtatcctggggtggcccagaggaatgtgggtccaaacaagtgtatggcgtatacaccaaggtcagtaattacgtcgattgggtttgggagcagatgggactaccccagtctgtcgtggaacctcaagtggagagatag

SEQ ID NO: 229497 - DNA, 2100 bp, synthetic construct
  misc_feature 1..2100: note = Description of Artificial Sequence: Synthetic coding sequence
  source 1..2100: mol_type = other DNA
atgagatggctcctgctatattatgccctgtgctttagcttgtcaaaagcatccgcccatacggtcgagttgaataacatgttcggtcagatccagagccctggataccccgacagctatccaagtgatagtgaagttacatggaacatcaccgtgcccgatggctttcggatcaaactctacttcatgcacttcaaccttgagagttcatatctgtgcgaatacgactatgtaaaagttgaaactgaggatcaggtgttggccactttttgtggcagagaaacaactgacaccgagcagacaccgggtcaggaagtagtgttgtctccaggatcgtttatgagcattacattccgctctgatttctcaaacgaagaacgctttacaggttttgacgctcattacatggctgtggatgttgacgaatgtaaagaaagggaagatgaggagcttagctgtgatcattactgtcacaactacattgggggatactactgtagctgcagattcggttacatcttgcatacagacaatagaacatgtcgggtagaatgtagtgacaacctattcacacagcgaacgggagtaatcactagcccagattttccaaacccgtacccaaagagtagtgagtgcctgtacactatcgagctggaggagggtttcatggttaacctgcaatttgaggatatatttgacatagaagaccaccctgaggtcccttgcccgtatgattacatcaaaattaaggtcggacctaaagtcctggggcctttttgcggagagaaagctcctgaacccatctccactcaatcccacagcgttctgatcctgtttcacagcgataactccggggagaacagagggtggaggctctcttatagggctgcgggaaacgaatgtccagaacttcagccgcctgtgcatgggaaaatagagccttcacaggccaagtacttctttaaagatcaagtgttggtcagctgcgacactggatataaagtgttgaaggacaatgtggagatggatacattccagattgaatgcttaaaagacggtacatggagcaataagatacccacatgcaaaatcgtcgactgcagagcccctggcgaattagaacatgggctgatcaccttttctacccgtaataacctgacaacatataagagtgagatcaagtactcctgtcaggagccctattataagatgctgaataacaacaccggcatttacacttgctccgcccagggggtctggatgaacaaagtattagggagaagtctgcccacatgtctacctgtgtgtggactccctaaattctccaggaagctcatggcccgtattttcaacggaaggcctgcccagaagggcacaacaccctggatcgctatgctatcccatctgaatggccagcctttttgtggcggaagcttgctcgggtcctcatggattgtcacagccgctcactgtctacaccagtctctcgacccagaagatccaactctccgcgatagcgacctgctaagtccatccgacttcaagattatcctgggcaagcactggcgtctgaggagtgacgaaaatgaacagcacttgggagtcaagcacaccacactgcacccccagtacgacccgaacactttcgagaatgatgtcgcgctggtggaactgctcgagtcccccgtccttaacgccttcgtgatgcctatttgcctgcctgaggggccacagcaggagggcgctatggttatcgtgagcggatggggtaagcagtttctgcagaggttccccgaaactctcatggagatcgagatccccattgtagaccacagcacctgtcagaaggcgtatgcccctcttaagaagaaggttacacgcgatatgatctgcgccggtgagaaagagggcggtaaagatgcctgtgcgggtgactccggaggaccaatggtgacactgaaccgcgagaggggccaatggtacttggtcggcacagtcagctggggagacgactgcggtaaaaaagatcgatatggggtctactcgtacatacatcataataaggactggatccagagggttaccggtgtacgtaattag

SEQ ID NO: 229498 - DNA, 1848 bp, synthetic construct
  misc_feature 1..1848: note = Description of Artificial Sequence: Synthetic coding sequence
  source 1..1848: mol_type = other DNA
atgtcaattacgttccgatctgacttcagcaacgaggaaagattcaccgggttcgacgcccattatatggctgtggatgttgatgagtgcaaagagagagaggatgaagaattgtcttgcgatcactattgtcataactacatcgggggatactactgcagttgtcgttttggatatatccttcacacagataaccggacgtgccgggtggagtgtagcgataacctgtttacccagagaaccggcgtgataacatcccctgacttcccgaacccataccctaaaagttcagaatgtctttataccattgaactggaggagggattcatggtgaacttgcagttcgaggatatattcgacatcgaggaccatccagaggtcccgtgtccttatgactacattaaaattaaggttggcccaaaagtgctagggcctttttgcggggaaaaggcaccagaacccattagcactcagtcgcatagcgtcctgatcctctttcactcagacaatagcggcgaaaaccggggatggagattgagctacagggcagctggtaatgaatgccctgagttgcagcccccagtgcacggaaagattgagccttcccaggcgaagtacttcttcaaggaccaggtgctcgtgtcctgcgacaccgggtacaaggtgctcaaagacaacgtagaaatggatactttccagatcgagtgtctgaaagacgggacctggtcgaataagatccctacctgcaagatagttgactgtcgtgcccctggtgaattagaacacggcctgattaccttctcaactcgcaacaacctgaccacctataagtcggagatcaaatatagctgccaagagccctattataaaatgttaaataacaacactggtatatacacctgttccgcgcaaggcgtttggatgaataaggttttgggcaggtcccttcccacctgcctgccagaatgcggccagccctcccggtccttgcccagcctggttaagcgaatcatcggcggaagaaacgccgagcctggattgttcccatggcaagctttgattgtggtggaagacaccagtcgggtgcctaatgacaaatggttcgggtccggagccctgctgtcagcgagctggatcctgacagccgcacacgtccttagatctcaacgtagagacacgacagttatcccagtatccaaggagcacgttaccgtttacctaggtctccatgacgtgcgggacaaaagcggcgctgtcaatagctcagccgcaagggtcgtcctgcatccagactttaacattcagaattacaatcatgatatcgcactagtccagctgcaggaacccgtcccactggggccacacgtgatgcccgtgtgtctccctcgactggagccagaaggacctgcaccacacatgttgggccttgtggctggatggggaattagcaaccccaatgtgaccgtggacgagattatttcatccggcacgcggactttgagtgatgtattacagtatgtaaagctgccagtcgtcccacacgccgaatgcaaaacctcctacgaatcccgatctggtaactatagtgtcactgaaaatatgttttgcgctggctactacgaggggggaaaagacacatgcttgggagacagcgggggagcattcgtcatctttgacgacctgagccagcgatgggtcgttcaaggcctggtctcatggggcggtcccgaagagtgtggctcaaaacaggtgtatggggtgtatacaaaggtttcaaactacgtagattgggtttgggagcaaatgggactgccgcagagcgtggtcgaaccacaggtagaaaggtag

SEQ ID NO: 229499 - DNA, 249 bp, synthetic construct
  misc_feature 1..249: note = Description of Artificial Sequence: Synthetic coding sequence
  source 1..249: mol_type = other DNA
atgttctgcgccggatactacgaaggcggaaaggacacttgtctaggggatagtggaggcgcatttgtgatctttgacgatctctcccagcgatgggtggttcaggggctggtctcatgggggggtcccgaagaatgtgggagcaagcaggtgtatggagtctacaccaaagtgtctaactacgtggattgggtctgggaacagatggggctccctcagtccgtcgtagaacctcaggtagagaggtag

SEQ ID NO: 229500 - DNA, 1443 bp, synthetic construct
  misc_feature 1..1443: note = Description of Artificial Sequence: Synthetic coding sequence
  source 1..1443: mol_type = other DNA
atgtctatcacattccgaagtgacttcagtaacgaggagcgattcactggcttcgatgctcattacatggccgtcgacgtggacgagtgtaaggaaagggaggatgaggaattaagctgcgaccactactgccataactacatcggcggttattactgctcatgccggttcggttatatcttacacaccgacaatagaacctgccgagttgagtgttctgacaacctatttacacagcgcacaggcgtaattacaagccccgacttccccaatccatatcccaagtctagcgagtgtctatacaccatcgaacttgaagagggtttcatggttaacctgcaattcgaggacatctttgatatcgaggatcatccagaagtcccgtgtccctatgactatattaaaattaaggtgggaccaaaggtccttggaccattttgtggagagaaggcccctgagccaatcagcacacagtcccacagcgtgcttatcttatttcacagcgataacagtggcgaaaacagaggatggcggcttagttaccgggctgccggtaacgagtgcccggaactgcaacctcctgtgcacgggaaaatcgagccctctcaggcaaagtacttcttcaaagatcaagttcttgtgagctgcgataccggatacaaagtcctgaaggacaacgtggagatggacaccttccagattgagtgcctcaaggacggcacctggtccaataaaatcccaacgtgcaaaattgtcgactgtcgtgcgccaggtgaattggagcacggtctgatcactttctccaccaggaacaatctcactacatataagtccgaaatcaagtactcctgtcaggagccctattacaagatgctgaacaataacactggtatatatacatgttcagcccagggcgtgtggatgaacaaggttctgggaaggtccctgcctacatgcttgcccgagtgcggtcagccttctcgctctcttccttcccttgtgaagcgcataataggaggccgtaatgccgagccgggactgttcccttggcaggccctgatcgtcgtggaggacactagcagggtccccaatgacaagtggtttggcagtggcgctctgcttagcgcatcatggattctcacagcagctcacgtgctccgatcccagcgccgagacactacagtcattccagtttctaaagaacatgtgaccgtctatctgggtttacacgatgtcagagacaaatcaggagccgttaattccagtgctgcacgagtggtgttgcacccggactttaacatacaaaattacaatcatgacattgcactcgtgcagttgcaggagccggttccgctgggtcctcacgtgatgcccgtgtgcctccctaggctggaaccacctgggggtcggctcggccacctgcagtcccagtgcgacagttag

SEQ ID NO: 229501 - DNA, 2061 bp, synthetic construct
  misc_feature 1..2061: note = Description of Artificial Sequence: Synthetic coding sequence
  source 1..2061: mol_type = other DNA
atgcgcctgctgactctcctgggtcttctctgtggctccgtggccactccattaggtcccaagtggcctgagcctgtgtttggcagacttgcctcaccgggattccccggagaatacgccaacgaccaagaacgcaggtggacgcttacggctccccctgggtatcgtcttaggttatactttactcattttgatctggagctttcacatctgtgtgagtatgatttcgtcaagctgtcgtcaggtgctaaagtcttggctactctgtgtgggcaagagtccaccgataccgaaagggctcccggaaaggataccttttactctctgggttcatccctggacatcacattcaggagcgactatagtaacgagaaacctttcactggcttcgaggccttctatgcggcagaggacattgacgaatgtcaggttgctccaggcgaggcacccacatgcgaccatcactgtcataaccacctgggaggattctactgttcatgcagagccggatatgtgctgcatcggaacaaacgcacttgttctgccctatgcagcgggcaggtttttacacagcggagcggcgaactttccagccctgagtatcccagaccatacccaaaactgtcaagttgcacctatagcatctcactggaggagggcttctcggtcatcctggattttgttgagtcttttgacgttgagacacaccctgaaaccctgtgcccttatgattttctcaaaattcagaccgacagggaagagcacggcccattctgcggcaagactctgccccacagaatagagaccaagagcaacactgttaccattactttcgtgacagacgagtctggagaccacactgggtggaaaattcactatacgtccaccgcacagccttgcccataccctatggccccaccaaacggccatgtcagccccgtgcaagcaaagtatattttgaaggattcattttcaattttttgcgaaacgggatacgaactgttgcagggtcaccttcctctgaagtccttcaccgccgtttgtcagaaagacggatcctgggacaggcctatgccagcatgttcaattgtggattgtggccctccggacgatctgccgagtggcagggttgagtatatcaccgggcctggggtgactacatataaagcggttattcagtactcgtgcgaggagaccttctacacaatgaaggtcaacgatggtaaatatgtttgcgaggcggatggattctggacaagcagcaagggcgagaagtctttaccggtctgcgagccggtctgcggcttaagtgcccgaaccaccggcggacgcatttacgggggacaaaaagcgaagccaggtgattttccctggcaggtgctaatcttgggaggaactactgccgcaggcgctctgctgtacgacaactgggtgctgaccgccgcacacgctgtgtatgagcagaagcacgacgcttccgcccttgacatccggatgggtacattaaaaaggctgtcccctcactacacccaggcttggtcagaggccgtgtttatacatgagggttacacacatgacgctggattcgacaacgacattgcgctaataaagcttaacaataaagtcgtcattaatagtaatataactcccatctgtctgcctcgcaaggaagccgagtcttttatgcgcactgacgacattggcaccgcctctgggtggggtctgacccaacgtggctttctcgcacggaacttgatgtacgtcgatatccccatcgtggatcatcagaaatgcacagcagcctacgaaaaacccccttaccccaggggctcagtgaccgccaacatgttgtgtgccggactcgagagcggtggaaaagacagctgcagaggagattctgggggtgcacttgtgttcctggattcagagacagagcgttggtttgtgggaggcattgtgagctgggggtccatgaattgtggagaagccggacagtatggcgtatacactaaagtcatcaactacatcccctggatcgaaaatataatttcagatttttag

SEQ ID NO: 229502 - DNA, 558 bp, synthetic construct
  misc_feature 1..558: note = Description of Artificial Sequence: Synthetic coding sequence
  source 1..558: mol_type = other DNA
atgcggcttctcacactgctgggtcttctgtgtggtagtgtcgcgacgccactggggcctaaatggccagagcccgtattcggtcgcctggcgtctcctggttttcccggagagtatgccaatgaccaggaacggagatggactctgaccgctccacccggttatcgactcaggctgtacttcacccacttcgacctagagctcagccacctgtgtgaatacgactttgttaaacttagctctggcgcaaaagtactggctaccttgtgtgggcaggaatccacagacaccgagagggcacctggcaaggatacattttactcactgggcagcagtcttgacatcactttcaggtcagattactcgaacgagaaaccattcaccggtttcgaggctttctatgcagctgaggacatcgacgagtgccaggttgcacccggagaagcacctacttgcgatcatcattgccataatcatctcggcggtttctactgttcttgtagagcaggatacgtactgcatcgcaacaaacggacttgcagtgagcagtctttatag

SEQ ID NO: 229503 - DNA, 1089 bp, synthetic construct
  misc_feature 1..1089: note = Description of Artificial Sequence: Synthetic coding sequence
  source 1..1089: mol_type = other DNA
atggccgcaccaagggtgtttcccctgtcatgcgctgttcaacaatatgcctggggaaagatgggtagcaacagtgaggtggctcgtcttttagccagctccgatccactcgcccaaatcgccgaggataagccttatgctgagttgtggatggggacccacccacgcggagatgcgaagatcctggacaacaggattagtcaaaagactctgtcacaatggatcgcggaaaaccaagactcgctgggctctaaagtaaaggacacctttaacgggaacttgccgtttctctttaaagtacttagcgtggagacaccgttaagcattcaggcacacccaaataaagagctagctgaaaagctccatctacaagcccctcagcactacccggatgctaaccacaagcctgagatggcaattgccctgaccccctttcaaggactatgcggcttccggccagttgaggagatcgtaacttttttgaaaactgccgcaggcaacaacatggaggacatatttggggagctcttgctgcagttacatcagcagtaccctggtgacattggctgcttcgctatctatttcttgaacctcctaacactgaagcccggagaggccatgttcctggaggccaatgtgcctcatgcttatctgaaaggagactgcgtcgagtgcatggcatgcagcgacaacacagtgcgagccggattaaccccaaagttcatcgatgtgccgactttgtgtgaaatgctcagctacactccgagcagcagtaaggaccgtctctttctgcctactcgttcccaagaagacccatacctctctatttacgaccccccagtcccagacttcaccataatgaaaactgaggtgccagggtctgtgactgagtataaggtgttagccctcgactctgcctcaattctgctgatggtacaggggactgtcatagcatccaccccaacgactcaaactcccattcccctgcagcggggtggggttttgtttatcggagctaatgagtccgtgagtctgaaactgactgagcctaaggatctattaatcttccgggcatgttgcctgctgtag

SEQ ID NO: 229504 - DNA, 1272 bp, synthetic construct
  misc_feature 1..1272: note = Description of Artificial Sequence: Synthetic coding sequence
  source 1..1272: mol_type = other DNA
atggccgcaccaagggtatttcctttgtcatgcgccgttcaacaatacgcttggggaaagatgggttcaaactcagaagtggcaagactgttggcctcttcagatccactggcccagatcgccgaggataaaccctatgcagaattgtggatgggcacacacccacgcggtgatgccaagatcctcgacaataggatctctcagaagactctcagtcagtggattgccgaaaatcaggattcgctggggagcaaagtgaaggatactttcaatgggaatctgccttttctgttcaaggtgttgtcggtggaaacccccctctccatccaggcccaccccaacaaggagctcgcagaaaagctgcacctgcaagcccctcagcactacccagacgccaaccataaacctgagatggcaattgcgctcacaccctttcagggtttgtgcgggtttaggccagtcgaggaaatcgtcacattcctgaagaaggtacctgaatttcaattcctgattggggacgaagctgcgacacacctgaaacagactatgagtcacgactcccaggctgtcgctagcagcttgcaaagctgcttctcccacctaatgaagagtgagaaaaaggtggttgtggagcagctcaatttgctagtaaaacgcatatcccagcaagctgcggcaggaaacaatatggaagacatatttggagaactgttattgcagctacaccagcagtaccctggggatataggctgcttcgccatctacttccttaacctcctgacactcaagcctggggaggcaatgtttctggaggcgaacgtcccccatgcctatctcaagggcgactgcgtggagtgtatggcctgcagcgacaataccgtacgcgcagggctgacaccaaaattcatcgatgtccctacactctgtgagatgttaagttacactccttctagcagtaaggacagactcttcctccccaccagatcccaggaagatccatacctcagtatttatgatcctccagtccccgacttcactatcatgaaaaccgaagtccctgggagcgtcaccgagtacaaggttctggcactcgacagcgcttctattctcctgatggtccaaggtacagttatagctagtaccccaaccacccagacccccatcccattacagcgcggtggtgtgctttttattggcgctaatgaaagtgtctctctcaagctaactgagccaaaagaccttctaattttcagggcatgttgcctcctgtag

SEQ ID NO: 229505 - DNA, 804 bp, synthetic construct
  misc_feature 1..804: note = Description of Artificial Sequence: Synthetic coding sequence
  source 1..804: mol_type = other DNA
atggggtctaactcagaagttgctcgccttctcgccagttccgaccctctggcccagatcgctgaggacaaaccatacgctgaactctggatgggtacccaccccagaggtgacgctaaaatcctggataatcgaatcagccaaaaaacactgtctcagtggattgcggagaatcaggattccctaggttcgaaggtgaaagacaccttcaatggcaaccttccgttcctgtttaaggtgctgtcggtggaaacgcctctaagcatacaagctcaccccaataaggagttggccgaaaagctgcatctccaggctcctcagcactaccctgacgccaaccacaagccagagatggctatcgccttgactccgttccaagggctctgcgggtttaggcccgtggaagagatcgtgacttttctcaagaaggtgccggagtttcagtttctgattggcgacgaggctgcaacacaccttaaacagacaatgagccacgactctcaggccgtggccagttcgcttcagtcttgcttctctcacctaatgaagagcgagaagaaagttgtggttgagcaactcaatctgctggtgaagcggattagtcaacaggccgcagccggaaataacatggaggacatttttggtgaactcttgttgcagcttcatcaacaatacccaggagatataggatgctttgcaatttattttttaaatctgctcactctgaagccgggagaggcaatgttcctcgaagcaaatgtgccacatgcctacctcaagggcggtccctggctttgccactag

SEQ ID NO: 229506 - DNA, 1122 bp, synthetic construct
  misc_feature 1..1122: note = Description of Artificial Sequence: Synthetic coding sequence
  source 1..1122: mol_type = other DNA
atgggcacacatccacgcggtgatgccaagatcctggataaccgtattagccagaagactctgtcacagtggattgcagaaaaccaagattccttgggcagcaaggtcaaagacacatttaatggtaaccttccctttttattcaaggtcctgagtgtggagacccccttgagcatacaggcccacccgaacaaggagttggctgagaagcttcacctgcaagctccccaacattatcctgatgccaaccacaagcctgaaatggccatcgccctgactccttttcaagggttgtgtggatttcggccagttgaggagatcgtaacattcctcaagaaagtgccggaatttcagtttcttatcggcgatgaggcagccacgcaccttaaacaaaccatgtctcatgacagccaggccgttgcctcatccctgcagtcttgcttcagccacttaatgaagtcagagaaaaaggtggtcgtcgaacagcttaaccttctggttaaaaggatctctcagcaagccgctgcaggcaacaatatggaagatattttcggcgagctgctgcttcaacttcatcaacaataccctggagacatcggttgttttgccatctatttcctcaacctcctcactttgaaacccggagaggccatgttcctcgaagcaaatgttcctcacgcctatcttaaaggagactgtgtggaatgcatggcctgttctgacaatactgttagggccggtttgacccctaaatttatagacgtccccacactctgtgagatgttgtcttacactccaagcagctcgaaggatcgcttgtttctcccaacaaggtctcaggaagatccgtatctgtcgatttacgacccacctgtgcccgattttaccattatgaagacagaggtcccaggttctgtcaccgagtataaggttctggccctcgatagcgcgagcatcttgctcatggttcaggggacagtgatcgcctctacccccacaacgcagaccccaattccattgcagcggggtggtgttctgttcatcggggctaatgagtccgtgagcctcaaactgaccgagcccaaggatctcttaatcttcagggcatgttgtctgctatag

SEQ ID NO: 229507 - DNA, 4371 bp, synthetic construct
  misc_feature 1..4371: note = Description of Artificial Sequence: Synthetic coding sequence
  source 1..4371: mol_type = other DNA
atgcgtctgcctctgctgctggtttttgctagcgttatcccaggcgctgttcttctgttagacacccggcagtttctaatttacaacgaagaccataaaagatgtgtggacgccgtgagtccctccgccgtacaaacagccgcatgtaaccaggacgccgaatcacaaaaattcaggtgggtttcggagtcacagattatgtccgtggccttcaagctgtgccttggcgtgccatcaaaaactgactgggtggcaattacactgtatgcctgcgattccaagtcagagttccaaaaatgggaatgtaaaaatgacactctgctgggcattaaaggagaggatctctttttcaactatggcaacagacaagagaaaaacatcatgttgtataagggctcaggcctgtggtcccgttggaagatctacgggactaccgataacttatgcagtcggggatacgaagcaatgtacactctgctgggtaacgcaaacggagccacctgcgcatttccttttaagttcgaaaacaagtggtatgcggactgtacatcggcaggaaggtctgacggctggctgtggtgcggtaccactacagattacgatactgataagctgttcggatattgccctctcaaatttgaaggctcggagtcactgtggaataaagaccccttaactagcgtgtcttatcagatcaatagcaagtctgctctgacctggcaccaggcccgaaaatcttgtcaacaacagaacgctgagttactctccataaccgagattcatgaacagacctacttaacgggcctgactagtagtctgaccagcggcctctggattggcctgaactctctgagttttaactctggctggcaatggtctgatcggtcccccttccgttatctcaactggttgccaggcagcccgtctgccgagccagggaagtcttgtgtgtctttgaaccctggcaaaaacgccaaatgggagaaccttgagtgcgtccagaagctgggctacatttgtaagaaaggcaatacgaccctcaattccttcgtgattccctctgaatctgatgtcccaactcattgccctagccagtggtggccgtacgccggacactgctataaaattcacagggatgagaaaaaaatccaacgtgacgcactgacaacatgtagaaaagaaggaggcgatctgacatcaatacatactatcgaggaactggattttattatctcacagcttggctacgagcctaatgatgaactgtggatcggacttaatgacattaagatccagatgtatttcgaatggagcgatggcacaccagtaacctttacaaaatggctgcgcggtgaacccagccatgagaataatcgccaagaggactgcgtggtgatgaaaggaaaggatggatactgggccgatcggggttgcgagtggccattgggctacatttgcaagatgaagagccgaagtcaaggacctgagattgtggaggtagaaaaggggtgcagaaaaggatggaagaaacaccatttttattgttacatgattggccacaccctaagtacattcgctgaggctaaccaaacctgcaacaatgagaacgcctacctgacgactatcgaggacagatacgaacaggccttcttgacttcgtttgtgggactgaggccagagaagtatttttggacgggactgagcgatattcagactaaaggcaccttccagtggaccatcgaagaggaggtcaggtttacccactggaacagcgacatgcccggacgaaagcctggctgcgtcgccatgcgtaccggcatcgctggagggctctgggacgttcttaagtgtgatgaaaaggccaaatttgtgtgtaagcattgggctgaaggagttacccacccgccaaaacccacgaccacacccgagccaaagtgccccgaggattggggcgcatcatcccgtacgagcctgtgtttcaagctgtatgccaaaggcaagcacgaaaagaaaacctggtttgagtccagagacttttgtcgggctctgggcggagatctggcctctatcaataacaaagaagagcagcagactatctggaggctgattacggcgtcaggatcataccacaagctgttctggctgggattgacatacggttccccctctgagggattcacgtggtccgacggctcccccgtttcctatgaaaactgggcatacggagaacccaataattatcagaatgtcgagtattgtggggagctcaaaggagacccaaccatgagctggaatgacattaattgtgaacatctgaacaattggatatgtcagatccagaaaggccagacaccgaaacccgagcctacccctgccccacaagataatccccctgtgacagaggacggctgggtgatctataaggattaccaatactacttctccaaagaaaaggaaacaatggacaacgccagagccttctgcaagcggaactttggggacctggtgagcatccagagcgagagcgaaaagaagtttctttggaaatacgtcaataggaacgacgcacagagcgcttacttcatcggcctcctcatcagtttggacaagaagttcgcctggatggacggttccaaggtcgactatgttagctgggcgacgggggaaccaaattttgccaacgaggacgagaattgtgttactatgtacagtaactcagggttctggaacgatatcaattgtggttatccaaacgcattcatatgccagcgtcataatagttcaattaatgcaaccacggttatgcctacaatgccatctgtgccgagcggatgtaaagaagggtggaatttttattccaacaaatgttttaagatttttggattcatggaggaggagcgcaagaactggcaggaggcccgtaaagcttgcatcggatttgggggaaatcttgtgagcatccagaatgagaaagagcaggcgttcctgacgtaccacatgaaggattctacattcagcgcatggacaggattaaatgacgtcaacagtgaacacactttcctgtggacagatggaagaggtgtgcactataccaactggggtaaaggttaccctggtggaaggagatcaagtctgtcttacgaggacgcggattgcgtggtcattattgggggtgcaagcaatgaagccggtaaatggatggatgatacttgtgacagtaaacgtgggtacatatgccaaactcggtcagacccatcgctgaccaaccctccagctaccattcagaccgacggtttcgtcaagtacggcaaatccagttattccctgatgcgccaaaaattccagtggcatgaggccgagacatactgcaagttgcataattctctgattgcctctattttggatccttacagtaacgcctttgcctggctccaaatggaaaccagcaatgaacgggtttggattgctctgaattcaaaccttaccgataatcagtacacctggacagacaaatggcgtgttaggtacaccaactgggcggctgatgagcccaagttgaaatctgcctgtgtttatctggacctagatggatactggaagactgcgcattgtaacgagtcattttacttcttatgcaaacgctcagatgaaatccccgcaactgaaccgccacagctcccgggaaggtgcccggagagcgaccacaccgcctggattccctttcacggacactgttactatatcgagagctcttatactcgaaactggggccaagcctctttagagtgcttgcggatgggctcttcactcgtgtccatagagagtgctgccgagtcttccttcctatcttatcgcgtggaacccctgaagtccaagacgaatttttggatcgggctgttccgcaacgtggaggggacctggctgtggatcaacaattctcctgtgagcttcgtgaactggaatacaggggatccatcgggggagcgaaatgattgcgtggcgctgcatgcatccagtgggttctggagcaacatccactgctctagctacaagggttatatctgcaaaagacctaagatcatagacgctaagcccacccacgaacttctgacaacaaaagccgacaccaggaagatggatccatccaagcccagctcaaatgtagctggggtggttatcatcgtaatcttgttgatcttaacgggcgctgggttagcagcctacttcttctacaagaaaagacgggtccacctgccacaggaaggcgcattcgaaaacacactgtattttaactctcagtcttcccctggaacctccgatatgaaagacttggttggtaacatcgagcagaatgaacacagtgtgatctag

SEQ ID NO: 229508 - DNA, 4440 bp, synthetic construct
  misc_feature 1..4440: note = Description of Artificial Sequence: Synthetic coding sequence
  source 1..4440: mol_type = other DNA
atgggtccaggtcggcctgctcctgcgccatggccacgccacctgctcagatgcgtcttgctcctgggctgcctgcatctgggtagaccaggcgcacccggagacgcagcattgcctgaacctaacgtttttctaattttttctcacggattgcaggggtgcctcgaagctcaaggcggacaagtgagggtaaccccagcctgcaacactagtttgcctgctcagcggtggaaatgggtctcaaggaatagattatttaacctgggcaccatgcagtgtctaggtaccggctggcccggaaccaatactaccgcgtccctcggcatgtacgaatgtgacagagaagcgctgaacttgaggtggcactgccggactcttggggaccagctgtcattactgctgggggctaggacttctaatatctccaagcctggtacattagagcgaggcgatcagacaaggagcggacagtggagaatttatgggagcgaagaagatctctgcgcactcccttaccatgaggtgtacaccattcagggcaactctcacggaaagccgtgcacaatcccctttaagtatgataatcaatggttccacggctgcacgagtaccgggagggaagatgggcacctctggtgcgcaaccacccaggactatggcaaggacgagaggtggggattctgtcctataaagagtaacgactgtgagaccttttgggacaaagaccaacttaccgatagctgctaccagttcaactttcagtctaccctcagttggagggaagcatgggccagttgtgaacagcagggagctgaccttctgagtatcaccgaaatacacgaacagacctacataaatggcttgttaactggctactccagtacgctgtggataggattaaacgacctggatacatccggtggctggcagtggtcggacaattctcctttgaaatacctgaattgggaatcggatcagcccgataatccatcagaggaaaactgtggcgtgattcgcactgagtcttctgggggatggcagaatagggattgttccattgctttgccctacgtttgcaagaagaagccaaacgcgacagccgagcctacgccacccgaccgatgggcaaatgtcaaggtggagtgcgaaccatcttggcagccttttcagggccactgctaccggctccaggcagagaagaggagctggcaagagagcaagaaagcctgtttgaggggtggcggagacctcgtttcgatccacagcatggcagagctggagttcattacaaaacaaattaagcaggaggtggaggagctttggatcggcctgaacgacctcaagctccaaatgaacttcgagtggtcagatggttctctcgtatcctttacacactggcatcctttcgaacctaataacttcagagattcgcttgaggactgtgtaacaatctggggacccgaagggcgatggaacgattccccctgtaaccagtcgctccccagcatctgcaagaaagcgggacaactgtctcagggagcagctgaagaagaccatgggtgccggaagggctggacgtggcacagccccagttgctattggctgggggaagatcaggtgacatattccgaagctcgcagactctgtaccgaccacggatcgcagctggtgaccattaccaatcgatttgagcaagcattcgtaagctcactgatctataattgggagggcgagtatttctggactgccctgcaggacttaaatagcaccggctcattcttctggctttctggtgatgaggttatgtacactcactggaacagggatcagccagggtattcacggggaggctgcgtagccctcgctacaggatccgcgatggggctttgggaggtaaaaaactgtacttcattccgcgctcggtacatctgtaggcagtctctcgggacccctgtgacccccgagcttcctggacctgaccctactccatcgcttaccggaagctgccctcagggctgggccagtgatacgaagctacgttactgttacaaggttttctctagtgaacgtctccaggacaaaaagtcttgggtgcaggcacaaggtgcttgtcaagaattgggagcgcaactgctgtctctcgcttcgtacgaggaggagcactttgtggctaatatgctgaataaaatcttcggagaatccgagcctgaaatccatgaacaacattggttctggattggcttgaatagacgagaccctcgcggaggccaaagttggcgctggtcggacggcgtgggcttctcctatcataacttcgatagatcacgacatgacgacgatgatatccgcggatgcgccgtgttggacttagccagcctccagtgggtggccatgcagtgcgatacgcagctggactggatctgcaagatcccaaggggaactgatgtacgagagcctgatgattcacctcagggtaggagggaatggttacgttttcaggaggccgagtacaagttctttgaacaccacagtacctgggctcaggcccagcgcatctgcacttggtttcaggcggaattgactagcgtgcattcccaagctgagttggattttctctctcacaacctacagaaattctcccgggctcaggaacagcattggtggattggtcttcacaccagcgagagcgacgggcgttttagatggaccgacggctcaataataaattttattagctgggctcccggaaagccacgtccggttgggaaagataaaaaatgtgtgtacatgacagcatccagagaagactggggagatcagaggtgcctgaccgccctgccatacatctgcaagcgttctaatgttacaaaagagacgcaaccaccggatcttcctaccacagccttgggcggatgcccatctgactggatccagttcctcaataagtgttttcaagtgcaaggccaagaaccccagtctcgagtgaagtggtccgaggcacagtttagttgcgagcagcaggaggcgcagcttgtcacgattactaatccacttgagcaagccttcattacggcctcactgcccaatgttacatttgacctgtggattggtctccatgcaagccaacgggatttccagtgggtcgaacaagagcctctgatgtacgcaaattgggcaccgggagagccctcagggcctagtcctgcaccgagcggcaacaaaccaacgagctgcgccgtcgttttgcactccccttccgcacattttacgggccgttgggacgacaggtcctgcactgaagaaacccacggcttcatttgccagaaagggacagatccctctcttagcccatcaccagccgcactgccaccagcccctggaactgagttatcatacctgaatggtacattccgcttactccaaaaacccctaaggtggcacgatgctctgttgctttgcgagagtaggaacgcgtcgcttgcatacgttcctgacccatacacacaagcttttctcacccaagctgcacggggacttcgaacccctctgtggatcgggctggccggtgaagagggatcacggaggtacagctgggtgagcgaagaacctcttaattatgtcggctggcaagatggagagcctcagcagccagggggatgtacctacgtggacgtagatggagcctggcgaactacctcctgcgataccaagctgcagggggctgtgtgtggagtatccagtggtcctccacctccaagacgtatttcctatcatggaagttgtccgcaggggcttgctgactcagcctggatcccttttagggagcactgttactcattccatatggagctgttgcttgggcacaaggaagcacgccagcggtgtcaacgggcaggaggtgccgttctgtccatacttgacgaaatggaaaacgtgtttgtgtgggagcatttacagtcctacgagggccaaagcagaggagcgtggcttggaatgaactttaatccaaaaggtggtactctggtgtggcaggacaatacagcagtaaattactctaactggggcccacccggtctcgggccaagcatgctgagtcacaactcatgttactggattcaaagcaactctggtctgtggagacctggagcctgcactaacattacaatgggtgtggtgtgtaagctcccacgagctgagcaaagttccttctcccctagcgcactgcctgagaatccagccgctttggtagtggtactcatggccgtgctattgttgcttgctttgcttacagctgccctgatactctaccgacggcgtcagtccattgaacgcggtgctttcgagggggctagatacagtcgtagcagttcctctcctaccgaggcaacggaaaagaacatactggtgagcgacatggagatgaatgagcagcaggagtag

SEQ ID NO: 229509 - DNA, 1038 bp, synthetic construct
  misc_feature 1..1038: note = Description of Artificial Sequence: Synthetic coding sequence
  source 1..1038: mol_type = other DNA
atgcccacaggccacctggggtctcccctggctctggcccttctccctgtggctacaaaccggccagcggtccagtggagctgcacagccccacagcctaccagcttagccgcagggacaatcggcgcagcaagaagacggcctatggccagcagtgccaggcgggctcgcggtagccgtagatactcatgggtttctgaagagccgctaaactacgtcggatggcaagacggagagcctcaacaacccggaggttgcacctacgttgacgtcgacggtgcatggcggaccacatcgtgtgataccaagctgcaaggggcagtgtgcggggtgagctccggccctcctccccctagaaggatcagctatcatggcagctgtccccaaggtcttgcagactcggcttggattcctttcagagagcactgctatagctttcacatggagctacttttgggccataaggaggccaggcagagatgtcagagagctggaggtgccgtcctgagtattttggacgagatggagaatgtattcgtttgggagcatctgcagagctacgaggggcaaagccgtggggcttggctgggaatgaatttcaatcctaagggcggtaccttagtgtggcaagataatacggcagtgaattattctaattgggggccacccggtttgggtccctctatgctgagccacaattcttgttattggatccagagcaattctggtctgtggaggccaggggcatgtaccaacatcaccatgggcgtggtgtgcaaattaccaagggcagaacagtcctccttcagccctagcgcattgccagagaaccctgccgctcttgtggttgtgctgatggctgttcttctgttgctcgcacttctgacagccgctctaatcttatacagacgcaggcagagtattgagaggggggctttcgaaggagcgcgatattctagatctagctcttcgcctacagaggccaccgagaagaacattttagtctccgatatggagatgaacgagcagcaggagtag

SEQ ID NO: 229510 - DNA, 834 bp, synthetic construct
  misc_feature 1..834: note = Description of Artificial Sequence: Synthetic coding sequence
  source 1..834: mol_type = other DNA
atgttcccattctatagttgttggcgaacaggcttgttgctcctgctgctagctgtggccgttcgcgagtcttggcagaccgaagaaaaaacttgtgacctggttggggagaagggaaaagagtcagagaaggaactcgccctggttaagcgcttaaagcccttattcaataagtcattcgaaagtacagttgggcaaggctcagacacgtacatctacatttttagggtgtgtcgtgaggcaggcaaccatacttccggagccggtctggtacaaatcaataagagtaacggcaaagagactgtcgttgggaggttgaacgaaacccacatcttcaacggcagcaactggatcatgttgatctataaaggtggagacgagtacgataaccattgcggcaaagagcagcggagggctgtggttatgattagctgcaaccggcatacgttggcagacaatttcaatcctgtctcagaggagcggggtaaagtacaggactgtttttatttgttcgagatggatagcagcctggcatgctccccggagatatctcatctgagtgtcggtagcatcttgctggtgacatttgcatctttggtggcggtgtacgttgtgggtggcttcctgtaccagaggctagttgtgggagcaaaggggatggagcagtttccacatcttgcgttttggcaggatctgggcaatctggtggctgacggctgcgactttgtttgtcgctctaagccgcgaaatgtgccagccgcttacaggggagtgggcgatgaccaactgggagaggaatccgaggagagagatgaccatttgttgccgatgtag

SEQ ID NO: 229511 - DNA, 279 bp, synthetic construct
  misc_feature 1..279: note = Description of Artificial Sequence: Synthetic coding sequence
  source 1..279: mol_type = other DNA
atgttcccattctattcatgttggcggaccggactgctcttgctgcttctggccgttgcggtaagagagtcctggcagacagaggaaaaaacgtgtgacctcgtcggcgagaaaggcaaggaatccgagaaggagctggcactggtgaaacgcctgaagcccctattcaacaagtccttcgaatcgacagtgggtcaggggagcgacacctacatctacatttttagagtatgtcgagaagcgggaaaccatacaagcggagcgggtctcgttcagtag

SEQ ID NO: 229512 - DNA, 330 bp, synthetic construct
  misc_feature 1..330: note = Description of Artificial Sequence: Synthetic coding sequence
  source 1..330: mol_type = other DNA
atgttcccgttctattcctgttggcgtaccggcctgttacttctgctcttagcagtggctgtgagggagagctggcagacggaggagaagacctgcgatttagtcggtgagaaggggaaggagagcgagaaagagctggcattagtgaagcgtctgaaacctctttttaacaagtcgttcgaatctaccgtgggccagggcagcgacacctatatctacatctttcgtgtgtgccgggaggcaggaaaccacacctccggagcaggactggtgcaaatcaacaaatctaatggaaaggagactgttgtgggccgactcaatgaaacgtag

SEQ ID NO: 229513 - DNA, 747 bp, synthetic construct
  misc_feature 1..747: note = Description of Artificial Sequence: Synthetic coding sequence
  source 1..747: mol_type = other DNA
atgtcactatttccttcccttccgttactgctactgagcatggttgctgcttcatattctgagaccgtgacgtgtgaggatgcccagaaaacatgtcctgcggttatcgcgtgtagtagtcctggcatcaacgggttccctgggaaagatggcagagacgggaccaagggggagaaaggcgagccgggtcaaggactccggggtttacaaggaccaccagggaagttgggccctccgggaaatccaggtccctccggaagtcccggaccaaaaggtcaaaagggtgatcccggaaagtcacctgacggagatagttccctcgccgcaagcgagcggaaagctctgcagactgaaatggcccgtatcaaaaagtggttaaccttctcgctcggcaaacaggtgggcaataagttcttcctgacaaatggagaaatcatgacatttgagaaagtaaaggctctctgtgttaaattccaagctagtgttgccacaccacggaacgcggcagaaaacggggctatacagaatctaatcaaagaagaggcctttctgggaattaccgacgagaaaactgagggacagttcgtggacctgacgggcaacaggctaacctacaccaactggaatgaaggagaacctaataatgctggatccgacgaagattgtgtgctgctccttaagaacggacagtggaacgacgtgccatgctctacgtcacatctggctgtgtgtgaattccccatttag

SEQ ID NO: 229514 - DNA, 744 bp, synthetic construct
  misc_feature 1..744: note = Description of Artificial Sequence: Synthetic coding sequence
  source 1..744: mol_type = other DNA
atggctgcagaggctgacggcccacttaaaaggctgctcgtgcccatactgctgcccgagaaatgctatgaccagttattcgtgcagtgggatttgcttcatgtgccctgccttaaaattctgttgtccaaagggttggggttgggcatcgttgccggatctctgctggtcaagctgccacaggtcttcaagatactcggagccaagagtgctgaaggtcttagcctgcagtccgtgatgttggagttggtggctttgactggtacaatggtgtactcaattacaaacaactttccattttcttcttggggcgaagccctcttcttgatgctacagaccatcaccatttgtttcctggtcatgcattatagaggacagactgtgaagggcgtggcatttcttgcctgttacggacttgtgcttctggtgctactgtcgcctctcactccactcactgtggtgacactccttcaggcatcgaacgtgccagcagtggtcgtgggaaggctgcttcaggcagcaaccaattaccacaatggccacaccggccagctctccgccatcaccgtgttccttctctttgggggaagcctggccagaattttcacatctattcaagagaccggagatcccctcatggctggcacttttgttgtgtcttctctctgtaacgggttgatcgccgcacagctcctgttctattggaacgccaaacctcctcacaaacagaaaaaggcacagtag

SEQ ID NO: 229515 - DNA, 381 bp, synthetic construct
  misc_feature 1..381: note = Description of Artificial Sequence: Synthetic coding sequence
  source 1..381: mol_type = other DNA
atggcagctgaggccgatggtcctcttaagcgcttgctggtgcctatcctgctgcctgaaaaatgctacgaccagctgttcgtacagtgggatttattgcacgtaccgtgcttgaagatcttgctttccaagggcttaggtttagggattgtggcaggctctctccttgtcaaactgccccaggtgttcaagattcttggcgctaaaagcgcagctggtctaaagaaggaagacgaagcgcgaccagtccgttctgcttcaatgagggtcagggggggacttggagcctggggacatcaacaaggggaaggctgtatggagtgggagtcacagggtgctggaagcgggtatcggtgggctgcagtaccaccaggtgcgtag

SEQ ID NO: 229516 - DNA, 900 bp, synthetic construct
  misc_feature 1..900: note = Description of Artificial Sequence: Synthetic coding sequence
  source 1..900: mol_type = other DNA
atggccgcagaagctgacggccctctgaagcgactactcgtgcctatcctgctccccgaaaagtgttatgatcaactgtttgtgcaatgggaccttctgcacgtgccgtgcctgaaaattctcctcagcaaagggctggggctgggaatcgtagcgggatctttgctggtaaagctcccccaggtttttaaaattcttggcgcaaagagcgccgaaggcttatcacttcagagcgtgatgttggagttagtggccctgacaggcaccatggtgtattcaattacaaataactttcccttttcttcctggggtgaagctcttttcctaatgcttcagaccatcaccatatgctttctcgtgatgcactaccgcggacaaacagtgaaaggagttgcatttctggcatgctatggtctggtactcctcgtgctgctctctcccctcacacctttgacggtggtcccatgttccggtctgcaatgtgcctgctgcggaggcggtgaggcttctcctgggtcccatcagctcccacagagagcccataggcccgctctttctcatcactccctgccagctgtgtggggtttaccgggacccaacctgcacttccacagcggaaatcgacggagccctgacggctgggatctttgtggactcctgagcctacaaagacctcataggaggccggcagcgctgctgctggaatgcaaagcctcacctcaagcagagaagggtgctgtggagcccgctactggtgtgattcccttcccgctgattcaccctacatccggtttctctccgagtgagcccgcatgctggtgtgatcttctcatactgcacagttccgccctcgcggactttctgagtcaggggtttctccttgtggagaccaatggctag

SEQ ID NO: 229517 - DNA, 636 bp, synthetic construct
  misc_feature 1..636: note = Description of Artificial Sequence: Synthetic coding sequence
  source 1..636: mol_type = other DNA
atggccgctgaagctgacggacccctcaaacgcttgctggtcccaattttactgccggagaagtgttatgaccaactttttgtgcagtgggacctgttgcacgtgccttgtctaaagattctcctgtctaagggactggggctagggattgtggctggttcccttctcgtcaagttgccccaagtatttaagattctgggggcaaagtcagccgagggactgagtctccaatcagtaatgctggaactggtggcgctgacaggaacaatggtgtatagcatcacaaacaatttccccttctcttcttggggcgaagccctctttttaatgttgcagaccattactatatgttttctggtcatgcactatagagggcagactgtgaagggggtagctttcctggcatgttacgggctggtgcttctggttttattgtctcctctgactccactgaccgtagtgacgcttctgcaggcatctaacgtcccagccgttgtggtggggcgtctcctgcaggccgcaactaacaccactaccggtacgcaagcctcaagccagcctagtcaaagttcttgttgcctgggagcaccctggccggagagctccctgccattcaggaaacccgagatcccctag

SEQ ID NO: 229518 - DNA, 561 bp, synthetic construct
  misc_feature 1..561: note = Description of Artificial Sequence: Synthetic coding sequence
  source 1..561: mol_type = other DNA
atggccgcagaggctgacggtccactgaagcgattactagtgcccatcttgctgccggagaagtgttacgaccagctgtttgtgcaatgggacctgctccacgtgccatgcctgaaaattttgctgtcaaagggtcttggcctagggatcgtcgcagggtccttgttagtgaagcttcctcaggtatttaaaatcctcggagccaaaagtgccgaggggctctcccttcagagcgtgatgctcgaacttgtcgcacttacaggtacaatggtgtatagcatcacaaataactttcccttcagatgtagatttccacggcttctgcgccctgggcctgccggagccagtctgacaagcgatgcgctagattgctcccatccggctcccggactgcagtgcgcttgctgtggcggaggagaagcctcccctggctcccatcagctgcctcagcgggctcacagaccggctctgtcccaccatagtttaccggctgtttggggcctgcctggtcctaacctgcactttcacagcggagtgtccatccctttttctcaactgtag

SEQ ID NO: 229519 - DNA, 2826 bp, synthetic construct
  misc_feature 1..2826: note = Description of Artificial Sequence: Synthetic coding sequence
  source 1..2826: mol_type = other DNA
atggcggctgccccagcattgaagcattggcggaccaccctggagcgggtcgagaaattcgtctcgcccctctattttacggattgtaacttacggggaaggctgtttggagccagttgcccggtggctgttctctcgagttttctaactcctgaaagactgccctaccaggaagccgtgcagcgggactttcgcccagcccaggtgggagactcatttggacctacatggtggacgtgttggtttagagtcgagcttactattcctgaggcgtgggttggccaggaggtgcacctctgttgggaatcggatggggaaggacttgtctggcgggatggggaacccgtccagggccttaccaaggaaggggagaagaccagctacgtccttaccgacaggctaggagaaagggatcctcgatctctgactctttacgtggaagtggcctgcaacggcctgctgggggcaggtaaagggtcgatgattgctgcccctgatcctgaaaagatgttccaactgtctagagccgagttggccgtcttccatcgcgacgtgcacatgctgcttgttgacctagagctcttgctcgggatcgccaaagcccagcagctggagtgggtgaagtctcgctatccgggtctttattctaggatccaggaatttgcctgccgaggtcagtttgttcctgtcggcggaacatgggtcgagatggacgggaaccttccttccggcgaagcaatggttaggcagttcctgcagggtcagaacttcttcttgcaggagttcggcaagatgtgtagcgagttctggctgcccgacacttttgggtattctgctcagttacctcagatcatgcatggatgcgggatcaggcgattcttaacccagaagttaagctggaatctagtgaacagctttccacatcatacctttttctgggagggcctggatgggtctcgggtcttagtgcacttcccaccgggagattcttacggcatgcaggggagcgtagaagaagtgctgaagacagtagctaacaaccgggataaggggagagccaaccatagcgcctttttattcggatttggcgatggcggtggtggacccacgcagacaatgttagacagattaaagaggttatccaacacagatggccttccacgggtgcagctgtcttcccctcgacagctcttttccgccttagagtccgacagtgagcagctgtgtacgtgggttggcgagttatttctagagctccacaacggcacatatacaacacacgcacagattaaaaaggggaaccgggagtgcgagcggatcctgcatgacgtggagttactttctagcctcgctctggctaggagcgctcagtttttatacccggcagctcagctgcagcacctgtggcgcctgctgcttttaaatcaattccacgacgtggtaaccggcagctgcatccagatggtggccgaagaagccatgtgccattacgaggatatccgaagtcatggcaacacgctgctgtcagccgcagccgctgctctatgtgccggtgaacccggaccagaggggctcttaatcgttaacacactgccatggaaaaggatcgaggtcatggcactacccaaacccggaggtgctcactcattagcgctggttacggttccctccatgggctatgctccagtgcctcccccaacttcactacagccattgctgccgcagcaacctgtgtttgtggttcaggagacggatggaagcgtcacgttggataacggaataatcagggtaaagttagatcctactgggaggctgacctctctggtgctcgtcgcaagcggaagagaagccatcgctgaaggagcagtcggcaatcagttcgtgctatttgatgacgtgccactgtactgggacgcctgggacgtcatggattaccacctcgaaacaagaaaacctgtcctgggacaggcaggaacactagccgtggggacagaggggggtctgagaggctctgcctggttcctcctgcaaatcagccctaatagcaggttgtcacaggaggtcgtgcttgacgtgggatgtccgtacgtgcgcttccataccgaggtccactggcacgaggcacataagtttctgaaggttgaattccctgcaagggtccgctccagtcaggctacctatgagatccagtttgggcatctgcaaaggccaacccactataatacttcatgggactgggcccgtttcgaagtatgggcccacaggtggatggatcttagcgagcatgggttcggtctggccctgctgaatgattgcaaatacggagcatccgttcgcggttccatcctctctcttagcctccttcgagcacctaaggcaccagacgccaccgctgacaccggtcgccacgaatttacctatgccctgatgccacataagggctcctttcaggatgccggtgtcatccaggctgcgtacagcctcaactttcctctgcttgccctgcccgcacccagtccagccccagctactagttggtccgccttttcagtctcttctcccgcagtggtgctggagactgtgaagcaagctgagtcctcccctcagcgacgtagtttggtgctgcggctgtacgaggcacacggaagccacgtggactgttggttacacctgtcccttcctgtgcaagaagctattctgtgtgatttattggaacgtcccgatcctgctggacacctgactcttcgcgataacagactgaagttgactttttcgccatttcaagtgctttctttgctgctggtgctacagcccccaccccattag

SEQ ID NO: 229520 - DNA, 3174 bp, synthetic construct
  misc_feature 1..3174: note = Description of Artificial Sequence: Synthetic coding sequence
  source 1..3174: mol_type = other DNA
atggctgccgcacccgcacttaaacactggagaacgacgctggagcgggtcgagaagtttgtaagtcccctgtacttcacagactgtaacctcaggggaaggctttttggggcatcctgccccgtggcagttctcagtagtttcctgacacccgagcggctaccataccaggaggccgtgcaacgggatttccgcccagcacaggtgggcgatagcttcggtcctacctggtggacatgttggttccgggttgagctgacaattcctgaggcttgggtcggtcaggaagtccatctgtgctgggagagtgatggtgagggtctggtgtggcgagatggagagccggtgcagggactcaccaaggaaggagaaaaaaccagctatgtgctgactgatcggctgggagagcgggatcccagaagcctcaccctttacgtcgaagtggcctgcaacggcctcctgggagccggaaaggggtctatgatagccgcacccgatccagagaagatgtttcagctgtcacgtgccgagttggccgtctttcacagagatgtacacatgttgctggtggaccttgaacttttgcttgggatcgccaagggcctgggcaaggacaaccaacgctccttccaggcgctctacaccgctaaccagatggtgaatgtgtgtgaccctgcacaaccggagactttccctgtagcgcaggctctagcgtccaggttctttggtcagcacgggggagagtctcagcacacgatccatgctaccggccactgccacattgatactgcatggctgtggccttttaaagaaaccgtgcgcaagtgtgcgagatcatgggtgacggccttacagctgatggagaggaaccccgaatttatcttcgcttgcagtcaggcccagcagctggaatgggtgaaatcacggtatcccggactctacagtcgaatccaagaattcgcctgccgcggacaatttgtgccggtgggaggcacatgggtggaaatggatggcaatttgcccagcggggaggctatggtgcgtcaatttttgcagggtcaaaattttttccttcaggagtttggcaagatgtgttctgagttctggctgcccgacacatttggatacagtgcccagctaccacagattatgcatggatgtgggatcaggcgcttcctgacacagaagttatcgtggaacctggttaacagtttcccgcatcacacattcttctgggaaggcttggacggatcgcgagttctggtacatttccccccaggtgatagttatggcatgcagggctctgttgaggaggtgctaaagaccgtggcgaataacagggacaaaggccgagctaaccattccgcatttttgtttggcttcggagatgggggaggcggacccacccagaccatgttagacagacttaagagattaagcaacacagatggcctgccccgtgtgcagttaagtagcccaagacagctgtttagcgcgcttgaatccgattccgagcaactgtgtacctgggtgggtgaattgtttctggagttgcataacggcacgtacacgacccacgctcagatcaagaaaggaaaccgagagtgtgaacgcatcctacatgatgttgaactgctctcttccctggcgctagcccgtagcgcccagtttctgtaccccgcagcacaactacagcacctgtggcgcctgctcctgttaaaccagttccacgacgtggtaaccggctcttgcatccagatggttgctgaggaggcaatgtgccactatgaggacatcagatctcacggtaacaccctgctgtcggctgccgctgcagcgctctgcgccggtgagccgggacccgaagggttgctgattgtgaacacattgccatggaagagaattgaggttatggctctgcccaagcccggaggggctcactccctgggactgactcccagcccgggagatagcgcccagcacgggttgtgctcttgttcatcaccacacctgacagccgcacctgccgcacccgcagcttgcgtccgcagcgctagggctcctaccgacagcgcctcccgacccccacctaccaagacagatggctccgtcaccctcgacaacgggataattcgcgtcaagctggaccctacaggtagactaacttcgctcgtgctagtggcaagcgggagggaggcgatcgccgaaggggcagtcggcaaccaattcgtgctctttgacgacgtgcccctgtattgggacgcctgggacgtcatggactaccatctcgagactcgaaagccggttttggggcaggcagggacactggccgtagggactgagggaggactgcgtggaagtgcctggttcctgctgcagatttcacccaacagtaggcttagtcaggaggttgtgctggacgtcgggtgtccctatgttcgcttccacacagaggtccactggcacgaggcccataagtttctgaaggtggaattcccagcaagagtacggtcatctcaggccacctatgagattcagtttgggcatctgcagcggcctacacattataatacctcctgggattgggcaagattcgaggtgtgggcacatcgttggatggatctctcagaacatggttttggcctggcgctgttaaatgactgcaagtatggggcttccgttagaggaagcattctcagtctcagcctgctccgagcaccaaaggctccagatgctaccgccgacactggtagacacgagttcacatatgcactcatgccacacaagggaagtttccaggacgcgggtgtcatccaggctgcatattcgttgaacttccccctgctggcgttacccgcaccatcacccgcacctgctactagttggtccgcctttagcgtgagtagcccagctgtagtgctagagacggtcaagcaggccgagtctagcccccagcgtaggagtctcgttttacgcctttacgaggcgcatggcagccatgtggactgttggctgcacctcagtctgccagtgcaagaggctattctttgtgacctgctggaacgccctgaccccgctggccatctgactctgagggacaatagactgaagctgacattctcacctttccaggtcttgtccctcctgctggtgttacagccaccccctcactag

SEQ ID NO: 229521 - DNA, 3054 bp, synthetic construct
  misc_feature 1..3054: note = Description of Artificial Sequence: Synthetic coding sequence
  source 1..3054: mol_type = other DNA
atggcggctgcacccgctctcaaacactggcgtaccacactggagcgggttgaaaaatttgtctcccccctgtacttcactgattgcaatctgaggggcagactgttcggagcctcctgtccggtggccgtgcttagctccttcttaacacctgagagactgccctaccaggaggcagtccaaagggacttccggcctgcccaggttggagattccttcggtcctacttggtggacatgctggttccgggtcgagctgactatacctgaggcctgggtcggccaggaagtacatctttgttgggagtcagacggtgagggtctggtgtggcgtgatggtgagcctgttcagggtctaactaaggaaggcgaaaagaccagctacgttctgacagatcggctgggcgagagggatccccgttcccttacactgtacgtcgaggtcgcatgcaacgggctcctcggggcagggaagggctccatgattgccgctcctgaccccgagaaaatgttccagctgagcagagccgaactggcagtgttccacagagatgtccacatgctcctggtggatctggagctccttctgggaatagccaagggactagggaaagataaccagagaagttttcaagcactctacacagccaatcagatggtgaacgtgtgcgaccccgcacagccagaaacctttcccgtggcccaggccctagcttcccgcttcttcggacagcatgggggagagtctcagcacactatccacgccaccggccactgccacatcgacacagcttggctctggcctttcaaagagaccgttcggaagtgtgctaggagctgggtgaccgcactgcaactgatggagagaaatcctgaattcattttcgcatgttctcaggctcagcagctggaatgggtgaaatcccggtatccagggctgtacagtaggatccaggagtttgcctgtcgcggacagttcgtgccagtcggaggcacgtgggtggagatggatggtaatttacctagcggcgaagctatggtcagacagtttctccaaggtcagaattttttcttacaagagtttggaaagatgtgttccgaattttggttaccggatacgtttggctactccgcacaactgccacagattatgcatggatgcggaattaggagattcctgacccagaaactgtcctggaacttggtaaactcatttccgcaccacacgttcttttgggagggccttgatggcagcagagtgttggttcatttcccgccaggcgattcctatggaatgcaaggcagtgtggaagaggtattaaaaaccgtggctaacaatagggataaaggacgggcaaaccatagtgcctttctgttcggttttggggatgggggaggcggtcctacccagacgatgctagaccgactgaaaaggctatccaacactgacggtttgcctcgagtccagttgtcctctcccagacaactgttctccgcgctggagagcgattccgagcaactctgcacctgggtaggagagcttttccttgagctccataatggaacatatacaacccacgctcaaatcaagaaggggaacagagagtgtgaacggatcctgcacgacgttgagctgctgtcgtcccttgccctggctaggtcagctcagtttttgtatcctgctgcccaactgcagcacctctggcgcctccttcttttaaaccagttccatgatgttgtgacgggaagctgtatccagatggtagcagaagaggcaatgtgccattatgaggatataagaagccacggtaacaccctcctgagtgccgcagcggcagcactgtgtgctggggagccgggacctgagggtctactcatcgtcaacacattgccatggaaaagaattgaggtcatggcgctgcctaagccagggggagcccattccctcgccctggttacggtccctagcatgggctatgcccctgtcccccctcctacttccctgcagccacttctgcctcagcagcccgtgtttgtcgtccaggagaccgatgggtctgtgacccttgacaacgggattatccgcgttaaattggaccccaccggacgactgacctccttggtgctggttgctagcggcagggaagcaattgccgagggtgcggtgggaaaccaattcgtcctatttgacgacgtgccgctttactgggacgcttgggatgtgatggattaccatttggaaacgagaaagccagtcctgggccaggcgggaactttggcagtgggtaccgagggcggtctgcggggttcagcgtggttcctcctgcagatatccccgaactctcgcttatcgcaggaagtagtgcttgacgtgggctgtccatacgtccgattccataccgaggttcattggcacgaagcgcacaagttccttaaagtagaattcccggcaagggtacggtcatcccaggccacatacgagatccaattcggtcaccttcagaggcccacccactataacacctcgtgggactgggccagattcgaggtttgggctcaccgatggatggacctctcagagcatggctttggcctggcccttctgaatgactgcaagtacggcgctagcgtcagagggtccatcttgtccctgtccctcctgagagcccctaaggctcctgatgctacagccgacacgggaagacatgagttcacgtacgcccttatgccccacaaggctccaagccctgcacctgccacctcatggagcgcattctccgtatcttcacctgccgtagtgctcgaaaccgttaaacaggctgagtcttccccacagcgccgatcactggtgcttcggttgtatgaagcccacggctctcacgtggactgctggctgcatctgtctttacctgtgcaggaggccatcctgtgtgatctgcttgagcggccagatcctgcaggccatttgaccctgcgagataaccgattgaaattgacattctcacccttccaggtcctctctttgctcttggttctgcagccaccacctcactag

SEQ ID NO: 229522 - DNA, 1104 bp, synthetic construct
  misc_feature 1..1104: note = Description of Artificial Sequence: Synthetic coding sequence
  source 1..1104: mol_type = other DNA
atgcccgtcggaggcctactgccccttttcagcagccctgccggaggcgtgcttgggggagggctgggtgggggtggcggtagaaagggctcagggcctgcagctctgaggctgacagagaaatttgtgctcttgctcgtctttagcgctttcattactttgtgcttcggggctatcttcttcctgcctgatagttctaaactcctgagcggggtacttttccactcatctcccgcactgcagccggctgccgatcacaaacccggtcccggagctagggccgaagacgcagcagaaggtcgtgcccgtcggagagaggagggggcacccggagatccggaagccgctttggaggataatcttgctcgcatccgagagaaccatgagagggctttaagggaggctaaagagacgctgcaaaagttgcccgaggaaattcaacgtgatattctcctggaaaagaagaaggttgcccaggaccagctgagagataaggctccgttcagaggcttgcctccagtcgactttgtgccccctatcggtgttgaaagcagagagccagctgacgctgccatccgggaaaaacgcgcaaaaattaaggaggagatcgaagccagaaaaggacaggcaaattgccccggtagttctagttcctgtgaggtcgagatacagatgatgaagcatgcttggaataattacaaggggtatgcgtggggcctgaatgaactcaaaccaatttctaagggcggacactcttcaagtcttttcggaaatataaaaggggctaccatcgtggacgcactcgataccctctttatcatggagatgaagcacgaatttgaggaagcaaaatcctgggtcgaggagaatctcgattttaacgtcaatgccgaaatcagcgtttttgaggtgaacataagattcgttgggggactgctttcagcttactacttgtctggagaggagattttcaggaagaaggccgtggagctcggtgtcaagctactgcctgcctttcataccccttctgggatcccctgggctttgctcaacatgaaacggtggatgtgcaacatccctcgagctatggaggccacaatttag

SEQ ID NO: 229523 - DNA, 1962 bp, synthetic construct
  misc_feature 1..1962: note = Description of Artificial Sequence: Synthetic coding sequence
  source 1..1962: mol_type = other DNA
atgccagtaggcggactgctgcccttattcagttctcctgcaggcggagtactgggcggagggctggggggtgggggagggcgaaagggctccggacctgctgcactgcgtctgacagaaaagtttgtgctgttgctggttttctcagcttttatcactctgtgcttcggcgcaatattttttctgcctgactccagtaaactgctttccggcgttttattccattcctccccagcgctgcagccagccgcagaccacaagccaggccctggagcacgcgcagaagatgctgcggaaggacgagcacgacgcagggaggaaggcgcaccgggagacccagaggctgccctcgaggataatctcgctaggattagggaaaatcatgagcgcgcactccgggaagccaaagagactctgcagaagttgcctgaggaaatccagcgtgacatcttactggagaagaagaaagtggctcaagaccagcttcgggacaaggctccattccgcggactgccgccagtcgactttgtgcccccaatcggagtcgaaagcagagagcccgctgatgcagcaattagggaaaagagggctaaaataaaagagatgatgaagcacgcttggaacaactataagggttatgcctggggcttaaacgagctcaagccaatttccaaaggaggtcatagttctagcctttttggaaacattaaaggggcaacaatcgtggatgcactggatacgctgtttattatggagatgaagcacgagttcgaggaagccaaaagctgggtggaagagaacctggatttcaacgtcaatgccgagatatcggttttcgaggtaaatataaggttcgtgggaggtctcttgagcgcctactatctgtctggtgaagagatctttcgcaagaaagctgtcgaactgggcgtaaaactgctccctgcctttcataccccaagtggtatcccctgggccttgctgaatatgaaatccggaattggcagaaactggccatgggcctctggtgggtcctcaatcttagccgagttcggcacattacacctggagttcatgcacctgagccacctgagtggcaacccaattttcgctgagaaagtgatgaatattcggaccgtgctcaataagctggaaaagccacagggcctttatcctaattacctgaaccctagttctggtcagtggggtcaacatcacgtctcagttggaggactgggagactccttttacgaatacctcttgaaagcctggcttatgtccgacaaaacagacctcgaagctaaaaaaatgtatttcgacgccgtacaggctatcgaaactcacctgattagaaaatcctcgtctggcctgacatacattgcggagtggaaaggcggactcctcgagcacaaaatgggacacctgacttgctttgcaggcggtatgttcgctttaggcgctgatgcagcccctgaaggaatggctcagcactacctagaacttggtgccgaaatcgccaggacctgtcacgaatcgtacaatagaacctttatgaagctagggcctgaagcattccgtttcgacggcggtgtggaagcaattgctactcggcagaacgaaaaatattatattctccgcccagaggtgatggagacatacatgtacatgtggagacttacccatgacccaaagtaccggaagtgggcatgggaagctgttgaagcgcttgaaaatcattgccgcgttaacgggggatatagcgggctaagggatgtctacctgttgcacgagtcttatgatgacgtgcagcagtcctttttcctcgccgaaacactgaaatacctttacctgatcttttccgatgacgatctcctgcccctggagcactggatcttcaactccgaggcccatctgttgccgatcctgcctaaagacaaaaaagaagtcgaaatccgcgaggagtag

SEQ ID NO: 229524 - DNA, 579 bp, synthetic construct
  misc_feature 1..579: note = Description of Artificial Sequence: Synthetic coding sequence
  source 1..579: mol_type = other DNA
atgttcgccctgggagctgacgggtcacgggcagataaggcaggacattacctcgagctgggtgcagaaatcgccagaacatgccacgaatcttatgacagaactgccctcaagttaggtcctgaatcgttcaaattcgatggcgcagtggaagcagtggccgtgcggcaggccgaaaagtactacattctacgccctgaggtgattgaaacctactggtatctgtggagatttacacatgacccccgttatcgccagtggggatgggaggctgccctcgcaatagagaaatactgcagagtgaacggcggtttttccggtgtaaaagacgtgtacagctcgacccctacgcatgacgacgtgcagcaatcctttttcttggcggaaacactgaagtatctgtatttgcttttcagcggagatgatctgctgccattagatcactgggtattcaatactgaagcacatcctctacccgtgcttcacctggctaacacgaccctgagcgggacctcgcagggtatgcggaggcaaaacccgtactttcaggtgctgtacttatattacccagacgattag

SEQ ID NO: 229525 - DNA, 1926 bp, synthetic construct
  misc_feature 1..1926: note = Description of Artificial Sequence: Synthetic coding sequence
  source 1..1926: mol_type = other DNA
atgactacgcctgccctccttccgcttagcggaagacggattccacccctgaatctgggtcctccttctttccctcaccaccgggcaactcttaggttgagcgaaaaattcatcctgctgctgattctgagtgctttcattactctgtgctttggggctttttttttcctgcccgacagttccaagcataaaaggttcgatctaggacttgaggatgtacttataccacacgttgacgctggcaagggagccaaaaatccgggagtgtttctaatccacggaccggacgaacatcggcatagagaagaagaagagaggctgcggaataagattagggcggaccatgagaaggccctcgaagaggccaaggagaaactgagaaaatcccgggaagagatccgagctgagatccaaactgagaagaataaagtagttcaggaaatgaagatcaaagaaaacaagcccttaccccctgtgcccattcctaaccttgtggggatacggggaggtgaccccgaagataacgatattagagagaagagggaaaagatcaaggagatgatgaagcacgcttgggataattacagaacttacggctggggtcacaatgaactgagacccatagccaggaagggtcactcacccaatattttcggttcgtcccagatgggggcaactatcgtggacgctctggacacattatacatcatgggacttcatgacgagtttctggatgggcagcggtggatcgaggataatcttgatttctccgtcaattctgaagtctcagttttcgaagttaatatccggtttattgggggactcctggccgcttattacctgtctggcgaggaaatcttcaagattaaggctgtgcagcttgccgagaagctgctgccggctttcaacacccctacaggaataccatgggcaatggtaaacttaaagagcggcgtgggccgtaactggggttgggccagcgctggcagcagtatcctcgctgagtttggcacattacacatggagttcatccatctctcctatctgacaggtgatttaacctactacaaaaaggttatgcacatacgcaagttgctgcagaagatggatcggccaaacggcctatatcctaattacctgaatcctaggacagggagatggggtcagtaccacaccagtgtgggaggtctcggcgattcattttacgaatatcttctcaaagcttggctgatgtccgacaagacagaccacgaggcaagaaagatgtatgacgacgcaattgaggccattgaaaaacaccttatcaaaaaatctcgaggcggacttacttttattggcgagtggaaaaatggccatctcgaaaaaaaaatggggcatctagcctgtttcgccggtgggatgttcgccttgggagcagatggatctcgtgccgataaggccggtcactacttggagctaggcgctgagattgccaggacctgccatgaatcctatgacaggacagctcttaaactcggccctgagtcttttaaattcgacggcgctgtggaagccgtcgccgttcggcaagccgagaaatactatatcttacggccagaagtgatagaaacctattggtacctctggaggtttacccacgacccccgataccgccagtggggatgggaggctgccctggcgattgagaagtactgtcgagttaatggtggattttctggggtaaaagacgtttactcctcaacccccactcatgatgacgtccagcagagcttcttcttggctgagactcttaaatatctgtacctgctctttagcggcgacgacctcctcccattggatcactgggtctttaatacggaggcccatcccctccccgttttgcacctggctaatactacattaagtggaaatcccgcagtgcggtag

SEQ ID NO: 229526 - DNA, 1128 bp, synthetic construct
  misc_feature 1..1128: note = Description of Artificial Sequence: Synthetic coding sequence
  source 1..1128: mol_type = other DNA
atgggcctgcatgatgaattcctcgatgggcagaggtggatcgaggataacctggacttttcagtgaactcagaggtgtctgtgttcgaagtgaatatccgcttcatcgggggactactggccgcttactatcttagcggagaagagattttcaagattaaggctgtacaactggccgagaaactgctgccagccttcaatactcccacaggcatcccttgggcgatggtgaacctgaagtccggggtgggcaggaactggggatgggcttcagccggatcatctatactcgccgagttcggtaccctacatatggagttcatacacctcagttatttaacaggtgatctgacctactataaaaaagtgatgcacatcaggaaactgctgcagaaaatggaccggcctaacgggctgtatcccaactacttgaacccacgaacgggccgatggggacagtatcacacatccgtgggaggtctcggcgacagtttctacgagtacctcctcaaagcgtggcttatgagcgacaaaacggatcacgaggctcgtaaaatgtatgacgacgcaatcgaggccatagagaagcatctgattaagaaaagtcggggagggctgactttcatcggtgagtggaagaacggccatctcgagaaaaaaatgggccacctggcttgtttcgcagggggtatgtttgcactgggagcagatggctcgcgagctgacaaggcgggtcactatctcgaactcggcgcagaaattgcccgtacatgccacgaatcttatgaccgcacagctcttaaactggggcctgaatcttttaaattcgacggagcagtagaagcagtagccgtgcggcaggctgagaagtactacatcctgcggcctgaggtaatagagacttattggtacctgtggcgctttacgcatgatccaagatacaggcagtggggatgggaggcagctctggctattgagaagtactgccgagtgaacggtggctttagtggggtcaaggatgtttactcctctacaccaacacatgacgatgtgcaacagtcttttttcctggccgagaccctcaagctcgcatcctaccacgagaggacagtgtttcctgcaggttag

SEQ ID NO: 229527 - DNA, 615 bp, synthetic construct
  misc_feature 1..615: note = Description of Artificial Sequence: Synthetic coding sequence
  source 1..615: mol_type = other DNA
taaatcaaaaaatcacgcggtggccttacctttatcggcgaatggaagaatggtcatctcgaaaagaaaatggggcacctggcctgcttcgccggaggaatgttcgccttaggcgctgatgggtcccgagctgacaaagccggtcactaccttgagcttggcgctgagatcgcacggacatgtcatgagtcctacgaccgcacagcactgaagctggggcctgagtctttcaagttcgacggagcagtcgaagccgtcgccgtgaggcaggctgaaaagtactatatcctgaggccagaggtgattgaaacgtattggtatctctggcgctttacgcacgaccctcgttaccgtcagtggggctgggaggctgcgttagccatcgagaagtactgtagagtcaatggcggattcagcggtgttaaggacgtctattccagtaccccaacccatgatgatgtacagcaatcttttttcctggctgaaactcttaaatacttataccttctgttctcaggagatgatttgctccctctggaccactgggtcttcaatacggaggcccatccactgccagtattacaccttgcaaataccaccctctctgaaagctag

SEQ ID NO: 229528 - DNA, 294 bp, synthetic construct
  misc_feature 1..294: note = Description of Artificial Sequence: Synthetic coding sequence
  source 1..294: mol_type = other DNA
gagaaatattgtcgcgttaatggcggattcagcggggtcaaggatgtgtacagctctacacccacacacgatgacgtccagcaaagcttctttctcgctgagacactgaagtacctgtatttgctgttctccggtgacgatctgctgcctctcgatcattgggtattcaatacagaggcccaccctctccctgtgttgcatcttgctaatacgacactgtcaggtacttctcagggaatgcgcaggcagaatccctactttcaggtgctgtacctgtattatcctgatgactag

SEQ ID NO: 229529 - DNA, 1035 bp, synthetic construct
  misc_feature 1..1035: note = Description of Artificial Sequence: Synthetic coding sequence
  source 1..1035: mol_type = other DNA
taaatccgatttattggcggactgctggctgcatattatctgtcaggagaggagatcttcaagatcaaggcagttcagctagccgaaaagttgctgcctgcttttaatactcccacgggaattccctgggcaatggtgaatctgaagagcggtgtggggaggaactgggggtgggcaagtgccggttcaagtatactggccgagtttgggactctacatatggagttcattcacctgtcatacctgaccggcgacctaacatactataagaaagtgatgcacatacgcaaactcctgcaaaaaatggaccgcccaaacggcttgtatcccaactacctcaaccctcgaacgggcagatggggccaataccacacgtccgtagggggacttggggattctttttacgagtacctgttaaaggcttggctgatgagtgacaagacggaccacgaagcccgtaagatgtacgacgacgctatcgaggctatcgagaagcacttaattaaaaagtctaggggtggcctgaccttcataggcgagtggaaaaacggacacctggagaagaaaatggggcatctggcctgcttcgcgggtgggatgtttgccctcggagctgatggttccagagcagataaggctggacactacctagaactcggagcagaaatcgccaggacttgtcacgagagctacgatcgcacagcattaaagctaggccctgagtcattcaagtttgacggcgctgtggaggctgtggccgtccggcaggccgaaaaatattatatcttaaggcctgaagttattgaaacgtactggtacctgtggcggttcacgcacgatcccaggtatcggcaatggggttgggaggcagcacttgcgatagagaaatattgtcgagttaatggaggattttctggagtgaaagatgtttactccagtacaccaactcacgacgatgtacagcagtccttttttctggctgagacgttaaaactagcttcctatcacgaaaggaccgttttcccagcgggttag

SEQ ID NO: 229530 - DNA, 2100 bp, synthetic construct
  misc_feature 1..2100: note = Description of Artificial Sequence: Synthetic coding sequence
  source 1..2100: mol_type = other DNA
atggcagcatgcgagggtcgccgatccggtgctttaggttcttctcaaagtgacttcctcactcctccggtgggtggtgcaccatgggcggtggctacaacggtggtaatgtatccaccaccacctcctcccccacatagggacttcatttccgtaaccctgtcctttggcgagaattacgacaactctaagtcatggcgacgcagaagctgctggcgaaagtggaaacaactctctagattgcagagaaacatgatcttatttttgcttgcctttctcctgttctgcggactgcttttctacatcaatttggccgatcactggaaagccctggccttccggctggaagaggagcagaaaatgaggccagaaatagctgggctgaaacctgctaaccctccagtgcttcctgccccacagaaggcagacacagatcccgaaaatctgccagagatcagtagtcagaaaacgcagcggcacattcagaggggccctccacatttgcagatccgccctccatcccaggatttaaaggacggtacacaggaggaagcaaccaagcgccaggaggcgccagttgatcccagacccgagggggatcctcagcgaacagtgatttcctggcgcggtgcagtgatcgaacctgaacagggtaccgagctcccgtcacgtagggccgaggtacccactaagccccctctgccacccgcacggacccaaggtacgccagtacatctgaattacagacaaaagggcgtgatcgatgtgtttctgcatgcctggaagggctatcgaaaattcgcctggggacacgatgagctgaaacctgtatccaggagcttctctgagtggtttggcttaggcctgacactgatcgacgctcttgatacgatgtggatcctggggttgcgcaaggagttcgaggaggcccgaaaatgggtgagtaagaagcttcacttcgagaaggacgttgatgtaaatctctttgagtcaacgattcgcattcttggcggtttactgtctgcgtatcatttgtcaggtgattccttgttccttagaaaagccgaggattttggaaatagactgatgcccgctttcagaacgccgtctaagatcccctattcagacgttaacatcggaacaggggtggcacacccaccacggtggacatctgatagcacagtagcagaggttacctcaatccagctggagttcagagaactcagccggctaaccggggacaagaagtttcaggaagccgtcgaaaaggttacccagcacatacacggactctccggcaaaaaggacgggctggtgcccatgtttattaatacacatagtggccttttcacccacctgggcgtgttcacgctgggagcgcgagccgacagttactatgaatacttactgaagcagtggattcagggtgggaaacaggaaacccaactgctggaagactacgtagaggcaatcgagggagtgcggacccatcttctcagacacagcgagcccagtaagctgacgttcgtgggggagctcgctcacggccgattctctgcaaaaatggaccatctggtctgcttcctgcctggcacattggcactcggagtgtaccatggcctcccggcttcccacatggagctagcacaggaactgatggaaacttgctatcagatgaatcgccaaatggagaccggtctatcccccgaaatcgtccactttaatctctatcctcagcctggtaggcgggatgtcgaggtcaagcctgcggaccgccataacctactacgcccagagaccgtcgaatccttgttctacctgtaccgagttacaggcgatcgaaaatatcaggactggggctgggaaatcctgcagtccttctctcggtttactcgggtgcctagtggcggttacagcagtattaataacgtccaagacccacagaaacctgaaccaagggataagatggagtcattcttcttaggggagacactcaaatacctcttcctgttgttctctgatgacccaaatctcctgagcctggacgcttacgtgtttaacactgaggctcacccacttccaatttggacgcctgcatag

SEQ ID NO: 229531 - DNA, 1209 bp, synthetic construct
  misc_feature 1..1209: note = Description of Artificial Sequence: Synthetic coding sequence
  source 1..1209: mol_type = other DNA
atgtggatcctgggactgagaaaggaatttgaggaagcacgcaaatgggtgagcaaaaagctgcattttgaaaaggacgtggacgtgaatttgttcgagtctacaatccgcattctcggtggcctgttgagcgcctatcatctcagcggtgattccctctttctgcggaaggcagaagacttcggaaacaggcttatgccggcttttcgcacacccagcaagatcccgtacagtgacgtcaacatcggaacaggggttgcacacccgcctcgttggacatctgattccaccgttgccgaagtcacttccatccagctggagttccgggaattgagccgcctcaccggagataaaaagttccaggaggccgtggagaaagtgacacagcatatacatggtctcagtggaaagaaggatggtctggtacctatgtttatcaatacacattccggtctatttacacacctgggcgtatttacattaggcgctcgcgctgactcctactacgaatatctgctgaagcagtggatccagggcggaaagcaggaaacacagctgctggaggattacgtcgaagcaattgagggtgtcaggacccacttgctgaggcacagtgaacccagcaagttgaccttcgtcggcgaactggctcacggcagattctccgctaagatggaccacctggtatgcttcctgcccggaacactggcgctgggcgtgtatcacgggttacctgcctcccacatggagcttgcccaggagctcatggaaacttgctaccagatgaaccggcagatggagacgggactgagtcccgagatcgtacattttaacctgtacccccaacccggtaggagagatgtggaagtgaaaccagcggatcgacataatttacttcgcccagaaacggttgagtccctcttttatttgtaccgagtgaccggcgatcgtaagtaccaagactggggttgggaaatcctgcagtccttctcccggttcactagggtaccaagtgggggatacagctccatcaacaacgtccaggacccacagaagcccgagcctcgagacaagatggagagcttcttcctcggagagaccctgaagtatctctttctgctgtttagcgatgacccgaacctcctgagcctggacgcttatgtgttcaacaccgaggctcacccactgcctatctggacacccgcatag

SEQ ID NO: 229532 - DNA, 2118 bp, synthetic construct
  misc_feature 1..2118: note = Description of Artificial Sequence: Synthetic coding sequence
  source 1..2118: mol_type = other DNA
taaccttgggcagtcgcaaccacagtagtgatgtaccccccaccaccacctccaccgcacagagacttcatttccgttacactgagttttggagagaattatgataattcaaagagctggcgcagacgaagctgttggcggaagtggaaacagctttcacggctgcaaaggaacatgatcctgttccttctcgcctttctcctgttctgtggattgttgttctacatcaacctagccgatcattggaaggccctggccttcaggttggaggaggagcagaagatgcggccagaaatcgccggactcaagccagctaaccctccagtactccccgcaccacagaaggccgacacagatcccgagaacctgcctgagatttcaagtcagaagacgcagcgtcacattcaaagaggtccacctcatcttcaaattcgcccaccttcccaggacctcaaggacggtacccaagaggaggcaaccaagcgccaagaggccccagtggaccctagaccagaaggagatcctcagcgcactgtcatctcctggagaggcgctgtgatagaacccgagcaaggtaccgaactgccctctaggcgtgcagaagtccccaccaagcctcccctgccacctgctcgaactcagggaacccctgttcacctgaattatcgccagaaaggggtaattgatgtgtttctgcatgcatggaagggataccgcaagtttgcttggggccacgatgagttaaaacccgtctctaggtcttttagcgagtggttcggcctgggattgaccctaattgatgctctggacactatgtggattctcggcctcaggaaggaattcgaggaagccagaaagtgggtatcaaagaaattgcatttcgagaaggacgttgacgtgaatttgtttgagagcaccatcaggattcttgggggtctgctctcagcataccacctgtctggggattctctctttctgcggaaagctgaagacttcgggaataggctgatgcctgcttttcggacgcccagcaaaatcccctacagcgacgtcaacattggaaccggggtggcacatcctcctcgctggacctccgactctactgtcgctgaggtgacatctattcaactagagtttagagagttatcccgcttgactggagataagaagttccaagaagccgttgaaaaagtcacacaacatatccacgggttatcagggaaaaaggacggtctggtgcccatgttcataaacacacactcaggcctgttcacacacctaggcgttttcacactcggagcccgagctgacagctattatgaatatcttctcaagcagtggatccagggcggaaaacaggaaacgcagttgctcgaagattatgtagaggcgatcgaaggcgtccgaacccatctcttgcgtcacagtgagccgagtaaactcacctttgtgggagagctggctcacggcagattctctgctaagatggatcacctggtatgcttccttcccggtacgctcgccttaggcgtgtatcatggcctccctgccagccatatggagctggcacaggaactaatggagacatgctaccagatgaataggcagatggagaccgggctgagccctgaaattgttcactttaatctgtacccgcagcctgggaggagagatgtcgaagttaagcccgctgatcgtcataacctgttacgacccgaaacagtcgagtccctgttttacttatatcgtgtcacaggggataggaagtatcaggattgggggtgggaaatccttcagtctttcagcagattcacaagagtcagcacctgtccccgtcccgcatggtctagacccccaggccacaggcatggttgggctgtgggattacgcctggcacccttgttggtagtggccgttacatggataagagaaggcagggcatgccgcagtcttggcgtcgccacgctgcagctgggcggaccgggaatccccatacctactgagttgcatggatgtggtacacaatccacttggaggggttgggcgcctctcatattcatctcacaaggcttgagccgggagggattatgctgcggtccttccatccctcccgtgtag

SEQ ID NO: 229533 - DNA, 3435 bp, synthetic construct
  misc_feature 1..3435: note = Description of Artificial Sequence: Synthetic coding sequence
  source 1..3435: mol_type = other DNA
atgaagctgtcacgccaatttaccgtttttggcagcgcaatcttctgcgtcgtgatcttcagcttgtatctcatgctagaccgtggacatcttgactatccaagaaatcctaggagagaaggtagtttccctcaggggcagctcagcatgctacaggaaaaaatagatcatctggagcgtctgctcgccgaaaacaatgagataatatcaaatattagagattccgtcatcaacttatcggaatccgtcgaagatggtccgaagtctagtcagagtaatttctcccagggggcaggctcacacctgctaccttctcaattgtctctgtccgtggataccgccgactgtctcttcgcatcgcagtctggatcacacaattctgacgtgcagatgctggatgtgtactctcttatatcctttgataatcctgatggcggagtgtggaaacagggtttcgatatcacctatgaaagcaacgaatgggacaccgaaccacttcaagtattcgtggtgccgcactctcacaatgatcctggctggttgaagaccttcaacgactactttcgggataagactcagtatatattcaacaacatggtgctgaaactgaaggaagacagccgcaggaaatttatttggtcagagatcagctacttgagtaagtggtgggacatcattgatatccagaaaaaagatgctgtgaagagcctgatagagaacggtcagctggagatcgttactgggggttgggtgatgccagatgaagccacacctcactattttgccctgattgatcagctgattgaaggtcaccaatggctggagaataacatcggggtaaaacctcggtctggatgggccattgaccctttcggtcatagtccgacgatggcctacctcctcaatagggctggcctgtcccacatgctgattcagagggtccattatgcagtgaaaaagcatttcgccctccacaagaccttggagttcttctggcgccaaaattgggacttggggtcagttacagacattctgtgccatatgatgcccttttattcttacgacattccccatacatgtggacctgaccctaagatttgctgtcagtttgacttcaagcgattacccggaggcagatttgggtgcccttggggcgtcccgccagagactattcatccagggaacgtgcagtcaagggcccgaatgcttcttgaccagtacaggaagaagtccaagctgttccgaaccaaggtcctcctggcccctcttggcgatgactttagatattgtgaatacaccgagtgggatctgcagttcaagaactaccagcaactctttgactatatgaattcccaatctaaattcaaggtcaaaattcagtttggtacactcagcgactttttcgacgccctggacaaagcggacgaaacccagcgggataaaggccagtccatgttccccgtgctgtcgggggatttttttacctatgccgatcgggatgaccattactggtccggatatttcacatcccgccctttctacaaaagaatggacaggataatggaaagtcacctcagagcagcggagattctctattactttgcactgaggcaggcccacaagtacaagatcaacaagtttctcagctccagcttgtacacagcacttacagaagctcggagaaatctcgggctcttccagcaccatgacgccatcacaggcactgcgaaagattgggtggtggtcgattacgggactcgtctcttccactcccttatggtattagaaaagatcattggtaacagcgcattcctgttgatcctgaaagacaaattaacttatgactcatactctccagacacatttctggagatggatctgaaacagaagagccaggacagcctccctcagaaaaatataattagactctccgctgagccccgataccttgttgtctacaatcccctcgagcaagacaggatcagcttggtgtctgtgtatgtttccagcccaaccgtgcaggtcttctctgcctccgggaagccagttgaggtccaagtttccgcagtgtgggacaccgccaacaccattagcgagactgcctacgaaatttcctttcgcgctcacattccccctctggggctgaaagtgtataagatccttgagtcagcctctagtaatagccacctcgcggactatgttttatataagaataaggtggaagattccgggatatttactatcaaaaacatgattaataccgaggaggggatcacgctcgaaaacagtttcgttctgctgaggttcgatcagacaggcctgatgaagcagatgatgaccaaagaggatggaaaacatcacgaggttaatgtgcagttcagctggtatggcacaacaataaaacgcgataagtctggagcctatctgtttttgccggacggcaacgcaaagccatacgtctacacaactccaccatttgtgcgggtgactcatggcaggatatactccgaggtgacctgcttcttcgaccacgtgacacaccgggtccgcctgtatcacatccagggcatcgaggggcagtcggttgaagtaagcaacatagtcgatatccgcaaagtttacaaccgggaaattgctatgaaaatctcttccgatattaaatcacagaaccgcttttacactgaccttaacgggtaccagatacaacctcgcatgactctcagtaagctgccgttgcaggccaatgtgtacccaatgacaaccatggcgtatatccaagacgcaaagcacaggctgacacttctctcagctcagtctctgggcgtttcaagcctaaactccggccagatcgaagtcattatggatagacgcctcatgcaggacgacaataggggtctagagcaggggatccaggacaacaagattactgccaacctctttcggatcctattagaaaagcggagcgccgtgaacacagaagaggagaagaaaagtgtgtcgtaccccagcctcttatcacacattacctcgagcttgatgaaccatccagtgattcccatggcgaacaaatttagtagtccaaccctggagctgcaaggtgaattcagcccattacagtcatcacttccatgtgatattcatctggtgaatctcaggactatccagagcaaggttggcaatggacattcaaacgaggctgcactgatcctccacagaaaaggtttcgactgtcgtttcagctccaaggggaccgggttgttttgtagcaccacccagggaaaaatcctggtgcagaaactgttgaataaatttatcgtggagtccttaacaccttcttcactgtccctcatgcacagccccccagggactcagaacattagtgagatcaacttgtcaccgatggaaatttccacatttaggatccagctgcgctag

SEQ ID NO: 229534 - DNA, 3453 bp, synthetic construct
  misc_feature 1..3453: note = Description of Artificial Sequence: Synthetic coding sequence
  source 1..3453: mol_type = other DNA
atgaaactcaaaaaacaggtcaccgtgtgcggcgctgccatattttgtgtggcagtattcagtctatatcttatgctggatagggtccagcatgacccaaccagacatcagaacggcggaaacttccctaggtcccagattagcgttctccagaatagaattgaacagttagaacagctccttgaggagaatcatgagatcataagccacattaaggattccgttctggaactgacagccaatgcagagggccctcccgcaatgctcccatactatactgtgaacggaagctgggtcgtccccccagaacctagacccagtttcttcagcatttcaccacaggactgtcagtttgcactgggagggagaggccagaaaccggagctgcaaatgctcaccgtgtcagaagagctgccattcgataacgtagatggaggggtgtggcgtcagggattcgacatcagttacgatccccatgattgggacgccgaggacctgcaggtattcgttgtcccacactcccataacgaccccggatggattaaaaccttcgacaagtactacaccgagcaaactcagcacattctcaactcgatggtatcaaaactgcaagaagatccaaggcgtcgtttcctgtgggcagaggttagcttcttcgcaaaatggtgggataacattaatgtgcagaaacgagccgctgtacgacgcctcgttggcaacgggcagcttgagatcgctactggcggatgggtgatgcccgatgaggcgaattcccactacttcgcactgattgaccagttgatcgaaggccaccagtggctggaacgcaatcttggcgctactcctcggtctggatgggcggtggatccttttgggtacagcagcaccatgccatatctgctgagacgagcgaacctgacctccatgttgattcagagagtgcactacgcaatcaagaaacatttcgctgcgacacacagcttggaattcatgtggcgccagacctgggactcggactctagcacagatatcttttgtcatatgatgccgttttactcttacgatgtcccacatacttgcggtcccgatccaaaaatttgttgccagttcgacttcaaaagactgccagggggaaggatcaactgtccttggaaagtcccaccaagagccattaccgaggctaacgttgccgagagggcagctctgctactggaccagtaccgtaaaaaaagccaactctttcgctcaaatgtgttgctggtgccacttggcgacgactttagatatgataaaccacaggaatgggacgcacaatttttcaattaccaaaggctctttgatttcttcaactctagacccaatcttcatgtgcaggcacagttcggcactctgtctgattattttgacgcactatataaaaggactggggtggagcccggagcgcgtcctcccggattccctgtgctctccggagattttttctcgtatgccgaccgcgaggaccactactggactggatattacacctcacggccattttataagtccctggaccgcgtgttagaggcccacttgcgcggtgccgaggtgctctatagtctggctgccgcacacgcacggaggagcggtctggccggacggtaccccctgtctgacttcacactactcactgaggcccgacggactctcggacttttccagcatcacgatgcaattacgggtactgccaaggaggcagtggtggtggactacggcgtccgcctgctacgaagcctggttaacctcaaacaggtgatcatccatgctgctcattatctggtgcttggagacaaggagacctaccattttgatcccgaggcccctttcctgcaggtggacgataccaggttgtcacatgacgcccttcccgagcgcacagtgattcagctcgactcttcccctcggttcgtagttctatttaacccacttgagcaggaaaggttctccatggtttccctcctggtcaacagccccagagtacgcgttctgtctgaagagggccagccactggcggttcagatctctgcccattggagctccgcaaccgaggcggtgcccgacgtgtaccaggtgtccgtgcccgtcagactgcctgccctcggcttgggcgtgctccagctgcaactggggcttgacggccaccggacactgccgtcaagcgtcagaatttacctgcatgggagacagctgtccgtgtcacgccatgaggccttccccttgcgtgtgattgatagcggcactagcgacttcgcactgagtaacagatatatgcaggtgtggttcagtggtctcactgggctgctgaagtccattagaagggtggatgaagagcacgaacagcaggtcgacatgcaggtgctagtgtatgggacaaggaccagcaaggataagtcaggagcttacctgttccttccagatggcgaagccaagccttatgtaccgaaggaacctcccgtgctgagggtaacggagggtccgttttttagtgaggtagtggcttactatgaacacattcatcaagctgttcggctgtataacctccctggggtcgagggcctctcactggacatcagcagcttagtggacatccgggattatgtgaataaagagctggccctccacatccataccgatatagacagccagggtattttttttactgacttgaacggctttcaggtgcaacctcgcaggtatcttaagaagctgccactgcaagccaacttctaccccatgcccgtaatggcatatatccaagatgctcaaaagcggctgacattgcacaccgcacaggctttgggggtgtccagcctgaaggatggtcagttggaagtgatactggacaggcgccttatgcaggacgacaacagaggattgggccaagggctgaaggacaacaaacgtacatgcaatcgcttccgacttctgttggaaagaagaacagtgggctccgaagtccaagactctcactccacttcctatccttcgttgctcagtcacctcactagtatgtaccttaacgctccagccctcgctttgcctgtggcacgaatgcagctcccgggacctggactgaggtcgttccacccactcgcctcatccctgccttgcgatttccacctgctcaacttgaggactctgcaggcggaagaagacactctgccttccgccgagaccgcgctaattttgcataggaaaggcttcgactgtgggctggaagccaagaatctcggattcaactgcactactagtcagggcaaagtcgccctgggtagcttatttcacggattggatgtggtcttcctgcagccgacaagcctgacacttctttatcctctggccagccccagcaatagtacagatgtatatctagagcctatggagattgccacgtttcgtcttaggctcggatag

SEQ ID NO: 229535 - DNA, 1023 bp, synthetic construct
  misc_feature 1..1023: note = Description of Artificial Sequence: Synthetic coding sequence
  source 1..1023: mol_type = other DNA
atgcaggtctggtttagtggcctgacaggattgctgaaaccttatgtgcctaaagaaccacccgtcctcagagttactgagggtcccttcttttctgaggtcgtagcctattatgaacacattcatcaggcagttcgcttatacaacctccccggagtggagggcctaagcctcgacatctcttcgctcgtggacatccgcgactacgtgaataaggaactcgctctccacatccacactgacattgacagtcagggcattttttttaccgatctgaacggctttcaggtccagccgcgaagatacttgaagaaactgccactccaggccaacttctatcctatgcctgtaatggcttacattcaggacgcacagaaacgcctcacattgcacacagcccaggcgcttggggtgagtagtcttaaggacggacaactagaggttatcctggatagacgcttgatgcaggatgacaaccggggactgggccagggcttgaaggataacaagcggacttgcaacagatttagactgctcttggagcgcagaacagttgggagcgaagtccaagatagccactctacgtcttatccctccctcctgtcacacctcacatccatgtatctgaatgcacccgctcttgcgctgcccgtggccagaatgcaattgcctgggccaggcctcagaagcttccaccccttggcctcttctctgccttgtgacttccacttgctaaatctgaggacacttcaggctgaggaagataccctcccgtccgcggagactgcacttattcttcacagaaaaggcttcgactgtggcctcgaagccaagaatctggggttcaattgcactacaagccaaggcaaagtcgcattgggctccctgttccacggactggacgtcgtgtttctgcagcctacttcactcacactgctgtatcctctcgcatcccccagcaactcgactgacgtctatttggagcccatggaaattgccaccttccggttaaggctgggctag

SEQ ID NO: 229536 - DNA, 1977 bp, synthetic construct
  misc_feature 1..1977: note = Description of Artificial Sequence: Synthetic coding sequence
  source 1..1977: mol_type = other DNA
atgacgagcgacatgacatcccctagatccgggatgccttccagctccacgacgaatggatccctgacatctagtactgcaggacttacatcaatgtgcaggggtgccgaggtgctctatagcctagcagccgcacacgcaagaagatctggcctagctgggcgttacccactttccgactttacgttgctaaccgaagcccgacggaccttaggcctgttccagcaccacgatgctatcaccggaacagccaaggaggcggtcgtggtggactacggagtcaggttgctgaggtctcttgtgaacttgaagcaagtgattatccacgctgcccactacctagttctgggggataaggagacttaccacttcgatcccgaagcgccttttctacaggttgatgataccagattaagccatgatgcactgccagagcgcaccgtcatacagcttgactctagtcccagattcgttgtgttgttcaatcccctggaacaggagcgcttctccatggtgagtctcttggtgaattcccctagggtgcgcgtgttgtccgaagagggacagcccctggccgtccagatctctgctcactggtccagtgccacagaggccgtacccgacgtctaccaggtttccgtgcccgtgagactgccggctctgggactgggagtgctgcagctacaactgggcctcgacgggcaccgaactctccctagcagcgtgcggatctatctacacgggcgtcagctgtccgtaagccgccacgaggctttcccacttagggtaatcgactccggtacctccgacttcgcactgagcaatcgttatatgcaagtttggtttagcggcctgactggtctattaaagtctatcagacgagtcgatgaggaacatgaacagcaggtggatatgcaagtcctagtgtacgggacacgtacaagtaaagataaaagtggtgcttatctctttttacccgatggagaagctaagccttacgtcccaaaagagccccctgttttgagggttacagaggggccttttttttctgaggtcgtggcatactatgaacacatccaccaggctgtgagactctacaaccttcccggtgtggaaggcctctcactggacattagcagcctggttgatattcgagattatgtcaataaggaactagccttgcatatccacacggatatcgactcacagggaatttttttcacagatctgaacggcttccaagtgcagcctcgaaggtatctaaagaaactgcctctccaggcgaacttttaccccatgcctgtgatggcgtacattcaagatgcccagaaaaggcttacactccatactgcgcaggccctgggtgtgagttccctgaaggacggccaactggaggtgattcttgacagacgcttgatgcaggacgacaacagaggactggggcagggcctgaaagacaacaaacggacttgcaacagattcaggctgctgctggaacgacgaactgtcggctctgaagtgcaagactctcatagtacttcctatccttcactgttaagtcatttaacctccatgtacttaaatgcaccagccctggccttgccagttgcgagaatgcagctccctggacctggcctgagaagtttccatccactggctagctctctcccctgcgatttccaccttctgaatctcagaacactacaggccgaggaggatacgttgcccagcgccgagaccgctctgatcctgcataggaagggatttgactgcgggctggaggctaaaaacctgggatttaactgcacgacctcccaagggaaggtggcattaggtagtctgttccacgggcttgacgtggtgtttttgcaaccaaccagtttaacactgctgtatcccttggcaagcccaagcaattctaccgatgtctatctggaacccatggaaatagcaacatttcggttgcgtctgggttag

SEQ ID NO: 229537 - DNA, 219 bp, synthetic construct
  misc_feature 1..219: note = Description of Artificial Sequence: Synthetic coding sequence
  source 1..219: mol_type = other DNA
atgaaattaaagaaacaggtaaccgtctgcggcgctgcaatcttctgcgtcgctgtgttcagtctctatctgatgcttgatagagtgcagcatgatccgaccagacatcagaacggcggaaattttcccagaagtcagatctctgtgcttcagaatcggatcgagcagctggagcagttgctggaagaaaaccatgaaataatatcccacataaagtag

SEQ ID NO: 229538 - DNA, 153 bp, synthetic construct
  misc_feature 1..153: note = Description of Artificial Sequence: Synthetic coding sequence
  source 1..153: mol_type = other DNA
atgaagctcaaaaaacaggtcacggtatgtggagccgctatattctgtgtggccgttttttcactgtaccttatgttggaccgggttcagcatgatccaacccgccaccaaaacggaggaaacttcccgcgaagtcaaatttctgtgttatag

SEQ ID NO: 229539 - DNA, 3192 bp, synthetic construct
  misc_feature 1..3192: note = Description of Artificial Sequence: Synthetic coding sequence
  source 1..3192: mol_type = other DNA
atgctcccctactatacggtgaacgggagctgggtggtgccgccagagcccagaccatcattcttcagcatatccccacaagactgccagtttgctctagggggaagggggcagaaacctgagcttcagatgctgactgtgtccgaggagttgccgttcgacaatgtggacgggggtgtgtggaggcagggtttcgacatatcttacgacccgcatgattgggatgcggaggatttgcaggtgtttgtcgtcccacactcgcataacgatccaggatggatcaaaacatttgacaaatactacaccgagcagactcagcacatcttgaattcaatggtgagcaaactacaagaggacccacgcagacgatttctttgggccgaggtttcctttttcgcaaaatggtgggacaacataaatgtgcagaaaagggccgcagtccgacggttggttggaaacggccaactcgagattgcgactggcggttgggttatgcctgacgaggccaacagccactattttgcccttatcgatcaattgatcgaaggtcatcagtggctagagcgcaatctgggcgcaacccctcgttcaggatgggccgttgatcccttcggctacagcagcacgatgccttatctgttaagaagggctaatctgacaagtatgctgattcagcgggtacactacgccattaagaaacattttgccgctacacactccctggagttcatgtggaggcagacttgggattctgattcgtctaccgacatcttttgccacatgatgcccttttactcgtatgacgttcctcatacctgcggccctgacccaaagatttgttgtcagtttgattttaagcgacttcctgggggaagaatcaactgcccatggaaggttcccccacgcgctataacggaggccaatgttgccgagagggcagctctgttacttgatcagtatcgaaaaaaaagccagctgttccggtcaaacgttctgttagtgcctctgggggacgatttcagatatgacaagcctcaggaatgggacgcgcaatttttcaattaccagaggctcttcgatttttttaatagcagacctaacctccatgtgcaggcgcagtttggaacactatccgactatttcgatgctctctataaaaggacgggcgtggagcccggagcgaggcctccgggattccccgtcctgtcaggcgattttttctcctacgccgaccgggaagatcattattggacaggctactacaccagcagacccttttacaagagcctggacagggtactggaagcgcaccttcgaggagcagaagtgttgtactcgcttgccgctgcccacgcaaggcgttcaggcttggcaggaaggtatccactcagcgatttcactctgctgaccgaggccagacgtacccttgggctttttcagcaccatgacgccatcaccggaacagcaaaggaagccgtcgttgtggattatggggtcaggctgctgcgatctctcgtcaatctgaaacaggtcatcatccacgccgctcattacctggtattaggggataaggagacataccacttcgatcccgaggccccatttttacaggtagatgatactagacttagccatgacgccctgccagagcgaaccgtgatccaactcgacagcagcccaaggtttgtggttctgtttaatcctctggaacaggagcgtttttctatggtgtcgctgctcgtgaattctcccagagtcagagtgctcagcgaggaaggtcagcccttagcagtgcagattagcgcccattggagctcggcaacagaggcagtgcccgacgtgtaccaggtgtcagtcccagtccggcttcccgcactagggttaggagtgctgcagcttcagcttggtctcgacggtcaccggactttgccctcatctgttagaatttacctacacggaagacagttgagtgtgtcaaggcacgaggccttccccctccgagtcatcgatagcggaactagcgattttgcgttgtctaatcgctacatgcaagtctggtttagcggactaaccggtcttcttaagtccattagaagggtcgatgaggagcatgagcagcaggtggacatgcaagtgcttgtctacggcactcggactagcaaggataagagcggcgcttacctcttcctgcccgacggagaggcaaagccgtacgtgcctaaggaacccccagttcttcgcgtcaccgagggacctttcttttccgaggtagtggcttattacgaacacatccatcaggccgtacgactgtacaacctgccaggcgtcgagggactcagcctcgacattagtagccttgtggatattcgtgattatgtaaacaaagaactcgcccttcatatacacaccgatatagatagccaaggaatatttttcactgacctgaacgggtttcaggtgcagccacggaggtatctaaagaaattgcctctgcaggctaacttttatccgatgccagttatggcttatattcaggacgcgcagaaaaggcttaccttacacaccgcccaggcgctgggagtgagcagcctgaaggacggccagctggaagtgatcctagaccggcgactgatgcaagacgacaatcgtggcctgggccaggggcttaaggataacaagcgtacatgcaatcgtttcagacttttgctggagagacgaaccgtgggaagcgaggtacaggattcacatagtacatcttacccttcgctcttgtcacacctgacctcaatgtatctgaatgccccagcactggctctccctgtcgccagaatgcagctcccgggacccggtctgaggagctttcacccactggccagttcattaccttgtgacttccacttgctcaacttacgaaccctccaggccgaagaggacacacttccatctgccgaaaccgcgttgatcctgcacagaaaaggcttcgactgtggcctcgaggcaaagaatttgggcttcaattgcaccaccagtcaagggaaggtcgctcttggttctctatttcatggcttagacgttgttttcctgcagccaaccagcctcactttgttgtacccacttgcttctccatccaatagcacagatgtgtacttggagccaatggagatcgctacgttcaggctgcggctgggatag

SEQ ID NO: 229540 - DNA, 231 bp, synthetic construct
  misc_feature 1..231: note = Description of Artificial Sequence: Synthetic coding sequence
  source 1..231: mol_type = other DNA
atgaaactgaagaaacaggtgactgtctgcggggctgccatcttctgtgtggccgtgttcagcttatacctcatgctggatcgggtccaacacgaccctacgcgtcaccagaatgggggtaactttccgagatcccaaatttctgtcctgcagaatcggattgagcagttggagcagcttctcgaggagaaccatgagattatctcacacatcaaggactccgtactatag

SEQ ID NO: 229541 - DNA, 363 bp, synthetic construct
  misc_feature 1..363: note = Description of Artificial Sequence: Synthetic coding sequence
  source 1..363: mol_type = other DNA
atgaagctgaagaagcaggtgaccgtttgcggcgcagccattttctgcgtcgcagtgttttccttgtatctgatgctggaccgcgtccagcacgaccccactaggcatcagaacggcggtaacttccctaggtcccagatctccgtcctgcagaataggatcgagcaactggaacaacttctcgaagagaatcacgagataattagccatatcaaagattccgtgctggaactgactgcgaacgcagaaggaccgcctgccatgctgccttactatacagtgaacggctcttgggtcgtcccaccggaacctcgaccctctttttttagcatctcgccacaggattgccagtttgctctgtag

SEQ ID NO: 229542 - DNA, 3123 bp, synthetic construct
  misc_feature 1..3123: note = Description of Artificial Sequence: Synthetic coding sequence
  source 1..3123: mol_type = other DNA
atggcagcagccccagccctcaaacattggcgcactaccctggagagggtagaaaaattcgttagcccgctctactttactgactgcaatctccggggaagactcttcggcgcatcctgcccggtggccgtgctcagttcctttctgactccagaaagattaccctaccaagaagccgtccagagggactttagacccgctcaagtgggggactcttttgggcctacctggtggacctgctggtttcgcgtggagctcactatccccgaggcctgggtggggcaagaggtgcacctctgttgggagtcggacggggaagggctagtgtggagggacggggagcccgtgcagggcctcaccaaggaaggggagaaaacgagctacgttcttactgacagattaggcgaacgcgaccctcgctctctcacattgtacgtagaagtcgcatgcaacggactcctaggcgcagggaaaggctccatgatcgctgccccagatccggagaaaatgttccagctttcccgagctgagctggccgtgttccacagggacgttcacatgttacttgtggacctggagttactcctcggcattgccaagggcttaggaaaggacaatcagaggtccttccaagccttatatacagcaaatcagatggtaaatgtgtgtgacccggctcagcccgagactttccctgttgcccaggcgcttgcctcacgattcttcggacagcacggtggggagtctcagcacaccatacatgccaccggccattgccatattgatacagcgtggctgtggccattcaaggaaaccgtccggaaatgcgcacgcagctgggtgactgccctacaactaatggagcgcaatccggaattcatctttgcttgttcacaggcccagcagcttgagtgggtaaagagcagatatcccggtttatacagccgtattcaggagttcgcttgtcgagggcaatttgttccagtcggaggtacatgggtagagatggacggcaatctgccctctggggaggcgatggttcggcagtttctgcaggggcaaaacttcttcttgcaggagtttggcaagatgtgcagcgagttctggctgcccgatacattcggctatagcgctcagttgccacagattatgcacggttgtggcatcaggcgcttcctgacccaaaaactctcttggaacttagttaacagcttcccacaccacactttcttttgggaaggcctagacggctcacgggtgttagtgcacttcccaccaggggattcctatggaatgcagggctccgtggaggaagttctgaaaaccgtggctaacaaccgtgataagggacgtgccaaccatagtgcgtttttgttcggattcggagatgggggaggcggtcccactcaaaccatgctggatcggctgaaaaggctttccaataccgacggactgccaagagtccaattgtccagccctcgccagcttttttccgccctggagtctgatagcgaacagctttgcacttgggtcggtgagctgtttctcgagctgcataatgggacatataccacacacgctcaaatcaagaagggcaaccgtgagtgtgaaaggatcctgcatgacgtggagcttctgtcctcgctcgctttggccagatccgctcagtttctctatcctgccgcacagttgcagcacttgtggcggttgctgctacttaaccagtttcatgacgtggtgactgggagctgcattcagatggtggccgaggaagccatgtgccactacgaagacattcgctctcacgggaacacactcctttcggcagccgcagctgcactttgcgcaggcgaaccaggaccagaagggctgctgatcgtgaatacccttccttggaagagaatcgaggtcatggcactgccaaagcccggaggcgctcactctctagccctggtgacggtgccttccatgggttatgcccctgtacccccacccacctctctacagcctctcctgcctcagcaacccgtcttcgtggttcaggaaaccgacggtagcgtgacgcttgataatggaatcatacgcgtgaagctggatcccacaggacgccttacatccctggttctcgtagcctctggacgggaagccattgctgaaggcgcagttggcaaccagtttgtgctgttcgatgacgtcccactgtattgggacgcgtgggacgtgatggattaccacctggaaacaagaaagcctgttctcggtcaggcaggcacactggctgtgggaaccgaaggtggactgaggggctcggcatggttcctgctacagatttctcccaatagtcgcttgagccaagaggtcgtacttgatgttggttgcccttatgttagattccacacagaagtgcactggcatgaggcccataaattcttaaaagtcgaatttcccgctcgtgtcaggtcctcgcaagccacatatgaaatccaattcggacatcttcaacggcctacacattataataccagctgggattgggcgagatttgaagtgtgggcccatagatggatggacctgtccgagcacggctttggcttggctctgctgaacgattgcaaatacggagcatcagttcggggatccatactgtcactctcactactacgggctccaaaggcgcctgatgcaactgctgataccggcagacatgagttcacttatgcactgatgcctcataagggcagtttccaggatgccggagtgattcaggccgcttattccctcaattttccgttattagcgttgcctgcccctagccccgcacccgctacttcatggtccgcattctccgtcagttctccagctgtggtacttgaaaccgtaaagcaggcagaatcttcacctcagcgccgaagtctcgtgttaagattgtatgaggctcatggatcacacgtggactgctggctgcatctttctctccccgtccaagaagccatcttatgcgacctgctggaaaggccagatcccgctggacatctcactctgagagataatcggctcaaactcaccttctcccctttccaggtgctgtcccttctgctcgtgctccaacctccacctcactag

SEQ ID NO: 229543 - DNA, 630 bp, synthetic construct
  misc_feature 1..630: note = Description of Artificial Sequence: Synthetic coding sequence
  source 1..630: mol_type = other DNA
atggctgccgcaccagctttgaaacactggcggacaactctcgagagagtggaaaagttcgtttctcccctctattttacagactgcaacctgcggggtcggcttttcggagcaagttgccccgtagctgtgctgtccagcttccttactcccgaacggctcccctatcaggaagccgtgcagagagacttccgacccgctcaggtgggagatagttttggacccacctggtggacatgttggttccgggtcgagttaaccatacccgaggcctgggtggggcaggaggtccatctctgctgggaatcagatggcgaaggtttggtgtggagagacggggaacctgtccaggggctgacaaaagagggggagaaaactagttatgtgctgaccgatcggctcggcgagcgggacccaaggtctcttaccctttacgttgaggtggcgtgcaacggcctgctgggagcaggcaaaggttctatgatagctgctcccgaccctgagaaaatgttccagctctcgagggccgagcttgcagtgttccaccgcgacgtgcacatgctgctcgtggacttggagctcttgctggggatcgcaaaacccggatttggccctagtaaacggttatag

SEQ ID NO: 229544 - DNA, 2910 bp, synthetic construct
  misc_feature 1..2910: note = Description of Artificial Sequence: Synthetic coding sequence
  source 1..2910: mol_type = other DNA
atggccgaggacgacccctatctcggccgaccggaacaaatgtttcacctcgacccatcactgacgcataccatctttaatcccgaagtgtttcagcctcagatggctttacccaccgcggacggaccgtatttacagatcttagaacaacccaaacagcgcggtttcagattcagatacgtgtgtgagggacccagtcatggcggtttgcccggtgcctcttcagaaaagaataagaagtcctatccacaagtgaagatttgcaactatgtgggcccagcaaaggttattgttcagctggtgactaacggcaagaatattcacctgcacgctcattcactggttggtaagcattgcgaggacggaatttgcactgtgaccgccggacctaaggatatggttgtgggcttcgcaaatctgggaatcttacacgttacaaaaaagaaggtcttcgagaccctggaggcaaggatgacggaggcttgtatcagaggttacaatcccggtctcctggtccatcctgacctagcctatcttcaggccgagggcggaggagatcgacagctaggggatcgcgagaaggagctcatccgccaggccgcactccagcaaaccaaggagatggacttgtctgtggtgcgcctaatgtttactgctttcctcccagattctactggatcttttactcgccgtctggaaccagtcgtgtctgacgccatctacgactcaaaagccccaaatgcatccaatctgaagattgtgaggatggatcgtactgctgggtgcgtcacagggggagaggaaatttatctcctctgcgacaaagtacagaaagacgatatccagatccgcttctacgaggaggaggagaacgggggagtttgggaagggttcggcgacttttcgccaaccgacgttcaccgccaatttgccatagtctttaaaacccccaaatataaggacattaacataacaaagcccgcatccgtcttcgtgcagctccgtcggaaaagtgatttagagacttcggaaccgaaaccctttctctattaccctgaaatcaaagataaagaagaggtccagcgaaagcgccaaaaattgatgcccaatttctctgattcattcgggggtggaagtggggctggtgccggaggaggcggaatgttcggtagcggtggaggcggagggggtactggaagtactggacccggatactcctttccccactatggctttcccacctacggaggtattactttccatcctggcactactaagtctaacgctggaatgaaacatgggacgatggacaccgagtctaagaaagaccctgaaggttgcgataaaagtgacgacaaaaataccgtcaatctcttcgggaaggtaatcgagacaactgagcaggatcaagaaccctccgaagctacagtgggcaacggcgaggtgacactcacatatgcaacagggactaaagaagagtcagccggtgtgcaggataacctttttttggaaaaggcgatgcaattggctaagcgccacgcaaatgcgttattcgattatgccgtgaccggcgatgtcaagatgcttctggctgtgcagcgtcatctgaccgctgtacaggacgagaacggtgactctgtgctgcatctggccattattcacctgcattcacagcttgtgcgtgatctgttagaggtcacttctggcctgatcagtgacgatattattaatatgagaaacgacttgtaccaaaccccacttcatctggccgtaataaccaagcaggaagatgttgtagaggacctgctccgggctggcgctgatttgtctcttttagatcgcctgggcaatagtgttctccatttagcagcaaaggaggggcatgacaaggtcttatcgattttgctgaagcacaagaaggctgccctgcttctggaccaccctaacggggatggtttaaatgcaatccacctggcaatgatgtccaacagtcttccatgccttctcttactagtagccgctggcgctgatgtgaacgcccaggaacagaagtctggccgaactgccttacacctggcagtagagcacgacaacatatcactagccggatgtctcttactggaaggagatgcacacgtcgattccaccacctatgacgggactacccccctacatattgccgctggccgtggaagcacaagactggcggctctgctgaaagcagctggcgcagatccactggtggaaaatttcgaacctttatacgatctggacgattcttgggagaacgccggagaagacgagggggtcgtgccgggaaccactcccctggatatggctactagctggcaggtatttgacatcttgaatggtaagccctacgagccagaattcacaagcgatgacctactggctcaaggcgacatgaaacagctagcggaagatgttaagctgcagctttacaagctgttggaaattcccgaccccgataaaaactgggccaccttagctcagaagctggggctggggatcctcaataatgcgttcaggttgtctccagccccaagcaagaccttgatggataactacgaagtaagtggcggaacagtccgcgaacttgtcgaggcactgcgccaaatggggtatacggaagccattgaagtaatccaggccgctagctcccccgttaagacgacttcccaggctcatagtttgcctctgagccctgcctcaacgcgtcagcagatagacgagttgagagattcagattctgtatgtgatagtggagttgaaacttcgttccgcaagctcagcttcacagagtcattgacatccggagcatctctgttgacgcttaacaagatgccccacgactacggccaggagggtccactggaaggcaagatatag

SEQ ID NO: 229545 - DNA, 1389 bp, synthetic construct
  misc_feature 1..1389: note = Description of Artificial Sequence: Synthetic coding sequence
  source 1..1389: mol_type = other DNA
atggcgaaattcagacggaggacctgtattatcctcgctttgtttatcttattcatattctcccttatgatggggctcaagatgttgcggcctaataccgctaccttcggcgcaccatttggcctggatctgttgccggaactgcaccagaggaccatacaccttggtaagaactttgatttccagaagtccgaccgaattaattctgagacgaacacgaaaaatctcaaatctgtggaaattaccatgaagccctccaaagcctctgagcttaatctggatgaacttcctcctctcaacaattatctgcatgtgttctattattcctggtatggcaatccccaatttgatggtaagtatatccactggaatcatcccgtacttgagcactgggaccctaggatcgccaagaattaccctcagggcaggcataacccacctgatgacattggatcatccttttatccagagttaggcagctattccagcagggatccctcagtgatcgaaacgcacatgcgccagatgcgcagcgcgtcaataggggttctcgcactcagctggtaccccccagatgtcaatgatgaaaacggcgaacccaccgataaccttgtgcctaccatcttagataaggctcacaagtataacctgaaggtaacattccatatagaaccatactctaacagggatgaccagaacatgtacaaaaatgtcaaatacattattgacaagtacggaaaccatcccgctttctacagatacaagactaagactggcaatgccctgcctatgttttatgtgtacgattcttatatcacgaaacccgaaaagtgggccaacctcttgaccacctccggatcacgatctattagaaacagcccctatgatggcctgttcatcgctctgctggttgaggaaaagcacaaatatgacattctccagagtggtttcgacggtatatatacctactttgctacgaacggctttacatatggcagctcccaccaaaactgggctagtctcaagcttttctgcgacaagtataatctgatcttcataccctcagtgggtcctggatatattgacactagtatcaggccgtggaacacgcaaaacactagaaacagaataaacgggaagtattacgaaatagggctgtccgctgcactccagacccgaccctctctgatttctatcactagctttaatgaatggcacgagggtactcagatcgagaaggccgtcccaaagcggacaagtaacactgtgtacctcgattaccggccacacaaacctggcctctacctggaactgacacggaagtggagcgagaagtactctaaggagagggctacttatgctctggatcgccagctgcccgtgagttag

SEQ ID NO: 229546 - DNA, 597 bp, synthetic construct
  misc_feature 1..597: note = Description of Artificial Sequence: Synthetic coding sequence
  source 1..597: mol_type = other DNA
atggctaaattccggagacggacctgcatcatattggccctttttatcttgttcattttttctctgatgatggggctgaagatgctgcgacctaataccgcaacttttggggcacctttcggcttggacctgctgcctgagttgcaccaaaggacaatccacctaggtaaaaactttgacttccagaagtccgaccgcatcaacagtgagactaataccaaaaatctcaaatccgtggagattaccatgaaacccagcaaagcctccgagttaaacctggacgagctgccacctctgaataattatctgcacgtcttctactactcctggtacgggaaccctcagttcgatggcaagtatattcactggaatcatccggtgttggagcactgggacccccgaattgccaaaaattatccacaaggacgccataacccccctgatgacattggctcttccttctaccctgaacttggaagttatagctcacgggatccatcggtgattgagacccatatgcgccagatgcgctctgcatctatcggcaactattgcatctatatttacgtgtgtctctgtctatacatctgcatctag

SEQ ID NO: 229547 - DNA, 624 bp, synthetic construct
  misc_feature 1..624: note = Description of Artificial Sequence: Synthetic coding sequence
  source 1..624: mol_type = other DNA
atggcgaagtttcgacgaagaacatgtataatcctggcactgtttattctgttcatctttagtctcatgatgggcctcaagatgttgagacctaacactgccacatttggcgcacccttcggtttggacctactccctgagttacatcagcgcactatacacctaggaaagaacttcgactttcagaagtccgacaggattaacagcgagactaataccaaaaacctcaaaagtgtggagatcacgatgaagccatctaaggcttctgaacttaacctggacgagctccctcccctgaataattatcttcatgtcttctactacagctggtatgggaacccgcagttcgatggaaagtatatccactggaaccatccggtgctggaacactgggatccacgcatcgcaaagaactatcctcaggggcgacataacccccctgacgacattggctcaagcttttacccagagttgggaagttactccagtagggacccctcagtgatcgagactcacatgaggcagatgcgaagcgcttctatcgggaattactgtatatacatttgtgtgtttgtgtcggtttatatgcatatcaacgacttcttgtgtaatttcacatcctag

SEQ ID NO: 229548 - DNA, 2379 bp, synthetic construct
  misc_feature 1..2379: note = Description of Artificial Sequence: Synthetic coding sequence
  source 1..2379: mol_type = other DNA
atgatcacagtcaacccggacgggaaaataatggtccgaaggtgcctggtcacactcaggcccttcaggctatttgtgttgggaataggcttctttactctgtgctttctgatgactagtctgggaggacaatttagcgcgcgacggctgggcgattcaccatttaccatcagaactgaggtgatggggggtccagaatctcgcggagtactccgaaagatgagcgatctgctggagctcatggtcaagcgcatggatgcactggccagattagaaaacagttctgaactgcacagggccggtggagatctgcattttcccgctgacaggatgcccccaggtgcgggactcatggagcgtattcaggccatagctcagaacgtctctgatatcgccgttaaggtcgaccagattctgagacattcgctgctcctccacagcaaagttagcgagggacggagggaccaatgtgaggcaccaagcgatccgaaattcccagattgcagcggaaaggtggaatggatgcgagcacgctggacttctgatccttgctacgccttttttggcgtggatggaaccgagtgctcattcttaatttacctatctgaggtagagtggttctgcccaccgctgccttggagaaaccagactgccgctcaacgcgcaccgaaacctctgcctaaggtacaagccgtcttcaggagcaatttgtcacatctgttagatcttatgggatctggaaaagaaagcctcatattcatgaagaagagaactaaaagactgaccgcacagtgggccctggccgctcaacgccttgcacagaagctgggcgcaactcagagggatcagaagcagatcctggtgcacattggctttctaactgaagagtccggcgacgttttcagcccaagggtgctgaaaggaggcccactgggcgagatggtgcagtgggccgacattctaaccgctttgtacgtgttgggccacgggctgcgggtcactgtgtccctgaaggaactccagtccaatctcggagttccgcctggcagaggcagctgcccgctgacaatgccactgccttttgatcttatctataccgactatcacggcttacagcagatgaaacggcacatgggcttgtccttcaagaaatacaggtgcaggattcgcgtaattgatacatttggcactgagcctgcctataatcacgaagagtacgccactttgcatggttatagaaccaactggggatactggaaccttaatccaaagcagttcatgacaatgtttccacacactcccgataacagctttatgggcttcgtgtccgaagagctgaatgaaactgaaaaacggctgatcaaggggggtaaagcctccaacatggcagtagtgtacggcaaggaggcctcgatctggaaactgcagggcaaggaaaagttcttgggcatcttgaacaagtatatggaaatccacggcaccgtgtattatgagtctcagcgccctcctgaagtgccagcctttgtcaagaatcacggactactgcctcaaccagagttccagcaactgctgaggaaggccaaactctttatcggcttcgggtttccgtacgaaggtcccgctcccctcgaggccatagccaacggctgtatctttcttcaaagtcggttcagccccccacacagttcacttaaccatgaatttttccgcggaaagcctaccagccgggaagtgttttcgcaacacccctacgcagagaactttatagggaagcctcacgtatggacggtggattacaataattctgaggaattcgaagcagccataaaggccattatgagaacccaggtcgacccatacctgccctacgagtatacctgcgagggaatgcttgagaggattcacgcctacatacagcaccaagacttttgtagggccccagaccccgctttgccagaggcccacgccccacagtcacctttcgtgttggcgcctaacgcaacccacctggaatgggcccgtaacactagtctcgctccaggcgcttggcccccagcccacgcccttcgagcctggctggcagtgcctggacgggcttgtaccgatacatgcctcgaccacggcctgatttgtgaaccaagcttctttcctttcctcaacagtcaggatgccttccttaaactccaagttccatgcgactccaccgagtcagagatgaaccacctctatcccgcatttgcccaaccagggcaggaatgctatctccagaaggagcccctgctcttctcatgtgccggatcaaacacaaagtacaggcgactctgtccttgtagagacttcagaaagggacaggtggccctctgtcaaggatgtctgtag

SEQ ID NO: 229549 - DNA, 1338 bp, synthetic construct
  misc_feature 1..1338: note = Description of Artificial Sequence: Synthetic coding sequence
  source 1..1338: mol_type = other DNA
atgctcaagaaacagagcgccggtctcgtcctgtggggagccatcctatttgtggcatggaatgctttgcttcttttgttcttctggacaagacctgcccctgggaggcctccatccgtttccgcgctcgacggggatcccgcttccttgacccgggaggtgatcaggctagcccaggacgcagaggtggaactcgagcgtcagaggggtctgctgcaacagataggagacgccctttcttctcaacggggaagagtgcctacagctgcccctcccgctcagcctcgggtgccggtaaccccagcccctgctgtaatccccattctggtgattgcctgcgacagatctacagtacgtagatgcctcgataaactcctgcattatcgcccatcagcggaactcttccccatcatagtgtcccaggattgtggccatgaggaaacggctcaagccattgcctcgtatggatccgcagtgacccacattcgacagcctgatttatcaagcattgccgtaccaccggaccataggaaattccaggggtactacaaaatcgctcggcactatagatgggcactgggtcaagtgttccggcagtttcgctttcccgcagcagtggtggtggaggacgatctcgaagtcgctccagatttcttcgagtacttccgagcaacctacccacttctgaaagccgatccctccctttggtgcgtgtcagcatggaacgataatgggaaagagcagatggtggatgcttccaggcccgaacttctctaccgcaccgatttctttcctggacttggctggctcctgttagcagagctttgggctgagctggaacccaagtggccaaaagccttttgggatgactggatgagacggccagaacagcggcagggcagagcctgcatccggcctgagattagtcgaactatgacattcggacggaagggagtttctcacggacagttttttgaccagcacctgaaattcatcaagctgaaccaacaattcgttcacttcactcagctggatttgtcatatcttcaacgtgaagcctacgatagagatttccttgctcgggtgtatggcgctccacaacttcaggttgaaaaggtccgaacaaacgaccggaaggagctgggcgaggtgagagtgcagtacacgggtcgggacagcttcaaggcatttgcaaaggctctgggcgtcatggatgatcttaagtccggtgtccccagggccggttataggggaattgtgacttttcagttccgtggtcgtcgcgtgcatctggcgcctcccctgacctgggaggggtacgaccccagctggaactag

SEQ ID NO: 229550 - DNA, 1338 bp, synthetic construct
  misc_feature 1..1338: note = Description of Artificial Sequence: Synthetic coding sequence
  source 1..1338: mol_type = other DNA
atgctgaagaagcagagtgctggcctcgtgttatggggagctatactctttgtggcttggaacgcattactcctgctgtttttttggacccgtccagcacccggaagacccccaagtgtgtctgccttggatggcgatcctgcctccctcaccagagaagtaattagattagcacaagacgcggaggtagaattagaaaggcaacggggactgcttcaacagattggggacgccttgagcagccagaggggtagagtcccaaccgctgccccacccgctcagcctcgggttccagtgacccccgctcccgctgtcatccccattttggtcatagcgtgcgacaggagcaccgtgcgcagatgtctggataagttacttcactatcgtcctagcgcagagctgttcccgataattgtgtctcaggactgtggtcacgaagaaactgcccaggcaatcgcgtcttatggaagcgccgtgacacacattcgacagccagatcttagttcaattgccgtgccgcctgatcaccggaagtttcaggggtattataaaattgccagacactatcgctgggctctcgggcaagtcttcagacaatttaggttccctgccgctgtggtagtggaggatgatctggaagtggctcccgatttttttgagtatttccgggctacataccctctcctgaaagcagaccccagcctctggtgcgttagcgcgtggaacgataacggcaaagagcagatggtcgacgcttcacggccagaattgctgtacaggaccgacttcttccctggactggggtggttactcttggcagagttgtgggccgaactggaacccaagtggcccaaggctttttgggacgactggatgcggcgacctgagcagcgccaaggcagggcgtgtatccggccagagattagccgtacaatgacattcggcagaaaaggggtcagccacggccagttctttgatcagcacctgaagttcatcaagctgaatcagcagtttgtgcattttacacagctggacctgagttacttacagcgcgaggcatacgatagggatttcctagcacgagtatatggagcaccgcagctgcaggtcgagaaggtgcggactaacgatcggaaagagctgggggaagttcgagtccagtacactggaagagacagtttcaaggcattcgctaaagccctgggagttatggatgacctgaagagcggcgtccctcgagctggttaccgcggaatagtcacctttcaatttagagggagaagagtgcacctggcccctcccctcacctgggagggctacgatccttcctggaactag

SEQ ID NO: 229551 - DNA, 1338 bp, synthetic construct
  misc_feature 1..1338: note = Description of Artificial Sequence: Synthetic coding sequence
  source 1..1338: mol_type = other DNA
atgctcaaaaaacagtccgcaggtcttgtcttgtggggagctatcctctttgtcgcatggaacgcgctgctactcttgttcttctggacacggccagcccctgggcgacctccatcggtgtcagcactggatggggaccccgcatccctgactcgagaagtcattagactagcgcaagacgctgaggttgaactcgaaagacaacgtgggttactccagcaaatcggagacgccctttcttctcagcggggaagagtgcctaccgcagcccctccagctcagccccgtgtccctgtgacaccagcacccgcagtcataccaattcttgtcattgcttgtgatcggtcaaccgttcggagatgcctagataagctgttgcactaccggccttcagccgagcttttcccaattattgtgagccaagattgtggccatgaagagaccgcacaggccattgcctcctatggctctgccgtgactcacatccgccaacccgacctatcgtccatagctgtgccgccagaccatagaaagttccaggggtactacaagatcgccagacactatcgttgggcacttggccaggtattccgccagttccgctttccggcagcagtcgtggtcgaagacgatctcgaagtggcaccagacttctttgagtacttccgtgccacctaccccttactcaaagccgatccctccctgtggtgtgtgagcgcatggaatgataacggtaaggagcagatggttgatgctagtcgccctgagctcctgtaccggacagattttttccccggtctcggctggctgctcctggccgagttgtgggccgagcttgaacctaagtggcctaaggcgttttgggatgattggatgcgtaggcccgaacagaggcagggcagagcctgtattcggcctgagattagccgcaccatgacattcggacggaaaggtgtcagccatggacaattctttgatcagcacctcaagtttatcaaacttaaccagcagttcgttcatttcactcagctggacttgagttacctgcaaagagaggcctacgatcgggacttccttgccagagtgtatggggctccccagctccaagtcgaaaaggtgcgtaccaatgatcgcaaagagctgggtgaagtgcgtgttcaatataccggaagggacagctttaaagccttcgcaaaggcccttggtgtcatggacgacctcaaaagcggtgtgcctagagcaggctataggggcatcgtcacatttcagttccggggaagacgcgtgcatctggccccacccctgacctgggagggatatgaccctagttggaactag

SEQ ID NO: 229552 - DNA, 1338 bp, synthetic construct
  misc_feature 1..1338: note = Description of Artificial Sequence: Synthetic coding sequence
  source 1..1338: mol_type = other DNA
atgcttaagaagcagtctgccggactggtgctgtggggtgcaattctctttgtcgcttggaatgcactccttctgctgtttttctggacacgcccagcgccaggaagacctccctccgtgagtgctctggatggcgacccagcatctctgactagggaggtcatacggctcgcccaggacgccgaggtggagctcgagcgccagagggggttacttcagcagattggagacgcactctcatctcagaggggcagggtgccaaccgctgccccacctgctcaacccagggtgcccgtcaccccggcaccagccgtcattcccatcctggtcattgcctgtgaccgcagtacagtacggcgatgtctcgataagctgctgcattaccggccttctgctgaactctttcctatcatagtgagtcaggattgcggacatgaggaaacagcccaggccattgcaagttatgggtccgcagttacccacatacgccagcccgacctctcctccatcgccgtcccaccggatcacaggaagtttcagggatactacaagatcgcaagacactaccgttgggccctggggcaagtcttccgccagttcagattcccggcagcggttgttgtggaggacgatctcgaggttgccccagactttttcgagtactttcgggctacttacccgctcctgaaagccgacccctccctgtggtgcgtaagcgcctggaacgacaatggcaaagaacaaatggtggacgcatctaggccggaactgctgtatagaaccgactttttccctggcctcggttggctcctcctcgccgagctgtgggctgagttggaacccaagtggccaaaggcgttctgggatgactggatgcgacgacctgaacagcgacaggggcgagcctgtatacgacctgaaatcagtaggaccatgacattcggacgaaaaggtgtctctcacggccaattttttgaccagcatctcaaattcatcaaattgaaccagcaatttgtgcactttactcagctggacttgtcgtatctgcagagggaggcttatgatagggattttctggcccgtgtgtatggtgcaccccagctccaggtcgagaaagtgcggacgaacgatcggaaggaattaggcgaggtgagggttcagtataccgggcgagacagttttaaggccttcgcaaaggccctgggggtgatggacgatcttaaatctggggtcccacgcgcaggatataggggaatcgttacattccagttccgcggacgccgtgttcatctggcccctccactaacctgggagggatacgaccccagctggaactag

SEQ ID NO: 229553 - DNA, 1338 bp, synthetic construct
  misc_feature 1..1338: note = Description of Artificial Sequence: Synthetic coding sequence
  source 1..1338: mol_type = other DNA
atgctcaaaaagcagtctgccggattagtattatggggcgcaatcctgtttgttgcctggaacgccctgcttctgctatttttctggacgcggccagctccaggtcgtcccccatccgtgtcagcactcgatggcgacccagcctccctcactcgggaagtgatcaggctggctcaggacgcagaggtcgagctggagcgtcagaggggcctgctgcagcagattggcgacgccttgtcaagccagagaggcagagtacctactgccgcacccccagctcaacctcgggttcctgttacacctgcacccgcagtgattcctattctggtcattgcatgcgatcggagcacagtgagacggtgtctggataagctgctgcattatcgacctagtgccgaactgttcccgatcatcgttagccaagactgtggccatgaggagaccgcccaggctatcgcaagctacggcagtgcagtaactcacatccgacagccagatttaagcagcatcgcagtacccccagaccatcgcaagtttcaagggtattacaaaattgcacgtcattaccggtgggcactcggtcaggtcttcagacaatttcgattcccagcagcagtggtggttgaggatgatttggaggtagcaccagacttttttgagtacttcagggcgacctatcccctgcttaaagccgacccaagcctttggtgcgtgtcagcctggaacgataacggtaaggagcagatggtcgatgcaagtaggcctgagctgctttacaggacagatttctttccagggctgggctggcttctgttggccgagctgtgggcagagctggagcctaagtggcctaaggccttttgggacgattggatgagaagacccgaacagagacagggcagggcttgcatccgtcccgaaatatcccggacgatgacttttggaagaaaaggcgtttcccacgggcagttctttgatcagcacttgaagttcatcaaactgaatcagcagttcgtgcatttcacccagctggacctgtcctatctccagcgcgaggcatacgatagagatttcttggccagagtctacggggctccacagctgcaggtggagaaggttaggaccaatgatcggaaggagctgggcgaagtgagagtgcagtacacaggacgagatagttttaaggccttcgcaaaggcccttggcgtcatggacgatctgaagagcggcgtgccgagagccggttatcgcggaatagtaacattccagttccgcggtaggagggtgcacctggccccacccctgacttgggaaggatatgatccctcatggaattag

SEQ ID NO: 229554 - DNA, 909 bp, synthetic construct
  misc_feature 1..909: note = Description of Artificial Sequence: Synthetic coding sequence
  source 1..909: mol_type = other DNA
atgcttaaaaaacagagtgccggactggtgttatggggggcaattctgtttgtggcttggaatgcacttctgctgctgttcttttggacgcgccctgcccctggcaggccaccatcagtctccgccctggatggagatcctgcatccttgacaagggtcttcaggcagttcagatttccagcggctgtggtggttgaagatgatctcgaggtggccccagactttttcgagtacttccgcgcaacttatcctcttctcaaagcagacccttctctgtggtgcgtgagcgcttggaacgacaatggtaaagaacagatggtggacgcctcccgaccagagcttctctatcggaccgatttcttcccgggactgggttggctactccttgccgaactctgggctgaacttgagcctaagtggcctaaagccttttgggacgactggatgcggaggcctgagcaacgccaggggagagcatgtatccggccagaaataagtcggacaatgactttcggtagaaagggcgtaagtcatggccagttcttcgaccaacacctcaaatttataaaattgaaccaacagtttgttcacttcacccagctggacctgagctatcttcagagagaggcctatgaccgcgactttttggcgagggtatacggggctcctcagcttcaagtggaaaaggtgcggacgaacgaccgcaaggagctgggggaagtccgagtgcagtacacaggcagggacagcttcaaggcctttgccaaagccttgggggtgatggatgatctgaaatcaggggtcccaagagctgggtacaggggtatcgtgacgtttcaattcagggggaggcgagtgcacctggcacccccactcacctgggagggttatgatccgtcatggaactag

SEQ ID NO: 229555 - DNA, 312 bp, synthetic construct
  misc_feature 1..312: note = Description of Artificial Sequence: Synthetic coding sequence
  source 1..312: mol_type = other DNA
atgcttaagaaacagtccgctgggctcgtgctgtggggcgcaattttgttcgtggcctggaatgccctgctgctgttattcttctggacaaggcccgcacccggtaggccgccaagtgttagcgcgctggatggggatccggcaagcctcaccagggaggtgattcgactcgcacaagatgctgaggtggagttagaacggcaacgtgggctgcttcagcagatcggcgacgccctgtccagtcaaaggggcagggtgcctactgctgcccctccggctcagcctcgggtcccggtcactcctgccccatag

SEQ ID NO: 229556 - DNA, 600 bp, synthetic construct
  misc_feature 1..600: note = Description of Artificial Sequence: Synthetic coding sequence
  source 1..600: mol_type = other DNA
atgttaaaaaagcaatccgccggtttggtgctttggggcgcaatactgttcgtggcctggaatgccttattactcttgtttttctggactcggcctgccccaggcagaccaccttcagtgtccgccctggacggagaccctgcaagtctcacaagggaggtgatccggctggcccaagatgcggaagtggaactcgaaagacaaaggggactcctccagcagatcggcgacgcactgtcttcacagaggggacgggttcctaccgccgctcccccagcccagccacgcgtacctgtcaccccagcacccgctgttatcccaatcctggtaatagcgtgcgacagatctactgtgagaaggtgcctggacaagctgctgcattacagaccctcagccgagcttttccctattatcgtgagccaggattgtggtcatgaagagaccgcccaggcgatcgcctcctacggctccgcagtaacccatatccgccagcccgacctgagtagtatcgccgtcccacccgaccatcgcaaatttcagggatattataaaatcgcgcgacactataggtgggccctgggacaggtgttccgccagtag

SEQ ID NO: 229557 - DNA, 336 bp, synthetic construct
  misc_feature 1..336: note = Description of Artificial Sequence: Synthetic coding sequence
  source 1..336: mol_type = other DNA
atgctgaaaaagcagagcgcaggtcttgtcttgtggggcgctatactcttcgtcgcatggaatgccctcttactgctgtttttttggacaaggcccgctccaggaagacccccatctgtgtccgctttggacggtgaccctgctagcctcacccgagaagtgattcgactggcccaggacgctgaggttgaactggagcggcagagaggtttactgcaacagattggggacgctctttcgtctcaacgcggaagggtgcccactgccgctcctcctgcacaaccccgagttcctgtgacccccgctcccgctgtaatccccatcttggtgatatag

SEQ ID NO: 229558 - DNA, 465 bp, synthetic construct
  misc_feature 1..465: note = Description of Artificial Sequence: Synthetic coding sequence
  source 1..465: mol_type = other DNA
atgctcaagaagcagagtgcaggcctcgtgctttggggagctattctcttcgtcgcgtggaatgcactcctactcctctttttttggactcgccctgctcctggtagaccacctagcgtatcagccttggacggcgatccagcatctctgacacgcgaggttatcaggctggctcaggacgcagaggtggaacttgaacgccagcgaggcttgctgcaacagatcggtgatgcgctcagctcgcaaagaggtcgggtccctactgccgctcccccagcccaacctcgggtgccagtaactccggcacctgcggttatccccattctagtgattgcatgtgaccgaagcacagtgagaagatgcctggataaactgttgcactaccggccttctgcggagttgtttcccatcatcgtgtcacaggattgcggacacgaggagacagctcaggccatagcctcatag

SEQ ID NO: 229559 - DNA, 105 bp, synthetic construct
  misc_feature 1..105: note = Description of Artificial Sequence: Synthetic coding sequence
  source 1..105: mol_type = other DNA
atgctgaaaaaacagtcagctggtctcgtgctatggggagccattttatttgtggcttggaacgccctcctcctgctgttcttttggaccagaccagccccatag

SEQ ID NO: 229560 - DNA, 348 bp, synthetic construct
  misc_feature 1..348: note = Description of Artificial Sequence: Synthetic coding sequence
  source 1..348: mol_type = other DNA
atgcttaagaaacagagtgcaggcctggtgctttggggtgccatcctcttcgtggcttggaatgccctgttgctcctgtttttttggacacgccctgccccaggtcgcccaccgagtgttagcgcgctcgacggtgaccccgcttctcttacaagagaggtgatccgtcttgcccaggatgccgaagttgagctggagcgccagaggggactgctgcagcagattggagacgcactgtccagtcaaaggggtagggtgcctactgccgctcctcctgcacagcctagagtgcccgtgacccccgctccggctgtaattcctattctggtgattgcttgtgaccgctag

SEQ ID NO: 229561 - DNA, 288 bp, synthetic construct
  misc_feature 1..288: note = Description of Artificial Sequence: Synthetic coding sequence
  source 1..288: mol_type = other DNA
atgttgaagaagcagtctgctgggctggttctatggggcgctattctatttgtcgcttggaatgcactcctgttgttgttcttttggacccgccctgcccctggtagacccccttccgtttcggcactggacggggaccccgcaagcctgacacgagaggttatacgcctagcccaggacgccgaagtagagctcgaaaggcagcggggattgctacagcagatcggcgatgccctctcctcacaaagaggcagagttcctactgccgcaccgcctgcacagccttag

SEQ ID NO: 229562 - DNA, 384 bp, synthetic construct
  misc_feature 1..384: note = Description of Artificial Sequence: Synthetic coding sequence
  source 1..384: mol_type = other DNA
atgttgaagaagcagagtgctgggcttgtgctttggggggctattctgttcgtggcctggaacgccctcctcctcctattcttttggacaaggccagctccaggaagaccgcctagcgtgagtgcactggatggtgaccccgcttcactgactagggaggtgatacgcctggcccaggatgccgaggtggagctggagcgccagagggggctcctgcagcagattggagacgcccttagttctcagaggggacgcgttccaaccgccgctcctcctgcacaacccagagttccagtaacccctgcgcctgccgtgatccctatccttgtcatcgcatgcgaccgcagtaccgtacgcaggtgcttggataagcttctgcactag

SEQ ID NO: 229563 - DNA, 318 bp, synthetic construct
  misc_feature 1..318: note = Description of Artificial Sequence: Synthetic coding sequence
  source 1..318: mol_type = other DNA
atgctcaaaaagcagtcagcaggtttggtcttgtggggggcaatcctgttcgtagcctggaatgccctgctgctgcttttcttttggactagacccgcaccgggtcggcctccctcggtcagcgccctggatggtgatccagcgagccttactagagaggtcattaggttggctcaggatgcagaagttgaactggaaaggcagcgtggcctcctccagcagatcggtgacgccttgtccagccaaaggggcagggtacccaccgctgcgcctccggctcagcccagggtgccggtcacccctgcacccgctgtctag

SEQ ID NO: 229564 - DNA, 1608 bp, synthetic construct
  misc_feature 1..1608: note = Description of Artificial Sequence: Synthetic coding sequence
  source 1..1608: mol_type = other DNA
atgcgactcagaaacggcacggtggccactgccctagcgtttattacgtcttttctgaccttgtcatggtacactacatggcagaacgggaaggagaaactgatcgcctaccagagggagtttttggccctgaaggagcggctcagaattgccgaacaccggatttctcagaggagctctgaacttaacacaatcgttcaacagtttaagcgtgttggtgctgagacaaatgggagcaaggatgctcttaataagttcagcgataatactctaaaactgcttaaggaactgactagtaaaaaaagcctccaggtgccaagcatatactaccatctgccgcatttgctcaaaaatgaagggagcctgcagcctgccgtacaaatcgggaatggtcggaccggcgtgagcatcgtaatggggattcccaccgttaaacgcgaggtcaagtcctatcttatcgagactttacatagtctgatcgacaacctatatcctgaggagaaactggattgcgtgatcgttgtgtttataggcgaaaccgacattgattacgtgcacggagtggtagccaacctggaaaaggaattttcgaaagagatcagttcaggtttggtggaagtaatcagcccgcctgaatcgtactatccagacctgaccaacctgaaggaaacttttggggatagtaaggagcgtgtcagatggcgcaccaagcagaatctggattattgcttcttgatgatgtatgcacaagaaaagggaatctattatatccagctggaggatgatattatcgttaagcagaactacttcaatacaatcaagaacttcgcacttcaactaagctcagaggaatggatgatcctggaattcagccagctgggttttattggaaaaatgtttcaggccccagacctgacacttatcgtagaatttatttttatgttttataaggagaagcctatagattggttactggatcacatcctttgggtgaaggtctgcaatcctgagaaggatgctaagcattgtgatcgacaaaaggctaatcttagaataaggtttcggccatcattattccagcacgtcgggctgcatagtagtctttctgggaagatccagaagctgactgataaagactacatgaaaccactgcttttaaagattcacgtgaatccgcctgctgaagtgtcgacatcgttaaaagtctaccaggggcacactcttgaaaaaacatacatgggggaagactttttctgggcaatcactccgatcgctggcgactacattctgttcaaattcgacaagcccgttaatgtcgaatcatatttgttccattcaggaaatcaagaacacccaggggatatccttttaaatactaccgtcgaggtcctgccctttaagtcagagggcctcgaaatcagtaaagaaacaaaagataagcgtcttgaggatggctacttccggattgggaaattcgagaatggtgtcgctgagggcatggtggaccctagcctgaacccaatctccgccttcaggctctccgtcatccagaactcagctgtgtgggcaattctgaacgagatccatattaagaaggccactaactag

SEQ ID NO: 229565 - DNA, 1608 bp, synthetic construct
  misc_feature 1..1608: note = Description of Artificial Sequence: Synthetic coding sequence
  source 1..1608: mol_type = other DNA
atgaggctgcgtaatgggaccgttgctaccgccctcgcctttatcacgagctttctgacgctgtcctggtatacgacatggcagaacggcaaggagaagctgatagcctaccagcgcgagttcctggcactaaaggagcggctccgaattgcagaacatcgtatatcccagagatcctctgagctaaataccatagtgcagcagttcaagcgcgtgggcgcagagaccaacggaagcaaggacgccctgaacaagtttagtgataataccttgaagctactgaaggagctgacatccaaaaagtccctacaagtcccgagtatttattatcatctgccccatctcttaaaaaacgagggctctttgcaacccgcagtccagataggcaatggcaggaccggcgtcagcattgtcatgggaattccaacagttaagcgtgaggtaaaatcttatttaatcgaaaccctccactccctgatcgataacttataccctgaagaaaagcttgattgcgtgatagtcgtatttatcggagagacggacattgattatgtccatggagtggtggccaatttggagaaggagtttagtaaagagatcagttccggcttagtggaggttatatccccccctgaatcatattaccctgatttgacaaatctgaaggagacatttggcgattcaaaggagcgggtgcggtggcgtacgaagcaaaacctggattactgttttctgatgatgtatgcgcaggagaagggcatatattatattcagctggaagacgacatcattgtgaagcagaattatttcaatactattaagaactttgctcttcagcttagcagtgaggagtggatgattctggagttttcccagttgggctttatcggcaagatgtttcaggctcccgacctcacactaatcgtggaatttattttcatgttttacaaggagaagccaattgactggctcctagatcatattttgtgggtgaaggtgtgtaaccccgagaaagacgcaaaacactgcgatagacagaaagcaaacttaaggattcgctttcgcccaagcctgtttcaacatgtgggtctccacagcagcttatcaggcaagattcagaagttgacagataaggattacatgaaacccctgttactgaaaatacatgttaaccctccggctgaggtgagcacaagtctgaaggtctatcaaggccacactttggaaaagacatatatgggagaggacttcttttgggctattacacctatcgctggcgactacattctgtttaagtttgacaaacccgtgaatgtggagagctacctgtttcattctgggaaccaggaacaccccggtgatattttattaaacaccacagtggaagtgctccccttcaagtctgaagggctggaaattagcaaagaaactaaggataagcggcttgaggatgggtactttcggatcgggaagtttgaaaacggcgtggccgaaggcatggttgatccaagccttaatccaatctccgcctttcgcctctctgtgattcagaacagcgcagtgtgggctattctgaatgagatccacatcaagaaggctacgaattag

SEQ ID NO: 229566 - DNA, 1608 bp, synthetic construct
  misc_feature 1..1608: note = Description of Artificial Sequence: Synthetic coding sequence
  source 1..1608: mol_type = other DNA
atgcggcttaggaatgggactgtggccactgcacttgccttcattacatctttcctgactcttagctggtacaccacttggcagaacggtaaagagaagcttatcgcctatcagcgcgagtttttggccttgaaggaacgcctcaggatcgctgagcatcgaatttcacagaggtcaagtgaattgaatactattgttcagcagtttaaaagagttggcgctgaaactaacggatctaaagacgcgctgaacaaattctccgataacaccttgaaactgctgaaggagttgacatcaaaaaagtcccttcaagttccttctatctattatcatctacctcacctgttgaagaatgaaggttcccttcaacccgcagttcagatcggcaacggtcgaaccggggtgagcatcgtgatggggatacctactgtcaagcgtgaggtcaagtcttacctgattgagactctgcactccctaatcgataacctttatcccgaggagaaattggactgtgttatagtggtgttcatcggtgaaacagacattgactatgttcacggggttgtcgctaaccttgaaaaggaattttcaaaagagatatcttctgggctggtggaagttatttcccctccagagtcgtactatcccgatctgacaaatctgaaagaaactttcggagatagtaaggagagggtccggtggaggacaaagcagaatctcgattactgttttttaatgatgtacgcccaagagaaagggatatactatatccagcttgaggatgatatcatagtgaaacagaattatttcaataccataaaaaatttcgccctccagctgtctagtgaagagtggatgattctggaattctcccagctgggattcatcggaaagatgttccaagccccagacctgactctgatagtggagtttatttttatgttctataaggagaaaccaattgattggctcctcgaccatattttatgggtcaaagtctgcaatcctgaaaaggatgcaaagcattgcgaccggcagaaggcaaacctgcgaatccgctttcgaccctcactgttccagcatgtcgggctccactcctctctatcaggcaagatccagaagctgaccgacaaagactatatgaagccactgctgttgaaaatccacgtgaaccccccagcagaggtttccacatcgctcaaagtgtaccagggtcacacgttagaaaaaacatatatgggtgaggacttcttttgggccatcactcccatcgcaggggactatatcctgtttaaatttgacaagcccgtcaacgtggaatcttacctcttccattcaggtaaccaggagcatccgggtgacattctgctcaatactactgtggaggtgctgccattcaagagcgaaggactggaaatctccaaggagaccaaggacaaaaggctggaggacggatacttcagaatcggaaagttcgaaaacggggtggcagaggggatggttgacccaagcctgaaccctatctctgcatttcgtctctctgtgattcagaattcggccgtctgggccattcttaatgagatccacattaaaaaggctacaaactag

SEQ ID NO: 229567 - DNA, 1272 bp, synthetic construct
  misc_feature 1..1272: note = Description of Artificial Sequence: Synthetic coding sequence
  source 1..1272: mol_type = other DNA
atgaattactccatcacagtcagcatagtaatgggcattcctactgttaagcgggaggtgaaaagttacttgattgagacactgcattcgctaattgacaacctgtaccctgaggaaaagctggactgtgttatagtggttttcatcggtgaaaccgatatcgattacgttcatggcgttgtcgctaatctggagaaagagttttcaaaagagatatcatcagggctggtagaagtgatctcccctcctgagtcctactatcccgatctgaccaacctgaaggaaacgttcggggactcgaaggagagggtacgctggcgcacaaagcagaacttggactattgctttctgatgatgtacgcacaggaaaaggggatttattacatccagctagaggacgacattatcgtcaaacagaactattttaatactatcaagaacttcgctctgcaactgagttcagaggaatggatgattctggagttttcgcagctgggatttattggaaaaatgttccaggctcccgacctgacgcttatcgtggaattcatttttatgttctacaaagagaaaccaattgactggctcctggaccacattctttgggtcaaagtgtgtaatcccgagaaggacgccaagcactgcgatagacaaaaagccaaccttaggatccgttttcgaccttccctgttccaacacgtgggcctgcattctagcttaagtggcaaaatccagaaacttactgataaggactatatgaagcccctccttctcaaaatccatgtaaatccgcctgcagaggtgagcacatccctaaaagtgtaccaaggacatacgctggagaaaacgtatatgggcgaagattttttctgggcaataacaccaatcgctggagactatatcttgtttaagtttgataagcctgtgaacgtggagtcctatttgtttcattccggaaatcaggaacatcccggtgacattctcctgaatacgaccgttgaggtgctcccctttaaaagtgagggattggagattagtaaggagacaaaggataaaaggctcgaagacgggtatttcaggatcggcaagtttgagaatggcgtcgcagaagggatggtagatccttcactcaatcccatttccgcgttccgactaagcgtcattcagaattcagccgtgtgggccatattgaatgagcagagggttttttctggatggtggcagaaatcacgtgacaaggccgagggccctcaggctccactgctcttttag

SEQ ID NO: 229568 - DNA, 1647 bp, synthetic construct
  misc_feature 1..1647: note = Description of Artificial Sequence: Synthetic coding sequence
  source 1..1647: mol_type = other DNA
atgagactcagaaacgggaccttcttgacactactccttttttgcctgtgtgcatttctgtccctgtcgtggtacgccgctcttagcgggcagaaaggcgacgtggttgacgtttaccagcgtgagtttctagccctccgcgaccgactccatgcggctgaacaagagtcccttaaaaggagtaaagagctgaacctcgtgcttgacgagattaagcgagctgtctcagagcgccaggctctgagggatggggacggtaaccggacctggggcagactcactgaagatcctcggcttaaaccttggaatggttctcataggcacgttctacatctgccgaccgtttttcaccacctgccacaccttctggcaaaggaatcctctcttcagcctgcggtgagagttggccaaggccgtaccggagtgtccgtcgtaatgggaatcccgtccgtgagaagggaggtccattcctacctgactgatacgctccactccctgatttctgagttgagcccccaagaaaaagaggatagcgtgattgtggtgttgattgcggagaccgactcacaatatacatctgccgtaaccgagaacatcaaggctctctttcctacagaaatccactccggcctccttgaggtgatctctccatcacctcatttctacccagacttttctaggctgcgggagagcttcggagatcctaaagagagggtgcggtggcggacaaagcagaatctggattactgcttcctgatgatgtatgcacagagtaaagggatttactacgtacaattagaagacgacatagtagccaagcctaactacctcagtacgatgaagaactttgcactccaacagccatcggaggactggatgattcttgaattcagccagcttgggttcatcggcaagatgttcaagtcactggacttatcccttatagtagagtttatcctcatgttttatcgtgacaagcctatcgattggttgctagaccacattctttgggtcaaagtgtgcaatcctgagaaggatgctaagcactgcgaccggcagaaggctaacctaagaattcgatttaagccctccctcttccaacacgtgggaacacattcatccttggccggaaaaattcaaaagctgaaggacaaagatttcgggaagcaggctttacggaaggaacatgtgaatcctcccgctgaagtctcgacatctttgaaaacttaccagcactttactttggagaaagcttatctgcgtgaggacttcttttgggccttcactccggctgccggtgatttcatcagatttcgcttctttcagccccttcgcctggagagatttttcttcagatccgggaatatcgagcatccagaggataagctcttcaacaccagcgtcgaggtcctgccattcgacaaccctcagagcgataaggaggccctgcaggaggggagaactgctaccctccgctacccaaggtcccccgacgggtacctgcaaattggctctttttacaagggagtcgctgagggggaagtggacccggcttttggaccattagaggccttgaggttatccatacagacggactcacccgtgtgggtcatcttgagcgagatctttctcaagaaggcagactag

SEQ ID NO: 229569 - DNA, 1692 bp, synthetic construct
  misc_feature 1..1692: note = Description of Artificial Sequence: Synthetic coding sequence
  source 1..1692: mol_type = other DNA
atgagcagggtcgccggaacccgaacggacgtaaacgagctgctgcagaggtggacacccagatgcgtacggtggcacaccggaggcgctcgcagagtagccctcgaccggcctctggtaaccgcctgccttcctcccgctggagatgtggtcgatgtctaccaacgggaatttctggcccttagagaccggctccacgctgcagagcaggagagtctgaagcgtagcaaagagctgaatctggtcttggacgagataaagagagctgtgtcagaacgccaggccctcagagacggggatggaaaccggacctgggggagactcacagaggacccccgattgaagccatggaatggatcacacagacacgtgcttcacctaccaaccgttttccaccatctaccacacctcctggccaaggagagcagcctccaaccagctgtcagagtgggccaaggaagaactggagtcagcgtggtgatgggtatcccgagcgtgcggcgagaagttcattcctatctgacggacaccctccatagccttatcagcgagttgagcccccaggagaaagaagacagcgtgatcgtggtgttaatcgcagagaccgattcccagtacactagcgctgttaccgagaatataaaggccctgttccccacggaaattcattcaggtttgcttgaggtgatttctcccagtccacatttttaccctgatttttctaggctgcgggagtcctttggcgaccccaaggaacgcgtccggtggcggacaaaacaaaacctggattattgctttctcatgatgtatgcccagtccaagggaatctattacgtgcagctggaggacgatatcgtagccaaacccaattatttgtcgaccatgaagaacttcgccctgcagcagccaagcgaggattggatgatactggaattttcccagcttgggtttatcggaaagatgtttaagtcactcgacctgtcactgattgtcgaattcatcctaatgttctaccgggataaacccattgattggctgctcgaccacatactctgggttaaggtctgcaatcccgagaaggatgctaagcactgcgaccgtcaaaaggccaacctgcgaatacgctttaaaccctctctgttccagcatgtggggacccattcgagtctcgctgggaagattcagaaacttaaagacaaagacttcggcaagcaggccttaagaaaagagcacgtgaacccccctgccgaagtgagcacctccctgaagacataccagcacttcaccctcgaaaaggcatacctccgagaagactttttttgggcattcacgccagccgctggcgatttcatcaggttccgatttttccagccactgagactggaacgctttttttttagaagtggaaatattgaacatcccgaagacaagcttttcaacacaagcgtcgaagtgctgcctttcgacaatccacagtctgacaaggaagccctgcaagagggcaggaccgccaccttgcggtatcctaggtctcccgatggttatctccaaatcggcagcttttacaaaggtgttgcagaaggtgaggtggaccctgctttcgggccattagaggccctgcgtctgagcatccagacagatagtcccgtctgggttatcctctcagagatttttttaaaaaaggctgattag

SEQ ID NO: 229570 - DNA, 1344 bp, synthetic construct
  misc_feature 1..1344: note = Description of Artificial Sequence: Synthetic coding sequence
  source 1..1344: mol_type = other DNA
atgcgcttccggatctacaaacggaaggtgctgattctcactctggttgtggccgcttgcggctttgtgttgtggtcttctaacggaagacaaagaaaaaatgaggcgctcgcccctcccttgctggacgccgaacccgcacgcggagcagggggacggggaggagatcatcctagtgtcgctgttggcatccggagggtgtctaatgtttccgccgcttcgctagtccccgcagtaccccaacccgaagctgacaacctgaccctacgctatcggtcgctggtctaccagcttaattttgatcagactctgcgaaacgtggataaagcaggaacctgggcacctagagagttggtgctggtagtgcaggtacacaaccgtccagagtatctgagattgctgctcgactccctgagaaaagcccagggcattgataacgtactggttatcttctctcacgatttttggtcaactgagataaaccaacttatcgcgggagtgaatttctgtcccgtgctacaagtattcttcccctttagcatacagttatatccaaacgaattcccgggatcagacccccgagactgccccagagatctgcctaagaatgctgctctcaagctgggatgtattaatgccgaataccccgattcattcggccactatagagaggccaagttctcccaaacaaagcaccattggtggtggaaactgcactttgtttgggaacgggtgaaaatactgagggactatgcaggactaattctgttcctggaggaagatcattatttagcgccagatttttatcatgtgtttaagaagatgtggaagttgaaacagcaggagtgtcccgaatgcgacgtgttaagtctcgggacctatagtgcgtcccgatctttttacggcatggcagataaggtggatgtcaaaacctggaaatccaccgagcacaacatgggcttggctctcactagaaatgcctaccaaaagctaattgagtgcaccgacacattctgcacatacgacgattacaattgggactggactttgcagtaccttactgtgtcttgcctgccaaagttctggaaagtgctagtgccccaaatccctaggatttttcacgccggtgattgtggcatgcaccataagaaaacttgcaggccctccacgcagagcgcccagatagagagcctgctgaacaacaataagcagtacatgttcccggagacgctgacaatctccgaaaagttcaccgtggttgcaatctctccgcctaggaagaacggaggctggggagatatccgagaccatgagctgtgtaaatcttatcgaagactccagtag

SEQ ID NO: 229571 - DNA, 1362 bp, synthetic construct
  misc_feature 1..1362: note = Description of Artificial Sequence: Synthetic coding sequence
  source 1..1362: mol_type = other DNA
atggagagaactgaaacaatgcgctttcgcatctataaaaggaaggtgctgatcctgacacttgtggtggccgcttgcggctttgtgctttggtcctccaatgggaggcagcggaagaacgaggccctggcccctcctttactggacgccgagcccgctcgcggagccggaggacgcggaggcgaccatccgtccgttgccgtgggcattcgccgtgtcagtaacgtctcagccgcaagcctggtcccagcagtaccacagcctgaggccgacaatctgaccctgaggtaccggtcgttagtgtatcagctgaatttcgaccagactctcagaaatgtggacaaagccggtacgtgggctccccgagaactagtcctcgtggtccaggtgcataatcgtcctgagtatctgcggttgttactcgacagcctgcggaaggcacaggggatcgataacgtcctggtcatcttctcacacgacttttggtctactgagattaatcagctgattgctggtgttaatttctgcccagtcctgcaggtgtttttccccttctccattcagctataccccaatgagttcccagggtctgatccgcgtgattgtcccagggacctgccaaaaaacgcagccctgaaactcggctgcatcaacgccgagtaccccgactcattcggccattaccgtgaggcaaaatttagccaaactaaacaccactggtggtggaaactgcacttcgtgtgggaacgggtcaaaattctgagagactatgccggactcattctgttcttagaggaggaccactacctcgcgccagatttctaccacgtattcaagaaaatgtggaagcttaaacagcaggagtgtcccgaatgtgacgttctgagcctgggaacttacagcgcctcaagaagtttctatggcatggctgataaggttgacgtcaagacatggaagagcaccgaacacaacatgggtttggcactgaccagaaacgcttaccagaagctgattgagtgcacagacaccttttgtacttatgacgactacaattgggattggacactacagtatctcacagtctcttgtctccctaagttttggaaggtgctggttccacaaataccaagaatctttcatgctggcgactgtggcatgcatcataagaagacttgtcggcctagcacccagtctgcccaaatcgagagtctgctgaacaacaataaacagtacatgttcccagagactcttacaatatccgaaaagtttaccgtggttgcaatctcaccgcctcggaaaaacgggggatggggtgatatcagggaccatgaactctgcaagtcctaccgacggcttcagtag

SEQ ID NO: 229572 - DNA, 2373 bp, synthetic construct
  misc_feature 1..2373: note = Description of Artificial Sequence: Synthetic coding sequence
  source 1..2373: mol_type = other DNA
atgatcacagtgaaccccgatggaaagattatggtgcgacgctgcttggttaccctgcgccctttcagactgttcgtgcttggcataggtttctttacgctgtgcttccttatgacctctcttggcggacagttttccgccaggcggcttggtgattctcctttcacaatacggactgaggtgatgggtgggccagagtcacggggagtacttaggaaaatgtctgacctgctggagctgatggttaagcgtatggatgccctagctagactcgagaattcatctgagctgcatcgcgcagggggtgacctgcacttccccgcagatcgtatgcctcctggtgccggtctgatggaacggatccaggcaatcgctcaaaacgtctccgacatagctgttaaggtcgaccagatcctgcgacacagtttgcttctgcacagcaaggtgagtgaagggcgacgggaccaatgcgaagctccctccgatccgaaatttcctgactgctccggcaaggtggagtggatgagggcccgatggacttctgatccatgctacgccttttttggcgtcgacgggaccgagtgtagtttcctcatctatctcagcgaagttgaatggttctgtccacctctgccttggaggaaccaaacagctgcccaacgcgcacccaagccgttacccaaggtccaggctgtgttcagaagcaacctttcacaccttcttgaccttatgggatccgggaaagagtcactgatcttcatgaaaaagaggaccaaacggctgaccgcgcaatgggccctcgccgcacagagattggcccagaagcttggcgctacacagcgcgaccagaagcaaatcttagtgcatatcgggtttctcacagaagaaagcggggatgtattcagccctagagtgctgaaaggcggaccgctcggagaaatggtacaatgggcagatatcctcactgctttatatgttcttggacatggactgagagtcacggtgagcctgaaggaattacagtcaaaccttggcgtcccacccggtagaggcagctgccctcttaccatgcccctgcccttcgatctgatctatacggattatcacggtctccaacagatgaaacggcacatgggtctgagttttaaaaaatataggtgtagaatccgtgtcatcgacacattcggtaccgaacctgcctacaatcatgaagaatatgccactctgcatggctataggaccaactggggatactggaaccttaaccccaagcagtttatgacgatgttcccacacactcctgataacagcttcatgggatttgtgtctgaagagctgaacgagaccgaaaagagactaattaaggggggaaaagcctctaatatggctgttgtatacgggaaagaggcgtcaatttggaagggcaaggagaagtttctgggcatcttaaataaatacatggagatacatggaacagtgtactatgaatcacagaggccccctgaagtgccagccttcgtaaagaatcacggactgctcccccagccagagttccaacagctgctacgaaaagctaagttgtttatcggcttcggcttcccatatgagggcccagctccacttgaagcaattgccaatggatgtatttttttacagagccgcttttctcctccccacagctcactgaatcacgagttttttcgcggaaaacctacttccagggaagtattctcccaacatccatacgcagagaattttatcgggaaacctcacgtttggacggtcgactataacaattccgaggaatttgaggccgcaatcaaggccatcatgaggacccaggtggatccttatctgccgtacgaatacacatgcgaagggatgcttgagaggatccacgcctacattcagcaccaggatttttgtagagcacccgatcctgctctccctgaagcccatgccccacagtcacccttcgtcctggccccaaatgcaactcacctggagtgggctcggaatacatcccttgccccaggagcctggccccctgcacatgcccttcgtgcttggctggccgtgccgggacgtgcttgtaccgacacatgcctggaccatggcttgatttgcgaaccgtcttttttccccttcctgaactcccaggacgcttttttgaagttgcaggtgccttgcgactctacagaatctgaaatgaaccacctgtaccctgcatttgcccaaccaggtcaggaatgttacttacaaaaggaaccactcttgttcagctgtgctggttctaacacaaagtatcggagactgtgtccctgccgggattttcgtaagggacaagtagccctctgccagggatgtctgtag

SEQ ID NO: 229573 - DNA, 1185 bp, synthetic construct
  misc_feature 1..1185: note = Description of Artificial Sequence: Synthetic coding sequence
  source 1..1185: mol_type = other DNA
atgataaccgttaatcccgacggaaaaattatggttagacggtgcctggtgacgctgaggccttttaggctgtttgtactaggcattgggttttttacgctgtgtttcctgatgaccagcctgggaggacagttctcggccagacggctgggggatagccccttcacaatcaggacagaggttatgggcggacccgagtcccggggagtcctgcgtaagatgtctgatttgctggagctcatggtgaaacggatggatgccctggccaggctagagaactcgagcgagttgcatagggcaggcggagatctacactttccagccgaccgcatgccaccgggagccggtcttatggagagaattcaagcgatcgcccaaaacgtgtctgatatcgctgttaaggtggaccagattctaaggcattccctgctactccattctaaagtgagcgagggccgaagagatcaatgtgaagcacctagcgatcctaagttcccagactgttccggcaaagtggaatggatgagggccaggtggacgagcgatccctgttacgctttttttggcgtggacgggactgaatgcagctttcttatctacctctctgaggttgaatggttttgtcctccactcccctggagaaatcagactgccgctcagcgtgctcctaagcccctacccaaagtgcaagcggttttccgaagtaatttgagccacttgctggatttgatggggagcgggaaggaatccttgatcttcatgaaaaagcgtacaaaacgtctgaccgctcagtgggctctggcggctcaacgcctggcccagaagttgggcgctactcaaagggaccagaaacagattctggttcacattggattccttacagaggaatccggggacgttttttcacccagagttctgaaggggggtcccttgggtgagatggtgcagtgggccgatatccttacagctctctacgtcctggggcatggtctaagggtcaccgtctcactcaaggagctgcaacgacagcggcgactgaggtcgtcccaagagcaggcccgttgtggagtcatgggcgcatgtgaaaaaatgctgctcgagggagatgtagcctctaacacactactgattgagaaaccctcaaaaaaggagacagagaagtgtcccaagaatctagtgacttag

SEQ ID NO: 229574 - DNA, 2406 bp, synthetic construct
  misc_feature 1..2406: note = Description of Artificial Sequence: Synthetic coding sequence
  source 1..2406: mol_type = other DNA
atgcactcctttgtcaaacacttgtgcagcaggtatgtggtggaaaggcagggaacgatggctctgcccgctttactcaccaggctccttcctctgcgacgtctcttcgtgctggggattggcttctttactctttgctttctcatgactagtcttggtggacagttttccgcaagacggctgggagacagcccctttactattaggacggaagtgatgggcggtccggaatctagaggagtactgaggaaaatgagcgatctcctggagctgatggtcaaacggatggacgctctggccaggttagaaaattcttcagaactccacagggctggaggtgacttacactttccagccgatagaatgcccccaggagcaggactgatggaaaggatccaggcgattgcccagaatgtgtctgatatcgctgtcaaagtggaccagattttgagacactcactattgctccacagtaaagtgtcagaaggtagacgcgaccagtgtgaagctccctccgaccccaaatttccagactgcagtggcaaagtcgagtggatgagagctcgttggaccagtgacccttgctatgcatttttcggtgtggacggtaccgagtgctcattcttgatttacctcagcgaggttgagtggttctgccctccactgccgtggcgaaaccagactgctgcccaacgtgcccctaagcctctaccaaaagttcaggccgtgttccgttccaatctgagtcacctgctggatcttatgggaagcgggaaggaaagccttattttcatgaagaagaggactaaaagactcactgcacagtgggcgctggccgcacagcggctcgctcaaaagctcggcgctactcagcgggatcagaaacagatcctagtgcatataggctttttgactgaagagtctggcgatgtattcagtcccagagtacttaaggggggacctcttggagagatggtccagtgggcagatatcttgacagccttgtacgttcttgggcacggcctgcgagtcactgtctctctgaaagagctgcagagcaacttgggcgtcccaccaggacgaggatcttgtccactaactatgcccctgcccttcgatctaatctacaccgactaccacggccttcagcagatgaagcgacacatgggcttatcattcaagaaatatagatgtaggatcagggtgattgacacctttggaactgaaccagcttataatcatgaagaatacgctacattgcatggatatcggaccaattggggatactggaacctgaaccctaaacagttcatgacaatgttccctcacactcctgataatagcttcatgggatttgtgagtgaagagctcaatgaaacagagaagaggctcattaaaggcggtaaggcaagcaatatggctgttgtgtacggaaaagaagcctccatctggaaaggcaaagaaaaattcttggggatcctcaacaaatatatggaaattcacgggactgtttattacgaatctcagcgccctccagaagtgcccgcttttgtgaagaaccacggcctgttgccgcagcccgaatttcagcagctcttgcgtaaggcaaaattgttcattgggttcggtttcccctatgaaggacctgccccacttgaagcaatcgcaaacgggtgcattttcctccagagcagattctcgcctcctcatagttctctgaatcatgagtttttccggggaaaacccacgtctagagaagtgttctcccagcatccctatgcggaaaacttcatcggaaaaccccatgtgtggacggtagactataacaactccgaagaattcgaggctgcgattaaagcaatcatgagaacacaggtggacccatacttgccgtatgagtacacctgcgaaggtatgcttgaaaggatacacgcttatatccagcatcaagacttttgccgcgctcccgaccctgccctgcctgaagcacatgccccacagtccccgttcgtcctggccccaaacgccactcatctggaatgggccagaaacacttctctcgccccaggagcctggccccctgctcacgcacttcgggcatggctggctgttcctggacgggcttgcacagacacgtgtctagatcatgggttgatttgtgagccaagcttcttcccgttcctcaattcacaagacgcctttttaaagctgcaggtgccatgtgatagcaccgaatcagaaatgaatcacctgtacccggctttcgcccaaccgggacaagaatgttacctgcaaaaagaaccactgctgttcagttgcgccggatccaacacaaaataccggagactctgcccatgtagagattttaggaagggccaagtcgccctgtgccagggttgcctgtag

SEQ ID NO: 229575 - DNA, 1602 bp, synthetic construct
  misc_feature 1..1602: note = Description of Artificial Sequence: Synthetic coding sequence
  source 1..1602: mol_type = other DNA
atgaagatgcgtaggtacaagctgttcctgatgttttgtatggcagggctatgtctcatcagctttttacatttcttcaagacactgtcttacgtgacttttccccgagaactagctagtctgagtccgaatcttgtgtccagtttcttctggaataacgcacccgtgacgcctcaggcgtccccagagccagggggtcctgatctgctgagaacgccgctttactcgcattcacccctactccagccattgcccccttccaaggctgccgaagagttgcatcgagtggatctggtcttgcctgaggataccactgaatacttcgttcgaaccaaggccggaggcgtgtgctttaaacctgggacaaaaatgctggaacggcctccacccggacgcccagaagagaagcctgagggggcaaacggctctagcgcccgtcgcccacctcgatacttactttcggccagagagcggactggaggacgcggagcgaggcgaaaatgggtggaatgtgtgtgcctgcctggatggcacggaccatcctgtggggtgcctactgtagttcaatacagcaatctgcccactaaggagcggctggtgccccgtgaagtgcctcgacgggtcatcaacgcgatcaacgtgaatcatgagtttgacctcctagacgtgaggtttcacgaattgggcgacgttgtggatgcgttcgtggtttgcgagagtaatttcacagcctacggagagccgaggcctctgaaattccgcgagatgttaacaaacggaaccttcgaatacatccggcacaaggtgctgtatgttttcctcgaccatttcccgcctggaggccgacaggatggttggattgcagatgattacctgagaactttccttactcaggacggggtttcaagattacggaatcttagaccagatgacgtttttatcatcgacgacgcagacgagattccggctagagatggcgtgctttttctcaagttgtatgacggctggactgagcccttcgcatttcacatgcgtaaatccctctacgggtttttctggaaacagccgggtactctagaggttgtgagcggttgcaccgtcgatatgttacaggcagtttatgggttggacgggataagactaagacgcaggcaatactatactatgcccaactttcgtcagtacgagaaccgcaccggacacattcttgtgcagtggtccttaggcagtcctctccacttcgctggttggcactgctcctggtgttttacgcctgaggggatttacttcaagttggtgtccgcacagaatggggattttccaaggtggggggactatgaggataagcgagatctaaattacattcgaggcctaatccgtaccggagggtggttcgacggcactcagcaggaataccctcccgcagatccatctgaacacatgtacgctcctaagtatctcctgaaaaactacgacagatttcactatcttctcgacaacccctaccaggaaccacggtctactgctgctggtggttggaggcaccgaggtcccgaaggccgaccacccgcaaggggaaaactggacgaggccgaagtgtag

SEQ ID NO: 229576 - DNA, 327 bp, synthetic construct
  misc_feature 1..327: note = Description of Artificial Sequence: Synthetic coding sequence
  source 1..327: mol_type = other DNA
atggaatcctgttcgtgccaccccggaagcggcgtgcagtggagggaccacggaagcctgcagctgccgccaccaggctttaagatgaagatgaggagatacaaactgtttctgatgttctgcatggccggactctgcctgatctcttttctgcatttcttcaagaccctttcttacgtgacctttccacgggagttggctagtcttagtccaaatctggtttcgagttttttttggaataatgccccagtgaccccccaggcgtctccagagccaggcggacccgacctgcttcggaccccgctttatagccattcccctttgtag

SEQ ID NO: 229577 - DNA, 486 bp, synthetic construct
  misc_feature 1..486: note = Description of Artificial Sequence: Synthetic coding sequence
  source 1..486: mol_type = other DNA
atgaaaatgaggaggtacaaactgttcctgatgttttgtatggcaggcctctgtcttatatcgttccttcatttctttaagaccctttcctatgtgactttccccagggagctggccagtttaagcccgaatctggtgtcatcctttttctggaataacgcacctgtaaccccccaggcttctcctgagccgggagggcctgatttgttgcggacaccgctttattctcacagtcccctcctgcagcccctgcctcccagtaaagccgcagaagagctgcatcgcgtggacctggtcctccctgaagatactactgagtattttgtcagaaccaaggccggaggggtttgtttcaagcccggtaccaagatgctcgagcgcccacccccagggcgaccagaggagaaacctgaaggagctaatggctctagtgcacggaggccaccccgttacctgctgtcagcacgggagcgcactggcggatag

SEQ ID NO: 229578 - DNA, 1044 bp, synthetic construct
  misc_feature 1..1044: note = Description of Artificial Sequence: Synthetic coding sequence
  source 1..1044: mol_type = other DNA
atggtctccagtcaaaaactggaaaagcctatcgaaatggggtcctcagagccattgcccatagctgacggggatcgcagaagaaagaagaaacggaggggccgtgccaccgacagcctgcccggtaaatttgaggacatgtataaattgaccagcgaactgttgggcgaaggcgcttacgccaaggtccaaggagccgtgtcactacagaatggaaaggaatacgccgttaagataatcgagaaacaggctgggcacagccggtcaagggtttttagggaggttgagacactgtaccagtgccaggggaacaagaacatcttggagttaattgaatttttcgaggatgatactagattttacctggtgtttgagaagctacaagggggaagcattctggcccacattcaaaagcaaaagcatttcaacgagagggaggctagtagggtggtgagagacgtggcggctgcactggacttcctgcataccaagggaattgcacaccgtgatctcaagccagagaacatcttgtgtgaatctcccgagaaggtgagcccggtgaagatatgtgatttcgatctgggcagcgggatgaagctgaataacagctgcactcccatcacaaccccagagctcaccacgccttgcggctcagcagaatacatggcacccgaggtggtggaagtgttcactgatcaggccaccttttacgacaagcggtgcgacctgtggtccctgggcgttgtgctctatatcatgttgagcggctatcctccctttgtgggtcattgcggggctgactgtggctgggatcgcggagaggtatgtcgagtgtgccagaataagctattcgaatccatacaggaaggcaaatacgagtttcctgataaggactgggcccacatcagctccgaggccaaagacctgatcagtaagttgctggtaagagatgccaaacagcgtctgtcagccgcacaggtactccagcacccatgggtgcagggggagcagcaacacaacggacccgacgcactgaggtcctag

SEQ ID NO: 229579 - DNA, 990 bp, synthetic construct
  misc_feature 1..990: note = Description of Artificial Sequence: Synthetic coding sequence
  source 1..990: mol_type = other DNA
atggcgaaatcaatgccatctaaatccagcagaaacaagcagggcaccgttggagtaggatgctttgagagatggcgccgatgcatctccgtgagagaaacctcctctatcctggcccatattcagaagcaaaagcacttcaacgaacgcgaggcctctagggtcgttcgggatgtcgccgctgccctagatttccttcatacaaaagggatagctcatcgggacctcaagccagagaacatcctttgtgagtcccctgagaaagtatctccagtgaaaatatgtgactttgatctgggcagcggcatgaaactcaacaactcttgtacccctatcactacccccgaactaaccaccccctgtgggtccgccgagtacatggccccagaggtagttgaagtgttcactgaccaggctacattttatgacaaacggtgcgacctatggtctctgggggtggtgctctacatcatgttgagcggatatccccctttcgtgggacattgcggcgctgactgtggatgggaccgcggtgaggtgtgtcgggtgtgtcaaaataaactgtttgaatccatacaagagggcaaatatgaatttcctgataaagactgggctcacatcagctccgaggcaaaagacctcataagcaagctccttgtacgcgacgccaagcagcgactaagcgccgcacaggttctgcagcacccgtgggtccaggggcaggccccagagaagggactgcccaccccacaggttctgcaaaggaactctagcacaatggaccttacactgtttgcagcagaggcaatcgctctgaaccgtcaattgtctcagcatgaggagaatgagcttgcagaagagcccgaggccttggcagatggtctatgctctatgaagctatccccaccttgcaaatccaggttggccagacggagagctctggcacaggccggtaggggtgaggacaggtcccccccaactgcactgtag

SEQ ID NO: 229580 - DNA, 1275 bp, synthetic construct
  misc_feature 1..1275: note = Description of Artificial Sequence: Synthetic coding sequence
  source 1..1275: mol_type = other DNA
atggtgagttcacaaaaactggagaagccaattgaaatggggtcatctgaaccactgcccatcgccgacggtgatcgccgaaggaagaaaaagcgccgaggccgagccaccgactcactgccgggtaagtttgaagatatgtacaagctgaccagcgagctgctgggcgaaggtgcctatgcaaaagttcagggcgcagtgagtcttcaaaacggcaaggagtatgcggttaagatcatcgagaaacaggccggacactcgaggtctcgtgtttttagggaagtcgagacgctgtaccaatgccaggggaacaagaacattcttgaactaatcgagtttttcgaagatgataccaggttctacctcgtatttgagaagttgcagggcggaagcatcctggcacatatccagaaacagaaacacttcaacgagcgcgaagccagcagggtcgtgcgtgatgtggcggctgctctcgatttcctccatacgaaaggaatcgcacacagggacctgaagcctgagaatatcctctgtgaaagtcctgagaaggtttcgcccgtgaagatttgtgactttgacctcgggagcgggatgaaacttaataactcgtgcacgcccattactacaccagaactcaccaccccctgtggttctgctgagtacatggcgcctgaagtcgtagaagtctttacggatcaggccactttctatgacaaacggtgcgacctctggtctcttggggtcgtactgtatattatgttgtctgggtatccaccttttgtcggccattgcggggcagactgtgggtgggaccgaggggaagtctgtagagtttgtcagaataagctattcgagagcatccaggaagggaagtacgaatttcctgataaagattgggcacacatcagctccgaagccaaggacttgatcagcaaactcttagttagagatgccaaacagcggctctcggccgcacaggtgcttcaacatccttgggtgcaggggcaggctcctgagaagggattgcccacacctcaggtcctccagcgtaattcatcaacaatggatctcacgctctttgcagcagaagccatcgcacttaacagacagttaagccaacacgaggaaaatgagcttgctgaggaaccagaggcgctcgcagatggcctctgctcaatgaaactgtctccaccttgcaaatccaggttggccaggagaagagctcttgcacaggccggacgcggagaggatagaagcccaccaactgccctatag

SEQ ID NO: 229581 - DNA, 1398 bp, synthetic construct
  misc_feature 1..1398: note = Description of Artificial Sequence: Synthetic coding sequence
  source 1..1398: mol_type = other DNA
atggtatcctcccaaaaactggagaagccaattgaaatggggtcttccgagccccttcccatagcggatggagaccggaggaggaaaaaaaagagacgaggaagagccaccgattctttgccaggtaaattcgaagacatgtacaagctgacaagtgagctcctgggcgaaggagcatacgctaaggtgcaaggcgctgtgagcctacaaaatggcaaggaatacgccgtgaagatcatcgagaagcaagccggtcatagcaggtcccgcgttttccgtgaggtggaaaccctgtaccagtgccaaggcaacaaaaacatcctggaactcatcgaatttttcgaagacgatacaaggttttacctagtcttcgaaaagctgcaagggggtagcattctggcacacatccaaaagcagaaacatttcaatgagcgagaagcgtcacgcgtagtcagggacgtggcagccgctctggattttctgcacactaaagataaggtgtccttgtgccatctggggtggagtgcaatggccccttccgggctgaccgctgcaccaacctctttggggtcctcagaccctccaaccagcgctagtcaagttgccggtaccaccggcattgcacaccgtgacctcaaaccggagaatatcctgtgtgagtctccagaaaaggttagcccggtgaagatatgcgactttgatctgggcagcggtatgaaattaaacaattcctgtactcccattactactccggaactcactacaccttgcggttcagccgaatatatggcccctgaggtggtggaggtattcacagaccaggccactttctacgataaacgttgtgacctgtggtctcttggtgtggtcttatatattatgctgtcggggtacccaccattcgtcggacactgtggagccgattgcggatgggataggggcgaggtctgcagggtgtgccagaataagctctttgaaagcatacaggaaggcaagtacgagttccctgataaagactgggcccatatttcatctgaggctaaggacctaatatcaaagttgctcgtccgagatgccaaacaacgcctaagcgccgcacaagtgctccagcacccctgggtgcagggtcaagcacccgagaagggcttaccaacaccccaggtacttcagagaaattcctcaacaatggacctgacgctatttgccgctgaggccattgccctcaatcgccagctgtcacaacacgaagagaatgaactcgcagaggagccagaagcgctcgccgacggcctatgctcaatgaagttgagccctccatgcaagagtaggctagcccgtcgccgagcgctcgcccaggccggtagaggtgaggatagatctccaccaactgcgctgtag

SEQ ID NO: 229582 - DNA, 1044 bp, synthetic construct
  misc_feature 1..1044: note = Description of Artificial Sequence: Synthetic coding sequence
  source 1..1044: mol_type = other DNA
atggtgagctctcagaagctggagaagcccatagagatgggatcctcagagcctttaccaatagctgacggagaccgcaggcggaaaaagaaaaggcgcggacgcgcaacagatagcctccccggaaaattcgaagatatgtacaagttaacttcggagttgctgggtgaaggcgcttatgccaaggtacagggtgcagtgtcacttcagaacggaaaagagtacgcggtcaaaatcattgaaaagcaagctggtcatagccgaagtagagtgttcagggaggtcgaaacactatatcaatgccagggcaacaaaaacatccttgagctgattgaatttttcgaggacgacacacgtttttaccttgtgttcgagaaactacagggtggatccatcttggcccatatccaaaagcagaagcacttcaacgagagagaggccagccgcgtcgtaagagacgttgccgctgccctggacttcctgcatacaaaaggcatcgcgcaccgggatttgaagcccgagaacatcctgtgtgaatctccagagaaggtcagccctgtcaagatttgcgacttcgatctgggtagcggcatgaagttaaacaattcctgcacaccaatcactacacccgaactgaccaccccctgcggcagcgccgagtacatggctccagaggtggtcgaggtctttacggaccaagctacattctatgataaacgttgtgatctgtggtctttgggcgtagtcctttatatcatgttgtctgggtacccccctttcgtaggccactgcggggctgattgcgggtgggatcggggtgaggtatgtagggtgtgtcaaaataagctttttgaatcaattcaagagggcaagtatgaatttcccgacaaagactgggctcatattagctccgaagccaaggacctgatctctaaactgttagttagggacgcaaagcagaggctgtcagccgcacaggtgcttcagcacccgtgggtgcagggcgagcagcaacacaatggtcccgatgcccttcgctcctag

SEQ ID NO: 229583 - DNA, 537 bp, synthetic construct
  misc_feature 1..537: note = Description of Artificial Sequence: Synthetic coding sequence
  source 1..537: mol_type = other DNA
atggtgtcatctcagaaattggagaaacccattgagatgggctcaagcgaaccactgccaatcgcagatggagaccggagacggaagaagaagcgcagaggcagggcgacagatagcctacccggaaagtttgaggacatgtacaaactgacgtctgaattattaggagagggggcttatgccaaagtacagggggcagtaagcctccaaaacggaaaggagtacgctgtcaaaattatcgagaagcaggccggacacagtcggtcacgggtatttagggaagtcgagacactgtaccagtgccagggcaacaaaaatattttagagctgatagaattctttgaagacgatacccggttctacctggtgttcgagaaactccaaggtgggtccatactggcgcacatccagaaacagaaacatttcaacgagcgagaggcatccagagtggtccgtgacgtggcggcagctttagacttccttcatacaaaaggaatcgcacatcgggatcttaagcctgagaacattctgtgctag

SEQ ID NO: 229584 - DNA, 306 bp, synthetic construct
  misc_feature 1..306: note = Description of Artificial Sequence: Synthetic coding sequence
  source 1..306: mol_type = other DNA
atggtttccagccagaagcttgagaaaccaatagaaatgggctctagcgagccactgccaatcgcggatggagaccgcagacggaagaaaaagcgcaggggacgcgctactgattccctgcccggaaagttcgaggacatgtacaaactgactagcgagctgctgggcgaaggcgcttatgcgaaagtgcagggagcggtgagcctgcagaacggcaaagagtacgccgtgaagattatcgaaaagcaggcagggcactccagaagccgggtcttcagagaagtggagactctgtaccagtgctag

SEQ ID NO: 229585 - DNA, 303 bp, synthetic construct
  misc_feature 1..303: note = Description of Artificial Sequence: Synthetic coding sequence
  source 1..303: mol_type = other DNA
atggtttcatcacagaaacttgagaagcctatcgagatgggaagcagtgaaccactgccaatcgccgatggagaccgtaggcgaaaaaaaaaaaggcgtggccgagcaaccgattctcttccagggaagttcgaggacatgtacaagttaacatctgagttactgggagagggtgcttacgccaaagtacagggcgcagtttcccttcagaatggaaaggagtacgcagtaaagattatcgaaaagcaagcaggccactctaggtcaagggtgttccgagaggttgagactctgtatcaatag

SEQ ID NO: 229586 - DNA, 402 bp, synthetic construct
  misc_feature 1..402: note = Description of Artificial Sequence: Synthetic coding sequence
  source 1..402: mol_type = other DNA
atggtgtcttcacagaagttggagaagcctatagaaatgggcagtagtgaacccttacccatagctgacggggataggcgaagaaagaagaagcgacggggtcgcgcaactgatagtctgccaggaaagttcgaagacatgtacaaacttactagtgagctgttgggcgaaggcgcttacgcaaaggttcagggagcagtgtccctgcagaatgggaaggagtacgccgtgaagatcattgagaagcaggcaggtcactcccggtcccgtgtcttccgagaggtggagaccctctatcagtgccagggtaataaaaacatacttgaactgatcgaatttttcgaggacgacactcggttctatttggtgttcgaaaagctccagggaggtacgtatcgctag

SEQ ID NO: 229587 - DNA, 1398 bp, synthetic construct
  misc_feature 1..1398: note = Description of Artificial Sequence: Synthetic coding sequence
  source 1..1398: mol_type = other DNA
atggtgcaaaaaaaacccgcagagcttcagggctttcaccgatcatttaagggtcagaatcctttcgagctcgcgttttccctcgatcaacctgatcacggcgacagtgacttcggtctacagtgcagcgctcgacccgacatgccagctagtcagcctatagacattcctgacgctaaaaagcggggtaagaagaagaaaagagggagggcgactgatagctttagcggccgatttgaggacgtctatcagctgcaggaggatgtgctgggtgagggggctcacgctcgcgtccagacatgcatcaatctgattacgagccaggaatacgctgtgaaaattattgaaaagcagcccggacatatcagatcaagggtgttcagggaagtagaaatgctttaccagtgccagggccatcgcaatgtactggagctgatagaattcttcgaagaggaggaccgcttctatctcgtgtttgagaagatgagaggcggtagtattttgagccacatccacaagcggaggcacttcaatgaacttgaagcctccgttgttgttcaggatgttgcctctgcactggactttctacataataagggcatcgcccacagagatttgaagcctgaaaatatactctgtgagcatccaaaccaggtgtcacctgtgaagatttgcgacttcgacttgggaagtggtataaagctcaatggagactgcagtcctatctctacgcctgagcttctgacaccatgcggatccgcagaatatatggctcccgaagtggtagaggcttttagcgaggaagccagcatttatgacaagcggtgcgatctctggagcctcggtgtcatactgtatattttgctcagcggctatccaccatttgtaggacggtgcggctccgattgtggatgggatcggggagaagcctgccctgcctgtcagaatatgttgttcgaaagcatacaagagggcaaatacgagttcccagacaaagattgggcacatatctcttgcgcagctaaagacttgatctcaaagctgctggttagggacgccaaacagcggctgagtgccgctcaggtgctccagcatccttgggtccaaggttgtgccccagagaatacattgcctactccaatggtcctgcaaaggaacagttgcgccaaggacctcaccagcttcgccgcagaagctatcgccatgaatagacagctcgcgcagcatgacgaggatctggccgaagaggaggcagccggacagggccaacccgtcctcgtgcgggctacgtctaggtgcctccagctgagcccgccaagccaatccaagctcgctcagaggcggcagcgcgcaagcctgtcctcagctccagtggttctcgtgggcgatcatgcctag

SEQ ID NO: 229588 - DNA, 1245 bp, synthetic construct
  misc_feature 1..1245: note = Description of Artificial Sequence: Synthetic coding sequence
  source 1..1245: mol_type = other DNA
atggtgcaaaaaaagccggctgaactgcaaggatttcaccggtcctttaaaggccaaaaccctttcgagctcgcgttctctttggaccaacccgaccatggtgattcagacttcggccttcagtgttccgcgagaccggacatgccagcatcacagcctattgatatcccagacgccaaaaagaggggcaagaagaaaaagaggggcagagcaacagacagctttagcggtcgctttgaagacgtctaccagctgcaagaggatgttctgggagaaggggctcacgccagggtgcagacttgtattaatctgatcacaagccaagagtatgcggttaaaatcatagagaaacagccaggacacattcgttcccgcgttttccgggaagtggaaatgttgtatcaatgccagggtcaccgcaacgtgcttgagttaatcgaattcttcgaagaggaggatcggttctatctagtgtttgagaaaatgcggggtggctcaatattgagccacattcataagaggcgacactttaacgaattagaagcctctgtggttgtacaggacgtcgccagcgcactggacttcctccacaataagggcatcgctcacagggacctgaagccagaaaacatattgtgtgaacatcccaaccaggtgagccctgtcaagatctgcgatttcgacctaggctccgggatcaagttgaacggcgattgcagtcctatctctacccccgagcttctcacgccatgcgggtcagcggagtatatggctccagaggtagtggaggctttctctgaagaagcgtctatctatgataagcggtgcgacttatggtctctcggcgtgattctatatatcctgttgagtggctacccaccctttgtgggcaggtgtgggagtgactgtggctgggaccggggtgaagcctgccccgcttgccagaacatgctgttcgagtcaatccaggaaggaaagtatgagtttcccgacaaagattgggcccatatttcttgtgctgccaaggacttgatctcaaagttgctggttagggatgcgaaacagagactgtctgccgcacaggtgcttcagcatccctgggtgcaggggtgcgccccagaaaacacccttcctacccctatggtgctgcagagatgggattcccatttcctgcttccgcctcacccatgtcgcattcacgtcaggccgggaggcctggtgcgtaccgtcaccgtgaatgaatag

SEQ ID NO: 229589 - DNA, 1005 bp, synthetic construct
  misc_feature 1..1005: note = Description of Artificial Sequence: Synthetic coding sequence
  source 1..1005: mol_type = other DNA
atgctgtaccagtgccagggtcatcggaatgtcttggagttgatagagttcttcgaagaggaagatcgtttctatcttgtttttgaaaaaatgaggggagggagtatcctgagccatatccacaaacggagacattttaatgaactcgaggcttccgtggtggttcaggacgtggcctcggccctggacttcctccacaacaaaggcatcgcgcaccgagacttgaaaccagaaaatatcctgtgtgagcaccctaaccaagtcagccccgtaaaaatctgcgactttgatttggggtcgggtattaagctgaacggcgattgctccccaatcagcacaccggagctcttgaccccctgtggatccgctgagtacatggcacccgaagtggtggaagccttttccgaagaggcatctatttacgataaaaggtgcgacctgtggagtctgggtgttatcctgtacattctgttgagtggataccctcctttcgtgggtcgctgcggatcagactgcggctgggacagaggtgaggcctgccctgcatgccagaatatgctgtttgaatccatacaggaaggcaaatacgagttcccagataaggactgggcccacatcagctgtgccgcaaaggacctgatctcaaaattactggtcagagatgccaagcagagattaagtgcagcccaggtgttacaacacccttgggtccagggatgtgcacctgagaatacactgcctacccccatggtgctccagagaaactcgtgtgcaaaggatcttacctcatttgccgctgaggcaatcgccatgaacaggcagcttgcgcaacacgacgaggacctggcagaagaagaggcagccggacagggacagcccgtactggtgcgggcaacctctcggtgcttacagcttagcccgccaagtcaaagcaagctcgctcagcgcaggcagcgcgcatctttatcctcggcgccagtggttctagtgggggatcacgcatag

SEQ ID NO: 229590 - DNA, 1218 bp, synthetic construct
  misc_feature 1..1218: note = Description of Artificial Sequence: Synthetic coding sequence
  source 1..1218: mol_type = other DNA
atgccagcttcacagcctattgatatccctgatgccaagaaaagaggtaagaaaaagaagcggggacgggcaaccgactccttttcaggtcgctttgaagacgtctaccagttgcaggaggacgtcctaggggagggcgcacacgccagggtgcagacctgtattaatctgattacaagtcaggaatacgccgtgaaaattatcgagaagcagccgggtcatataaggtcccgcgtctttagagaagttgagatgctctaccagtgtcagggccaccgcaacgttttggagctgattgaaaagatgagaggtggttccattttgagccatatccataaacgtcgacacttcaatgaacttgaggcttcagtggtggttcaagatgtggcctctgcattagacttccttcacaacaaggggatcgcacacagagatttgaagcccgagaacatactttgcgaacatccaaaccaggtgagtcccgtaaagatttgtgattttgacctgggcagtggcatcaagctgaatggcgactgctctcccatatcaacaccggaactgctgaccccttgtggctccgcagagtatatggctcccgaagtggtggaggccttcagcgaggaagcatccatctacgataaaagatgcgacctttggtccctcggcgttatactctacatcctgctgagcggctatcccccttttgtcggcagatgtggttccgattgtggctgggataggggagaggcttgccccgcatgtcagaatatgctgtttgagtctatacaggaggggaagtatgagttcccagacaaggactgggctcacattagctgcgccgcaaaggacttgatctcgaagctcctcgtgcgcgatgctaaacagaggttaagcgctgcgcaagtcctgcaacatccttgggtccagggatgtgccccagaaaacacgttacctaccccgatggtgctgcaaaggaactcatgcgccaaggacctaacttcctttgctgccgaggctatagccatgaatcgtcagttggcccagcatgatgaggacttggcagaagaggaggccgcaggacagggccagcctgtcctcgtgcgggcaacctcaagatgcctgcagctgagtccgccttcccagagcaagttagcccagaggagacagcgggcaagtctgagctctgcgccagtcgtgttggtgggagatcatgcttag

SEQ ID NO: 229591 - DNA, 2388 bp, synthetic construct
  misc_feature 1..2388: note = Description of Artificial Sequence: Synthetic coding sequence
  source 1..2388: mol_type = other DNA
atgtccgccagaacgccccttccaaccgtcaatgagcgggacactgagaaccacactagtgtcgatggatatactgaaccacacatccagcctacaaagtcctctagtcgacagaatattcctaggtgccggaactccatcacctccgctactgatgagcaaccccatatcgggaattaccggttacagaaaaccattggaaaaggcaattttgcaaaggtgaaactggccaggcatgttcttactggcagagaagtggccgttaagatcattgacaaaacacaactaaatcccacctccctgcaaaaactttttcgagaagtacggattatgaagatcctgaaccatcctaatattgtcaagctgttcgaggtcatagagacagaaaaaacgctctatctggttatggaatatgcttcaggcggtgaagtctttgattacctggtggctcacggtcgcatgaaggaaaaggaggcgagagcgaaatttagacagattgtgagcgcggtgcagtactgtcatcagaagtatattgtgcatcgggacctcaaagccgaaaacctcctgttagacggcgatatgaatattaaaatcgcagatttcggcttttccaatgagttcactgtcggcaataagttagacacattttgtggcagcccaccgtatgcggcacctgaactgtttcagggtaagaaatacgacggccctgaggtagatgtctggtcattgggcgttattttatataccctggtgagcggctcgttaccattcgatgggcagaacctgaaggagctacgtgaaagagttctgcggggtaagtatagaataccgttttatatgtcgactgactgcgagaacctcctcaagaaactgcttgtgcttaatcccattaagcgcggatcactagagcagattatgaaggaccggtggatgaacgtgggacacgaggaagaggaactcaagccatacaccgaaccagatccagatttcaacgacaccaagaggatcgacatcatggtgacgatgggattcgctagggacgaaatcaacgatgccctgatcaaccagaagtatgacgaggtgatggctacgtatatcctgctggggaggaagccacctgaattcgaggggggagaatcactcagtagtggtaatctgtgtcaacggtcaaggccaagctcagacctcaacaactctactttgcaatccccagctcacctgaaagtgcaaaggtctattagcgcaaatcagaaacagaggcggttcagtgatcacgcgggtccaagcataccgcctgcggtttcttacacaaaaagacctcaggccaactcagtagaaagcgaacagaaggaggaatgggacaaagacgtagcaagaaagttggggtccactactgttgggagtaaatctgagatgactgcatccccacttgttggtcccgaaagaaagaagtctagcacgattcctagtaataatgtttattctggaggtagtatggcacgacggaatacatatgtgtgtgagaggacgacagataggtacgtagccctacagaatgggaaggactcctcccttaccgaaatgtctgtgagttccattagcagtgcgggatcaagcgtcgcttccgctgttccctctgccaggccacggcaccagaaaagcatgtctacttcaggccacccaatcaaggtcaccctgcctaccataaaggatgggtccgaagcgtatcgccctgggacaactcagagagtgccagccgcaagcccttccgctcattcgatttccactgccactcccgacaggacaaggttccctaggggatcttccagccggagtaccttccacggagaacagcttcgagagcgcaggtcagtggcctacaacggcccaccagccagtccatctcatgagacaggggctttcgcccacgctcgacgtggtacttccacaggaataattagtaaaatcaccagcaagttcgtccgtcgcgatcctagtgagggtgaggcatccgggagaaccgataccagcaggtctacaagcggcgaaccgaaagagagagataaggaggaggggaaagattccaagcccagatccctgagatttacctggtccatgaaaacaacatccagcatggaccctaacgacatgatgagggaaatccggaaagtcctggatgctaacaactgcgactatgaacagaaagagcgattcctcctgttctgtgttcacggcgacgcgcgtcaagactccttggtccagtgggagatggaggtctgtaagctgccacgtttaagtttgaacggcgtaagattcaagagaatctccgggacatctatcgcattcaagaacattgcttctaagattgccaacgaactgaaactatag

SEQ ID NO: 229592 - DNA, 2277 bp, synthetic construct
  misc_feature 1..2277: note = Description of Artificial Sequence: Synthetic coding sequence
  source 1..2277: mol_type = other DNA
atgtctgcaagaaccccactgcctaccgtcaatgagagggacactgagaatcatactagcgtcgatggctataccgaacctcacatccagccaacgaaatctagcagtcgacagaacattccacgctgtcgcaattccatcacaagtgcgacagatgaacaacctcacattggcaactaccggttacagaaaactatcggaaaagggaactttgccaaggtcaagctggcgagacacgttctcaccgggagagaagtagcagtgaagataattgataaaactcaactcaaccccacaagtctacagaaattgttccgggaagttcgtatcatgaaaattctgaatcaccccaatatcggggaggtgttcgactatttagtcgcccacggcagaatgaaagagaaggaagcaagagccaagtttcgccaaatcgttagtgccgtgcaatactgccaccagaagtatattgtgcatcgagacctgaaggctgaaaacctccttctggacggggacatgaacatcaagatagctgactttgggttttccaacgagttcaccgtgggaaacaagctggacacattctgcggcagcccgccttatgccgctccggagctgttccagggaaagaagtacgatgggcctgaggtagacgtctggtctctcggcgtgatcctgtataccttggttagcggaagcctgccatttgatggccagaatctcaaagagctaagggaacgggtcttgagggggaaataccgcattcctttttatatgtcaacagactgtgagaacctgttgaagaaactgcttgtgctcaatcccattaaacggggatccctggagcaaattatgaaggaccggtggatgaacgtgggccatgaagaggaagaattgaaaccatataccgagcctgatcctgacttcaatgatacaaagcgcatcgatattatggtgaccatgggtttcgctcgggacgaaatcaacgatgcactcataaaccaaaagtacgacgaggtcatggcaacctatatcctcctggggagaaaaccacccgaatttgaaggaggagagagtctttctagcgggaatctgtgccagcgtagtcggccatccagcgacctgaataacagcaccctgcagtctcctgctcacctcaaagttcagaggagcatttccgctaaccagaaacaaaggagatttagcgatcacgctggcccttcgatccctcctgcagtgtcctatactaaacgcccacaggccaacagcgtggagtccgaacagaaggaagaatgggacaaggacgttgcccgaaaattgggctccaccaccgtgggatccaagagtgagatgaccgcaagcccacttgtgggccctgagaggaaaaagtcctctacaatcccttcaaacaatgtttactcgggtggatccatggcgaggcgaaatacatacgtgtgcgaacggactacagaccggtatgtggcgctgcagaacggaaaggatagttcactgacagagatgagcgtgtcatctatctcgtccgccggatccagtgttgcttcagccgtgccgagcgcacgtccgcgacatcagaaatctatgtcgacctcaggccacccaattaaggtaacccttcccaccattaaagatggtagcgaggcgtatcggcctggcacgacgcagcgggtgcccgcagcctcaccttccgcgcacagcattagcacagcaacccctgaccgaaccaggtttccacggggaagctcatctcgcagtactttccacggggagcaactccgggagcgtcgctccgttgcgtataacggacctcctgccagcccgtctcatgaaaccggagcttttgcacatgccaggcgcggtactagcaccgggatcatttccaagatcacttccaagttcgtgcgacggagcacctctggagaaccgaaagaaagagacaaggaggaaggaaaagactcgaagcctagatccctccgattcacttggtccatgaaaaccacctcttccatggatccaaacgatatgatgagggagattaggaaagtgctagatgcaaacaattgtgactacgagcagaaagagcgcttcctgctgttctgcgtccatggagacgcccgtcaggactctctggtccagtgggagatggaagtgtgcaagcttccgcgtctcagcttgaatggtgtgagatttaaacgtataagtggcacctcaattgcttttaagaacattgctagcaagattgccaatgaactcaagctgtag

SEQ ID NO: 229593 - DNA, 1938 bp, synthetic construct
  misc_feature 1..1938: note = Description of Artificial Sequence: Synthetic coding sequence
  source 1..1938: mol_type = other DNA
atggaatatgcctcaggaggcgaagtgttcgactacctagtagcacatggacgcatgaaagaaaaggaggcccgagctaaattcaggcagattgtgagtgcggtgcagtactgtcaccaaaagtacatcgtccacagggaccttaaagctgaaaatctgctcctggatggtgacatgaatatcaagattgccgactttggtttctctaatgaatttacagtgggaaacaagcttgataccttttgtggatcacccccttacgcggctcctgaactctttcaaggcaagaaatatgatggtcccgaggtggacgtgtggtccctaggcgtcatcctgtacaccctagtctcagggtccctgccctttgatggtcagaacttgaaggagctgagggagagagtgctaagaggcaaatacaggattcccttctacatgtccaccgactgtgagaatctgttgaagaagttactggtgctgaatccgatcaaacggggttctctcgagcagatcatgaaggacagatggatgaacgtgggacacgaggaagaagagcttaagccttatacagagccagacccagatttcaacgatacaaagcggattgacatcatggtgacgatgggattcgccagggatgaaattaacgatgctctgatcaaccaaaaatacgatgaagtaatggctacctatatccttctaggcagaaaaccccctgagttcgaaggtggcgagagccttagctccggcaatctctgtcagaggagtcggcctagttcagatctgaacaactccacgttgcagtcccccgcacacctgaaagtgcagcgctcgatttcagccaatcagaagcagaggcgctttagcgatcacgcaggcccaagtattcctcccgctgtgtcttataccaaaaggcctcaagccaattctgtagagtctgaacaaaaagaggagtgggacaaggacgtggcacgcaagcttgggagtaccacagttggcagcaagagtgagatgacagcttcgccactggtgggacctgagcggaaaaagagcagcaccattccatcaaataacgtctattccgggggttccatggccaggagaaatacatacgtgtgcgagaggacgaccgacaggtatgtcgccctccaaaatggcaaagactccagcttaacagagatgagtgtctcctccatctcttcagccggatcatcagttgcatcagctgtgcccagcgctagaccgaggcatcagaaatctatgtcaacatcaggacacccaatcaaggtcaccttacccacaattaaggacgggtcagaggcctatcgccctggcacgactcaaagggtgcccgcagcctctccatccgcccactctatctctacggccacaccagaccggaccaggtttcctcgagggagtagctctcggtctacttttcacggagagcaactgagagagcgaagaagtgtggcttacaatgggccacccgcaagccctagtcacgaaactggcgcttttgcccacgcgagacgaggaacaagcaccggcattattagtaaaataacgtcaaaatttgtccgacgatcaacctccggagagcctaaagagagagacaaagaggaggggaaggactccaaaccgaggtctctgaggtttacctggtccatgaagacgacctcttccatggaccccaatgacatgatgagggagatacgcaaggtgctggacgccaataattgcgattacgagcaaaaagagcggttcctcctgttctgtgtgcatggtgatgcccgtcaggacagtctggtccaatgggagatggaggtttgtaagctgccaagactgtcccttaatggagtaagattcaaaagaatttccggaacctccatcgcattcaaaaacattgcctccaaaattgctaacgaactcaagctgtag

SEQ ID NO: 229594 - DNA, 2340 bp, synthetic construct
  misc_feature 1..2340: note = Description of Artificial Sequence: Synthetic coding sequence
  source 1..2340: mol_type = other DNA
atgagctccgcccgaacaccactgccaaccctgaacgaaagggacactgaacaacctacactcggccacctggacagtaaacccagctccaagtcaaatatgatcagggggaggaactctgctacgagcgcggacgaacagcctcacattggcaattatagactacttaagaccatcggtaagggaaatttcgcaaaggtgaagttggcccgtcatattctgacaggcaaggaagtggctgtcaagattatcgacaaaactcagttaaattcttcttccctccaaaaactgttccgcgaggtgcgcattatgaaagttctcaaccaccccaatatagtgaaactgttcgaagtcatcgaaactgaaaagactctctacctggttatggaatacgcttcaggcggtgaggttttcgattatctggtggctcatgggagaatgaaggaaaaagaggcaagggccaagttccggcagatagtcagtgccgtgcaatactgccaccagaagtttattgtgcaccgggatctgaaagctgagaatctgctcctggacgccgatatgaatatcaaaatcgctgatttcggattttctaatgaattcaccttcgggaataagctcgacactttttgtggatcccctccgtatgcagcacctgagcttttccagggaaaaaaatacgatggccctgaggtggacgtatggagcctcggggtgatcctttacaccttggtctccggatcgcttccctttgacggccagaatctgaaggaattgcgcgagagagtgcttcggggaaagtaccggattcctttctacatgagtaccgattgtgagaacctgttaaagaaattcctgatactgaatccctcaaagagaggcaccctcgagcagatcatgaaagaccgatggatgaacgtcggacacgaagacgacgagctgaaaccttacgtggagccactgcccgactataaggacccaaggcgcaccgaactgatggtgagcatgggttacacccgagaggagattcaggactccctggtggggcagaggtataacgaggtgatggcaacataccttttactaggttacaaaagctcagagctggagggagataccatcacactcaagccgagaccctccgctgacctgacgaacagtagcgccccatctccctctcacaaggtgcaacggagcgtatcagctaaccccaaacaaagacgattttcagatcaggctgctggtccggctatcccaacgtcaaacagttacagcaagaagactcagtcaaataatgccgaaaacaagcggccagaggaggatcgtgaaagcggccgaaaagccagtagcacagccaaagtgccggcttctcccctgccaggtttggagcgtaaaaaaaccaccccgacaccatctaccaattccgtgctatcaacaagtaccaataggtcacggaactccccacttctggaacgggcatcactgggccaggcgtctattcagaacggcaaggatagtctgaccatgccgggatcacgggctagtacggcctcagcttccgccgctgtttccgccgcacggcctcgccagcaccagaagtccatgtccgccagcgtgcaccccaataaggctagcggactgcctcctaccgaaagtaactgcgaagtcccgagaccatccacagccccacagcgcgtgcccgtggcttctccctccgctcataacatttctagctctggcggagcccctgacagaactaacttccccaggggtgtgagttcccggagcacattccatgcaggtcagctaagacaggtgcgggatcagcaaaatcttccttacggcgttacgccagcttccccatctgggcatagtcaaggacggagaggtgctagtggtagtatcttcagtaaattcacaagcaaatttgttcgacgcaatctgaatgaacctgaatcaaaagatcgggtagaaacactaaggcctcatgtagtaggttctggcggaaatgacaaagagaaggaagagttccgggaagccaagccgcgtagtctgaggttcacctggtccatgaaaacgacatcatcaatggaacccaacgagatgatgcgagagatacgtaaagtcctggatgccaactcatgtcagtccgaacttcacgagaagtacatgctgctgtgcatgcatggaacacctggacacgaggactttgtccagtgggaaatggaagtgtgcaagcttcctcgactatcactaaacggtgttcggttcaagcgtatctctggcacaagcatggccttcaaaaacattgcttctaagatcgcaaacgaactcaaactttag

SEQ ID NO: 229595 - DNA, 2130 bp, synthetic construct
  misc_feature 1..2130: note = Description of Artificial Sequence: Synthetic coding sequence
  source 1..2130: mol_type = other DNA
atgtctagcgcccgaactccactgccgactctgaatgagcgcgacacagagcagcccacgctgggacacctggatagcaagccgtcctccaagtctaacatgatccgcggacgcaatagcgctacgtcagctgacgagcagccccacattggtaactaccgcctgctcaagacaattggtaaaggaaactttgccaaggtcaaattggccaggcatatccttaccggtaaggaggttgccgttaaaatcatagacaagactcagctcaatagctctagtctgcagaagctctttagagaggtaagaatcatgaaggtgctcaatcacccaaacattgtcaagttgtttgaggtgattgagaccgagaaaacgctctacttggtgatggagtacgctagcgggggagaagtgttcgactaccttgttgcccatggaaggatgaaggagaaggaggccagagccaaattccgtcaaatcgtttctgctgtgcagtactgccaccagaagttcatcgtccatcgggacttaaaggcagaaaacctgctgttggacgccgatatgaacatcaagatcgccgacttcggtttcagtaatgagttcaccttcggcaacaagctggacaccttttgcggctcccccccatacgctgcacccgagcttttccaaggaaagaagtatgatggacctgaggttgatgtttggtctctgggcgtcatcctctacacactggtgagcggctccctacccttcgatggccaaaacttaaaggagctgagagagcgagtcctcagaggcaagtatcggatccccttctacatgtccaccgattgcgagaacctgctcaagaagtttttgattcttaatccttccaaaagaggaaccctcgagcagatcatgaaggacaggtggatgaatgtcggacatgaagacgacgagctgaaaccctatgttgagcccctcccggactacaaggaccctcgaagaaccgagttgatggttagtatgggctacaccagagaagagattcaggattctctggtcggccagagatataatgaagtgatggctacttacctattactgggttacaaaagttccgagctggaaggtgatacaattacgctgaaacctagacccagtgccgaccttacgaactcaagcgcaccctcaccatctcataaagtgcagcgcagcgtgtccgccaacccaaagcagcggagatttagtgaccaggccggtcctgcgatacccacctcaaactcgtacagcaaaaagactcagagcaataatgccgaaaacaagcggcctgaagaggatcgggagtccggaaggaaggcatcatctacagcaaaggtgccggcatcacctctgccaggacttgaaaggaagaagaccaccccaacgccatccacgaacagcgttctatctacctccactaataggtcgcgcaacagcccactgcttgaacgagcttctctcgggcaagcttctattcaaaacggcaaagacagcacagctcctcaaagggtgccggtggcttccccaagcgcacataacataagtagctccggtggcgctcccgaccgcaccaattttcccaggggagtatcgagcagatcaacatttcatgcgggacagcttcggcaagttagagatcagcagaaccttccatacggggtgactccggcatccccttcgggccatagccaggggcgtcgtggtgccagtggcagcatatttagcaagttcacctccaaattcgtgcgccgtccccacgtcgttggctccggtggaaacgataaggagaaggaggagttcagagaagccaagcctcgaagcctgcggttcacatggtcaatgaaaacaaccagcagcatggagcctaacgagatgatgcgggaaatccgcaaagtactggacgctaacagctgccaatctgaactgcacgaaaagtacatgttgctgtgcatgcatggcacacccggacacgaagacttcgtgcagtgggaaatggaagtctgtaagttgcctcggttgtctctgaatggagtacgctttaagaggatcagcggaacaagtatggctttcaaaaacatagcctccaaaatcgctaacgagctaaagttgtag

SEQ ID NO: 229596 - DNA, 2160 bp, synthetic construct
  misc_feature 1..2160: note = Description of Artificial Sequence: Synthetic coding sequence
  source 1..2160: mol_type = other DNA
atgtccagtgctcgcacaccactgcccacactcaatgaacgggataccgaacagccaaccctgggtcacctggacagtaaaccctcctctaagtccaacatgatcagaggacgcaatagcgctacgtccgcagatgaacagccccacatcggcaactaccggctgctgaagacgatagggaagggcaacttcgccaaggtgaaactggcccgtcacatacttaccggcaaagaggtggctgtcaagatcattgataaaacccaactcaactcatcttcgcttcagaagctctttagagaagtgcgaatcatgaaggtcctgaaccaccctaatatagtgaagctgttcgaagtgatcgaaacagagaagaccctctacctcgtgatggaatatgctagcggaggcgaggtcttcgattacctggttgcccacggcaggatgaaagaaaaagaggctcgtgcgaaattcaggcagatcgtttccgctgttcagtattgtcaccagaagtttatcgtgcaccgtgacctcaaagcagaaaacctcttactcgatgccgatatgaacataaagattgccgattttggattttcaaatgaatttactttcgggaataaattggatacattctgcggaagccctccttacgctgctcccgaactgttccaggggaaaaagtatgacggaccagaggtggacgtatggagcttaggagtcatcttatataccctggtgtcagggagcctccccttcgatggacagaacctgaaagagctgagagaacgggtgctgcggggaaagtatcgtatccccttttacatgtcaaccgattgcgaaaacctgttgaagaagtttctgatactgaacccgagcaagcggggaaccttagaacaaattatgaaagaccggtggatgaatgtgggtcatgaggacgacgaactgaagccctacgttgagcccctgccggactataaagatccaaggcgaaccgagcttatggtctctatgggctatacccgggaggaaatccaagattcgctggtcggccagaggtacaacgaagtgatggctacctatctgcttctcggttacaagtctagcgaactggagggggataccattacactgaaacccaggcctagtgctgaccttaccaactctagtgccccaagtccgagccacaaagtacagagatccgtgtccgccaacccgaaacagcgacgcttctctgatcaggccgctggacctgccatccctacaagtaacagctactcgaaaaagacgcaatcgaataatgccgagaataagaggccagaagaggatagagagtcagggagaaaggcttcatctacagcaaaagtgcctgctagtcctctcccagggttagaaaggaagaagacaacacccacgccgtctacaaactcggtgctttcgacatccacaaatcgcagccgcaacagccctttgctcgagcgcgcatccttaggccaggctagcatccagaatggtaaggattctaccgcccctcaaagagtgcccgtggcttcgccttccgcacataatataagctcgtcagggggagccccagacagaacaaacttcccgagaggagtgagcagccggtcgacttttcacgccggtcagctgcggcaggtgcgggaccagcagaatctgccgtatggtgtgacccctgcttccccttccggccactcacaaggacggagaggagcgtcaggatctatttttagtaagtttacctccaaatttgtgcgccgaaacttgagctttagatttgccagacgtccacacgtcgtgggaagtgggggtaacgataaagagaaggaggaattcagagaggccaagccaagaagcctgaggttcacctggtctatgaaaactacctcatcgatggaaccaaatgaaatgatgagggaaatacgcaaggtcctggatgcaaattcatgccagtctgagcttcacgagaagtacatgttactgtgcatgcatggtacaccaggccatgaggattttgttcaatgggaaatggaagtgtgtaaactgccacgcctttccctgaacggggtgagatttaagaggataagcggcacgtccatggcctttaaaaacatcgccagcaagatagctaacgagctcaagctgtag

SEQ ID NO: 229597 - DNA, 2322 bp, synthetic construct
  misc_feature 1..2322: note = Description of Artificial Sequence: Synthetic coding sequence
  source 1..2322: mol_type = other DNA
atgagctctgcaaggacaccgctcccaactttgaatgaacgagacacagaacagcccactttaggacacctggactcaaagccctctagtaaaagcaatatgattaggggcagaaacagcgccactagtgccgatgaacaaccacatatcgggaactatagactcctgaaaacaatcgggaagggaaatttcgcaaaagttaagctggccaggcacatcctcactgggaaggaagtggccgttaagatcattgataagacacagcttaactccagtagcctacagaaactttttagggaggtgcggataatgaaggtgctgaaccatcccaacatcgtgaaactcttcgaagtgatcgaaaccgagaagaccctctatctggtgatggagtacgcctcaggaggagaagtcttcgactacttggttgcacatggcagaatgaaagaaaaagaggctagggccaagttccggcagatcgtgtccgctgttcagtactgtcatcagaagttcattgtgcaccgagatttgaaggccgagaatctgcttctcgatgccgatatgaacataaagatagcagacttcgggttcagtaatgaatttactttcgggaacaagttagatactttctgtggcagccccccatacgctgcgcctgaactatttcagggtaagaagtatgatgggccagaagtagacgtgtggagcctgggagtgatcttgtatacgctcgtgagcggctccctccccttcgacgggcaaaatctgaaagagctgcgcgagcgtgtactccgaggcaaatatcgaatccccttctatatgagcacggactgtgagaacctgctgaagaagttccttattttgaatccctcaaagcggggtaccttggagcagatcatgaaggaccgttggatgaatgtgggccacgaagacgatgagctgaaaccctatgtagaacctctgccagattacaaggacccacgcaggactgagctgatggtgagcatgggctacaccagagaagagatccaagattcactcgtggggcagcggtacaacgaagtaatggcgacttacctgctcctcgggtataagtcgtctgaactggagggagatacgatcacgctcaaaccccgtcccagtgccgatctcaccaactccagtgccccaagcccttcgcacaaggtgcagcgctcagtgtctgcaaacccaaaacagcgcaggttctctgatcaggccgcaggcccagccatccccactagtaactcatactcaaagaaaacacaatcgaataacgctgaaaataagcgacccgaggaggatcgggagagcggacgaaaagcctcttcaacagccaaagtcccagcatctccattgcccggactggaacgaaaaaaaactacgcccactccatctaccaacagtgtgctgagcacgtcaaccaataggtccaggaacagcccactccttgagagagcctccctgggccaggccagcatccaaaatggaaaagattcactcaccatgcctgggagcagagcttctaccgcaagcgcctcggccgctgttagtgccgctcggcctcgccagcaccagaagtccatgtcagcaagtgttcacccaaataaggcgtcaggcctccccccaaccgaaagtaactgtgaggtgccgagacctagtaccgctcctcaacgcgttccagtcgcttccccatccgcacataatatttccagttcgggtggcgctcctgatagaacgaattttccccgtggtgtgtcttcccggtcaactttccatgccggacaattgaggcaggtgcgtgaccagcagaacctgccgtacggcgtgacgcccgcatcccccagcgggcattcccaggggaggcggggagccagtggtagcatttttagtaagtttacctctaagttcgtgcggcgaaacctgtcctttagattcgcacggagaccccatgttgtgggcagtggcggaaatgataaagagaaagaggagtttcgcgaggcgaagccccgttcgctgaggtttacctggtcgatgaaaactacatctagtatggagccaaatgaaatgatgcgggagatcaggaaagtgttggacgctaactcttgccaatcagagttgcatgagaaatatatgctgctctgcatgcacgggaccccgggacacgaagactttgtacagtgggagatggaagtctgcaaactacctagactctccttgaatggtgtacgcttcaagaggatctctggcaccagcatggcttttaaaaatatcgccagtaaaatcgcgaacgaactcaaactctag

SEQ ID NO: 229598 - DNA, 2076 bp, synthetic construct
  misc_feature 1..2076: note = Description of Artificial Sequence: Synthetic coding sequence
  source 1..2076: mol_type = other DNA
atgatccggggaaggaactccgccacctcagccgacgaacagccacatattggcaactatcgcctgctaaagacaattggcaagggcaactttgctaaagtgaaattagctaggcacatcctcaccggtaaagaagtggccgttaaaatcatcgacaaaacacagttgaatagctctagccttcagaagttgttccgggaggtcagaatcatgaaggtgttgaaccatcccaacatcgtaaaattatttgaagtgatagagaccgaaaaaaccctctacctagtgatggaatatgcgtcaggtggcgaggtcttcgactacctcgtcgcacatggtcggatgaaagaaaaggaggcacgggcaaaatttcggcagattgtgtctgccgtgcagtactgtcatcaaaagtttattgttcacagagatcttaaagccgagaatttactgctggacgctgacatgaatattaaaattgccgattttgggttcagcaacgaatttaccttcggtaataagctcgatacattctgtgggtcccccccatacgccgcacccgaactgtttcaggggaagaaatatgacggccctgaggtcgacgtatggagcctcggcgtgattctctatactctggtttccggtagcctgccatttgacggtcagaatctgaaagaactgagggagcgggtgttgcgaggcaaatatcgcattcccttttatatgagtaccgactgtgagaacctgttaaaaaagttccttatactgaatcccagcaagagggggactctggagcagatcatgaaagaccgatggatgaacgtggggcatgaggatgacgagctgaagccctacgtggagccacttccagattataaagaccctcgcaggactgagttgatggtttcgatgggatatacaagggaagagattcaggacagccttgtggggcaacgatacaacgaagtaatggccacctatttgctactcggctataagtcaagcgagctggagggagacacaatcactctgaaaccgaggccatctgcggacctcacgaacagctcggccccatctccctctcataaagtgcagcgttcagtgtccgccaaccccaaacagcgccgattctcagatcaggccggacctgcaattccaaccagcaattcttatagtaagaaaacccagtccaacaacgccgagaacaagaggcctgaggaggatagggaaagtggaagaaaagccagctcaaccgccaaagtccctgcatccccgctgccgggactggagaggaagaaaaccactcctactccaagcaccaactccgtcttatctacatccactaatcgcagccgcaattcacctctacttgagcgagcctcactgggccaggccagcatccagaatggcaaggattctactgcgccacaacgcgtgccagtcgcatctccatccgcccataatatctcaagcagcgggggagcccctgaccggacaaactttcccaggggcgtttcaagccgttccactttccacgctggccagctgaggcaggtgcgagaccagcagaacttgccgtacggggtcactcctgccagccctagtgggcattcccaaggccgaaggggcgcaagtggtagcatattttcgaagttcacttctaagttcgtgcggaggaaccttaatgagcctgaatcaaaggatcgagtagagactctgaggccccacgtagtcggatcaggaggaaacgacaaggaaaaagaagagttcagggaagcaaaaccaaggtcgctaagatttacctggagcatgaagaccacaagctctatggagccgaatgagatgatgcgggaaattaggaaggttctggacgccaactcctgtcagagtgagctccatgagaaatacatgctcttgtgcatgcacgggacacctggccatgaggatttcgtgcaatgggaaatggaggtctgtaagctgccaagactctctctaaacggcgtgagatttaagagaatcagcgggaccagtatggcctttaaaaacatagcaagcaagatcgctaacgagctcaaactgtag

SEQ ID NO: 229599 - DNA, 2367 bp, synthetic construct
  misc_feature 1..2367: note = Description of Artificial Sequence: Synthetic coding sequence
  source 1..2367: mol_type = other DNA
atgtcctccgcgagaacgcctctccccactcttaatgagagagatacagaacaaccaactctcggccacctggattcaaaaccatcttcaaaatctaatatgatccgcggtcgcaactccgccaccagcgctgacgagcagccccacatcggtaactaccgcctcctcaagactatcggaaaggggaactttgccaaggtaaagttagcccgacacatcctcaccgggaaagaagttgcggtgaaaatcatcgacaagacccagctgaacagctccagcctccaaaaactgtttagggaggtgcgcattatgaaggtcctgaatcacccaaacattgtcaaactgtttgaagtgatcgaaactgaaaagactctgtaccttgttatggagtatgcgtcaggaggggaggtttttgactacttagtcgcccacggcagaatgaaagagaaagaagcaagagccaaatttaggcaaatcgttagcgcagtgcagtattgccaccagaaattcatcgtccacagggacctgaaagctgagaacttgctgctggacgccgacatgaatatcaaaatcgccgatttcgggttttcaaacgaatttacgttcggcaacaagctggatactttttgcgggtcccctccctacgctgcgccagaattgttccaaggcaagaaatatgacgggccagaagtggatgtttggagtctcggcgtgatactgtacactttagtttccgggtccctgcccttcgatggacagaatctcaaagaacttagagagcgggtgctcaggggaaaatacaggattcctttttacatgtcaaccgattgcgagaatctcctcaagaagtttctgattctgaacccgtctaagagaggcacattggagcagatcatgaaggatagatggatgaacgtaggacatgaagatgatgagctaaaaccctacgtggagcctttgcccgactacaaggaccctcgcaggacggaattaatggtgtccatggggtacacccgggaggagattcaggattccctggtaggccagcgctataacgaggttatggcgacatatctgctgcttggatataaatccagtgagctggagggagatacgatcaccctgaagcccagaccaagcgccgacctgactaactcatccgcaccttcaccctctcataaggtgcagaggtcggtgtctgctaaccccaagcaaaggcggttctcagatcaagccgcaggtcccgcaattccaacatcaaactcctatagcaagaagacccaatccaacaatgccgagaataagcggccagaggaggatagagagagtgggagaaaggccagttccaccgcaaaagtgcccgcaagcccccttcccggattggaacgcaaaaaaacaacaccaaccccttccaccaattccgtcctttcaacaagcacgaatcgctccagaaattcccctcttctggaaagggcctccctgggccaagcatccatacagaacggcaaggacagcctaaccatgccaggcagtagagcatcgactgcatctgcctcagctgcagtatccgctgctcgcccaagacaacatcagaaatccatgagtgcttctgtccaccccaacaaggcctccggactaccacccactgaatccaactgcgaagtcccacgaccatcgacagcgccacagcgggttcccgtcgcgtcccccagcgcacacaacatctcctcctcaggcggagcccctgacagaacaaacttcccgcgaggcgtgagttccaggtcaacgtttcatgcaggccagctgcgtcaggtccgggaccagcagaacctgccttacggtgtaacccctgctagcccttcaggacactcccagggaagacgtggggcaagcggttctatcttttcaaaatttacatctaaattcgtgcgccgtaacctctcttttcggttcgcgcgaagaaatttaaatgaaccagaatccaaagatagagtggagactctccgcccacacgtagtcgggtccggaggcaacgacaaggagaaagaggagtttcgggaagccaaacctaggagcctgcggttcacatggtccatgaagaccaccagctccatggagccaaatgagatgatgcgcgaaattaggaaagtccttgacgctaattcttgccagagcgagcttcacgaaaagtacatgctgctttgcatgcacggcacccccggacatgaggattttgtacagtgggagatggaagtctgtaagcttcccaggctgtctctgaacggagtcaggttcaagagaatttcgggaacttccatggcctttaagaacatagccagtaaaatcgcgaacgagctgaaactgtag

SEQ ID NO: 229600 - DNA, 2076 bp, synthetic construct
  misc_feature 1..2076: note = Description of Artificial Sequence: Synthetic coding sequence
  source 1..2076: mol_type = other DNA
atgatccggggacgaaactccgcgacctcagctgacgagcagcctcacattgggaactataggctgctgaagaccatcggaaagggcaacttcgctaaggtgaaattggccaggcatattctgacaggtaaggaagtcgctgtaaagatcatcgataaaactcagttaaactctagcagtcttcaaaagctctttcgggaggtccggataatgaaagtgctgaatcatcccaacatagtgaaactcttcgaagtcattgaaacggagaaaaccttatacctcgtaatggaatacgcctctggaggagaggttttcgactacctcgtggctcacggccgtatgaaggaaaaggaagccagggcaaagtttagacaaattgtaagtgctgtgcaatactgtcaccagaaattcatcgtccacagggatttgaaagccgaaaatcttctgttggatgccgacatgaatataaaaatcgccgacttcgggttttctaacgagtttacgttcggcaacaagttggacactttttgcggctcacctccctacgccgctccggagctgttccaggggaagaaatacgatgggccagaggtagatgtttggtccctgggggttattttatacacactcgtgagcggttccctgccgtttgacggccagaacctcaaggagttacgcgagcgggtgctcagagggaagtacagaataccgttctatatgagtacagattgtgaaaatttactgaaaaaatttttgatcctcaatcctagtaaacgcggaaccctcgagcaaataatgaaagatcgttggatgaatgtaggccatgaagatgatgaacttaagccctacgtcgaacccctgcccgactataaagatcccagaaggaccgagctgatggtgagtatgggctatacgcgtgaggaaatacaggatagcctggtcggtcagcgatataacgaggtgatggccacttacttgttgctcggctataagagctccgagctcgagggggacactatcacactgaagcccaggccctcagctgatcttaccaattcctccgcgccttcaccgtcccacaaagtgcaacgttctgtgtcagctaacccaaaacagcgacgcttcagtgatcaggcagggcctgcaatccctacatccaacagctacagcaaaaaaactcagagcaataacgcagaaaacaagcgcccagaggaggacagggagagcggacgcaaggccagctccaccgctaaggtacccgcaagtcctcttcccggactagaacggaaaaagaccacacctacccctagcacaaactccgtgctaagcactagcactaataggtcacgcaacagcccactactcgagagagcttccctcgggcaggcgtccatccagaacggcaaggatagcacagctcctcagcgagtgcccgtggctagtccaagtgcccataacatctcaagctccggtggtgcccctgatcggaccaactttcccaggggcgtgagctcccgttcaacttttcacgcgggacaactgaggcaagtaagagatcagcagaacctgccttacggcgtcacccccgcatcaccaagtggccattcacaagggaggcggggtgcctctgggtcaattttctctaaattcacatctaaatttgtgaggaggaatctaaatgagcctgaatccaaggatagagtagagactctgaggcctcacgtggtgggtagtggaggtaatgacaaggaaaaggaagaattcagagaggcaaaaccgaggtccctacgttttacgtggtccatgaaaaccacatcctccatggagccaaacgagatgatgcgagaaattcgcaaggtgctcgatgccaatagctgccaatcagaactccacgagaagtatatgcttttgtgcatgcacgggacacctggccacgaggacttcgtccagtgggaaatggaggtttgcaagctgcccagactgtcgctgaacggcgtcaggtttaagcgcatatcagggacttcaatggcatttaagaacatcgctagtaagatagcgaatgaattaaagctgtag

SEQ ID NO: 229601 - DNA, 2205 bp, synthetic construct
  misc_feature 1..2205: note = Description of Artificial Sequence: Synthetic coding sequence
  source 1..2205: mol_type = other DNA
atgtctagtgccagaacacctctgcctacactgaacgaaagagataccgaacaaccgaccctcggacacctggatagcaaaccctcttctaagtccaatatgatccgagggagaaactctgccacgtccgcagatgaacaacctcatattggtaactaccgactactgaagaccatagggaaagggaacttcgccaaggttaagctcgctcgccacatcctcacagggaaggaagtggcggtcaagatcattgacaaaacccagctgaattcttctagcctccagaagctgttccgtgaagtgcgcatcatgaaggtgttgaaccaccctaacattgtgaagctattcgaagtcattgaaacagagaagacattgtatctggtgatggaatacgcatctggaggagaagtttttgactacctggtagctcacggtagaatgaaagagaaggaggccagggcaaaattccgccagatcgtgtccgccgtacagtattgtcaccagaaattcatagtgcacagagatctgaaagccgagaatcttcttctggatgctgacatgaatataaaaatagcagactttggtttctctaatgagttcaccttcggcaataagttagacacattctgcggaagccccccatacgccgcaccagaactgttccagggaaagaaatatgatggacccgaggttgatgtttggagtcttggcgtcatcctgtatacactcgtctcaggctctctgccttttgacggacagaatctgaaggaactcagagaaagggtgcttcgagggaagtaccgcattcctttctacatgagtacagactgtgagaacctcctcaaaaagtttctgatcctgaacccaagtaagcgcggaacactggagcagatcatgaaggataggtggatgaatgtgggacatgaagatgacgaactgaaaccctatgtcgaacctcttccagactataaagatcctcgacggacagaactcatggtcagcatgggatatacacgggaagagatccaagactcactggtcggacagcgatacaatgaggtgatggcaacttatttgttgctgggatataagtctagcgagctggagggggacaccatcaccctcaagcctagaccaagtgcggaccttacaaactcatcagctccgagcccctcgcataaagtccagagatcagttagcgcaaatccaaaacaacgacggttcagcgatcaggctgcagggcctgccatccctacctcaaatagctacagcaagaagactcagtcaaataatgccgagaataagaggccagaagaggatagagaatcgggacgcaaagcaagctccaccgcaaaggtgcctgcaagtcctctccccggtctggagcgaaagaagacaactccgaccccaagcaccaactctgtcttgagtacctccacaaatcggtcccggaactcccccctgctggagagggccagcctggggcaggcaagcatccagaatggaaaagatagtaccgcaccacagcgtgtccccgtggcgtctccatccgcacataatataagcagttctgggggagcccctgatcgcacgaacttcccacggggagttagttccagatcgacattccatgccggacagcttaggcaggtgagggatcaacaaaacctgccctacggtgttacccctgcatcaccgagtggacacagccagggccgtcgcggagcctccgggagcatattctccaaatttactagtaagttcgtccgacgcaatctgtctttccgattcgccaggagaaaccttaacgagccggaatctaaggatagagtcgagactttacgaccccacgtggtcggcagtggtggcaacgacaaagaaaaagaagaatttagagaggcaaagccgaggtccctgcgctttacctggtccatgaaaaccacatcttcaatggagccaaatgagatgatgagagaaataagaaaagtgctggacgccaattcatgtcaaagcgaactgcacgagaaatatatgctgctctgcatgcatggaacacctggtcacgaggatttcgtacagtgggaaatggaggtttgcaagctccctaggttgtcactgaacggagttagattcaaaaggatctccggcacctctatggcatttaagaacatcgctagcaaaattgctaacgagctcaagctctag

SEQ ID NO: 229602 - DNA, 2343 bp, synthetic construct
  misc_feature 1..2343: note = Description of Artificial Sequence: Synthetic coding sequence
  source 1..2343: mol_type = other DNA
atgtcttctgccaggacaccattaccgacactgaatgaacgcgacactgagcagccaacactggggcatttagattccaagccctcttctaagtcaaatatgatcaggggcagaaactcggccacctccgcagacgagcaacctcacattggtaattacagactcctcaagaccatcgggaagggaaattttgccaaggtcaagctggcgagacacatccttacaggaaaggaagtcgcagttaaaattatcgacaaaacccagctgaatagcagctccctgcagaagctgttcagggaggtccgcatcatgaaggtgctgaatcatccgaatatcgtgaaactcttcgaggtcatcgaaaccgaaaagaccctgtacctcgttatggaatacgcttcaggcggtgaagttttcgactaccttgtagctcatggaaggatgaaggaaaaagaagccagagccaaatttcggcaaattgtgtccgctgttcaatattgccaccaaaaatttattgtgcaccgcgacttgaaagccgaaaatcttctcctggatgccgacatgaacattaagatcgccgatttcggcttctctaatgagttcaccttcggtaataagctggacacgttctgtggctctcctccgtatgcggctccggaattattccaaggaaaaaaatatgatggccctgaagttgatgtgtggtccttgggtgttattttgtacacccttgtgagcggatctttgcccttcgatggtcagaatcttaaggagcttcgagaacgcgtcctccggggaaaatatcgcataccattctatatgtccaccgattgcgagaatcttctcaaaaagtttctgatactcaatccatccaagcgaggcacattggaacaaattatgaaagaccgctggatgaatgtggggcacgaggacgacgaattaaaaccctacgtcgagcccctcccagattacaaagaccccagacggaccgagctgatggtctcgatgggatatacccgggaggagatccaggactctttggtaggccaacggtacaacgaagtcatggccacatatttactgctgggttacaaaagcagtgagctggagggagataccataacactgaagccacgtcccagtgccgacttgactaacagtagcgccccaagtccttcccataaagtgcagcgctccgtatcagccaacccgaaacagaggaggttttcagaccaggccggtcccgctatccccacaagtaacagttattccaaaaaaacgcagtcgaacaatgccgagaacaaaaggcctgaagaggatcgagagtcaggaaggaaggcaagcagtaccgccaaggttcctgcaagtcccctccctggcctcgagcgcaaaaaaacaaccccgacgccaagcaccaacagcgtgctttcgacgagcactaataggagcaggaactccccgctgctggaacgtgcttcactgggacaggcaagcatccagaatggcaaggactctctcacaatgcccggttcacgagcaagcaccgctagcgcctccgccgctgtgtccgcagctaggccacgccaacatcagaaatcgatgtcagcatccgtacacccgaataaagcctctggcctccccccaaccgaatctaactgcgaagtccctcgacctagacaggttaccgcccctcagagagtgcctgtcgcttctcccagtgcacataacattagcagctctggaggtgcgccagatcgcaccaactttcctaggggcgtatcgagccggtccacttttcacgcaggccagttgcggcaggtgcgcgaccagcaaaacctgccttacggcgtgacccccgcttctccttcaggccattcgcagggacggaggggggcaagtggctctatttttagtaagttcacctcgaaattcgtgaggcgcaatctgaacgagcccgagtccaaggatcgcgtggaaacactcagaccacatgtggttgggtccgggggaaacgacaaggaaaaggaagagttccgggaggccaaaccccgatctcttagattcacctggagcatgaaaacgacatcttccatggagccaaatgagatgatgcgagaaataagaaaagtactcgatgctaacagttgccagagcgaactgcatgaaaaatatatgttgctgtgcatgcacggtacaccaggtcacgaagattttgttcaatgggagatggaagtatgcaaacttccacgtctgtctctcaacggagttcgcttcaaaagaataagtggcacatccatggctttcaaaaatatcgcctccaaaatcgcgaatgagttaaagctgtag

SEQ ID NO: 229603 - DNA, 126 bp, synthetic construct
  misc_feature 1..126: note = Description of Artificial Sequence: Synthetic coding sequence
  source 1..126: mol_type = other DNA
atgtccagcgcacgaactccactgcccactcttaacgagcgggacacagagcagcctaccctgggacacctggactcgaagcccagttctaagtccaatatgatccgagggaggaatagcgcatag

SEQ ID NO: 229604 - DNA, 2175 bp, synthetic construct
  misc_feature 1..2175: note = Description of Artificial Sequence: Synthetic coding sequence
  source 1..2175: mol_type = other DNA
atgtcctccgctcgcacccccctgcctactttgaatgaaagagacacagagcaaccaactctcggacatctcgactccaagcccagttccaaaagcaatatgatacgagggagaaattcggccacctcggcagatgagcagccacatattggcaactataggttactgaagaccatcggaaaagggaatttcgcaaaagtcaagctggcgcgtcacatactaacgggcaaggaagttgccgtgaagatcattgataaaacacagcttaactcctcaagtcttcaaaaactgtttcgagaggtccggattatgaaggtcctaaaccaccctaacatcgttaagttatttgaggtgattgagactgaaaaaacactgtacctggtgatggagtatgcctccggaggggaggttttcgattacctcgttgcacacggtcgtatgaaagagaaagaggccagggccaagttccgtcagatcgtgagcgccgtacagtattgtcatcagaaattcatcgtgcatagggacttaaaagccgaaaacttactgctggacgcagatatgaatatcaaaatcgcagactttgggttcagcaatgagtttacctttggaaataagctcgacaccttttgcggctctccaccctatgcggcacctgaactgttccaggggaaaaagtacgatggaccagaggtggacgtttggagcctgggcgtgatcctctacacactggtgagcggtagccttccatttgatggtcagaacctgaaagagctgcgggaacgggtcttgcggggtaaatataggatccccttctacatgagtacagactgcgaaaacttactcaaaaaatttctgatactgaacccttccaagagagggacactggaacagatcatgaaggaccggtggatgaatgtgggacatgaggacgatgagcttaaaccgtacgtcgaacccctgcccgactataaggacccacgcaggacggaattaatggtgtcaatgggatatactcgggaggagatccaggacagcctggttggacaacgctataacgaggttatggccacctacttgctacttgggtacaagtcatctgaattggaaggtgatacaattactctgaagcccaggccaagtgccgacctcactaattctagcgcccctagtccatcacacaaggtccagaggagcgtgagtgctaatcctaagcaacgccgattttcggaccaggctggacctgcaattcccacttctaacagctatagcaaaaaaacacagtccaacaacgcagagaacaagcgtcccgaggaggaccgtgaatccggtcgcaaggcctcctccaccgcaaaggtaccagcgagcccccttcctggcctggagcgcaagaagaccacccccactccgtcgacgaactcagtgttgagcaccagtaccaatcgtagtagaaattcacctttgctggagcgtgccagccttgggcaggcctccatccagaacggaaaggattctaccgcccctcagagggttcctgtggcatctccaagtgcgcataatatctccagcagcgggggtgcaccggaccgcacaaatttccctcgcggagtgtcgtccaggtcgacttttcacgctgggcagctgagacaggtgcgcgaccaacagaacctgccttatggcgtgactcccgcatcgccctccggacattctcaaggacgacgaggggcatccgggagtattttctctaaattcacaagcaaatttgtcaggaggaacctgaatgagcctgagtccaaagatagagtcgagacactgcggcctcacgtggtgggaagtggaggaaatgacaaagagaaagaggaattcagggaggccaagccaaggagtctccggttcacttggagcatgaagacaaccagttctatggaacctaatgaaatgatgcgggagatccggaaggttctcgacgccaatagctgccagagcgagttgcatgaaaagtacatgctcctctgtatgcacggcacacccggtcacgaggactttgtgcaatgggagatggaagtgtgtaaattaccccgtctgtcactgaacggggtccgctttaagcgcatctctggtacaagcatggcctttaaaaacattgctagtaagatagctaacgaattaaagctgtag

SEQ ID NO: 229605 - DNA, 186 bp, synthetic construct
  misc_feature 1..186: note = Description of Artificial Sequence: Synthetic coding sequence
  source 1..186: mol_type = other DNA
atggaagtagctggctcccccttcccctttttgcaatccgtggcctgtcttctgacactggctcatatccccgctgttggaaacatactgcagcatagacgtcgaggagcaggtcctactctaggacatctagacagcaagccgtcttccaaatccaatatgattagagggcgaaactccgcctag

SEQ ID NO: 229606 - DNA, 339 bp, synthetic construct
  misc_feature 1..339: note = Description of Artificial Sequence: Synthetic coding sequence
  source 1..339: mol_type = other DNA
atgatccgtggtcggaatagcgcgacgagtgcggatgagcagccgcatatcggcaattacagacttttaaagactatcgggaagggcaatttcgccaaggtaaagctagcacgacatatcctcactggaaaagaagtagccgtgaagattattgataagacccagctgaacagttccagcttgcagaagttgttcagggaggtcaggataatgaaggtgcttaatcacccaaatatagtgaagctgttcgaagtcatcgaaactgagaaaacactctacctggtcatggagtatgcgtccggcggtgaggtgttcgattacttggtggcccacgggtag

SEQ ID NO: 229607 - DNA, 486 bp, synthetic construct
  misc_feature 1..486: note = Description of Artificial Sequence: Synthetic coding sequence
  source 1..486: mol_type = other DNA
atgataagaggcaggaacagcgccacaagtgcggatgagcagccccacattggcaactacagactattgaagacaattggtaaggggaatttcgcgaaggtcaagttggctagacatatcctgaccgggaaggaagtagccgtgaagattattgataaaactcaattaaactcctcgtctctccaaaaactgttcagggaggtgcggattatgaaagtgctgaaccatcccaacattgtaaaactcttcgaggttatcgagactgaaaagaccctgtacctggtcatggaatacgccagtgggggagaagtgttcgactatttggtcgcccatggcaggatgaaggagaaggaagcaagggccaagtttaggcagatcgtatcagcagtccagtactgtcaccagaagttcattgtccatagagacctcaaagcagagaacttactgctggacgccgatatgaatattaagatagccgatttttag

SEQ ID NO: 229608 - DNA, 276 bp, synthetic construct
  misc_feature 1..276: note = Description of Artificial Sequence: Synthetic coding sequence
  source 1..276: mol_type = other DNA
atgggtggccagaggaacaccagcgtcggcaatattgtccagcgctggcgagatcatgttgtgtgccagaaagccggagtaatctattccggcagaaaggcccaggaacatggaactggcagaaccgatttcacacctgcgcagagactcatgatgcccaccttgggacatctggactctaagcccagttcaaagtcgaatatgatccgcggaagaaactccgccacgtcagccgacgaacagccccacataggcaactaccggcttctgaagtag

SEQ ID NO: 229609 - DNA, 2238 bp, synthetic construct
  misc_feature 1..2238: note = Description of Artificial Sequence: Synthetic coding sequence
  source 1..2238: mol_type = other DNA
atgattcgcggtagaaatagcgcaactagtgccgacgagcagccacacatcggcaactaccggttgctgaaaacaattggcaaagggaacttcgctaaggtcaaactggctaggcacatcctcaccggcaaagaggtggccgttaagatcatcgataaaacccagctgaatagctcatcactgcagaagctgttcagagaggtgagaatcatgaaggtgcttaaccatcccaacatcgttaagctattcgaagttattgagactgagaagaccctgtacctggtgatggaatatgcttccggaggggaggtgttcgattacctcgtcgcccatggacggatgaaggaaaaggaagccagagctaaattccgccagattgtctctgccgtgcagtactgccatcagaagtttatcgtgcacagagacctgaaagccgagaatcttctcctggacgcggatatgaacattaaaattgcggacttcggatttagtaacgagttcacctttggaaacaagcttgacactttttgcggatcaccaccttatgcagccccagagcttttccagggaaaaaagtatgatggacccgaagtggatgtgtggtccctgggcgtcatactatatactctggtgtctggaagtctcccattcgatggtcagaacttaaaagagctccgggagcgggtgctgagagggaagtatcgcattccattctatatgtcaactgattgcgaaaacctgctaaagaaatttctgatcctcaacccttccaaaagggggaccttggagcagatcatgaaggacaggtggatgaatgtcggtcatgaggacgacgagttaaaaccgtatgtggagcctctgcccgattataaggatcctcgacgaaccgagcttatggtgtccatgggttacactagagaggagatacaggattcccttgtggggcagcgctataatgaggtgatggcgacttatctgctgctgggatacaaatcttctgaactggaaggagacacaatcacactgaaacccagaccatccgccgatcttacaaactcatctgccccttccccttcacataaagtgcagaggtccgtttcagcaaaccctaagcaacggcgattctcagatcaagcaggacctgccatccctacttcgaattcctatagtaaaaagactcagagcaataatgcagaaaataagcgaccggaggaggaccgtgagagcggtcgaaaggcgtcctctaccgccaaggtccctgcatcaccactcccgggattggaacgaaaaaagacaaccccaacacctagtacaaatagcgtgctgtccacatcaaccaatcgtagcagaaactcgccgctgttagaaagggctagcctggggcaagcttctatccagaacggtaaggattcactgaccatgcctggatcaagggcctccaccgcatccgcctcagccgcagtgagtgccgctcgacctcggcagcaccagaagtccatgtcagcttctgtccacccaaataaagcatccggacttcccccaacggagagtaactgtgaggttccacgcccatccaccgctccccaacgcgtacctgtggcatctccatcagctcacaatatttccagctcaggcggagccccagatcgcactaattttcccagaggcgtatcgtcccgttccaccttccacgctggccagctaagacaggtgagagaccaacagaacctgccctacggcgtaactcccgcttctccaagcgggcactcccagggccgacgaggcgcttctgggagcattttttcgaagttcacatccaagtttgtgcgtaggaatctgaatgagccagagtccaaggatcgcgtggaaaccctccgtccccatgtcgtgggtagcgggggaaatgataaagagaaagaggaattccgcgaggccaagccacgatccctgaggttcacatggtcaatgaaaactacttcaagcatggaacctaacgagatgatgagagagattaggaaggtgctcgacgccaacagttgccagtcagagcttcatgaaaagtatatgttgctctgtatgcacggcaccccagggcatgaagactttgtgcagtgggaaatggaggtctgcaagctgccgagattgtccctaaatggcgtccgcttcaagcgcatctctggaacgagtatggcctttaagaatatcgctagcaagattgctaatgagttgaagctgtag

SEQ ID NO: 229610 - DNA, 4128 bp, synthetic construct
  misc_feature 1..4128: note = Description of Artificial Sequence: Synthetic coding sequence
  source 1..4128: mol_type = other DNA
atggagggcgatagggtggctgggaggcctgtgttgtcttcactgcccgtcctgctcctattacccttgctgatgctgagagctgcagcccttcaccctgatgaactgttcccccacggcgaaagttggggagatcagttgttgcaagaaggggacgacgagagctctgctgtagtgaagctggccaatcccctgcatttctacgaggctcggttcagcaacttatatgtaggaacaaacggtattatttccacacaggattttcccagggagactcagtacgtggactatgacttccctactgacttcccagccatcgctccttttttagctgacatcgatacctcccatgggaggggcagggtcctgtatcgggaagacacctctcccgcagtcctcgggttggctgcgcgttacgtgcgggcagggttcccacgaagtgcaaggttcaccccaactcacgctttcctggcaacgtgggagcaagtgggggcttatgaggaggtcaaaagaggagcactgccatccggcgagcttaacacttttcaagccgtgctggccagtgatggcagtgactcctacgccctctttctgtacccagccaacggcctgcaattccttggcacccggcctaaggagtcctacaacgtccagcttcaactgccagcaagagtgggattttgtcgtggtgaagccgacgatctgaagtcagaaggcccatacttctcgctgaccagtacagaacagtctgtcaagaacctgtaccagctctccaaccttggaatccctggtgtctgggctttccatattggcagcacttcaccactggacaatgtgcggcctgctgctgtaggggacctgtcagccgctcattcctccgtaccgctgggcaggtccttttctcacgccaccgcactcgagtctgactacaatgaggacaacctggattattatgatgtaaatgaggaggaggccgaatatctgcctggagaaccggaagaggccctcaacgggcacagctcgattgacgtgagcttccaatccaaagtggataccaagcccctggaggagtcaagcacattggatcctcatacaaaggagggaacctccttaggagaggtggggggacctgaccttaagggccaggtggagccatgggacgaacgcgaaacccgcagccccgctcctcccgaagtcgatcgtgatagtctggcgccttcctgggagacgcctcctccatatcctgagaatggctccatccaaccctatccagacggtgggccagtcccatccgagatggatgtccctccggctcacccagaggaggaaatcgtgttgagaagttaccccgcttccgggcacactactcctctgagccggggaacgtacgaagtcggtctggaggataacattggatctaacacagaggtgtttacatacaacgcagcaaataaggagacgtgcgaacacaatcacagacaatgcagcagacacgcattttgtactgattatgctacaggcttttgttgccactgtcagtctaaattctatggtaacgggaaacactgtctacccgagggggctccacatagagtcaatgggaaggttagcggccatctccacgtcggacacacacctgtacactttactgacgttgacctccacgcatacatcgttgggaatgatggacgcgcatataccgcaatctcccatatccctcagcctgctgctcaggcccttttaccgctgacaccgatcggaggcctgttcgggtggctgttcgccctggaaaaacccggttcagagaacggtttcagtctggccggagctgcttttacgcatgacatggaagtgaccttctacccaggagaagaaacggtaagaataactcagacagcagagggattggaccccgagaattatctgtctattaaaacaaatattcagggacaggtgccatacgtgtctgctaacttcacggctcacatctcaccctataaggaactgtaccactatagtgactctactgtcacctccaccagctccagagattattctcttaccttcggtgctatcaatcagacgtggtcctaccgcatccatcagaacataacctatcaagtgtgccggcacgcccctcgtcacccctcttttcccacgacccaacagctcaacgtggacagggtttttgccctgtataatgacgaggaacgggtccttagattcgccgtgacaaaccagattgggccagtgaaagaggatagcgatccaacacctgggaatccgtgttatgacggttctcatatgtgtgacaccaccgccaggtgccatccagggactggagtcgactacacttgcgagtgcgcatctgggtatcagggggacggaagaaactgcgtggacgagaatgagtgtgctacgggctttcatcgatgtgggcctaactccgtgtgtatcaacctgcctgggtcctatcggtgtgaatgccggtccggatacgagtttgcggacgacagacatacttgcattctaataacccccccagctaacccatgtgaggatggcagtcacacttgcgcgcctgccggacaggcccgttgtgtgcaccacgggggttctacatttagctgtgcttgcctccccggttacgccggagatgggcaccagtgcaccgacgtggatgaatgcagcgagaatagatgccatcccgcagcaacctgctacaacactcctggatctttctcctgtagatgccagccaggatactatggcgacggctttcagtgcataccggactcaacatcaagcctcaccccatgtgaacagcagcaaagacatgcccaggcccaatacgcatatcccggagccaggttccacataccgcaatgcgatgaacagggcaacttcctacctctgcagtgtcatgggtccacaggattttgctggtgcgttgacccagacggtcacgaagtacccggaacacaaactcctccgggaagcactcctccacactgcggcccttctcccgaaccaacccagcgcccaccaacaatctgcgagcggtggcgtgagaacctgctcgagcactacggtgggacccctcgcgatgatcaatacgtccctcaatgcgacgacctggggcatttcatccctttgcaatgtcacggcaagtccgatttctgttggtgcgtcgataaggacggtagggaggtgcagggaacccgttcgcagcctggtacaactccagcctgcatccctaccgtcgcaccacccatggttagacccacaccacggcctgatgtgacccccccttctgtcggcacctttctgctgtacacccaggggcaacagattggttaccttccactcaacggcactcgtttgcaaaaagacgccgcaaaaactttgctcagcctccatgggtccattatcgttggaatcgactacgactgccgtgaaagaatggtgtactggacagacgttgccggtcgtactataagccgcgcaggattagagctgggagctgaaccagagacgatcgtgaattccgggctcataagtcccgaaggcctggccatcgatcacatcagacggaccatgtactggaccgattccgtgctcgacaagatcgaaagcgcactgctggatggaagtgaaaggaaagttctcttctacacggatctggtcaatccccgagccatcgcagtggatcccattcggggtaacctgtattggactgattggaaccgggaggcccctaagatcgagacctccagtctggatggtgagaatcggagaattctcatcaacaccgacatcggattgcctaatggtctcacttttgaccctttctccaaactgttgtgctgggccgacgccggaaccaaaaagctcgagtgtactctccctgatgggaccggtcggcgagttatacagaacaatctcaaatatcccttcagcattgttagctatgcagaccatttctatcacacagactggcgcagagacggcgttgtatcagtgaacaagcactctggtcaattcactgacgagtacctccctgaacaacggagtcatctctacggaatcaccgcagtgtacccttactgtcccactggacggaaatag

SEQ ID NO: 229611 - DNA, 2190 bp, synthetic construct
  misc_feature 1..2190: note = Description of Artificial Sequence: Synthetic coding sequence
  source 1..2190: mol_type = other DNA
atgtccacaaggacccccctccctactgtgaacgaaagggatactgaaaaccatacatctcatggagacggccgtcaagaagttacatctcggacctcacggagcggcgctagatgtagaaattccattgctagctgtgctgacgagcaaccccacattggtaattaccgcctattgaaaaccatcggaaaaggaaatttcgccaaggtgaagctggccagacacatcctgactggcagggaagttgctatcaagattattgataagactcaactcaacccaactagtcttcagaaactattccgagaggtgcggatcatgaaaattctgaatcaccccaacattgtgaagctatttgaggtgatcgaaacagagaaaacgctttatctgataatggagtatgcatcagggggtgaggtgttcgactatctggtggctcatgggaggatgaaagaaaaggaagctagaagcaagtttaggcagatagtttcagctgtgcagtattgtcaccaaaaaaggatagtccaccgagacctcaaagcagagaatttgctgttagacgccgatatgaacataaaaatagccgactttggtttttctaacgagtttacggtgggcggaaagcttgacaccttctgcggatcacctccatacgccgcacctgaactatttcagggcaaaaagtatgacggtccagaagtggatgtttggtcgctaggtgtcatactatacacattggtgagtggatccctgccttttgatgggcagaatctcaaggaactgcgcgaacgggtcttgcgcggaaagtatcggatccccttttacatgtccacggactgcgagaacctcctgaaaaggttcctggtgctgaacccaatcaaacgtgggacgctggaacagattatgaaggatcgttggatcaacgcaggccatgaagaggatgagttgaagccgttcgtggaaccagagttggatatcagtgaccaaaaaaggatcgatatcatggtgggcatgggatactcccaggaagagattcaggagtcattgtccaagatgaaatacgacgagattaccgccacctatctactgctcggcaggaagagcagcgaactggacgcaagtgatagttctagttcatcaaatctatctctcgccaaagtccgcccttccagcgatctgaataactcaaccggacaaagccctcaccataaagtgcagaggtcagtcttttcctctcaaaaacagagacgttatagcgaccacgctggccctgccatcccatccgtggtggcctatcctaaaagatcacagacaagcacagccgactcagatctcaaagaggatggcatctcgtcccgcaagagcagtgggtccgctgtggggggaaagggaatcgcccctgcctctcccatgctgggcaacgcctcaaacccaaacaaagctgatattcccgagagaaagaagtcgtccacagtaccctccagtaacaccgctagcggcggtatgaccaggagaaacacttacgtatgtagtgaaagaaccaccgctgatcgccatagtgtcattcagaacggtaaagagaacagtaccatccctgaccagcgtacaccagtcgcaagcacacactcaatcagctccgcagccaccccggatagaatccgctttcctcgcggaacagcctcgaggtcaacctttcacggacagcctcgagagcgcaggactgcgacctataacggtcccccagccagcccctcactgagtcatgaagctactccactgtcccagacccgaagccgaggctctacaaatttgttcagcaagttaacaagcaagttgacccgatcgaggaatgtgtcagctgagcagaaagatgagaacaaggaggccaagccccgatcactaagatttacttggagcatgaaaaccacttcttctatggaccctggagatatgatgcgagagatccgaaaagtcctcgatgctaacaactgtgattatgagcagagagaacgattcctgctgttctgcgtgcacggggacggccatgccgaaaaccttgtccagtgggagatggaagtgtgtaagctgccgagactcagcctcaatggcgtccggtttaaaagaatctctggcacatctatcgcattcaagaacattgctagtaagattgcgaacgaacttaaactgtag

SEQ ID NO: 229612 - DNA, 1338 bp, synthetic construct
  misc_feature 1..1338: note = Description of Artificial Sequence: Synthetic coding sequence
  source 1..1338: mol_type = other DNA
atgaagtacgatgaaattactgcaacgtacctcctgttaggtcgaaagtccagcgagttggacgcttcagactcatcctcatcttctaacctgagcctggctaaagtgaggccttcatctgacctgaacaattcaaccgggcagagcccccaccacaaagtgcagagatccgttttttcctcacagaaacagagacggtactctgatcacgccggaccagccattccttccgtagttgcctacccaaaacggtcccagacttctacagcggacagtgatttgaaggaggacggaatcagcagtcggaaatcatctggcagcgccgtggggggtaaaggtattgcccctgcttctcccatgctcgggaacgcttctaacccgaataaggccgacattcccgagcggaaaaagtcatctacggtcccgagttccaatactgcatccggagggatgaccaggcggaatacctatgtatgcagtgagcgaaccacagctgatcgccactccgtgattcagaacggcaaggaaaattccctgacagaaatgtttgcgtacgccgcaagccctgcatctgtgtgcacttctacctgtcgactgcgccatcagaaaagcatgtcaatgagcgcaagtggccaccctaagatgatgttacctcctatcgatagtgaaggggacaatttcaaggccatcacaatccctgaccaacggaccccagtggcaagtacacattcgatctcctctgccgctacccccgacagaataaggttccccaggggcacggcctcgcgctctacattccacggacaacctagggagaggcgaactgccacgtataacggacctcctgcttccccatctctttcacacgaagccacaccattgtctcagacccggagcaggggaagcactaacctgttttccaaactaaccagcaaactgacgaggcggctcccgacagaatacgaacggaacgggagatatgaggggagcagccgaaacgtgtccgcagagcagaaggatgagaataaggaggctaagcctagatcattaagattcacatggagcatgaagaccacaagctccatggatcccggagatatgatgcgcgagatccgaaaagtcctggacgccaacaactgtgactatgagcagcgtgaacgctttctcctcttctgcgtccacggtgatggacatgcagaaaaccttgttcagtgggagatggaggtttgcaaactgccccgattatctctcaatggcgttcgttttaagaggatcagtggcacgtctattgctttcaaaaatatcgccagcaagatcgcgaatgaactgaagctgtag

SEQ ID NO: 229613 - DNA, 2259 bp, synthetic construct
  misc_feature 1..2259: note = Description of Artificial Sequence: Synthetic coding sequence
  source 1..2259: mol_type = other DNA
atgagcacccgcacccccctcccaacggtgaatgaaagagacacagagaatcacacctctcatggcgacggaagacaggaggttacctcccgcacctcgcgatccggtgcgcgatgcaggaactcaatcgcctcctgcgctgatgagcaacctcatatagggaattataggcttctgaagacgatcggtaagggcaacttcgcaaaagtgaaactggcacgtcatatcctgaccgggagagaggttgccattaagattatagataagacgcagctcaatcccacctctctgcagaaactttttcgggaggtgagaattatgaagatcctcaatcatcctaacatcgtgaagctgtttgaagtcatcgaaacagaaaagactctctacctgattatggaatacgcctccggtggtgaagtctttgactatttagtcgcacacgggcgaatgaaggaaaaagaggcgagaagcaagttccggcagggctgccaagctggacagacgataaaagtgcaggtgagttttgatttgctatcactgatgtttacctttattgtgagcgctgttcagtactgccaccaaaagcgaattgtgcatcgcgatttaaaggccgagaacctccttttggatgccgatatgaacatcaagattgcagatttcggcttcagcaacgaattcactgtagggggaaaactggacaccttctgtggctcacctccatatgccgctcctgaattgttccagggcaagaagtacgacggacccgaggtggacgtttggtctctgggggtgatcctctacacccttgtgtcaggatcattgccattcgacgggcaaaacttaaaagagcttcgtgaacgcgtgttgcgcggaaagtatcgtattcctttttatatgtcaaccgactgtgaaaatctgctcaaacggttcctcgttcttaaccctatcaagcgtggcacgctagaacagattatgaaagatcgatggatcaatgctggccatgaagaagacgagcttaagccattcgtagagcccgagctggacatctcagaccagaaaagaatagacattatggtgggcatggggtactcacaggaggaaatccaggagtccctcagtaagatgaagtacgatgagatcacagccacatacctgttgctgggtcgaaagtcttccgagctagacgctagtgatagcagctcctcatcaaatctgtctctggctaaggtgagacctagttccgatctaaacaactccactggccagagtccccatcacaaggttcagagaagtgttttctcgtcccagaagcagaggaggtacagcgatcacgcaggtcctgccattcccagtgtcgtggcatatcctaagaggtcacagactagcaccgccgattccgatctgaaagaagatggtatttcttcaagaaagtccagcggctccgcagttggcggaaaaggaattgcgccagcctctccaatgctcggcaacgcatctaaccccaacaaagccgatattcccgagcgcaagaaatcatccacagtgccgtcttcaaacactgcctccggcggaatgaccaggcgcaacacatacgtatgttccgagcgaaccacagccgaccgccacagcgttattcagaacgggaaagaaaactccacgattcccgaccagcggactccagtcgcaagtacccattctattagttctgctgcaacccccgatcggatccggttcccccgaggcaccgctagccggtcgacttttcacggccagccgagagagcgcagaaccgcgacttacaatggtccccctgcttccccttccctttcccatgaagcaacgcccctgagccagactagatcccgaggcagcaccaacttgttctctaaattgacctccaagttgaccagaagtcggaatgtctccgcggaacagaaggacgagaacaaagaggcgaagccaagatctttgcggtttacatggagcatgaagaccaccagctccatggatccaggcgatatgatgagagagataaggaaggtgctggatgcgaataattgcgattatgagcagcgggagagatttcttctcttctgcgttcacggagacggccacgccgaaaacctggtccaatgggaaatggaagtttgtaagttgcctaggctgtccctgaacggcgtcaggttcaagcgcatctccggtacatcgatcgcgtttaagaacatcgcttcaaagattgccaacgagctgaaactgtag

SEQ ID NO: 229614 - DNA, 2262 bp, synthetic construct
  misc_feature 1..2262: note = Description of Artificial Sequence: Synthetic coding sequence
  source 1..2262: mol_type = other DNA
atgtccacccgtacaccgctccctacggtgaatgagcgagacacagaaaatcacacttcgcacggcgacgggagacaagaagtgactagcaggacctcccgatccggggctaggtgtcggaatagtattgcctcctgcgcagatgagcaacctcatataggaaattataggctgctgaagacaattggaaaaggaaatttcgccaaagtgaaactggcaaggcatatcttgactgggcgtgaagtcgcaatcaagattattgacaagacccagctgaacccaaccagtctccaaaagctgttccgggaggtgaggattatgaagatcctgaaccatcctaacatcgtgaagctgtttgaggtgattgagacggagaaaaccctctacctaatcatggagtacgcatccgggggtgaggtttttgactatttggtcgcccatggaagaatgaaggagaaggaggctcggtcaaagttcagacaaattgtttccgccgtgcagtattgtcaccaaaagcggatcgtacatagggacctgaaggctgaaaatctcttacttgacgctgatatgaacattaagattgcagacttcggcttttcaaatgaatttacggtcggcggaaagctcgataccttttgcgggagccccccttacgcagcacccgagctctttcagggaaagaaatatgatggcccagaagtggacgtgtggtccctcggagtgatactttacacccttgtatctggcagcctgccgttcgatggccaaaacctgaaagagctgagggaaagagtcctgagaggaaagtatcgtattccattttatatgtcaactgactgcgagaatttattgaagcgcttcctggtattgaaccccattaagcgcggaacactagaacagattatgaaagatagatggattaatgcaggacatgaagaggatgagctgaaaccattcgtcgagcctgagcttgatatcagtgatcaaaagcgcattgatatcatggtggggatggggtatagccaagaagaaatccaggagtctctgtctaaaatgaagtacgacgagatcactgccacctatttgctgctgggaaggaagagcagcgagctcgatgcttccgattcctccagttcaagtaacctcagtctcgccaaagtgcgaccgtcttctgacttgaacaactcaacgggccagtccccccatcataaggtccagagatctgtgttttccagtcagaagcagagacgctactcggaccatgcaggaccagctattccatccgtggtggcgtaccccaaaaggagccagacatctaccgccgacagtgatctaaaggaggatggcatcagttcccgtaagagcagcgggtcggcagtagggggaaaagggattgctcctgcatctcccatgctcgggaatgcaagcaaccccaacaaggccgatattccggagaggaaaaaaagttccacggtacctagttccaacaccgcctcgggtggcatgactcgacgaaatacgtacgtgtgcagcgagcggaccactgctgaccggcacagcgtgatccaaaacgggaaagaaaattctacaatccccgaccagagaaccccagttgcctcgacccacagcatctcttcagccgctacccctgatagaatccggttccccagagggaccgcctcccgcagcaccttccacgggcagccacgggagcgacggacggccacttacaacggaccacctgctagtccaagcttatcacacgaagctaccccactaagccaaaccaggtctcggggatcaacaaacttgttctctaagctcacctcaaagctcacccggcgaaatatgtccttcagatttattaagagattgcccacagagtatgaaaggaacgggaggtatgagggttccagcaggaatgtatccgcagagcagaaagatgagaataaagaagctaagcctcggagcttgagatttacttggtcaatgaaaaccacctcaagtatggaccctggagacatgatgcgcgagatcagaaaggtcctggacgctaacaattgcgattatgaacagagggagcggttcttgctcttctgtgtccacggcgacgggcatgcagaaaatctggtacagtgggaaatggaagtttgcaagctccccaggctgtccctgaacggcgtgagattcaaaagaatttcagggacctctattgcttttaaaaacatcgccagtaagatcgcaaacgagctgaagctgtag

SEQ ID NO: 229615 - DNA, 1980 bp, synthetic construct
  misc_feature 1..1980: note = Description of Artificial Sequence: Synthetic coding sequence
  source 1..1980: mol_type = other DNA
atgtctacacggacccccctgccaaccgtgaatgagcgggatactgagaaccacacaagccacggcgatgggcgacaggaagtaacaagccgaactagtaggtccggggcacgttgtagaaactcgattgcttcctgtgccgatgaacagcctcacatcggcaactaccggctcctgaagacaatcgggaaaggaaatttcgccaaggtaaaactggcccgacacattctgactggccgagaagtggcaattaagattattgataagacccaactcaatcctaccagtctccaaaagttgttcagagaggtgcgtatcatgaaaatactgaatcatcctaatattgtcaagctgtttgaagtgattgaaaccgagaagactctatatttgattatggaatatgccagcggtggtgaagtctttgattatctcgtggcacacgggaggatgaaggagaaagaagcccgatcaaagtttcggcaaatcgttagcgctgtccaatactgccaccagaagaggattgtccatcgcgaccttaaggagctgagagaaagggtactgagagggaaataccggatccctttctacatgtctacagactgtgagaatctactaaagagattcctcgtgctcaaccctataaagcggggaactttggaacagattatgaaggatcggtggattaacgctggtcatgaagaggatgagttgaaaccgtttgtcgagcccgagttagatatcagcgaccagaaaaggattgacatcatggtgggaatggggtactcacaggaagagatccaggagtcactaagtaagatgaaatacgacgaaattacggcgacatacctgctcctgggacgcaagagctccgaattagatgcttcggactcatcatcctcgagcaatttaagcctggcgaaagtgcgcccatccagcgacctcaacaactcaactgggcagtccccacatcacaaggtccagcgatccgtgttcagtagccagaagcaacggcgttattctgaccatgccggaccagccattccgtccgtggtggcctaccctaagcgctctcagacctcaaccgctgattcagacctcaaagaggacggcatttcatccaggaagtcttccggcagtgcggtgggcggaaagggtattgctcccgcatctccgatgctggggaatgcctctaaccccaataaggctgatattcccgaacggaaaaagtcttcgaccgtaccaagttccaacactgcctctgggggtatgaccaggagaaacacctacgtgtgctctgagcgaacaactgccgacaggcactctgtcatacagaacgggaaagagaatagtacaattccagaccagagaacccccgtggcgtctactcatagcataagctccgcagccacaccggaccggatccgattcccaagaggcaccgcttcgcggtctaccttccatggtcagccacgtgagagacggacagcaacctacaatggcccaccagctagcccatcactctcacatgaagcaacacccctgtctcagacaagatctagaggttccactaacttgttctcaaagctcactagcaagctcacaagacgaaacatgtcgtttcgatttatcaagtcaagaaatgtcagcgccgaacagaaagacgaaaataaggaagcaaagccccgtagtctgcggttcacctggtctatgaaaactacctcaagtatggatcctggagacatgatgcgcgaaatccgaaaggtactggatgcgaacaattgtgactatgaacagagagagagatttctgcttttctgtgtccacggtgatggacacgccgagaatctggtccagtgggaaatggaggtctgtaagcttcctcgcctgtcactgaacggggtgaggttcaaacggatctcaggtaccagtatcgcttttaaaaacatagccagtaaaatcgcaaacgagctaaagttgtag

SEQ ID NO: 229616 - DNA, 2235 bp, synthetic construct
  misc_feature 1..2235: note = Description of Artificial Sequence: Synthetic coding sequence
  source 1..2235: mol_type = other DNA
atgtctactcgtaccccccttcccacagtgaacgaaagggacaccgagaatcatacatcacatggcgacggtcgccaggaggttacatcccgcaccagtcggtccggtgccaggtgtcggaacagcatcgcgtcctgcgcagatgagcagcctcacattggcaactatagattacttaagactatcggcaagggtaattttgctaaagtgaagctggcccgacacatcctcacaggccgagaagtggccataaagataatcgacaaaacccaactcaaccccacttctctacagaaactttttcgagaagtcagaataatgaagatcttgaaccaccctaacatcgtgaagctgttcgaggtcatcgaaactgagaaaactttatatttgatcatggagtatgcttctggtggtgaggtattcgattacctcgtggcacacggccgtatgaaagaaaaggaggcacggtctaagttccggcagattgtgtcagccgtgcagtactgccatcagaagaggattgtgcaccgggacctcaaagccgaaaacctcttgctggatgcggacatgaatattaagatagcagacttcggcttctcaaacgagtttaccgtgggaggaaagcttgatacattctgcggctctcccccttatgccgctcccgaactgttccagggaaagaagtacgacggtccagaggtcgatgtgtggtccttgggggtgatcctctacactctggtctcaggtagtcttccgttcgacggccagaacctcaaagagctgagagagagggtcctccggggtaagtacaggattccgttctatatgtcgacggactgcgagaacctgctcaaacggttcctggtcctcaatcctatcaagaggggaaccctggaacagatcatgaaagaccggtggatcaacgccggtcacgaagaggatgagctgaagccttttgtcgagcctgagctggacatttcggatcagaagagaatcgacataatggtcggcatgggctactcacaggaagaaattcaagaatcgctctctaagatgaaatatgatgagatcaccgcgacctatcttctgctgggcaggaaaagcagcgagttggatgcctctgattcatcctcttcttccaatctttcactcgcaaaggtccgaccttcaagtgacctgaataactcgacagggcagagcccacaccacaaagtgcaacgcagtgttttctcctcccagaagcaacgaagatactccgatcacgcaggcccagctattccatcagtggtggcctacccaaaacgatcacaaacgagcacggccgacagcgatctgaaggaggacggaatttccagcagaaagtcttccgggagtgctgttggaggtaaggggattgcaccggcttctccgatgttagggaatgcatccaaccctaacaaggctgacattccggagcgaaaaaagtcgagtactgtgcccagtagcaacactgccagcggcggtatgacacgaagaaacacctacgtgtgcagtgagcgcaccaccgctgacagacactcagtcattcaaaatggaaaagaaaactccacaatacctgatcagagaactccggtggcatcgacgcacagtatttcatctgctgcaacgcccgaccgcattcgcttcccccgagggactgcatcacggtcgacgtttcatggacagcctagagaaaggcggaccgctacatataacggcccacccgcttcgccatcactctcacacgaagccacccccctcagtcagacacgcagtcgtggctcaaccaatctgttctctaaacttacctccaagctcacacgcagattaccgacggagtacgaacgaaatggacgctacgaaggtagttcccgaaacgtgtccgccgagcagaaggatgaaaataaggaggccaaaccgcgttcattaagattcacatggtccatgaagactacttcttctatggacccaggcgacatgatgcgcgagatcagaaaggtgctggacgctaacaattgcgactatgaacaacgcgaaaggtttctgttgttctgtgtgcacggcgatggccacgcagaaaatctcgtccaatgggagatggaggtgtgcaaattaccaaggctctctctcaacggggtgaggtttaagaggatttccggaacgtctatcgcgttcaaaaatatagcaagtaaaattgctaatgagttaaagctgtag

SEQ ID NO: 229617 - DNA, 1518 bp, synthetic construct
  misc_feature 1..1518: note = Description of Artificial Sequence: Synthetic coding sequence
  source 1..1518: mol_type = other DNA
tgagtggatgtgtggtcactgggtgtcatcctctataccctggtgagcggatcactcccattcgacggccaaaatctgaaagagttacgagagagagtgctcaggggtaaatatcggattcccttctacatgagcactgattgcgaaaatttactgaagaggttcctggtccttaaccctatcaaacgaggcacactggagcagattatgaaggacagatggattaacgcgggacacgaggaggacgagctgaagccattcgtggagcccgaattggacatctccgatcaaaagcgaattgatataatggtgggtatggggtatagtcaagaagagatccaagagtcacttagcaagatgaagtacgatgagatcactgctacatacctgctgctgggacggaagagttcggaagttcgaccctctagtgacctgaataatagcacaggtcagagcccccatcacaaggtgcaacgatctgtgttcagtagtcagaaacagaggcgctatagtgatcatgcagggccagccataccttcagttgtggcttatcccaagcgctctcagacctccacagcagactccgacttgaaagaggacggaatctcatcaagaaaaagctcagggagcgccgtcggcggaaaaggcattgcccctgcaagccccatgctcggcaatgcatccaatccaaacaaggcagatattccggagcggaagaagagttctacagtgcccagtagcaatactgccagcggcggaatgacccgcagaaatacctatgtgtgttctgaacggaccaccgccgatcggcattctgtcattcagaatgggaaggaaaattctactattcccgaccagcgaacccccgtggcttcgactcacagtatctcaagtgccgcaacacccgacagaatcagatttcctcgagggacagcatccagaagtacctttcacggccagcctcgagaacgaaggactgcaacctataacggcccacctgcctcgccttcactctctcatgaggcaacgccattatcccaaacacgctctcgaggatcaaccaatctgttctccaagttaacatccaagttaacacgacggaacatgagcttcagatttatcaagcgcctgccaacagagtacgaacggaacggcaggtatgaaggatctagtcggaacgtgtcagccgagcagaaagacgaaaacaaggaagctaaacctcggtcactcagatttacatggagtatgaaaacaacaagttctatggaccccggtgacatgatgcgagaaattagaaaggtgttggatgctaataactgtgattacgagcagcgtgagcgatttctgctgttctgcgtgcacggggacgggcatgcagaaaacctggttcaatgggagatggaagtatgtaaattacctcggctgtccctgaatggggtgagatttaaacgcatcagcgggacgtccatagcattcaagaatattgcctcaaaaatcgctaatgagctgaagctctag

SEQ ID NO: 229618 - DNA, 2259 bp, synthetic construct
  misc_feature 1..2259: note = Description of Artificial Sequence: Synthetic coding sequence
  source 1..2259: mol_type = other DNA
atgtcgagtcggactgtcctggctccgggaaatgacaggaatagcgatacgcacggtactcttgggtctggacggtcctcagacaaaggaccaagttggtcttccagatcccttggggcacgctgtcggaattcaattgcatcctgcccagaggagcaaccacacgttgggaactatcggctgctacgtacaatagggaaggggaatttcgctaaggtgaagctcgcacggcatatactgacaggacgcgaggttgctatcaagatcatagataagactcagctcaacccttctagcctgcaaaaactttttcgcgaggttagaatcatgaaaggactcaaccatcccaacatcgtcaaacttttcgaagtgattgagaccgagaaaaccctgtatcttgtgatggagtatgcttcagccggtgaggtgttcgactatctcgtgagccacgggaggatgaaggaaaaggaggctcgagccaagttccgccagattgtttccgcggtgcactattgccaccagaagaacattgttcaccgtgatctgaaggcagagaacctgctgctcgacgccgaagccaacattaagattgccgactttggcttctctaacgagttcaccctgggtagcaagctagacaccttttgcgggagtccaccctatgcagcacctgagctatttcaaggcaagaaatatgacggtcccgaggtcgatatctggtcactgggagtcatactgtacaccctggttagcgggagcctccctttcgatgggcataacctgaaggagttacgcgagagggtcctgagaggcaaatacagggttccattttacatgtccaccgattgcgaaagtatacttaggcgtttcctagtgcttaatccagctaagcgctgcacgctcgagcagattatgaaagacaagtggatcaatatcggttacgaaggggaggagttaaagccttacacagaacctgaagaggactttggcgacaccaagcggatcgaagtaatggtcggcatgggttacactcgcgaggagatcaaggagagtctaacctcacagaaatacaacgaggtaaccgcaacttatctattattagggcgtaagacagaagagggtggagaccggggtgctccagggctcgcgttggctcgggttagagcgccttcagacactaccaacgggacaagctcgtccaagggaacctcccactctaaggggcaaaggtctagcagctcaacgtaccatcgccagcgaagacattccgatttttgtggaccgtcccctgcacccctgcaccccaaaaggagtcctactagtacaggcgaagcagaactgaaggaggagcggctcccaggaaggaaagcctcgtgtagtaccgctgggagtggctcccgcggactgccaccttcgagcccgatggtgtcgtcagcccacaacccgaacaaggccgaaatccccgagcgcagaaaggactccacatcgacgcctaacaatcttccgccttcgatgatgacgcgacgaaatacatacgtgtgcactgaacgccctggggcagagaggccttcccttctccccaatggcaaggagaacagttcaggcaccccaagggtgccacccgcatccccaagcagccacagtttagcccctccgagtggcgagcgcagccgcctcgccagaggatccacaattcgcagcacattccatgggggacaggtgcgcgatcgcagggctgggggaggcggaggcggtggcgtgcagaatggccctcccgctagccctacgcttgctcatgaggctgctcctctgccggctggtcgccctcgcccaaccaccaacctgttcaccaagttgacctcgaagttaacccggagggttgcggacgagcctgagcgcattggcggtcccgaggtgacctcttgtcacctaccctgggatcagaccgagactgcccctcgtctgctcaggttcccttggtcagtgaagctgacttctagccggccacccgaagccctgatggccgctttgcggcaggcaactgccgcagctagatgtcgctgccgacagcctcagcccttcttgctggcctgtctgcatgggggtgcaggaggcccagagcctctcagccacttcgaggtcgaggtttgtcagctacctcgcccaggtttgaggggtgtgcttttcagacgtgtggccggaactgcactcgcttttaggacattggtcacgagaatctcaaatgacctggaattgtag

SEQ ID NO: 229619 - DNA, 1389 bp, synthetic construct
  misc_feature 1..1389: note = Description of Artificial Sequence: Synthetic coding sequence
  source 1..1389: mol_type = other DNA
atgagttcaaggacagtcttggccccaggcaatgacagaaattccgatacacacggcacactgggctctgggaggagcagtgataaaggtccgtcctggtcctctagaagtcttggcgctagatgtagaaacagtattgcctcatgccccgaagaacagccacatgtgggaaattataggctactgagaacgatagggaagggaaattttgccaaggtgaaactagctcgccatatcttgaccggcagggaggtagccataaagatcatcgacaaaacccagctcaatccttccagcctccagaaattattccgagaagtaaggattatgaagggactgaaccaccccaatatcgtcaaactgtttgaagttatcgagactgagaaaacattatacctcgttatggaatacgcttcagcaggcgagcctccaacactgtccgctttgccactatgccacctgcctctgcccctgcacctgactttgacacccttgggcttgtgtccagctggggaggtgtttgactacctggtgagccacggacgaatgaaggagaaagaagcccgagcaaagttcaggcaaattgtgagcgccgtgcactattgtcaccagaagaacatcgtgcatagagatctgaaggccgagaacttactgctggatgccgaagcaaatatcaagattgccgacttcgggttcagcaacgaatttaccctcggaagcaagctggacacattctgtgggagtcccccttacgccgctcccgaactgtttcaagggaagaagtatgacgggcctgaggtggatatctggagtctgggtgtaatcctgtatacccttgtgtctggtagtctccctttcgacggccacaaccttaaagaactacgagagagggtcctgagggggaagtaccgcgtgcctttttacatgagtaccgactgtgagagtattttgagaaggttcctcgtattaaatccagccaagagatgtacactggagcagataatgaaggacaagtggataaatattgggtatgagggcgaggaactgaaaccctatactgagcccgaggaggattttggcgataccaagcggatcgaggtgatggtgggcatgggttatacccgagaggaaatcaaggagtcattaacaagccagaaatataatgaagtgactgcaacctacctactgctgggtaggaagacagagcctgacgagcatgggggaggtggcgctgaaggaggagccgctgccagacccgaaggtgagctacaacaccggggagaatgggagtccagggctgcacctctgcagccccacggccagcagcgcccacaaccacaacaaggtagagatccaagagccgctgagggccaacacgagcacccctag

SEQ ID NO: 229620 - DNA, 2067 bp, synthetic construct
  misc_feature 1..2067: note = Description of Artificial Sequence: Synthetic coding sequence
  source 1..2067: mol_type = other DNA
atgagcagtcgcaccgtgctggctccgggaaatgacagaaacagtgacactcatgggaccctcgggtccggacgtagctccgataaggggccttcatggagcagtaggtccctcggcgctaggtgccgcaattctatcgcctcatgtccagaggaacaaccccacgttggcaactaccggcttctgaggaccatcggcaaggggaacttcgccaaggtgaaactcgcccgtcacatcttgacaggaagggaagtggccattaagattatcgataagacccagctgaatcctagttctttacagaaactctttagagaagtaagaatcatgaagggactgaatcatccgaatatcgtcaagctgttcgaagtcatagagactgaaaagacactatacctggtcatggagtacgcttctgctggcgaggtgtttgattacctggtttcacatggtcggatgaaggaaaaagaagccagggccaagtttcgccagatcgtctctgcggtgcattactgtcatcaaaagaacattgtgcacagagatttgaaggcagagaacctgctgttggacgctgaggctaacattaagatagccgactttggttttagcaatgaattcacactggggtctaagctcgacaccttttgcggttcgcccccttatgcagcgcctgaactcttccagggcaaaaagtatgatggtcccgaggtggacatttggagcctaggagtcatcctgtatacgctggtgtccggatcacttcccttcgatggccacaacctgaaagaactgcgcgaacgagtgcttcggggtaaatacagagtacccttttatatgtctactgattgcgagagcattttgcggaggttcctggtgctgaaccctgcaaagcggtgtaccttggaacagatcatgaaagataagtggattaacattgggtatgagggagaagaattgaaaccctacacagaaccagaggaggatttcggtgacacaaaaaggattgaagttatggttggcatggggtatacacgggaggagataaaagaaagcctcaccagtcagaagtataacgaagttacagcaacctaccttctgctggggagaaagacggaagaggggggagatcggggtgctcccggactcgccctcgccagggtcagagctccaagcgacaccactaacggaaccagtagtagtaagggcacctcacacagtaaaggtcagcggtccagcagctcgacataccacagacagagacgccactctgatttctgcggccctagcccagccccactccatcccaagagatcaccgaccagcacaggagaagccgagttaaaagaagagcggctcccaggccgaaaagcatcatgttccaccgctggaagtggttcgcggggactgccccctagtagcccaatggtctccagcgcccacaatccaaacaaagctgaaatccccgaacgcagaaaagattctacgtcaactcctaataacctgcctccctcgatgatgactcggcgaaacacctatgtatgtactgagcgtcccggtgccgaacgcccttcactgcttcctaatggtaaagaaaattcctcaggcactccaagggttcctcccgcttcaccctcttcccactctcttgccccacctagcggggagcgttccaggctggcgcgaggctctaccattcgctcaacgtttcacggaggacaggtcagagatcgtcgggcaggagggggtggcggtggcggagtccagaatggccctcccgcaagcccgacgctagctcatgaggcagcacccttgcctgccggaaggcctcggcctactaccaacctctttaccaaactaactagtaagctgaccaggcgcgtgacactggacccaagtaagcgtcagaacagtaaccgatgcgtaagtggagcctccttgcctcagggcagcaagatccgctcccagacaaacctgagggagtcgggcgacttaaggtcccaggtagcaatttatctagggattaagcgaaagccccctcctgggtgctcggattctccaggggtttag

SEQ ID NO: 229621 - DNA, 240 bp, synthetic construct
  misc_feature 1..240: note = Description of Artificial Sequence: Synthetic coding sequence
  source 1..240: mol_type = other DNA
atggcagcacttagacaagcaaccgcagccgctaggtgcagatgtcgccagcctcagcctttcctgctcgcttgcctccatgggggtgcagggggacccgaacctctcagccactttgaggtggaagtttgccagctgcctcgacccggactgcggggagtgctgtttcggagggtggccggaactgctctagctttccgcaccctcgtgacaagaatttctaacgacctggaattatag

SEQ ID NO: 229622 - DNA, 1032 bp, synthetic construct
  misc_feature 1..1032: note = Description of Artificial Sequence: Synthetic coding sequence
  source 1..1032: mol_type = other DNA
atggcagctgccacggagctgaacaggccctctagtggggaccgaaaccttgaacggagatgccggccaaacctgagcagagaagtcctttatgaaatcttccgctcactccacaccttggtcggccagttggacctaagggatgacgttgttaagatcaccatcgattggaataaactacagtctctatccgcgttccagccagccctgttgtttagtgcgctggaacagcacattctttatctgcagcctttcctggccaaactgcaatcccctatcaaagaggaaaatactaccgcggtcgaggagatcggaaggaccgagatgggcaacaaaaacgaggtaaacgataagttttctatcggtgacctgcaggaagaagaaaagcacaaggaaagcgatctgcgagacgtcaagaagactcaaatacactttgaccccgaggttgtccaaattaaagccggaaaagccgagattgacagacggatcagcgcctttatcgagcgaaagcaagcggagataaacgaaaataatgtgcgggagttttgtaatgtcattgattgtaaccaagagaacagttgcgcccgtaccgatgctattttcacaccttacccgggattcaaatcacacgtgaaggtttcccgcgtggttaatacctacggaccacagacccgtcccgagggcattcctgggtcaggtcacaaaccgaattccatgttacgcgactgtggcaaccaggcagtggaagaacgtctgcagaatatagaagctcacttgcggctgcagacaggcggacccgtgcctcgggatatctatcagcgaatcaagaaactagaggacaagatcttagagctggagggaatctctcctgagtactttcagtccgtctccttttctggcaaaaggcgcaaggtgcagcccccacaaaactactctcttgctgagttggatgagaagattagcgcgctcaagcaggctcttttgaggaagtctcgggaagcagaaagcatggctacccaccacttaccttag

SEQ ID NO: 229623 - DNA, 1035 bp, synthetic construct
  misc_feature 1..1035: note = Description of Artificial Sequence: Synthetic coding sequence
  source 1..1035: mol_type = other DNA
atggcagctgccaccgaactgaatcgcccttctagcggcgatcgaaacctcgagaggaggtgtcggcctaacctgagcagggaagtcctgtatgagatctttcgcagtctgcacacccttgtaggacaactggacttacgggacgacgtcgtgaaaatcacgatagactggaacaaactgcagagtctttctgcttttcagcctgctctgctgttctccgcactggagcagcacatcctctatctgcagccctttctggcaaagctgcaatctcctatcaaggaggaaaacaccacagcagtagaagagatcggcaggactgaaatgggaaataagaacgaagtcaacgataaattctcaattggagatctgcaggaggaagaaaaacacaaagagtcagatctcagggatgttaaaaagacccagattcacttcgaccctgaggtggtccagattaaagcaggtaaggctgagattgacaggaggatctcagccttcatagaaaggaagcaggctgaaataaacgagaacaacgtacgggagttctgcaatgtgatcgactgcaaccaggagaacagttgcgcccgaacggacgcaatcttcactccctacccaggcttcaagtcacatgtgaaagtctcccgcgtggtaaatacctacggaccacaaactcggccagaaggcatccccggatctgggcataaaccaaatagcatgcttagagattgtggcaaccaggcagtggaggagcgcctgcagaacatagaagcccatctgaggctgcagacagggggacccgtgcctagagatatataccaacgaataaaaaaacttgaagacaaaatcctcgaactggagggcatttccccggaatactttcagagcgtgagtttctctggcaagcgtcggaaagtccagccacctcaacagaactattccctggcagagctggacgagaagatttcggctctgaagcaggctctgctacgaaaaagtagagaggccgaaagcatggctacccatcatttaccctag

SEQ ID NO: 229624 - DNA, 4944 bp, synthetic construct
  misc_feature 1..4944: note = Description of Artificial Sequence: Synthetic coding sequence
  source 1..4944: mol_type = other DNA
atggttcaaaagaagaagttctgtcccagacttcttgattacctcgtgattgtgggcgctaggcacccatcctcagattccgtggcccagacccctgaactgttacgcagatacccactcgaagatcacaccgagtttccactgccccctgacgtcgtctttttctgccagccagagggctgtctgagtgtgcgccagcgcaggatgtcactgcgtgatgatacttcattcgtgttcacactgactgataaggacactggcgtcactaggtatggtatttgtgtgaatttctacagatccttccagaagcggatctcaaaggaaaagggcgagggcggtgccggttctagaggcaaagaaggcacacatgcaacatgtgctagcgaagaggggggtaccgagtcttctgagtccggtagctccctgcaaccattgtctgccgacagcacacctgacgtgaatcagtctcccagaggcaaacgtagggccaaagccggaagtcgcagtagaaatagcaccctgacttccctatgtgttctgtcacactacccttttttctccacattccgtgagtgcctgtataccttaaaaagacttgtcgactgctgctccgagcgtctgctaggcaaaaaactcggcatcccacgaggggtgcagcgggataccatgtggcggatctttaccgggagtttgctcgtcgaggaaaaaagctctgctctgctgcacgacctgcgcgagatcgaggcatggatctacagattactgcggtcaccagttcccgtgtccgggcagaagagggtggatatcgaggtacttccccaggagttacagcccgctctgacattcgcgctaccagacccctccaggtttacactggtggactttcctctgcacctccccttagagctgttgggagtagacgcttgcctccaggtcttaacttgcatactcctagaacataaagtcgtgctgcagtcccgggactacaatgccctatctatgtccgtgatggcgtttgtcgccatgatttatcccctggaatatatgttccccgtgatcccactgctcccgacatgtatggctagtgccgagcaattactgctggctccaacaccttatattattggagtaccagcgtcttttttcctgtataagctggattttaagatgcccgacgatgtgtggttggtcgatcttgactcaaacagagttattgcacccacgaacgccgaagtccttccaatcctacctgagccggagtcactcgagctcaagaagcatttgaaacaggctttagcgagtatgtcactgaacacccagcctatcctgaacctggaaaagtttcacgaaggtcaggagatccctctgctgctggggcgaccctctaatgacctgcagtccacccctagcaccgagtttaaccccctgatatacggcaatgacgtagacagtgtggatgttgcaaccagagtcgctatggtcagatttttcaacagtgcaaatgtgctacaggggttccagatgcataccagaactcttagactattccctaggcctgtggtggcattccaggcgggatcgttcctggcgtcacgtcccaggcaaacccctttcgccgaaaaattggcaaggactcaggctgtagagtacttcggggaatggatcctgaatcctacaaactacgcttttcagagaatccacaataatatgttcgacccagcactcatcggggataaacctaagtggtatgctcatcagctgcagccaattcactatcgagtatatgactccaacagccagctcgccgaggccctatccgtgccgccagaacgcgactccgatagtgaaccaacagacgacagcggctcagacagcatggactacgacgacagctcctcatcttatagctcacttggggacttcgtcagcgaaatgatgaaatgcgacatcaacggagacactccaaacgttgatcccctcacccacgcagccctcggggatgccagcgaagtcgagatcgacgaactccagaatcagaaagaagcagaagaaccaggccctgacagcgagaactcccaggagaatccaccactgagaagcagctcatcaacaactgctagcagcagtcctagcacagtgattcatggggcaaatagtgaacctgcagattcaactgaaatggatgataaggctgcagttggcgtgagcaagcccctccccagcgtccccccaagcatcggtaaaagtaatgtcgataggcggcaggccgagatcggagagggctcggtgagacggaggatctatgataacccttacttcgagcctcagtacggctttccccctgaggaagatgaggacgagcagggcgagtcctacaccccacgattctcccagcatgtttctggcaatagggcgcaaaagttgctaaggcccaattcactgcgtttggcctccgactctgatgcagagagtgactccagggcgtcatctcccaactcaacagtgtccaacacctctaccgagggcttcggtggcattatgtcattcgcgagcagtttgtacagaaaccactcaacatcattttctctgtctaacctgaccttgccaaccaagggcgctcgtgaaaaggctacgcctttcccctccctcaaagtgttcggactaaatacgctgatggagattgtgactgaagccggtccgggttcaggcgagggcaaccgcagagcccttgtggatcagaaatcgagcgtgattaaacactcaccgacagtgaagagagaaccgccaagcccccaggggaggagcagcaacagtagcgaaaatcaacagttcttgaaggaggtcgttcatagcgtgctggatgggcagggagtgggatggctgaatatgaaaaaagttaggcggttattagagagcgagcagctcagagtgttcgttctatcgaaactgaacaggatggttcaatcagaggacgacgcccgacaagatatcattccagatgtggagattagtcgcaaagtctataaggggatgctggatttgctgaagtgtacagtcctgtccctagaacagtcatacgcacatgctgggctcggaggaatggcatctatttttggcctgcttgagattgcccagacacattattactccaaggagcccgacaaaaggaaaagatctccaactgaatctgtgaacacgccagtcggaaaggatcctggcctcgccggtagaggagatccaaaggcgatggcacaactgcgcgttccacaactgggaccacgtgcccctagcgccacagggaaaggtcccaaggagttagacacacgcagcctcaaagaagaaaactttatcgctagcattgagttgtggaacaaacatcaagaggttaagaaacaaaaggctctggaaaagcagcggcctgaagtgataaagcccgttttcgacctgggggagacagaggagaagaagtctcagatctccgccgattccggcgtcagtctgacatcttcttcacagcggaccgatcaggattccgtcatcggagtgtctcctgccgtgatgatcaggtcctcctcacaggactcggaggtgagcacggtcgtgtcaaatagcagcggagagacacttggagcggattccgacttatcctctaatgcaggggatggtccagggggagaaggcagtgtccacctggcgtcctccagagggacactaagcgactcagaaatagaaacaaatagcgcaacctcgaccatcttcggcaaagcccactctctgaagcccagcatcaaggagaagctggccggaagtccaattagaacaagcgaagacgttagccaaagggtctatctctacgagggtctcctcgggagggacaagggaagtatgtgggaccagttagaagacgctgctatggaaactttcagcatttccaaggaacgatcaacactgtgggaccagatgcagttctgggaggatgctttcctcgatgctgtcatgttggagcgtgaaggaatgggcatggaccagggccctcaggagatgatagaccgctacctatccctgggcgagcatgatagaaagcgcttagaagacgacgaggaccgcctgttggctaccctccttcacaatcttatcagctacatgctcctaatgaaggttaataagaacgacattcgaaaaaaagtacgcaggcttatgggaaagagtcatattggcctggtgtatagccaacagatcaatgaggtgcttgatcagctggccaatctgaacgggagagatctctccatctggtcctctggatcccgccatatgaagaagcagactttcgtggtgcatgcgggaaccgacactaatggcgacatctttttcatggaagtgtgtgatgactgcgtggtcctgcggagcaacatcggaaccgtgtacgagcgctggtggtacgagaagctcattaatatgacctactgccccaagaccaaggttctgtgcttgtggaggcggaatggaagtgaaactcagctaaataaattttacaccaagaagtgccgagaactgtactactgcgttaaggactccatggagcgggctgctgctaggcagcagtcgataaaaccgggtcctgagctgggcggagagtttcctgtacaggatttgaagacaggcgagggcggtctcttgcaggtcacgcttgaaggcattaatctgaagttcatgcacaaccaggttttcatagagctgaaccacatcaaaaaatgtaacacagtccgcggagtttttgtgctggaggagttcgttccagagattaaagaggtggtcagccacaaatacaagacccctatggcacacgaaatttgttattcagtattatgtctcttttcctatgtggccgctgttcattcatcagaggaggatctcagaacaccgccacgcccagtcagctcctag

SEQ ID NO: 229625 - DNA, 4767 bp, synthetic construct
  misc_feature 1..4767: note = Description of Artificial Sequence: Synthetic coding sequence
  source 1..4767: mol_type = other DNA
atggttcagaagaaaaaattctgcccacggcttttggattacctggtgatagtcggtgcgagacacccatcaagcgactctgttgcccagactcccgaactcctgaggagatatccattggaagaccacacagagtttcccctgccaccggacgtggtctttttttgtcagcccgaggggtgcttaagcgtgaggcagaggcggatgagcctgcgggatgacacctctttcgtctttactttaaccgacaaagacacgggtgttacaaggtacggaatatgcgtgaatttttatcggtcttttcaaaagcgcatcagcaaggaaaaaggagaaggcggtgcagggtctagaggtaaagagggcacccacgctacatgcgcgtctgaggaaggcggtaccgaaagctcggagtccggctcaagcttgcagccactctctgccgatagcacccctgacgtgaatcaaagccctcgtgggaaacgaagggcaaaagccggaagtcgaagcagaaacagtaccctcacctctctgtgcgttcttagtcattatccattcttttctacattccgtgaatgtttatataccttaaaacgcctggttgactgttgctcagaaaggctcctgggcaagaagctgggaattcctaggggagtacagcgagatacgatgtggcgaatcttcaccgggagccttctagtagaggaaaagagtagcgccctacttcacgacctgagggagatagaggcatggatctatcgcctgcttcgtagtcctgtccccgtgtccggccagaaacgtgtcgatatcgaagtgctgccccaggagctccagcccgcactcaccttcgccctgccagacccctctcgatttacactagttgacttcccactgcacttgccattagagcttctcggcgtagacgcttgtctccaagtcctgacctgcatcttactcgagcacaaagtcgtccttcaaagtcgggattacaatgctctcagtatgtccgtcatggcattcgtggctatgatctaccctcttgagtacatgttccccgtaatacccttgctgccaacatgcatggctagcgcagagcagctgctgttggccccaaccccctatatcatcggggtacctgcatccttctttctttacaaactggacttcaaaatgcctgacgatgtatggttagttgacctggactccaaccgtgtgattgcccctacaaatgcagaggtgcttcccatattaccagagcccgagagcttagagctgaagaagcacctgaagcaggctctggcttctatgtcgctgaacacccagccaatcttgaacctggagaagtttcatgaaggtcaagagatccctctgttgctgggcagacccagtaatgacctgcagagtaccccttccacggaattcaaccccctcatttatggaaatgacgtcgactccgtggacgttgctactcgagtcgctatggttcgtttttttaatagcgccaatgtgttgcagggattccaaatgcacaccaggacccttcgcctgttcccgaggcctgttgtggctttccaggccggttcttttctggcttcgagacctcgccaaaccccctttgcagaaaagttggcccgaacgcaggcggtggagtactttggagagtggatcctgaaccctactaactatgctttccaaaggattcataataatatgtttgacccagctttgataggagataagcctaagtggtatgcccaccagttgcaacccatccactatcgcgtctacgactccaactcacagctcgccgaggcactctctgttccaccagagagggatagtgattccgagcctaccgatgactctggcagtgactccatggactacgacgattcaagctctagttattcttccctgggagatttcgtcagtgagatgatgaagtgcgacatcaatggtgatactcccaacgtcgacccactcacacacgctgcattgggagacgccagcgaagtagagattgatgagttgcagaatcagaaggaagctgaagaaccgggacccgattccgaaaatagtcaagagaaccccccactgaggagcagctcctctacaacagccagcagctctcctagtaccgtcattcacggtgcaaattccgagcccgcagactctactgagatggacgacaaagctgccgtgggggtttcaaagccactcccctccgtccctccctcaatcggaaagtctaatgtggaccggaggcaggccgagatcggcgaggggagtgtcaggaggcggatctatgacaacccgtatttcgaaccgcagtacggctttcccccagaagaggacgaggacgaacagggggagtcatacaccccacggttttctcagcacgtgagcggcaatagggctcagaaactcctgcgaccaaacagcctgcgacttgcatcggattcagacgcggagagcgatagtagagccagtagtccgaatagcaccgtttctaacaccagcacagaaggatttgggggaatcatgtcattcgctagcagtctttataggaatcattctaccagctttagcctgtccaacctgaccctaccaacgaagggggcacgggaaaaagccactccctttccgagtcttaaagggaatagaagggcccttgtggaccagaagagctccgtgatcaagcactctcctacagtgaagcgggagccaccctctccccaggggagaagcagcaatagttcagagaaccaacagttcctgaaggaggtcgtccatagcgtcttggacggacagggcgttggctggctgaacatgaagaaggtccgccgactgctagaatctgaacagctgcgggtattcgttctgtctaagctgaaccgtatggtgcaaagcgaggacgatgcacggcaggatatcatccctgacgtagagatcagcagaaaggtatacaaaggcatgctggacctgttaaaatgtacagttctgagtcttgagcagtcctacgcccacgctgggctggggggaatggcctcgatatttggcctactcgaaatcgcccagacccattattacagcaaggaacctgacaagaggaagagaagcccgactgaaagcgtaaataccccagtgggcaaggatcccggactggcaggtcgcggagaccctaaagctatggcacagctaagggtaccacagctcggccctagggcaccctccgcaacgggcaagggaccgaaagagctcgacacaagatccctcaaggaagagaattttatagcctcaatcggacctgaagtcatcaagcccgtctttgatctaggagagactgaagaaaagaaatctcaaatcagcgcagattccggggtttccttgacgtcgagcagtcagcgcacagaccaggacagtgtgatcggggtttccccggcagtcatgatccggtcaagtagtcaagacagtgaggtgtccacagtggtgagcaattcttcgggggaaaccctgggcgcagattccgatctttcctctaatgcaggggatggcccaggtggggaagggagcgtgcatctggcgtccagtagggggaccttgagtgactctgagattgagacgaattcagccacttccactatttttggtaaggcccactctctgaagccttcgatcaaagaaaaattagcaggctctcctatccgcacatccgaagatgtcagtcaaagagtctacctttacgaaggcctgctgggaaaggagcgctctacgttgtgggatcagatgcaattctgggaggacgctttcttggacgccgtaatgctggaacgtgagggcatgggcatggatcagggacctcaggagatgatcgatcgatacctatcgctgggggagcacgacagaaagaggctagaggacgatgaagacagactactggcgacactgctgcacaatctaatttcttatatgctgctaatgaaggtcaataagaatgacatccggaaaaaggtaagacggctcatgggtaagagtcacatcggcctggtttatagtcagcagataaatgaagtactggaccagctcgcaaatttaaacggccgagatctcagcatctggtcatctggcagccgccatatgaaaaagcagacttttgtggtccacgcagggacagacacaaatggggatatattttttatggaggtgtgcgatgactgtgtcgtgcttcgaagcaacatcgggacagtgtatgagcgctggtggtatgaaaaactaatcaacatgacctattgtccaaagacaaaagttctctgtttgtggcgacgcaacggatcagagacacagctcaataagttctatactaagaagtgcagagaactgtattattgtgttaaggattcaatggagagagctgccgctcggcaacagtctataaagccaggtccagagcttgggggagaatttcctgtgcaggacctcaagacaggggaaggcggtttgctgcaggtcaccctggaaggaatcaacttgaaatttatgcataaccaggtatttatagagctcaatcatatcaaaaagtgcaacactgtgcgaggcgttttcgtcctggaggagttcgttccggaaatcaaggaggttgtcagccacaaatacaaaaccccaatggctcacgagatttgctacagcgtcctgtgtctgttttcctacgtggctgctgtccactccagtgaagaggatctaaggacaccaccaagacctgtaagcagctag

SEQ ID NO: 229626 - DNA, 4827 bp, synthetic construct
  misc_feature 1..4827: note = Description of Artificial Sequence: Synthetic coding sequence
  source 1..4827: mol_type = other DNA
atggtacaaaagaaaaagttttgcccgaggctcttggactatctcgtaatcgtgggagctagacatccctctagtgatagtgtcgcgcagaccccagaattgctgcgcagatacccgctggaggaccacacagagtttcccctgccacctgacgtggtctttttctgtcaacctgagggctgcttatccgtaagacaaaggaggatgagtctccgcgatgacacatcttttgtttttacactgacggataaggacactggagtcacaagatatggaatctgtgtgaacttctaccgatcttttcagaagcgcattagcaaggagaaaggtgagggaggtgccggtagcagagggaaggagggtacccatgcaacttgcgcctccgaagaaggagggactgaaagtagtgagtctggcagttctctgcaaccactctctgcagattccactcccgacgtcaatcagtcaccacgaggcaaacgcagggcgaaggcagggagccgctctcgaaattctacactgacctccctgtgcgtcctcagccattaccccttttttagtacatttcgggagtgcctttataccctaaagcgcttagtggattgctgttccgagaggctgctcgggaaaaaacttggcatccctcgtggagtgcagagagacaccatgtggcggatttttacgggctcgctcctggtcgaggaaaaatcatccgctctgcttcacgatctgcgcgaaattgaagcctggatataccgcctactgagatccccagtgcctgtgtccggtcagaagagggtggacattgaggtgctccctcaggagctacagccagcacttacttttgctttgcctgatccttcacggtttactctcgtggattttccgctgcacctgccgctggaactgctgggagtggacgcctgcctgcaggtactgacctgcattcttctggagcataaagtagtgctgcagagtagggattataacgccctgtccatgagcgtgatggcattcgtggccatgatatacccacttgagtacatgtttccggtgattccattactgcctacctgtatggccagcgctgaacagttactactcgcgcctactccatacattataggagtgccggcaagcttcttcctatacaagttagactttaagatgccagatgacgtctggctcgtagatttggacagcaatcgggtcattgcacctacaaacgccgaagtgctccccattttgccggagcccgaatctctcgagctgaagaagcatctcaagcaggccctcgcctctatgagccttaacactcagcccatcctgaatctagagaaatttcatgagggtcaagaaatcccattattgctggggaggccttccaacgacctgcaatccactccttcaactgagtttaaccctctcatttatggaaatgacgtggactccgtagatgtggccacacgggtggcgatggtacgctttttcaactccgccaacgttctgcaaggttttcagatgcacactcggactctaaggctgtttccacgcccagtcgtcgctttccaggccggatcattcctggcctcccggcctcggcagacacccttcgccgagaaactggcgaggacccaggcagttgaatacttcggggaatggattctgaatcctacaaactacgcctttcaaagaatacataacaatatgtttgatccagcgctgattggcgacaagccaaagtggtatgcgcaccaacttcaaccaattcactatcgtgtctacgactccaactcccagctggcggaggcactatccgtcccccctgaaagagactctgactccgaacccactgacgactcaggctcagattctatggactatgatgattccagttcatcttactcctcccttggagatttcgtgtccgagatgatgaagtgtgacatcaacggtgacacccctaacgtcgaccctcttactcacgccgctctaggagatgcatctgaagtggagatcgacgaactgcagaaccaaaaggaggcggaagagcccggacccgactctgagaactcccaggagaaccccccattacgatccagttccagtaccactgcatcatctagtccttccacagtaatccacggcgctaattcagagcctgcagactcaaccgagatggacgacaaggccgctgtgggagtctcgaagcccttgccttctgtcccgccatccattggcaagtccaatgttgaccgcagacaagccgagatcggagagggctctgtgcgaagacgaatttatgacaatccatattttgagccacaatacggcttccctcccgaggaggacgaggatgaacagggtgaatcatatactccacgtttctcccagcatgtatccgggaatcgggcacaaaagttattgagacctaatagtctccgcctagccagtgacagcgatgccgagagcgactctagagccagctctccgaacagtacagtctccaacacttctactgaaggcttcggcggaattatgagttttgcctccagcctctaccggaaccacagtacttccttctcgctatctaacttgaccctccccacaaagggtgccagggaaaaagctaccccatttccaagcctgaaagtgtttggcctgaacacactgatggaaattgtgacggaagcagggcctgggtccggagagggtaaccgtcgagcactggtcgatcagaagtcttccgtgatcaaacactcccccactgtgaaaagagaacctccaagtccgcagggaagatcatctaacagcagcgaaaaccagcagtttctaaaagaggtggtacactctgtcctggacggacaaggcgtcggctggttaaatatgaaaaaggttagaaggctcctcgaaagtgagcagctccgggtgttcgtgctatctaaactcaatcgtatggttcagagtgaggacgatgcgagacaagacattattccagacgtcgaaatctcgcgaaaagtatacaagggtatgctcgacctgctgaagtgcacagttttatctctagagcagtcttacgcccacgccggactcggtggcatggcaagcattttcggcctgttagaaattgcgcagacccactactacagtaaggaacctgataagcgtaaacggtcccctactgagagtgttaatactcccgttggaaaggaccccggtttagcaggccgtggggatcccaaagccatggcgcagttacgcgtgccccagttggggcctcgggcaccctcagcaacagggaaaggcccaaaagagctggacaccaggtcactcaaagaggagaatttcattgcatcaatcgggccagaggtaattaagcctgtttttgacctcggagagacagaggaaaagaaaagtcagatttccgccgattccggtgtctcattgacatcatcgagccagcggactgatcaagacagcgtgatcggagtgtcgcccgcagtgatgatccgctcaagctcccaggacagtgaggtgtccacagtggtgtctaatagctcaggagagacgttgggcgcagactcggacttgagtagcaacgccggagatggacccggaggcgaagggtccgttcacttggccagttcgcgtggaacactgtccgatagtgaaatagaaaccaacagcgctacgagtactatattcggcaaggcccattctctgaagccatcaatcaaagagaagctggccggatcacccatcagaacaagtgaagacgtgtcacagcgagtgtatctgtacgaaggattgctcggtaaagagcggtctactctgtgggaccagatgcagttttgggaggatgctttcctggatgcagtgatgcttgagcgagaggggatgggaatggatcagggcccacaggagatgatcgatagatacctctctctgggcgagcacgatcgcaaaagattagaggatgatgaagacagacttctggccacactcctccacaaccttatatcatacatgcttcttatgaaggtgaataagaacgatatcaggaagaaggtgcgcagactgatgggcaagtcacacatcggactggtctattcccagcaaataaatgaggttctggatcaattagctaacttgaacgggcgtgacctttccatttggtcctcggggtcaagacatatgaaaaaacaaacatttgtcgtacacgctggaaccgacactaacggtgatatcttttttatggaggtctgtgatgattgtgtcgttttgagatcaaacattggaacagtgtacgagcgttggtggtacgagaagttgataaatatgacctactgccccaaaaccaaggtgctgtgcctttggcgaaggaacggcagcgagactcagctgaataaattctatacaaagaagtgcagagagctttattattgtgtaaaagacagtatggagagggccgctgcccgacaacaaagtattaagccgggtcccgaacttggaggagagtttcctgtgcaggatcttaagaccggcgaaggtgggctgttacaggtgacgctggaaggtattaacctgaaatttatgcataatcaagttttcattgaactcaaccacatcaaaaagtgtaataccgtacggggtgtgttcgtgctggaagagttcgttcccgagattaaggaagttgtctcccataagtataagacaccgatggcacacgagatctgttatagtgtgttatgtcttttcagctatgtggcggcagttcacagctctgaagaggacctaaggacccctccacgccctgtgagctcctag

SEQ ID NO: 229627 - DNA, 4746 bp, synthetic construct
  misc_feature 1..4746: note = Description of Artificial Sequence: Synthetic coding sequence
  source 1..4746: mol_type = other DNA
atggtccagaagaaaaaattctgtccacgcctcctggactacctagtgattgttggagcgagacatccaagctcagattccgtagcccagaccccagagcttctccgcagataccccctggaggatcatactgagtttccactgccgcctgatgtcgttttcttttgtcagcctgaaggctgcctatccgtacggcaacgccgtatgagcttaagggatgacacttccttcgtcttcactcttacagacaaagatacaggagtgactaggtacggaatctgtgttaatttttaccgttcatttcagaaacgcatctcaaaagagaagggtgaggggggtgccggaagccggggaaaggagggcacccacgcaacctgcgcctcagaggagggcggaactgagtcctccgagtccggttcaagcctgcaaccactcagtgctgacagtacgccagacgtgaaccagagtcctcggggaaaacgccgagccaaggccggttctcgctctcgcaatagcactcttacctcactgtgcgttttgagtcactacccattctttagcactttccgagaatgtctgtataccctcaaaagactagttgactgttgttccgaacgtcttctcggaaagaaattgggcataccgcgaggagtccagagggatacaatgtggaggatttttaccggcagcctgctggtagaagagaagtcgtccgcccttctgcatgatttacgagagatcgaggcatggatttatagactcctgagatctcctgtccctgtcagcggacaaaagcgcgtggacatagaggtactcccacaggagctccagccggctctgacttttgcactacctgatccgtcccgattcactctggtagacttcccacttcacttacctttggagctccttggtgttgatgcctgtctgcaggttctgacctgtatcctgttagagcacaaggtcgtcctgcagtcaagagattacaacgcactcagcatgtctgttatggcctttgtagctatgatctatccgttagaatatatgtttcccgtgatccctctgctgccaacctgtatggcctctgccgagcagttgctgctcgctccgaccccctatatcatcggcgttccggcttctttttttctatacaagctcgattttaagatgccggacgatgtgtggctggtggacctcgactctaaccgtgtcatcgccccaaccaatgccgaggtcctccctattctcccagaaccagaaagcttagaactcaaaaagcacctgaagcaggctttggcctctatgagtttaaatacacagcctatcttgaacctggaaaaattccacgaaggccaggaaatcccgcttttgctcggacgcccatccaacgacctgcagtctactccaagcaccgaattcaaccctttaatatacggcaatgacgtggatagcgtagatgtcgccactcgggtggccatggtgcgattctttaattccgccaacgtgctccagggcttccagatgcacactagaactttgcgactttttccgagaccagtcgtggctttccaggctggatcctttttagcaagcagaccccgacagacccccttcgccgagaaacttgcgaggacccaggctgtcgaatacttcggtgaatggatcctgaacccaaccaactacgcgtttcagcgcatccacaacaatatgttcgatccagccctgatcggcgacaagccgaagtggtatgctcatcaactccaaccaatccactaccgggtctatgacagcaattctcaactggccgaagcgctcagtgtgccacccgagagggactccgacagcgagccaacagatgactccggatcagatagcatggattacgacgatagttcttcatcatattcttccctaggggacttcgtgtcggagatgatgaaatgcgatataaatggagacactcccaatgtggatcccctgacacacgcagcgctcggcgacgcttccgaggtggagattgacgagttacagaatcaaaaggaagctgaagagccaggcccagactcggagaactcccaagagaatcctcctctgcggagctccagcagcacaaccgcttccagcagtccgagcaccgtgatccatggggctaatagcgaacctgccgatagcaccgagatggacgacaaggcggctgttggagttagcaaacccctccccagtgtcccgccatccattggaaaaagcaacgtggaccggaggcaggcagagattggggaaggtagtgttaggaggaggatttacgacaacccctatttcgaaccccagtacgggtttccccctgaggaggacgaggacgagcagggcgagtcctacacccctcggtttagccagcatgtatccgggaatagggcgcagaagctgcttagacccaactctttgagactggcttctgattccgacgccgaatctgactcaagggcaagctcacccaactcaacagtgagcaacacctcaacagagggtttcgggggaatcatgtcattcgccagcagtctgtatcggaaccactcaacatcgttcagtttgagtaacctgacgttgccgaccaaaggggctagggagaaagcaaccccctttccctctttgaaggtgttcgggctgaacacgttgatggaaatcgttaccgaggcaggacctggctcgggcgaggggaacaggcgtgccctggtggatcaaaaaagcagcgttataaagcattcaccaacggtgaaaagggaaccgccttccccccagggacgctcttccaacagttcagagaaccagcagtttctgaaagaagtcgtccactctgtcctggatggtcagggggtaggttggcttaacatgaagaaagtgagaaggctgttagagtctgaacagctgcgtgtttttgtgctctccaagttgaaccgaatggtccaaagcgaggatgatgcaaggcaggacattatcccagacgttgaaatttcacggaaggtctataagggcatgctcgatctgctaaagtgcaccgtccttagcctggagcaatcctatgctcacgctggtcttggcggaatggcctcaatctttggcctgctagaaattgcccagacacattattatagcaaggaacctgacaaacgcaaacgcagcccaacagagtcagtaaatacgcccgttgggaaggatccgggtctggctggaagaggagaccccaaagcgatggcgcagctccgcgtcccccagctggggcctcgtgctccctccgcgactggcaagggccctaaggagctggatacccgctctctcaaagaggaaaactttatagcatcaatcgaactgtggaacaaacaccaagaagtgaagaagcagaaagcattggagaaacagagacccgaggtgatcaagccagtctttgacctgggagagaccgaagaaaaaaagagccaaatttctgccgattctggcgttagcctgaccagcagctcgcagaggactgatcaggatagtgtgatcggagtgtcccccgctgtgatgattcgatcttcctctcaggacagtgaagtctcaaccgtagtgagtaattcctcgggcgagactcttggggcagacagtgacctgtccagcaacgccggagacggacctgggggtgagggaagcgttcatctcgcttcatcaaggggcacgctgagtgacagcgagatcgagaccaattcagctacttccactatattcggcaaagcgcacagcctgaagccttcaatcaaggagaagttggccggtagccctatccgcacatccgaggatgttagtcagcgtgtgtatctatatgagggactccttggcagagataagggctccatgtgggaccagctggaagatgctgcaatggagacatttagcatcagcaaggaaaggtcaaccctctgggatcagatgcaattctgggaagacgcatttctagacgccgtcatgttggagagagagggaatgggcatggaccaaggcccacaagagatgatagacagatatctgtcactgggcgagcatgacagaaagagacttgaagatgatgaggacagactgttggctaccttgctccacaatcttatctcttatatgctgttgatgaaagtcaataagaacgacattcgaaaaaaggtgagacgcttaatgggaaagagccatattggactggtgtattcccaacaaattaatgaagtgttggaccagctggcaaatctcaatggcagagacctgtcaatctggagtagtggcagcagacacatgaagaagcagacatttgttgttcacgcaggcactgataccaacggagacatcttcttcatggaagtgtgcgacgactgcgtcgtactccgcagcaacatcgggacagtatatgaaaggtggtggtatgagaaactgatcaacatgacatactgccccaagacaaaggtcctttgtctctggagacgcaatggctctgagactcagttaaacaagttctacaccaagaaatgccgggaactgtactactgcgttaaggatagtatggaaagggctgccgcacggcagcaatctatcaagcctgggccagaactgggcggagagtttccggttcaggacctgaagactggagagggcggattgcttcaagtcactctggaaggcatcaatctcaaatttatgcacaatcagttcctgaaactgaagaaatggtag

SEQ ID NO: 229628 - DNA, 4440 bp, synthetic construct
  misc_feature 1..4440: note = Description of Artificial Sequence: Synthetic coding sequence
  source 1..4440: mol_type = other DNA
atggtgcagaagaaaaagttttgcccaaggctgttagactatctggtcatcgtgggcgcacgccatcctagtagcgacagtgtcgcccaaactcctgaactacttcgacggtatcccctggaagaccacaccgagtttccactgccccctgacgttgtattcttttgccagccagagggatgtttatccgtccgacagagacgcatgagtctgagggacgacacatcgttcgtttttactctcaccgataaagataccggcgtgacgaggtatggtatttgtgtgaacttttatcgctctttccagaagcgaatcagcaaggagaaaggagaaggcggagctgggtctcgcggaaaggaagggactcatgccacttgtgcctcagaggagggcggaacggagtctagtgaaagtggatcttcattgcagcctctgtcagcagacagcacaccagatgtgaaccaatctccccgtggcaagaggcgcgcaaaggccggtagtcggtcccggaacagtacactgacatcgctgtgtgtcctcagtcactatccgttcttttctacatttagagagtgtctatatacactgaaaaggctcgtggattgctgtagcgaacggcttctaggtaaaaaactcggaattccacggggagtacagagagacaccatgtggaggatcttcaccggatccctgctcgtggaggagaagtcctctgcgctgctccatgatctgcgggaaatcgaagcgtggatctaccgcttgctgaggtccccagtgccagtgtcgggccagaagagggtcgatatcgaagttctccctcaagagctgcaaccggcattgacgttcgccctccccgacccgtctaggtttaccttggtcgactttcccttacatcttccactggaactcctgggcgtggatgcttgtctgcaagtcctgacgtgcatactgctggaacataaggttgtactgcagtcgcgcgattataacgccctttctatgtctgtaatggcttttgtcgctatgatctatcccctggagtacatgttcccagttataccattgctgccgacttgtatggcatctgctgagcagctattgctggcaccgaccccgtatatcatcggcgtccccgctagctttttcctatataagcttgattttaagatgccagatgacgtgtggctggtggatttagactctaaccgtgttatagcacctaccaatgctgaggtgctgcccattctcccggagcccgagagcctggaactcaaaaaacacctgaagcaggctctcgcatcaatgtcccttaacactcagcctatcctgaacctggaaaaattccacgaggggcaggaaatccctctgcttctgggcagaccatctaatgatttacagtctactcccagtactgagttcaacccccttatttatggtaacgacgtagatagcgtcgacgtggcgacaagggttgcgatggtgcgtttcttcaactctgcgaacgtcttacagggcttccagatgcatacccgcacactgcgactctttcctaggccagtggtagcatttcaagctgggtccttccttgcttcccggccacgacaaacaccgttcgctgagaagcttgcaagaacacaggccgttgaatatttcggggagtggattctcaaccccactaattatgcatttcagagaatccacaataacatgttcgatcctgcgctaattggagacaaaccaaaatggtacgcccatcagctgcagccaattcattaccgagtgtatgacagtaatagtcaactggccgaagctctgagcgtcccacctgagcgagactcagattccgagccaaccgatgactccggtagcgacagcatggactacgacgacagctccagtagttattcgtcgcttggggactttgtttcagagatgatgaaatgcgacataaatggggacacccctaatgtggatccccttacccacgcagcactgggagatgcaagcgaggtggaaatcgacgaacttcagaatcagaaggaagcggaagagccaggccctgactccgagaacagtcaagagaatccacccctgcgctccagtagttctacaactgcttcatcaagtccatccactgtgattcatggagctaactcagaacctgcagatagcaccgaaatggatgataaggcagccgtcggcgtgtctaagcccctgccctctgtgcctccgagcattggaaaatcaaatgtggacaggcggcaggctgagataggagaaggcgcacagaaactgctgagacccaattcacttcggcttgcctctgacagcgatgcagagtcagattccagggcaagctctcctaattcaactgtgagcaatacaagtacagagggtttcggaggcattatgagctttgctagcagcctgtacaggaaccactctacatcattctccttatctaacctgaccctgcccacgaagggagcacgagaaaaggccacgccattccctagcttgaaaggcaaccgacgcgctcttgtggaccagaagtctagcgtgatcaaacattctcccaccgttaagcgggaaccgccaagcccccagggccgaagcagcaattcttcagaaaatcagcaattcctgaaagaagttgtgcatagcgtgctggacgggcagggagtcgggtggctgaacatgaagaaggttcgccgtctgctcgaaagtgaacagctgcgcgtgtttgtgctctctaagttgaacaggatggttcagtccgaagacgacgcacgacaggacattattcctgatgtcgagatttcgcggaaggtttataaagggatgctggatctgctcaaatgtacagtcctctccctggagcagagctacgcccacgctggactgggcggaatggcaagtatttttggcctgctggaaatcgcccaaacacattactatagcaaagagcccgacaagcggaaacgaagcccaaccgagtctgtaaatacacccgtcggtaaggacccaggccttgccggtcgtggtgaccccaaggctatggctcagctgagggtaccacaactgggcccacgggcaccctctgcaaccggcaagggacccaaggaactagatacacgctcgctgaaggaggagaacttcatcgcctccattggccctgaagttataaagccggtgttcgatctcggggagacagaagaaaagaagagccagatttccgcggacagtggggttagcctgacgtcctccagtcagcgcacagatcaggattcggtaatcggagtcagtcctgcagtgatgatccgttcgagcagccaggactctgaggtgagcacagttgtgtctaactcctccggcgagactctgggtgcagattccgaccttagcagcaatgccggagatggaccaggaggcgaaggcagtgtccacctggccagttccagagggacgctgtctgactcagagatcgagacaaactcggcaacaagcaccatcttcggtaaggcccattcccttaaacccagcatcaaagagaaacttgcaggtagtcctatccgtacctcagaggatgtatcccaaagagtctacctctatgagggcctattaggtaaggaacgttcaaccctgtgggaccagatgcaattctgggaagatgccttcctggacgcagtgatgctcgaaagggaggggatgggcatggaccagggccctcaggagatgattgacaggtacctgtctctaggtgagcatgaccggaagcggctggaggacgatgaagatcgcttgctcgccacacttctgcacaatttgatctcctacatgttgttgatgaaagtcaataagaatgatatccggaagaaggtccgtcggctgatggggaaaagccacatcgggctggtttactcccagcagataaacgaggtcctggatcagcttgccaacctcaatggcagagatctgtccatttggtcatcaggctcccgtcatatgaagaagcagacgttcgttgtccacgctgggaccgatactaacggggatatattcttcatggaggtctgtgatgactgcgtggttctacgctctaatattggtaccgtgtatgagcggtggtggtatgaaaagctgattaatatgacatactgtccaaagactaaagtcctgtgtctgtggaggcgcaatgggtcagagacccagctcaataaattttacactaagaagtgccgggaactttactattgcgtcaaagatagcatggaacgagccgctgctaggcagcagtctattaaacccggtcctgaactgggaggcgagtttccagtgcaggacctcaagaccggtgagggcggactgctgcaagtgaccttggagggcattaacctgaaatttatgcacaaccaactacttcgacggctgcgttggtag

SEQ ID NO: 229629 - DNA, 4626 bp, synthetic construct
  misc_feature 1..4626: note = Description of Artificial Sequence: Synthetic coding sequence
  source 1..4626: mol_type = other DNA
atggtccaaaagaagaaattctgtccccgactgttagactatctggtgatcgtgggagctcggcatccctcgtccgactcagtggcccaaacaccggagcttctgaggcgctacccacttgaggaccacactgaattcccactgccacctgacgtggtgtttttttgtcagcctgaaggttgtctgtctgtgagacagagacgcatgtcactacgcgatgataccagtttcgtttttacactcacggataaggataccggtgtgactcgttatggcatctgcgtgaacttctacagaagctttcaaaagcggatctccaaggaaaagggggaaggtggcgcaggatctcgtggaaaggaaggtactcatgccacatgtgcctctgaggagggcggaaccgagtcaagcgagtccgggtcctccctccaaccactctctgctgattccacgccagacgtcaaccagagcccaagaggaaagagacgtgctaaagccggatccaggagcaggaatagcacacttacgtccctgtgtgttctgagccattatccttttttctccacgttcagagaatgcctatatacattgaagagactggttgattgttgcagcgaacgcctgcttggcaagaaactgggcatacccaggggcgttcaacgagacaccatgtggaggatctttaccggtagcctgctggtggaggagaaatcctcggctctcttacatgacctccgcgaaatagaagcctggatctatcgactgctcaggtccccggtccctgtctccggacagaagcgggtcgacattgaggtgctgcctcaggagctgcaacctgcactgactttcgctcttcctgatccctctaggtttactctagtggattttcccttgcacctgccactggaactactgggggttgacgcttgtctccaagtgctgacatgtatcttgctggaacacaaggtggtcttgcaaagtagagactataacgcgctgtctatgagtgtcatggcgttcgtggccatgatctacccactggagtacatgtttcccgttatacctctccttccaacgtgcatggccagcgctgagcagctcctgctcgcgccaacaccatacatcattggggtgcccgcatcgttcttcctttataaactcgacttcaagatgcccgatgacgtgtggctagtggaccttgactccaaccgcgtaatcgccccaaccaatgcagaggtacttcctatcttacccgagccagaatccttggagctgaaaaagcatcttaagcaggcacttgcctccatgtctttgaacacacagcccattttgaacctggaaaagttccacgaaggccaggagatacctctgctcctcggccgaccctcgaacgacttacaaagtacgccatcaacagaattcaatccactgatctatggcaatgacgtggacagtgtggacgtggcgaccagggtcgctatggtcaggttttttaactcggcaaacgtgctgcaaggtttccagatgcacacccggactctgaggctgtttccaagacctgtcgtcgcctttcaagcaggtagctttctcgcaagccgtcctcgacaaactccctttgctgagaagttggccagaactcaggcagtggaatatttcggagagtggatcctgaatcccacaaattacgcttttcaacgaatccacaataatatgttcgatcccgctctgattggagacaagcccaaatggtatgcccaccagttgcaaccaattcattaccgcgtttacgattctaacagccaattagccgaggctctgtccgtccctcctgagcgagattcagatagcgagcccactgatgactcaggttctgatagtatggactacgacgatagctccagtagctattcctcattaggcgactttgtcagcgagatgatgaagtgtgatatcaacggggatactccaaatgttgatcccctgacgcatgccgcattgggggacgcgtccgaggtcgagatcgatgagctgcagaaccaaaaagaagctgaggaacccggaccagactccgaaaactctcaggaaaatcctcctctaaggagcagctcatcgactactgcctccagctcacctagcaccgttattcacggagccaactccgagcccgcagacagtacagagatggatgataaggccgcagtgggagtctctaagcccctaccatctgtgcctccaagcataggcaagtccaatgtggaccgtaggcaggctgagatcggggagggcgcacaaaagctgttacgtccaaatagcctacgtctcgcatcagatagcgacgcggagtctgattctagggctagcagccccaattctactgtgtcaaatacctctacagaaggattcgggggaattatgagtttcgctagctctctctaccgtaaccacagcacttccttctctctgtcaaatctcacattgccaacaaaaggcgctcgcgagaaggccaccccctttccgtcactcaaaggcaaccggagagctttggtcgaccagaagtcctctgtgatcaaacatagtccaacagttaaacgcgaacctccctcacctcagggaaggtccagcaactcgtctgagaaccagcagtttctgaaggaggtggtgcattccgtgctggacggccagggagtcgggtggcttaacatgaaaaaggtccgtcgcctgttggagtcagagcagctcagagtgttcgttctatctaagctgaacagaatggtgcagagcgaagacgatgctagacaggatatcattccagacgtagagattagccggaaagtgtacaaagggatgctcgatctgttaaaatgcaccgtactgagcctggagcagtcctacgcccatgccggtcttggtggaatggcttccatctttgggctgctggaaatcgcccagacccattactactccaaagagccagacaaacgcaaaagaagtcctacggagagtgtgaatacccccgtcgggaaagacccaggactggccggacggggtgatcccaaagcaatggcccaattgcgagtacctcagctgggacctagggccccatccgctacaggtaagggtcctaaggagctggacacaaggtctctgaaagaggaaaatttcatcgcgagcattggccctgaagtgattaaacctgtgttcgatttgggcgagaccgaggaaaaaaagagtcagatttccgccgattcgggagtgtccctcacctcttctagtcagcggaccgaccaggattcagtgattggagtcagcccagccgtcatgattaggagcagttctcaagacagcgaggtgtctaactcctcaggagagacactgggggctgattctgacttgagttctaatgccggtgacggccctgggggagaagggagcgtgcacttggcttcctcgaggggcaccctgtctgattcagaaatagagactaattcagccacatccaccatattcggcaaagcccactctttaaagcctagcatcaaggagaaattagctggaagcccaattagaacttctgaagacgtgtcccagcgcgtttatttgtatgaaggcctgctggggaaggaacggtcaacgttgtgggaccaaatgcaattctgggaagatgcattcttggacgccgtgatgctcgagcgcgagggcatggggatggatcagggcccacaggagatgattgatcggtacctgagcctaggtgaacatgatcgcaaacgcttagaggatgacgaggatcgacttctcgcaacgctgttgcataacctgatctcctacatgctgttgatgaaagtgaacaagaacgatataagaaagaaagtcagaagactcatgggcaagtcacacatcggattggtgtatagccaacagattaatgaggtgctggatcagctggccaacctgaacggacgggatttgtccatatggtcttctgggagccgacacatgaaaaagcagacattcgtcgttcacgccggtacagataccaacggggatatttttttcatggaagtgtgcgatgactgtgtggtcctgcgatctaatatcgggaccgtttacgagcgatggtggtacgagaagctgataaacatgacttattgccccaagactaaggtgttatgcctgtggcgtcggaacggatcagaaacgcaacttaataaattttacacaaaaaaatgtagagagctgtactactgcgtcaaggattcaatggagagggcagccgctcggcagcagtctattaaaccaggacccgagctcggtggtgagttccctgtgcaggatctgaaaaccggggaagggggactgcttcaggtgaccctggaaggcatcaacctaaagttcatgcacaaccaagtgtttattgagctcaatcacattaagaagtgtaacactgtgaggggggttttcgtgctggaagaattcgttcctgaaatcaaggaagtcgtaagccacaagtataagacccccatggcccacgagatatgttattcagtactatgcttattctcttatgtcgctgccgttcattctagcgaggaggatttgcgtacgcctcctcggccagtcagttcttag

SEQ ID NO: 229630 - DNA, 4764 bp, synthetic construct
  misc_feature 1..4764: note = Description of Artificial Sequence: Synthetic coding sequence
  source 1..4764: mol_type = other DNA
atggtgcagaaaaaaaaattttgccctaggctcctcgattatctcgtaatcgtgggggcacggcatccaagcagtgatagcgtggctcagactcctgaactgctgagacggtacccacttgaagatcatactgaattccccctgcctcccgacgtcgtattcttttgccaacccgaaggttgcctgagtgtgcgtcagcggagaatgtccttaagagacgacactagcttcgtctttactcttacagataaagataccggggtcacacgttatggaatttgcgtgaacttctacagaagttttcaaaagaggattagcaaggagaaaggcgagggcggagccggttctcggggaaaagagggcacccacgccacatgcgcctccgaggagggaggtactgagagttctgagtccggatcttctctgcagcctctgtccgcagattccactccagatgtgaaccagagtcctcgcggtaagcgaagagctaaggcaggctccagatctcggaactctaccctgaccagcttgtgcgttttgagccactacccatttttttctactttcagagaatgcctgtatacgcttaagcgactggtggactgctgcagtgagcgcctgctcggaaaaaaacttgggatccccagaggcgtgcaaagagatactatgtggcggatcttcaccggaagcctcctggttgaagaaaagagctcggccctgttgcacgacttacgtgaaatcgaggcatggatataccgcctgctgagatcacccgtacctgtgtcaggtcaaaagagagttgatattgaagtcctgccccaggagttgcagcccgcattgacgttcgcgcttcccgacccaagtagattcaccctggtcgacttcccactgcacctccccctggagctgctcggtgtggacgcttgcctccaggtactgacatgcatcttgctggagcacaaggtagtgctgcaaagccgggattataacgcgctttctatgtcggtgatggcttttgtagcgatgatctacccactggagtacatgttcccggtcatccccctcctacccacgtgcatggcatccgctgagcagctcttgcttgcccctactccgtacataataggtgtgcctgcctcattcttcctgtacaagctcgacttcaaaatgcccgacgatgtgtggctggtcgacttggattccaaccgggtgattgctccaacaaacgcagaggtcctgccgattcttcccgagccagagagtttagaactgaaaaagcatctaaaacaggccttggcctcgatgtcgttaaacacacaacctatcctgaatttggagaagttccatgagggtcaagaaattcctctgctgttgggcaggccgagtaatgatcttcagtctacgccgagcactgaattcaaccccctgatctatgggaacgatgtcgattccgtcgacgtggctaccagagtagctatggtcaggttttttaacagcgcaaatgtgctgcagggtttccagatgcataccaggaccctgaggctttttccacgcccagtagtggcatttcaagcaggctccttcctcgcttcccggccaaggcagaccccatttgcagagaaactggcacgaacgcaggccgttgagtattttggcgagtggattctcaacccaacgaactatgcttttcagcgaattcacaacaacatgttcgaccccgctctcatcggcgacaagcccaaatggtacgcacatcagctgcagcccattcactaccgtgtctatgatagtaatagccagctggctgaagctctgtctgtaccaccggaaagggattcagactccgagcccacagacgactccggctctgactctatggactacgacgactcgtctagctcttactctagcctgggagacttcgtgagcgagatgatgaaatgcgacattaatggggacaccccaaatgtcgatcccctgacgcacgctgccctgggtgacgctagcgaggtagaaattgacgaattgcagaatcagaaagaagccgaggagccgggacctgattctgagaacagccaggagaatccccctttacggagctcttctagtaccacggctagctcttctccttccacagtgattcatggtgccaattccgaacctgcagattcgacggaaatggatgataaagccgctgttggggtgagcaagccactgccctccgtgcccccttccattggtaagtccaacgtggatagaagacaggccgagattggagaaggatcagtgaggcggaggatctacgataatccgtatttcgaaccccagtacggcttccctccagaagaggatgaggatgaacaaggggaatcatacacccccaggttcagtcagcatgtatcggggaaccgagctcaaaagctgcttcggccaaatagtcttagactagcatccgattccgacgcggagagcgactcccgggctagcagccccaacagtactgtgtccaatacatctacggagggatttggcggaattatgagctttgccagctctctataccggaatcactctacctcattctcactgtccaatctgacattacccacaaaaggagccagggaaaaggcaacaccatttcctagcttaaaaggcaatcggagggccctggtcgatcaaaaatcttcagtgatcaaacactcacctactgtcaaacgcgagccccctagccctcaaggacggtcatccaattccagcgagaaccagcagttccttaaagaggtggtgcatagcgtcctggacggccaaggcgtgggctggctgaatatgaaaaaagtcagacgactgttggagtccgagcagctgagggttttcgtcctaagtaagttgaatcggatggtccagagcgaggacgacgcccgacaggacatcataccggacgtggaaatttctaggaaggtgtacaaaggcatgctggacttgttgaagtgtacagtactgtcacttgagcagagttatgcacatgccggtctgggagggatggccagcatctttggccttttagaaattgctcagacccactactatagcaaggagcccgacaaaaggaagcgcagtcccactgaatccgtcaacactccagtggggaaggaccctgggctagctggacggggtgatcccaaagcaatggcccagcttagagtcccccaactgggacctcgcgcaccctccgccaccggcaagggacctaaagaactagacacccgctccctgaaggaggaaaacttcatcgcaagcatcggacctgaggtcataaagccggttttcgacttaggagaaaccgaggagaagaagtcccagatcagtgccgactcaggggttagcctaactagctcctctcaacgcacggaccaggactccgtgatcggagtctccccagctgtaatgatcaggagcagcagtcaggacagcgaggtgagtaccgtgagcaatagctccggcgaaacccttggcgctgactctgacttgtcaagcaacgcaggggatggtccgggaggcgagggtagcgtacacctggcctcctccaggggtaccttgagcgactctgaaattgagacaaatagtgccacaagcaccatcttcggcaaagctcattccctcaaaccgtccatcaaggagaagttagccggttccccgatccgaacatcagaggatgtttcccagcgcgtgtacctgtacgaagggctcttaggcaaagaacggtccaccttatgggatcagatgcagttctgggaagatgcctttcttgacgccgtgatgctagagcgggaaggcatgggcatggaccaaggaccccaggagatgatcgacaggtacttgagtttaggcgagcatgaccgcaagcgtctggaagacgacgaagaccgtttactcgcaactttgctgcacaacctgatttcttatatgctgctgatgaaggttaataaaaacgacatcaggaaaaaggtgcggaggctaatggggaaaagccacatcggccttgtttattctcagcaaatcaatgaagtattggaccaattggccaacctgaatggccgtgacctgagtatctggagtagcggttcgcgccatatgaaaaagcagacattcgtcgtgcatgccggaaccgatacaaacggcgatatatttttcatggaggtctgtgacgattgtgtggtcttaagaagcaacattgggacagtttacgaaagatggtggtacgagaagcttataaacatgacgtactgcccaaagactaaagttctgtgcttgtggagacgtaacgggtcagaaacacagctgaataaattttatactaagaagtgtagggaactgtattactgcgtgaaggacagcatggaaagagcagcagctcgtcagcagtcaatcaagccgggacccgaactggggggtgaattccctgtccaggacctgaagacaggagaggggggtctcctccaggttacgcttgaaggcataaatctaaaatttatgcataatcaggtgttcatcgagctgaatcacattaaaaaatgcaacaccgtgaggggtgtgttcgtacttgaggaatttgtgccagagattaaagaggtggtgagtcacaagtataaaaccccaatggcacatgagatatgctatagcgtactttgcctgttttcatatgtcgcagcagtccattccagcgaggaagacctacgaacccccccaagacccgtgagcagttag

SEQ ID NO: 229631 - DNA, 4638 bp, synthetic construct
  misc_feature 1..4638: note = Description of Artificial Sequence: Synthetic coding sequence
  source 1..4638: mol_type = other DNA
atggtgcagaagaaaaaattttgccccagacttctagactatcttgtcattgtgggcgcaaggcatcctagttcggatagcgttgcccagacccccgagcttttgcgcagatacccgctggaagaccatacagagttccccttacccccagatgtggttttcttctgtcagccggagggctgtctttcggtgaggcagaggagaatgtcgctcagggatgataccagcttcgtgttcacccttaccgacaaggacactggggttactcgctacggtatatgtgtgaacttttacagaagctttcaaaagcgcatctctaaggagaagggcgaaggcggagcagggtctcgtggaaaagagggaactcatgccacctgcgctagcgaagagggaggaaccgaatcttcagaatctggaagctctctacagcccctctctgctgattcaacgcccgatgttaatcagagccctcggggtaaacgacgggcaaaggcaggctcccgctcaaggaactctacattgacaagtctgtgtgttctatctcactacccgttcttttcgaccttcagggaatgcctgtacacgcttaaaaggttggtcgactgctgtagtgaaaggcttctaggtaagaaacttggaatccccagaggtgtccagagggataccatgtggcggatctttacggggtccctattggttgaggaaaagagttctgctttgttgcatgacctgcgtgagattgaggcatggatctaccggttactacgctcccccgtgcccgtttctggccaaaagcgggtggacattgaggtgctgccacaggagctccagcctgcgctcacattcgccctgcctgatcctagccggttcacacttgttgattttccactgcatttaccactagaactgctcggagtcgacgcttgtctgcaggtactgacttgcattcttctagagcacaaggtggtcctgcagtccagagattataatgccctctccatgagtgtgatggctttcgtcgcaatgatatacccactggagtacatgtttcccgtgatccccttattgccaacatgtatggctagtgcagagcaactgctgcttgcacccaccccatacatcattggcgttccggcttcattcttcctgtacaagctggatttcaaaatgcccgacgacgtgtggctggtcgacttagattctaatagggtgatagcaccaactaacgcagaggtgctgcctattcttcccgagcccgagagtttggagctgaagaagcaccttaaacaggcacttgcaagcatgagtctaaatactcaacccatcctgaaccttgagaagttccatgagggccaagagatacccctcctgctgggcaggccttctaatgacctgcaatctacccctagcacggagttcaaccccctgatatacgggaatgatgtggatagtgtggacgtggcaacccgggtcgccatggtgcggttcttcaatagcgccaacgtgctgcaaggattccaaatgcacactcggacactacgactcttcccacggcctgtagtcgctttccaagcaggctcttttctggccagccggccacgccagacacccttcgctgaaaaattggcacgcacccaggctgttgagtacttcggcgagtggatcctgaatcccacaaattatgcctttcagagaattcacaacaatatgttcgaccccgctttaattggagacaaacccaaatggtacgcccaccagctccagcctattcattatcgagtgtacgatagcaacagccaactcgccgaagcactgtctgtgccaccagagagggacagcgattcagagcccactgacgactccggttctgactctatggattacgacgattcctcttcgagctactcaagtttaggagatttcgtgtctgaaatgatgaagtgtgatatcaacggagatacaccaaatgtggatccactgacccacgccgcactgggggacgcctctgaggtggagatcgacgagcttcagaatcagaaagaggccgaggagccaggtccagacagcgaaaactctcaggagaatcctccccttagatccagctctagcaccactgctagctcctccccctctaccgtgatccacggggctaatagcgagcccgcagactccaccgagatggatgataaagccgctgtaggcgtttctaagcctcttcctagcgtgcccccttctattggcaaaagtaatgtggacagaagacaggccgaaatcggagaaggtgctcagaagctgctgagaccaaactcccttcgactggcatccgattccgatgcagaaagtgattcacgcgcttccagcccaaacagcacagtctcaaatactagcactgaggggttcggaggcattatgtccttcgcttcgtccctgtacaggaaccattccacctctttcagccttagtaaccttactctgcctacgaagggggctcgcgagaaagccacaccttttcccagccttaaggggaatcgcagggcactggtggatcaaaaatcgtccgtaatcaagcattcccctacggtgaaaagagagccaccttcacctcaaggtcggagcagcaacagctcagagaatcagcagttcctcaaggaagtggtgcattcagttttggacgggcagggggttggctggctcaacatgaaaaaggtccgacgtctgttggaatctgaacagttgcgagtgttcgtgctgtccaagttgaatcgaatggtccagagcgaggacgacgcgagacaggacattattccagatgtagaaattagccgtaaggtgtataagggcatgctggatcttctcaagtgtacagtcctttcccttgagcagtcctacgctcacgctggcctagggggaatggctagtatctttggcctgctggagattgcacaaactcactattactcaaaagagcccgacaagagaaaacggagcccaacagaatccgtcaacactcccgtgggcaaagaccccggactggctggcagaggcgatcctaaagcaatggctcaattacgggtgccacagctgggcccacgcgcacccagcgctacaggaaagggcccaaaagagctggatactcggtcattgaaggaggagaacttcatcgctagtatcggaccagaggtcatcaagccagttttcgacctgggagaaactgaagagaagaagtcacagatttcggcagactccggagtctctcttacaagctcttcacagaggaccgaccaggacagcgtcataggagttagccctgcagtaatgatcagatccagtagtcaagacagcgaggtcagcaccgtggtcagcaactccagcggcgagaccctgggcgcagactctgacctctcatccaacgctggcgacggacccggaggggaggggtcggtacatttagcaagtagcagggggactctgtcagacagtgagatcgaaacgaattcagccacttcaaccattttcggcaaggcacacagcctgaaaccgtcaataaaagaaaaacttgccggttcgccaatccggacttctgaagatgtctcccagagagtttacctctacgagggcctcctcgggaaagaaaggtctaccctctgggaccagatgcagttctgggaggatgcgttcctggatgccgtaatgctggaaagagagggcatgggcatggaccagggccctcaagaaatgatcgatcgctatctttctctgggtgagcatgacagaaagcggttagaagacgatgaagatcgattgcttgccactctgctgcataatcttatctcttacatgctgctgatgaaagttaataaaaatgacattcgaaaaaaggtgcgcaggttgatgggaaagtctcacataggtctcgtgtacagtcagcagattaacgaagtgctggatcagctcgctaacctgaacgggagagacctgtctatctggtcgagtggcagtaggcatatgaaaaagcagacctttgtggtccacgcaggcaccgacacgaacggagacattttttttatggaagtgtgtgacgactgcgttgtccttcgcagcaacattgggacagtgtacgaaagatggtggtatgagaaacttatcaacatgacctactgcccaaagactaaagttctgtgcctgtggcggaggaatgggtctgagacccaactgaacaaattctacacaaaaaaatgcagagagctatactactgtgtaaaagacagtatggagagagcagcagccaggcagcaaagtattaagccgggaccagagttaggtggcgaattcccagtgcaggatctgaagactggcgaaggaggactcctccaggttaccctcgagggcatcaatctgaaattcatgcataatcaggtcttcatcgaactgaatcatattaagaaatgtaacaccgtgcgcggagtgttcgtacttgaggaattcgttcctgagattaaagaagtggtgtctcacaagtacaaaacgcccatggctcatgagatttgctattccgtgttgtgtctgttttcctacgtggcagctgtgcatagttccgaagaagacctgaggacccctccaagacctgttagttcctag

SEQ ID NO: 229632 - DNA, 4440 bp, synthetic construct
  misc_feature 1..4440: note = Description of Artificial Sequence: Synthetic coding sequence
  source 1..4440: mol_type = other DNA
atggtgcagaagaaaaaattctgcccgcgacttctcgattatctcgtgattgtgggagcacgccaccccagttccgactcggttgcgcagacaccagagttattgagacgatacccattggaggatcacacagagttccctcttccccctgacgttgtgttcttttgccaacctgaaggttgcctgtctgtgcggcagaggcgtatgtcgcttcgcgacgacacatccttcgtgtttactctgaccgacaaagacactggcgtgacccgctacggcatctgtgtgaacttttacagaagttttcaaaagcggatcagcaaggaaaagggagagggaggagctggtagcagaggaaaagaggggacacatgcgacctgcgcctccgaggaagggggaaccgagtcatctgagagtggatccagcctgcaacccctgagtgctgattcaactcccgacgtgaatcaaagcccccgtggaaaacgccgtgccaaggctgggtcacgctctcggaacagcactctcacttcattgtgcgtgctgtcacattacccgttctttagcacattccgggaatgcctttacactttaaaaaggttggttgattgttgcagcgagaggctgttaggaaagaaattggggatccctcggggtgtgcagcgggacaccatgtggaggattttcaccggctctttgctcgtggaggaaaagagctcagcccttctgcatgacctgcgagaaatcgaagcatggatttacagattacttagatcaccggtgcctgtgtccgggcagaagcgtgtggacattgaagttctgcctcaggaattgcagccagctctcacattcgcacttcccgacccatcacgtttcactctcgtagacttcccgctacatctgccgttggagctgctgggggtggacgcatgcctccaggtgcttacatgcattctgttggaacacaaagtggtcctccaatctagggactacaacgccctctcaatgagtgtcatggcttttgtggccatgatttatcccctggaatatatgtttccggtgattccgcttctgcccacttgcatggcctcggcagagcagttactgctggcaccaaccccctacattatcggggttcccgctagtttctttctgtataaattggacttcaaaatgcccgatgatgtgtggctagtggacctagactctaacagagtgatcgccccaacgaacgccgaagtgctgcccatcctcccagagccagagagtctagagttgaagaagcatctcaagcaagccctggcaagcatgtccttgaatacacagcctattctcaatctcgagaaattccatgagggccaggaaattcctctgctgttgggaagaccaagcaacgaccttcagtcaaccccttctactgaattcaacccattaatatacggaaacgatgtggacagcgtcgacgtcgcaacgcgcgtggcaatggtgagatttttcaatagcgccaacgtgttgcaggggtttcagatgcacaccagaactttgaggctgttccccagacccgtggttgcattccaggctggctcgtttctggcttccaggccccgacagacacccttcgctgaaaaactagccagaactcaggctgtcgagtatttcggtgaatggatcttgaatcctacaaactatgcctttcagagaatccacaacaacatgtttgatccagcattgatcggggataagcctaaatggtacgctcaccagctccaacccattcattacagagtttacgacagcaacagtcagctcgcggaggcactgagtgtgccaccagagcgagacagtgacagtgaaccaacagacgattcaggcagtgacagcatggattatgatgattcaagttcctcctatagttccctgggggacttcgtgtcagagatgatgaagtgtgacatcaatggcgatacccctaatgtcgacccgctgacccatgctgctctcggagacgctagcgaagtcgagatagatgaactgcaaaaccagaaggaagctgaagagcctgggcctgactcagaaaatagccaagaaaacccaccactgcgctcctccagctcgacaaccgcgagttcctcaccatcaacggtcatacacggggcaaattcagaacctgccgatagcacagagatggacgataaagccgcagtgggcgtatccaaacccctgccttccgtcccgccttctataggaaagtcaaacgtggatcgccgacaggcagagataggcgagggcgctcagaagctgctgaggccaaactctctgagactggccagtgacagtgacgccgaatcagactccagagcttcatcgccaaacagcactgtgtcgaatactagcaccgagggatttggagggattatgtcatttgcctcatcactctaccggaaccactcaacgtctttcagtctctccaatctgacacttcctacaaaaggcgctcgtgaaaaagccactccattcccctccttgaaaggtaatcggagggctttggtggatcaaaagagcagtgtgatcaaacattccccaactgtcaagcgcgaacctcccagcccacagggcagaagcagcaattcatctgagaatcagcagtttctcaaggaagtggtgcactcagtgcttgacgggcagggggttggatggttgaacatgaagaaggtccgcaggttactcgagtccgagcagctgcgcgtttttgtcctgtcgaagctaaatagaatggtgcagtccgaagatgacgcgaggcaggatattatccctgacgtcgaaatctcacgcaaggtgtacaagggcatgcttgacctcctaaaatgcacagtcctgtctctggagcagtcgtatgcccatgccggtctggggggaatggcaagcatcttcgggctcttagagatcgctcaaacacactactatagtaaggagccagacaagaggaaaaggtcgccgactgaatctgtgaatactccagttggtaaggatcctgggttagccggaaggggcgatcctaaggctatggcccagctccgagtgccgcagcttgggccacgcgctcccagtgccaccggaaaaggacctaaggagttagacacgcggtcactgaaggaggagaactttatagcttcaattggtcccgaggtcataaaacctgtgttcgatcttggcgagactgaggagaaaaagagtcagatttccgccgactccggagtatcacttacatccagttcccaacgcaccgaccaggacagcgtgatcggagtgtccccagccgtgatgatcagatctagttcccaagactcggaagttagcaccgtcgtctcaaacagcagcggcgagaccctaggtgccgacagtgatctctcaagtaacgcgggagacgggcctggcggtgagggaagcgtgcatctggcaagctcccgtgggacactcagcgactccgagatcgagacaaattctgctacctccactatcttcggaaaggcgcatagcctgaaaccatcaattaaggagaagctggccggaagtcctatcaggacatcagaagatgtctcccaacgcgtgtatctgtacgaagggctgctgggaaaggagagatcgaccctctgggatcagatgcagttttgggaggatgcctttttggatgccgtgatgctcgagcgtgaaggtatgggaatggatcaaggccctcaggagatgatcgatcgctacctgtctctgggcgagcacgataggaaacgcctcgaagatgacgaggaccgcctcttggctactctgttgcacaacctgatcagctatatgctgttgatgaaagttaacaaaaacgatatccgcaagaaagttagacgactcatgggtaaaagccacatcggcctcgtgtacagccagcagatcaacgaagtactcgaccaactagcgaatttgaatgggagagacctttctatatggagctccggatctaggcacatgaagaaacaaacattcgtggtgcatgccggtacagatactaacggagacatcttcttcatggaagtatgcgacgactgcgtggtactcagaagcaatattgggacagtgtacgagcgatggtggtacgaaaaactgatcaacatgacctattgccccaagaccaaagtgctgtgcctgtggcggagaaacgggagcgagacacaactcaacaagttctacacaaagaagtgccgcgagctgtattactgtgttaaggatagcatggagagagcagcggctcgccagcagtctattaagcctggccctgaactaggtggagagttcccggtgcaggatttgaagaccggcgaaggcggtctcttacaggtgaccctcgaaggcatcaatctgaaattcatgcacaatcagttcctgaaactcaagaaatggtag

SEQ ID NO: 229633 - DNA, 4698 bp, synthetic construct
  misc_feature 1..4698: note = Description of Artificial Sequence: Synthetic coding sequence
  source 1..4698: mol_type = other DNA
atggtccagaagaagaagttctgccccagattgttggactacctggtgatcgtcggcgcacgccatccgagtagcgacagcgtggcccagacacccgagctgttaaggaggtacccgcttgaggaccataccgagttccctctcccccctgatgtggtctttttctgtcagcctgaagggtgtctgagtgttaggcaaaggcgtatgagtcttagagacgacacatcctttgtttttaccctgactgacaaggatacaggggtaacacgctatggcatttgtgtgaatttttacaggagctttcagaagcggatctccaaggagaaaggagaaggtggcgctggtagccgcggtaaggaggggacccacgcaacatgcgctagtgaggaagggggaaccgagagctcggaaagcggctcctcactgcagccactctctgctgacagcaccccggacgtgaatcagtctccccgtggtaagcgacgggctaaggccggttccagaagtagaaattcaaccctgaccagcctgtgcgttctttctcattaccctttcttctccaccttcagagagtgtctgtataccttaaagcggcttgtggactgttgctccgagcggctgttgggcaagaaacttggaattccacgaggcgtgcagagggacacgatgtggagaatcttcaccggatctctgctagtggaagaaaaatcatctgccctacttcatgacctcagggagatcgaagcttggatctacaggctacttcggtctccagtacctgtgagtggacagaagagagtcgacatcgaggtacttcctcaggagctccagcctgccctgacatttgccttgcctgacccttcaagattcactctcgttgattttcctctgcatttgccgctcgaactgctgggtgtggacgcctgcctgcaggtgctgacatgcatcctgctggagcacaaggttgtgctccagtccagggattacaatgccctatccatgagcgttatggctttcgtggccatgatctatccccttgagtacatgtttcctgttatccctctgctgcctacttgcatggccagcgccgaacagcttcttttggcacccaccccatacatcataggtgtgccggctagcttcttcctctataagctggacttcaagatgccagatgatgtctggttggtcgacctcgactctaatcgggtcattgcacctacaaatgcggaggtcctcccgatactcccggaacccgaatcactagagttaaaaaagcatctgaagcaggcccttgcatccatgtctctcaacacccagccaattctgaacctcgagaaattccatgaaggtcaagaaattccactgctattgggcaggccttctaacgacttgcagagcacccctagcactgaatttaatcccctcatttacggcaatgatgtagactcagttgacgtggcaacacgagtggccatggtccgcttcttcaactccgcaaacgtcctccaagggtttcagatgcacactcgtaccctgagactattcccccgaccagttgtagcctttcaggcgggtagcttcctggctagcaggccacgccagaccccttttgcggagaaacttgcacggacccaggccgtggaatacttcggggagtggatcttaaacccaacaaactacgctttccaacggatccacaacaatatgttcgatccggctctgatcggcgacaagcctaagtggtacgctcaccagttacagccgatccactatagggtatatgacagtaacagccagttggccgaggcgcttagcgtgccacccgagagagacagcgactctgagcccacagacgactccgggtccgatagcatggattacgatgattcaagcagcagctatagcagcctcggcgatttcgtgtccgaaatgatgaagtgtgatataaatggggatacaccaaatgttgatccgctcactcacgcggcactcggcgatgcttccgaggtggaaatcgatgaactccaaaaccagaaagaagctgaagaaccaggccctgatagtgagaattcacaagagaatccaccactcagatcctcaagctcaacaacggcaagctcttcaccctccaccgtcattcacggagctaacagcgagcctgccgactctaccgaaatggatgataaagccgctgtgggggtgtctaaaccgctgccgtctgttcctccatctatcgggaagtctaatgtggaccggaggcaggcagagattggcgagggggctcagaaactgctgagacctaattctctgcggctggcatctgattccgatgccgaatctgacagtcgggctagctctcccaacagcacggtatccaacacaagcacagagggctttggaggtatcatgtcgtttgcaagctccttatatcgcaatcattccacaagctttagcctcagtaatttaacactccctactaaaggtgctagagagaaagctaccccctttccatctctgaaggtgtttggattgaataccctgatggaaatcgtcactgaggcgggacccggaagcggggaaggtaatagacgggcactagtggaccagaagtcctccgtgataaaacattcccctacagttaagagagagccaccttctcctcagggcaggagttctaacagcagcgaaaatcagcaattcttaaaggaagtcgtccatagtgtactagacggccagggcgtcggttggctgaatatgaagaaggtacggagattactggagtcagagcagctcagagtcttcgtccttagcaaactcaatcggatggtgcagagcgaggatgacgcccgtcaggacattatcccagacgtggagatctcaagaaaggtgtataaaggcatgttggatctgctgaaatgtactgtcctgtctctggagcagagctacgcccacgccggtctgggtggcatggctagcattttcggcctgctggaaattgcacaaacacactactatagcaaagagccagataagcgtaaaaggagccctacagagtcggtcaatacacctgtcgggaaagatcccggtctggctggccgaggagaccctaaggctatggcacagctgcgtgtgccccagcttggccctagggctccgagtgcgactggcaaaggaccgaaagaactagatacccgtagcctgaaagaagagaacttcatcgcctccatcggtcctgaagtgatcaaacctgtattcgacctcggcgagactgaagaaaaaaaatctcaaatttcagccgactctggcgtatctctcacctcaagtagccagcggacagatcaggactcagtgatcggcgtaagtcctgcagttatgatccggtcatcttcccaggactctgaagtatctaccgtcgtgagcaattctagcggtgaaacactcggagccgatagtgacttatcttccaatgcgggtgacggccctggtggagagggctctgtccacctcgcgtcttcccgcggaacactgtcggattctgagattgagaccaactcagccacctccactatcttcggcaaagcccattccctgaaaccctccataaaagaaaagctggctggcagcccaatccgcactagtgaagacgtgagccagcgagtatacctgtatgagggcttgctgggaaaagaaagaagcacactgtgggatcagatgcagttttgggaggacgctttcctggatgcggtgatgctggagcgggagggcatgggcatggatcaggggcctcaggagatgattgatcggtatttgagtcttggtgagcacgaccgcaaacgactcgaagatgatgaagatcgcctgctggctactttgttgcacaacctgatttcatacatgctcttgatgaaagtgaataagaatgacattcggaaaaaagtgcgcagattgatgggtaaatctcatatcggccttgtgtattcccagcagattaacgaggtgctggatcagctggcaaatcttaatggaagagacctgagtatctggtcatcaggttcccggcacatgaaaaagcaaacatttgttgtccacgctggtacggacactaacggcgatatttttttcatggaggtgtgcgacgattgcgtagtcctgcgaagcaatatcgggaccgtttacgaacgatggtggtatgaaaagctcattaacatgacttattgccccaaaaccaaggtgctgtgcttgtggaggcggaatggctcagaaacacagctaaacaagttctacaccaaaaaatgtcgggagttatactattgcgtgaaggacagcatggagagagccgctgctcgccagcagtccattaaacccggacctgagcttggaggagagtttcctgtccaggacctcaagaccggagaaggaggactgctgcaagtaacactggagggaataaacttgaagttcatgcacaatcaggtttttattgagctcaatcacatcaaaaagtgcaacactgtgcgcggagtcttcgtcctcgaggagtttgttcctgaaattaaagaagtggtgtcgcacaaatataagacccctatggcacacgagatctgctacagtgtcctatgcctcttttcctacgtggccgctgtacacagctctgaagaagatttaaggacaccacctcgccctgtttccagctag

SEQ ID NO: 229634 - DNA, 588 bp, synthetic construct
  misc_feature 1..588: note = Description of Artificial Sequence: Synthetic coding sequence
  source 1..588: mol_type = other DNA
atgggaagtcagtcatcaaaggccccaaggggggacgtgacagccgaagaggctgccggtgcatcgccggctaaagctaacgggcaggaaaacggccatgtcaaatctaatggggatctttctccgaagggtgaaggtgaaagtccacctgttaacgggactgatgaggcagcaggtgcgaccggggatgcaattgagcccgctccccctagtcagggagctgaggccaagggggaggtgccaccaaaggagacaccgaagaagaaaaaaaaattctcattcaaaaagccttttaagctctcgggcctgagtttcaaacggaaccgaaaagaaggcggtggagacagttccgcttccagccccactgaagaggagcaggaacaaggagagataggcgcatgtagcgatgaggggacggcccaggaaggcaaagccgcagcaacacccgagtcacaagagccgcaggccaagggagcagaagcttcagccgcaagtgaagaagaggcagggcctcaggctaccgaaccatccaccccctctgggccagagtctggccctaccccggcttctgccgagcaaaatgaatag

SEQ ID NO: 229635 - DNA, 1377 bp, synthetic construct
  misc_feature 1..1377: note = Description of Artificial Sequence: Synthetic coding sequence
  source 1..1377: mol_type = other DNA
atgtccaacgatggcagatctcgcaatagagacaggcggtatgacgaagtgccttccgatctgccttaccaagataccacaatcagaacacaccccacattgcacgatagtgaaagggcggtatctgccgatcctttgccgcctccccctctgcccctccagcccccatttggcccagacttttatagttctgacactgaggagccagctattgctcccgacctgaagcccgtgcgaagatttgtgcctgattcttggaagaatttctttcgcggaaagaagaaagatcccgagtgggacaagcccgtgtctgatattcggtatatcagcgatggagttgagtgtagcccccctgcttctcccgcacgaccgaaccaccgatcaccgctgaactcctgtaaggatccttacgggggaagcgagggaactttctctagccgcaaggaagccgacgcagtctttcccagagacccgtatggaagtctggataggcacacgcaaacggtaagaacatactctgaaaaggtcgaagaatataaccttagatattcctatatgaaatcttgggcagggctcttgcgaatcctcggcgtagtggagttacttcttggggctggcgtctttgcctgtgtcaccgcctacattcacaaggactccgagtggtacaacctgttcggctactcacagccttatgggatgggaggggtggggggactggggagcatgtacggcggatactactacaccgggccaaagacccccttcgtactggttgttgcaggccttgcttggatcacaacaatcattatcctcgttcttgggatgtctatgtactaccggactattcttctcgacagtaactggtggccactgactgagttcggtataaatgttgccctctttattctgtacatggccgctgccatagtctacgtcaatgatacaaacagaggcggtttatgttactacccccttttcaacaccccagtaaatgcggtcttctgccgggttgaggggggacaaatcgccgctatgatattcttattcgtgaccatgattgtctacctgatctcagccctggtgtgtctcaaattgtggaggcatgaagccgcacgcaggcacagggagtacatggaacagcaggaaatcaatgaacctagtctgtcctctaaacggaagatgtgcgagatggccactagcggggacagacagcgggactctgaagttaactttaaggaattgaggacagccaagatgaaacccgagctcttgtctggccatatcccccctcctcgccctgcaaactttttcgtcttcctcgttgagatgggctttcaccgcgtgagccaggacgatttggaccttctgacttcgtag

SEQ ID NO: 229636 - DNA, 1677 bp, synthetic construct
  misc_feature 1..1677: note = Description of Artificial Sequence: Synthetic coding sequence
  source 1..1677: mol_type = other DNA
atgtctaacgacggacggtctcggaaccgcgaccggagatatgacgaggtgccttcagatctgccttatcaggacaccacaattcgtactcaccctaccctgcatgactctgaacgcgctgtttccgccgacccactccctccacctcccctgccattgcagcccccattcggtccagacttttactcctctgacaccgaagagcccgctattgcacccgatctgaagcccgtgaggagatttgtgccagactcatggaaaaactttttccgcggaaagaaaaaggatcccgaatgggacaaaccagtcagtgatattagatacatctcggacggcgtggaatgttctccgccagctagtccggctaggccgaatcaccgctccccattaaactcatgcaaggacccctatggcggaagcgaaggcactttctccagtaggaaggaagcagacgcagtctttccacgagacccttatgggtccttggatcgccacactcagaccgttaggacgtattctgagaaggtggaggagtataacctgcgctactcttatatgaagtcgtgggctgggctcctgcgtattcttggggttgtggagctgttgctgggagctggggtgtttgcttgtgttacagcctatatccacaaagacagcgaatggtacaatctgttcggctatagtcagccctatgggatggggggagtagggggtttgggcagtatgtacggaggctattactatacagggcctaaaactccatttgtgttagtagtagccggactggcctggattactacaatcataattctggtcctgggtatgtccatgtattacagaacgatcttgctagatagtaattggtggcccttgaccgaattcggcatcaatgtagcactgttcatcttgtatatggccgcagctatagtctatgtgaacgataccaaccgagggggattgtgttattatcccctcttcaacactcccgtcaacgctgtgttttgccgagtggaaggcggacagattgccgcaatgatctttttgtttgtcactatgatcgtatacttgatcagcgcgcttgtgtgcctgaaactgtggcggcatgaggcagctaggcgccacagggaatacatggaacagcaggagatcaacgagccttcgctctcatcaaagaggaaaatgtgcgagatggctacctccggggatcgacagagagactcagaggttaatttcaaggaactgcggaccgcgaaaatgaagccagagctcctttcaggccacatcccgccagggcatatccctaagcctattgttatgcctgactacgtcgcaaagtacccagttattcagaccgacgatgagcgcgagcggtacaaggctgtgttccaagatcagttcagcgaatacaaggaactctcggctgaagtgcaggctgtgttgagaaagttcgatgagctggatgccgtaatgtcccgcctcccacaccacagtgaatccaggcaggagcacgaacgcattagtcgcatccatgaggagttcaagaagaaaaaaaatgatccgacattcctcgaaaagaaagagaggtgcgattatctgaaaaataaactctcgcacataaagcagcgtatccaagaatatgataaggtgatgaactgggacgtgcaagggtatagctag

SEQ ID NO: 229637 - DNA, 1329 bp, synthetic construct
  misc_feature 1..1329: note = Description of Artificial Sequence: Synthetic coding sequence
  source 1..1329: mol_type = other DNA
atgtcaaatgacggcagatctagaaatcgagatcggcgatatgatgaggtaccgtctgacttgccctatcaagacactactatccgaacccatccaactctgcacgacagcgagagggcagtgtctgcagatccgctgcctcctcctccactgccactgcaacccccattcggaccagatttctattcaagtgatacagaagaacctgctattgcacctgatttgaagccagtgcgacgattcgtaccggactcctggaagaacttttttagaggcaaaaagaaagacccggagtgggataagcctgtgtccgacatccgctacattagcgatggggtagagtgcagccctcccgcttcacctgctaggcccaatcatagaagcccacttaactcttgcaaggatccttacggcggatccgaaggcacctttagctctagaaaggaagctgatgctgtgtttcctcgagacccctatggatctttggatcgccatacacaaacagtcaggacttactctgaaaaggtggaggaatataacctgagatactcatacatgaagtcctgggccggactcctgcgaatactgggggttgtggagcttcttttgggggcaggggtgtttgcatgcgtgactgcatatatccacaaagattcagagtggtataacctgttcggatacagtcagccttatggaatgggcggagtgggcggacttggctccatcgctttggtttgtctcaaactctggaggcacgaggctgcaagacgccacagagaatatatggagcaacaggaaattaatgaaccaagcctcagctcgaagagaaagatgtgcgagatggccacctcgggagaccggcagagggattctgaagtgaattttaaggaattgcgaactgccaaaatgaagcccgagttgctcagcggccacattccacctggtcacattccaaagcccattgttatgcctgattatgtggcgaaataccccgtgatccaaacagacgatgagagggagaggtataaggcagtttttcaggaccaattttccgagtataaggagctgtccgctgaggtccaagcagtcttgagaaagttcgacgagttagacgcagtgatgagcagattgccccaccacagtgaatcgagacaagagcatgaacgcatctctcggatccacgaggagttcaaaaagaaaaagaatgacccaactttcctcgaaaagaaagagcgctgcgactacctcaagaataagttgtctcacatcaagcagcgaatccaggaatatgacaaggtcatgaattgggacgtgcaggggtacagctag

SEQ ID NO: 229638 - DNA, 1641 bp, synthetic construct
  misc_feature 1..1641: note = Description of Artificial Sequence: Synthetic coding sequence
  source 1..1641: mol_type = other DNA
atgtccaatgatgggaggagcaggaatcgggatcgcaggtacgatgaggtacctagtgatctcccttaccaggatactaccatcagaacgcatcccacactgcacgattccgagcgcgctgtctccgcggaccctctcccccctccacctctccccttgcagcctccgtttggcccagacttctatagcagcgacaccgaagaacctgctatcgctcccgacctcaagcctgtccgccgatttgttccggactcatggaagaactttttccgcggaaagaaaaaggaccccgagtgggataaaccagtgagtgatatccggtatatatcggacggcgtggagtgcagtccaccagccagccccgcacgaccaaaccacagatcgcccctgaatagctgtaaagacccttacggcggatcggagggaaccttctctagcaggaaggaagcagacgccgtctttccccgagacccttatggatcccttgatagacatactcaaaccgttagaacttactcagagaaggtggaggaatataacctgcgatacagttatatgaagtcttgggccggactcctgcgaatcctgggagtcgttgaattgttactcggggctggagtctttgcatgcgtgactgcctacatccataaagacagcgaatggtacaacctgttcggctactcacagccttatgggatgggcggagtaggaggattgggctccatgtacggcggatactactacaccggaccgaagactccctttgttctggtggtcgccggactggcctggataaccactatcattatcctggtgctggggatgagcatgtactatcgcacaattctgctggacagcaattggtggcccctgacagagttcgggatcaacgtggccctattcatcctgtacatggctgcagctattgtgtacgtgaacgatactaaccggggtggcctgtgttattacccactctttaacacccccgtgaatgccgtgttctgccgggtcgaagggggacaaatcgcagcaatgatctttctgttcgtgaccatgattgtgtacctcatatctgcccttgtctgcctgaagttgtggcgccacgaggcggctagaaggcaccgagaatatatggagcagcaggaatgcgaaatggcaaccagtggtgacaggcaaagggatagcgaggtcaacttcaaagaactacgtactgcaaaaatgaaacctgaattgctgtctgggcacataccacccggtcatatcccgaaacccattgtgatgccagactatgtcgcaaaatatccagtgattcagaccgacgatgaaagggagcgatacaaagcagtctttcaggaccagttcagcgaatacaaggagttgagcgccgaggtccaggccgttctgagaaagtttgatgaactcgacgccgtcatgtcaaggctgcctcaccactcagagtctaggcaggagcacgagcgcattagccgtatccacgaagagtttaaaaagaaaaagaacgaccctacttttctcgagaaaaaggaaaggtgtgactacctgaagaataagctgtctcatatcaagcagcggatccaggagtacgataaagtgatgaattgggatgtccaggggtacagttag

SEQ ID NO: 229639 - DNA, 1551 bp, synthetic construct
  misc_feature 1..1551: note = Description of Artificial Sequence: Synthetic coding sequence
  source 1..1551: mol_type = other DNA
atgagtaacgatgggagatcgagaaaccgggataggcgatacgacgaggtgccctctgatctgccctatcaggatacaaccataagaacccatcccacgctccacgactccgagagagcagtctctgcagatcctcttccccctcctcctctgcctctccaaccaccctttgggcctgacttctattcaagcgatacagaggaacccgcaatcgcacccgatcttaagcccgtgagaaggtttgtacccgattcctggaagaatttcttcaggggtaaaaaaaaggaccctgagtgggacaagcccgtgagtgatattagatacatatctgatggggttgagtgcagcccccctgcatctccggcacgccctaatcatcgcagccccttgaattcctgcaaggacccatacgggggttccgaagggacgttttctagccgcaaggaagccgacgctgtctttccacgggacccctacggaagtctcgacagacacacgcagaccgtaagaacctattctgagaaagtcgaagagtataatctccgctattcatacatgaagagctgggctggactgctgcggatactaggcgtggtagagcttctcctgggggcaggggtgttcgcttgcgtgactgcctacattcacaaggactctgaatggtacaacctgtttggctactcacagccctacggaatgggaggagtaggaggcctcggtagcatgtatgggggatattactacactggcccaaagactccctttgttctggtggtcgcgggactggcctggattaccacaataatcatacttgtccttggaatgtcaatgtactaccgcacaattctcctagatagtaactggtggcccctcactgagtttggcattaacgtggccctcttcatcctgtacatggctgcggctattgtgtacgtgaacgacactaatcgcggtggcttgtgttactaccctctcttcaatactccagtgaatgcagtcttttgtcgggtggaaggcggtcaaatagcagccatgattttcctgtttgtcactatgatcgtctatttgataagtgccctggtgtgccttaaattgtggcggcatgaagccgctcgaaggcaccgggagtacatggagcagcaggagatcaatgaaccttccctctcctccaaaaggaagatgtgcgagatggccacatctggcgatcgtcagcgggattcagaagtgaatttcaaggagctcagaaccgccaagatgaagccggagctgctgagtggccacataccacccggtcacattcctaaaccaatagtgatgcccgactacgtggcaaaatacccagtgattcagactgatgacgaaagagaacgatataaagccgtctttcaggatcagttttccgagtacaaagagctgagcgctgaggttcaggctgtgctgcggaaatttgacgaactggacgcagtcatgagtaggttgccacaccattctgaaagcaggcaggagcacgagagaattagtaggatccatgaggaattcaagaaaaagtag

SEQ ID NO: 229640 - DNA, 438 bp, synthetic construct
  misc_feature 1..438: note = Description of Artificial Sequence: Synthetic coding sequence
  source 1..438: mol_type = other DNA
atgtctaacgacggcagaagcagaaatcgcgaccgccgatacgatgaagtgccatcagacctgccttatcaggatacgacaattaggactcatcctacattgcacgactcggaacgtgccgtaagcgcggatccattaccgcctccgccactgccgttgcaacctccatttggccctgatttctatagtagcgataccgaggaaccagcaattgcgccagatttaaagcctgttcgtcggtttgtccctgactcctggaagaacttcttcagggggaaaaagaaggatcccgaatgggacaagcccgtatctgatatcagatacataagcgatggcgttgaatgttctccccctgcaagtcccgctcgcccaaaccaccggagcccactgaatagctgcaaagatccatatggcggaagcgaagggacatttagttag

SEQ ID NO: 229641 - DNA, 1206 bp, synthetic construct
  misc_feature 1..1206: note = Description of Artificial Sequence: Synthetic coding sequence
  source 1..1206: mol_type = other DNA
atggaagacccctcaggcgcaagagagcccagggctcgacccagggaaagggaccctggtcgccgtccccatccggaccagggcaggactcatgaccgtcccagagatagacctggggaccccaggagaaaacggagctcagacggcaaccgacgacgcgatggcgatagggatcccgagagagaccaggagcgggatggcaacagggatagaaatcgagacagggagcgggagagagaaagagaacgggacccagacaggggaccaaggagagatacacaccgggacgctgggccacgcgcaggggaacatggggtgtgggaaaagcccagacagagccggacacgagatggagcacggggactgacttgggatgccgctgcacctcctggccctgccccttgggaagcccctgagccaccgcagccacagcgaaaaggtgaccctggtagacgaaggccagaatctgaaccgccttcggagcggtatctcccaagcacaccgagacccggaagggaggaagtggagtactaccagtcggaagctgagggactcctagagtgtcacaaatgtaagtacctttgcacaggacgagcctgttgtcagatgttggaagtgctactgaacctgctgattttggcatgctcttccgtgtcctattcaagcaccgggggatacacgggcattacttcattagggggaatttattactatcagtttggaggcgcttattctgggtttgacggcgcagatggagagaaggcacagcagctggacgtgcagttctaccagctcaagctccccatggtcacagtcgcaatggcatgtagtggcgcacttactgcactgtgttgtttgtttgtggctatgggtgtgcttcgcgtgccctggcattgccccctgctcttagtcaccgaagggttgcttgacatgttgatagcgggtgggtatatccctgcactgtacttttatttccattatctcagtgctgcatacggatcgcctgtatgtaaggagaggcaggctctttatcagagtaagggatactctggatttggttgtagctttcacggcgcagatattggggctgggatctttgcagctcttgggatagtggtgtttgccttaggagctgtgctggccattaaaggttaccgcaaggtcaggaaactgaaagagaagccagcagagatgttcgagttctag

SEQ ID NO: 229642 - DNA, 1233 bp, synthetic construct
  misc_feature 1..1233: note = Description of Artificial Sequence: Synthetic coding sequence
  source 1..1233: mol_type = other DNA
atggaagatccctctggggcacgagagccaagagccagacctcgcgagagggatcccggtaggcgccctcaccctgatcaggggagaacacacgaccggcctcgtgataggccaggagaccctcgccgaaagagatctagcgatggtaaccgtcgaagggatggtgatagggatcctgagagggatcaggagcgggacggtaacagggacaggaatagagacagggagagagaacgggaacgggagagagatcctgatcgcggtcctaggagagatacacatcgcgatgcaggtcccagagctggggagcatggcgtgtgggaaaaacctcggcaatcacgtacaagagacggtgcccgaggcctgacatgggacgcagcggcaccccctgggccagctccctgggaagctcccgagccgcctcagccccagcgtaagggcgatcccggtcgacggaggccggagtcagaaccaccgagcgaaaggtacttgccttctacccctcggccagggagggaggaggtggagtattaccaaagcgaggccgaaggcttactggagtgtcacaaatgcaagtacttatgtacaggtcgcggtgtcgtgcaaattgttgaggttgtcctcaacggtatggtgctgatctgtattgtggcctcctacttcgtccttgccggttttagtgcttccttttcatcaggcggagggtttggcaacaattactactcaccgtttgaggggactgagctagagcaggtccggcagctggaccaacagtataccatcctgcgaagcccgctcatatatgggggtgtggctgtgtcgctggggcttggggtgctgaccatgggcgtcttacttcaaggcgctaagagcaggaccatgctgtccggaaaatggttactgacagaagcagcgttcagccttttggcagcggtgggttactgcacagggatcggcgtttacctgcacgtggcacttcaaatcaactctacagacacttgcaagactcgggagcgactgtatgcaaggaaagggctgacatggatggattgtcagctggcaggaacggatggggcagctgctactttcgcttgcctcttggtaattatgtatggcgctagcgtcgtgctggccctgcgaagctatcgcgaacagaaacgctataaggggagccgtgagcagcccggatcatacagtgatgcacccgagtatctttggagtggcactctatag

SEQ ID NO: 229643 - DNA, 978 bp, synthetic construct
  misc_feature 1..978: note = Description of Artificial Sequence: Synthetic coding sequence
  source 1..978: mol_type = other DNA
atggatgggtccaacgtcaccagtttcgtggtggaggagcctacaaatatttctactgggaggaacgcatctgttggtaatgcccaccgccagattccaattgtgcactgggtgattatgtctatttcccccgtgggattcgtggaaaatgggatccttctatggttcctctgcttccgaatgaggcggaaccccttcaccgtgtatatcacccatctatcgatcgcagatatatccttgctcttctgcatatttatcctcagcatagattacgccttggattacgaactctcatccggccactattacacaatcgtaactctgtccgtgacgttcctctttggctacaacacgggtttatatctccttaccgccatatccgttgaaagatgtctgagcgtcctttacccgatctggtaccgttgccatagacctaaatatcagagtgccctggtttgtgctctgctgtgggccctcagctgtttggtcacgaccatggagtacgtgatgtgtatagaccgtgaggaggaaagccacagtcgcaatgactgcagagccgtgattatcttcattgctattctctcttttctcgttttcacccccctcatgctggtgtcttccacaatcctggtggtgaagatacgaaaaaatacatgggcctctcactccagcaaactgtacattgtcatcatggtgacaatcattattttccttatcttcgccatgcccatgagactcctctacctcctatattatgagtactggtcgacattcggtaatttgcatcacattagcttgcttttcagtaccattaattctagcgccaatcctttcatctatttttttgtgggcagctctaaaaaaaaaagatttaaggaaagcctcaaagtagtgttgacccgggcttttaaagacgaaatgcaacccagacgccagaaagacaattgcaatactgtcaccgtggagacagtcgtctag

SEQ ID NO: 229644 - DNA, 1137 bp, synthetic construct
  misc_feature 1..1137: note = Description of Artificial Sequence: Synthetic coding sequence
  source 1..1137: mol_type = other DNA
atggtgtggggaaaaatatgctggttttcccagcgagctgggtggactgtattcgccgagagccagatcagcttgtcctgtagcctctgtctgcactcaggtgatcaagaggctcagaatccaaacttggtgtcacaactttgtggcgtgtttttacagaatgagaccaatgaaaccattcatatgcagatgtccatggcagtgggccagcaggccctccccctcaatatcatcgcccctaaggccgtgttagtgagcctgtgcggggtactgcttaatggcaccgttttttggctcctgtgctgtggtgccacaaatccgtacatggtttacattctgcacctggtggctgccgatgttatttatctgtgctgcagcgcggtgggcttcttgcaagttacgctgctaacttaccacggcgtcgtcttcttcatcccagacttcctggcgatcctctccccatttagcttcgaggtatgcctctgtctgctcgtcgcaatctcgacagagcgctgcgtgtgtgttctcttccccatatggtatcggtgccatcggcctaaatacacgtccaatgtggtgtgtacactgatttggggtctacccttttgtatcaatatcgtgaagtctctcttcttaacatattggaaacacgtaaaagcttgcgttattttcctgaagctgtctggcctcttccatgccatcctgagcctcgtcatgtgtgtgagctcactgactctcctaatccgatttctgtgctgcagtcaacaacaaaaagctacccgtgtgtacgcggtggtgcagataagcgcaccaatgtttctgctgtgggccttgcctctgtcagttgccccactcatcacagatttcaaaatgtttgtgaccactagttacctgataagccttttcctcattatcaattcatccgctaacccaatcatttactttttcgttgggagcttgcggaagaagaggctgaaggaaagcctcagggtcattctccagagagccctggcagataagccagaggtcggaagaaacaagaaagctgccggaattgaccccatggaacagccccactccacccagcatgtggagaatctgttgccccgagaacacagagttgacgtggagacctag

SEQ ID NO: 229645 - DNA, 1137 bp, synthetic construct
  misc_feature 1..1137: note = Description of Artificial Sequence: Synthetic coding sequence
  source 1..1137: mol_type = other DNA
atggtgtggggcaaaatctgctggttctcacagagagcaggatggactgtgtttgcagagtcccagatttctctgtcctgcagcctttgtcttcactccggcgaccaagaggcgcagaacccaaatctggtgagccagctgtgcggcgtctttttgcagaatgaaacaaacgaaacaattcatatgcaaatgagcatggccgttggacagcaggcccttcccctaaatatcattgctcctaaagctgtgttagtgtccctttgcggcgtgttgcttaacggaacggtcttctggctgttgtgttgtggtgctacaaatccatacatggtgtatattctgcaccttgttgccgcagacgtcatttacttgtgttgtagtgccgtagggtttctgcaagtcacactgctgacctatcacggagtcgtgttctttatacctgatttcctcgcgatactgagtcctttctctttcgaggtgtgtctttgtctgctcgtcgcgatcagtactgaaaggtgcgtgtgtgtgctgtttccaatttggtacagatgtcaccggccaaaatacacttctaatgtcgtttgcaccttgatttggggtctgccgttttgcataaacattgttaagtccctgtttctcacctattggaagcatgtgaaagcttgcgtcattttccttaagctctctggcttgtttcacgcgatactgagcttggttatgtgcgtgagctcactgaccctcctgatcaggttcttgtgttgcagtcagcaacaaaaagcaacccgagtttatgctgtagtgcagatttccgcccctatgttcctgctctgggctttgccactaagtgtggcacctctgatcacagactttaagatgtttgtgactacttcctatctaatcagcctgtttctgattatcaacagcagcgccaatcccattatttatttttttgtcggcagtttgcgcaaaaagcggttgaaggagtccttgcgcgtgatattacagcgcgcacttgctgataaacctgaagtggggaggaataagaaagctgcaggcatcgatccaatggagcagcctcattctacacagcacgtcgaaaacttgttacctagggagcatcgcgtcgatgttgagacttag

SEQ ID NO: 229646 - DNA, 1137 bp, synthetic construct
  misc_feature 1..1137: note = Description of Artificial Sequence: Synthetic coding sequence
  source 1..1137: mol_type = other DNA
atggtgtgggggaaaatctgctggttttcacagagggccggatggacagtgttcgccgaatctcagatttcactcagttgctccctgtgcctccacagtggcgatcaagaagcacagaatcccaacctggtatctcagttgtgtggggtgttccttcagaatgagactaacgaaaccatccacatgcaaatgagcatggctgtggggcagcaagctcttcccttgaacatcattgcaccaaaagccgtgctggtcagcttatgcggcgtcctcttgaatggcaccgtgttctggctcctgtgttgcggtgccacaaacccttatatggtgtatatcctgcatctggtagccgctgacgtcatttatttgtgctgtagcgcagtgggcttcctgcaggtgacgctgctcacataccacggtgtggtgttttttatcccagattttttggccatcctctcaccttttagcttcgaggtgtgtctctgccttcttgtggctatctcaaccgagaggtgcgtgtgtgtgctgtttccaatatggtatcggtgtcatcgtccgaaatacacaagcaacgttgtctgtactctcatctggggattgcctttctgcattaacatcgtaaagagcctgttcctgacttactggaagcatgttaaggcatgcgtcatcttcctaaaattaagtggcctgttccatgccattctgtcgttagtaatgtgtgtcagtagtctgacactcctcatacgattcctctgctgtagtcagcagcaaaaggcaaccagagtgtatgccgtggtacagatatccgcgccaatgtttttattgtgggccctgccattgtctgtcgcgcctctgattacggactttaagatgttcgttaccacaagctacctgatcagtctgtttctgataattaattcgagcgccaaccccataatatatttctttgtcggctctcttcgaaaaaaaagactgaaagagtccttaagggtaatcctccagagggctctcgccgataaaccagaggtaggtcgaaacaaaaaggctgctggcatagaccccatggaacagccacactctacccagcacgtggagaacttgctcccgcgtgaacaccgggtggacgtggaaacatag

SEQ ID NO: 229647 - DNA, 1137 bp, synthetic construct
  misc_feature 1..1137: note = Description of Artificial Sequence: Synthetic coding sequence
  source 1..1137: mol_type = other DNA
atggtgtggggcaaaatttgctggttcagtcagcgagccggatggaccgtcttcgccgaatcccagataagcctctcttgttcactttgcttacacagtggggaccaggaggcacagaaccctaacctggtatctcagctgtgcggggtgttcctacaaaacgagacaaacgaaacaattcacatgcagatgagcatggccgtggggcaacaggcccttcctctgaacataattgccccaaaggccgtgttggtgtcattgtgcggtgtgcttctcaacggcacagtcttttggctcttatgctgtggcgcaaccaacccatatatggtctacatactgcacctggtggccgctgacgtgatctatctttgttgcagcgctgttggtttcctgcaagtgacgctgctcacctaccatggggtggtattcttcatcccggattttctcgctatcttgtcccccttttcgtttgaggtctgtctgtgtctgttggtggctatctctactgagcggtgtgtctgcgtcctgtttcccatctggtacagatgccatcgacccaagtatacgagtaacgttgtgtgcactctgatttgggggttgccattttgcatcaacattgtaaaaagtctttttttgacatactggaaacacgtcaaggcttgtgtcatattcttaaaactgtcggggctgttccatgccatcctgtcacttgtaatgtgtgtgagttcattgaccttgctgatccgctttctgtgctgctcacagcagcagaaggcgaccagggtttacgccgttgtgcaaatcagcgcacccatgtttctactttgggccctgcctttaagtgtagctccactgatcacggactttaagatgtttgtgaccacctcatacctgatttccttattcttgataatcaacagttcggctaaccccatcatttactttttcgttggatctctgcgtaaaaaacggctcaaagagtcactgagggtaatcttgcaaagagcgcttgccgataagcccgaggtcgggcgaaacaaaaaggcagcagggatcgatccaatggagcagcctcactcgacacagcacgtagaaaatctcctccctcgagagcaccgcgtcgatgttgaaacatag

SEQ ID NO: 229648 - DNA, 1137 bp, synthetic construct
  misc_feature 1..1137: note = Description of Artificial Sequence: Synthetic coding sequence
  source 1..1137: mol_type = other DNA
atggtatggggaaagatctgttggttctctcagagggccggatggaccgtattcgctgagtcacagatctccttgtcttgctccttgtgcctgcactccggcgatcaggaagcacagaatccgaacctggtgagtcagttgtgcggcgtttttctgcagaatgaaaccaacgagacgatccacatgcagatgtctatggcagtgggtcaacaggccctacctttaaacatcatcgccccaaaggctgtgctcgtgtcgttgtgcggggtgctgcttaatggtactgtgttctggctgttgtgttgcggcgcaactaacccatatatggtttacatcctgcacctggtggcagccgatgtgatttacctgtgttgtagtgctgttggatttcttcaagtcaccctgctcacgtaccatggtgtggtctttttcattcctgacttcctggcaatcctgagcccttttagcttcgaggtttgtctgtgcctcttggtagccatttcaacagagagatgtgtgtgtgtgctgttccctatatggtaccggtgtcaccgcccaaagtacacgagcaacgtcgtgtgcaccttgatctggggattgcctttctgtattaatattgtgaaatcgctctttctcacatattggaagcacgtcaaggcttgcgtgatctttctcaaactcagcgggttgtttcacgctatcctgtccttagtaatgtgcgtaagctctttaacattacttattcggttcctgtgctgctcccaacagcagaaggccacacgcgtttatgcagtggtccagatcagcgcacctatgttcctgctctgggctcttcctctgtcagttgcccctctaattacagactttaaaatgttcgtcacaactagctatctcatcagcctcttcctgatcataaattccagtgccaacccaatcatctacttcttcgtgggatcgcttcgcaagaagcggctcaaggaaagccttagggtgattctgcaaagagcattggccgataaacccgaggtcggcagaaacaagaaagccgcaggcatcgatcccatggagcaaccccattctacacagcacgtggaaaacctgttgcccagagagcatagagtggacgtcgagacttag

SEQ ID NO: 229649 - DNA, 1137 bp, synthetic construct
  misc_feature 1..1137: note = Description of Artificial Sequence: Synthetic coding sequence
  source 1..1137: mol_type = other DNA
atggtgtggggcaagatctgttggttctcacagcgggctggatggaccgtgttcgcagagtcgcagattagtctgtcctgtagcctctgcttgcatagtggggaccaggaggctcaaaatcctaacctggtgtcccaactgtgtggcgttttcctgcaaaatgaaactaacgagacaattcacatgcagatgtcaatggccgtgggacaacaggcgctgccactgaatattatcgcccctaaggccgtcttagtaagcttgtgcggagtgctcttaaacgggaccgtgttttggctcctctgttgtggcgcaacaaatccttatatggtgtacattctccacctagtggccgctgatgtcatctacctgtgctgcagtgctgtggggttcttacaggtaactttgcttacttatcacggagtagtattttttattcccgacttcttggccatcctcagccctttcagtttcgaggtctgtctgtgtctgctggttgccatatctaccgagcgatgcgtctgtgtcctgtttcccatatggtaccgatgccacaggcccaaatacacatcgaacgtggtctgtaccttaatctggggcttgcctttctgcattaacatagtgaagtctctgttcctcacctactggaagcacgtgaaagcttgcgtaatttttctgaagctgtccggattgttccatgccatcctcagcctggtgatgtgcgtgtcctcgctaacactgctgattaggttcctatgttgcagccagcaacaaaaggctaccagagtctatgccgtggtgcagatatccgcccctatgttcctgctgtgggccttgcctctctcagttgcccctcttataacagactttaagatgtttgttacaacctcatacctaatctctctttttctaatcatcaactcctcagccaaccctatcatatacttcttcgtcggctctctccgaaagaaaagactgaaggagtccctccgagtgatcctccagcgcgcactggcagacaagccagaagtgggaaggaacaagaaggcagccggaattgacccgatggagcagccccactctacgcagcacgtcgaaaacctcctgcccagggaacacagggtagatgtggaaacctag

SEQ ID NO: 229650 - DNA, 1137 bp, synthetic construct
  misc_feature 1..1137: note = Description of Artificial Sequence: Synthetic coding sequence
  source 1..1137: mol_type = other DNA
atggtctggggtaagatctgctggttcagccagcgagccggatggactgtgtttgctgagtcccagataagtctgtcctgctccctctgcctccattcaggcgaccaggaggctcagaaccctaatctcgtttctcaactatgtggagttttcctacaaaacgagacaaacgaaacaatccacatgcagatgtcaatggctgtaggacagcaggctctgccactgaatataatcgctccgaaagccgttctggtaagcctgtgcggcgtgcttcttaacggcacagtgttttggctgctttgttgtggcgctacaaacccctacatggtttatattctacatctcgtggccgctgacgttatctatctgtgctgttccgccgtgggcttcttgcaagtgacgttattgacgtaccatggtgtggtcttttttatacctgatttcctcgcgatcctgtcccctttttcattcgaggtttgtctatgtctactggtcgcaatcagtaccgaacggtgcgtttgtgtactgttcccaatctggtataggtgtcacaggccaaaatacacatccaatgtggtatgcacccttatctggggactgcctttctgcattaatatcgtgaagtccttatttctcacttattggaagcatgttaaagcctgtgtgatttttcttaaactgtctggcctatttcacgccattctgagcctcgtgatgtgtgtctcttcacttacactactgattaggttcctgtgttgtagtcagcagcagaaggccacgcgggtttacgccgtagtgcagatatcggcccctatgtttctcctgtgggcgttgcctttatcggtagctcctcttatcaccgactttaagatgtttgtgacaacgtcgtatttgatctccttatttcttataatcaattcttccgctaatcctatcatctacttcttcgttggatccctccgcaagaagcgtcttaaagagtcactgagagttatcctgcaacgtgctttggccgacaagccggaggtgggaaggaacaagaaagcggcagggatagaccctatggagcagccccactcaacccagcacgttgagaacctcctgcctagggagcaccgagtggatgttgagacttag

SEQ ID NO: 229651 - DNA, 1137 bp, synthetic construct
  misc_feature 1..1137: note = Description of Artificial Sequence: Synthetic coding sequence
  source 1..1137: mol_type = other DNA
atggtttgggggaagatctgctggttctcgcaacgagcgggttggactgttttcgcagaaagtcagatcagtctgagctgttctctgtgcctgcattccggggaccaagaggcccagaacccaaacttggtgagccagctctgcggtgttttcctccaaaacgagacaaacgaaaccattcacatgcagatgtcaatggctgttggccaacaggctctccctctgaacatcatagccccaaaggctgtgcttgtgagtttatgcggtgtactgttaaatggcaccgtgttctggctgctgtgctgcggagctactaacccatatatggtttatatcctgcacttagtggcagccgatgtgatctatctatgttgttctgcagtcgggttcctacaggttaccctgctaacatatcatggggtggtgtttttcattcctgactttctagcaatattatcgcctttcagctttgaagtctgtctgtgtcttctggtggcaatttccactgagcgctgcgtttgcgtgttgtttcctatatggtatagatgtcaccggccaaagtacacctctaacgtagtttgcactttgatttggggcctgccattctgtatcaatattgtgaagtccttatttttaacatactggaaacacgttaaagcctgtgtgattttcctaaagctttcggggctctttcacgcaatactgtctctcgtaatgtgcgtcagttctctcacactgttaattcggttcctctgctgctcacaacaacagaaagctaccagagtatatgctgtagtgcagatctcagctcccatgttcttgttgtgggccttgccactgtcagtagctcccctgataaccgatttcaaaatgtttgtgacgacgagttatctcatctctctattcctgatcattaactcttctgctaatcctatcatctacttttttgtcggaagtctgcgcaaaaagaggctgaaggagagccttcgtgtcatactccaacgcgctctggctgacaagcctgaagtcggaagaaataagaaagccgctggtattgaccccatggagcagccccattcaacccagcatgttgagaatctattaccacgcgaacatcgggtagacgtcgaaacctag

SEQ ID NO: 229652 - DNA, 966 bp, synthetic construct
  misc_feature 1..966: note = Description of Artificial Sequence: Synthetic coding sequence
  source 1..966: mol_type = other DNA
atgaaccaaaccttgaactcgtctggcaccgtcgagtccgcccttaactatagccgagggtccactgtccataccgcttatctcgtactatcctcactggcaatgtttacttgtttatgcggcatggcaggtaacagcatggttatatggttgttaggcttccggatgcatcgcaatccattttgcatttacatcttaaacttggccgctgctgatctgctgttcctgttcagcatggcgagtacactcagcctggagacccagccactggtcaacaccaccgataaagttcatgaactgatgaagagactaatgtactttgcttacacggtggggttgagtctattgactgccatctcaacgcagaggtgcctctccgtcctgttcccgatatggtttaagtgtcataggccgagacatctgtcggcctgggtttgcggattgctttggactctatgcttgttaatgaacggcttgacatcgtccttctgtagtaagttcttgaaatttaatgaggaccgctgcttcagagtagatatggtgcaggcagctctgataatgggagttttaacccccgtcatgactctttccagcctaaccctttttgtctgggttcggcgttcttcccagcaatggaggcgccagccaacaagactgtttgtggtcgttctcgcctctgtactggttttcttaatatgttctctcccgctgagcatctattggttcgttctctattggttatcattacctcccgaaatgcaggtcctgtgttttagcctcagccggctttcaagctctgtcagttcatctgccaatccggtgatatatttcctcgtgggatcgcggcgtagccatcggttgccgactagaagcctgggcacagtactgcagcaggctctgcgggaggagcccgaactagagggcggtgagaccccgactgttggcactaacgaaatgggggcatag

SEQ ID NO: 229653 - DNA, 936 bp, synthetic construct
  misc_feature 1..936: note = Description of Artificial Sequence: Synthetic coding sequence
  source 1..936: mol_type = other DNA
atggaaccccgtgaagccggacagcacgtcggagcggctaacggggctcaagaagatgttgcttttaacttgattatcttgagtctcaccgaggggctcggcctgggaggactactgggcaacggggctgtgctatggctactcagctccaatgtttatcgcaacccctttgcaatttatttactggatgtcgcctgcgccgatttgatttttctaggatgccatatggtggccattgtgccagacctgctgcagggtagacttgactttccagggtttgtgcaaactagcctcgccacccttaggtttttctgttatattgtgggactgagcctgctcgctgcagtgtctgtcgagcagtgcctggcggcactgttccccgcatggtatagttgccgaaggcctcgtcaccttaccacttgtgtgtgcgcactcacctgggcgttgtgtttgcttctgcatctattgttgagtggcgcttgcacccagtttttcggagagccgagtcgccatttgtgccggacactgtggctcgtggcggcagtgttgttggcgctcctgtgttgcaccatgtgcggagcttcactcatgctgctgctgcgggtagagcggggaccccagagaccccctccgaggggctttcctggcttaatcctgttgaccgtactgctgtttctgttttgcggtctgccattcggcatttactggttgagtaggaatcttctatggtatataccccattacttctatcattttagctttttgatggctgccgtgcactgtgctgcgaaaccagtcgtttatttctgcctaggctctgcacagggacgtcgcctgccgctccgcctcgtgttgcaacgtgctctgggcgacgaggctgagttgggagctgtgagagagacaagtcggcgagggctcgttgacatcgccgcatag

SEQ ID NO: 229654 - DNA, 939 bp, synthetic construct
  misc_feature 1..939: note = Description of Artificial Sequence: Synthetic coding sequence
  source 1..939: mol_type = other DNA
atgatggagcccagggaggccggtcagcatgtcggcgcagctaacggcgcacaggaggatgttgcctttaacttgattattcttagcttgaccgaaggcctgggtctgggtgggctgctgggcaacggggctgtactgtggctgctgagctcaaatgtctaccggaacccctttgcgatctacctcctggatgtcgcctgtgccgacctgatcttcttggggtgtcacatggtggccatcgtcccagacctgttgcagggcagattggactttccaggatttgtgcagacatctttggctacgctcaggtttttttgctacatcgtcgggctgagcctgttagcggcagtgagtgttgagcagtgcctcgcagcgctgttccccgcttggtacagctgtagacgacccaggcatcttacaacgtgcgtctgcgccctgacgtgggccctctgtttgctactgcatctgttgctgtctggagcatgtacacaattttttggcgaaccctctagacatttgtgccggaccctctggctcgtggccgcagttctgctggccctgctgtgctgcaccatgtgcggcgcaagtctgatgctactgctgcgagttgagagaggccctcaacggccaccacctcggggattccccggactgattctcctgacggtgctattgttcctgttttgtggattgcccttcggtatctactggctctcccgtaacctgctgtggtatataccacactatttctatcacttttccttcttgatggccgcagtacattgcgccgcaaagccagtggtgtacttctgcctgggatctgcccagggccgtcgtttgccattgcgtctggtgctacagagagctctgggtgatgaggctgagcttggtgcagtgcgcgaaacctctcggaggggactggtggacatcgccgcatag

SEQ ID NO: 229655 - DNA, 1032 bp, synthetic construct
  misc_feature 1..1032: note = Description of Artificial Sequence: Synthetic coding sequence
  source 1..1032: mol_type = other DNA
atggccggaaactgctcttgggaagcccacccagggaatagaaacaaaatgtgtcccggactcagcgaggctcccgaactctactccagggggttcctgacaatagagcagatcgccatgttgcctccacctgcagtaatgaactacatctttctgctcctgtgcctgtgtggccttgtggggaatggtctcgtgctgtggtttttcggtttttcaatcaaacggaatcccttctcaatctattttttacatcttgccagcgccgacgttggctacctttttagcaaggcagtgttctccattctcaacaccggcggattcctcggcacttttgcagattacattcgctcggtttgccgtgtgctcggactatgcatgtttttaactggggtctccctgctgcctgcagtttctgctgaacggtgtgctagcgtgatatttccagcctggtactggcgccgtcggccaaagaggttgagcgcggtcgtctgcgccttgctatgggtactgtccctgttggtcacctgtcttcataactacttttgtgtcttcctggggaggggagcgcctggtgccgcatgtaggcacatggacattttcctgggcatcctgctgttcttgctttgttgccccctcatggtgctgccctgtttggccctcatactgcacgtggaatgtagagcccgaaggaggcagaggtcagctaaactcaaccacgtcattctggccatggtgtccgtctttctggtgtcctctatttacctaggcatagattggttcctcttttgggtgtttcagatccctgctcctttcccagagtacgtcaccgatttgtgcatatgtataaacagcagcgcaaagcctatcgtctacttcttggcaggacgcgacaagagccagcggctctgggagcccctccgagtggtctttcagcgggctctccgcgacggcgctgaactgggggaggctgggggttctaccccaaatacggtcaccatggagatgcagtgccccccaggcaacgccagttag

SEQ ID NO: 229656 - DNA, 948 bp, synthetic construct
  misc_feature 1..948: note = Description of Artificial Sequence: Synthetic coding sequence
  source 1..948: mol_type = other DNA
atggccggaaactgctcatgggaagctcaccccggtaatagaaacaaaatgtgccccggtctctctgaggctcccgaactgtattcacggggtttcctcaccatcgagcaaatcgcaatgctgcctcctccagcagtgatgaactacattttcctgcttctatgtctgtgtggactggtggggaacggcctcgtgctgtggttttttggattttccatattaaacaccggtggcttcctagggacattcgcggattacatcaggtctgtgtgcagggttctgggtttgtgcatgtttctgactggcgtgtcacttctacccgctgtttctgctgaacggtgtgcctcagtgatctttcccgcatggtactggaggcggaggcccaagagactctcagccgtggtttgcgctctactgtgggtgctcagccttctcgtaacctgtctccacaactatttttgtgtcttccttgggaggggcgcacctggcgcagcttgccggcacatggatattttcctgggtatcctgctgtttttactgtgctgtcccttgatggtactcccctgcctggccctcattctgcatgttgaatgtcgcgcaagaagacgccagcggagcgctaaactcaaccatgtcatcctcgctatggtgtcggtgttcctggtcagctcgatctaccttggcattgattggtttttgttctgggtctttcagatccctgccccttttccggaatacgtgacagatttatgcatatgtatcaacagttccgctaagcctatagtctactttctggccggaagagataaatctcagcgactctgggagcctctgagagtggtgttccaacgagccctcagagatggcgctgagttgggcgaggctgggggatcaacacctaataccgtgactatggagatgcagtgcccaccagggaacgcaagttag

SEQ ID NO: 229657 - DNA, 1032 bp, synthetic construct
  misc_feature 1..1032: note = Description of Artificial Sequence: Synthetic coding sequence
  source 1..1032: mol_type = other DNA
atggccggtaactgttcctgggaagctcatcccggtaataggaataaaatgtgtcccggactgtctgaggcacctgagctgtacagtcgtggtttccttacaattgaacagatcgccatgcttccaccccctgcagttatgaactacatattcctgttgctctgcctctgtgggcttgtgggaaacggtctggtcctctggtttttcggtttcagcatcaagcgaaacccattcagcatctacttcttgcacctcgcctctgccgacgtaggctacttattctcaaaggccgtctttagcattctcaatacagggggattcctgggaaccttcgctgattatatccgctctgtctgcagagttctaggcctgtgtatgtttctgactggcgtgtccctcttgccggctgtgtccgcagaacgctgcgcaagcgttatattccctgcgtggtactggcgccgaagacctaaacgattatccgctgttgtctgtgcactgctatgggtgctttcgctcctggtcacctgcctccataactatttctgtgtcttcctgggacggggagcacccggagctgcctgccgtcacatggacatcttcctcggcatcctgctttttttactgtgctgtcctttaatggtgttgccttgtctagcactgatcttgcatgttgagtgtagggccaggcggcgtcagcgatctgcgaagctgaaccacgtgatcctggctatggtttctgttttcttggtgtcctctatttacctgggcatcgactggttcttattctgggtcttccaaattccagccccattccccgaatacgtcacagacctctgcatttgtatcaacagttctgctaagccaatagtttacttcttagcgggacgcgacaagagccagcgactttgggagcctttgagagtggtgttccagcgagcactgcgggacggagcggaacttggcgaggcgggaggtagtacgccaaataccgtcaccatggagatgcagtgcccccctggtaatgccagctag

SEQ ID NO: 229658 - DNA, 870 bp, synthetic construct
  misc_feature 1..870: note = Description of Artificial Sequence: Synthetic coding sequence
  source 1..870: mol_type = other DNA
atgttcggtctcttcgggctgtggagaacctttgactcagtggtattttacctgacgctcatcgttgggttgggaggcccagtgggcaacggcttggttttatggaaccttggcttccggatcaagaagggacctttttctatctatctgctgcacctggctgctgccgacttcctgtttctctcctgtagagtaggtttttctgtggctcaggcggcactcggagcccaggatacactgtactttgtgttaactttcctgtggttcgcagtggggctgtggctgctagcagccttttccgtcgaacggtgtctctcagacctcttccctgcttgttaccagggttgtaggcctaggcacgcctctgcggtgctttgcgctttagtttggacacccactttgcctgccgtccctttgcctgccaacgcatgtgggctccttcgaaatagcgcgtgcccactggtgtgccccaggtaccatgtggcaagcgtcacatggttcctggttctcgcgagagtagcctggactgccggagtggtactcttcgtgtgggtgacatgctgtagcacgcgcccaaggccacgcctctacggtattgtcctaggagctctccttctgctctttttttgcggcctgccgtccgtgttctactggtctctccagccactgcttaactttctgttaccagtgttttctcccctggcaacgctcctggcatgtgtgaatagctcatcaaaacccctgatatacagcggactgggccgtcagccaggtaagcgggagcctctacggtcagtgttacgaagggctcttggagaaggtgcggagctgggggctagagggcagtccctgccaatgggtcttctgtag

SEQ ID NO: 229659 - DNA, 969 bp, synthetic construct
  misc_feature 1..969: note = Description of Artificial Sequence: Synthetic coding sequence
  source 1..969: mol_type = other DNA
atggacccaacaatctcaacccttgacactgagctgactcccatcaacgggaccgaagagacactgtgttataaacagactctcagccttacagtgctcacctgcatcgtcagtctggttggcctcactggaaatgccgttgtgctttggctgttgggttgtaggatgcggaggaacgcctttagcatctatatcctcaatctagcagctgccgactttctgttcctgtccggaaggttaatttattccctcttgagcttcatttcaatcccccacacaatttctaagatactgtaccccgttatgatgtttagctattttgccggactgtcctttctgagcgctgtttcgactgagcgctgtctgtctgttctgtggcctatctggtacagatgtcatcgacccacgcatctgtcagccgtggtctgtgtgctcctgtgggccctctcactgcttaggtcaattttggagtggatgctgtgtggctttcttttttccggagctgacagtgcatggtgccagacaagcgatttcatcacagtggcttggctgattttcctgtgtgtggtactttgtggcagttcactggtgctgctcatcaggatattgtgcggtagcaggaaaattcctttgacaagactctacgtaaccattctgttgacagtgctcgtttttcttctctgcgggctgcccttcggcatacaattctttctgtttctttggatccacgtggaccgggaagtgctcttttgtcacgttcacctggtgtctatctttctgtccgcgttaaactcatccgcaaatcccatcatatatttcttcgtcgggtcgttcagacagagacaaaaccggcagaacctcaaattagtcctgcagcgggctctgcaggatgccagcgaggtagacgaaggcggaggacagctaccggaggagatcctagagctcagtggctcaagacttgaacagtag

SEQ ID NO: 229660 - DNA, 993 bp, synthetic construct
  misc_feature 1..993: note = Description of Artificial Sequence: Synthetic coding sequence
  source 1..993: mol_type = other DNA
atggaccccaccactcccgcatgggggactgaatcaaccacggtgaatggcaatgatcaggcgctcctcctgctctgtgggaaagaaaccttgataccggttttccttattttgtttatcgcactggtagggctcgttggtaatggctttgtgctatggctgcttggatttcgaatgcgaaggaacgcgttttctgtgtacgtgctgtcccttgcaggggcagacttccttttcctttgttttcaaattattaactgcctggtgtatctgagcaactttttttgtagcatcagtattaacttcccatctttctttactaccgtcatgacctgcgcatatctcgccggacttagcatgctgagtaccgtaagcaccgagcgctgcctgagcgtgctgtggcccatatggtatcgctgtaggaggcctcgacaccttagcgcagtagtgtgcgtcctcttgtgggccctcagcctgctgcttagcatcttggagggaaagttctgcggcttccttttcagtgacggagattcgggttggtgtcagacattcgactttataaccgccgcttggttgatctttctgtttatggttctgtgcggtagcagcttggccctgctcgtccggattctctgcgggagccgcggacttcctctgaccaggctttatctcactattctccttacagttcttgtcttcctgctttgtggattaccattcggtattcagtggttcctgattttgtggatctggaaggacagcgatgtgctcttctgtcacattcaccctgtgtcagtagtcctgtcctccttgaattcttctgcaaatcctatcatttacttctttgtagggtcctttcgaaagcagtggcgcctacagcagcccattctaaagttagcccttcaaagagcgctgcaggatattgcagaagttgatcactcagaaggttgcttccgacagggcacccccgagatgtccagatctagtttagtctag

SEQ ID NO: 229661 - DNA, 969 bp, synthetic construct
  misc_feature 1..969: note = Description of Artificial Sequence: Synthetic coding sequence
  source 1..969: mol_type = other DNA
atggactcaaccatacctgtgctggggacggagctgacacccataaacgggcgagaggagacaccttgttacaaacagaccttatccttcacaggcttgacgtgtattgtgagcctggtggcactcactggaaatgcagtggtattgtggctgttagggtgccgaatgcgcagaaatgccgtcagcatctacatactgaacctggttgccgcagactttctctttctctctggccacatcatctgctcccctctgaggctcattaatataaggcatccgatcagtaagattttgagcccagtgatgacgttcccctacttcataggtctgtcaatgctctctgctatctcaactgagcgctgtttgagcatcctctggcccatctggtaccattgtagaagaccaaggtacctctcctccgtgatgtgcgtgctgctttgggccctgagtcttctgcggtccatcttggagtggatgttctgcgacttcctgttttcaggcgcaaattctgtttggtgcgaaacctctgacttcatcaccattgcttggctcgtgtttttgtgtgtggttctgtgtggttcctctctcgttcttctggtgcgtatactttgcggctcacgcaaaatgcccctgacgcggttgtatgttacaatcctgcttaccgtgctcgtgtttttactctgtggcctacccttcggtatccagtgggctctctttagtcgtatccacttagattggaaagtgctattctgccacgttcatctggtaagtatcttcttatcagccctgaacagctcagctaaccccattatctacttctttgttgggtcatttagacagcgtcagaaccgtcaaaacctcaaactggtcctgcagagagccctgcaggataccccagaggtggacgagggaggaggatggctgccgcaggaaacacttgagctgtcaggcagcaggttggaacagtag

SEQ ID NO: 229662 - DNA, 741 bp, synthetic construct
  misc_feature 1..741: note = Description of Artificial Sequence: Synthetic coding sequence
  source 1..741: mol_type = other DNA
atggatagcacgatcccagttttgggaaccgagcttactcccatcaacggaagggaagagacaccttgctacaaacaaactctgtcatttacgggcctgacttgcatagtgtctcttgtggcactcaccgggaacgcagtggtgctttggctgcttgggtgtcgtatgcggagaaacgctgtctccatttatatcctgaatctcgtggcagctgatttcctgttcctctcaggtcacatcatctgctcaccgctccgtctgataaatatcaggcacccaatctcaaagattctttcacccgtgatgaccttcccttattttattggtctgtctatgttgagcgctatttctactgagagatgtctgtccattctgtggcctatatggtatcactgtcggaggccaagatatctgtcatctgtcatgtgcgtgctattatgggctctatctctgctccggagtattctagaatggatgttttgcgattttttgttctcaggtgccaatagcgtctggtgcgaaacatcagacttcataaccatagcgtggttagtttttctgtgtgtggtgctttgcggctcctcactggtattgttggtgcgaatactgtgtggcagtaggaaaatgccactgactagattgtacgtgaccatcctcctcaccgttttagtgtttctgctttgtgggcttccttttggcattcagtgggcccttttcagccgcatccacctggattggtag

SEQ ID NO: 229663 - DNA, 969 bp, synthetic construct
  misc_feature 1..969: note = Description of Artificial Sequence: Synthetic coding sequence
  source 1..969: mol_type = other DNA
atggatcctaccgtgccagtctttggtaccaagttaacacctattaacggccgagaagagactccatgctacaaccaaacattgtcttttaccgtgctcacgtgtattatctcgctggtgggactcaccggaaatgctgtggtgctttggcttctggggtaccgtatgcgaagaaatgccgtgagtatatacattctgaatttggctgccgctgactttctgttcctttctttccagataatccggcttcctctgagacttatcaatatctctcatctaatccgtaagattctcgtatcggtgatgacattcccttatttcaccgggctgtcaatgctgagtgccatcagcaccgagcggtgtctctcagtgctctggcccatatggtataggtgtcgtagaccaacccacctgtcggctgtcgtgtgtgtgctgttgtggggcctgtctctgctattttcaatgttagaatggcggttttgcgactttctgttctctggggcagattctagctggtgcgagacctccgactttatcccagtcgcctggctcatattcctgtgcgtggtgttatgtgtgagttccctcgtcctcctggtaagaattctgtgcggtagccggaagatgccactgacacgtctgtacgtgaccatcctcctgacggtacttgttttccttctgtgtggactgcctttcggcattcttggagcccttatttaccggatgcacctgaacctcgaagtgctgtactgtcatgtgtatctcgtctgcatgagcctgtcctctctgaattcgtctgccaaccccatcatctactttttcgtgggttcttttcggcagagacaaaacaggcaaaatcttaaactggtcctgcaacgcgcactgcaggacaagccagaagtcgataagggcgaggggcagctcccagaagagtcactagagctctcaggaagcaggctggggccatag

SEQ ID NO: 229664 - DNA, 3051 bp, synthetic construct
  misc_feature 1..3051: note = Description of Artificial Sequence: Synthetic coding sequence
  source 1..3051: mol_type = other DNA
atggtgttacctacctgtccaatggctgaatttgccctgcctcggcactccgccgtaatggaacgtctgaggcgcagaattgagctatgccgcaggcatcactccacttgtgaagcccgttacgaagccgtttccccagaacggttggagctggaaaggcagcataccttcgcgttacaccagcgctgtattcaagccaaggcgaagagggcgggaaagcatagacaaccccctgctgctaccgccccagcccctgccgctccagctccaaggctagacgcagccgatggacctgaacacggcagaccagctactcaccttcatgatacagtgaagcgcaacctcgactcagctactagtccccagaatggcgaccagcagaatgggtacggagacctgttccctggccacaagaagacccggcgagaggccccactaggcgtggccatcagttcaaacggcctgccgccagcctcccccctgggccagtcagacaaacccagtggagctgacgcactccagagcagcggcaaacactccctggggctagacagtctcaacaagaagcgcctggccgatagctcactgcacttgaacgggggaagcaacccctctgagtcattccccctgtccctcaacaaggagttaaagcaggaaccggtggaggacctgccctgcatgattacagggaccgttggctcaatctcacagagcaatctgatgcctgacctcaatctcaatgaacaggaatggaaagaactcatcgaggaactgaaccgcagtgtgccggacgaagacatgaaggacctttttaacgaagacttcgaggagaagaaagaccctgagtcgtcggggtcagcaacccaaaccccactggctcaggatattaacattaagaccgagttctctccggctgcattcgaacaggagcagctgggttcaccacaggttcgagccggatccgccggacagacctttctggggccatcaagcgccccagtttccaccgattcgccttctctgggaggatcacagaccctgtttcacacatcaggacaaccaagagctgataatcccagccctaatctaatgccagcttccgcccaggcacagaatgcacagagggccttagctggagttgtgctgccctctcaggggcctggtggggcaagtgaattgtcatccgcacatcagctccagcagatcgccgctaagcagaagagggaacaaatgctgcagaatcctcaacaggctacgcctgcaccagcccctggccagatgtctacatggcagcaaacagggccatctcattcctctttggacgtgccttacccaatggaaaaacctgctagtcctagcagttacaagcaggatttcaccaattctaagctcttgatgatgccttcagtaaataaaagtagccctaggcctggaggcccatacctgcagcccagtcacgtcaatctgttgagtcatcagccaccgagtaatttgaaccagaacagtgctaacaatcagggctcagtgctagactatggcaatacgaagccgctgtctcattacaaagcagattgcggacagggttcaccgggatccggccagagcaaacccgcacttatggcctacctacctcagcagctgtcacacatcagccatgaacagaattctctctttctgatgaaacctaaaccaggaaacatgccttttcggtccctggtgcccccaggccaggagcagaacccgagttctgtacccgttcaggcccaggccacaagcgttgggactcagcctcccgctgtgagtgtggccagcagccacaattcttccccttatctgtccagccagcagcaggcggcagtgatgaaacagcaccagctgctcctcgatcaacagaagcaacgcgagcagcagcagaagcacttgcaacagcaacaattcctgcaacgacagcagcatctcttggccgagcaggaaaagcaacaattccaaaggcacctgacccgacccccaccacagtaccaggatcccactcaagggtcattcccacaacaagtgggccaatttacagggtcgagcgctgcggtcccagggatgaatactctaggtccaagcaattcatcttgtcctagagtatttccacaggctggaaatctgatgccaatgggccctggtcacgcctctgtctctagcctccccaccaactccggtcaacaggatcgcggagttgcacaatttccaggtagccagaatatgccacagtcctctctatacggaatggcatccggaattacacagatagtggcccagccacccccacaggctacgaacggccatgcccacatacccagacagaccaacgttgggcagaatacaagcgtgtcagccgcatatggccagaatagcttggggtcttcaggactgtcacaacagcacaataaggggaccctcaaccccggtctcacgaagcccccagtccctcgcgtgtcccccgctatgggcggtcagaacagctcctggcaacaccaggggatgcccaacttgtctggtcagactcccggtaattccaacgtctcaccatttaccgccgcatcctcttttcacatgcagcagcaggcgcacctgaaaatgtcatccccgcagttcagccaggcagtaccgaatcgtccaatggcaccaatgtctagcgcagctgcagtggggagcctgttaccgccagtgtccgctcagcagaggacctccgccccagccccagccccacctcccaccgcgccacagcagggtttgcctggcttatcacccgcaggcccagaacttggtgctttcagtcagtccccagcaagccagatgggtggtagagccggattgcactgtacccaggcctatccagtgagaacggccggacaggaactgcctttcgcttactctggccagcccggtgggtctggcttatcatcggtcgccggtcacactgatctgattgacagcctgctgaaaaatagaacctcagaagagtggatgagcgatcttgacgacctgctgggctctcagtag

SEQ ID NO: 229665 - DNA, 2286 bp, synthetic construct
  misc_feature 1..2286: note = Description of Artificial Sequence: Synthetic coding sequence
  source 1..2286: mol_type = other DNA
cgcggaaagcagtggggcagggggggaggtgagaggccgagactggaagtggggagtaagcggagacttggcgtcgggccatctggagccggagggaaacccgctgccgcacgggaaccagccccactgcctagtggagcctggaggggaagggaagccgagcggggatcaagaggggaaagatctccacagtgccagcccgctcctaggggaccagctccaggtccagcaagggccgcaagaggcccatggtgctgccctcccgctccttggcggtcaagtcggtgtaggggtaccgcaagatcctggagtgctttcgccggtgccagcagttgtgctggtgcaacaaccgcccctgctcgaccagcggcacctgctcccaggctggacgctgccgatggccctgaacatggccgtccagcaactcatctgcatgatacagttaaaagaaaccttgattctgccacgagcccccagaacggggaccagcagaacggttacggagacctatttcctggccacaaaaagacaaggcgcgaagctcccctcggagtggccattagttcaaacggtctccccccagcgtctcctctcggccagtcggacaagccttcaggcgctgacgctctacagtcatcgggcaagcattcactcggcttggattccctgaacaaaaaacggttggctgactctagcctgcacctgaatggaggttctaatccgagtgagtcatttcccctttctctaaataaggaattaaagcaggagccagtcgaagacctcccctgcatgattactggaactgttgggagcataagtcagtccaacctaatgccggatctgaatctgaatgaacaagaatggaaagagctgatcgaggagctaaacaggtccgtgcccgacgaggacatgaaagatctttttaacgaagattttgaagagaagaaggaccccgagtcaagtggctccgcaacacagacaccgctggcacaggacattaatatcaaaacagagttctctccagccgctttcgagcaagagcaattgggctcaccacaggtccgagcagggtcagctggacaaaccttccttgggccatcatcggcgccagttagcactgatagtcccagtctaggtggaagccagaccctgttccataccagcggtcagcctagggctgataatcccagtccaaacctgatgcctgcctcggcccaagcacagaacgcccagcgtgctctggccggtgttgttcttccttcccaagggcctggaggagccagtgagctcagtagtgcacaccagctgcagcagatcgccgctaaacagaagcgagaacaaatgttgcaaaacccacagcaagcaacccctgcccctgcaccaggccagatgtcaacatggcaacagaccggacctagccacagttccttggacgtcccgtaccccatggaaaaacctgccagtcccagctcatataaacaggacttcaccaatagcaagctattaatgatgcctagcgtgaacaaatcctctccaagacccggaggtccatatctccagccatcacacgtgaatctcttatcacaccagcctcccagcaatctgaatcagaatagtgcaaacaatcagggctctgtacttgattacggcaataccaagccccttagccattacaaggcagactgtgggcaaggtagccccggaagcggacagtccaagcctgctctcatggcatatctgcctcagcaactgtctcacatcagccatgagcagaatagtctttttttaatgaagcccaaacccggtaatatgccatttcggtccttggtgccgcctggccaagagcagaatccttccagtgtgccagtgcaagcccaagccacatcggtagggacccaaccacctgctgttagtgttgcctccagccacaatagcagcccctacttgtcatctcagcagcaggcagcggtgatgaaacagcatcagctcctgctggatcagcagaagcaaagggaacagcagcagaagcacctgcagcagcagcagttcttgcagaggcagcaacacctcctggcagaacaggagaaacagcagttccagcggcatcttacgagaccccctccgcaatatcaggaccctactcagggctcttttccacagcaggtgggtcagttcacagcccagggactctcctgcgctctgccaatgatccatagtacagaggtcctcattagcagtctttgcaacggatcagcaggtctgtccgcggcacagagatcctggtag

SEQ ID NO: 229666 - DNA, 3471 bp, synthetic construct
  misc_feature 1..3471: note = Description of Artificial Sequence: Synthetic coding sequence
  source 1..3471: mol_type = other DNA
atgggagacaccgctcctccccaggccccagccggtgggctggggggtgcttccggtgcaggcctcttaggaggcggtagcgtgactcccagggttcattccgccatcgtggagcgattacgggctcgtatcgccgtctgtcgccagcatcacctctcctgtgaaggtcggtacgagcgaggacgcgcagaatcgtccgatcgcgaaagagaatctacactgcagctgctttctctcgttcagcatgggcagggagctagaaaggccggtaagcatacaaaggccactgccaccgctgcaaccacaacagcacctccccctccacctgcggcacctcctgccgcttcccaggcagcagctactgccgcaccgccacctccacctgattaccaccatcatcaccagcagcacttgctgaattcatcgaacaatggaggatccggaggcataaatggtgagcagcaaccacccgcatccactcctggggaccagaggaattcagctttgattgctttacagggcagcctaaagcggaaacaggtggtgaacctctctccagccaactcaaagaggcccaatgggttcgtcgacaactcattccttgacattaagcggatcagagtcggcgaaaatctgtccgctgggcagggaggtctgcagataaataatggtcaatcacaaatcatgagcggaacgttaccgatgagccaagcacccctgagaaagacaaatacactcccaagtcacacacactcccctggcaacggcctgttcaacatggggctaaaggaagtcaaaaaagagccaggagaaacactctcgtgtagcaaacacatggacggccagatgacccaggagaacatctttcctaacaggtatggcgacgaccccggagagcaactcatggatccagagttacaagagctctttaacgagctgaccaatatatcagtgcccccaatgtcagacctggaactcgagaatatgattaacgcaaccatcaagcaagacgacccatttaatatagacctgggacagcagtcgcagcgtagtacgcctagaccctcgctccctatggaaaaaatagttataaaatcagaatatagtccgggtctgacacaggggcctagtggcagtccacagttgcggcctccaagtgcagggcctgcattctctatggccaacagcgctctgtccacctcttctccaatcccttcagtaccgcagagccaagctcaacctcaaacaggaagcggcgcttctcgtgccctgcctagttggcaggaggtgtcccacgcccagcaactcaaacagatcgcagccaacaggcagcagcatgctagaatgcagcagcaccaacagcagcaccagcctaccaattggtccgcccttccatcgagtgcaggtcctagcccgggaccttttggacaggagaagattcctagtccatctttcgggcaacagactttttcaccccagtccagcccaatgcctggggtggcaggcggaagcggtcagagtaaagtgatggccaattacatgtacaaagcaggcccttctgcacaaggcggacacctggacgtgctgatgcagcagaagccacaagacttgtcccggtcttttattaacaaccctcatcctgcaatggaaccgagacagggcaacactaagccgcttttccactttaatagtgatcaggcgaatcagcagatgccctctgtcttgccgtcacagaacaagcctagtctgctgcactatacacagcaacagcagcaacaacaacagcagcagcagcagcagcagcaacagcagcaacagcagcaacaacagcagcaacaacagcagcaacagcagcagcagcagtcctcaatctccgcacagcagcaacagcagcagcagtcctcaatctccgcgcaacagcagcaacagcagcaacagcagcagcagcaacagcagcagcagcagcaacagcaacagcagcagcagcaacagcagccatcatctcagccagcgcaatccctgccctctcagccattactgcggtcgcctcttcctcttcagcagaaattgctactgcagcaaatgcagaaccagccgattgccggaatgggataccaagtgagccagcagcaacgccaggatcaacattccgtggttggccagaatactggccctagccccagccctaatccttgcagcaaccccaataccggaagcggatatatgaactctcagcagagcctgctgaaccagcagttgatgggaaaaaaacagaccctacagcgccagattatggaacaaaagcagcaactcctcctccaacagcagatgttagctgatgcggagaagattgcgcctcaggatcaaatcaatcggcatctctcccgcccacccccagactataaagatcaaagaaggaacgtcgggaatatgcagcctacggctcagtatagcgggggtagctctaccatcagcctcaatagtaatcaggccttggccaaccctgttagtacacatacaattcttacacccaattcttctttgcttagcacatcccacggaacaaggatgcccagcctgtccaccgctgtgcagaatatgggaatgtatgggaacctgccttgcaaccagcctaatacttattccgttacctcaggtatgaatcagttgactcagcagaggaaccctaaacagctgttggcaaatcaaaacaaccccatgatgccccgaccaccaaccctgggcccatctaacaacaataatgtggccacattcggtgccggaagtgttggcaattctcaacagctcaggcccaacctgacacactctatggccagcatgcctccccagaggaccagtaatgtcatgataacgtccaatacaacagcccctaattgggccagtcaggagggtacttccaagcaacaggaggcactgacgtctgcaggcgttcggtttcccactggcacccctgcagcctatactcctaatcagagcttgcagcaggctgtgggatcacaacagttcagccaacgagccgtcgcaccacccaatcaactcacccccgcagtccagatgcgcccaatgaaccagatgtcgcagaccctgaacggtcagaccatgggcccactacgcggtctgaacctgcgaccaaaccaactcagcactcaaatcttgcccaatctgaatcagtcaggaactggcctgaaccagagccgaactggcatcaaccaacctcccagcttgacaccatcaaatttcccgagtccaaatcagagcagcagggcattccaggggacagatcattcctcggacctggcattcgattttttgtcccagcagaacgacaacatggggccagctctaaattccgacgccgactttatcgactccctgctaaagacagagccgggaaacgacgactggatgaaagatatcaatctcgatgaaatcctgggaaacaacagttag

SEQ ID NO: 229667 - DNA, 3471 bp, synthetic construct
  misc_feature 1..3471: note = Description of Artificial Sequence: Synthetic coding sequence
  source 1..3471: mol_type = other DNA
atgggggatacagcgcctccccaggcccctgcaggcggacttggtggagctagcggtgcgggtctcctggggggaggtagcgttacccctcgtgtgcattcagcaatagtggagcgcctgcgagccaggatcgctgtttgtagacagcaccacctctcctgtgaaggaagatatgagcgcggacgagcagagtccagcgacagggagagagaatctactctgcaactgctgtcactggtgcagcacggccagggcgctcggaaggcgggtaaacacacaaaggctaccgccactgctgccaccactacagcacctccccctccacccgcagcccctcccgctgcctctcaagccgcagccactgccgcacctccgccaccacccgattaccaccatcaccaccagcagcacctgctcaacagctcaaacaatgggggaagcggaggtatcaacggtgagcagcagccacccgcatcgacccctggcgaccaacggaacagtgccctcattgcattgcaaggcagtctaaaaagaaagcaagtcgtgaacctgagtcccgcaaacagtaagcgtcctaacggctttgtggacaatagctttctcgatatcaaaagaattcgtgtgggcgagaacctgagtgccggtcagggtgggctacagattaacaacggtcagtctcagattatgtccgggactctacctatgtcccaggcacccctccgaaagaccaatacattaccaagccacacgcattcacccggaaacggccttttcaatatggggctgaaggaagtgaagaaggaacctggcgaaactttatcctgtagtaaacacatggacggtcaaatgacccaggagaacatctttcctaatcgatatggcgacgatcccggagaacagctgatggatcccgagttgcaggagctgttcaacgagctgaccaacatttccgtacctcctatgtccgatctggaattggagaatatgataaatgccactattaaacaggacgatccattcaatattgatctgggccaacagagtcagcggtcaacgcccaggccgagcttacctatggagaagattgttataaagtcagagtactcccccggtctgacccagggtccttcagggagtccacaattacgcccaccaagcgccggaccagcgttcagtatggccaatagtgccctgtcaacttcaagccctatcccgtctgtaccgcaaagccaagcccagccacagacggggtctggtgcttccagagccctaccatcttggcaagaagtcagtcacgcacagcagctaaagcagatagccgctaacaggcagcagcatgcacgcatgcaacagcaccagcagcagcatcagcctaccaattggtccgccctgccttcttccgcaggtccctctccaggcccattcggccaagaaaagattccttctccttcctttgggcagcagactttcagtccacaaagcagtcctatgccaggagttgctggcggatccggccagtccaaggtcatggccaattacatgtataaagcaggcccttctgcccaggggggacacctcgatgtcctgatgcagcagaagccccaggacctctcccgcagtttcatcaacaatccccaccccgctatggaaccacgccaggggaacacgaagcccctgtttcactttaattcggaccaggcaaatcagcagatgccctcagtgctgccctcccagaacaagccttcattgctgcactacactcagcaacaacaacaacaacagcagcagcagcagcaacagcagcagcagcagcagcaacagcagcagcagcagcagcaacagcagcagcagcagcagcagcagtcttcaatctctgcccaacagcagcagcagcagcaaagtagtatctctgctcagcagcagcagcaacagcagcagcaacagcagcagcagcagcagcagcagcagcagcaacagcaacagcagcagcagcagcccagctcacagcctgctcagtccctgccctctcagcctttgctccgtagtccactgccactgcagcaaaagcttctgctacaacaaatgcagaatcagcccatagccggtatggggtaccaggtgtcgcaacagcagagacaggaccagcacagtgtcgtgggccagaacaccggtccgtccccctccccaaacccatgcagtaaccccaatactggctccgggtacatgaattcccagcagtcattgctaaatcagcagcttatgggcaagaagcagacactgcaacgccaaatcatggagcagaaacagcagttactgctccagcagcagatgctcgctgatgcagagaaaatcgcccctcaagatcagataaaccgccacctgagtcgaccccctcccgattacaaggaccaacggaggaatgtgggtaatatgcagcctaccgcccaatactcaggaggctcttctacaatctctcttaacagcaatcaggccttggccaaccccgtcagcacacacacaattctgacgcctaactcgagtctgctctccactagccatgggacccgaatgcctagcttgagcacagccgtgcaaaatatgggcatgtatgggaatctgccttgcaatcagcctaacacctactcagtcacctctggtatgaaccagctgacccagcagaggaacccgaaacagctgctggcaaatcagaacaatcccatgatgcccaggccgcctactctcgggcctagcaataataataacgtcgccacgtttggagcaggtagcgtgggtaatagtcagcaactgcgtcccaatcttacgcacagtatggcctccatgccaccgcagcgaacgtctaacgttatgataacaagcaataccaccgcacccaattgggccagtcaggagggcacttccaaacagcaggaggcgctgacaagtgccggagttcggttccccaccggaactcctgcggcatataccccaaaccagtcactccagcaggcggtgggcagtcagcagttttctcagcgagctgtcgccccacctaatcaactgacacctgcagtgcagatgagacccatgaaccaaatgtcgcagacgttgaatggacagaccatgggacctctacgcggactgaatttgagaccaaaccagctgtcaactcaaatcctgccaaacctcaatcaaagtgggacgggcctcaatcagtcaagaacaggcattaaccaacctccatcccttacgccctctaatttccccagccccaatcagagctctagagctttccagggtactgaccactcctccgatctcgcgtttgacttcctttctcagcaaaatgacaacatgggccctgcactgaactcggacgctgattttattgatagtcttctgaaaacggaacctggaaatgacgactggatgaaagacattaatctggatgaaattctgggcaataatagttag

SEQ ID NO: 229668 - DNA, 1632 bp, synthetic construct
  misc_feature 1..1632: note = Description of Artificial Sequence: Synthetic coding sequence
  source 1..1632: mol_type = other DNA
ttgcaggaaacggtaaagagaaagctcgaaggcgcaagatcccctctgaatggggaccagcaaaatggggcatgcgacggcaacttcagtcccaccagcaaacggattcggaaggacattagcgcaggaatggaggccatcaacaatctaccaagcaacatgcctctgccatctgcgtccccactgcatcagttggacctgaaaccctccctacccctccagaacagtgggacgcacacacccggactgctcgaggatctgagcaaaaacgggcgactgcctgagattaagttgcccgtgaatgggtgctctgacctagaagactccttcaccatattgcaatctaaggacctcaaacaggagcctctagacgatcctacctgcattgataccagtgagacctccttatcaaaccagaataagctcttttccgacattaacctgaacgatcaagaatggcaggaattaattgatgagttagctaatacagtgccggaagatgatatccaggacttgtttaacgaggatttcgaggagaagaaggaacccgaattcagtcagcctgccactgagactccgctgagccaggaatccgcttcagtcaagagtgatccgagccatagcccgtttgcacacgtcagtatgggtagcccccaggctaggccatccagctccggtcccccattttctaccgtatcaacagccacctcgcttccttcagtggctagcacaccggctgcgcctaaccccgctagttcacccgctaattgcgccgtgcagtcaccacagacccccaatcaggcgcatactccaggccaagctccacctagacctggaaacggctacctgctcaatccagccgctgtgactgtggccggttccgccagtggaccagtagcggtcccaagcagtgatatgtcaccagccgagcagctaaaacagatggcagctcagcagcagcaacgggcaaagcttatgcagcaaaagcagcagcagcagcagcagcaacagcagcagcagcagcaacagcagcagcagcagcagcagcagcagcaacagcaacacagcaaccagacgtcaaattggtctccactgggacccccatcaagtccgtatggggctgcctttacagcagaaaaacctaatagccctatgatgtacccccaggcattcaacaatcagaacccaattgtgcctcctatggcaaataacctccagaaaactaccatgaacaactacctaccccaaaatcatatgaatatgataaatcagcagcctaacaacctgggaaccaattctctgaacaaacagcacaacattctgacttacggaaatacgaagccactgacccatttcaatgcagatctgagccagcggatgaccccccctgtagccaaccccaataaaaatcctctcatgccatacattcagcagcagcagcagcagcagcagcagcaacagcagcagcagcagcagcaacagccgcctccgccacaactgcaggcccctagggcacatctgagcgaagatcagaaaaggctgctcttgatgaagcagaagggcgtaatgaatcaaccgatggcctacgccgcacttccctcccatgggcaggagcagcagcccgtggggtag

SEQ ID NO: 229669 - DNA, 831 bp, synthetic construct
  misc_feature 1..831: note = Description of Artificial Sequence: Synthetic coding sequence
  source 1..831: mol_type = other DNA
atgtcgccggcagaacagctgaaacagatggccgcacaacagcagcagcgggctaagctgatgcaacaaaagcaacagcagcagcagcaacagcagcagcaacagcagcagcagcactcgaaccagactagcaattggtcgccactcggccctccatcctctccgtacggcgcagcctttaccgccgaaaagccaaattccccaatgatgtacccccaggctttcaacaatcagaacccaatcgtccccccaatggccaataacctgcagaagaccacaatgaacaactatctgcctcaaaatcacatgaatatgattaaccagcaacctaataatctggggacaaattcgctgaacaaacaacacaacattttaacgtatggaaataccaagcctcttacccatttcaacgccgatctgtcccaacgtatgactccaccagtcgctaatccgaacaagaaccctctaatgccctatatccagcagcagcagcagcagcagcagcagcagcagcagcagcagcagcaacagcaaccgccacccccacaactgcaggcaccacgcgctcacttgtctgaggaccagaaacgcctcctgctgatgaagcagaagggagtgatgaaccagcccatggcctacgcggcactaccctctcacggtcaggtgtcagtgaaagtgacacattcctctagttcctcatgtggggcttttgactgcaggtgcgtaatgttctataagagcacagtcgttggctcaaactgcctccagaagacatctctgcaccctcaggtggtggcgagattcggcgtattcttttttcacttcagttag

SEQ ID NO: 229670 - DNA, 3417 bp, synthetic construct
  misc_feature 1..3417: note = Description of Artificial Sequence: Synthetic coding sequence
  source 1..3417: mol_type = other DNA
atgggagattttgcagcccctgctgccgcagccaacggcagctccatatgtatcaactccagtcttaactcctctctcgggggagccggaataggagtcaataacacgcccaacagtactcccgcagctccctctagtaaccacccggctgcagggggttgcggcggttccggtggacccggaggcggaagtgcggctgtccccaaacacagcacagtggtggaacgactgaggcagcgcatcgaggggtgccggcgtcaccacgtcaattgtgagaatagatatcaacaggcccaagtggagcagttggaactggagcgcagggataccgtctcactttaccagagaacactcgagcagcgagctaaaaagtccggggcaggcacaggaaagcaacagcatccatcaaagccacagcaggacgccgaggcagcatctgctgagcagcgcaatcacaccctgataatgctgcaagagaccgtcaaaaggaaacttgaaggcgctcggagccctctcaacggagaccaacaaaacggcgcatgcgatgggaacttctcgccaactagcaaaagaatccgtaaggatatttccgccggtatggaggctataaataatctccctagcaacatgcccctccctagcgctagccctttgcatcaacttgacctaaagccaagtctacctttgcaaaacagcggcacccatacaccgggactcctggaggatctgtcaaaaaacggcagactgcccgaaattaagttacctgtgaacggatgctctgatctagaagattctttcacaattctgcaaagtaaggatctcaagcaggaacctctcgatgaccccacgtgcatagacactagcgagaccagtcttagtaatcagaataaattgttctcagatattaatcttaacgaccaggaatggcaggagctgattgacgaacttgctaatacagtgcccgaggacgacattcaggatctgtttaacgaagatttcgaggagaaaaaggagcctgaatttagtcagccagcaaccgagactcctcttagccaagagtccgcctccgtgaagtcagatccgtctcactccccgttcgcccacgtctcaatgggatcccctcaagcacgcccttctagtagcggccctccattctccactgtttccaccgccacctcgctgccctctgtagcatcaaccccggctgccccaaacccagcttcatctccagccaactgcgctgtacagtcgccacaaacacccaaccaagcacatacaccagggcaggctccgcctcgtcctggtaacggatacctgctgaatcctgccgctgtcacagtagccggttcggcctcaggccctgttgctgtccctagctcggatatgtccccagccgagcagctcaagcagatggccgctcagcagcaacagcgggctaagctgatgcagcagaagcagcagcagcagcagcagcagcagcaacaacagcagcaacagcagcagcagcagcagcaacagcaacaacaacagcactccaaccaaacgagtaactggtcccctctgggaccccctagttcaccttacggggcagccttcaccgcagagaagcccaatagtcccatgatgtatccacaagctttcaataaccagaatcccatcgtccccccaatggcgaataacctacaaaaaacaactatgaataattacctaccacagaaccatatgaacatgatcaatcagcagccaaataacctcggcactaacagcctgaacaaacagcataacatcctcacgtacggaaataccaaaccactgacccatttcaacgctgatttgtctcagagaatgactccacctgtcgctaatcctaacaagaatcctctcatgccatatatacagcagcagcagcagcaacagcaacagcagcagcagcagcagcaacagcaacaaccccctcctccacagctccaggccccacgggcacacctctccgaagaccaaaagagacttctgttgatgaaacagaaaggggtgatgaaccagcctatggcatacgctgccctccccagtcatggtcaggaacagcacccggtgggcctcccaaggactaccggtccgatgcagagcagtgtgcccccaggctctgggggtatggtctccggggcttctcccgctgggcctggtttcctggggagccaacctcaggcagccatcatgaaacaaatgctgatcgaccaacgtgcccaactcattgagcagcagaaacagcagttcctcagagagcaaagacagcagcaacaacagcaacagcagcagattctggctgaacagcaacttcaacagtctcacctcccgaggcagcatttacagccacagcgtaatccctatccagtacagcaggttaaccagttccaaggaagcccccaggatatcgccgctgtcaggtctcaggccgctttacaatccatgagaacatcgcgactgatggcacagaacgcgggaatgatgggtataggaccaagtcagaatcccggtacgatggcaactgccgctgcccagtctgaaatgggtttggccccttactcaactacgcctactagccagcctgggatgtacaacatgagtacaggcatgacccagatgttacaacatccaaaccagtccgggatgagcataacgcacaatcaggctcaggggccacgccagcctgccagcggacagggggtgggaatggtgtctgggtttgggcaatccatgctggtcaacagtgcaatcacacagcagcatccccagatgaaaggaccagtcggtcaggccctcccacgtccacaggcacctccaagattgcaatctttaatggggaccgtacagcagggagcccagtcttggcagcagcgcagtctgcagggtatgccgggaagaacctccggggagctggggccatttaacaatggggcatcctatcctctgcaagccggacaaccccgattgaccaaacagcacttcccccaggggctatcacaatcagtggttgatgctaacaccggaacagtgcggacgttaaaccccgctgccatgggacggcagatgatgccgtcgctccctgggcaacaggggacctcacaagcacggccaatggttatgagtggactctctcagggagtgccgggaatgccggcattctctcagcctcccgctcagcagcagattccctccggcagcttcgccccttcgtcacagtctcaagcgtacgagcggaacgcacctcaggacgtgtcctataactactccggagatggcgctggcggaagctttccaggactacctgatggtgcggatcttgtggattctatcattaaagggggacctggagatgaatggatgcaagagctagatgagttgtttggaaacccatag

SEQ ID NO: 229671 - DNA, 1338 bp, synthetic construct
  misc_feature 1..1338: note = Description of Artificial Sequence: Synthetic coding sequence
  source 1..1338: mol_type = other DNA
gagcagcatcccgtaggtctgcccaggactacaggtcctatgcagagctccgtcccccctggatcaggaggcatggtgagcggagcatcaccggctggcccagggttcctcggctcgcagcctcaggcagctatcatgaagcaaatgctcattgaccagcgagcgcagctcatcgagcagcagaagcagcaatttctgagggagcagcgacaacaacagcagcagcagcagcagcagatcctggccgaacagcaactgcagcagtctcacctcccaaggcagcacctacaaccccagcgcaacccctatcccgtgcaacaggtaaaccaattccagggcagcccgcaagatatcgccgctgtgagatcacaagccgcactgcagagtatgcggacctcacgtctgatggcccaaaacgcgggtatgatgggtattgggccaagccagaatcctggaacgatggccacggcagccgctcagagcgagatgggtctagccccatattccactacccctacttctcaacctggcatgtataatatgtccactggcatgacccagatgcttcagcaccctaaccaaagtggcatgtccatcacccacaaccaggcacaaggaccaagacagccagcgagtggccagggcgtaggcatggtgtccggtttcgggcagagcatgctcgtgaacagcgccattacccagcagcatcctcaaatgaagggccctgtagggcaggctctgcctcgaccgcaggctcctcccaggctccaatccctgatggggaccgtacagcaaggggctcaatcttggcagcagcgcagcttacaggggatgccaggacggacctcaggcgagctcggccctttcaataacggcgcatcttacccacttcaggctggccagcctaggctcaccaagcagcattttccccagggcctgagtcagtccgtggtcgatgcaaacactggaaccgttaggactcttaacccagccgcaatgggtagacagatgatgcccagcctcccaggacaacagggcacttcccaagccagacccatggttatgtctggactttcccagggcgtgcccggaatgcctgccttcagccagccacctgcccagcagcagatcccctccggctcctttgcacccagctcccaaagtcaggcttacgagagaaatgctcctcaagatgttagttacaactattcgggggacggtgctggaggcagtttcccaggattgccagacggagccgacctggttgatagcatcatcaaaggtggtcccggagacgagtggatgcaggaactcgatgaacttttcggaaacccctag

SEQ ID NO: 229672 - DNA, 2325 bp, synthetic construct
  misc_feature 1..2325: note = Description of Artificial Sequence: Synthetic coding sequence
  source 1..2325: mol_type = other DNA
atggatgattggaagtctcgtttagtcataaagagcatgctaccccactttgctatggttggtaatcgacaagaaccccgaaaacttcaggaatccgggaaaaagccctcctggatggaggaagaggatctgagcttcctctataagtccagtcctggcaggaagcatcagggcactgtaaaaaggaggcaggaggaagatcactttcagttccctgacatggccgacggtggctatcctaacaagatcaaacgcccatgtttggaggatgtcacattagccatgggtcctggcgctcatccaagtacagcctgcgccgagctccaagttccccctctgacaatcaacccctctccagccgctatgggggtcgccggacagagccttcttcttgagaataacccaatgaacgggaacatcatgggcagcccctttgtagtgccgcagaccaccgaagtggggctgaagggtcctaccgtcccctattatgaaaagatcaattcagtcccagccgtggaccaggagctgcaggagctgctggaagagctaacaaagatccaagacccatcccccaacgaactggacctggaaaagatcctcggcaccaaacctgaggagcccttagtgctggatcacccacaggccactctgagcaccacacccaaacctagcgtgcagatgagccacctagagagcctggccagtagtaaggaattcgcgtccagctgtagtcaggtaacgggcatgagtctgcagattccatcatcctcaactggcatcagttactctattccttctacatcgaaacaaatcgtgtccccttcaagttccatggcacagagcaagagccaggtgcaggctatgctgcctgtggctctccccccactgcctgtcccacagtggcatcatgctcatcagcttaaggcactagcagctagcaaacagggatccgctaccaaacagcaggggccaacaccgagttggagcggtctgccaccacccggtctgagcccgccataccggccagttcccagtccacaccccccaccacttcccttacctccaccaccacctcctttttcgccgcaatccctgatggtgtcatgcatgtccagcaatacgctttcagggagtacactgagggggagcccaaacgctctgctcagttcaatgacctccagcagtaatgccgctctgggacctgccatgccttacgccccagagaagctgccctctccggctttaacacagcagccccagtttgggccacagagctcaattctcgctaacctgatgtcaagcacaatcaaaactccacagggacacctgatgtctgccctcccagcttctaaccccggaccaagtcccccttataggcctgaaaaattaagctcacccggtctgccgcaacagagctttacgccccagtgcagtctgatccgatctctgacacccacaagtaatttgctgtctcagcagcagcagcagcagcaacagcaacaacaggctaacgtgatatttaaacccatctcatcaaacagctctaagactctaagtatgattatgcagcagggtatggcatcaagttcccctggggctaccgaaccgtttactttcggaaacaccaaaccactgtcacacttcgtcagcgagccaggtccccagaaaatgcccagcatgcccaccacaagtcggcagccgtctttactgcactacctgcagcagccaactccgactcaggcttcgagcgcaactgccagcagtaccgccaccgcaacactgcagctgcagcagcagcagcagcaacagcagcagcagcccgatcatagctccttcctcctccagcagatgatgcaacagccccaacggttccagcggtccgtggcttctgattcaatgccggctctaccccgtcagggctgctgtcatctgttcgcgtggacctccgccgctagcagcgtcaagccccagcatcagcacgggaacagtttcacatcaagacaagacccgcagcccggagacgtatccccctccaatatcacccatgtggacaaagcctgcaagttaggtgaggctagacacccacaagttagccttggcagacagcccccttcttgtcaggctttgggctccgaatccttcctgccaggaagtagtttcgctcacgagctggccagggtgacatctagctattccacaagcgaagctgcgccttggggttcctgggatcccaaagcttggcgccaggtacctgcaccactcttgcctagttgtgatgcaactgcaagaggcaccgagatccgctcttatgggaatgatccctag

SEQ ID NO: 229673 - DNA, 411 bp, synthetic construct
  misc_feature 1..411: note = Description of Artificial Sequence: Synthetic coding sequence
  source 1..411: mol_type = other DNA
atggacgactggaagagtagactcgtgattaaatccatgctgccacactttgccatggtgggaaaccgacaggagcctaggaagttacaggagtcaggtaaaaaaccttcctggatggaggaagaagatctgtcctttctgtacaagagctccccaggcaggaagcaccagggtactgtcaagaggaggcaggaagaagaccacttccaatttcccgatatggctgatggcggataccctaataagataaaacggccttgtctggaggatgtgaccctggcgatggggcctggagcacatcccagcaccgcctgcgccgagctgcaggtgcccccactcactatcaatccctcccctgccgcaatgggggtcgcaggtcaaagcctgttacttgagaataatcctatgtag

SEQ ID NO: 229674 - DNA, 2325 bp, synthetic construct
  misc_feature 1..2325: note = Description of Artificial Sequence: Synthetic coding sequence
  source 1..2325: mol_type = other DNA
atggacgattggaagtcccgtttggttatcaaatccatgctgccccatttcgctatggtgggaaaccggcaggaaccacgcaagctgcaggagagcggaaagaagccatcttggatggaagaagaggatctgtccttcttatacaagagctcccctggacggaagcaccaaggtactgttaagagacggcaagaggaggatcacttccagtttcctgacatggccgatggagggtaccctaacaagatcaagcgcccttgcctggaggacgtgaccctggcgatggggcctggagctcacccttcgactgcttgcgctgagctgcaggtgccccctctgaccattaacccttcccctgccgcaatgggggtggctggccaatcgttgctgcttgaaaacaatcctatgaatggcaatatcatgggttctccatttgtggtgccccagacgaccgaggtgggcctcaaaggcccaaccgttccgtattacgagaaaatcaatagcgtacccgcagttgatcaggaattacaggagctattggaagagttgacgaagattcaggatccaagccccaacgagttagacttagaaaagatactgggtacaaaaccagaagaaccattggttctcgatcatccccaggctaccctcagcactacacctaagccgtccgtgcagatgagccaccttgagtctctggcctcctccaaagagtttgcaagtagttgcagtcaggtcacaggcatgtctcttcagataccctcgagcagcacagggatttcttactccatccctagcacttccaaacagattgtttcaccatcaagctcaatggcccagtccaagtcacaggtgcaagctatgctgccagtggcccttcccccactgcctgtgccacagtggcatcatgcccatcagttaaaagccctggctgcctcaaaacagggaagcgctacaaagcagcagggacccacaccatcctggtctgggttgccccctcccggtcttagccccccttaccgtcctgtaccatctccacatcccccacccctgcccctgccccctcctcccccacccttttcaccacagtcactgatggtgtcctgcatgtcctcaaacaccctgagcggctctacactccgaggaagccctaacgctctgctctcctccatgacttcttccagcaacgcggcattgggaccggcaatgccttatgcaccagagaagcttccctctccagccctgacccagcagccacagttcgggccacagtctagtattcttgctaatctaatgagctcaacaattaagactccccaggggcatctcatgtcagctctgcctgcaagtaatccgggaccctctccgccatatcgcccagagaagctatcatcccctgggctaccgcagcagtccttcacaccgcagtgttccctaatcagatccttgacccctacatcgaacctgctgtcccagcagcaacaacagcagcagcagcagcaacaggccaatgtaatctttaaacctatatcttccaacagtagcaaaaccctgagtatgatcatgcagcaagggatggcctcctcctcccccggtgccaccgaacctttcacattcggcaacacaaaacccctgtcacacttcgtctctgaacctgggcctcagaaaatgcctagcatgcctaccacaagccgtcagccatcactcttgcactacctgcagcagccgacacctacacaagccagcagcgcaactgcttctagcacagccactgctacgctgcagctccagcagcaacaacagcaacaacaacagcagcccgatcactcttcgttcctcctgcaacagatgatgcagcagccacagaggtttcagcggtccgtggctagtgacagcatgcctgctctgcccaggcagggttgttgccacctgttcgcttggaccagtgcggcttcttccgtaaagcctcagcatcagcatggcaacagctttaccagccgtcaagatcctcagcccggagatgtaagcccctccaatataacacatgtggataaggcatgcaagctaggagaagcgcgtcatccgcaagtttcactgggacgccagcccccttcctgtcaggctctagggtctgagagctttctgcctggttcttcgtttgcgcatgagctagctcgggtgacctcctcttattccacgtcagaggcggctccatggggctcatgggaccccaaggcctggcggcaggtgcctgctcctctgctgccaagttgtgacgcaacagctcgcggtaccgagattagatcttacggcaatgacccctag

SEQ ID NO: 229675 - DNA, 2250 bp, synthetic construct
  misc_feature 1..2250: note = Description of Artificial Sequence: Synthetic coding sequence
  source 1..2250: mol_type = other DNA
atggacgactggaaatctcggcttgtcatcaaatctatgctccctcactttgccatggtgggtaaccgacaggaacctaggaagcttcaggagtcaggaacagtgaagcgccgtcaagaggaggaccactttcagtttcctgatatggccgatggtggctatcctaacaaaataaagcgcccttgcctggaagacgtgaccctggccatgggcccaggcgctcaccctagtacagcctgtgcagagctgcaggtgccaccacttacaattaatccctctcccgcagccatgggcgttgcgggacagtcccttctgctcgaaaataatccaatgaacggaaatataatgggaagcccatttgtggttccccagaccactgaggtaggtcttaagggcccaactgtgccatattacgaaaaaatcaattccgtccccgcagtggaccaggagctgcaggaactgctcgaagagttgaccaaaatccaagacccttctccgaatgaattagatttggagaagattctcggcaccaaacccgaagagcctctcgtgctggaccacccccaggccacattatcgacaacacccaagccctcagttcagatgtcacacctggaatcactcgccagtagcaaagaatttgctagttcctgcagccaggtgacaggaatgagcctgcagatccccagcagttccacaggaatctcctacagtattccgagtacaagtaagcagatagttagccccagtagcagtatggcccagtcaaaatcccaggtgcaagctatgctgcccgtcgctctgccacccctgcctgtgccacagtggcaccacgctcatcagctcaaggctcttgccgctagcaagcagggttctgctactaagcagcagggacctactcctagctggagtggcctccccccacccggtctgtctccaccgtaccgaccagtgccctcaccacatcctccacccctgcctttgcccccacctccaccacctttctctccccagtcattgatggtatcctgtatgtcctcaaatacccttagcggtagtaccctgaggggtagtccaaatgcccttctgtcatcaatgacatcgtcttcaaatgcagctctgggaccagccatgccttatgccccagaaaagctcccttctcccgcactgacccagcagccgcaatttgggcctcaatcctcaattctcgccaacctaatgtcatctaccatcaaaactccccagggccaccttatgtcagccctgccagctagcaacccgggaccgagcccaccctataggcctgaaaagctctccagtcccggattgccacagcaaagtttcacaccccagtgcagccttataagaagcctgactccaacctctaacctgctgagccagcagcagcaacaacagcagcagcagcagcaagccaatgtcatctttaagcctatctcctctaattcctcaaagacgctgagtatgatcatgcagcaaggtatggcatcatcatcacccggagcgaccgagccattcactttcggaaataccaaacctctgtctcacttcgtatctgagccgggacctcagaagatgccatctatgcctacaacttccagacagccttcccttctacattacctccaacagccgacaccaacacaagcttctagcgctacagcaagttcaacagctaccgccacactgcagctgcagcagcagcagcaacagcagcagcaacagccagaccatagcagttttctactgcaacaaatgatgcaacagcctcagagattccagcggagcgtggcttcggactccatgcctgcccttcctcgccaaggttgttgtcatctattcgcctggacctcggccgcttcaagcgtgaaaccccagcatcagcacggcaactcattcacgtcaagacaagatccgcagcctggcgatgtctctccgtccaacataacccacgtggacaaggcgtgcaagttgggcgaggcccgacaccctcaggtgtcattaggcagacagcccccttcatgccaagctctgggctctgaatcctttctacccggtagcagtttcgcgcatgagttggcacgggtcacaagtagctactccacgtccgaggctgcgccatggggcagctgggacccgaaggcctggcggcaagtcccagccccactgctcccgagctgcgacgctactgcaaggggtacagaaatccgcagctacgggaacgatccatag

SEQ ID NO: 229676 - DNA, 2997 bp, synthetic construct
  misc_feature 1..2997: note = Description of Artificial Sequence: Synthetic coding sequence
  source 1..2997: mol_type = other DNA
atggatgattggaagtcacggctggtgattaagtccatgcttcctcatttcgctatggtcgggaataggcaggagcctagaaagttgcaggaaagcggaaccgttaaacgcagacaagaagaagaccactttcagtttccagacatggccgatggtggctaccctaacaagattaagagaccctgcctggaggacgtgactttggccatgggacctggggcacatccgtccaccgcctgtgcagagctccaggtaccgcctctgactatcaatccttctccggctgctatgggggttgcaggccaatccctgctgcttgagaataaccctatgaatgggaatatcatgggatcgccttttgtagtaccccagactaccgaggttggcctcaagggcccaactgtgccatactatgaaaaaattaattctgtgcctgctgttgatcaggagctccaggagctgttggaggagctgacgaaaatccaggaccctagcccaaacgagctggatctggagaagatcctcggcaccaaaccagaggaaccactcgtgctggaccacccccaggctacactgagcacgaccccaaagccctctgtccagatgagccatttggaatcacttgcctcttctaaggagttcgcgagcagctgtagccaggtcaccggcatgtcacttcagatcccttcgtccagcaccggcatttcttattccatcccctcgacttcaaagcagatcgtttctccttcaagctccatggctcagtctaaaagtcaggtgcaggcgatgctgccagtcgctctaccccctctccctgtgccacagtggcatcatgcccaccagctgaaagctctggccgcatcaaagcagggctctgcaacaaaacagcagggccctacaccctcctggagtgggctcccgcctccaggtctgtcacccccatacaggccagtcccatcaccacaccctcccccactcccactccctcccccaccccctcctttttctccccaaagtcttatggtatcctgtatgtccagtaacactctatccggatctacactcaggggaagccccaacgcattactctccagtatgacaagctcatctaatgcagcccttggccctgccatgccctacgcaccggagaaactgccctcccctgctctgacccagcagccacaattcggcccacagtcaagcatcctcgccaacctcatgtcctctacaatcaagacaccccaagggcatctcatgtccgctctgccggctagcaacccgggacccagcccaccttataggcctgagaaactgtcatcccctggattgccacagcagagttttaccccccaatgcagcttgatccgaagcctgacacccacgtcaaatctgctttcacagcagcagcagcagcaacagcagcagcagcaggctaacgttatcttcaagcccatctctagcaactctagcaagaccctctcgatgatcatgcaacagggtatggcctcttcttcaccaggcgctacagagccattcacctttggtaacaccaagccacttagtcactttgttagcgaaccgggtccacagaaaatgccatctatgccaacgacctctcggcaaccctccctattgcattatctgcaacagccgacccctacgcaagcttcaagcgcaactgccagttcaaccgccacggcaacattgcagctgcagcaacagcagcagcaacagcagcaacagccagatcacagctcgttcctcctgcaacagatgatgcagcaaccccagcggttccagcgtagcgtggcaagcgatagcatgcctgcccttccacgacagcaagaggaacagcgcagtgggctgatggccatgacccccgaaaggcaaaatgcctatatcagccaacagatgagccccttcgaggctgttcaggaacaagtcacttctaagtgcagcagaatcaaggcttcacctccatccagcaagcacttgatgccccctaggactgggctgctccagaacaacctttctcccggtatgataccacttacacggcatcagtcctgcgagggaatgggggtaatatctccaaccctgggtaaaaggcagggcatcttcactagctccccacagtgtcccattctgtctcattccgggcagaccccgcttggacgtttagacagtgtttgtcagcatatgcagagcccaaaggctacacccccagaagtgcctttgcccggattttgtccaagctccctcggaacacagtccctgtccccacaccagttgcgcagaccatcagtccctagaatgcccacagcgttcaacaacgctgcctgggtgaccgccgctgctgcggtgaccacggccgtgtccggcaaaactccgctgagtcaggttgacaatagcgtgcaacaacactccccatcgggacaggcctgccttcagcgcccatctgattgggaagctcaggttccggctgccatgggaacccaggtgccactggccaacaatccatccttcagtctattggggtcgcagtcattgcgccagtctcccgttcagggccctgtgcctgtcgcgaacactacaaaattcctgcagcaaggaatggcctccttctcacctctgtctccgattcagggtatcgaaccaccgtcttacgtcgcagcagccgcaactgccgctgcagcaagtgcagtagctgcaagccaatttcctggtccctttgacagaacggacatccctcccgagctcccaccggcagactttctgagacagccgcagcccccacttaacgaccttattagctcccctgactgtaatgaagtggatttcatcgaggctctgctgaaggggtcatgcgtgtctcctgatgaggactgggtgtgtaacctgcgcctcattgacgatatcttggaacagcatgcggcagcccagaacgccacagcccagaactcaggacaggtcacccaggacgccggagcgctctag

SEQ ID NO: 229677 - DNA, 1941 bp, synthetic construct
  misc_feature 1..1941: note = Description of Artificial Sequence: Synthetic coding sequence
  source 1..1941: mol_type = other DNA
atggaagaggaagatttgtcctttttgtacaagtcttcccccggacggaagcaccagggaacagtcaagcggcgacaagaggaggaccactttcagttcccggatatggcggacggtggatacccaaacaaaatcaaaagaccctgcctggaggatgttacccttgccatggggcctggggcacaccccagcaccgcttgtgccgaactgcaggtgccccctcttactataaatccttcccctgccgctatgggagtggcaggacaaagcttactgcttgaaaataaccccatgaacggcaatattatgggttctccattcgtggtacctcagacaacagaggtgggtctgaagggtcccaccgtcccctactacgagaagatcaacagtgtcccagccgtggaccaggaacttcaggaactgttagaggagctaacaaagattcaggacccatctccaaatgagctagatctcgaaaagatcctcggcactaagccggaagagcccttggtgttggatcatcctcaggcaacacttagtacaacgcctaagccatctgtccaaatgagccacctcgagtctctggcaagctctaaggaattcgcatcttcatgttcccaggtgacgggcatgagccttcagatcccctccagcagcacaggaatttcctactcaatcccgagcacttcaaagcaaattgtgagtccttcctcatctatggcccagtctaaatcccaggtccaggcaatgctcccggttgcactgcctcccctgcctgtgccccaatggcaccatgcccatcagctgaaggcgttggccgcttccaagcagggtagcgctacaaaacagcaaggccctaccccctcgtggtccggcctgccacctcccggtcttagtcctccctacagaccagtgccttcaccacatccacccccactgccactgccaccaccacctcccccttttagcccccaaagcctgatggtgtcctgtatgagtagcaacactctgagcgggagcacactgcgcggaagtcccaacgccctgctctcgtctatgacctccagctcaaatgctgccctgggcccagccatgccatatgccccagagaaactaccatcgccagccctgacccagcagcctcaattcggacctcagagtagcatcttagctaatctgatgtcttcaacaataaaaacaccgcaaggacatctcatgtctgctttacccgcttcaaacccaggtccctctccaccatatcggccagagaaactgtccagccctggactgccccaacaaagcttcacgccgcagtgtagcctgttacattatctgcagcagccaacacctacccaggcctccagcgctacagcttctagtactgctaccgcaacactgcagctgcaacagcagcagcagcagcagcagcaacagcccgaccattcctccttcttgctccagcagatgatgcagcagcctcagaggttccagcgaagcgtagctagtgatagtatgcctgccctcccacgccagggctgttgccacctctttgcatggacatcagcagcgtcatcagttaagcctcagcatcagcatggaaactctttcacatcacgtcaggacccccaacccggtgatgtctccccaagcaacattacccacgtcgacaaggcctgcaagttgggggaggccaggcacccccaggtgagcctggggaggcagcccccaagttgccaggctctaggcagcgaatctttccttccaggttccagttttgcccacgaattggctcgcgtgacctccagctactctacctcagaagcagccccttggggttcctgggaccccaaggcttggcgccaggttcctgctcccttactgccgtcttgcgacgccacggctagggggaccgagattagaagctatggaaatgatccatag

SEQ ID NO: 229678 - DNA, 645 bp, synthetic construct
  misc_feature 1..645: note = Description of Artificial Sequence: Synthetic coding sequence
  source 1..645: mol_type = other DNA
atgattatgcagcagggaatggcctcgtcgagtccgggagctacagagccatttaccttcggtaacactaagccactgagtcacttcgtaagtgaacctggcccacagaagatgcctagcatgccaacaacctccaggcagccgtctctgctgcactaccttcagcagccgacacccacacaggcttcatccgccactgcctcatctacagctacggcaactttgcagttgcaacagcaacagcagcagcagcaacaacagcctgatcacagcagctttctcctgcaacaaatgatgcagcagcctcagagatttcagcgatctgtggctagcgatagcatgcccgctctcccgcgtcagactcacgtagacaaagcctgcaaattaggggaagccagacacccacaagtaagtctggggaggcagcccccatcatgccaggctctgggaagcgagagctttctgcccggatctagcttcgctcacgagctagctcgcgtcacaagcagctattcgacatctgaggctgcgccttggggttcatgggatcccaaagcttggcgccaggtgcccgcacccttgctgccgagttgcgatgccacagccagaggcaccgaaatcaggtcatatggcaatgatccgtag

SEQ ID NO: 229679 - DNA, 1956 bp, synthetic construct
  misc_feature 1..1956: note = Description of Artificial Sequence: Synthetic coding sequence
  source 1..1956: mol_type = other DNA
atgaaggattacgacgagttgttgaagtattacgaacttcatgagactatcggcactggcggattcgccaaagtgaaactggcctgtcacatcttgactggcgagatggtggctatcaagatcatggataaaaacactcttggcagtgatctgccaaggattaagactgaaatcgaggccctgaagaatttgcggcaccaacatatttgccagttgtatcacgtccttgaaaccgctaacaaaatatttatggttttggagtactgtccaggcggtgaactgttcgattacatcatcagccaggaccgactcagtgaagaggaaacccgcgtggtcttccgccagatcgtcagcgcagtggcttatgttcatagccagggatacgcccaccgcgacttgaaaccagaaaacctccttttcgatgaataccacaaacttaagctgatcgacttcggcctgtgcgctaaacccaaagggaataaggattaccatcttcagacttgttgcggatccctggcctacgctgccccagagctgatccagggaaaatcatatctgggtagcgaagccgatgtgtggagcatgggcatcttgctctatgtgctgatgtgtggctttctgccctttgatgacgataacgtgatggccctgtataaaaagatcatgcgcggtaagtatgacgtcccaaagtggctgtctccctcctctattctgttactccaacaaatgcttcaagtggaccccaagaagcgcatatcgatgaagaatcttcttaaccacccctggattatgcaggattacaattatcctgtcgagtggcagtctaaaaatccttttattcaccttgatgatgattgcgtgaccgaattgtcagtgcatcataggaataacagacagacgatggaagacctgattagcctctggcagtacgatcacctcaccgccacatatctgctgctcctcgctaaaaaagccagaggcaagccagtgcgcctgcggctgtcatccttcagttgcggccaggcttccgccacaccttttacagacataaagtcaaataattggtccctggaggacgttacagccagcgacaaaaactacgtcgccggactaatcgattacgactggtgtgaagatgatttgagtacaggcgctgccactcccaggacatctcagttcaccaagtattggaccgagagtaacggagtcgagagtaagtcgcttactcccgcactgtgtcgaactccagccaacaagcttaaaaataaagagaacgtgtatacacctaaaagcgccgtcaaaaatgaggagtacttcatgtttcccgaaccaaagactccagtgaacaagaaccagcataagcgcgaaatacttaccacccctaacagatatactaccccatctaaagctcgtaatcaatgtctcaaagaaactccaattaaaataccagttaacagcaccggaacagataagctgatgactggagttatctccccagagcggaggtgcagatctgtggaacttgatctcaaccaggctcacatggaggagacccccaagcggaagggcgcaaaagtctttggctccctggagcgtggtttggacaaggttatcaccgtactgactcgaagtaagagaaaaggcagcgccagagacggacccagacgtcttaaactgcactataatgtaaccaccaccaggcttgtcaacccggaccagttgctgaatgagattatgagcattctacccaaaaagcatgtggacttcgttcagaagggatataccttgaaatgtcagactcagagtgatttcggtaaggtaactatgcagtttgagctggaggtgtgtcagttgcaaaaacccgacgtggtcgggataagaaggcagagattgaaaggcgatgcctgggtgtacaagaggctcgtggaggatatactgagctcctgcaaagtgtag

SEQ ID NO: 229680 - DNA, 1743 bp, synthetic construct
  misc_feature 1..1743: note = Description of Artificial Sequence: Synthetic coding sequence
  source 1..1743: mol_type = other DNA
atgatgaatttctcaaatatcatgaactatatgaaacttttaggccaatattgcccaggtggtgagctgtttgactacattataagtcaggatcgtctgagcgaagaggaaacaagggtagtcttccggcagatagtttcagcagtggcctacgtacactcacagggctatgcacatagggatctaaaaccagaaaacctcctgttcgatgagtatcacaagctaaaactgatcgactttggcctgtgtgcaaaacctaaagggaacaaggattatcacttgcagacctgttgcggctccctggcttacgcagcccctgagttaatccaggggaagtcctatctgggaagcgaagctgacgtgtggtccatgggcatcctgttatatgttctcatgtgcggattcttaccattcgatgatgacaatgtgatggctctgtataagaagattatgcgcggtaaatatgacgtccctaaatggttgtcaccatccagtatattgctgttgcagcagatgctgcaggtcgaccctaaaaagagaatcagtatgaagaacctactgaatcacccctggatcatgcaggactacaactaccctgtggaatggcagagcaagaaccccttcatacacctcgacgatgattgtgtgactgaacttagtgtccaccaccgcaacaatcgccagaccatggaggacctgatttctctgtggcaatatgaccatctcacagccacatatcttctgctcttggccaagaaagcacgcggtaagcctgtccgcctccggctctcaagctttagttgcgggcaggcctcggccaccccttttactgacatcaagtccaacaactggagccttgaggatgtgactgcatcagataaaaactatgtggctggactcatcgattatgactggtgcgaagatgacctttcaactggggctgccactccaaggactagccagtttacaaagtactggaccgagagcaatggcgtcgaatctaaaagcttgactcctgctttatgccgtacaccagctaacaagctgaagaacaaggagaacgtatatacccctaaatctgccgtgaaaaatgaagagtacttcatgttccccgaaccaaaaaccccggttaataagaaccagcacaagcgggagatcctcacaactcctaatagatacacaacccccagcaaggccaggaatcaatgcctgaaggagacccctatcaagatccccgtgaatagcactggcactgataagctgatgaccggtgtgatatcgccagaaaggcgttgccgcagtgtggaactcgatcttaaccaggctcatatggaagaaacaccaaagcgtaagggcgctaaggtgtttgggtccctggaacggggtcttgacaaagtcattaccgttctgaccagatctaaaagaaagggctctgctagggatggcccacgcaggttgaaattgcattacaacgttacaacgacccgactggttaatccagatcagctcctgaatgagattatgtctatccttccaaagaagcatgttgactttgtgcagaagggatataccctgaaatgccagacccagagcgactttgggaaagtgactatgcagtttgaactggaagtgtgccagcttcagaagcccgatgttgtcggcatcagacgccagagactgaaaggagacgcgtgggtttacaagaggctggtggaagatattcttagctcatgcaaggtgtag

SEQ ID NO: 229681 - DNA, 1812 bp, synthetic construct
  misc_feature 1..1812: note = Description of Artificial Sequence: Synthetic coding sequence
  source 1..1812: mol_type = other DNA
atgaaggactacgatgagctgctgaagtactacgagctgcacgaaacaattggcaccggcggattcgctaaggtcaagcttgcgtgtcatatccttacgggggagatggtggccatcaagattatggataaaaacacgctgggctctgaccttcctaggataaaaaccgaaatcgaggcactaaagaatctaaggcatcagcacatctgccagctgtatcacgtcttggaaaccgccaataaaattttcatggtgcttgaagaaaacctgttgttcgacgagtatcacaaattgaaactgatagatttcggcctgtgtgcgaagcccaaggggaacaaggattatcatctgcaaacctgttgtggctctctggcctatgccgctcctgaattgatccagggtaagtcatatctgggctcagaggccgacgtctggtctatgggcatcctcttgtatgttctgatgtgtggatttctgcccttcgatgatgataatgtcatggctctgtacaagaagataatgcgaggaaaatatgatgtcccgaaatggctatcaccctcctccatcttattgcttcaacaaatgctgcaggtggatccaaaaaagagaatttctatgaaaaatttactgaaccacccctggataatgcaagattacaattaccccgtagaatggcagtcaaagaacccattcatacatctggacgatgattgtgtcactgagttgagcgtgcaccacagaaataacaggcagaccatggaagatctgattagcctgtggcagtacgaccatcttactgcaacttacctgctgctgctggcaaagaaggccagagggaaacccgtgaggcttagactgagtagtttttcctgtggacaggcctcggcaacgccttttaccgatattaagagcaacaactggtctctcgaggacgtgacagcgtcagacaagaactatgtggcaggtttgatagactatgattggtgcgaggatgatctgagtacaggcgctgctacacccaggacatctcaatttaccaagtactggactgaatctaacggggtggagagtaaaagcctgacacccgctttgtgccgtactcctgccaataagctgaaaaacaaggaaaatgtctacacgccaaagagcgccgtgaaaaatgaagaatacttcatgtttcccgaacctaaaacacctgttaacaagaatcagcacaagagagaaattctgactactccaaaccgctatacaacgccatcaaaggcccgtaatcagtgcctcaaagaaacccccatcaagattcctgtcaactcaacgggtactgacaagcttatgacgggcgtgattagtcccgaacgacgatgccgcagcgtcgagttggaccttaatcaggcccacatggaggagaccccgaagaggaaaggcgcaaaggtcttcggttctttggaacggggattggacaaagttataactgtgttgacccggagtaagcgcaagggaagcgcaagggatggccctaggaggctcaaactccactacaatgtaaccaccacacgccttgtgaatcctgaccagctgctgaatgagattatgagcatcttgcctaaaaagcacgtggatttcgtgcaaaagggttacacactgaaatgccagacacagagcgactttggaaaagtcaccatgcagttcgagttggaagtttgccagctgcagaagccggacgtagttggaatccgacgccagcgactcaagggtgatgcatgggtctacaagcgtctggtggaggacatcctctcaagctgtaaagtgtag

SEQ ID NO: 229682 - DNA, 1563 bp, synthetic construct
  misc_feature 1..1563: note = Description of Artificial Sequence: Synthetic coding sequence
  source 1..1563: mol_type = other DNA
atggtgctcgaagagaatttgctgttcgacgaatatcacaagcttaaactgatagactttggtctctgcgctaagcccaaaggaaacaaggactaccaccttcagacttgctgtggctctctggcttatgcagctcctgagctcatccaggggaagtcctaccttggttccgaggcggacgtgtggtccatgggcattctgctgtatgtgctgatgtgcggttttctcccatttgatgatgataatgtgatggccctctacaagaaaatcatgaggggaaagtatgacgttccgaagtggctctccccttcctctatattacttttgcaacagatgctgcaggtggaccccaaaaagcgtatttcgatgaagaatctgcttaaccacccctggattatgcaggactacaactaccctgtagagtggcagagtaagaacccgttcatccatctggacgacgattgtgtaactgaactatcagtgcaccaccgcaacaatcggcagactatggaagatctgatctccctgtggcagtacgaccacctgacagccacgtacttgctcctgctagccaaaaaggcccgtggaaagccagtacgactgcgcctgtctagtttctcgtgtggccaggcttctgccactccgttcaccgacataaaaagcaacaattggtcactagaagacgtgactgccagtgataagaactatgtggctggcctgattgattacgattggtgtgaagacgatctgtcgacgggagcagccacccccaggacctcccagttcacaaagtactggacagagtcgaacggcgtggaatctaagtctttaacacctgcactgtgcagaaccccagccaataagctgaagaacaaagaaaatgtgtacacgcccaagtccgccgtgaaaaacgaagaatactttatgttccccgaacctaaaacgccagtgaataaaaatcagcacaaaagggagattttaacaacacccaatagatacacaactccctccaaagcccgaaaccagtgcttgaaggagactcctatcaaaattcctgtcaattcgactggaacagataagctcatgaccggggtgatcagtcccgagcgaagatgcaggtctgtagaattggacctgaatcaggcccacatggaagaaacccccaagagaaaaggcgctaaagtgttcggcagcttggaacgcggactcgacaaagtgatcaccgtactcacaaggtccaagaggaaaggtagcgccagggacggcccacgcagactcaaacttcactataacgtgaccaccactcggctcgtgaatccagaccagttgctgaacgagataatgtctatcttaccaaagaagcacgtggactttgtgcagaaaggctacactttgaaatgccagactcaatcagattttgggaaggtgacgatgcaattcgaactggaggtgtgtcaactccaaaagccagacgtggtgggaatccgtcgacagcggttgaagggcgacgcatgggtatacaagaggctggttgaggacatcctgtccagctgcaaagtctag

SEQ ID NO: 229683 - DNA, 1374 bp, synthetic construct
  misc_feature 1..1374: note = Description of Artificial Sequence: Synthetic coding sequence
  source 1..1374: mol_type = other DNA
atgggcatcctcctgtacgtcctaatgtgcggcttcctgcccttcgatgacgacaacgttatggctctgtacaaaaaaatcatgcgcggaaaatatgacgtgccaaaatggctgagcccttcttccattctgcttctgcagcaaatgctgcaggttgatccaaagaagagaatctcaatgaaaaatctgttgaaccatccttggattatgcaggattataattaccctgtggaatggcaatctaaaaaccctttcattcacctggacgatgattgtgtgaccgaactgtctgtgcaccaccgtaataataggcagaccatggaggacctaatttcgttgtggcagtatgaccatctgaccgctacttaccttcttctactggccaaaaaagctagaggaaagcccgtgcggctacgactatcaagctttagctgcgggcaagccagtgccactccctttaccgatatcaagtctaacaattggagccttgaagacgtgaccgcctcagacaaaaattacgtggctgggctgatcgactatgattggtgtgaagacgaccttagtacaggcgctgccacccccaggacctctcaattcaccaagtactggacagaaagcaacggcgtagagtctaagtctcttaccccagccttatgtagaactcccgctaataagctcaaaaacaaagagaacgtttacacacccaagtctgccgttaagaacgaagagtatttcatgtttccagagcccaaaacgccggtaaacaaaaatcagcataaacgagagattctgactacacctaaccgatacacaacccccagcaaggctcgcaaccagtgcctgaaggagactcccatcaagataccagtcaacagcacaggaaccgacaagttgatgaccggggtgattagcccagagcgcagatgcagatccgtcgagttggatcttaaccaggctcatatggaagaaacgccgaagcgtaaaggcgctaaagtattcggctctctagaacgcggactcgataaggtgattacagttctgactcgttctaaaagaaaaggatctgcacgcgacggcccacgacgcttgaagctccattataatgtgaccacaaccagactggtcaaccccgatcagttgttaaatgaaattatgagtatcctcccaaaaaagcatgtggactttgtccaaaagggttatacgctcaagtgtcaaacccagtcagactttgggaaagtgaccatgcaattcgagcttgaggtctgtcagctccagaagccggacgtggtcgggattcgcagacagcgactgaaaggcgatgcctgggtctataagcgcctagttgaggatatcttatcttcatgcaaggtgtag

SEQ ID NO: 229684 - DNA, 1833 bp, synthetic construct
  misc_feature 1..1833: note = Description of Artificial Sequence: Synthetic coding sequence
  source 1..1833: mol_type = other DNA
atgaaggattatgatgagttactgaagtactatgaactgcacgaaacgattgggactgggggattcgcaaaagttaaactagcgtgccacatcttgacgggggagatggtcgctataaagatcatggacaagaatacgcttggttccgacctgcctcgaatcaaaaccgagatcgaggccctcaaaaatttgcgccaccagcacatctgtcagttgtaccacgtcctggaaactgctaataagatctttatggttctcgagtactgcccgggaggggaattattcgactacattatttcgcaagacaggctgtcagaagaagagactagggtggtcttcaggcagattgtgagtgcagtggcgtacgtgcactcgcagggctacgctcatcgagacctgaaacccgagaacctgctcttcgacgagtatcacaaactcaaactgattgatttcggcctttgcgcaaagcctaagggtaacaaggactatcacctgcaaacatgctgcggtagcctggcctacgccgcaccagaactaattcagggaaaaagctatttgggatctgaagcggacgtgtggtcaatgggtattctactctacgtgctaatgtgcggttttctgccattcgatgacgacaacgttatggccctgtacaagaaaattatgcgcggtaaatacgacgtgcctaagtggctttccccttcctcgatccttctgcttcagcagatgctccaggttgacccgaagaaaagaatcagcatgaaaaacttgctgaatcacccttggatcatgcaggattacaactaccccgtggagtggcagagcaagaatccatttatccatctggatgacgactgtgtaacagagctgagcgtgcaccacaggaataatagacagacgatggaagatttgattagcctgtggcagtatgatcacctgacagcaacttatttgcttctgctggccaaaaaagccagggggaagcccgtgcggcttcggctctcgtccttctcttgcggccaggctagcgccacccctttcaccgatatcaagtttaccaaatactggaccgagagcaatggggtggaaagcaagtcccttacccctgccctgtgtaggactcctgctaataagctgaagaacaaagagaatgtgtatacgcctaagagcgctgtaaagaacgaggagtatttcatgttccctgaacccaaaaccccagttaacaaaaaccagcataagagggagattcttactacacctaacagatacacaactcccagcaaggctcggaatcagtgcctgaaggagacaccaataaaaattcccgtgaattctactggcaccgacaaactgatgacgggtgttattagtcccgagcggaggtgcagatctgtagagctcgacctgaaccaggcccatatggaagagacacctaagcggaaaggggcaaaggtcttcggaagccttgagcgtggcctggacaaggtgatcacagtgctcactaggagcaagagaaagggaagcgctagagacggcccacgacgactgaaacttcactataacgtcaccacgacgcgcttagtaaacccggaccagctgttaaacgaaatcatgtctattcttcccaaaaagcacgtagactttgtgcagaaggggtacaccctgaaatgccagacccagtccgattttggaaaggtcactatgcagttcgagttagaggtgtgccagctccagaaaccagatgtcgtaggtatacgtcggcagaggctgaaaggcgatgcttgggtttataagcgactggttgaagacatcctctcaagctgcaaagtttag

SEQ ID NO: 229685 - DNA, 1860 bp, synthetic construct
  misc_feature 1..1860: note = Description of Artificial Sequence: Synthetic coding sequence
  source 1..1860: mol_type = other DNA
atgatgaatttcagtaacatcatgaactatatgaagctcttgggccaaagcgacctgcccagaatcaaaactgaaatcgaagccctcaagaacctcagacaccagcatatctgccagttgtatcacgtcctagagacggccaacaaaattttcatggtgctcgaatattgccctggtggggaactgttcgattatatcatctcacaggatagactgagtgaagaagagacgagagtggtgtttaggcaaatagtcagcgccgtcgcctacgttcacagccaggggtatgcccacagagacttgaagccggagaacctgctgtttgacgagtatcacaagctgaaactaatcgattttggtttatgtgctaaacccaaaggtaataaagattaccacctgcagacctgttgcggctccctggcttacgctgcacccgaacttattcagggcaagagctatttaggaagcgaggccgacgtctggagcatggggatactgttgtacgtattaatgtgtggcttcttacccttcgatgacgataatgtcatggctctgtacaaaaaaatcatgagggggaaatacgacgtgccaaaatggctttctccgagcagcattttgcttctgcagcagatgcttcaggtggaccctaagaaaagaataagtatgaaaaatttgctgaatcacccttggataatgcaggattacaactaccctgtggaatggcagtctaaaaatcctttcattcacctggacgacgattgtgttacggagctgtccgtgcatcatagaaataaccggcagaccatggaagacctgatttcattgtggcagtatgatcacctgactgctacctatctgctgctgttggctaagaaggcccgtggcaaacctgtcagattacggctgagttcttttagctgtgggcaggcctccgcgacaccatttaccgatataaagagcaacaattggagtttagaagatgtcacagccagcgacaagaactacgtcgccggtctcattgattacgattggtgtgaggacgacctgagcaccggggcagctactccacggacatcccagtttaccaaatactggacagagtctaacggggtggaatccaaaagcctcacccctgctctgtgtaggacgccagccaacaagcttaagaacaaagagaacgtctacaccccaaagagcgctgtgaaaaacgaagagtatttcatgttcccagaacccaagaccccagtcaacaaaaatcagcacaagagggaaatcctaacaacaccgaacaggtataccacacccagtaaagctcgcaatcagtgtttaaaggaaacaccaatcaagattccagttaactcgactgggacagacaaactcatgactggcgtgataagcccagagcgtaggtgtagaagcgtggagcttgatttaaaccaggcccacatggaagagactcctaaacggaagggtgcgaaggtgtttggatccctcgaaagaggactggacaaggtgatcactgtactcaccaggtctaagcggaaaggttctgccagggacggccctagacgtttaaaacttcattataatgtgacaaccacaagattggttaacccggatcagctgttaaacgagattatgtcaattttgccgaaaaaacatgttgactttgtgcagaagggctacactctgaagtgccagacacagagcgattttggaaaagtcaccatgcagtttgaactcgaggtctgccagttacaaaagcctgatgtggtcggaattagacgccagcgccttaaaggggacgcttgggtgtataagaggctcgtcgaagacattttgtcatcttgtaaggtatag

SEQ ID NO: 229686 - DNA, 1743 bp, synthetic construct
  misc_feature 1..1743: note = Description of Artificial Sequence: Synthetic coding sequence
  source 1..1743: mol_type = other DNA
atgaaagattacgatgagcttctaaagtattatgagctgcatgaaaccatcgggacaggaggtttcgccaaagtgaaacttgcatgccatatactgacgggtgaaatggtggccatcaagatcatggataagaatactctgggctctgaccttccccgaatcaagacagagattgaagccttgaaaaacctgcgacatcaacatatctgtcagctttaccacgttctggaaactgccaacaagatttttatggtccttgaaggcaacaaggattatcatttacagacctgttgcggatctcttgcatacgctgctcctgagctgatacaggggaagagttacctggggtctgaggctgatgtttggtcaatgggcattttactttacgttctcatgtgcggttttctcccatttgatgacgataacgttatggccctgtacaaaaagataatgcggggtaagtacgatgtccctaaatggctcagcccgagtagcatcctgctgcttcaacagatgctacaggttgacccaaaaaagagaatctctatgaagaacttgctgaatcacccttggattatgcaggattataattaccccgtagaatggcagagcaagaatcctttcatccacctggatgacgattgtgttactgagctttccgttcaccataggaataataggcaaacgatggaggatttgatctctctatggcagtatgatcacctaaccgccacataccttctgctgctcgcgaaaaaggctaggggtaaacccgtcagactccgtctatcatccttctcctgcggccaggcttcagccacgcctttcacagatattaagagcaacaattggagtctggaagatgtgaccgcctctgataagaactatgtggccggactgattgactatgactggtgtgaagacgacctgagtacgggtgccgcaacccctcgaactagccaatttacaaagtattggaccgagtccaacggcgtcgagtcaaaaagtttaacccccgctctctgtcgcacccccgctaacaaactgaagaataaagagaacgtgtacacgccgaagtctgcggttaagaacgaggaatactttatgtttcccgagcctaagacaccggtgaacaagaatcagcataagagagagatcctcacgacgccaaaccgctacaccacaccgtcaaaagcgagaaaccagtgtcttaaggaaacccccattaaaattcccgtgaattccactgggaccgataaactcatgacgggcgttataagtccagaacggcgatgtcgatctgttgagctagaccttaaccaggcacacatggaggaaacacctaaacgaaaaggagccaaggttttcggctcactcgaaaggggcctggacaaagtaataaccgttctgacgaggagcaaacgcaagggatccgctcgggatggaccacgacggcttaaactccactacaacgtaacaacaacccggctagtcaaccctgatcagttgttgaacgaaataatgagcattctccctaaaaagcacgtggacttcgttcagaagggctacacacttaagtgtcaaacacagagcgatttcggaaaggtgaccatgcagtttgagctggaagtgtgccagctccagaaacctgatgtcgttgggatccggaggcaaaggctgaagggtgacgcgtgggtgtataagcgcctcgtagaagacatattgtcctcttgcaaggtgtag

SEQ ID NO: 229687 - DNA, 1491 bp, synthetic construct
  misc_feature 1..1491: note = Description of Artificial Sequence: Synthetic coding sequence
  source 1..1491: mol_type = other DNA
atgcgagttctgtctggaaccagtctgatgctgtgtagcctcctgctcctcttacaggcattgtgttctcctggactggcccctcagtcccgcggtcatctttgtcgaacccggccaactgatctggttttcgtggtggactcatctagaagcgtccgtccagtcgagtttgaaaaggtaaaggttttcctcagccaagttatagagtcccttgacgtcggcccaaatgcaactcgggttggaatggtaaattatgccagcactgtaaaacaggaattctctctgcgggctcatgtctccaaagcagccctgctacaggccgtgcggaggattcaaccactgagcactgggaccatgactggtttggcaatacagtttgctatcaccaaggcctttggcgatgcagagggtggcagatcccggagcccagatatctcgaaggtggttatcgttgtcactgatgggaggccccaggactccgtacaggatgtgtccgcaagggccagggcttctggagtggagcttttcgctatcggggtgggatctgtcgacaaggctacactgaggcagatcgcttcagagccccaggacgaacacgttgattatgtagagtcgtactcggtgatcgagaagctgtccagaaagttccaggaggccttttgtgtcgtgagcgatttgtgcgcaaccggcgaccacgattgtgaacaagtttgtatatcttcccccggttcgtacacctgtgcctgccacgaaggctttaccctcaattccgacggcaaaacatgtaatgtgtgtagtggtgggggaggtagcagcgcgaccgacctcgttttcctcattgacggctcaaagagcgttagacctgagaacttcgaactggtgaagaaattcatcagccagatcgtcgacacccttgatgtgtcggataagctggctcaggtggggctggtgcaatattcgtcctccgtcagacaggaattccctctgggtagatttcacacaaaaaaggatataaaggcagctgtccggaatatgagctatatggagaagggcactatgaccggggctgccttgaaatacttaattgacaactcctttactgtttcaagtggtgctcgcccaggggcacagaaggttgggatcgtcttcaccgacgggagaagtcaagattatatcaacgacgccgctaagaaggccaaagacctgggatttaaaatgttcgctgtgggtgtaggtaacgctgtggaagacgaactccgggaaatagctagcgagccggtggcagagcactatttctataccgcggatttcaagactataaatcagatcggtaaaaaactgcaaaagaaaatctgcgtcgaagaggacccctgcgcctgcgaatcccttgtgaagttccaggcaaaggtggagggccttttacaggcacttaccagaaagctggaagccgtttctaaaagattggcaatcttagaaaacactgtggtctag

SEQ ID NO: 229688 - DNA, 2874 bp, synthetic construct
  misc_feature 1..2874: note = Description of Artificial Sequence: Synthetic coding sequence
  source 1..2874: mol_type = other DNA
atggagaagatgctggccggatgtttcctgttgatactgggacagattgtgctgttgccagccgaggccagagagcgttctcggggaaggtctatttcccggggacggcatgcacgcacccacccccaaacagctctgctggaatcgagctgtgagaataaaagagctgatctggtgttcatcattgattctagtcgcagcgtgaacacccacgactatgcaaaggtcaaagagttcattgtggatatactgcagtttctagacattggcccagacgttacacgcgtaggcctgttacaatatggaagtactgtgaaaaacgagttttctctgaagacgttcaaaaggaagagtgaagtcgagagggccgtgaaacgcatgaggcatctttccacaggaactatgaccggattggctattcagtatgctttgaatatcgctttttctgaagccgaaggagccagacctttgcgcgagaacgtccctcgggttataatgattgttacggatggcaggccgcaggattctgtggccgaggtggccgcaaaagcgcgtgacaccggcattttgatctttgccatcggcgtgggacaggttgactttaatacgctgaaaagtattggatcagagcctcacgaggatcatgtcttcctagttgcgaacttctcccaaattgagactctgacttcggtgtttcaaaagaagctgtgcactgcccatatgtgttcaactcttgaacataattgcgcacacttctgtattaatatcccgggaagctacgtttgtcgttgcaagcagggttatatcttgaattcagatcaaacaacatgccgaatccaggacctgtgcgcgatggaggaccacaattgcgagcagttgtgcgtgaatgtaccaggctccttcgtctgccaatgctattccggttacgccttggcagaagacgggaagcgatgcgtggccgtggactactgcgcctccgaaaatcacggatgtgaacacgagtgcgtaaacgctgatggctcgtacctgtgtcaatgtcatgagggtttcgcgctcaatccagacaagaagacatgtactaagatcgactactgcgcctcttcaaaccatggatgccagcacgagtgcgtcaacaccgatgattcttactcatgccattgcctgaagggctttaccctgaacccggacaagaagacttgtcgccgaataaattactgtgcattaaacaagccaggctgtgagcacgaatgcgtaaatatggaggaatcttattactgtcggtgtcatcggggatatacgttggatcctaacggaaaaacttgcagcagggttgatcactgtgcccagcaggatcacggatgtgagcagttgtgcctgaacaccgaagacagtttcgtatgccagtgttccgagggattcctgattaatgaggatctgaagacgtgcagtagggttgattattgtctactcagcgatcacggttgcgagtacagttgcgttaacatggaccggagtttcgcatgccagtgtccggaaggacatgtccttcggagcgacggtaaaacttgcgctaaactggattcctgtgcgctgggggatcacggatgcgaacactcatgcgtgtcaagcgaggactccttcgtgtgtcaatgtttcgaagggtatattctccgcgaggacggcaagacctgcagaagaaaggatgtgtgccaagctatcgaccacggctgtgagcacatctgtgtgaacagcgatgacagctatacctgtgaatgcctggagggattccggctagctgaggatggtaagagatgccgacggaaagatgtctgtaagagtactcaccacggctgcgaacatatctgtgtgaacaatgggaactcctacatttgcaaatgttccgagggcttcgtgctggccgaagacggccgacgttgcaaaaagtgtactgagggtcctattgacctggttttcgtgatcgatggctccaagtccttaggcgaagagaattttgaggtggtgaaacagttcgtgactggaatcatcgattcgctgacaattagccccaaggctgccagagtggggctgttacagtatagcactcaggtacacacagaattcacactgcggaatttcaatagcgcaaaagacatgaagaaggccgtcgcccatatgaaatatatgggaaagggcagcatgaccgggttagccctgaagcacatgttcgagagaagcttcacccaaggtgagggtgctagacccctatccacacgtgtcccgagggccgctatcgtgttcactgacggcagggcccaggacgatgtttctgagtgggcctccaaagcaaaggcaaacggaataacaatgtacgccgtcggggtgggaaaggcaattgaggaagaattgcaggagatcgcctccgaaccaaccaataaacatctgttttacgcggaagatttcagtacaatggacgagatctctgaaaagttgaaaaagggcatctgcgaggccttagaggacagtgatgggcgacaggattcacccgctggggaactgcccaaaacagtccaacagccgactgaatctgaacctgttacgattaatatacaggacctcctatcctgctccaattttgccgtccagcacagatatctgttcgaggaagataatctgcttagaagcactcagaagctaagtcacagcacaaaaccgagcggctctcctctcgaggagaaacacgaccagtgcaagtgcgaaaacttgattatgtttcagaaccttgcaaatgaggaagtgcgtaaacttacccagcgcctgctggaggagatgacccagaggatggaagccttggagaatagacttcgttacagatag

SEQ ID NO: 229689 - DNA, 2754 bp, synthetic construct
  misc_feature 1..2754: note = Description of Artificial Sequence: Synthetic coding sequence
  source 1..2754: mol_type = other DNA
atggaaaagatgctggccggttgctttctactcatactgggacaaatagtactgttaccagctgaagctagggaaagaagccgcggacgaagcatttccagaggcagacacgccagaactcatccccagacggctctgctggagtcttcctgcgagaacaagagagctgatttagtgttcataatcgacagctctagatccgttaacacacatgattacgctaaggtcaaagaatttatagttgatatactgcagttcttggacataggccctgacgtcactcgtgtagggctgctccaatacggctctacagtgaagaatgaatttagtctcaagacatttaaacggaaatctgaggtggagcgcgctgtcaagaggatgcggcatttgtctacgggcaccatgaccggattggccatacagtatgcgctcaatatcgccttctcagaggctgagggggctcgtccattaagagagaatgtgcctcgggttatcatgatcgtcacagacggcagaccccaggatagcgtggctgaagttgcagccaaagccagggatacaggcatactgattttcgccatcggagtcggccaagtggacttcaatacactgaaatccattggcagcgaaccccatgaggatcacgtctttctagtggccaacttcagccagattgaaactctgacgtccgtgttccagaagaagttatgtactgcccacatgtgtagtacactggaacacaattgtgcacatttctgcattaacatcccagggagctatgtgtgtcgctgcaaacagggttacattctgaatagcgaccagactacgtgtagaattcaagatctttgtgcaatggaggatcataattgcgaacagctgtgtgtgaacgtgcctggctctttcgtctgtcagtgctattccgggtatgctctggccgaagatgggaaacgatgcgtcgcagtcgactattgtgctagtgaaaaccatggctgcgagcatgagtgcgtgaatgccgacggcagctatctgtgccagtgtcacgaaggattcgccctcaatcctgacaaaaaaacgtgcacgagaatcaattattgcgcgttaaataagcctggatgtgagcacgaatgtgtcaatatggaagagagttattactgccggtgccacagaggatacacccttgatcccaatggaaagacctgttccagggtggaccattgcgctcagcaggaccatggctgtgaacaactgtgcctgaacacggaggatagttttgtctgccaatgttcagagggttttctcatcaatgaggacttgaagacgtgctcccgggtcgactactgtctgctttccgatcacgggtgcgagtactcctgcgtcaacatggataggagtttcgcctgccaatgccccgaaggtcatgttctccgatcagatggcaagacatgtgccaagctcgactcgtgcgccctaggcgaccacggttgcgagcacagctgtgtcagctcagaggactctttcgtgtgtcaatgttttgagggctacatcctgcgggaggacggtaagacctgtcggagaaaggatgtgtgtcaggccattgatcacggctgcgagcacatctgtgtgaattcagacgactcatatacatgcgaatgtcttgaggggtttcggttggctgaggacggcaagcgctgcaggaggaaagatgtctgcaaatctactcaccacggctgtgaacacatatgcgtgaacaatgggaactcatatatctgtaaatgcagcgagggctttgtgttggccgaagacggccgaaggtgtaaaaaatgcactgaagggcctatcgacctggtgtttgtgatcgacggtagcaagagtttgggcgaggaaaattttgaggttgtgaagcaatttgtgaccggaatcatcgacagcctgaccatctcaccaaaggctgctagagtgggcctcttacaatacagtacccaggtacacactgagtttaccctacgcaatttcaactccgccaaagacatgaaaaaggccgtggcccacatgaagtacatggggaagggtagcatgacaggacttgccttgaaacacatgtttgaacggagcttcactcaaggggagggcgctcgccctctgtccactagagtgccacgcgctgccatagtcttcaccgatggccgagcccaggatgatgtctccgagtgggcatcaaaagctaaggcgaacggaatcaccatgtatgccgtcggagtcgggaaggcaatcgaagaggagttgcaggaaatagcctcggagccgactaacaagcatttgttttacgcagaggatttctcaaccatggacgagatatctgaaaagctgaagaaaggtatttgtgaggctttggaggattcagacggacgccaggacagcccagcgggagaattgcccaagaccgtgcagcagcctaccgaatccgaacccgtgactatcaatattcaagaccttttgtcatgcagcaacttcgctgtgcagcatcgttacctcttcgaggaggataaccttctgcgttcaacacagaaactcagccattccactaagccttccggctcccccctggaggaaaagcatgaccaatgcaaatgcgagaacttgataatgtttcagaatctcgcgaacgaggaggtgaggaagctcactcagaggtatttattggaggagatgactcagagaatggaagctctggaaaacagattgcgatacagatag

SEQ ID NO: 229690 - DNA, 348 bp, synthetic construct
  misc_feature 1..348: note = Description of Artificial Sequence: Synthetic coding sequence
  source 1..348: mol_type = other DNA
atggaggatcacaattgtgagcagctttgcgttaacgtcccaggatcattcgtatgccagtgctattctggctatgccctggcggaagatggaaaaaggtgcgtggcagtggattattgcgcctcagaaaaccacggatgcgaacacgagtgtgtgaatgctgacgggagctacctgtgtcagtgtcatgagggatttgctctgaacccagataagaaaacctgtaccaagattgattactgcgcaagctccaatcacggatgtcaacatgagtgtgtcaataccgacgattcatattcgtgccactgcctcaagggcttcactctgaacccagacaagaagacatag

SEQ ID NO: 229691 - DNA, 2871 bp, synthetic construct
  misc_feature 1..2871: note = Description of Artificial Sequence: Synthetic coding sequence
  source 1..2871: mol_type = other DNA
atggagaagatgcttgccggatgttttctgctcattctagggcagattgtgctcctgcccgcagaagccagggaaaggagcaggggccgatctataagtaggggcaggcatgccaggacccatccacagactgcactgctggagtcttcctgcgaaaacaagcgagccgacctggtcttcatcattgatagttctagaagcgtcaatactcacgattatgcaaaagtcaaagagttcatcgtggacatccttcagttcttggatattggccctgacgtgacaagagtgggactgctgcagtacggatccacggtcaagaatgagttctccctgaaaacttttaagaggaagtcagaggtggaaagggccgtgaagagaatgaggcatctcagtaccgggacgatgaccgggctggccatccagtacgccttaaacatcgcctttagcgaggcagagggtgctaggcccctaagagaaaacgtccctcgggtcattatgatagtcacagacggcagaccacaggattcagttgccgaagtcgccgctaaggcccgtgacacaggcatcctgatttttgccatcggagtcgggcaggtcgacttcaacactctgaaaagcatcggcagcgaaccgcacgaagaccatgttttcctggtggctaatttttcccagatcgagacgctcacgtcagtcttccagaagaagctctgcacagcacacatgtgcagtactctggagcataattgtgctcatttttgcatcaatataccaggctcttacgtctgtagatgcaagcaggggtatatcctgaactccgatcagaccacatgtcgaatacaagatttatgcgccatggaggaccacaactgcgagcagctttgcgttaatgtgcccggaagctttgtgtgtcagtgctactccggatatgcactcgcggaggatggaaaaagatgtgtggccgtggattactgcgctagtgaaaaccacgggtgcgaacacgagtgtgtaaatgcagacggttcctatctgtgtcagtgccatgagggttttgctctaaaccccgataaaaagacttgcacaaagatcgattattgcgcgtcttctaaccacggttgccaacacgagtgtgtgaacacagacgacagttactcctgtcattgcctcaaaggatttactctgaaccctgataagaagacttgcagaagaatcaactattgtgccctgaataagccaggttgcgaacacgagtgcgtgaacatggaagaatcctattactgtcggtgtcaccgtgggtataccttggaccctaacgggaagacctgctcgagagtggaccattgcgctcagcaagatcacgggtgtgagcagctctgtcttaacaccgaggatagcttcgtgtgtcagtgctctgaaggattcctgatcaacgaggaccttaagacctgcagcagggttgattactgcctgctgagcgatcatggatgtgaatattcctgtgtgaatatggatcgcagcttcgcatgccagtgtcccgaaggccacgtcctccgaagcgacggtaagacatgtgcaaaattggattcttgtgcactcggggaccacggctgcgagcattcttgtgtgagctctgaggactctttcgtttgccagtgttttgagggctacattctccgagaagacgggaagacctgccgacggaaggacgtatgccaggccatcgatcacggatgtgagcacatatgcgtgaacagcgacgatagttacacctgtgagtgcctggagggcttcaggttggcagaggatggaaagcgctgccggagaaaagacgtctgtaagtcaactcatcacggctgtgagcacatatgcgtaaacaacggaaatagttacatctgcaagtgcagcgaggggttcgtactcgccgaggatggtagaaggtgcaagaaatgtactgaaggaccaattgatctggtgtttgtgattgatggatcaaagagtctgggcgaggaaaacttcgaagtggtcaagcagtttgtgacgggcatcattgacagcctgactatctcgcccaaggctgcaagggtgggccttctgcagtactctactcaagtgcacaccgaatttacactgagaaatttcaacagcgctaaggacatgaagaaggccgtggcgcatatgaagtatatgggtaagggttcaatgacaggcttggctctcaaacacatgtttgaaaggagtttcacccagggtgagggggcacgccctcttagcacccgtgttccacgggctgccatcgtgttcacggacggaagagcccaagatgatgtgagcgagtgggcgtcgaaggccaaggccaacggcataaccatgtatgctgtgggcgtcggaaaagctatcgaggaagagctgcaggagatagcaagcgagcctactaacaagcatctcttctatgccgaagacttctccaccatggatgagataagtgaaaagttaaaaaagggcatatgcgaggcactggaagacagcgatggtcgccaggacagtccggctggggagctgcccaaaactgtgcagcagccaacggaatcagagccagttacaattaacattcaggacctgctgtcttgcagcaacttcgccgtccagcataggtatctcttcgaagaagataacctgttaaggtccacacaaaagttgtcccattctacaaagccatccggcagtccactcgaggagaagcatgatcagtgtaagtgtgagaaccttatcatgtttcagaatctcgctaatgaagaggttcgcaaacttacccagcgcctcgaagaaatgactcagcgcatggaggccctggaaaaccgccttcgataccgctag

SEQ ID NO: 229692 - DNA, 2814 bp, synthetic construct
  misc_feature 1..2814: note = Description of Artificial Sequence: Synthetic coding sequence
  source 1..2814: mol_type = other DNA
atggagaaaatgctggctgggtgctttttactgattctggggcaaatcgtgctattgcccgctgaggccagggagagatctagaggacgtagtatctccaggggcagacacgcgaggactcacccacagactgccctgctggagagttcttgcgagaacaagcgcgctgatcttgtctttatcatagactcgtcgaggtctgtcaatacccacgattatgccaaggtgaaagagttcatcgtggacattttgcaatttctagatatcggcccagacgtgacacgggttggattgctccagtacggatccaccgtgaagaatgaattctccctcaagacttttaagcgtaagagcgaagtggaaagggccgtgaagagaatgagacacttaagcaccggcacgatgaccggcctggctatacaatacgcacttaatatcgccttctcagaggcggagggtgcaagacctctccgggaaaatgtcccaagggtcatcatgattgttaccgacggaagacctcaggacagcgtggctgaggtggccgctaaggcacgggataccggcattctcatctttgcaatcggagttggccaggtagacttcaacactctcaagtccatcggaagtgaaccccatgaagaccacgtcttcctggtagcaaatttttcgcagatcgagactctgacttccgtgtttcagaaaaaactgtgcacagcgcatatgtgtagcacccttgagcataactgcgcgcacttttgtatcaacattccgggttcctatgtgtgtcgctgtaagcagggatacattctgaactccgatcagacaacctgccgtattcaggacctctgcgcgatggaagaccacaactgtgagcagttatgcgtaaacgttcccggatcattcgtttgtcagtgttatagcgggtatgctctggccgaagacggcaaacgttgcgtggcagttgattattgtgcctcggagaaccatggatgtgaacatgagtgcgtcaatgctgatggttcctatttgtgtcagtgccacgagggattcgcgctgaaccccgataagaagacttgcacgaaaattgattactgtgcttccagcaatcatggatgccagcatgagtgcgtgaatactgacgacagttatagctgtcactgcctgaaaggcttcactctcaatccagataaaaagacatgcagacggatcaactactgcgccctgaacaagcctggttgtgagcatgaatgtgtgaacatggaggaaagttattactgcaggtgccatcgaggctacactctggatcccaatggcaagacctgctcccgggtggatcactgcgcgcagcaggatcacggatgcgaacaactgtgcctgaatactgaggacagttttgtttgccagtgctcagaaggtttcctcattaatgaggacctgaaaacctgttcaagagtggattactgcctgttaagcgaccacggttgtgagtattcgtgcgtgaatatggatcgctcttttgcgtgtcagtgccctgaaggacatgtacttcggtccgacggcaagacttgtgccaaactggatagctgcgcgctgggcgatcacggatgtgagcacagttgtgtcagctctgaggacagctttgtgtgccaatgtttcgaggggtacatcctgcgggaagatggcaagacctgccgcaggaaggacgtgtgccaagcgattgatcatggctgcgaacacatttgcgtaaatagcgacgactcttatacctgcgaatgtctcgagggctttcggctggcggaagacggcaagcgatgtagacgcaaggatgtgtgtaagtcaacacaccacggttgtgaacacatttgtgtaaacaacggaaactcgtacatctgtaaatgtagcgaaggcttcgtgctagcagaggatgggagacggtgcaaaaagtgtaccgagggcccaatcgacctcgtatttgttattgatggatccaaatctttgggggaggaaaattttgaagtcgtgaaacagtttgtcaccggaattatcgattctctcaccatctccccgaaggccgctcgtgttggtctactccaatacagtacacaggtgcacaccgaatttacactcaggaacttcaactcagctaaggatatgaagaaggccgtagcacatatgaagtacatgggaaaagggtcaatgactgggctagcactgaagcacatgttcgagagaagctttacacagggcgaaggtgcaaggcccctgagcacgcgcgtgcccagggctgccattgtatttacggatggtagggcacaagatgacgtgtccgaatgggcttcaaaagctaaggctaatgggattactatgtatgccgtcggcgtggggaaggctattgaggaggagctgcaggagatcgcttccgagcctacaaataaacacctcttttatgcggaagatttttctaccatggatgaaatatcagagaaactgaagaagggcatctgcgaggcgctggaggatagtgatggcaggcaggactcccctgcaggtgagctccccaagaccgtgcaacaaccaacagtgcagcacaggtacctgttcgaggaagataatctgttgcgttctactcagaagctgagccacagcaccaagccctcaggatcgcccctcgaggaaaagcacgaccagtgcaagtgtgagaacctgatcatgtttcagaatctggccaacgaagaagtccgaaaactaacacagcgcctggaagaaatgacccagcgtatggaagctttggagaacaggctccgataccgctag

SEQ ID NO: 229693 - DNA, 2019 bp, synthetic construct
  misc_feature 1..2019: note = Description of Artificial Sequence: Synthetic coding sequence
  source 1..2019: mol_type = other DNA
atggaagaccataactgtgaacagctgtgtgttaatgtccctgggagcttcgtttgccagtgttacagcgggtacgcactggccgaagacggcaagagatgtgtagccgtcgactactgcgccagcgaaaatcatggctgcgaacatgaatgcgtcaatgcagacgggtcttacctatgtcagtgccacgagggctttgctctgaatcctgacaaaaaaacttgcaccaagatcgactactgcgccagttctaaccatggttgtcaacatgaatgcgtgaatacagatgatagctattcctgtcactgtctcaagggatttacattaaatccagacaagaaaacatgccggagaataaattattgtgctctcaacaaacctgggtgcgaacacgaatgtgttaacatggaggaatcctactactgccggtgccataggggctatacactcgaccctaatggaaagacatgcagccgggtggaccattgtgcacaacaggatcatggctgcgaacagctgtgcctgaatactgaagattcttttgtttgccagtgctctgagggcttcctcatcaacgaagatcttaagacttgctcacgcgttgactactgcctgttgtcggatcacggatgtgagtatagctgcgtaaatatggacagaagttttgcctgccagtgccctgagggacatgtgctgagatccgacggcaagacgtgcgcaaaactggatagctgtgcccttggcgatcacggttgcgaacacagctgcgtgagttctgaggacagctttgtgtgtcagtgttttgaggggtatatcctgagagaggatggtaagacttgcagacgcaaggatgtttgtcaggctatcgaccacgggtgcgagcatatctgcgtgaatagcgatgactcctacacctgcgagtgtctggagggattcaggcttgcggaggacgggaagcggtgtagacgcaaagacgtgtgtaaatcaacacatcacggttgtgaacatatctgtgttaataacggcaactcttatatttgtaagtgctcagaaggttttgtcctcgcagaggatggaagacgatgcaagaaatgcacagaagggcctattgacctggtttttgtcattgatgggagtaagagtctgggtgaggagaattttgaggttgtaaaacagtttgtcacgggaatcatcgattcactgacaataagccctaaggctgctcgggttggtcttttacagtattctacacaggttcataccgagttcaccctgaggaacttcaacagtgctaaagacatgaagaaggcggtggcacacatgaagtatatggggaaggggtccatgacaggtctcgcactcaaacacatgtttgaaagatcctttactcaaggcgagggggctaggcctttgagtacccgcgtccctcgggctgctatcgtttttacagatggacgagcgcaggacgatgtgagtgaatgggcttctaaggcgaaggcaaatggaatcaccatgtacgctgtcggcgtcggtaaggctattgaagaagaactgcaagagattgcctccgagcctacgaataagcacctcttttacgccgaagacttttccacgatggacgagatctctgagaaattgaagaagggtatatgcgaggcattggaagacagtgatggcaggcaggatagccccgctggggagttgccaaagactgtacaacagccaaccgagagtgaaccagtcactataaacattcaggacctgttgtcctgttccaatttcgcagtccagcaccggtacttgttcgaagaggataacctcctgcggagtacccagaagctgtcccacagtacaaagccctccggtagtcctctggaggagaaacatgaccagtgcaagtgtgaaaacctgattatgttccagaatctcgccaacgaagaggttcggaaattaacacagagactggaggagatgacccagcgaatggaagccctcgaaaaccgtttgcgataccgctag

SEQ ID NO: 229694 - DNA, 2748 bp, synthetic construct
  misc_feature 1..2748: note = Description of Artificial Sequence: Synthetic coding sequence
  source 1..2748: mol_type = other DNA
atggaaaaaatgcttgccggatgttttctgctgattttggggcagattgttttgcttccggctgaagcgagggaacgctctcgaggtaggtcgatctcccggggtcgacatgcccgtacccatcctcagacagcacttctggaatcctcttgcgagaacaaaagagccgacctggtgtttattattgatagctccaggagtgtcaacacacatgactatgcaaaggttaaggagttcatcgtggacatactccagttcctcgatatcgggcctgacgtaacaagagtcgggctcctccagtacggaagcactgtcaaaaacgaattcagtcttaaaacctttaaaagaaagtcagaggttgagagagctgtcaagagaatgcgccacctgagtactggaacaatgaccggactggccatccagtacgccttgaacatcgccttcagtgaggctgaaggggctagaccattacgcgaaaatgtgccgagagtcatcatgattgttaccgatggtcggccacaggactcggtcgccgaggtggctgccaaagccagagataccggcattctcatcttcgcaattggtgttgggcaggtggattttaacacgctgaagtccattggtagtgaaccccatgaagaccacgtgttcctggtggccaacttctcacagatcgagacactcacttccgtctttcagaaaaagctgtgtacagctcacatgtgttcaactttagagcataactgcgcacacttctgtataaacattcctgggtcctatgtctgtagatgtaagcagggctatatcctcaactcagatcagacgacttgtagaatccaggatttgtgcgccatggaggatcacaattgcgaacaactctgcgtgaatgtaccaggatcttttgtgtgtcagtgttattccgggtacgcgttggccgaggacggaaagcgctgtgtagccgtggactattgtgcatctgagaaccatggatgcgaacacgaatgcgtcaatgctgacggatcatacctctgccagtgccacgaaggcttcgccctcaatcccgacaaaaagacttgtacacggatcaactactgtgctctgaataaacccggatgcgagcatgaatgtgtcaatatggaagagtcctactactgccggtgccacaggggctacaccctcgatcccaatggcaaaacatgtagccgggtggatcattgcgctcagcaagaccatggatgcgagcagttatgtttgaatacggaagatagctttgtgtgtcagtgttcagaagggttcctgattaatgaagatctgaagacctgctctagagtcgattattgcctgctgtctgatcatggatgcgaatattcttgtgtgaatatggatagatcctttgcatgccaatgccccgaggggcatgtgctccgctcagatgggaaaacttgcgcaaagttagactcgtgcgctctcggagaccacgggtgcgagcatagttgtgtttcctcagaagatagctttgtatgccagtgcttcgagggctatattttgcgcgaggatggtaaaacatgccggcgtaaggatgtttgtcaggcaatcgaccacggatgcgaacacatttgtgtaaattccgatgattcctatacatgtgaatgtctggaaggattccgtttggcagaggatgggaaaagatgcaggcgaaaagatgtgtgtaaatctactcaccacggatgcgagcacatctgcgtgaacaatgggaacagctacatctgcaagtgtagcgagggctttgttctggccgaggatgggcgaagatgcaagaagtgcacagaagggccaatagatctggttttcgtgattgacggctcaaaatctctcggcgaggaaaactttgaagtagtaaagcagttcgtgacggggattatagactctcttactatctctccgaaggccgctcgcgtgggcctgctgcagtactctacacaggtgcacaccgaattcacattaaggaactttaactcagccaaagacatgaagaaggctgtcgcccatatgaagtatatgggcaaagggagcatgacaggccttgctttgaaacatatgttcgagcgaagctttacccaaggcgaaggcgctcggcctctgagtactcgggtgcccagagcagctatagtattcaccgatggtcgcgcacaggacgacgtctcagaatgggcatccaaagcgaaagccaacggcataacgatgtacgctgtgggcgtgggcaaggccattgaggaggaattgcaggagattgcctcggaacccactaacaaacacctcttttacgctgaagattttagcaccatggacgagatctccgagaaacttaagaaagggatctgtgaggctctcgaggactccgatgggagacaggacagcccagcaggtgaacttcctaagactgttcaacagcctactgagagcgaaccagtgactatcaacatccaggatctcctatcttgttcaaacttcgcggtgcagcatcgctatctgtttgaggaagataatctgctgcggtctacccagaaactttcacactctaccaagcctagcggatcacccctggaagaaaaacacgatcaatgtaagtgcgagaaccttataatgttccaaaatctcgccaacgaagaggtgcggaagttgacccagagactggaggagatgactcagcgaatggaggcactcgaaaatcggctgaggtatcgatag

SEQ ID NO: 229695 - DNA, 1461 bp, synthetic construct
  misc_feature 1..1461: note = Description of Artificial Sequence: Synthetic coding sequence
  source 1..1461: mol_type = other DNA
atgcctcgccctgccccagccagaagactgcctggactcctactcctgctgtggccactcctgctgctgccttctgctgctcctgatcctgtagcgcgacctggcttccgacgccttgaaaccagagggccagggggatccccagggcgtcgtcccagcccggctgccccagacggagcacctgcatcaggcactagtgagcctggacgggcaagaggcgcaggcgtgtgcaagagtcgtccactggacctcgtgttcattattgactcctcacggtcagttcgtccgttagagttcacgaaagttaagacttttgtgagcagaatcattgatacactggacatcggccctgcagatacccgtgtcgctgtggtgaactacgcctcaaccgtcaagatagaatttcagctgcaggcatacacagacaaacaaagcctgaaacaagccgtgggtagaattactcccctctccactggtaccatgtcaggcctagcaattcagacagctatggatgaggcgtttaccgtcgaggctggcgctagagaaccaagcagtaacattccgaaagtggcgattatcgtgaccgacgggagacctcaagaccaggtgaacgaagttgctgctcgggcacaggcatcgggaattgaattgtatgcggtgggcgtggaccgggctgatatggcctccttgaagatgatggcctctgaacctttagaagagcacgttttctacgtagagacttatggtgtgatcgaaaagttgagctcacgctttcaggagacattttgcgcacttgacccatgcgtgctcggaacccatcagtgtcagcacgtctgcatttctgacggggaggggaagcatcactgcgagtgctctcagggctacaccctgaacgccgataagaaaacatgtagcgcactcgatcgctgcgctttgaatacccatggctgtgagcacatctgtgtgaatgatcgctccgggagctatcattgtgagtgttacgaaggatacacattgaacgaagacagaaagacgtgtagcgcccaggacaagtgcgctctaggaactcacggttgccaacacatctgcgtgaacgaccgaactgggtcgcaccattgcgagtgctacgaaggctatacgctgaacgcggataagaagacctgcagcgttcgggataagtgcgccctcggatcccacgggtgccagcatatttgcgtctccgatggggctgcgtcctatcactgtgattgttacccagggtatacgctgaacgaggacaagaagacatgcagcgctacagaggaggcgcgaaggctcgtttcaacggaggatgcttgtgggtgcgaggctaccctcgcattccaagacaaggtctcgtcttacctacagcgtctaaatactaaactggacgacattctggaaaagctgaaaatcaatgaatatggacaaattcatcggtag

SEQ ID NO: 229696 - DNA, 1335 bp, synthetic construct
  misc_feature 1..1335: note = Description of Artificial Sequence: Synthetic coding sequence
  source 1..1335: mol_type = other DNA
atgccccgtcctgctcccgcaaggcggctgccaggtcttcttctccttctatggcctctattattattaccaagtgcggctccagacccagtcgccagacccggattcaggagacttgagacgagaggtccaggcggtagtcccggacgtaggccatcgcccgctgcgccagacggtgccccagcttctgggaccagtgaacccggtcgcgcacggggagctggtgtgtgcaaatcccgcccactcgacctggtgttcattatcgactcttccaggagtgtgcgccctctcgaattcaccaaagtgaaaacatttgttagtcggatcattgacactttggacatagggcctgcagatactcgggtggcggtggtcaactatgcgagcacggtcaagattgagttccagctgcaggcatacacagataaacagtccctgaaacaggctgtcgggcgaatcacaccattgagtacgggaaccatgagcggccttgccatccagactgcaatggacgaagcattcaccgtggaagctggggcaagggaacctagttcaaatatacccaaagtagcgattattgtaacagacgggagacctcaagaccaggtgaacgaggtggctgcaagagcccaggcctctgggatcgaactgtacgcagtgggagtggaccgggcagacatggcgtcactcaaaatgatggccagcgagccactggaagagcatgttttttacgttgaaacctatggagtaattgagaaactcagttccagatttcaggagactttttgtgcgctggacagatgcgctctgaatacccacggctgcgagcatatatgtgtaaacgaccgcagcggttcctaccattgtgagtgctatgagggttatacccttaacgaggacagaaaaacgtgcagcgcccaggacaaatgcgctctgggcacccacggttgccaacacatctgcgtgaacgatcgcaccgggagtcaccattgcgagtgctatgaaggatatacactgaacgcggacaagaaaacttgcagcgtccgagataaatgcgcgttgggatctcacggttgccaacacatttgcgtatccgatggcgctgcaagctaccactgcgactgctatcctggctataccctcaatgaagacaagaagacttgctccgccacagaagaggcccgtcggcttgtctctactgaggatgcttgtggatgcgaagcaactctggcctttcaagataaagtctcctcatacctgcaaaggctgaataccaagctggacgacatcctagagaaattaaaaatcaacgagtatggtcagatccatcgttag

SEQ ID NO: 229697 - DNA, 1869 bp, synthetic construct
  misc_feature 1..1869: note = Description of Artificial Sequence: Synthetic coding sequence
  source 1..1869: mol_type = other DNA
atgcggggtttactttgctggccggtcctgctcctgctgcttcaaccttgggagacccagttacagctcaccggtccccgttgccacacgggccctttggaccttgttttcgtgattgattccagccgatccgtgcgacctttcgaattcgagacgatgcggcagtttctgatgggcctgctccgtgggcttaacgttggacccaatgctacacgcgtgggcgtaatccagtactcctctcaagtacaaagcgtgtttccgctccgagcttttagtcggagggaagatatggaacgagctataagagatcttgtccccctggcccaaggcaccatgaccgggctggctattcagtacgccatgaatgtcgccttctctgtagcggagggtgctcggccacccgaggagagagtgcccagggtcgcagtcatcgtgacagatggcagacctcaggaccgggtggccgaggtggccgcacaggcgagagccaggggtattgagatctacgccgttggtgtgcaaagggccgatgtgggtagcctccgtgcgatggctagccccccactggatgaacacgtgttccttgtagaaagttttgacctcattcaggagtttggtctgcaattccagtctagactctgcgggaaagaccagtgcgcggaaggcggtcacggctgccaacaccaatgtgtgaacgcctgggctatgtttcactgtacctgtaatcctggttacaagctcgccgctgacaacaaatcatgtctggccatagatctttgtgccgagggaactcatggctgtgagcaccattgcgtgaattcccctgggagttacttttgtcattgtcaggtgggctttgtgctgcagcaggaccagcgcagttgtcgcgcaattgactattgctctttcggtaaccacagttgccaacatgagtgcgtgtctacgcccggtggacccaggtgtcactgcagagaggggcatgatcttcagcccgatggcagaagctgtcaggtgcgcgatctgtgcaacggggtcgaccatggttgcgagtttcagtgcgtttccgagggcctctcttatcggtgtctttgccccgaggggcgtcagcttcaggctgacggtaaatcctgcaacaggtgtcgggaaggtcacgtggacctggttctgctagtggacggttcaaagtctgtgcgccctcagaatttcgaacttgttaagagattcgttaatcagatcgttgactttctggacgtatcccctgagggtaccagggttgggcttgtgcaatttagttctcgagtacggacagagttccctctgggacggtatggaaccgccgcagaggtgaagcaggccgtactggccgtggagtacatggaacgtggaactatgactggactcgccctccgacatatggtggagcacagtttctcagaggcccagggggcacgtccacgtgccctaaacgtgcctcgcgtgggactggtgtttacagacgggcgtagccaggatgacatatcagtctgggcggctcgggcaaaagaagaaggtatcgtcatgtacgccgtcggagtggggaaggcggtggaagcggagctgcgggaaatcgcctcagagccggctgagctgcatgtgtcttacgcacccgactttggaacaatgacccacctgttagaaaatctgcggggtagcatttgtccggaggaaggcatcagcgccggtactgagctgcgcagcccttgtgaatgtgaaagtctagtagagtttcaaggcagaacgctgggagcacttgaaagccttactcttaacctcgcacaactgacagctcgcctcgaggacctagaaaaccagttagccaatcagaagtag

SEQ ID NO: 229698 - DNA, 1746 bp, synthetic construct
  misc_feature 1..1746: note = Description of Artificial Sequence: Synthetic coding sequence
  source 1..1746: mol_type = other DNA
atgcgaggcctcctatgttggcccgtgctgttgcttctcctgcagccttgggagacccaacttcagctaacagggcctcgctgccacacagggcctttggacctcgtctttgtaatcgatagctccagatcagtgaggccttttgagttcgaaaccatgagacagtttctgatgggccttctcaggggtctgaatgttgggccaaacgcaacacgggtgggcgtcattcagtattcttcacaagtgcagagcgtatttccattgagagcgttcagccggagagaagacatggaacgagcaatccgagatttggtgcctttggcgcagggaactatgactggattggctatacagtacgctatgaatgtcgccttctctgttgcagagggggcacgcccaccggaggaacgcgttccgagagtggcagtaatcgtcactgacggacggccacaagacagggtcgccgaagttgccgcacaggctcgggctcgcggtattgagatctacgctgtcggtgtgcagagagccgacgtgggctcattgcgcgctatggctagtcctccacttgacgagcacgtgtttcttgtggaatccttcgatctgatacaggagttcggactgcaatttcaatctcggctgtgtgccatagatctgtgcgccgaaggcactcacgggtgtgagcatcattgcgttaatagcccaggttcttacttctgtcattgtcaagtggggtttgtcctccagcaagaccagcgaagctgtcgtgctattgactactgttcttttgggaatcactcatgtcagcacgagtgtgtttcaactcctggtgggccaagatgtcattgccgggaaggacacgatctgcagccagacgggagaagttgtcaggtgcgagacctgtgcaacggcgtggatcacggttgcgagtttcaatgtgtgtctgaggggctgtcataccggtgcctctgccccgagggcaggcaactgcaggccgatgggaaaagttgcaacagatgtagggagggccatgtggatttggtattactggtggatgggagtaaaagcgttcggccacagaacttcgaactcgttaaacgatttgtcaaccagatcgtggactttctcgacgtgagccctgaaggcactcgggtgggacttgttcagttctccagtagagtgcgcacagaatttcctttaggcaggtacggtaccgccgcagaggtgaagcaagctgtgctcgccgtcgagtacatggaaagaggaacaatgaccggattagcccttcgacacatggtcgaacatagcttctctgaagcacagggcgctcggcctcgcgctcttaacgtgcctagggtcggcctggtattcaccgatggacgctcccaggatgacatttccgtgtgggcggcaagggctaaagaagaggggatcgtaatgtacgccgttggtgtgggaaaagctgtcgaagccgaactgcgcgagatagcttcagaacccgcagaactccatgtgtcctacgcccctgacttcggaacgatgacccacctccttgaaaacttgagagggtcaatttgcccagaggagggcatatccgcgggaactgagctccggtccccctgcgagtgcgaaagcctggtggagttccaggggagaaccctgggcgctctcgagtccctgactctcaacttggcacagctgactgcaagactggaggacttggagaaccagctggccaaccagaaatag

SEQ ID NO: 229699 - DNA, 1500 bp, synthetic construct
  misc_feature 1..1500: note = Description of Artificial Sequence: Synthetic coding sequence
  source 1..1500: mol_type = other DNA
atgaggggcctactgtgctggccggtccttctgcttctgctgcagccctgggaaacacagttacagctcactgggcctagatgtcataccgggccacttgatctcgtgtttgtaattgattctagcagatctgtgagacctttcgagttcgaaaccatgcgacagtttcttatgggcctgcttcggggtcttaacgtcggacccaacgcaactcgggtcggggtgatccaatacagttcacaggtgcagagcgtgtttccgctgcgggcattttctcggagggaggacatggaaagggcaatccgggatttagttcctctggcccaggggactatgaccggcctggcgatccagtatgcgatgaacgtcgccttttccgtggcagaaggtgcgagaccacccgaagagcgagtcccacgggtggctgtaattgttacagacggccgtcctcaagatcgagttgccgaggtggctgctcaagctagagctaggggcattgagatttacgcagttggggtgcaaagagcggatgtgggctctttgcgcgcaatggcgtctcccccactggacgagcatgtgttcctggtggagtccttcgatctaattcaggagttcgggctgcaatttcagtcccggttatgtgtccgggacctgtgcaatggagtggaccatgggtgcgaattccagtgcgtgtcagaaggcctaagctacaggtgtctgtgcccagaagggagacagctccaggcagatggaaaatcctgtaatagatgccgggaaggccacgtggatctcgttcttcttgtcgacggttctaagtcagtgaggccacagaatttcgagctcgtcaaacgcttcgttaaccagattgtagacttcttagatgtctctcctgaaggtacacgcgtgggcctagtccaattctcttccagagtgagaacagagtttcccctcggaagatacggaaccgctgcagaggtgaaacaggccgtcttagcagtcgaatatatggaaagaggaacgatgaccggattagcactaaggcacatggttgagcactccttctccgaggcacagggcgctcggccaagagccctaaatgtgccaagggttggtctcgtgtttactgatgggagatcacaggacgacatttcggtgtgggccgcacgggcaaaggaggaaggcatagtgatgtatgccgtgggcgtgggcaaagctgtggaggcggaactccgggagatcgcctccgagcccgctgaactgcacgtcagctatgcgcctgatttcggcaccatgacccaccttctggagaatttgcggggatcaatctgccctgaggaggggatttccgcgggtactgagttgcgttccccctgcgaatgcgagagcctcgttgaattccagggcaggacacttggggctttggagagtctcactttgaacttagcacagttaactgccaggctggaagatctggagaaccagttggctaatcaaaagtag

SEQ ID NO: 229700 - DNA, 1623 bp, synthetic construct
  misc_feature 1..1623: note = Description of Artificial Sequence: Synthetic coding sequence
  source 1..1623: mol_type = other DNA
atgcgaggtcttctttgctggcccgtcctgcttttgctcttgcaaccttgggagacccagctacaacttacgggcccaagatgtcacacaggacccctggatctggtcttcgtgatcgactcctctaggtccgtgcggccattcgagtttgagactatgagacagttcctgatgggtctcctgagggggttaaatgtggggccaaatgctacaagagtgggcgttatccaatactcttcacaagttcagagcgtgttcccgctgagggctttctcaaggagggaagacatggagcgcgctattcgggacctggtgccactggcacagggcacaatgaccggccttgccatacagtacgctatgaatgttgcttttagcgtggcagagggggcaaggccacctgaagaaagagtgcctcgcgtggcagtgatcgtgacggacggacgcccacaggacagggtggctgaagtagctgcccaggccagagcaaggggaatcgagatctatgcggtgggagtgcaacgggcagatgtgggatctcttcgggctatggcctccccacccctggacgaacatgtgtttctcgttgagtccttcgatctcatccaggaatttggcctgcagtttcaatcccgcctgtgcgcaattgactattgttcttttggtaatcactcctgtcaacacgagtgcgtaagcacccccggagggcctagatgccactgcagagagggccacgacctccagccagacggtcgctcctgccaggttagagatttgtgcaatggcgttgatcacggttgcgaattccagtgtgtatccgagggcttatcctacaggtgtctgtgtcccgaggggcgacagctgcaagctgacggaaagtcctgtaacagatgccgcgaaggccatgtcgacctagtgttactggtggatggtagcaagagtgtcagacctcagaactttgaattagtcaagcgcttcgtgaatcagatagttgactttctggatgtctccccagaaggcacacgggtgggccttgtgcagttttccagccgggtgcggacggagtttcctctgggaagatacggaactgccgcagaagtcaaacaggcagtccttgctgtggagtatatggaaagaggcaccatgaccggtcttgcactgagacatatggtggagcacagctttagcgaagcccaaggggctcggcctagggctcttaacgtccccagggtcggcctagtcttcaccgatggacgatcccaggatgacatctccgtttgggcagcaagggctaaggaggagggtattgtgatgtacgccgtaggggtcgggaaggcggtcgaggccgaactgagggagatcgcctccgagccggctgagctgcatgtctcatatgccccagacttcgggaccatgacacacctgcttgagaatcttcggggatccatttgcccggaagaagggattagtgcagggaccgaactgaggagtccatgtgagtgcgagtcactagtggagtttcagggcaggacgctgggggcacttgagtctctgaccctcaacttggcacaactgacagctaggctggaggaccttgaaaatcagcttgccaatcaaaaatag

SEQ ID NO: 229701 - DNA, 1299 bp, synthetic construct
  misc_feature 1..1299: note = Description of Artificial Sequence: Synthetic coding sequence
  source 1..1299: mol_type = other DNA
atgcggggtctcctgtgttggcccgtgctcctccttcttctgcagccttgggagactcagctgcagctcacaggtaaggatcagtgcgccgagggtggccacgggtgccaacatcagtgtgtgaatgcatgggccatgttccactgtacctgcaacccgggttataagctcgcagctgataataaatcctgcttggctattgacctgtgcgcagagggcacccacggatgtgaacaccattgtgtgaattccccaggctcctacttctgccattgtcaagtgggattcgttttgcagcaagatcaacgtagttgtcgggctatagactactgctctttcggaaaccattcctgtcagcacgagtgcgtgtcgacaccgggaggccctaggtgccactgtcgggaaggtcatgatctgcagccagatgggagaagctgccaagtgcgtgacctctgcaacggtgtggaccacggctgcgaattccagtgcgtcagtgaagggttgagctataggtgcctgtgccctgaaggcaggcagctccaggctgatgggaaaagctgcaaccgttgtagggagggacatgtcgacctcgttcttctggtggatggctctaagtcagttcgaccgcaaaactttgagctagtgaagcgtttcgtaaaccagattgtggacttcctggacgttagcccagagggaacgagagtcgggcttgtgcagttttcaagtagagtgaggacagagttccctctgggaaggtacggaacagctgctgaggttaaacaggctgtgttggccgtggaatacatggagcgcggtacaatgactggccttgcccttcgccacatggtggaacactctttttccgaagctcagggtgccagaccccgagccctgaacgtccccagagtcggattagtgttcacagacggacggtctcaggacgacatcagcgtttgggccgctagggccaaggaagaaggtatcgttatgtatgcagtgggcgtcggcaaggccgtagaggccgagcttcgcgagatagcctctgagcctgccgaacttcacgtgagttacgctcccgacttcggtacaatgactcacctcctggaaaaccttcgcggatccatatgccctgaggaaggcatctccgctggaactgaactccgctctccttgtgagtgcgaatccctcgtggagttccagggtaggacgctgggcgctctcgagagtttaacactgaacctggcccaactcactgcccgtctggaagatctggagaatcaactggccaaccaaaagtag

SEQ ID NO: 229702 - DNA, 1299 bp, synthetic construct
  misc_feature 1..1299: note = Description of Artificial Sequence: Synthetic coding sequence
  source 1..1299: mol_type = other DNA
atgcgcggtctcctgtgttggcccgtcttactgctgctactacagccgtgggagacccagctgcaattgaccggtaaggaccagtgcgccgaggggggtcacggttgtcaacaccagtgtgttaatgcatgggccatgttccactgcacatgtaatcccggatacaagctggccgcagacaataagagttgcctagctatcgatctctgcgcagaaggtacgcatggatgtgaacatcactgtgtgaattctcccggaagctatttctgccactgccaagttggatttgtccttcaacaggatcagaggagttgcagagcaatcgactattgcagctttggtaatcactcctgtcaacacgagtgtgtgtctaccccagggggacccagatgccattgccgagaggggcacgacctgcagcccgatggtcggagctgtcaggtgcgtgacctctgtaacggcgtcgatcatggttgcgaatttcagtgcgtctccgagggcctctcttacagatgtctgtgtccggagggacggcaactgcaagccgacggcaagtcatgtaatagatgtagagagggccacgtcgatttggtgttgctggtcgatgggagtaaaagtgtgaggccacagaatttcgagctggtgaagcggttcgtaaatcagatcgtggattttctagatgtctccccggaggggactcgggtggggcttgtccagttctccagcagagtaaggactgaatttcccttagggcgttatggaaccgctgccgaggtgaagcaagcggtcctggctgtggagtatatggagagaggaacgatgaccggacttgcgcttcgccatatggtagaacattcctttagtgaggcccaaggagctcggcctcgtgcactcaacgtgcctagggttggtctggtttttaccgatggccgaagccaagacgacatttctgtgtgggcagcacgcgcaaaggaagagggcatcgtgatgtatgccgttggggtcggtaaggctgtcgaggcagagctccgggaaattgcgtctgagcccgcagagcttcatgtctcctatgcacctgactttggcacaatgactcatctgttagagaacctgcggggttctatttgcccggaggagggcatcagcgctgggactgaactccgatctccgtgcgaatgtgaaagtttagtggaattccagggcaggactttgggcgctcttgagtctttgaccttgaacttggcgcagctcacagcccgtctggaggaccttgagaatcagctcgccaaccagaagtag

SEQ ID NO: 229703 - DNA, 1869 bp, synthetic construct
  misc_feature 1..1869: note = Description of Artificial Sequence: Synthetic coding sequence
  source 1..1869: mol_type = other DNA
atgagaggattgctgtgctggccggttctgctgctcctgcttcagccgtgggaaacccagctccagttgacaggccctcgctgccataccggacccctggacctcgtctttgtgatcgatagttctaggagcgttaggcccttcgagttcgagaccatgaggcagtttctgatgggacttctccgtgggctgaatgtagggccaaatgctacacgcgtaggtgtcatacagtattcttcccaggttcagagcgtcttcccactccgcgcattcagccgtcgagaggacatggaaagggccatacgggatttagtgcccctggcgcaaggaaccatgactggtttggccattcagtacgccatgaatgttgcattttctgtggcagaaggggcaagaccacccgaagagagagtcccccgtgtggccgtgatagtcacagatgggaggccacaggacagggtggccgaggtggccgctcaggccagagcccgaggcatcgagatatacgccgtgggagtgcaacgtgctgatgtaggctcactgcgcgctatggcctctccccctctggatgagcatgtgttcttggtcgaatcattcgacctcattcaggaatttggcctgcagtttcagtccaggctgtgcggcaaggaccagtgcgcggaaggtggacacggatgccagcatcagtgcgtcaacgcgtgggccatgtttcactgtacttgcaaccctggctataagctcgccgcagacaataaaagttgcctggcgatcgacctatgcgccgaaggaacacacggctgcgagcatcattgcgtgaattccccagggtcctatttttgccactgtcaggttggtttcgtgttacagcaagatcagcgaagttgtcgtgcaatagactactgttcattcggcaaccactcatgccagcacgagtgcgtgtccacccctggcggtccaaggtgccattgcagggagggtcacgatctgcagcccgacggacgaagctgccaggtgcgggacctctgtaatggggtagatcacggctgtgagttccagtgtgtctctgaagggctttcctacagatgtctctgcccagagggtcggcagttgcaggccgacggtaaatcatgtaacaggtgccgggaggggcatgtggatctggtgctgcttgtggacggttctaaaagcgttcggcctcagaatttcgaacttgtaaaacgtttcgtgaatcagatagtagactttctcgacgtgtctcccgaaggcacaagggtcggactggttcagttcagtagccgggtccggactgagttcccactcgggaggtatggcactgccgctgaagtcaagcaggccgtgctggccgtggagtacatggagcggggaacgatgaccggcctcgccctccgacacatggtggagcatagcttcagtgaagcacagggagctagaccaagggccttgaacgttcccagagtgggactcgtattcactgatggcagatcacaggacgatatcagtgtgtgggcagcaagagcgaaggaagagggcatcgtcatgtacgccgtgggagtgggaaaggccgtggaggcggagttaagggaaatcgccagcgaacccgcagagctccatgtatcttatgccccagattttggcacaatgactcaccttctagagaatctcaggggaagtatatgccctgaggaaggcatttccgctgggaccgagctgagatcaccttgcgaatgcgagtccttggtagaattccagggacggaccctaggcgctctggagtctctgacgttgaatctcgcccaactgactgccagactggaagacctggaaaatcagctggcgaatcagaagtag

SEQ ID NO: 229704 - DNA, 1746 bp, synthetic construct
  misc_feature 1..1746: note = Description of Artificial Sequence: Synthetic coding sequence
  source 1..1746: mol_type = other DNA
atgcgaggtctcctttgttggccggtcctgctgttgctgctccagccgtgggagacacagttgcaactcactggccctaggtgtcacaccggccctctggatctagtttttgtcatcgacagttcacggagcgtgaggcctttcgagtttgaaacaatgaggcaattcctcatggggctgcttagggggctgaacgttggacccaacgccacaagggtgggagtcatccaatactcttcccaggttcaatcggtcttccccctgcgggcattttctcggagagaggacatggaacgggctataagagacctcgttcctctggctcagggcacaatgactggcctcgcaatccagtacgccatgaacgtggcttttagcgtcgcagagggggctcgacccccagaggagcgggtcccacgcgtggcagtcatagtcactgatggcaggcctcaggatcgggtggcagaggtggcggctcaagctcgggctagaggaatcgagatctacgcagtgggggtgcagcgtgcagatgtaggctctttgagggccatggcaagtccgccattagacgagcacgtgttcctggttgaaagcttcgatcttatccaagaatttggactacagttccagtcacgactttgtgcaatcgacctttgtgccgagggaacacacgggtgcgaacaccattgcgtcaattcccctggttcctacttttgccactgtcaggtggggtttgtgctccagcaggaccagcggagctgtcgggcaatagattattgtagtttcggaaaccattcatgccagcacgaatgcgtgtccaccccagggggtccacgctgccattgcagggagggacacgacctccagccagatgggcgatcatgccaagtgagggatctctgcaatggtgttgatcacggctgcgaattccagtgtgtcagtgaagggctgtcttacaggtgcctgtgcccagaaggcagacaactgcaggctgacggcaagagctgtaataggtgtagggagggccacgtagacctagtcctgctcgtagatggaagcaagtcagtcagaccccagaattttgaactcgtgaaacgttttgtcaatcagattgttgactttctcgatgtgagccccgaggggacccgagtgggccttgtgcagttttctagccgggtgaggactgagttcccacttggacggtatggaacagctgccgaggtaaagcaggcagtcctggcagtggaatacatggaaagagggactatgactggcctcgccctgcggcatatggtagaacactccttttccgaggctcagggggctaggccaagggccctgaatgtgcctagggtcggcttagtgtttaccgacggccgatctcaagatgacatcagtgtgtgggccgcaagggccaaagaggaggggatcgtaatgtacgctgtgggggtcggcaaagcagtcgaggccgagctgagagagatagcttcggaaccggcagagttacacgtgtcatacgcaccagatttcggcacaatgactcatctactagagaacctgagaggctcaatttgtcccgaagaagggatttctgccggaaccgagcttaggagtccctgcgagtgtgagagcctagttgagtttcaggggcgtactttgggcgcactggaatctctcacactgaatcttgcccagcttacagctcgcctcgaagacctggagaaccagctggccaatcagaagtag

SEQ ID NO: 229705 - DNA, 852 bp, synthetic construct
  misc_feature 1..852: note = Description of Artificial Sequence: Synthetic coding sequence
  source 1..852: mol_type = other DNA
atgtctaaaagctttcagcagtcttctctgagcagagactcacaaggccatggccgagatctgtctgccgcaggcataggcctcctagctgctgcgacacagtctctgagcatgttgcttgaaagcgaagacgagctactggtcgacgaagaagaggcggctgcgttattggaaagcggaagttcagtaggcgacgagactgacctcgcgaatctaggagatgtggcctcagatggcaagaaagaaccatcagataaagcagttaagaaggatggcagtgcctcagccgcagccaagaagaaattaaagaagcggagatttccaggctccatggaagggtttgttaccctcgatgaagttggcgatgaggaggactctgaactgcagaaactgcggaagtcagggatggcatttaagtccggcgacaagaacgacgacggacttgtggagattaaagttgacaaaatcgaagaactggaccaggagaatgaggctgctcttgaaaatggaataaagaatgaggaaaacacagaacccggagccgagtcctcagaaaacgctgacgaccctaataaagatacatctgaaaacgccgatggtcaaagcgatgaaaataaggacgactataccattccagatgagtaccgcatcggcccttaccagcctaatgtcccggtaggaattgattatgtgattcctaagacaggcttctactgcaagctgtgtagtctgttctatacaaatgaggaagtggcaaaaaatacacattgctcttctcttccgcattaccagaaactaaaaaagtttctgaataaacttgccgaggaacgcaggcagaagaaagaaacgtag

SEQ ID NO: 229706 - DNA, 2544 bp, synthetic construct
  misc_feature 1..2544: note = Description of Artificial Sequence: Synthetic coding sequence
  source 1..2544: mol_type = other DNA
atgagcaagagtttccaacagtcaagcttaagcagagactcccaggggcacggtcgcgacctgagcgccgctggcattggcctacttgccgctgccactcagtccctgtccatgcccgcttctctcggccgaatgaaccaggggacagcccgactggcgtctctaatgaacctcgggatgtcttcttcgctgaaccagcagggggcacattcagcgcttagtagtgccagtactagctctcataacttgcagagtatctttaatattggttcccggggaccacttcctctctcatcccagcatcggggtgatgccgatcaggctagcaacatactcgcgtcatttggtctgtccgcgagggatctcgacgagctcagccgctatcctgaggataaaattactcccgaaaacctgccccagattcttttacaattgaaaagacgcaggaccgaggagggccctactctgtcctacgggagggacggacgctctgccacaagagagcccccatatagggtaccacgggacgactgggaagagaagagacatttcaggagggatagcttcgatgatcggggtccctccttgaacccagtgctcgattacgaccacggatctcggtcccaggaatccggttattatgaccggatggattacgaggacgatagactccgggacggagagcggtgtagggacgattctttttttggtgaaacgtctcacaactatcataaatttgactctgagtatgaaaggatggggaggggcccaggcccactgcaggaaagatctttatttgaaaagaagagaggcgctccccctagcagcaacattgaagatttccatggcttgctgcctaaggggtatcctcacctctgttccatctgcgatctacctgtccacagtaacaaggaatggagccagcacattaacggcgcaagccattcccgcagatgtcagcttctgctcgaaatctacccagagtggaacccggacaatgataccggccacacaatgggagacccttttatgctgcaacagtccaccaacccagccccaggaatccttggcccaccacccccttcattccacctcggtgggcctgctgtcggcccacgcggtaacctcggcgctgggaatggcaatctgcagggccctcgccacatgcagaaaggtagagttgagaccagccgggtcgtgcatatcatggacttccaacgcggtaagaatttaagataccagttgctgcagctggtggaaccctttggagtaatttccaatcaccttatcttaaacaagattaatgaggcgttcatagaaatggcaaccactgaagacgctcaggcagcagtggattactatactactacccccgctcttgtgtttggaaagcccgtccgggtccacctgtctcagaagtacaaacggataaagaagcccgaggggaagccggatcagaaatttgatcagaagcaggagcttggccgtgtgatacatctcagtaatttgcctcactccggctattccgattccgccgtcctcaagctagctgagccatatggaaagatcaaaaattatattctgatgcgcatgaaatctcaagcgtttatcgaaatggagactagggaggacgcaatggcgatggtagaccattgtctgaagaaggcactgtggtttcaaggcaggtgcgtgaaagtagacctgagtgagaagtataagaagctagtgctaagaatcccgaatcgagggattgatttgcttaaaaaagacaaatctcgcaagaggtcatacagccccgatggaaaggagtccccctctgacaagaagagtaaaacagatggatctcagaagacagagtcatcaacagagggtaaagaacaggaggaaaaatcaggagaggacggggagaaggacaccaaagatgaccagaccgagcaggaacccaatatgctgctggagtccgaagatgagctactcgtagacgaagaggaagcagccgcattgctggaaagtgggagttccgttggagacgaaacagacctcgctaatcttggcgatgttgcttctgatggtaaaaaggagccatcagataaggccgtgaagaaggatgggagtgcttccgctgccgcaaagaaaaaacttaagaaggttgataagattgaagagttggatcaggagaacgaggcggctcttgaaaatgggatcaaaaacgaagagaacaccgaacctggggctgaatcttctgagaacgcggatgatccaaacaaggacactagtgaaaatgctgacggccagtccgatgaaaataaagacgattacaccattcccgatgagtacaggattggcccttaccaacctaacgtcccagtgggcattgattatgtcatcccgaaaacaggtttctactgcaagctctgttccctgttttatacaaatgaggaggttgctaagaatacgcactgttcctcactgccccactatcagaagctaaaaaagtttttgaacaaattggcagaagagagacgacagaagaaggaaacctag

SEQ ID NO: 229707 - DNA, 2544 bp, synthetic construct
  misc_feature 1..2544: note = Description of Artificial Sequence: Synthetic coding sequence
  source 1..2544: mol_type = other DNA
atgagtaagtccttccaacaaagttcattgtcaagagatagccagggacacggtagggacctgagcgccgcagggatcgggttattggccgctgctacccagtcactcagcatgcccgcttcactagggagaatgaatcaaggtactgctaggttggcatcactgatgaatctgggaatgtctagctcactgaatcaacaaggcgctcattcagctttatcttctgcctccacatccagccataacctgcagtccattttcaacattggcagccgaggacctctgcccctgtccagtcagcaccggggagatgcagaccaagcctctaacattctggcctcattcgggctttccgcgagggatctcgacgagttgagcagatatcccgaggacaagattactcccgaaaatctacctcagatcctcctacaactgaagcgccgacgtactgaggaagggcctacactgagttacgggcgagacggacggtctgcaactagggagcccccttacagagtgccacgcgatgactgggaggagaagcgtcacttccgcagggattccttcgatgaccggggacctagcctgaatcccgtgctcgactacgatcatgggagccgcagccaggagtcaggatattacgacaggatggattacgaggatgatagactgagagacggggagaggtgtcgcgacgactcattctttggcgaaaccagtcacaactaccacaagtttgattctgagtacgagagaatgggcaggggccctggaccactgcaggagcgcagcttgttcgagaagaagaggggtgccccaccttcatctaacatcgaagatttccatggactcctcccgaaagggtaccctcacctgtgctccatctgtgacctgcccgttcactcaaacaaagagtggagccagcacatcaatggagcgtcacattcacgcagatgccagctcctgctggagatttatccagagtggaacccagacaatgataccggccatactatgggggatccttttatgcttcagcagagcacaaatcccgctcccggaatcttggggcctccccctccctcttttcatttagggggacccgcagttggccctaggggcaatctgggtgctggaaacggcaacctccagggacccaggcacatgcaaaaagggagggtggagacgtccagggtggtccacattatggactttcagcgcggtaagaatctgcggtaccaacttttgcagcttgtggagccctttggtgtgatcagcaatcacctgatcctgaataagatcaacgaggccttcatcgaaatggccacgacagaggacgcccaggccgctgtcgattactacacaacaaccccagccctcgtgttcggcaaaccagttcgcgtccatctctcccagaaatacaaacgaattaagaagcctgagggaaagcccgaccagaaatttgatcagaaacaggagcttgggagggtcattcatttgtcaaacttacctcattctggttacagcgactctgcggtcctcaagctggctgagccgtacggcaagattaagaattacattctgatgagaatgaagtcgcaggcatttattgaaatggagaccagagaggacgcaatggccatggtcgaccattgcctgaaaaaagctctctggttccaagggcgttgcgtgaaagtggacctcagcgaaaaatataagaaactcgtgttacggattccgaatagaggtattgatctactgaagaaggataagagtagaaagagatcttatagcccagacggaaaggagtccccgtcggataaaaagagcaagacagacggtagccagaagacggagtcatctactgaaggcaaagagcaggaagagaaatcaggcgaggacggggaaaaggacactaaggatgaccagaccgagcaggagcccaacatgttgctcgagtcagaggacgaactgcttgttgatgaggaagaggctgctgcgctcctggagtcaggttccagcgtgggcgatgagaccgacttggccaacttgggggacgtggccagcgatggaaaaaaagagccttccgacaaagccgtgaaaaaagatggaagtgcaagcgcggctgccaagaaaaagctgaagaaagttgacaagatagaagaactcgatcaggaaaatgaggctgccctggagaacggcataaaaaacgaggagaatactgagcccggtgctgaatcatctgagaacgctgacgatcccaataaggatacaagtgagaacgctgatggacagtccgatgaaaataaagacgactatactatcccagacgagtatcgcattggcccataccagcccaatgttcccgtgggcatcgattacgtaattcctaaaaccggtttttattgtaagctctgttctttgttctataccaatgaggaggtggctaagaacacccattgttcgtcattgccgcattatcagaagttgaagaaattcctcaacaagctggccgaagagcgccgacagaagaaggagacctag

SEQ ID NO: 229708 - DNA, 300 bp, synthetic construct
  misc_feature 1..300: note = Description of Artificial Sequence: Synthetic coding sequence
  source 1..300: mol_type = other DNA
atgtccaaatccttccagcagagtagcctcagtagagattctcagggacatggcagagacctgagcgctgccggaatcggactccttgctgccgcaacccagtcgttgtccatgccagcttcgctgggaagaatgaatcaaggtaccgccaggctggcctccctgatgaacttggggatgagtagcagtctgaatcagcaaggtgcgcactctgccttaagtagcgcaagcacaagttcacataacttgcagtctatctttaatatcggaagccgcggacccctgccactgtcaagctag

SEQ ID NO: 229709 - DNA, 1530 bp, synthetic construct
  misc_feature 1..1530: note = Description of Artificial Sequence: Synthetic coding sequence
  source 1..1530: mol_type = other DNA
atgggcgatccattcatgctgcagcagtctaccaatccggcacccggtatccttggcccacccccaccctctttccatctggggggtccagcagtaggccctagaggcaatctgggagccggaaatggcaacttgcagggtcccaggcacatgcagaaaggaagggtggagacctcaagggttgtacacattatggacttccagcgcggaaagaatctgcgctaccagctgttacagctcgtagagccttttggtgtgatctctaaccacctcatacttaacaagataaatgaggccttcatcgagatggcaaccacagaggatgcacaggcagctgtcgactactataccaccacccccgctctggtgtttgggaaacctgtccgcgtacatctctcccaaaagtataaaaggatcaagaagccagaaggcaagccagatcagaaatttgaccagaaacaagagctgggaagggtgatacatttgagtaatctgccccatagtggctatagtgattcagctgtgctaaaactcgcagagccttatggcaaaattaagaactacatcctgatgcgcatgaagagccaggctttcatcgagatggagacccgagaagacgctatggcaatggtcgatcactgtctcaagaaggctctgtggttccaaggacgttgcgtgaaggtggatctgagcgagaagtacaaaaagttggtgctgagaatcccaaaccggggaatcgatctgctgaagaaggacaagagtaggaagcgcagctactcccccgatggcaaggagtcaccttccgacaaaaaatctaaaaccgatggcagccagaaaacagaatcatctacagagggcaaggagcaagaggaaaagtccggcgaggatggggagaaagacacaaaagacgaccagacagagcaggagcccaatatgctgctggaaagcgaagacgaacttctggtggacgaggaggaagccgcagccctcctggagtctggcagctcagtcggggacgagactgatctggctaatctgggagacgtcgcttcagatggcaaaaaggagcccagtgacaaggcagttaaaaaggatggctctgcttctgccgctgctaaaaagaagctgaagaaagtggataaaattgaagaactggaccaagaaaatgaggctgcacttgaaaacggaataaagaatgaagagaacacagagcctggtgcagagtcctcagagaacgccgacgaccccaataaagacacatcagagaacgcggacgggcaaagcgacgagaacaaagatgattacactatacctgatgagtacaggattgggccttaccaacccaatgttcccgtcggaatcgattatgtgatcccaaagaccggcttctactgcaaactgtgtagcctgttctacacgaatgaagaagtcgcgaagaatacccattgtagttcactgccacactaccaaaagctcaagaagtttctcaataaattagctgaagagcggcgtcagaaaaaggagacttag

SEQ ID NO: 229710 - DNA, 264 bp, synthetic construct
  misc_feature 1..264: note = Description of Artificial Sequence: Synthetic coding sequence
  source 1..264: mol_type = other DNA
atgagtaagagttttcagcaaagcagtctgtccagagatagccagggtcacggccgtgacttgagcgccgctggaatcggtcttctggctgccgcaacccagagcctttcaatgcctgcctcgttggggcgtatgaatcagggaaccgccaggctcgcctctctcatgaatctggggatgtccagctctcttaaccagcaaggtgcacactctgcactctctagtgcctccacaagttcccataacttacagagcattttctag

SEQ ID NO: 229711 - DNA, 1680 bp, synthetic construct
  misc_feature 1..1680: note = Description of Artificial Sequence: Synthetic coding sequence
  source 1..1680: mol_type = other DNA
atgctcggggcacagtggagacgtaatcagccaagccgggctgccgaggaatggagccagcatattaacggcgctagtcattcccgtaggtgccaactcttactcgagatatatccagagtggaaccccgacaacgacacaggccataccatgggcgacccttttatgcttcagcagtcaacaaatcccgcacccggaatactggggcctccacccccatcatttcacttgggcggacctgcggtgggcccaagggggaacctgggagcgggaaacggcaacctgcaaggacccagacatatgcagaaggggagagtagaaacctctcgagtggtacatattatggactttcagaggggcaaaaaccttcgctaccagctcctacagctagtggaaccctttggtgtgatcagcaatcatcttattcttaataagattaatgaagctttcatcgaaatggctaccacagaggatgcacaagcagctgttgattattacactaccacgccggcacttgtctttggaaagccagtgcgcgtccatttaagccagaagtataaacggatcaagaagcccgaaggtaagcctgaccagaagttcgaccaaaagcaagaattggggagagtcatccacttgagtaacctgccacactctggttacagtgactctgcggtactcaagctggccgagccctatggcaagattaaaaactatattctaatgagaatgaagagccaggcattcatcgagatggagaccagagaggatgccatggccatggtcgatcattgtctgaaaaaggccctctggttccaggggaggtgcgtgaaagtggaccttagcgaaaaatataagaagctcgttcttagaatccccaataggggcatagaccttctgaagaaggacaagtctcgtaagcggtcctattcaccggatggtaaagagtccccctctgacaaaaagagtaaaaccgatggatcacagaaaaccgaaagcagcactgagggtaaagagcaggaggaaaagtcgggcgaggatggagagaaggataccaaagatgaccaaacggagcaggaacccaacatgctgctcgaatctgaggatgagctgttggtggacgaggaagaagcagcagccctactggaatctgggagcagtgtaggcgacgagacggacctggcaaacctgggtgatgtggcttccgacgggaagaaagagccttccgacaaagcagtcaagaaggacgggtcggcttctgcagccgctaaaaagaaactgaaaaaagtagacaagatcgaagagctagatcaggagaatgaggccgcattggaaaacggcataaagaacgaggagaatacagagcctggcgctgaatcttccgagaacgccgatgatccgaataaggatacttctgaaaatgccgatggacagtctgacgagaataaagacgattatacaattccagacgaataccgaatcggaccctatcagcccaatgtgccggtaggaattgattacgtcataccgaagacaggcttctactgtaaattgtgttcattattttacacaaacgaggaggtggccaagaacactcactgctcatctttaccacattatcagaagctaaagaaatttttgaataaattagccgaagagagacgccagaaaaaggaaacctag

SEQ ID NO: 229712 - DNA, 237 bp, synthetic construct
  misc_feature 1..237: note = Description of Artificial Sequence: Synthetic coding sequence
  source 1..237: mol_type = other DNA
atgagcaaatctttccagcagtcatccctctccagagatagccaggggcacggtagggatctgtcagccgcaggaattggcttgttagcggctgccactcagtctctatccatgccggcatccttaggtaggatgaatcagggcaccgcccgattagcctctcttatgaatttgggcatgtcatcctccctgaaccaacagggggctcactccgccctctcatccgcttcaacttag

SEQ ID NO: 229713 - DNA, 1302 bp, synthetic construct
  misc_feature 1..1302: note = Description of Artificial Sequence: Synthetic coding sequence
  source 1..1302: mol_type = other DNA
atgagcaagagcttccaacagtctagcttgtcaagggattcacagggccatggcagggacctctcagcggcaggtattggcctgctggcagcagccacgcaaagtctgagtatgccagcatccctgggaagaatgaaccagggaacggctaggctggccagtcttatgaatcttggaatgagttcgtctctgaaccagcaaggcgctcacagtgccctgtctagcgcatccacgagttctcacaacctgcagtccatcttcaatattggatcgagagggcctctgcctctcagttcccagcatcggggagacgcagatcaggcgtccaacattctggcatcattcggcctgtctgctcgggatctagatgaattaagtaggtaccccgaggacaagatcacacctgagaaccttcctcagattctgctccagcttaaacgcaggcgcacggaagaggggcctacgctgtcctatggacgtgatggtcgttccgctacccgcgagcccccttatagggtgccacgtgatgattgggaagaaaagcggcattttcgaagggattccttcgatgaccggggtccatcattaaatccggtgctcgactacgatcatgggtcgcgctcgcaggagtcaggctattacgatagaatggactacgaggatgaccgtctaagggacggcgaacggtgccgtgatgactctttttttggggagacttcgcacaactaccataagtttgacagcgaatacgaacgcatggggcgaggtcccggaccactgcaagagcgaagcctgttcgagaagaaaagaggcgctcctccctccagcaatatagaagattttcatggactgttgcctaagggatatccccacctgtgctcaatctgcgatctgccggtccactctaacaaagagtggagccaacatatcaacggtgctagccatagtagaagatgccagctgctcttagaaatttaccctgagtggaaccctgataacgataccggccatacaatgggtgatcctttcatgctgcaacaaagtactaatcctgctccagggatcttggggccacccccaccaagctttcatctggggggtccagccgtcggtccccgaggcaatctcggtgccggaaacggcaatttgcagggccctcgtcatatgcaaaagggcagagtcgagactagccgcgtggttcacattatggactttcaacggggtaagaatcttcggtaccagctcctccagttagtcgagccattcggtgtgataagtaaccacttgatcctgaataaatag

SEQ ID NO: 229714 - DNA, 1530 bp, synthetic construct
  misc_feature 1..1530: note = Description of Artificial Sequence: Synthetic coding sequence
  source 1..1530: mol_type = other DNA
atgggcgaccctttcatgctgcaacaatctaccaaccccgctccaggaattcttgggcctccccctcctagctttcacctcgggggacccgctgtaggacctagaggaaacctgggggctggcaatgggaatttacagggcccaaggcacatgcaaaagggcagggtcgagacgtccagagtcgtgcacattatggacttccagaggggcaaaaatctcaggtaccagctgttgcagctcgtggagcccttcggtgttatctccaaccacctcatcctcaacaaaatcaacgaagcatttatcgagatggcaactactgaagatgctcaggccgcagttgactattacacaacaactcccgctctggtgtttggcaaaccggtcagagtgcacctatctcaaaaatacaagaggattaagaaaccggagggaaaacccgaccagaaatttgaccaaaagcaggagttggggagagtgattcatctgtcaaatctccctcattcagggtattcggatagcgcagtgctcaagttggccgagccttacgggaaaatcaagaattatattctcatgagaatgaagtcacaggccttcatagagatggaaactagagaagatgctatggcgatggtggatcattgcctcaagaaagctctctggttccagggcagatgtgtgaaggttgatttgagcgaaaagtacaagaagcttgttctcagaattccaaacaggggcatcgacctactgaagaaagataagtcccgtaaaaggagttatagccctgacggaaaagaaagcccttccgacaaaaagagcaagaccgatggatcccagaaaaccgagagtagcaccgagggcaaggaacaagaggagaaatccggagaggatggagagaaggatacaaaggacgatcaaacagagcaggaacctaatatgctccttgagtccgaagacgagcttcttgttgatgaagaggaggctgctgcactgcttgagtccggcagttccgtgggggacgaaacggacctcgctaatctgggggacgtggcctccgatggtaaaaaagagccttctgacaaagccgtgaagaaggacggaagcgctagcgccgctgcgaaaaagaagctgaaaaaagtagacaaaatcgaggaattggatcaggagaatgaagcggctttggaaaatggaattaaaaacgaggagaataccgaacccggtgccgagagctccgagaatgcagacgatccgaacaaggacaccagcgagaatgctgacgggcagtctgacgaaaataaagacgattacacgatccccgatgagtatagaattgggccttatcagccaaacgtacctgtgggcattgactacgttattccaaaaacgggtttttattgcaagctatgctcgctcttctacaccaatgaggaagttgcaaaaaacacccattgctcttccttgcctcattatcaaaaacttaaaaagtttctgaataagctcgctgaagagagaagacaaaagaaggaaacctag

SEQ ID NO: 229715 - DNA, 144 bp, synthetic construct
  misc_feature 1..144: note = Description of Artificial Sequence: Synthetic coding sequence
  source 1..144: mol_type = other DNA
atgtccaagtcatttcagcaatcgagtttgtccagagacagtcaaggacacggaagggatctgtctgctgctggcatcggcttgctggccgctgccactcagtccctaagcatgccagcttcgcttgggaggatgaaccagtag

SEQ ID NO: 229716 - DNA, 237 bp, synthetic construct
  misc_feature 1..237: note = Description of Artificial Sequence: Synthetic coding sequence
  source 1..237: mol_type = other DNA
atgtcaaaatcgttccagcagtcaagcttgagcagggactcccagggccacggtagagacctgtctgcagctggtattggacttctcgccgcagcaacccagtccctcagcatgccggcatcccttgggaggatgaatcagggtacagcgcgtctcgcgagcctcatgaacctgggcatgtctagctccctgaaccagcaaggcgcacactctgcattgagctccgccagcacctag

SEQ ID NO: 229717 - DNA, 2544 bp, synthetic construct
  misc_feature 1..2544: note = Description of Artificial Sequence: Synthetic coding sequence
  source 1..2544: mol_type = other DNA
atgagtaagagtttccagcaatcctctttaagtagggactcccaggggcatggaagagatctgagcgctgcaggcatcggactcctagctgcagccactcagtccctctctatgcctgcaagcttaggccgaatgaatcaaggaacagcacggctcgccagcctgatgaatctcgggatgtcctcatccctgaaccagcaaggggcacactccgcactttctagcgccagtacctcaagccataacctgcagtctatcttcaacataggctcccggggtcctctgcctttatcttctcagcataggggtgatgccgatcaggcctcaaacattctggcttcctttgggttatctgcccgtgacttagacgaactgtcccgatatccagaggacaagatcacacccgagaatcttccacaaatcctcctgcaactcaaaaggcgacggacggaggaaggtcccacgttgtcttatggaagagacggacgttccgccaccagggagcccccttacagagtcccacgcgacgactgggaggagaagcgccatttccgaagggattctttcgacgataggggccctagcttgaaccccgtcctggattatgatcacggttcacggtcccaggagtccgggtactacgacaggatggactatgaagacgatcgcctcagagacggcgaaagatgtcgcgatgactctttcttcggagagacttcacataattatcataaatttgactctgagtacgagcggatggggagaggaccgggtcccctccaggagagatccctcttcgagaagaagaggggtgcacctccatcaagcaacatcgaggattttcatggactgcttcctaagggctatccacatctgtgcagtatatgtgacctgcccgtgcacagcaacaaggaatggtcacaacacattaacggagcatcccactcccggcgttgccagctgcttctggaaatctacccagaatggaacccagacaatgacacagggcataccatgggcgacccctttatgctgcagcagagtactaatcctgccccaggcatcctagggccaccccctcctagtttccatctcggcggtcctgccgtgggaccacggggtaacctgggtgccggaaatggaaatctccagggtcccagacacatgcagaagggacgggttgagacatctcgtgtggtgcacataatggactttcagaggggcaagaatctacggtaccagctgctgcagctcgtggagccctttggagtgatttccaatcacctgatactcaataagattaatgaggcctttattgagatggcaaccaccgaggatgcccaagccgcagtggactactacactactaccccagctttagttttcggaaaaccagtgagggtacacttgtcccagaagtacaagcgcattaaaaaaccagagggcaaacccgatcagaaatttgaccagaaacaggagctgggtcgcgtgatacacctgtctaacttgcctcactcaggatacagcgatagtgccgtgctcaagctagccgaaccctacgggaagatcaagaactacattctgatgagaatgaagagccaagctttcatcgaaatggaaacaagggaagatgccatggcaatggtggaccactgcctgaaaaaggccctctggttccagggaagatgtgtcaaggttgatctttcagaaaagtacaaaaaattagtgcttcggattcccaacagaggcatcgatctgttgaaaaaggacaaatccaggaagaggtcatacagccccgacggcaaagagagtccatcagacaaaaaaagcaaaaccgacggttcacagaaaacagagagctctaccgaagggaaggagcaggaagagaaatcgggcgaggacggtgagaaagataccaaggatgatcaaactgagcaggaaccaaatatgctgctcgagtctgaagatgagctgcttgtcgatgaagaggaggctgccgctctgctggagtccggctccagcgtcggtgacgagacggacctcgcaaacctcggagacgtcgcctcggatgggaagaaggagccgagtgacaaggccgtgaagaaggatggttccgcatctgcagccgcaaagaagaagcttaaaaaggtagacaaaattgaggagctggatcaggagaatgaagcagctttggagaacggcattaagaacgaagagaacactgagcctggagccgagtcctctgagaatgctgacgacccaaacaaggatacttcagagaacgccgatgggcagagcgatgagaacaaagatgactataccatacccgatgagtacaggatagggccatatcagcctaatgtgccagtcggcattgactacgtcatacccaaaacaggcttttattgtaaactgtgcagtctcttttataccaatgaagaagtggccaagaacactcattgcagtagcctacctcactatcagaagctgaagaagtttctgaataaactggccgaagaacggaggcagaaaaaagagacttag

SEQ ID NO: 229718 - DNA, 30 bp, synthetic construct
  misc_feature 1..30: note = Description of Artificial Sequence: Synthetic coding sequence
  source 1..30: mol_type = other DNA
atgtccaagtctttccagcagtcctcttag

SEQ ID NO: 229719 - DNA, 303 bp, synthetic construct
  misc_feature 1..303: note = Description of Artificial Sequence: Synthetic coding sequence
  source 1..303: mol_type = other DNA
atgtccaagtctttccagcagagttcattatcccgggacagccaggggcacggacgagatctcagcgcagctgggattggcttgcttgccgcagccacacagtctctgtctatgccagccagcctaggacgcatgaatcagggaacagctaggctggcatccctgatgaatctagggatgtcgtcatctctgaaccagcagggcgctcatagcgcactctccagcgcctcaacatcctcacataatctgcagagcatcttcaacattggttcacgcggacccctacccctcagcagtcagtag

SEQ ID NO: 229720 - DNA, 324 bp, synthetic construct
  misc_feature 1..324: note = Description of Artificial Sequence: Synthetic coding sequence
  source 1..324: mol_type = other DNA
atgagtaaatccttccaacagtccagcctaagtagagattcccagggccatgggagggacctgtcagcagcaggcattggcctgctggcagcagctacacagtccctgagtatgccggcaagccttggcaggatgaaccaggggacggccaggttagcatccctgatgaatttggggatgtcttcttctctgaaccagcagggtgcccacagtgcactctccagcgcatccacctcttcccataatctccaaagtatcttcaacattggatccagggggccactgccactttccagccagcatcggggagacgctgatcagtag

SEQ ID NO: 229721 - DNA, 1578 bp, synthetic construct
  misc_feature 1..1578: note = Description of Artificial Sequence: Synthetic coding sequence
  source 1..1578: mol_type = other DNA
atgcgagttttttgtgtgggattgctgttattcagcgtgacttgggcggctcctaccttccaaccacagacagagaagacaaaacagtcatgcgtggaagagcagagacaggaggaaaagaacaaggataacattggattccatcacctggggaaaaggatcaatcaggagttgagctctaaagaaaacatcgtccaggaacgtaagaaggatttgtccctctctgaagccagtgagaacaaaggtagcagtaagtcccagaattattttaccaacagacagagattaaacaaggaatatagcatatcaaacaaagaaaatacccacaacggtttgcgaatgtccatatatcctaaaagcaccggaaacaaagggtttgaggacggtgacgacgctataagtaaactacatgatcaggaggagtacggtgccgcactgatccggaataacatgcagcacatcatgggccctgtcacagccatcaagctgttgggagaggagaataaggaaaacaccccgagaaatgtcctgaacataatacccgcttctatgaactatgctaaggcccattccaaagacaaaaagaagccacagagagactcccaagcacaaaagtccccggtgaagtctaagagtactcaccgaatacagcataatatcgactaccttaagcatctctctaaagttaagaaaattccctctgacttcgagggctcaggctataccgacctacaggaacgtggagacaatgacatttccccattcagcggggacggccagccatttaaagacatcccaggcaagggcgaggcgaccggaccagatctcgaaggcaaggatatccagacgggtttcgcgggtccttctgaggccgaaagcactcacttagatacaaagaagccaggatacaacgaaattcctgagcgagaggaaaatggagggaataccatcgggacacgggacgaaacggcaaaggaggccgacgcagtagacgtgtcattggtggagggttccaacgatattatgggtagcactaacttcaaggagctgcccggacgcgaagggaacagggtcgatgccggatcccagaatgcgcatcagggcaaagtcgaattccactacccacctgccccttcaaaagagaagcgcaaagaagggtccagcgacgctgcggaatcaacaaattataatgagattcctaagaacggaaaaggttccacaaggaagggggttgatcattccaaccgcaaccaggctacactgaacgagaagcagaggtttccaagcaaagggaagagccagggtctaccgatccccagtcggggacttgataatgagatcaagaacgagatggattcgtttaatggaccttctcacgagaacatcattactcatggccgtaagtatcattacgtcccccacaggcaaaataattccacccggaataaagggatgccccaggggaagggatcttggggcagacaacctcactccaatagaagattctcttctcgtcgtcgagacgactcaagcgaaagctccgatagcggatctagcagcgagtccgacggcgactag

SEQ ID NO: 229722 - DNA, 1578 bp, synthetic construct
  misc_feature 1..1578: note = Description of Artificial Sequence: Synthetic coding sequence
  source 1..1578: mol_type = other DNA
atgcgggtgttttgtgtcggccttctgctcttcagcgtgacttgggccgctcctacatttcagccacaaacagagaagactaagcaaagctgtgtggaggagcagcggcaggaagagaagaataaagacaacatcggctttcaccacttgggcaagagaattaaccaagagttatcctcaaaagagaacatagttcaggaacgcaaaaaggatttatctctcagcgaggcaagcgaaaacaaaggcagctccaaatctcagaattatttcaccaataggcagaggctgaacaaagagtattccatcagcaacaaagaaaacacccacaacggcttgcggatgagcatctaccccaagagcacgggtaacaagggcttcgaggatggggatgatgccatctctaagctacacgaccaggaggaatacggggcagctttaatccgcaataacatgcagcacattatgggccctgttacagccatcaagttactgggagaggaaaataaggagaatacccctagaaacgttcttaacataattccagctagtatgaactacgcgaaagcacactcaaaagataaaaagaaaccgcaacgcgattcacaggcacaaaaatcaccagtaaagtccaagtccacgcaccggattcaacacaacatcgattacttgaagcacttgtccaaagtcaaaaagattcctagcgatttcgaagggtctgggtatacagacttacaagagcggggagataatgacatttccccttttagtggcgatgggcagccattcaaggacatacctggaaagggggaagcgactggacctgatctcgagggtaaagacatccagaccggttttgcaggcccttccgaggctgagtccactcatctggacaccaagaagcctgggtacaatgaaattcccgaacgagaagaaaacgggggaaacacaattgggacgcgcgatgagactgcaaaggaggccgatgccgttgatgtgagtcttgtggaagggagcaatgatatcatggggtctactaactttaaggagctgcctgggagggaaggtaacagggtggacgccggttcccagaacgctcatcagggtaaggtggaatttcactaccctcctgctcctagtaaagagaagcgtaaggagggttcatcagacgctgcggagtctacaaactacaatgagatacccaagaatgggaaggggtcaacgcgcaagggagtggatcatagtaaccggaatcaagcgacattgaatgaaaagcagagattcccctctaaagggaagtcccaggggctgcccattcccagccgaggactcgacaatgagatcaaaaacgaaatggacagctttaatggcccaagccatgaaaatattataacccacgggaggaagtaccactatgtaccccatcgccaaaacaactctactcgcaataaagggatgcctcagggaaaaggatcttggggcagacagccccattcaaataggagattttcaagtcggagaagagacgattcctctgagtcatccgactccggctcttcgtctgagagtgacggagactag

SEQ ID NO: 229723 - DNA, 828 bp, synthetic construct
  misc_feature 1..828: note = Description of Artificial Sequence: Synthetic coding sequence
  source 1..828: mol_type = other DNA
atgagagtgttctgtgttgggctcctgttgttcagtgtcacctgggccgctccgacctttcagccgcagacagagaagaccaaacagtcatgcgtggaagaacaacgacaggaggagaagaataaggataatattggctttcatcacctcggaaagaggatcaatcaagaacttagttcgaaggaaaacatcgtgcaggaacgtaaaaaggatctctctctttctgaagccagcgagaataagggttctagtaaaagtcaaaattactttactaaccgccaaaggctgaacaaggaatatagcatcagcaataaagaaaatacacataatggtttgagaatgagcatttatccgaagtctactggaaataagggcttcgaggacggcgacgacgctatttccaaacttcacgaccaagaggagtacggggctgcacttattcggaacaatatgcagcacataatgggtcccgtaacagctatcaaattgctaggtgaggaaaataaggaaaacacaccgcgaaacgttctgaatataatccccgcttcaatgaattacgctaaggctcattccaaggacaaaaaaaagccccagcgcgactcacaagcccaaaaatctcctgtcaaatcgaaatccacgcatcggatccagcataatatagactatctgaagcacctgagtaaagtcaagaagattccaagcgactttgagggctccggctacacagacctacaggaacgaggagataacgatatcagcccctttagtggaacggcaaacctactgcgcaccttcctcgttaaggagaagcttctggtgctgacttag

SEQ ID NO: 229724 - DNA, 1239 bp, synthetic construct
  misc_feature 1..1239: note = Description of Artificial Sequence: Synthetic coding sequence
  source 1..1239: mol_type = other DNA
atgtcaatataccccaagagcactggcaataagggtttcgaggatggtgatgatgccatatcgaaactgcacgatcaggaagaatacggcgcagcactgatccggaataacatgcagcatattatgggcccagtgactgctataaaactcctcggtgaggagaataaagagaacacccccagaaacgtgctgaacatcattcctgccagcatgaactatgcaaaggcacactccaaagataagaagaagccccagagggactcacaggctcaaaagtcccccgttaaatccaaaagcacccataggattcagcacaatatcgactacttgaagcacctgtctaaggttaaaaagattccgtccgatttcgaagggagtggttacactgatttgcaggagagaggagacaacgatatctctccctttagcggagatggccagccttttaaagatatacctggaaagggcgaagccactgggcctgacttagaggggaaagatatccaaaccggctttgcaggcccttctgaggccgaatccacacacctggataccaagaagcctggctataacgagatccccgaaagggaggagaatgggggtaacacaataggcacccgggacgagaccgccaaggaggcagacgccgtagatgtctctctcgttgagggctctaacgacatcatgggttcaaccaatttcaaggagctgccgggacgagaggggaatagagtggacgctggatcacaaaacgcccatcagggaaaggtggaattccactacccgccagctccttctaaagagaagcggaaggagggcagctcagacgcagccgaatctacaaattacaatgagattcctaaaaatggcaagggctccacgagaaagggcgtcgatcactccaaccgaaaccaggcaaccctgaacgagaagcagcggttccccagcaaagggaagtctcagggtctgcctatcccctcccggggactggataacgaaatcaagaacgagatggatagttttaacggtccaagtcatgagaacattatcactcacggcaggaaataccactacgtccctcaccggcaaaacaactcaactcgaaataagggcatgccacagggcaagggctcgtgggggaggcagcctcattcgaatagacggttttcaagcaggaggcgtgatgactcaagcgaatcaagcgacagcgggtcgtcttcggagtctgacggcgactag

SEQ ID NO: 229725 - DNA, 1239 bp, synthetic construct
  misc_feature 1..1239: note = Description of Artificial Sequence: Synthetic coding sequence
  source 1..1239: mol_type = other DNA
atgagtatttaccccaaaagcacaggaaataagggatttgaagatggtgacgatgcgattagcaagttacatgaccaggaagagtatggggctgctctgatacggaataatatgcagcatatcatggggccagtcacagctattaaactgctcggcgaagagaataaagagaataccccgcgaaatgtgttgaatatcattcccgctagtatgaattatgcgaaagctcattccaaagataagaagaaacctcaacgcgactctcaggctcaaaaatccccagttaaaagcaagtccacccaccgtattcagcataatatagattacctgaaacacctctcaaaagtcaagaaaatccccagtgacttcgaaggctctggttataccgacctgcaggaaagaggggacaacgatatatcgcctttctccggagacggccaaccattcaaggacatacccggtaaaggcgaagccaccgggccagacttagagggcaaggatatacaaaccgggttcgccggacccagcgaggcggaaagtacccacttggatactaaaaagccgggatacaacgaaatccccgagagggaggagaacggcggaaacaccataggtacccgagatgagaccgccaaggaagcagatgccgtggacgtgtcgctggtggagggatccaatgatatcatgggcagcacaaattttaaggagcttcccggaagagaggggaatagagtagacgcgggatcccagaatgcgcatcaggggaaggtagagttccactatccccctgcaccatctaaggaaaagagaaaagagggcagctcagatgccgcagaaagtactaattataatgagatccctaaaaacgggaaaggcagcacacggaagggagtcgatcattccaatagaaatcaagcaacgctcaacgagaaacagagatttccgagcaagggcaaatcacagggccttccaatccctagcaggggcctcgataacgagataaaaaacgagatggactcctttaatggccctagccatgaaaacattataacacacggtcgcaagtaccattacgtgccacacaggcagaacaactctacgcgcaacaaaggcatgccccaaggtaaaggcagttggggccgtcagccacattcaaatcgacgcttttcttctcgccgacgggacgacagcagcgagagttctgacagtgggagtagtagtgaatctgacggggactag

SEQ ID NO: 229726 - DNA, 312 bp, synthetic construct
  misc_feature 1..312: note = Description of Artificial Sequence: Synthetic coding sequence
  source 1..312: mol_type = other DNA
atgaaatcccttatactgctggctatactggccgcattggctgttgtgacgctctgctacgagtctcatgaatccatggagagttacgagctgaacccattcattaatcgcaggaacgcgaatactttcatttccccacaacaacggtggcgcgctaaggtccaggagcggattcgggaacgtagtaagcccgtacatgaacttaacagggaggcatgtgatgactaccgcttgtgcgaacggtacgccatggtgtacggatataatgctgcctacaatcgctatttccggaaacgaaggggtacaaaatag

SEQ ID NO: 229727 - DNA, 945 bp, synthetic construct
  misc_feature 1..945: note = Description of Artificial Sequence: Synthetic coding sequence
  source 1..945: mol_type = other DNA
atgggcccactcatcaaccggtgtaaaaagatcctcctgcccaccaccgtgccacctgctactatgcgaatttggctcctcggaggactgctgccttttctcctgctgctttccggcctgcagagacctactgaagggtctgaagtagccataaaaatcgacttcgacttcgccccaggctctttcgacgaccagtatcagggctgcagcaagcaggtcatggagaagctgacgcaaggcgactatttcactaaggatattgaagcccagaagaattactttaggatgtggcagaaggcccacttggcatggctcaatcaggggaaggtcctgcctcagaatatgacaacaacgcatgccgttgcaatcttgttttatacactgaactccaatgtgcacagtgactttacccgggctatggctagtgtcgcccgaaccccacagcaatacgagcgaagttttcactttaaataccttcattactatctgacttctgctattcagttacttcgcaaagactcaatcatggaaaacggaacactctgttatgaggtgcactaccggactaaggacgttcacttcaatgcttacacaggtgccacaataagattcggccaattcctgagtacatccttactgaaagaagaggcacaggagtttggcaatcagacgctcttcaccatctttacctgtctcggggcacccgtccagtactttagcttaaagaaagaggtactcatcccaccctacgagctatttaaggtaattaacatgagctaccaccctcgcggtgattggctacaactgagatctaccggaaatctgagcacctacaattgccagctgctgaaggcgtcttcaaagaagtgtattccggaccctattgccatcgcttctctatccttcttaaccagcgtcatcatcttctctaagtctcgcgtttag

SEQ ID NO: 229728 - DNA, 1749 bp, synthetic construct
  misc_feature 1..1749: note = Description of Artificial Sequence: Synthetic coding sequence
  source 1..1749: mol_type = other DNA
atgagcatcgagaccttgttggaggcagccagattcctggagtggcaggcccagcagcaacagagggccagagaggaacaagagagactgcgactcgagcaggaacgagagcaagaacagaagaaagccaactccctggcgcgactcgcccataccctgcctgttgaggagcccagaatggaagctccccctctcccattgagtccaccagcccctccgcctgctcccccacctcctctggcaaccccagcgccactgaccgtgatcccaatcccagttgtgaccaacagccctcagcctttaccacccccacccccactgccggcagccgcacaacctctgcccttggcacctcgccagccagctttggtgggtgcccctggcctatctattaaggagcctgctccgctgccttcccgccctcaggtgcccactcctgctccattgctgccggactccaaagccactattccccctaacggaagtcctaaacccctgcagcccctcccaactcctgttctgactattgctccacatcccggtgtccagccacaactcgctcctcaacaacccccacctcccacattgggaacgcttaagttggcccctgccgaggaagtgaagtcatctgagcagaagaagaggcccggtggcatcggtactagggaagttcataataaattagaaaaaaatcgcagggcccacttgaaggagtgctttgaaaccctcaaaagaaacatccctaacgtagatgataagaaaacaagcaacttgtctgtgctccgaactgccctccgctacatccagtcactaaagcgaaaagagaaagagtacgaacatgagatggaaaggctggccagagagaaaatcgcaactcagcaaaggctggcggagctcaagcacgagctctcacagtggatggatgtcctcgagatcgatagggttctccgacaaacgggacagcctgaggatgatcaggcgtctacctctacagctagcgagggcgaggacaatatcgacgaggacatggaagaggatcgggcaggtttggggccacccaagttatcccatcgcccacaaccggagctgttgaaaagtacattgcccccacccagcactactccagccccattgccgcctcacccacaccctcaccctcatagcgtggctctgccccctgctcacctccctgtccaacagcaacagccacagcagaaaacccctctgccagctcccccacccccacctgccgctcctgctcagaccctcgtccccgctcccgcacacttagtggccacagcgggtggcggtagtactgtgattgcccacacagcaactacacacgccagcgtgattcagactgtgaatcatgtgttgcaggggccagggggaaagcacatcgcacacattgccccatcggccccttctccggcagtgcagctggcaccagcaacgcctccgataggccacatcaccgtgcatcctgcaacactgaaccatgtggcgcacctgggttcacagctgccactgtatccccagcccgtggccgtgtcccatatagcccacacattgtctcaccaacaggtgaacggcacagctgggctaggtcctcccgctaccgtgatggcaaagccagccgtgggcgcacaggtagtacatcacccacaattagtagggcaaactgttttgaacccggtgacaatggtaactatgccctcatttcctgtctctaccctcaagctggcctag

SEQ ID NO: 229729 - DNA, 1749 bp, synthetic construct
  misc_feature 1..1749: note = Description of Artificial Sequence: Synthetic coding sequence
  source 1..1749: mol_type = other DNA
atgtccatcgaaaccctgcttgaggcagcacgctttctggagtggcaggcacagcagcagcaaagggccagagaggagcaggagaggctaagactggagcaagagagagagcaggaacagaaaaaggcgaactctctcgccagactcgctcacactcttcccgtggaggagcccagaatggaggcgcctccgctgcctctgagtccgccagctcctccccctgcaccacccccacctctggccacaccagctcccctcaccgtcatacccatcccagtggtcaccaatagtccacaacctctcccgccacctccaccactccccgcagccgcacagcccctacccctcgcccctaggcaacccgcactggtcggagcgccagggctatcaataaaagaaccagccccactgccttcccggcctcaggtacctacacccgcacctttgcttcccgactcaaaagctaccatcccaccaaacggctcaccgaaacctcttcagcctcttccgacgcccgttctgaccatagctcctcaccccggtgtgcaacctcagcttgcgccacagcagcccccacctcctactttgggcaccttaaagctagcacccgctgaggaggtgaaaagcagtgaacagaaaaaacgccctggaggtatcggcaccagagaagtacataacaagctcgagaaaaacaggagggctcacttaaaagaatgctttgaaacattaaaaaggaacatccctaacgtagacgacaagaagacatctaatctgtctgtcctgagaactgctttgcgctatatccagagcctcaaacgcaaagagaaggaatacgagcacgagatggagagactggcacgtgaaaaaatcgccactcagcagaggcttgcggaacttaagcacgagcttagccagtggatggacgtcctcgagatagacagagtcctgaggcaaaccggacagcccgaagatgatcaagccagtacgtccacagcttctgagggtgaagataatatcgacgaagatatggaggaggacagagctggtctcggccctccgaaactgtcgcatagaccgcagccagagctgttgaaaagtaccctccctcctccatcgactacgcctgcccctctccctccgcatccacacccgcaccctcattctgtggcactgcctcccgcacacctgccagtgcaacagcaacaacctcaacaaaaaactccattgccggcaccgcctccgccaccagccgcaccagcccagacattggtgcccgcaccagcccacttggttgcaaccgctgggggtggatccactgttatcgctcatactgctaccacacatgccagcgtgattcaaactgtcaatcatgttctccagggcccagggggaaagcacattgctcatattgcccctagcgccccatcacctgccgtccaactcgccccagcgaccccacctatcggacacattaccgtgcacccagcgacacttaaccacgtcgcgcacctgggctcacagctccctttgtatccccagcctgtggcggtgtcccatattgctcacactctatcacaccagcaggtcaacggaacggcagggttgggcccacccgcaactgtgatggcaaagcctgctgtgggggctcaagtggtccaccacccccagctggtcggtcagaccgttctgaatccggtgaccatggtgaccatgccctccttccccgtgagtacacttaagctggcctag

SEQ ID NO: 229730 - DNA, 594 bp, synthetic construct
  misc_feature 1..594: note = Description of Artificial Sequence: Synthetic coding sequence
  source 1..594: mol_type = other DNA
atggaaccgctggcatcgaatatacaggtgctgcttcaagcggcagaatttctggaaaggagagaacgggaggctgagcatgggtacgccagcctgtgcccacaccgatcccccggtcccatccaccgtcggaaaaagcggccacctcaggctcccggtgctcaggatagcggacgctggcgcgcacagctgaaaagatgccttgagagactaaagcagcaaatgccattgggagcagactgcgctcggtacactactctgagtcttttgcgacgggctagaatgcatatccagaaactggaggatcaggaacaacgcgcaaggcagctcaaggagaggttgcggtctaagcagcaaagcctgcagagacagctggaacagctgcgcggtctggctggggctgccgaaagagagaggttgcgggctgactcactggatagctcaggtctgtcaagcgagcggtctgattccgaccaggaggaactcgaggtggatgtggaatcacttgtctttggcggagaggccgagctgctgcgtggcttcgtggcaggacaggaacactcttattcacacggcggaggggcttggctttag

SEQ ID NO: 229731 - DNA, 1167 bp, synthetic construct
  misc_feature 1..1167: note = Description of Artificial Sequence: Synthetic coding sequence
  source 1..1167: mol_type = other DNA
atggaacccctagcttcaaatattcaagtgctcctgcaggcagcagagttcctagaaagacgcgaaagggaagccgagcatggctatgctagcttatgcccacacaggtcccccggacccattcatagaagaaaaaagcggcctccccaggctccgggagcgcaggattctggaaggtccgtgcataacgaactggaaaagcgacgcagagctcaactgaagcgctgcctggagaggctgaagcagcagatgccactgggcgcagactgtgcccgttacacaacactatccctgctgcggagggcacgaatgcatattcagaaactcgaggaccaggaacagcgcgcacggcagcttaaagagcgactacgttctaaacagcagtcactgcagcggcagttagaacaactgaggggcttggccggagcagccgaacgagagagattgcgggcagactcccttgactcgagcggactgtcctctgagcggtccgattcagaccaaggagagtgccctgaggccgagggattgtgtggacctcgcggtgagccaggtctccttacaggaccgttacccgctcagaggtcctggaggtggatgtggagggcttggtgcctgggcgtcaggccatcttgttgtggagcctcttcacctgctaggagtacagccacccgtacggccgctgccccagggtacgacgttccccaccccggaagggcttccgccctctattcttgtcaggcccaccttccaggacgttccccgcctcaagcttttagggctgccagaagccatcttctggagtggacaaaacgaactctcgtctgggagcaggttcttcctaaacacccggctgcaggctgccaggccggtcctctggaaggcaagggccaggattcatcggggccaccatggacacccgctggacaggccgcatgggcacgagcgcaagcctttggtagtgctgcacccaaggggacgggttccctactggggttattcccctcctggactaggcccccagcttttgctagccacaaactctattctatttttatcaagtcactgtttcacaatttcccctccatcgtgttgcctaatgagaacggaggcactcccaatcacaggccaacaggcagaggcaacaacatatcgtcgcaccattag

SEQ ID NO: 229732 - DNA, 582 bp, synthetic construct
  misc_feature 1..582: note = Description of Artificial Sequence: Synthetic coding sequence
  source 1..582: mol_type = other DNA
atggagcccctggcatctaatattcaggttttgctgcaggcagccgagtttctcgagcggagagagagggaggccgagcatgggtacgccagcctgtgccctcataggtcccccggacctatccacaggcggaagaagaggccccctcaggcaccaggcgctcaggattctggaagaagcgtgcataacgaactggaaaaacggaggagagcccaattaaaacgatgcctcgagagacttaaacaacagatgccactgggggctgattgcgccagatacactaccctctctcttctcaggagggctaggatgcacatacagaagctggaggatcaagagcaaagagcaaggcagctgaaagagcgactgcgatcaaaacagcagagcttacagagacagttggaacagctgcgcggattggccggagccgctgaaagggagcggctccgagccgactcgttggactcaagtggcctttcttcggaaaggtcagatagcgatcaggtgctgccaaacgagaatgggggtactcccaatcacaggcctacgggcaggggtaacaacataagttcccatcattag

SEQ ID NO: 229733 - DNA, 621 bp, synthetic construct
  misc_feature 1..621: note = Description of Artificial Sequence: Synthetic coding sequence
  source 1..621: mol_type = other DNA
atggaacctctcgctagcaacatccaggtgctgcttcaggccgctgaatttttggagcgaagagagcgcgaggctgagcatggctacgccagcctatgcccccacaggagtccgggtccaatacatcgacgaaagaaacgcccacctcaggctcccggagctcaggattctggccgtagcgtgcataatgaactggagaagcgcagacgtgcccagttgaaaaggtgtctcgagaggctgaaacagcagatgcccctgggggctgactgcgcgaggtatacgacactcagtctgctgaggagggccagaatgcatatacagaagctcgaagatcaggaacaacgcgctcggcagttaaaggagcgtttgcggagtaagcaacagtccctgcagagacagctggaacagttaaggggactggcaggcgcagcagagcgcgaacggctcagagcagattcattggacagctcagggcttagctctgagaggtctgatagtgaccaggaggagctggaggtcgacgttgagagcctcgtgttcggcggagaagctgaacttctgagaggttttgtggccggacaggagcactcctattctcacggagggggtgcctggctgtag

SEQ ID NO: 229734 - DNA, 621 bp, synthetic construct
  misc_feature 1..621: note = Description of Artificial Sequence: Synthetic coding sequence
  source 1..621: mol_type = other DNA
atggaaccactggccagcaacatccaggtccttttgcaagcagccgagttcctggagagaagggagcgggaggctgagcatggttatgcatcgctctgcccccatcgctcaccaggaccaattcatcggagaaagaaaagaccaccacaggcaccgggagcccaggattcaggccgatccgtgcacaacgagctggaaaagcgaagaagggctcaactgaagaggtgtctggagaggctcaagcaacaaatgccactcggggcagattgcgctcgatacaccacattgagtttgctgaggagggccaggatgcatatccagaagcttgaagatcaagagcagcgggctagacaactcaaagagcggctgaggtccaaacagcagtctctacagaggcagctggagcagctgcgtggcttagccggagctgccgaacgagaaagattaagggctgatagcctcgacagttcaggcctaagttcggagaggtccgacagcgaccaagaggagctggaggttgatgtggagagcctagtcttcggaggggaggccgagctgctgaggggtttcgttgcaggccaggagcactcttacagccatggaggaggggcttggctgtag

SEQ ID NO: 229735 - DNA, 768 bp, synthetic construct
  misc_feature 1..768: note = Description of Artificial Sequence: Synthetic coding sequence
  source 1..768: mol_type = other DNA
atgatacaggccatacaagttctcaggttccatcttctcgaactggaaaaagtacatgagttatgcgataacttttgccaccgttacatctcatgtttgaaggggaagatgcccattgacttggtcattgacgagcgcgacggatcctctaagtcagaccatgaggaattgagtggatcaagtaccaaccttgctgatcataaccccagcagctggcgcgatcacgatgacgcgacgagcacccactctgccggaacccctggcccaagctccggaggccacgcatctcagagtggcgacaactctagtgagcagggagacgggctggacaactcagtagcctcaccaggcacaggagatgacgacgaccccgacaaggacaaaaaacggcaaaagaagcgaggaatcttcccaaaggtagctaccaatattatgcgggcttggttattccagcacctgacgcacccgtacccgagcgaggaacagaaaaaacaacttgcgcaggacactgggctcaccatcctccaggtaaacaattggttcattaatgctcggcgaagaatcgtgcagcccatgatcgatcaatcaaaccgagccggtttcttgctcgacccttccgttagccagggcgctgcatacagcccagagggacagccgatgggctccttcgttcttgatggacaacagcatatgggaataaggccggcaggaccaatgtccgggatgggaatgaatatgggaatggatggtcagtggcattacatgtag

SEQ ID NO: 229736 - DNA, 9080 bp, synthetic construct
  misc_feature 1..9080: note = Description of Artificial Sequence: Synthetic coding sequence
  source 1..9080: mol_type = other DNA
atggaagaaaagcagcagattattttagctaatcaggatgggggaacggtggccggagccgcacctacattcttcgtgattcttaagcaaccaggcaatggcaaaacggaccaaggaattctggtcaccaatcaggatgcttgtgcgctcgcctcaagcgtgagtagtcccgtgaagtccaaaggaaagatttgtctacctgctgattgcaccgtggggggtattaccgtaactttggacaataactcgatgtggaacgagttctatcaccgaagcactgagatgatcctgactaaacagggaagaagaatgttcccttattgccgctattggattaccggactggactctaatctcaaatacatcctcgtcatggatatcagtccagtggacaatcaccgttacaagtggaatggccgttggtgggagccaagcgggaaagccgagcctcacgtgctgggaagggtcttcattcatcccgaatccccaagtaccggacactattggatgcaccagcccgtgagcttctataaattgaaactgaccaacaatactctggaccaagagggacacattattctgcactctatgcatagatatcttccaaggctgcacctggtgcccgcagagaaggccgtcgaggtgatccagctgaacggcccaggcgttcataccttcacctttccacagactgaatttttcgctgttactgcctaccagaacattcagattacccagctcaagatcgactataacccattcgctaaggggttccgagacgatggtctgaacaacaagccccaacgcgatgggaagcaaaaaaacagctctgaccaggaaggtaataacatctcctcatctagcgggcaccgtgtccgtctgaccgaaggccaggggagcgaaatacagccaggagatctggaccccctatcccggggacacgagacgagcggaaaaggcctcgaaaaaactagcttaaacataaagcgggatttcttagggtttatggatacggattccgctttgtcagaggttccccaactgaagcaagaaattagcgaatgccttatagcatcgtcattcgaggatgattcgagagtagcatcccctctggatcagaatggatccttcaatgtggtcatcaaagaggaaccactggacgattacgactatgagctcggcgagtgtcccgagggtgtgacagttaagcaggaggagacggacgaagaaacagatgtctacagcaacagcgacgacgacccgattctggagaagcagctaaaacgccacaataaggtggacaacccagaagcagaccatttgagtagcaagtggctccccagcagcccgagcggggttgccaaggccaaaatgtttaagcttgacacgggaaaaatgcccgtcgtgtacctggaaccttgtgccgtaacaaggagtaccgtcaagatttctgagctccctgataatatgctgagcacaagcaggaaggacaagagttcgatgctagctgagctagagtatctgcccacatacatcgaaaattctaacgaaacagctttttgtcttgggaaagagtccgagaacggactgcgcaaacatagcccagatcttcgagttgtgcaaaagtatcctctgctcaaagagccccaatggaagtaccctgacatttctgacagtatttccactgagcgcattttggatgacagtaaggatagcgtgggggatagcctgagtggcaaagaagaccttgggagaaagaggacaactatgctgaaaattgctactgctgcgaaggtcgtgaacgctaaccaaaatgccagcccaaacgtgcccggaaaaaggggaagacccaggaagctgaagttatgtaaggccggacggccaccgaagaatacaggaaagtctctgatctcaacaaagaatactcctgtatcccccggaagtacttttccagatgtgaaacccgacctggaagacgtcgacggagtgctcttcgtgtcgttcgaatccaaagaggccctcgacattcacgctgtggatgggacaaccgaggagagcagttctcttcaggcctcaaccacaaacgatagtggataccgagcccgtatttcacagctggaaaaagaactgatcgaggacttgaagactctgaggcacaagcaggtaatccatccgggtctgcaggaagtcgggttaaaattgaattcggtggaccctacaatgagcattgatttaaagtacttaggcgtgcagctccctcttgcccctgcgactagctttccattttggaacctgacaggcaccaaccccgcaagtcccgacgcaggcttcccttttgtcagcaggacaggcaaaaccaatgactttacaaagatcaaagggtggcgcggtaagtttcactctgccagcgccagtaggaacgagggcggaaacagcgaatcttcgctgaaaaataggtccgcgttctgctccgataaacttgatgaatacctagagaatgaaggaaaactcatggagacctctatgggcttttcatcaaacgcaccaacgagtccggttgtttatcaacttcctaccaagtctacttcctacgtgaggaccctggattcggttttgaaaaaacagagcaccatctcaccaagcacctcatattccttgaaaccccacagtgtccctcccgtcagcaggaaggctaagtcacagaatcgtcaggcgaccttttccggccgaacaaagagcagctataagagcatcctaccttaccccgtttctcccaaacagaaatatagtcacgtgattctcggcgacaaagttactaaaaattcctcaggtattatatccgagaaccaagccaataacttcgtcgtaccaaccttggacgaaaacattttcccaaagcaaatttccctccgacaagctcagcaacagcagcaacagcagcagggctctcggccacctggccttagtaaaagccaagtgaaacttatggacctcgaagactgcgctctctgggaagggaagcctcgcacatacatcacagaggagagggccgacgtgagtcttacaacacttcttacggcacaagctagcctgaagacaaaacccattcatactatcataaggaagcgggctcctccttgtaataacgacttttgtcggctcggatgcgtgtgctcatctctcgcgctggagaaaagacaaccagcccactgcaggaggccagactgtatgttcggttgcacatgcttgaagcgtaaagttgtgcttgtgaaaggaggaagcaagaccaagcacttccagcgaaaagccgcacaccgcgaccccgtattttacgatacgttaggagaagaggcaagggaggaagaggaagggatccgagaagaggaggagcagctgaaagagaagaaaaaaaggaagaagttggagtacaccatctgtgaaaccgaacctgagcagcctgtccgacactatcccctgtgggttaaggttgaaggcgaagtggaccctgagccggtgtatatccccacacccagcgtgatcgaacccatgaaaccacttctactcccacaaccagaggttctgtcacctacagttaaaggaaagctgctgacggggattaaaagtcctaggtcttatacccctaaacccaaccctgtgatccgggaggaggataaggaccccgtgtatctgtacttcgagtccatgatgacctgcgcacgggtgcgcgtgtacgaaaggaagaaggaggatcaaaggcagccatctagttccagttcaccctcaccctcctttcagcagcagactagttgtcattcaagtccggagaaccacaataacgcaaaggagccagattctgagcagcagcctctgaagcagcttacctgtgacctggaagatgatagtgacaaactccaggaaaagtcctggaagtccagctgtaacgagggtgaatcatctagtacatcctacatgcatcagagaagtcctggtgggcctaccaagttaatcgagatcattagcgattgcaactgggaagaggatcgcaacaagattttgagtattctttctcagcacattaatagcaacatgccccagtcgctgaaagtgggaagcttcattattgagctggcctcccagcgtaagagcagaggcgagaagaacccacctgtgtacagttcccgcgtcaagatttcaatgccaagctgccaggaccaggacgatatggctgagaaatccggtagcgagacaccagatgggcctttgagccccggtaagatggaggacatatcgcccgtccagactgacgccctggactccgtgagagagaggctgcacgggggtaaggggctccctttttatgccggtctcagcccggctggtaaactggtcgcctacaagagaaagccctctagtagtacttctgggctgattcaggtggccagcaatgccaaggtggctgcatctcgtaagccacgcacactgctgccttctacaagcaactcgaaaatggccagctctagcggaacagcaaccaataggcccggaaagaatttgaaagcgtttgtacccgctaagcgtccgatcgccgctagaccttcgcctggcggagtattcacccaattcgtgatgtctaaggtcggcgcactccagcagaagatcccgggtgtctccaccccccaaaccctcgcaggtacgcaaaagtttagcattaggccatcgcctgtgatggtggtcacccccgtggtctcctctgaaccggtacaggtatgctcccccgtgactgccgctgtgaccacaacaacacctcaagtctttttggagaacaccactgccgtcacccccatgaccgcaatcagcgacgtcgagaccaaagagacaacatactcctctggtgccacaacaactggcgtggtggaagtgagtgagaccaacacttctacatctgtcactagtacccagagtaccgccactgtgaacctgacgaaaaccacgggcataactacccctgtggctagcgttgcctttcctaagagcctggttgcctcaccttccacaattaccctgcccgttgcgtccactgcttctacgtccttggttgttgtgactgccgctgcctccagcagcatggtgacgaccccaacttccagtctggggagcgttcccatcattctgtcagggattaatgggagccctccagttagccagaggcctgaaaacgcagcacagatcccggtcgccactccgcaggttagcccaaacacagtcaagcgagccggtcccagactcttacaccctaatggccagattgtgcagctcttgcccctccatcaactacgaggctccaatacacagcctaacttacagcccgtaatgtttagaaaccccggaagcgtgatgggtatccgcctgcctgcacctagcaaaccatctgaaacacctccaagtagtacatcatcatcagctttcagtgtcatgaatcctgtgatacaggcagtgggatccagttctgcggtcaatgttatcactcaagccccatccctgttatcttctggtgcttcttttgttagtcaggccggaaccctcaccctgagaatatcgccccctgagccccagtcattcgccagcaaaaccggctctgagaccaagattacatacagttccggaggacaaccagtgggtacggcctctcttatccctttgcagagcgggtcatttgctctgttgcaactccctggtcagaagcccgttcccagctcaattctacagcatgtcgcgagtcttcagatgaagagagaatcccagaatcctgatcagaaggatgaaaccaactctatcaaacgcgagcaagagaccaagaaggtgctgcaatccgaaggagaggcagtcgaccccgaggcaaacgtgattaagcagaactcaggggctgcaaccagcgaggagactctgaacgatagcctggaggataggggcgaccacttggatgaggagtgcctgcctgaggaaggctgtgcgactgtgaagccctcagagcatagctgcattactgggagtcataccgatcaagactacaaagatgtgaatgaggaatatggagccaggaatcgaaaaagctctaaggaaaaagtggctgtgcttgaagttcgaaccatctcagagaaggcctcaaacaagacagtgcaaaatctttcaaaggtgcaacatcaaaagctgggggatgttaaggtggaacaacagaaggggttcgacaaccctgaagagaactcatctgaattccctgtcactttcaaggaggaaagcaaattcgagctgagcgggagcaaagtgatggagcagcagtccaacctgcagcctgaagcaaaagagaaagagtgtggcgactctctggagaaggacagagaacgatggaggaagcacctgaaaggcccattgactcgcaaatgcgtgggggcaagtcaggaatgcaagaaagaagccgacgaacagctgatcaaggaaacaaagacctgtcaggaaaactccgatgttttccagcaggaacagggcatctctgatctgctgggaaaatccgggatcacagaggatgcacgcgtcttgaaaacggaatgtgactcctggagcagaatcagcaatccttctgctttctccatcgtaccacgaagagccgctaaatcgtctcggggtaatgggcacttccagggtcacctcctgttgccaggcgagcagatccagccaaaacaggaaaagaaggggggtcgcagtagcgccgattttaccgttctcgatttagaagaggatgatgaagacgataacgaaaagactgacgattcaattgacgagattgttgatgtggtcagcgactaccagtccgaggaggttgacgatgtggagaaaaataactgtgtggaatacatagaagacgacgaagagcatgttgatattgaaaccgttgaggagctgtctgaggagatcaacgttgctcacctcaaaaccaccgcggctcacacacagtctttcaagcaaccaagctgtacgcatattagtgccgatgaaaaggctgccgagaggagcaggaaggcccctcccataccgctgaaactaaaacctgattattggtctgacaagctacagaaggaagctgaagctttcgcctattataggagaacccatacagcaaatgaacgcagaagaaggggagagatgcgagacctatttgagaagctcaaaatcacgctcggattactgcacagctccaaggtgtcaaaaagtctgattctgactcgtgctttctcggaaatccagggattgactgatcaagccgacaagctgatcggccagaagaatctgcttacccggaagcggaacatcctcatccggaaagtgtcttctctgtccgggaagacagaggaggtcgtgctaaagaagctggagtacatatatgccaagcagcaggcgttagaagcccagaaacggaagaaaaagatgggcagtgacgagttcgatatctccccacgtatctcaaaacaacaagaaggcagctctgcctcatcggttgacttaggacagatgttcatcaataatagaagaggaaagcccctgattctaagccgcaagaaggatcaggccactgagaatacatcgccactcaacactccacatacctccgctaatcttgtaatgaccccccagggccagttgctgactctaaagggaccattattcagcgggcctgttgtagctgtgtcccccgatctgttggagtccgatctcaagccacaggtggctggctccgccgttgcccttcctgaaaacgacgacctgttcatgatgccaagaatcgtcaacgtgacgagtcttgccactgagggtgggttggttgatatgggcggttcaaaatatccacatgaggtccctgatagcaaaccctccgaccacctcaaggatacagtccggaatgaagataacagtcttgaggataaggggaggatctcctctcgcggtaacagggatggaagggtgaccctcggccctacacaggtgttcctggccaacaaagactctggatacccacagatcgtggatgtgtcaaatatgcaaaaggctcaggaattcctgcctaagaagatctcgggagacatgaggggcatccagtataaatggaaggagtccgaatcccggggagaacgggtcaaaagcaaagattcgtctttccataaactgaaaatgaaagacctaaaagacagcagcatcgagatggagctgcgtaaggtgacctcagcaatagaggaggcggcactcgattcttccgaattgcttacaaacatggaagatgaagacgacacggacgagaccttgactagcctgcttaacgaaatagccttcttaaatcagcaactgaacgatgacagcgtcggccttgcagagttgccgagtagtatggacaccgaattcccgggtgatgccaggcgggcttttatatctaaggtccccccaggctcccgcgctacattccaagtggagcatctgggtaccggcctaaaagagctcccggacgtgcagggggagtccgattctatcagcccactgctcctccatctggaggatgacgatttttcggagaacgaaaaacaattggctgaacctgcctccgaaccagatgtgctgaagatagtgatcgactctgagattaaggactcactgctctctaataaaaaagccatcgacggcggtaaaaatacctctggcctgcccgctgagcctgagagcgtgtcttctccacccactctccatatgaaaacgggcctggagaattcaaacagcactgatacactgtggaggcccatgccgaagctggcccctctgggcctgaaggtcgctaatcccagctcagacgccgacggccagagcctcaaagtgatgccatgcctcgctccgattgctgctaaagtcggatccgtgggtcacaagatgaacttgaccggtaatgatcaggagggtagagagtccaaggtcatgcccactctggccccagtcgtggcgaaactgggcaacagtggtgcctcacccagcagtgccggtaaata

SEQ ID NO: 229737 - DNA, 8570 bp, synthetic construct
  misc_feature 1..8570: note = Description of Artificial Sequence: Synthetic coding sequence
  source 1..8570: mol_type = other DNA
atggaggagaagcagcaaatcatcttagccaatcaggacggcggtaccgtggccggtgcggctcccaccttcttcgtgatactcaagcagcctggcaatggaaaaactgatcaggggatcctggtgacaaaccaagatgcctgtgccctggcctccagcgttagttcccctgtcaagtcaaaggggaagatctgtctgccagccgactgcactgtcgggggtataacagttacactggacaataattctatgtggaacgaattttaccaccgctctacagagatgatcttaacaaagcagggacgaagaatgttcccttattgcagatactggatcaccggactggattctaatctgaagtacattctcgttatggacattagtcccgtagataatcatcgatacaaatggaatggcagatggtgggaaccatcagggaaagcagaaccccacgtcctcggtcgagtgtttattcacccagagtcgccaagcacaggccactactggatgcaccaacctgtctccttctacaagctgaagcttacaaataataccctggaccaggaggggcacatcatcctccactccatgcatcgttacctcccgaggttgcatctggttccggcagaaaaagctgtggaagtgatccagctcaatggcccaggagtgcacacattcactttcccccagacagaatttttcgccgtaactgcctaccaaaacatacagattactcaactgaaaatcgattacaatccatttgctaagggctttcgcgatgatggtcttaataacaagccccagagagacgggaagcaaaaaaactcatctgatcaggagggaaataatatcagttctagcagcgggcatagggtccgtctgacagagggccagggatctgagatccaaccaggggatctggaccctttgagtcgagggcatgagacctccgggaaagggttggaaaagacaagcctgaatataaagagagacttccttggtttcatggacaccgatagcgccttgtctgaagtgccacagctgaaacaggaaatttccgaatgtctgatcgcaagttccttcgaggacgactccagggtggccagtcccctggaccagaacggctccttcaacgtagtgattaaagaagaaccccttgacgattatgactacgaactgggggagtgcccagagggggtcacagtaaagcaggaggagacagatgaagagactgatgtgtatagtaactccgatgatgaccccatcctggagaagcaactgaaacgccacaacaaagtggataacccagaggccgaccacttgagctcaaagtggctgccatcttctccgagtggggtggctaaggccaagatgtttaagttagacacaggcaagatgcccgtggtttacctggagccatgcgccgtgaccaggagcacggtcaagattagtgaactacctgacaatatgctaagcacatctcgaaaggataaatctagcatgttggctgaactggagtacttgcccacctatatcgagaattcaaacgaaacagctttctgcctcggcaaggagagcgaaaatgggcttaggaagcacagcccagatttgcgcgttgttcagaagtacccattactgaaggagcctcagtggaaataccctgacatttcggattccatctctacagaacgaatactggacgattccaaagattctgttggtgactctctaagcggaaaagaggacctcggccgaaaaaggacaaccatgcttaaaatcgccactgcagcaaaggtcgtgaatgcgaatcaaaatgcatcccctaatgtgcctggaaaacgtggtagaccccgaaagctcaagttgtgtaaagccggtcgtcctcccaaaaataccgggaaaagcctcattagtacgaaaaacacccctgtgagtccgggatctacctttccagatgtcaagccggacctcgaggatgttgacggcgtattatttgtgtcttttgaatctaaggaagccctggatatacacgctgtagatggaactacagaggaatcttcctccctgcaggcttctaccaccaacgactctggctatagagctcgaatatctcagttggagaaagaactgattgaagacttgaaaacattgaggcacaagcaggtgatccaccctggcttgcaagaggtggggctgaagttgaactccgtggatccaacaatgtcaatcgaccttaaatacttgggcgtgcaattgccgcttgcccctgccactagctttcccttctggaacctcactggaacaaatcctgccagccccgacgcgggtttccctttcgtgtcacgtaccggtaaaactaatgacttcaccaaaatcaagggatggcgcggaaagttccacagcgcaagtgccagcagaaatgaaggcggaaacagtgagagcagtctcaagaacaggagtgccttttgcagcgacaagctggacgaatatttagagaatgaaggaaagctcatggaaacatctatggggttctcttccaacgcaccaacgtctccggtagtttatcagctgcctaccaagagtacctcctacgtcagaacgctggattcagttcttaagaagcagtcaacaatctcaccctccacttcttactctctgaagcctcacagcgtacctcctgtttcccgaaaggccaagtcacagaacagacaggcgacgttcagcggcaggaccaagagttcatataaatccatcctgccatatcccgtttcccctaaacagaagtactctcacgttatattaggggacaaggtcacaaagaactctagcgggatcatctcggagaaccaagccaataattttgtagttccaacacttgacgaaaatatcttccccaaacagattagcctccgacaagcccagcagcagcagcaacagcagcaggggtccaggccacctggactgagtaagagccaggttaagttaatggatttagaagattgcgccctttgggagggtaagcctcgaacctatatcactgaggaacgagccgatgtgagccttacaactttgctgacagcccaagcttccttgaagactaagcctatccataccattatccgaaaacgggctcctccatgcaacaacgacttctgccggcttggttgtgtatgttctagcctggctttagaaaagcgacagccagcccactgtcgtagacctgattgtatgtttggctgcacttgtctgaagagaaaggtggtgctcgtgaaaggaggttctaaaacaaagcactttcaacgtaaagccgcacacagagatccggtgttctacgacaccctaggcgaggaggcccgagaagaagaagaaggtattcgagaagaggaggagcagctgaaagagaagaagaaacgtaagaagttggagtatacgatttgcgagaccgagccagagcagccggtgagacactatccactgtgggtaaaagtggagggggaggtggaccctgagcctgtttatattcccacacctagcgtaattgaaccaatgaaacctttactgttaccccaacctgaagttctgtcacccacagtgaagggtaagctgctgaccggtattaagtcccctagatcttatactccgaaaccaaaccccgtaatccgggaagaggacaaggaccccgtgtacctgtactttgagagcatgatgacttgcgccagagtccgggtttacgagaggaagaaggaagaccaaagacagccttcatcgtccagtagcccgtcacctagctttcagcagcaaacttcctgccacagcagccccgagaaccacaataatgccaaagagcctgattccgaacagcagcctctcaaacagctgacctgtgatctagaggacgacagcgataagctgcaggagaaatcatggaaaagttcttgtaacgagggggaatcatcgagtacctcatatatgcatcagcgctcccctgggggaccaacaaagctgatagagatcatctcagattgtaattgggaggaagatcgtaacaaaatcctgagtatcctctcacagcatatcaatagcaatatgccacagtccttaaaagttggtagttttatcatcgagctggcttcccagcggaagagcaggggggaaaagaatcctcccgtgtactccagccgtgtgaaaatttctatgccgagttgtcaagaccaggacgacatggctgaaaagagtggctcagagaccccggatggcccattaagtccaggcaagatggaagatattagcccagtacagacagatgccctggactctgtgagagagcgattgcacggaggaaagggcctgcctttctatgccggtctgagtccagccggaaaattagtagcatacaaacggaagcccagcagttcgacttccggtcttattcaggtagcctctaacgcgaaagtcgccgcttcacgtaaacctcgcacactgctgcctagtaccagtaattccaaaatggccagctcttcgggtacagcgactaaccgccctggaaagaacctaaaagccttcgtacctgctaaacggccaattgagaatgctgctcagatcccagtggctacaccccaggtgagtcctaacacagtcaagcgcgctggccctaggttgctgttgattcccgtgcagcaaggctccccaacgctaaggccggtttctaatacccaactgcaggggcaccggatggtgctgcaacctgttaggagcccctcagggatgaacctatttcgtcaccccaatggccagatcgtgcagcttctgcccctgcatcagcttagaggttcaaacacccagccaaacttgcagcccgtgatgtttaggaatccaggaagcgtcatgggaatacgcctgcctgccccaagtaaacccagcgaaactccgccatcatccacctctagcagcgcattctctgttatgaatccagtgattcaggctgtgggctcgtcctccgcggtgaacgtgatcactcaggccccttccctgctgagctctggcgcttcctttgtttcccaggcaggtacgttgactttgcgaattagtccacctgagccacagtcattcgcatcgaagactggttctgaaaccaagatcacttattccagtggtgggcagccggtgggcactgctagccttatcccactgcagagtgggagctttgctttgctccagctcccgggtcaaaagcctgttcctagcagcatccttcagcatgtggccagcctgcagatgaagagagaatcacagaaccccgatcaaaaggatgaaacaaactctattaagagggagcaggaaacaaagaaggttctgcaatccgagggcgaagcagtcgacccagaagccaacgtcatcaagcagaactccggtgctgctacttcagaggagacactgaacgacagcttggaagatcggggtgatcacctagatgaggaatgcctccctgaagagggatgtgccactgtcaagccttcggagcactcttgtatcacaggtagccatacagatcaagattacaaggacgtgaatgaagagtacggtgccaggaatagaaaatcgtccaaggaaaaggtggctgtcctcgaggtacgcaccatttcagagaaggcttctaataaaacagtccagaacctcagtaaagtccagcatcagaagctcggggacgtgaaggttgaacagcagaaagggttcgataacccagaggaaaacagtagtgaattcccagtcactttcaaggaggaatctaagtttgagctatcaggcagtaaggtaatggaacagcaatccaacctgcaacccgaggccaaagagaaagagtgtggcgactcgttggagaaagacagagaacgctggcggaaacatttgaaagggcctcttacgagaaagtgcgtgggggctagccaagagtgtaaaaaggaggctgacgagcagctcatcaaggaaaccaagacttgccaggagaatagtgacgttttccagcaggagcagggcatctctgatcttctcggaaaatccggtataaccgaagacgccagagttctaaagaccgagtgcgactcctggagtagaatatctaatccctccgctttcagcattgtgcctcgcagggcggcaaaatcgtctaggggaaacgggcatttccaaggtcatctactgctgcccggagagcagatccagcctaagcaggaaaaaaagggaggacgttctagcgctgacttcacagtactggatttggaggaggacgatgaggacgacaacgaaaagactgacgactccatagatgaaatcgttgatgttgtcagcgattatcagtcagaagaggtcgacgatgtagagaagaacaattgcgtggaatacatagaggatgacgaagaacatgtagatatcgaaaccgtggaggaattgtctgaagaaataaatgtcgcacatctcaagacaaccgctgctcacacccagagttttaagcagccgtcctgcacacacatttcagcagacgagaaggcagccgaacgaagccgaaaggcaccccctattccactgaaactgaagcctgattactggagtgataaactccagaaagaagcagaggctttcgcatattatcgcaggacacacactgctaatgagagacgaagacgcggagaaatgagagacctctttgaaaaattgaagatcacattaggactattgcattcttccaaggtctcaaagtctctgattttgactcgagcattctccgagatccagggcctcacggaccaggctgataagctgataggccaaaaaaacctgcttacacgaaagcggaatatcctgattcgaaaggtttcatccctcagcggcaagaccgaagaagtcgttctgaagaagctggaatacatttatgcaaagcagcaagctttggaggcacagaaacgaaaaaagaagatgggctccgacgaatttgatatcagcccgcgaatctcgaagcagcaggagggcagcagtgccagctccgtggacctggggcagatgtttattaataatagacgaggtaagcctttgattctttctcgaaaaaaggatcaggcgactgaaaataccagcccgctgaacacgccgcacacttccgccaaccttgttatgaccccgcagggacagctgctcactctgaagggacccctgtttagtgggcctgtagtggccgtgtcacctgacttacttgagtctgacctcaagccccaggttgctgggtctgcagtggctctgcctgagaatgatgatctgttcatgatgccacgaatagtgaatgtgacatcgctcgctactgagggcggactcgtggacatgggtggtagcaagtacccccacgaggtccccgattccaaaccaagcgatcacctcaaggataccgtcaggaacgaggataattctctggaggacaagggaagaattagcagccgcggtaatcgtgacgggagggtcaccctgggaccaacccaagtgttcctggcaaacaaggatagtgggtaccctcagatcgtcgatgtgtcgaacatgcagaaagcccaggagttcctgccaaagaagatttccggcgacatgaggggaatccagtacaagtggaaggagtccgagtcgcgcggtgagcgagtcaagtccaaagacagcagcttccacaaactgaaaatgaaggacctaaaagattcctcgatcgaaatggagcttagaaaggtgactagcgctatcgaggaggccgcacttgattcctcagaactgctcacaaacatggaggacgaagatgacactgacgagaccctgaccagtcttctaaatgagatcgcctttcttaatcagcaactcaatgatgattctgtcggcctggcagaacttcctagttctatggatacagagtttcctggcgacgccagaagagcgtttatctctaaagttccacctggctcccgcgctacattccaggtggagcacctaggcaccggcctgaaagaacttcccgacgtccagggagagtctgattctatctccccactacttctccatctagaggatgatgatttctctgaaaatgaaaagcagctcgcagagccagcctctgaacccgacgttcttaagatcgtgattgactcagaaatcaaagatagcttgctctctaataagaaggccatcgacggcggaaagaacaccagcgggttgcctgccgagccagagtccgtgagtagcccacccacactacatatgaaaaccggcctggagaactccaactcaactgatacattatggcggccaatgccaaagctggccccattgggcctgaaagtagcaaaccccagttccgatgcagacgggcaaagtcttaaggtcatgccttgccttgctcctattgccgcaaaggtaggtagcgtgggccataagatgaacctgaccggcaacgaccaggaggggagagagagcaaagtcatgcctaccctggcccctgtggtggcaaagttagggaattcaggagctagcccttccagtgccggaaaata

SEQ ID NO: 229738 - DNA, 687 bp, synthetic construct
  misc_feature 1..687: note = Description of Artificial Sequence: Synthetic coding sequence
  source 1..687: mol_type = other DNA
atggagagagtgaagatgatcaatgtccagaggctgctcgaagcggcagagttcctggaacgcagagaaagagagtgtgagcacggttacgccagctcatttccttccatgcccagtccaaggttgcagcacagtaagccgccacggaggttatccagagcccaaaagcactcgtccggttccagtaacacatctaccgccaaccggagtacgcataacgagctggagaagaatcgacgtgcccaccttcgcctgtgcttagaacggttaaaagtcctcatccctttggggcctgactgcacgagacacaccactctaggactgctcaataaagctaaggcccatatcaaaaaacttgaggaggccgagaggaaatcccagcaccagctggaaaacctcgagcgcgagcaacggttcctgaagtggcgacttgagcagctgcaagggccacaagagatggagagaatccgcatggactccataggctccacaattagttctgatcgcagcgactctgagcgggaagagattgaagtggacgtggaatccactgaattctcccatggcgaggtggacaatattagcaccacttctatctctgacatcgacgaccactcctctttacctagtatcggttcagacgaaggatactcatctgcaagtgttaagctgtcatttacttcctag

SEQ ID NO: 229739 - DNA, 888 bp, synthetic construct
  misc_feature 1..888: note = Description of Artificial Sequence: Synthetic coding sequence
  source 1..888: mol_type = other DNA
atgggaaagagggggaggccgaggaaggaggcgcgttgcgagggggctggacttgctccggctgctccacccgctgtgccccctgcggtcgctgccccacagccccctgcactgcccgaagatcctgccggagcaaaaccccgttgtccatttagcgatatttttaatacctccgagaactccatggagaaacacattaacactttcttgcagaacgtccagattcttctggaggcagccagctatttggagcagatcgagaaagaaaataaaaagtgtgagcatggctacgccagttcctttccatccatgccttcccctagactgcaacacagcaagccacctcgccgactgagtagggcgcagaagcattcctcagggtcatccaacacatctactgcaaaccgaagcacccacaacgaactcgaaaaaaatagaagagctcatttacggctgtgccttgagcggctgaaggtcctaatcccgctcggacccgattgcaccaggcacacaacattgggcctgctgaacaaggccaaggcccacattaaaaaactagaagaagccgagaggaagagccagcatcagttagaaaaccttgaaagggaacagagattcctgaagtggaggctggaacagcttcagggaccccaggagatggagcggatcaggatggacagcattggttcgactatctcctctgatcgcagcgacagcgaacgcgaagagattgaagtagatgtggagtcaactgagttctcccacggagaggtagataatataagcactacctcgatatcggatattgatgatcactcttcattgccctctatcgggagcgatgaagggtatagctccgcaagcgtgaagctctcgtttactagctag

SEQ ID NO: 229740 - DNA, 549 bp, synthetic construct
  misc_feature 1..549: note = Description of Artificial Sequence: Synthetic coding sequence
  source 1..549: mol_type = other DNA
atgccgagccctagattgcagcattcaaaacctcctaggaggctttcccgtgcacagaaacacagctcgggatcaagcaatactagtacagctaacaggcgcgcacacctgcgcctctgcctggaaagacttaaagtgctcattcctttgggccctgactgcacccgtcacaccactctgggacttctgaataaagccaaggcacacatcaaaaagctagaggaggcggaacggaagtcccagcatcagctggaaaatctggaacgggagcagaggttcctgaagtggagactggagcagctccaaggtcctcaggagatggagcggattcgcatggattccatcggaagtacgatttcatctgacagatctgactcagaacgggaggagattgaggtggacgtggaatctactgagtttagccatggagaggttgataatatttccactacctcaatttcagatatcgatgatcacagctcgcttccttccatcggatctgatgaagggtactcttcggcaagtgtcaagctaagctttacttcatag

SEQ ID NO: 229741 - DNA, 579 bp, synthetic construct
  misc_feature 1..579: note = Description of Artificial Sequence: Synthetic coding sequence
  source 1..579: mol_type = other DNA
atgccgagtccgagactccaacactccaagcctccgcgaagattgtcacgcgctcagaagcattctagtgggtcttccaacacctcaaccgctaatcgctctacccataacgagctggagaagaacaggagagctcatctgagactgtgcttggagcgtctgaaagtacttattccgttgggccctgattgcacacgtcacactaccctgggtctgctcaacaaagccaaagcccacattaaaaagttggaggaggccgaacggaagtcccaacaccaactcgagaacctcgaacgggaacaaaggtttctgaagtggcgtttggagcagctgcaggggccacaagagatggagcgcatccgcatggattccatcgggtcgacgatctccagcgaccgttctgactccgagcgggaggaaatagaggtcgacgtggagtctacggagtttagccacggcgaggttgacaatatctctaccacgtctatttcagatattgacgatcatagttctcttccttcaatcggcagcgacgaggggtattcttctgcgtcagtgaagctgtcattcacgtcatag

SEQ ID NO: 229742 - DNA, 579 bp, synthetic construct
  misc_feature 1..579: note = Description of Artificial Sequence: Synthetic coding sequence
  source 1..579: mol_type = other DNA
atgccatccccacgattgcagcacagcaaaccccctcggcgactgagtagggcacagaagcattcatccggatccagcaacaccagcacagcaaatcggtcgacacacaacgagctcgaaaagaacaggagggctcacctgagactgtgtctcgagcggctcaaagttcttatcccactcggacccgactgtacgcgccacaccactctaggcctgttaaacaaagctaaggcgcatattaagaagcttgaggaagccgaaaggaaaagccagcatcagcttgagaatctcgagagggagcaaaggttcttaaaatggcgcctagagcagcttcagggccctcaggagatggagcgcatccgcatggattctatcggcagcaccatcagttccgaccggagcgactcggagcgagaggaaatagaggtcgacgttgagtctactgaattctcccacggagaagttgacaatatctccactacgtctattagtgatatcgacgatcattctagcctgccctccattggatccgacgagggatattcctctgcttctgtgaaactgtcttttacttcttag

SEQ ID NO: 229743 - DNA, 579 bp, synthetic construct
  misc_feature 1..579: note = Description of Artificial Sequence: Synthetic coding sequence
  source 1..579: mol_type = other DNA
atgccttctcctaggctgcaacacagcaagcctccgcgtaggctgagcagagcccagaaacatagcagtggcagttccaacacctccaccgccaatcgaagcacccacaacgaactggaaaagaatagacgcgctcacctgagactctgtctcgagcggctcaaggtcttgattccactcgggccagattgtaccagacatactactctcggattgctcaataaggcgaaggcacatatcaaaaagctggaggaagccgagagaaagtcacagcatcaactggagaacctggagagggagcagcggtttctgaaatggcgcctggaacagttgcaggggccacaggagatggaacgcattagaatggatagtatcggatcaaccatttccagtgaccgctcagacagtgaacgcgaggaaatagaagtggatgtggaatccaccgagttctctcacggggaagtggacaacatttcaacaacgtccatctccgatattgatgatcattcttctttgccctctattgggagcgatgaaggctactcaagcgccagcgtgaagttgtcatttacgagttag

SEQ ID NO: 229744 - DNA, 657 bp, synthetic construct
  misc_feature 1..657: note = Description of Artificial Sequence: Synthetic coding sequence
  source 1..657: mol_type = other DNA
atggaaagggtgaaaatgatcaatgtccagcgattgctggaagctgctgagttccttgaaagacgcgagagagagtgcgaacacgggtatgcctcctcgttcccgtcgatgccttctcccaggctgcaacacagcaaacccccacggagactgagccgggctcagaagcactctagcggttcttcaaacacttctaccgcaaacaggagagcacatctgcgcttgtgtctggaaaggctgaaggtccttatccccctcggtcctgactgtacccgccatacaaccttgggcttactgaacaaagctaaagcccacataaagaagcttgaggaagctgagagaaagtcccagcaccagcttgaaaacctggagcgcgaacaaagattcttgaagtggaggctggagcagctgcagggaccgcaggaaatggagcggattcggatggactctataggatcaacaatttcatctgatagatctgacagcgaaagggaagaaattgaggtggatgtcgaatctacagagtttagtcacggagaggtggataatatctcaaccactagcatctccgacattgatgatcactcatccctgccgagtattggatccgacgagggttacagctccgcatcggtcaagctctcattcaccagttag

SEQ ID NO: 229745 - DNA, 657 bp, synthetic construct
  misc_feature 1..657: note = Description of Artificial Sequence: Synthetic coding sequence
  source 1..657: mol_type = other DNA
atggagagggtgaagatgatcaacgtacaaagactgctggaggccgctgagtttctggagagacgcgagagagagtgtgaacatggatatgcctccagctttccctcaatgccctccccacggctacagcacagcaagccccctcgacgattgagcagagctcagaagcacagctcaggcagttctaatacatccaccgccaaccggagggcgcatctcagactgtgtctggagaggctgaaagtcctcatccccttgggcccagattgcacgcggcacaccaccctggggctgctgaacaaggcaaaagcacacatcaagaagttagaggaggcagagcgaaaaagtcagcaccagctagagaacctcgagagggagcagagatttctcaaatggcgcctggagcaattgcaaggtcctcaggaaatggagaggatcaggatggattctatcggatcaactatctcttcggatcgcagcgactctgaacgggaggagatagaggttgatgtggagagtactgagttttcacatggggaagtggataacatttctaccacatccatcagtgatatcgatgatcactctagcctgccatcgatcggcagcgatgaagggtactccagtgcctccgtgaaactgtccttcactagttag

SEQ ID NO: 229746 - DNA, 357 bp, synthetic construct
  misc_feature 1..357: note = Description of Artificial Sequence: Synthetic coding sequence
  source 1..357: mol_type = other DNA
atgccaagtccaaggttgcaacatagtaaacctcctcggcgtctgtctcgagctcaaaaacactcgtccgggtcgtccaacaccagcactgctaatagatccacccataacgagttggagaaaaaccgtcgcgctcacctgcgcctctgcctggaacgcctgaaggtcttgattcccctcggacccgattgcactcgtcacactacactaggcctgcttaacaaggctaaagcacatatcaagaagttggaggaagccgaacgtaagagccaacatcaactcgagaatctcgagcgggagcaaagattcctgaaatggcggcttgagcaactgcaggggcctcaggagatggaatag

SEQ ID NO: 229747 - DNA, 681 bp, synthetic construct
  misc_feature 1..681: note = Description of Artificial Sequence: Synthetic coding sequence
  source 1..681: mol_type = other DNA
atgggtaagagaggccgtccgcgtaaggaagcgagatgtgaaggggctgggttagctcccgctgcccctccggcagtcccccctgccgtggccgctccccagcctcctgcattgcccgaagaccccgcaggcgctaaacctaggtgccctttcagtgacatttttaacacaagcgagaactccatggaaaagcacatcaacactttcctccagaatgtgcagatcctgcttgaggccgctagctatttagaacagatcgagaaagaaaacaagaagtgcgaacacggttatgcatccagcttcccttccatgccttctcctcgcttgcagcactccaaacctcccaggaggcttagtcgcgctcagaagcacagcagcggctccagtaacaccagcacggccaaccgccgtgcacacctgagactgtgtctcgagcgacttaaagtcctcatacccctcgggcctgactgcactaggcacacaaccctcgggctacttaacaaagccaaggcccatatcaaaaaactggaggaagccgagaggaagagtcaacaccagctggagaacctcgagcgggagcaaagatttctgaaatggaggctagagcagcttcagggtcctcaagagatggagcgcatccgaatggatagcattgggtctaccattagcagcgacagatag

SEQ ID NO: 229748 - DNA, 897 bp, synthetic construct
  misc_feature 1..897: note = Description of Artificial Sequence: Synthetic coding sequence
  source 1..897: mol_type = other DNA
atgaccgaacccggtgccagccctgaagatccatgggtgaaggctagccctgtcggggctcacgctggggaggggagagctggcagagcacgcgcacggaggggagcgggacgtcgaggcgcttccttactatctcctaaatcaccaaccctcagcgtgcctagaggatgccgggaagactcctcacaccctgcatgcgccaaagtggaatacgcttacagcgacaactctttagatcccggactattcgtggagtctacccgtaaggggtcagttgtgtcccgggcaaacagtataggatctacgtcagcgtcctccgtccccaacacagacgacgaggattctgactatcaccaggaggcctataaggaatcttacaaagaccgccgtagaagagctcacacacaggctgagcagaaaagaagggatgcgattaagcggggttacgacgacctacagactatagtccctacttgtcagcagcaggatttctccattggctcccaaaagctaagcaaggccatcgtcctccagaaaaccatcgattacatccagttcctgcacaaggaaaagaagaagcaggaagaggaggttagcaccctccggaaagatgtaaccgccttgaaaatcatgaaggttaactatgagcaaattgtgaaggcacatcaggacaacccccacgagggtgaggaccaggtgagtgaccaggtgaaattcaatgtttttcagggcattatggactcccttttccagtcgttcaatgcatcaatatctgtagcttcattccaggaactgtccgcctgcgtattctcttggattgaggagcactgtaaaccacagactcttagggaaatcgtgataggcgtgcttcaccagttaaagaatcaattgtactag

SEQ ID NO: 229749 - DNA, 645 bp, synthetic construct
  misc_feature 1..645: note = Description of Artificial Sequence: Synthetic coding sequence
  source 1..645: mol_type = other DNA
atgacagagcccggagcttcgcctgaggacccctgggttaaggtcgagtatgcctactcagacaattctctcgatcccgacgacgaagatagcgactaccaccaggaagcttataaagagtcttacaaggacagacgcaggagggctcatacccaggctgagcaaaagagacgcgatgccatcaaacggggatatgacgacctgcaaaccatcgtccctacttgtcagcaacaggacttctcgattggaagtcaaaaattgtccaaagcaatagtgttgcagaagactatcgattacattcagttcctacacaaagagaaaaaaaaacaagaggaggaggtgtccaccctgagaaaggatgtcacggcattaaagataatgaaggttaactatgaacagattgtaaaggctcaccaggacaacccccacgagggggaggatcaagttagcgaccaggttaagtttaacgtgttccaagggatcatggactcacttttccagtcctttaacgcttccatctccgtcgcctctttccaggagctatctgcttgcgtgttcagctggatagaggagcactgcaaaccccagacgcttagagagattgtgattggggtgctccatcagctgaagaatcagctttactag

SEQ ID NO: 229750 - DNA, 735 bp, synthetic construct
  misc_feature 1..735: note = Description of Artificial Sequence: Synthetic coding sequence
  source 1..735: mol_type = other DNA
atgaccgaacccggtgcctcaccagaggacccttgggtgaaggttgaatacgcctacagcgataactctttggacccaggcctgttcgttgaaagtacacgaaaggggagcgtggtttccagggctaactccattggctcaacctcagcctcttccgtcccaaacactgatgacgaggattccgattatcatcaagaagcctacaaggaaagttataaggaccgtcgcaggcgggctcacacccaggcagaacagaaaaggagggacgcaatcaagagggggtatgacgatctccagactatcgtcccaacatgccagcagcaggattttagcataggatctcagaaactaagcaaggccattgtgctacagaagacaattgactacatccagttccttcataaagaaaaaaaaaagcaagaggaagaagtatcaacactgaggaaggacgtgactgctctgaagattatgaaggtgaattatgaacagatagtgaaagcccatcaggacaatccccacgagggcgaggatcaagtctcagaccaggtcaagttcaacgtattccaggggatcatggattctctgtttcaatccttcaatgcgagcatttccgtggcttcgttccaggagctatccgcctgcgtctttagttggattgaagaacactgcaagccacagactttgagggagatcgtcattggcgtgctccatcagctgaagaatcagctgtattag

SEQ ID NO: 229751 - DNA, 2826 bp, synthetic construct
  misc_feature 1..2826: note = Description of Artificial Sequence: Synthetic coding sequence
  source 1..2826: mol_type = other DNA
atggccgaggcaaacccacgtcgcggaaagatgcgctttcgcaggaacgctgcgtcctttcccggaaaccttcacctcgttctggtgctgcggcctacctcattcctacaaagaacctttactgatatcggcttctggttttcccaggaggactttatgctgaaattgccagttgtgatgctcagctcagtctctgacctactcacttatatcgatgataaacagttaactcccgagctagggggaacactccaatactgccattcagagtggattatattccgcaatgccatcgaaaacttcgccctgactgttaaggaaatggcccagatgttgcagagtttcggtacggaactggccgagacagagcttcccgacgatattccttccatagaggaaatcctcgctattcgcgcagaacgatatcacctcctgaagaacgacatcacagctgtgaccaaggagggcaagattctgctgaccaacctggaggtgcctgatactgaaggtgccgtgtctagtagattagagtgccaccgccagatcagcggtgactggcagacaattaacaagctcctaacccaggtgcacgacatggagacggcctttgatggattctgggagaagcaccagctgaagatggagcaatatctgcagttgtggaaatttgagcaggactttcagcaattggtcacagaggtggagttcctgctgaaccaacaggctgaacttgcggacgttactggaacaatcgctcaagtgaagcaaaagattaagaagttagagaacttagacgagaacagccaagaactcctttctaaggcacagttcgttattctccacggacataaacttgctgctaaccaccactacgccctcgaccttatctgccaacggtgtaatgagctccggtatctgagcgacatccttgttaatgaaattaaggccaagaggatccagctatccaggaccttcaaaatgcataagttgctgcagcaggcccgacagtgttgtgatgagggagaatgccttctggctaatcaagagatcgacaaattccagtctaaagaggatgcccagaaggcacttcaggatatcgagaacttcctcgagatggcactccccttcatcaactatgagccagagacccttcagtacgagttcgatgtcatcttgtcacctgagctcaaggtgcagatgaagacaatccagctgaagctcgaaaatattcgctcaattttcgagaaccaacaagctgggttcaggaatctcgctgacaaacacgtcaggccaatccagttcgtggtgccaacccccgagaacctggtcacctctggtacaccctttttttccagcaaacaggtcggtgtggggtattcgttttttcaagcctgcaagctgttttccaaaggtaagaaaacatggaggcagaatcagtctaacctcaagattgaagttgtccctgattgtcaggagaagcgcagtagtggcccttcatcgagcttggacaacggcaactcccttgacgttctgaagaatcatgtgcttaatgagcttattcagaccgagcgtgtgtacgttcgcgagctgtatacggtgctgctcggatatcgagccgagatggacaatcctgagatgttcgatttaatgccacctctactgcgtaataagaaggacatactatttgggaatatggctgagatctatgagtttcacaacgatatttttctgagctccctggagaactgcgcacatgcgcctgaaagggttggaccttgttttctcgagagaaaggacgattttcagatgtatgctaaatactgccaaaacaagcctagatctgagacaatctggcgtaagtactcagagtgtgcattctttcaggagtgtcagcgcaagctcaagcatcggctccgcctggatagctatcttctgaaacccgtccagaggatcacaaagtatcagttgcttttgaaggaactcctgaagtatagtaaggattgcgaagggagcgccctcctgaagaaagcactggacgccatgctggatctcttgaaatctgtgaacgactccatgcaccagattgctatcaacggatatatcgggaatttgaacgaactcgggaaaatgatcatgcagggaggattctccgtttggatcggtcacaagaaaggtgcaacaaagatgaaggacttagcccgattcaagcccatgcaaaggcatctgttcctgtatgagaaagccattgtcttctgcaaacggagagtcgagtcaggtgaggggtcagaccggtaccctagctattccttcaagcactgctggaagatggatgaggttggcatcacggaatacgtcaaaggcgacaatcggaaatttgaaatatggtacggggaaaaagaagaagtttatatcgtccaggcttcgaacgtcgacgtgaagatgacatggctcaaggagattcggaatattctactgaagcagcaggagctgctgaccgttaagaagcgtaagcagcaggaccagttaaccgagcgagacaaattccagatcagtcttcagcagaatgacgagaaacagcagggtgcattcatcagcaccgaggaaactgagctagagcacacgtctacagtcgtggaagtgtgcgaggctatcgcaagcgtgcaggctgaggcaaataccgtttggaccgaagcatcgcagtcagccgaaatttcagaagagccagcagaatggtcctccaactatttttatcctacatatgatgaaaatgaagaggagaacagaccattgatgcggcctgtgagtgagatggcattgttatattag

SEQ ID NO: 229752 - DNA, 2583 bp, synthetic construct
  misc_feature 1..2583: note = Description of Artificial Sequence: Synthetic coding sequence
  source 1..2583: mol_type = other DNA
atggccgaggccaacccccgaagggggaagatgcgattccgaagaaatgccgctagctttccaggaaatctgcacctcgtgctggtgctccgccctactagctttctgcaacgaacttttaccgatattggcttttggttttcccaggaggacttcatgctaaagttacccgtggtaatgttgagcagcgtctccgacctcttgacatacattgatgataagcaactcacccctgaattagggggtaccctccagtattgccactccgagtggatcatattcaggaacgccattgagaactttgccctgaccgtcaaggaaatggcccaaatgcttcagtccttcgggacggagctggccgaaactgaactccctgacgacattcctagcatcgaggagatccttgctatccgagcagaaagataccatctccttaagaatgacattaccgccgtgaccaaggaaggtaagattctccttaccaacctggaagttcctgacacggagggagctgtctccagtaggcttgagtgccaccgtcagatttccggggattggcagacaattaacaaacttctgacccaagtgcacgatatggagactgcttttgatggtttctgggagaaacaccagctcaaaatggaacagtatctccaactttggaagtttgaacaggactttcagcagctggtcacagaagtggaatttctgctgaatcagcaggcggaattggccgatgttactggaacaatagctcaggtgaagcaaaaaattaagaaactggagaacctggacgaaaattcccaggagctgcttagcaaggcgcagtttgtgatcttgcatggccacaaactcgctgccaatcatcactatgctctggatttaatctgtcagagatgcaacgagttaagatatctcagcgacatcctggtaaacgagattaaggctaagcgcatccagctgtcccggacattcaaaatgcacaaacttctccagcaggctcgtcagtgttgcgatgagggtgagtgtctgctggccaaccaggagatcgataagtttcagagcaaggaggacgcccagaaagcactgcaggacatcgaaaatttccttgagatggccttgccatttataaattacgagcccgagaccctccagtacgagttcgacgtgatcctctctcccgagctgaaagtgcaaatgaagaccatacagctgaagctagagaatataagatcgatctttgagaatcagcaggcgggattccgcaacctcgccgataaacatgtgcggccaatacagtttgttgtccctaccccagagaatttggtcactagtggtacacctttcttctccagcaagcaggggaaaaaaacgtggcggcagaatcaaagtaatctgaagatcgaagtagttccggactgccaggaaaagcgaagtagtggcccatctagctctctggataatggaaactccctggacgtgctgaaaaaccacgtcctgaatgaactgatacagaccgaaagggtttatgtgagggagctctataccgttctcctcggataccgtgctgaaatggacaatcctgaaatgttcgacctgatgccgcctcttctacggaataagaaggacatcctcttcgggaatatggctgagatttatgaatttcacaacgacatattcctgtccagccttgagaactgtgcgcatgctccagaacgggttggcccttgttttttggagcggaaggatgacttccaaatgtatgccaagtactgccagaacaagccacggagtgaaacgatatggagaaagtactctgaatgtgccttcttccaggaatgccaacggaaactgaaacacagacttaggctggattcctacctcctgaagcccgttcagagaattaccaaataccaactcttactcaaagaacttcttaagtatagtaaggactgcgaaggatcagcactcctgaagaaagcccttgatgcaatgctcgatctcctcaaaagcgtcaatgactctatgcaccagatcgctataaacggatatattggcaatctgaatgaactggggaaaatgataatgcagggagggttttccgtttggataggtcacaaaaagggcgcaactaaaatgaaggacctggccaggtttaagccgatgcagagacaccttttcctttatgagaaggccattgtattctgcaagaggcgagtggagagtggagagggaagcgaccggtatcctagttattccttcaaacattgctggaaaatggacgaggtggggatcacagaatacgtcaagggcgataaccgcaagtttgaaatttggtatggggaaaaggaagaggtctacatcgtacaagccagtaacgtagacgtgaaaatgacttggctgaaggaaatcaggaatatactcttgaaacagcaggagcttctgaccgtaaagaaaagaaaacagcaagatcagttgaccgagagagacaagtttcaaatcagcctccaacagaacgacgaggatctgtgccggaggtggttatcctacattgatgaagcaacaatgtcaaacggaaagtag

SEQ ID NO: 229753 - DNA, 2778 bp, synthetic construct
  misc_feature 1..2778: note = Description of Artificial Sequence: Synthetic coding sequence
  source 1..2778: mol_type = other DNA
atggccgaagccaatccacgaagggggaaaatgagattcaggaggaacgccgcatcgtttcccggaaacttgcacttggtactggttctgaggcctacttcgttcctgcagagaaccttcacagacatcggcttttggttttcccaagaggacttcatgttgaagctaccggtggtaatgctatcgtcagtgtcggacctactgacgtatattgatgacaaacagctgacacctgagttaggaggcacactccagtattgccattccgagtggattatcttccgcaacgccatcgagaactttgcacttactgtgaaggagatggcacagatgctgcagagcttcggaacagaactggccgaaacggagctccctgacgacatcccaagcatcgaagaaattctagctatacgagcggaacgatatcatctcttaaaaaatgacataaccgcagtgaccaaggaagggaagatcctgctcaccaatctcgaagtccccgataccgagggtgccgtgtcatcacgattggaatgccacaggcaaatttccggcgactggcagaccatcaataaacttcttacgcaggttcatgatatggaaacggcctttgacggattttgggaaaaacatcagcttaagatggagcagtacctccagctgtggaagtttgaacaggacttccaacagttagtgactgaggtggagtttctattaaaccagcaggcggagctagccgacgtgactggcacaatagcccaggtgaaacagaaaattaagaagctggaaaacttagacgaaaactctcaagagctgctgagtaaggcccagttcgttattcttcacggtcataaacttgccgcaaatcaccactatgcattagaccttatttgccagcgatgcaatgaactgaggtacctgtctgacatcctggtcaacgagataaaggcaaaaaggatacagctgtccaggacttttaagatgcacaagttattacagcaagcaagacagtgctgtgacgagggcgaatgtttgcttgccaatcaagagattgacaaattccagtctaaagaagatgcccaaaaggcacttcaagacatcgaaaattttctcgaaatggctcttccttttattaactatgaacctgaaacgctgcaatacgagttcgacgtcatcctgagtcctgaactgaaagtgcaaatgaaaaccatccagcttaaactggagaacatccgctcaattttcgagaaccagcaggccggatttaggaatctagcggacaagcatgttcgtcctatccaattcgtggttcccacacccgagaacctggttacctctggcaccccatttttcagcagcaaacaaggaaagaagacctggcggcagaaccagtccaacttgaagatcgaagtggtgcccgactgccaggaaaagcggtctagcggcccatcatccagcctcgacaacggcaattcccttgacgtgcttaagaaccatgttctcaacgagctcatacaaacggaaagagtttacgtgcgggagttgtacacggttctgctaggataccgtgctgaaatggacaacccagagatgtttgacctcatgccaccactgctgcgcaacaaaaaggacattctcttcggaaacatggcggaaatctatgaattccataatgatatcttcctgagcagtctcgagaattgcgcacatgctcctgaaagagtcgggccttgctttctcgagcggaaggatgattttcaaatgtacgccaagtattgtcaaaataagcccaggtcagagacaatctggagaaaatatagcgagtgcgcattctttcaggaatgccagcgcaaattaaagcacaggttaaggttggatagctacctgctcaagcccgtgcaaaggataactaaataccagctactcctgaaagaactccttaagtacagcaaggattgcgagggctcggctctgctcaagaaggcactcgacgccatgctggacctgcttaagagtgtgaacgattctatgcaccagatcgctatcaacggatacattggcaatctgaacgaacttggcaagatgatcatgcaggggggtttttctgtatggataggccacaaaaagggggctaccaagatgaaagatcttgccaggttcaaacccatgcagaggcacttgtttctctacgagaaggccatcgtcttttgtaaaaggcgagtcgaatctggcgagggaagcgaccggtacccatcttattcctttaagcattgctggaagatggacgaggttggtattaccgaatatgtgaagggcgataatcgaaagttcgagatttggtatggcgagaaggaggaagtctatatcgttcaggccagtaacgtagacgtcaaaatgacttggctcaaagaaatcaggaacatcctcctgaagcagcaagagctcttgaccgttaaaaagcgcaagcagcaggaccaactgaccgaaagggacaaatttcagatcagcttgcagcagaatgacgaaaaacagcagggtgcattcatatctaccgaggagacagagctcgagcatacctcaactgtcgtggaagtatgcgaggcgatagcctcagtgcaggccgaggccaacaccgtgtggacagaggctagccagtccgccgaaatttcggaggaacctgctgagtggtcgagtaattacttctacccgacctatgacgagaacgaggaagaaaataggcctcttatgcgtcctgtttccgagatggctctcctctattag

SEQ ID NO: 229754 - DNA, 3213 bp, synthetic construct
  misc_feature 1..3213: note = Description of Artificial Sequence: Synthetic coding sequence
  source 1..3213: mol_type = other DNA
atgccccaggcagctgcttccgccccatggacctcagtttcctgcgggaggatccccggactcccacagaaccctgatggatgcacctttatgccaatcgcacaggcgattccactccaggtggatatggccatggcgttgcagcgggtgcggatcgcagagaaatatgggaaaaactacttatgccttctgcaggccgtctttgtagctgagactgacctcttgttgcggataaaagatataagtcactttctcatgcaagatatcgcattcctgtccggcggtagagggaaggacaatgcctggatcattacctttccggagaattgtaacttccgctgcattcctgaagaagttattgccaaagtgttgacttatctgacctcaatcgccaggcaaaatggatcagactccagattcaccataatcctggatcggaggcttgacacatggtcctctctcaagattagcctgcagaaaatcagtgctagcttccctggcaacctccatctggtcctggtgctgagacccacatccttccttcagagaacgttcacagacatcggattctggttctcccaggaagattttatgctgaagctacccgtagtcatgttatccagtgtgtcggacctgttaacctatatcgacgacaaacagttaactccagagctcgggggtacactccagtactgccactccgagtggataatctttcgcaacgccatcgaaaattttgcactgaccgtaaaagaaatggcccagatgctacagtcatttggtacagagctggcagagaccgagctgccagacgatattccaagtattgaagaaattctcgctattagggcggaacggtaccatttgcttaagaatgatataaccgccgttacaaaagaaggcaagattctgctgacaaatctggaggtgcctgacacagagggggctgtgagctctcgcctggaatgccaccggcaaatctcaggggactggcagacaattaacaagttgctgacccaggtgcacgatatggagacggcattcgatggattttgggaaaagcaccagctgaagatggaacagtatctgcagctgtggaagttcgaacaggatttccagcagctagtgacagaagtggaattcctactgaaccagcaggcagagctggccgacgtgacggggacaatcgcacaagtaaagcaaaaaatcaaaaaactggagaacctagatgagaatagtcaggagttgctctccaaggcccagttcgttatcttgcatggccacaagttggccgctaaccatcactatgcactcgatctgatctgccaacggtgcaatgagctcagatatctgagcgatatcctggtcaacgaaataaaagccaagaggatccagttaagccgaacatttaaaatgcacaagctgttgcagcaggcacggcagtgttgtgatgagggggagtgcttgctcgccaaccaggaaatcgataaattccaatcaaaggaagacgcgcagaaggcactgcaggatatcgagaactttctggaaatggccttacctttcatcaattacgagccagagacgctgcagtatgaattcgacgtaattttaagtccagagctgaaagttcagatgaaaaccattcagctaaagttggagaacatccggtcaatcttcgagaaccagcaagcagggtttaggaacctggccgataagcacgtgcgccctattcagtttgtggtacccacgcccgaaaatctcgtgacaagcgggaccccgttcttcagttctaagcaaggaaaaaaaacgtggcggcagaatcagtctaacctgaagatagaggttgtgcctgattgtcaagaaaagagaagttccggtcccagctcctcactggacaacgggaactccttggatgtgcttaagaaccacgtgctgaatgagcttattcagacagagagggtgtacgtgagagagctctacaccgtcctactcggataccgcgcagagatggataaccctgagatgtttgacctgatgcctccgctcttgaggaacaaaaaagacatactgtttggaaatatggccgagatttacgaattccacaacgacattttcctgtcgtcgctggagaattgtgcccacgcacctgagcgagttggcccatgctttctggagcgcaaagatgactttcagatgtatgctaagtattgccagaacaagccccgaagtgaaacaatctggcgcaaatattcagagtgtgcctttttccaggaatgtcagcgtaaactgaagcatcgcttacgactagactcttatctcctcaagcccgtccaaaggatcaccaagtatcaactgcttttaaaggagcttctgaaatatagcaaggattgcgagggctccgccctgctcaagaaggcacttgatgccatgcttgacctgctgaaatcagttaatgacagtatgcatcagatcgcaattaatggatacataggcaacttaaatgagctgggcaagatgatcatgcagggtggcttcagtgtctggataggccacaaaaagggtgcaactaagatgaaggatctcgccagattcaaacccatgcaaaggcacctgtttctatatgagaaggctatagtgttctgtaaacgacgcgtggaatctggcgaaggctccgatcgatatccatcttacagctttaaacactgctggaagatggacgaggtgggtataaccgaatatgtgaaaggagataacaggaaatttgaaatatggtacggggagaaggaggaggtctacattgtgcaagctagcaacgttgacgtgaagatgacatggcttaaggaaatcaggaacattctgttgaaacagcaggaactcctgactgtcaagaagaggaagcaacaggaccagctgactgaacgcgataaattccaaatcagcctgcagcaaaatgacgagaagcagcagggggcattcatttccactgaagaaaccgagttagaacacacatctaccgtagtagaagtttgtgaggcgattgctagcgtgcaggctgaagctaacacagtgtggaccgaggccagccagtcggccgaaatcagtgaggagccagccgaatggtcatctaattatttttaccccacttatgacgagaatgaagaggagaaccggccacttatgagacccgtatcggagatggctctgctgtattag

SEQ ID NO: 229755 - DNA, 2958 bp, synthetic construct
  misc_feature 1..2958: note = Description of Artificial Sequence: Synthetic coding sequence
  source 1..2958: mol_type = other DNA
atgcaggatatcgctttcctgtccggcggtcgaggtaaggacaacgcttggatcatcacctttccagagaattgcaatttcagatgtatacccgaggaggttattgcaaaggtgcttacatacttaaccagtatcgcccgacagaacgggagcgacagtcgcttcaccatcatcctcgaccgccgtctggacacatggagctcattaaagattagccttcagaaaatctcggcatcttttccgggaaatctacacctggtcttagtgctcaggccgacttcctttctccaacggaccttcactgacattgggttctggttctctcaagaagatttcatgctcaaactgccggtggtgatgctatcttcagtatctgacctgctcacttacattgatgataaacaactcaccccggaactggggggtactttacagtattgccatagcgaatggattatctttaggaatgctatcgaaaacttcgctcttacggtgaaggagatggcacagatgttgcagtccttcggaactgaattagcagagacagagttgcctgacgatattccttccattgaggaaatcctcgcaattagagccgaacggtatcacctgctgaaaaatgatatcaccgccgtgaccaaggaaggaaagatactcctcacgaacctcgaggtgccagacaccgaaggagcggtctcaagccgtttggagtgccaccgccaaatctctggagattggcaaactatcaataagctgctgacccaagtccatgatatggaaaccgccttcgacgggttctgggaaaagcaccaacttaagatggagcagtacctacagctctggaagtttgaacaggatttccaacagctcgtgacggaagtggagtttttgcttaatcagcaagccgagctagccgatgtgaccggtaccattgcccaggtcaagcaaaaaatcaagaagctggagaacctggatgagaacagccaggaactgcttagcaaagcccagtttgtgatcctccacggtcacaaactggcggcaaaccatcactatgccttggacctgatctgccagaggtgtaatgagctgcgatacctttcagatattcttgtcaatgagattaaggctaaaaggatccagctgtcaagaacctttaaaatgcataagctcctgcagcaagccagacaatgctgtgacgaaggcgaatgcctcctagcaaatcaggagattgataaattccagagcaaggaggacgcgcaaaaggcactgcaagacattgaaaatttcctggagatggccctcccatttatcaactacgagcccgagacccttcagtacgagttcgatgtgatcctgagtccggagctcaaggtccagatgaaaactattcaactgaaactcgagaatatcagatctatcttcgaaaaccaacaggcaggttttcgcaatctggccgataagcacgtgcggccaatacagtttgtggtacctacccccgagaatctggtgacatctggtacacccttcttcagctctaagcaggggaagaagacctggagacagaatcagagtaacctgaaaatcgaagtggttccagattgccaggaaaaacgctccagtggacccagcagctcgcttgacaacggaaattcgctcgacgtgcttaaaaaccacgtgctcaacgaactgattcaaacggaacgcgtatatgtgagggagctgtacacagtattgctgggctacagggcggagatggacaacccagagatgttcgatctgatgccgccactcctgcggaacaagaaggacatactgttcggcaatatggccgagatttatgagttccacaatgatatctttctttctagcctggagaactgtgctcacgctcctgagagagtggggccttgctttctggaaagaaaggacgattttcagatgtatgccaagtactgccagaataaaccacggtccgagactatctggcgaaaatacagcgaatgtgcattctttcaggagtgtcagcgaaaacttaagcacagattaaggctggacagctacctattgaagccagtccagcggattacaaaatatcaactgctgcttaaagagctgctgaaatactctaaggattgtgaaggaagcgctttactaaagaaggctctcgatgccatgctcgatttgctcaagtcagtgaatgacagcatgcatcaaatcgctataaacgggtacattggcaatctcaacgagctgggaaaaatgattatgcaaggcggattctctgtgtggattggccataaaaaaggtgcaaccaaaatgaaggatcttgcgcgatttaagccgatgcagaggcatttgtttctgtacgagaaggccatcgtcttttgtaagcggagagtggagtccggcgaaggctctgacagatatcccagctactccttcaaacattgctggaagatggacgaagtggggatcacagaatacgttaagggtgacaatcgaaaattcgaaatttggtatggcgagaaggaggaggtgtacattgttcaagcgtcaaatgtagacgtcaaaatgacgtggttgaaagaaattcgcaatattctcctgaagcaacaggagcttcttacagtcaagaagagaaagcaacaggatcagcttactgagagagataagtttcaaatttcactccagcagaatgatgaaaaacaacagggggctttcatcagtacagaagagaccgaattagaacatacgagcactgtggtcgaggtgtgtgaggccatagcgtctgtacaggccgaagcaaatacagtgtggacagaagcctcgcagagcgccgagatcagcgaggagcccgcagagtggagtagcaactatttttacccaacgtatgatgagaacgaggaagaaaatcggcctctgatgcggccagtgtctgagatggccctactttattag

SEQ ID NO: 229756 - DNA, 1290 bp, synthetic construct
  misc_feature 1..1290: note = Description of Artificial Sequence: Synthetic coding sequence
  source 1..1290: mol_type = other DNA
taacacgtcctaaatgaactcatccagacagagagagtgtacgtgagagagctctataccgtgctactaggataccgagcagagatggataacccagaaatgttcgatcttatgccacctctgctgcgcaacaagaaagacattctattcggcaatatggctgaaatctatgaattccacaatgacatttttctctcgagcctggaaaactgtgcccatgcccctgaaagggtcggcccttgcttcttagagagaaaggatgatttccagatgtatgcgaaatactgtcagaacaagccccgtagcgagaccatctggaggaaatattcggagtgcgcgttcttccaagagtgtcagagaaaattgaaacacagactacgccttgattcctacctgctcaaacccgtgcagcgaatcacgaagtaccagctgctcttgaaagaattactgaaatattccaaggactgcgagggatcagctcttctgaagaaggccctcgatgccatgctggatctgctcaagtctgtgaatgatagcatgcatcagattgccataaatggatacataggaaaccttaatgaattgggcaaaatgatcatgcaagggggatttagtgtctggatcgggcataaaaaaggagcaacaaagatgaaagatctggccagatttaaacccatgcagcgccaccttttcttgtacgagaaagctattgtgttctgcaaaagaagggtcgagtcgggcgaggggagtgaccgctacccctcatatagcttcaaacattgttggaaaatggatgaggtcggcattaccgaatacgtgaagggggacaacaggaagtttgaaatctggtacggagaaaaagaggaggtgtatattgttcaggcttcaaacgttgacgtcaagatgacttggctcaaagaaatccgcaatatcttgctcaagcagcaagaacttctgaccgtaaagaaacggaaacagcaggaccagctcacggagagggataagtttcaaatttcgttacaacagaacgacgagaaacagcagggcgcttttatttccaccgaggagaccgagctcgaacatacctcaaccgtagtagaagtctgtgaggccattgccagtgtccaggccgaggcaaataccgtctggaccgaggcctcccagtctgccgagattagtgaggagcccgcagagtggtcctcaaattacttctatcctacttacgacgagaacgaagaggagaaccgaccactcatgaggcctgtttcagagatggctctgctgtactag

SEQ ID NO: 229757 - DNA, 1587 bp, synthetic construct
  misc_feature 1..1587: note = Description of Artificial Sequence: Synthetic coding sequence
  source 1..1587: mol_type = other DNA
gttcagatgaagacaatccagctgaaactggagaatattcgcagtatatttgaaaatcagcaagctggctttaggaacctggctgataagcacgtgcgccctatacagttcgtggtgcccacacccgagaacctggttactagtggcacaccctttttcagcagcaagcagggcaagaaaacttggcgtcagaaccagagcaacttgaaaatagaggtggttcccgattgtcaggaaaagagatcttctggaccaagctcaagcttagacaatggtaattccctggatgttcttaagaaccacgtactcaacgaactcattcagacagaacgtgtgtacgtccgggaattgtacaccgtcctgctcggctaccgggctgaaatggataaccctgagatgtttgatctgatgccaccccttttacgcaataagaaggacatcttattcggaaatatggccgaaatttatgaattccacaatgacatttttcttagtagtttggaaaattgcgctcacgcgccagagcgtgtgggcccatgttttctggagagaaaagacgatttccaaatgtacgccaagtattgccagaacaagcctagatcggagaccatctggaggaagtattctgaatgcgctttctttcaagagtgccaacgcaaactgaaacataggttgcgcctagactcctacctgcttaagcctgttcagcggattacaaaataccaacttcttttgaaggaactgttaaagtatagtaaggactgtgaaggctccgccctgctgaaaaaggccctggatgccatgctcgatctcctcaagagtgttaacgatagtatgcatcagatcgctattaatggctacattggaaatctgaatgaattaggaaagatgatcatgcaagggggtttttccgtgtggatcggtcacaagaagggggctactaaaatgaaggacctcgcccgattcaaacctatgcagcgccatctatttctgtacgagaaagccatagtgttttgcaagcgaagggtcgagagtggcgaaggaagcgacaggtacccctcctattcctttaaacactgttggaagatggacgaggtcggtattaccgaatacgtcaagggcgataacagaaaatttgagatctggtacggagagaaagaagaagtctatatcgtgcaggcaagcaacgtcgatgtcaagatgacatggttgaaagaaatccgaaacatcctgctgaagcaacaggaattgttaaccgtgaagaagcggaaacagcaagaccagctaactgaacgcgacaaattccaaatcagtctgcagcagaatgatgaaaagcagcaaggcgcttttatctctactgaggagacagagctggagcacacctctacagtggtggaagtgtgcgaagctattgcgtcggtccaggccgaagcaaacacagtatggacggaagccagccagtccgcagagatctctgaagaaccagccgagtggtcatcaaattacttctacccaacgtacgacgagaatgaggaggaaaacagacccctgatgaggccagtcagtgaaatggccctgctgtactag

SEQ ID NO: 229758 - DNA, 3006 bp, synthetic construct
  misc_feature 1..3006: note = Description of Artificial Sequence: Synthetic coding sequence
  source 1..3006: mol_type = other DNA
atgcaggacatcgcttttctgtccggaggcagaggcaaagacaacgcctggattattacattccctgagaattgcaacttcaggtgtatcccagaagaagtaatcgcaaaagtgcttacatatctcacatccatagctagacagaacggctctgacagcagattcaccatcatccttgaccggagactggacacctggtcatcgctgaaaatatctctgcagaaaatttcagcttccttcccgggaaacctccatctggtgctggtcctgcggccaacaagctttctgcagaggacattcacagacataggcttctggttcagtcaggaggacttcatgctgaaactccccgttgttatgctttccagtgtctctgacttgctgacgtatatcgacgacaaacaattgacaccagaattaggaggaacacttcagtactgtcattctgaatggattatatttcgtaacgctattgagaatttcgccctaaccgttaaggagatggcccaaatgctacagtctttcggcacagagctagcagagactgaactgcccgacgacatcccatctatcgaagagattctggcaattagagccgaaagatatcatctattaaaaaatgatataaccgcggtgaccaaggagggcaagatcctcttaaccaacctggaggttcccgatacagagggggctgttagcagccggcttgaatgccacagacagatttccggcgattggcagactattaataaactgttgacacaggtgcacgatatggagacagcgttcgatggattttgggagaaacaccagctgaaaatggaacagtacttacagctgtggaagttcgaacaagattttcagcagcttgtgacagaggttgaattcttactgaaccagcaggcggagcttgccgatgtcacaggaacaatcgctcaagtgaagcaaaagattaagaagcttgagaacttggacgaaaattcccaggaactgcttagtaaggcacagtttgtgatattacacgggcacaagctggcagccaaccaccattacgcacttgatttgatatgtcaaagatgcaacgaactgcgctacctgtctgacatcctcgtgaatgaaattaaagcgaagaggatccagctctcccggacgttcaagatgcataagcttctgcagcaggccagacagtgctgcgacgagggcgaatgcctcctcgcaaaccaggaaattgacaaatttcagtcgaaggaggatgcgcagaaagctcttcaagacatcgagaatttccttgagatggccctgccttttatcaactatgagccggagacgttgcagtatgaattcgacgtgatcctgagtcccgagctaaaggtacagatgaaaacaattcagctgaaactagaaaacatcaggtctatttttgaaaaccagcaagcgggttttaggaacctcgcagataagcacgtaaggcctatccagtttgttgtacccacccctgaaaaccttgtcacaagcggtacacctttttttagctctaagcaggtgggagtggggtactccttcttccaggcctgcaaattattctccaagggcaagaagacttggcgacagaaccaaagtaacctgaagattgaggtggtccctgactgccaggaaaagcggtcttctgggccatcctcatcactggacaacggaaactcactggacgtcctcaaaaatcacgtgctcaatgaactgattcagacggaaagagtatacgtcagggaactgtacaccgtgctcctgggctatcgggcagaaatggataacccagagatgttcgacttgatgcctcccttgctgcgcaacaaaaaggatatcctgttcggcaacatggctgagatctacgagtttcataacgacattttcctgtcttcactggagaactgtgcacatgctcccgagagagtgggaccatgcttcttggaacgcaaagacgactttcagatgtatgcgaagtactgccagaataaacctcggagcgaaactatttggcgaaagtacagcgagtgcgctttttttcaggagtgccagagaaagctgaagcaccgacttcgactagactcgtacctgctgaaaccagtccaaagaatcaccaagtatcagctcctgttgaaggagttgctcaagtactccaaggattgtgaaggcagcgccttacttaagaaagccctcgacgccatgttggatttactgaagtccgtgaatgattctatgcaccagatagccattaatggttatatcggaaacctgaacgaactggggaagatgatcatgcagggaggtttttctgtttggataggtcataaaaaaggggcaacaaagatgaaggatttggctaggttcaaacctatgcagcgccatctgttcttgtatgagaaggccattgtgttttgcaaaagaagagtcgagtcaggtgagggaagtgatagatatccgtcatatagcttcaagcactgctggaaaatggatgaggtcggaattaccgaatacgtgaaaggcgataatcgaaaattcgaaatctggtatggagagaaagaggaagtgtatattgttcaggcgtcgaatgtcgacgtcaagatgacgtggctcaaggagatcagaaacattctcctcaaacagcaggagttattgaccgtcaaaaagagaaaacagcaagaccaacttactgaacgagataaatttcagatttctctgcagcagaacgacgagaagcagcagggcgcattcatcagcaccgaagaaaccgaactagagcatacctccacagtggtagaagtctgcgaggctatcgccagtgtgcaagctgaagccaacactgtgtggaccgaagccagccaaagcgccgaaatctctgaggaacctgcggagtggagtagcaactacttttatccaacttacgacgaaaacgaggaagaaaatcggcctctgatgagaccggtttctgaaatggcattactgtactag

SEQ ID NO: 229759 - DNA, 2958 bp, synthetic construct
  misc_feature 1..2958: note = Description of Artificial Sequence: Synthetic coding sequence
  source 1..2958: mol_type = other DNA
atgcaagatatcgcctttctgtccggcggaagaggaaaagacaatgcatggattataacatttcctgagaattgtaacttccgctgtattccagaggaagtgattgcaaaggtgctcacctatctaactagcatagccagacaaaacggatctgattctcgatttacaattattctggatcgacgcctggatacatggtcctccctgaagatctctctgcagaagatttccgcatctttcccaggcaacctgcacttagtgttggtacttaggcccacttcgttcctgcagaggacttttactgatattgggttttggtttagccaggaagactttatgttaaaactgccagtggtgatgctcagcagcgtttccgatttgttgacatatatcgacgacaagcaattgacccccgaactggggggtacgcttcagtattgccattctgaatggattatattccgcaatgccattgagaacttcgcactcactgttaaggagatggcgcaaatgctgcagagcttcggaacggagctggccgaaaccgaacttcccgatgacatcccaagcattgaagaaattctcgcaatccgcgctgaacgataccacctcctcaaaaacgatataacggccgttactaaggagggaaaaatacttctcaccaatctggaggtgccggacaccgagggagccgtatctagtaggctggaatgtcacaggcagatttcaggggactggcagaccatcaacaaactgttaactcaggtccatgatatggagacagccttcgatggattctgggaaaaacatcagcttaagatggaacaatacttacagctttggaaattcgaacaggacttccagcaactggtaaccgaggtagagttcctgttaaaccagcaggctgaattagctgatgtgactggcactatcgcacaggttaagcagaagatcaagaagctggagaatctggatgagaactctcaggaacttctgtcaaaagctcaatttgttatcctgcacggacacaaacttgcagcgaaccaccactacgctttagatctcatttgccagcggtgcaatgagctgagatatctgagcgacatcttagtgaatgagattaaagccaagcggatccagctgagcagaacatttaaaatgcacaagcttcttcagcaggccagacagtgttgcgacgagggagagtgtctgctggccaaccaggaaattgacaagtttcagtccaaggaggacgcacagaaagcattgcaagatatcgagaattttctggagatggccctgccattcatcaattacgagcctgagaccctgcaatatgaatttgacgtgatcctgtcacccgagctcaaggtccagatgaaaaccattcaacttaagctcgagaacattcggagcattttcgagaaccagcaggcgggttttagaaatcttgctgacaagcacgttcgacctatacagttcgttgtccctacccctgagaatctcgtgacctcaggcacccccttcttctcatctaagcaaggaaagaagacgtggaggcaaaatcagtccaatctgaagatcgaagtggtgcctgactgtcaagaaaagcgttcctctggtccctcatcttcactggataacggcaattcgctggacgtgctcaaaaatcatgtgctgaacgaactaatccagactgagagggtctacgtgcgggagttgtacaccgtcctgctgggatatagggctgagatggacaatcctgagatgttcgacctgatgccacctttattaagaaataagaaagatatcctcttcggcaatatggctgaaatctatgagttccacaacgacatatttctgagttctcttgaaaattgcgctcatgcacccgaacgcgttggcccatgcttcttggagagaaaggatgattttcaaatgtacgccaaatactgccagaacaaaccaaggagtgaaaccatctggcgaaaatactccgaatgtgccttctttcaggaatgccaacggaagctgaaacatcggttacgactggatagctacctcctgaagcctgtccagagaatcacgaagtaccagctgctcctcaaggagctcctgaaatatagtaaagactgcgagggctccgcgctacttaagaaggctttggacgctatgctggacctgttgaaatcagtgaatgactctatgcaccagattgcaatcaacggctacatcgggaacttgaatgagctcggaaagatgattatgcaggggggattcagtgtgtggatagggcacaagaaaggcgctacaaaaatgaaagatttggcaagatttaagcccatgcagcggcatctttttctgtacgagaaagccatagtattttgtaagagaagagttgaaagtggcgaaggaagtgaccggtacccgtcttattcatttaaacactgttggaaaatggacgaggtcggtataaccgagtacgtgaagggcgacaacaggaagttcgagatttggtacggtgagaaggaagaggtttatattgtgcaggcctctaacgtcgacgtgaagatgacctggctgaaggaaattcgcaatatcctactcaaacaacaagagttgctgaccgtcaagaagagaaaacagcaggaccagctgaccgaacgggataagttccagataagtctgcaacagaatgacgagaagcagcagggggcttttattagcacagaggagacagagctggagcacaccagcacagtagtggaggtgtgtgaggccattgcctctgtccaggccgaggctaacaccgtctggacggaggcttcacagtctgcggagatcagtgaggaaccagctgaatggtcttccaattatttttaccctacttacgacgagaatgaagaagaaaacagacctctgatgcggcctgtctcggaaatggctttgctgtattag

SEQ ID NO: 229760 - DNA, 2466 bp, synthetic construct
  misc_feature 1..2466: note = Description of Artificial Sequence: Synthetic coding sequence
  source 1..2466: mol_type = other DNA
atggccgaagctaacccccgacggggaaagatgaggttcagacgcaacgcggcatccttccccggtaacctgcacctcgtcctggtactcaggcctactagcttcctgcagcgaaccttcacagacatcggattttggttctcacaggaagatttcatgctgaagctgccggctatagagaatttcgccctgaccgtgaaggagatggctcaaatgctgcagtcttttggcaccgagttagcagagaccgagctgccggacgacattccgtcaattgaggagatccttgcaatacgagcagagcgttatcacctgctcaaaaatgatattactgccgtgaccaaggaggggaagattctcctgactaacctggaggtaccagatactgagggtgctgtgagctctaggctcgaatgtcatcgccagatctccggtgactggcagaccattaataagctgttaacccaggtgcatgacatggagacagctttcgatggcttctgggaaaaacaccagttgaagatggaacaatatctgcagttgtggaaatttgaacaagatttccagcaactcgtgaccgaggtggaatttctgctgaatcagcaggccgaactggcagacgtgaccggtacaatcgcacaggtgaaacagaagattaagaagctagaaaaccttgatgagaatagccaagagctgttaagcaaggctcagttcgtgattctccatggtcacaaactggcagctaaccatcactacgcactggacttaatctgccagaggtgcaatgaattgcgttatctgtcagatatattggtgaatgagatcaaagccaaaaggatccagctctcaagaaccttcaaaatgcacaagttgctgcagcaggcacgccagtgctgcgatgaaggagagtgcctactcgcgaaccaggagatagacaagtttcaatctaaggaggacgcacagaaggccctgcaggatattgaaaatttcctggaaatggcccttcctttcataaactacgagccagagaccctccagtacgaattcgatgttattttgagcccggagctgaaagttcagatgaagacaatccagcttaaactagagaatattagatcaatctttgagaaccagcaagcgggttttcgcaacctggctgataagcatgtcagacccattcaatttgtagtgcctactcctgagaacttggtgaccagtggtactccgtttttctcatctaaacaaggcaaaaagacttggcgccagaatcaaagtaatttgaagatcgaggtggtgccagactgccaggagaagagatcttcagggcctagctcatcactggataacggaaactctttggacgtgctgaaaaatcacgttcttaatgagctcatccagacagagcgtgtgtatgtgagggagctgtacacagtcctacttgggtatagagcggagatggacaaccccgagatgttcgaccttatgccgccactcctccgcaacaaaaaagacattcttttcgggaacatggccgagatatacgaattccataacgatatttttctcagttctctggagaattgtgctcatgcccctgagcgcgtgggcccttgctttctcgagaggaaagacgactttcagatgtacgctaagtattgccagaataaacctcggagcgagactatctggcggaagtacagcgaatgtgctttttttcaagaatgccagcggaagctcaaacaccgacttaggctagactcatatcttcttaagcctgtccagaggatcacgaaatatcagctgttgctgaaagagctgctaaagtattccaaggactgtgagggatccgcgctcctcaagaaagcgctggacgccatgttggacctcctgaaaagcgtgaatgatagcatgcaccagatcgctattaacgggtacatcggcaatctgaatgaactcggcaagatgataatgcaggggggattttctgtttggatcggccacaagaagggggcaaccaagatgaaagaccttgcccgattcaaacctatgcaaaggcatctgtttctgtacgagaaggctattgtgttttgcaagcgacgagtggaaagcggtgagggaagcgatcgatatccatcgtacagctttaaacactgctggaagatggacgaggtcggcatcacggaatatgtgaaaggggataaccgcaaattcgagatctggtacggggaaaaggaggaggtttacatcgtacaagcatcgaatgtagatgtgaaaatgacgtggctgaaggagatcaggaacattctcctgaaacagcaggaactgttgactgttaagaagagaaagcagcaggatcagttgacggaacgagacaagttccaaatttccttacagcagaacgatgaagacctgtgccgacggtggttatcttacattgatgaagcaacaatgtccaacggtaagtag

SEQ ID NO: 229761 - DNA, 2955 bp, synthetic construct
  misc_feature 1..2955: note = Description of Artificial Sequence: Synthetic coding sequence
  source 1..2955: mol_type = other DNA
atgaccgtacggaggctgtcactactttgcagagacttgtgggcactctggctactgttgaaagccggtgccgatgagataatgcaccaagacatcgtgcctttgtgcgctgccgatatccaggatcagctgaagaagaggtttgcctacctatccggagggcgaggacaagacggctcgcctgtcatcacatttcccgattatcctgcgttcagtgaaatcccggacaaggagttccaaaatgtgatgacatacctgacaagtattcctagtctgcaggacgctgggatcggtttcattttggtaattgaccgccgacgggataaatggacaagcgttaaggcctctgtactccgaatcgcggcatcattccccgctaatctccagctagttttggtgctccggcctaccgggttctttcagaggaccctatctgatatcgcgttcaaattcaacagggacgactttaaaatgaaagttcccgtgattatgctcagcagcgtgcctgatttgcacggctacatagacaagagtcagctcactgaagatttaggagggactctggactactgtcattccagatggctgtgtcagcgcaccgcaattgagtcttttgcccttatggtcaaacagactgcacaaatgcttcaatcctttggcactgaactagcggagaccgaactcccaaacgatgtgcaatccacctccagcgttctgtgtgctcacacggagaaaaaggataaagcaaaggaagacctcaggcttgcattgaaggagggccattccgtcctcgagtctctaagagaactccaggctgagggctcagaaccaagtgtgaatcaggaccagctcgataatcaggcaacggtgcagagactactggcccagctcaacgagactgaagcggcattcgatgagttctgggccaagcaccaacagaaactggaacagtgtcttcagttgcggcacttcgagcagggattccgagaggttaaagcgatcctcgatgccgcttctcagaaaatagcgactttcactgacattggaaatagcctggcgcacgtagagcatttgctgcgcgatctggcgtcttttgaggaaaagagcggagtggctgtagagcgggctcgtgccctgagtctggatggcgaacagctgatcggaaataagcattacgcggtcgattcgatcagaccaaagtgccaggaactcagacatctgtgtgaccagtttagtgccgaaatagcccgtaggagaggattgctgtctaagtcactggaactccaccggcgactggaaacttcaatgaaatggtgtgacgaaggcatctacctcctggcttcacagccagtggataagtgccagagccaggatggcgcagaagcagctctgcaggaaatcgaaaaattcctcgaaaccggcgctgagaacaagatccaggagctgaatgctatttacaaggagtatgagagtattctcaatcaggacttgatggaacatgtccggaaggtgttccagaagcaagcttcaatggaggaagtctttcaccgacggcaggcttctttgaagaaactggcagctaggcagactcgacccgttcaacctgttgctcctcggccagaggctcttgccaagagtccttgtccgagtcccggaattaggaggggctcggaaaacagctcatcagaaggcggagctctgagaaggggaccataccggagggccaaatcggaaatgtctgaaagtcgacaaggaagggggagcgccggtgaagaggaggaaagcctggctatcctgcggaggcatgtcatgtcagaacttctagacaccgagagagcgtatgtagaggagctgttgtgtgtcctggagggctacgcagcagaaatggacaatccgcttatggcacatctcctttctaccgggctgcacaacaagaaggatgtcctgttcgggaatatggaggaaatttatcacttccataacagaattttcctccgtgagctggagaattacacagattgtccagagctcgtcggccgatgcttcctggagcgtatggaggacttccagatatatgaaaagtattgtcaaaataaacccagatctgagagtctttggaggcagtgcagcgattgccccttcttccaggagtgccagcgaaagctggaccacaagttgagcctcgactcgtatctcttaaagcccgtccaacgcatcaccaagtatcagctgcttttgaaggaaatgctaaagtacagccgcaattgcgaaggggcagaagacctccaagaggccttgagctccatcctgggcattctgaaagccgtcaatgacagtatgcatctgattgccattactggttatgatgggaatctcggagatttggggaagctgctaatgcaaggaagctttagcgtttggactgaccacaaaagagggcacaccaaagtaaaggagctcgctcgctttaaaccaatgcagcggcacctctttctgcacgaaaaggctgtgctgttttgcaagaaacgggaggaaaacggagagggctacgaaaaggccccttcatactcctacaagcagtctttaaacatggccgctgttggaatcaccgaaaacgtgaagggcgatgctaaaaagtttgagatttggtacaatgctcgagaggaggtctacattgtccaggcacccacccccgagatcaaagccgcatgggtgaacgaaatcaggaaggtgctgactagccagctacaagcatgccgagaagctagtcagcacagagccctggaacagtcacaatccctgcctctcccagctcccacatcaactagtccaagcagagggaactcacgaaacattaagaaactggaggaaaggaagactgatccactgtccctggagggttatgtgagcagcgccccattgaccaagccccctgagaagggcaaggagccatag

SEQ ID NO: 229762 - DNA, 3390 bp, synthetic construct
  misc_feature 1..3390: note = Description of Artificial Sequence: Synthetic coding sequence
  source 1..3390: mol_type = other DNA
atggccgagaagggcgcttccagaggaactctgaggcgcctgtggtcgttgccaaggagaaggcgtggtaccgcaggaaggtcacgccctgatgagatcatgcatcaggatatagtgcctctgtgtgcagctgacatccaggatcaactgaagaaacggtttgcatatctctctggcggaagagggcaggatggctcacccgtcatcacttttcccgattaccccgcatttagcgagattccggacaaagaattccagaacgtgatgacctatctcaccagcatcccatccttgcaggacgcgggaatcgggtttatccttgtcatcgaccgcagacgggacaagtggactagcgtcaaagcctctgtccttcgcatcgctgcttctttcccagcaaacttgcagctggtattagtccttcgcccaaccggattctttcagagaactctctcagatatcgcttttaaattcaaccgtgacgacttcaagatgaaagtgccagtgattatgctgagcagtgttcccgacctccatggatacattgacaagtcccagctgactgaggacctcggaggcacacttgattactgccattcgcgatggctgtgccagaggaccgctattgagtccttcgctctgatggtgaagcagactgcccagatgctgcaaagtttcggaacggaacttgccgaaacagagttgcccaacgacgtgcaaagcacttcgagcgttctgtgtgctcatacggagaagaaagataaagctaaagaagatctgagattggctctcaaggaaggccactccgtgctcgagagtctgcgcgaactccaggctgagggcagcgaacccagcgtcaaccaggatcagcttgacaaccaggctacagtgcagcgtctcctcgcacagctcaatgagaccgaagcagcgttcgacgagttttgggctaagcatcagcaaaaactggagcagtgcttacaactacgccatttcgaacagggattccgggaagtaaaagccatcctggacgcagctagccagaaaatcgccactttcaccgacatcggaaactcactagcacacgtggagcatttgctgagggatctggctagcttcgaagagaagtccggcgtggctgtggagagggcgcgagcactgtctctggacggcgagcagctgattgggaataaacactacgctgtcgactcaattaggccaaaatgtcaggagttgcgacatctttgcgatcagttctctgccgaaattgcccgtaggagaggcttgttgagtaagagcctcgagctccaccgcaggctagagaccagtatgaaatggtgcgatgaaggcatttatttgctggcatcccagccggtggacaagtgccaaagccaggacggcgctgaagcagctctgcaggaaatcgaaaaatttttagaaaccggggctgagaacaaaatacaggagctcaacgccatctataaggagtacgaaagcatcctcaatcaggatttaatggagcacgtgaggaaagtatttcagaagcaagcctccatggaggaggtgtttcacagacgacaggcctctcttaagaaactggcagcccgacagacccgtcccgtacaaccagttgccccaaggccagaagcactggctaaaagtccatgtccttctccgggaataaggcgtggttctgaaaactcttcctcagagggcggagctctgcgcaggggaccctaccgcagagccaaatctgaaatgtccgaaagccgccagggtaggggatctgctggggaagaagaagaatcgctggccatcctgcggaggcatgtcatgagcgagctgctggacaccgagagggcatatgtcgaggagctcttgtgcgtcctcgaggggtatgctgccgagatggataacccactgatggcacacctgctgtcaactggcctgcataataaaaaggacgtgctatttggtaatatggaagagatttatcattttcacaaccggatattcctacgcgagttggaaaattatactgattgcccggagctggtgggacgatgtttcctcgaaagaatggaggatttccaaatttacgaaaaatactgtcagaataagcccaggtctgagtccctatggcgtcagtgctctgattgccctttctttcaggaatgccagcgtaagctggatcataaattaagtctggacagctatctacttaagcccgtccagagaatcactaaatatcagttactgctgaaagagatgctgaagtacagcaggaattgtgaaggcgcagaggaccttcaagaggctttaagctctatcctgggcatccttaaagccgtcaacgatagtatgcatttgattgctatcactggttacgatggaaacctgggagaccttggaaaactcctaatgcaggggagttttagcgtgtggacagaccacaagcgtggccacactaaagtcaaggagctcgcaagattcaaaccaatgcagcggcacttatttctccatgagaaagctgtgttattttgtaaaaagagggaagagaatggcgaaggttacgagaaagcaccttcgtactcttacaagcagtccttgaacatggctgcagtgggcatcactgagaacgtaaagggggacgcaaagaaatttgagatttggtacaacgccagggaggaagtctacatcgtccaagcacccacccctgagatcaaggctgcgtgggtgaatgaaatacggaaggtcctgactagccagctgcaggcctgcagggaggcgagccagcatcgcgcacttgagcagagtcagtcattgccactcccggctcctactagcaccagcccaagccgtggtaactcccgcaatatcaagaagctggaggaacggaagactgacccactctctttggaaggatatgtctcttctgccccacttactaagccccctgagaaggggaagggctggagcaagactagccactcactggaggctccagaggatgatgggggttggtcctctgccgaagagcaaattaattcctccgacgcagaggaggacgggggtctaggccctaaaaaattggtgccaggaaaatatactgttgtggccgaccacgaaaagggcggtcccgacgctctacgggtgcgctccggtgacgttgtggagctcgtgcaggagggcgacgaagggctctggtacgtgagagacccgactaccgggaaggagggttgggtacctgcctcatctcttagtgtacgtctgggcccaagtggttcagcccagtgtctgagcagctccgagtcatctcctggttcagcagtcctgagtaactcgtcaagctgctctgaaggaggccaggctccattcagcgacctgcagggatag

SEQ ID NO: 229763 - DNA, 3549 bp, synthetic construct
  misc_feature 1..3549: note = Description of Artificial Sequence: Synthetic coding sequence
  source 1..3549: mol_type = other DNA
atggctcgtgttgagagcccagtccccgcagctcgggcatccttaactggaagttgcgttttgggccaggctatgccgctgaggggaggcgcaggcccttctcccgcatctcatggccctacgcatggcccttcggaccctcgcacatgtcttccaggaagaggagcagggggaatgaggccccacggccgaggtgccctcgggtgttgtgggctgtgctctttttacacttgtcacggcgcagctggagatgagataatgcaccaggacatcgtgccactttgcgcagccgacatccaggatcagttaaaaaaaaggttcgcttacctgtcaggaggtcgcggtcaggacggctccccagtgataaccttcccagattaccctgcattctccgaaataccagacaaggaatttcagaacgtgatgacctaccttacgagtattccaagccttcaggacgcgggaataggctttatattggtgatcgatcggcgaagggacaagtggacttccgtgaaagcttccgttctgcgcatcgccgcttccttcccggctaacttgcagctggtgctagttttaaggccaacggggttttttcagcgcacattgtcagacattgcatttaaattcaatagggacgatttcaaaatgaaggtgcccgtgattatgttatcttcagtaccagacctgcatggttacattgataagagccagctcacagaggaccttggcggaactctcgactactgccattcacgatggttatgccaaagaacagccattgagagttttgcactgatggtgaaacagactgctcagatgctccagagctttgggacggagcttgccgagactgagttgccaaacgacgtccagtctacctcttccgtactgtgcgcccatactgaaaaaaaagataaggcaaaggaagatctgcgcttggccttgaaggaaggccatagcgtcttggaaagcctgagggagctccaggccgaggggtccgaaccctcagtcaaccaggaccagcttgataaccaggccacggtgcagagactgctggcccagctgaacgaaacagaagcagccttcgacgaattctgggcaaagcaccagcaaaaactggagcaatgtctacagctacgccactttgagcaaggatttagggaggtaaaggcaattcttgacgcagctagtcagaagatcgcgactttcactgacattggcaacagtctcgcacacgtggaacacctgctgcgcgatctggcttcctttgaagagaagagcggggtggccgtagaacgggctcgtgcacttagcctggatggcgaacaactgatcggaaacaagcactatgccgttgatagtatccgaccaaaatgccaggagctgagacacctgtgtgaccagttttctgcggaaatagctcgccgacggggactactctccaaaagtctggagttacatagaagattagagacttctatgaaatggtgcgatgaaggaatctatctactcgccagtcagcctgtggataagtgccagagtcaagacggagcagaagcagcattacaggagatcgagaaatttctggagaccggagccgagaataagatacaggagctgaatgctatttacaaagaatacgagtcaatccttaatcaagatctgatggaacatgtgaggaaagtgttccaaaagcaagctagcatggaagaggtgttccatagaagacaggcaagcctgaaaaagttagcagccaggcagacacgcccagtgcaacctgtggctccccgaccagaagcactggcaaaatccccttgccctagccctgggattagaagagggagtgaaaacagctcgagtgaaggtggtgcactgcgacggggtccttatcgccgagctaagagcgagatgtccgaatcacgacaaggcaggggttccgccggtgaggaagaagaatcactcgcgattttgcggagacatgtcatgagcgaactgcttgatacagaaagagcatacgtcgaagaattgctgtgcgtactagaaggttacgccgcagaaatggataaccctcttatggcacatctgctgagcaccggcctgcataataagaaagacgtcctcttcggcaacatggaggagatataccacttccacaatagaatctttctgcgcgagttggaaaactatactgactgccctgagctggtcggtaggtgcttcctagaacgaatggaggacttccaaatttatgagaagtactgtcaaaacaaaccacgctccgaatctctttggcggcagtgctccgattgtccattctttcaggagtgccagcggaaactggatcataaattaagtcttgactcttacctgcttaaacccgtacagcgaattacaaaataccagctgctcctcaaggagatgctgaaatattctcgcaactgcgaaggagccgaggatctgcaggaggccctgtctagtattctgggaatcctgaaggcggtaaatgactcaatgcatcttatcgccattacaggatatgacgggaatctaggggacctcggtaagctgttaatgcaggggtcgttctccgtctggaccgaccataaacgcggacacactaaggtgaaggaactcgccaggtttaagcccatgcaacggcacctgttcttgcacgaaaaggcagtcctgttttgtaagaagcgagaagagaacggggaaggatacgaaaaggcaccaagctatagctacaaacagtccctgaatatggcggctgtgggtattaccgagaacgttaagggagacgccaagaagtttgaaatctggtataacgccagagaagaggtgtacatcgtgcaggctccaacaccggagattaaggcagcttgggtgaacgaaatccgcaaggtcctgacatctcaattacaggcctgtcgggaggccagccagcaccgtgctttggaacagtcgcaaagcctgccccttcctgcaccgacctcaaccagcccgagcagaggtaacagccgcaacatcaagaagctggaggagagaaaaacagacccattaagtctcgaaggctacgtgagtagcgcgcctctgaccaaacccccagagaagggcaaagggtggagcaaaacctctcatagcttggaggcccctgaggacgatggaggatggtctagtgctgaggagcaaatcaatagttccgatgcggaggaggatgggggactgggacctaaaaagcttgtgcctgggaagtacactgtcgtcgccgaccacgagaagggaggccctgacgcactaagagttaggagcggtgatgtcgtagaactggtgcaggagggagatgaggggctgtggtacgtgcgagaccctaccaccggaaaggaggggtgggtgcccgctagttccctgagtgtgcgcctgggcccaagtggctcagcccagtgtctgtcatcgtccgagagcagtcccggttctgctgtcttatcaaattccagctcatgcagcgaagggggacaggcaccttttagtgatctccagggctag

SEQ ID NO: 229764 - DNA, 3414 bp, synthetic construct
  misc_feature 1..3414: note = Description of Artificial Sequence: Synthetic coding sequence
  source 1..3414: mol_type = other DNA
atgtttgactgctggcggttcatcctctgtaaacggcctgggtctaatagctactcgtcccctcagcggcctaatgaagctaaaaaggaagaaacggaccaccagatcgacgtcagtgacgtgatccggttagtacaggatacgcctgaagcaacggcgatggctacggacgagatcatgcaccaagacatagtcccactttgcgctgcggatatccaagatcagctaaaaaaacggtttgcgtatcttagcggcggaagaggtcaggatggatccccagttataacctttcccgattatcccgcattttcagagattccggataaagagtttcaaaacgtgatgacctacctgaccagcattccaagcctccaagacgccggaattggcttcatactcgtgatcgaccgccgacgagacaaatggacatcagtgaaggcctcagtccttcgcattgcagcgagtttcccagcaaatctccagctagtcctggtgcttcgaccaacgggctttttccagaggaccctaagcgacatcgcttttaagtttaatcgggacgattttaagatgaaggtgcctgtgattatgctaagttccgtgccagatctacatggttacatcgataagtctcagctcactgaagatctgggcggaaccctggactattgccattctcggtggttgtgccagcgcaccgccatcgagtctttcgccctcatggtgaaacagacagcccaaatgctccaatcttttgggaccgagctggcagagacagaactgcctaacgacgtgcagtcaacctcatctgtgttgtgcgcacacaccgagaaaaaagataaggctaaggaggacctgcgtcttgcactaaaagagggtcattctgtattagagagcttgcgcgaactccaggctgagggctcagagccatccgtgaatcaagaccaacttgataaccaggccactgtccaacgattgttggcacaactcaatgagacagaagctgcatttgatgagttctgggctaagcaccaacagaagttagaacaatgcctgcagttgagacactttgagcagggtttccgcgaggtgaaagcaattctcgatgctgccagccagaaaattgccaccttcactgatattggcaacagtctggctcatgtggagcaccttctgcgtgacctagcctctttcgaggaaaaatctggtgtggccgtggagagagccagggccctgagcctggatggggaacagctaataggtaacaagcactacgctgtcgacagtatccgtcccaagtgccaggagctgaggcatctttgtgatcaattctcagctgaaatagctcgaagacgcggtctcctgtccaagtccctggagctacaccggcgtctggaaaccagcatgaagtggtgcgacgagggaatctacctgctggcgagtcagccagtcgataaatgccagtctcaagacggcgcagaagctgctcttcaggaaattgaaaagtttctggaaaccggtgccgaaaataagattcaggaacttaacgcaatatacaaggagtatgaatcaattctcaaccaggacctaatggagcatgtcaggaaggtgtttcaaaagcaagcgtccatggaagaggtgttccacaggaggcaggctagcttgaagaaactggctgctaggcagacccgccctgtgcagcccgtggccccacggcctgaagcattagcaaaatcgccatgtccttctccaggtataagacggggttcagagaattcctcttcagaaggaggggctttgagacgaggcccttatcgccgagcgaaaagcgaaatgagcgaaagcaggcagggcagggggtccgcgggagaagaggaagagtcattggcgattctcaggcggcacgtcatgtccgaattacttgatacagagcgtgcctacgtggaagagctcctatgcgttctggagggctatgctgccgaaatggacaatccgttgatggcccacctgttatctactggactgcacaataagaaagatgtgctgttcggcaatatggaggagatttaccattttcacaatcgtatctttttacgcgagctggaaaactacacagactgcccagaactggtaggtaggtgtttcctggagaggatggaagatttccagatatatgaaaaatactgccagaacaagccacgaagcgagtcactgtggcgccagtgctctgactgtcctttctttcaggaatgccagagaaagctcgaccacaaactatcactggattcctacctcctcaagcccgtgcagaggatcactaagtaccaactgctcctgaaggagatgctgaagtactccagaaactgcgaaggagctgaggatctccaagaagccctgtcatccatactgggtatcctcaaagccgtcaatgactctatgcatcttatcgcaattacgggctacgatggaaatctgggggatctggggaagctgctgatgcaaggctccttttcagtctggacagaccataagaggggacacacaaaggtgaaagaactcgcccgatttaaaccaatgcaacgccatctgtttctgcacgagaaggccgtgctgttctgcaagaaaagggaggaaaatggcgagggatacgagaaagcaccatcgtactcatacaagcagagcctcaatatggccgctgtgggcattaccgagaacgtcaaaggggacgctaagaagtttgagatctggtataatgcaagagaggaagtctatattgtgcaggccccaaccccagagatcaaagccgcttgggtgaacgagattagaaaggtacttaccagtcagctacaggcttgtcgagaagcctcgcagcatcgcgctttagaacagtcacagtcactgcctcttcctgctcccacatctacatcaccatctcggggaaattcgcgaaacattaagaaattggaggaacgtaaaacagaccctttgtcattagagggatatgtcagttctgcgccattgaccaagccaccagaaaaaggaaagggctggtcaaaaacatctcactcgctggaggcccctgaggacgatggcggttggtcatccgcagaagagcagatcaactctagcgatgccgaagaagacggtgggctaggccctaagaagttggtccctggcaagtacacagtggttgccgatcatgagaaaggagggcctgatgctctgcgggtgcggtccggggacgtggtcgaactagtgcaggagggcgatgagggcctctggtatgtgcgggacccaacaactggcaaggagggctgggtcccagcttcttccctttcggttcgcctgggaccaagcggctctgctcagtgtttgtcctcctcaggaaaagcacacgtgccgcgagcccacccttag

SEQ ID NO: 229765 - DNA, 2382 bp, synthetic construct
  misc_feature 1..2382: note = Description of Artificial Sequence: Synthetic coding sequence
  source 1..2382: mol_type = other DNA
tagagtcagaaaattgcgactttcaccgatataggcaattcacttgctcatgtagaacacctgttacgggacttggcctcattcgaagaaaaatcaggggtggccgtagaaagagcccgtgccttgtctttggatggagaacagttaatcggaaacaagcattacgccgttgatagtataagacctaaatgtcaggagctgcgccatctctgcgaccaattctcagcggaaattgccaggcgcagaggcttactgtctaaaagccttgagctgcaccgaaggctagagacatctatgaaatggtgcgacgagggtatatacctacttgcctcacagccagtggacaagtgccaatcacaggatggcgcagaggccgctctgcaggagatagagaaattcttggagactggcgctgagaataagatccaggaactgaacgcaatctataaggagtacgaatctatcctaaaccaggacttgatggagcacgtcaggaaagtattccagaaacaggcttcaatggaggaagtgttccaccgcagacaggcctctttaaaaaagcttgccgcacgtcagaccagaccggttcagcctgttgccccaaggcccgaggcacttgccaagtcaccatgtccctcccccggaatacgccgtgggagcgaaaactcatcttctgagggaggggcactgagacggggtccctaccgaagagcaaaatcagaaatgagcgagagccgacagggcagggggtccgctggagaggaagaggaatcactggccattttgaggcgccacgttatgtctgagcttttggataccgaaagagcttatgtagaagagctgctttgcgtcctagagggttacgccgcagagatggacaatccccttatggcccatctcttgtcaactggactgcataataagaaggacgtgctgttcgggaatatggaggaaatctaccacttccacaacagaattttcctgagagaacttgaaaactacaccgattgccctgagcttgtgggacggtgcttcctggaacgcatggaggatttccagatttatgaaaagtattgtcaaaataaacccagatccgaatctctgtggcgccagtgttctgactgccctttttttcaggagtgccagcgaaaactggaccataaattaagcctggactcctatctgctcaagccagtgcaacggataactaagtatcaactgctgctgaaagaaatgctcaagtattcacgcaactgcgaaggagcagaagatctgcaggaagcactcagctctattctcgggattttgaaggctgtcaatgactcaatgcacctgatcgcaatcaccggttacgatgggaatcttggcgacctgggcaagctgcttatgcagggttccttttccgtgtggactgaccataaaaggggccacacaaaggtgaaggaattggcccgtttcaaaccaatgcaaaggcatttgtttctgcacgaaaaggcggtgctcttctgtaagaagcgggaagaaaacggtgaaggctacgaaaaggctccctcttattcgtataagcagagcctcaacatggcagcggtgggaattactgagaatgtcaagggagacgcgaagaagtttgaaatttggtacaacgcgagagaggaagtctacatcgtgcaggccccaacccctgaaattaaagctgcctgggtgaacgaaatcaggaaagtgctcacttcacagctacaggcctgtcgcgaagcctctcagcaccgagcgctggaacaatcacagagtcttcctcttcctgcccctacaagtacgtctccaagccgtggtaattctcgcaatatcaagaagttggaagaacgtaagactgatccacttagtctggaggggtacgttagttcagcccctttgacaaaaccacctgagaaaggaaaggccagtcctacgagccctgacaagaaggcaaagagacacgaggtaaaatcggaccctaccccatttggcgttcggggatggagcaaaacgtcgcactccctggaagccccagaggacgatggaggctggagcagcgccgaggagcagattaactccagcgacgccgaggaggatggagggttagggcctaaaaaattagtccccggtaaatataccgtggtcgccgatcacgaaaagggaggcccagacgccctgcgcgtccggagcggagatgtggtagagcttgttcaggagggcgacgagggtctctggtacgtcagagatcccacaacggggaaggaagggtgggtaccagcgagcagcctgtccgttcggctcggacctagcgggtctgcccagtgcctgagttcgtctggcaaagcgcacgtgcctcgcgcacacccttag

SEQ ID NO: 229766 - DNA, 3291 bp, synthetic construct
  misc_feature 1..3291: note = Description of Artificial Sequence: Synthetic coding sequence
  source 1..3291: mol_type = other DNA
atgccgcttcggggtggagctggacccagtcccgcatcccatggtcccactcatggaccaagtgacccaaggacatgtctgccagggagaggagcaggcggtatgcggccacacgggaggggggctctgggatgctgcggcctgtgctctttttatacctgccatggcgctgcaggagatgagattatgcatcaggacatcgtgccactctgcgctgccgacattcaggaccaactaaagaagcgttttgcttatttgagtgggggtagggggcaggatggttctcccgtgattacattccctgactatccagccttctctgagattcctgataaagagtttcagaatgtcatgacataccttacgtcaatcccatctctccaggacgctgggatcgggtttatcctcgtgattgaccgcaggagagacaaatggaccagcgtgaaggccagtgtgctgcgaatagcagcaagcttcccggctaacttgcagcttgtgctggttcttaggcccactgggttctttcagcgtaccctttccgacattgcgtttaagttcaaccgcgatgattttaaaatgaaggtgcctgtgatcatgctgtcaagcgtgcctgatctgcacggctacatagataagtcacaactgactgaggatctgggcggtaccttggactactgccactctcgatggctgtgccagaggaccgccatagagtccttcgccctaatggtaaagcagaccgcccaaatgctgcaatcatttgggaccgagctggctgagacagaactccccaatgatgtgcagtctacgtcttccgtactctgcgcccataccgaaaagaaagacaaagcgaaagaagacctgcggctcgccctgaaggagggtcatagtgttctcgagtctctcagagagctacaggcagaaggttctgagccaagcgtcaaccaggaccaacttgacaatcaggctactgtgcaacggctcctggctcaactgaatgaaacagaagctgcattcgatgagttttgggccaaacaccagcaaaaactggagcagtgcttgcagcttcgacactttgaacaggggttcagagaggtgaaagccatattagacgctgctagtcagaaaatcgccacctttacagacatcggcaactcactggcccacgtcgaacacttactgcgagaccttgcgagtttcgaggagaagagcggggtggctgtagaacgggcaagagcactcagcctggacggcgagcagctcattgggaataaacattacgcggtagattcaatccgtcctaaatgccaggagctacgccacctgtgtgaccaattcagcgccgaaatagcaagacgaagaggtctgctctctaaatctctcgagcttcatcggaggttggagacatctatgaagtggtgtgacgaagggatctacctgctagcctcccaacccgtcgacaaatgccagtctcaggacggcgcagaagccgctttacaagagatcgagaaattcctcgaaactggagcggagaacaaaatccaggaactgaatgccatctataaggagtacgagagcatcctcaaccaggacctgatggagcacgtacgaaaggtgttccagaagcaagcctcgatggaggaggttttccacagaaggcaggcatctctcaagaagctggcagccagacagacaagaccagttcagccagtggcaccaaggccagaggcactggccaaatctccatgcccctctccagggatccggaggggatcagagaattcatcatctgaggggggagctctgcggcgaggcccttataggcgcgcaaagagcgaaatgtctgaatctcgacaggggagaggctctgccggtgaggaagaagaatcattagcgattctcagaaggcacgttatgtcggaactcctcgacactgagagagcatacgtcgaggagcttctgtgcgtgctagagggctacgctgccgaaatggataatccactgatggcccacctgctatctactggtttgcacaataaaaaagatgtgctctttggcaatatggaggagatctatcacttccacaatcgcatattcctgcgtgagctcgagaattatacagattgccccgagttggtgggacgctgcttcctcgagcgcatggaagactttcagatctatgagaagtattgtcagaataagcccaggagcgagtccctctggaggcagtgcagtgattgtcccttttttcaggaatgccagagaaaactcgatcacaagctctccctcgattcctatttactgaaaccagtgcagagaattaccaaataccaactgctattgaaggagatgcttaaatacagtaggaactgtgaaggggctgaagatctccaggaggccctgtcgtctattcttggtatattgaaggccgtcaatgatagcatgcacctgatagcaattacggggtatgacggaaatctgggcgacctgggcaaactcctcatgcagggatccttttcagtgtggaccgatcataagaggggccacactaaggttaaggaactggcgagatttaaaccaatgcaaaggcatcttttcttgcatgaaaaggccgtccttttttgcaagaaacgcgaagaaaacggggaggggtacgagaaagctccaagctacagctataaacagtcactgaacatggctgccgtgggaattaccgaaaatgtcaaaggagacgcaaagaaattcgagatctggtacaatgcccgtgaagaggtgtacatcgtgcaggcccctacacccgagataaaggctgcctgggttaacgaaatccgcaaagtgttgaccagccagctgcaggcctgtcgcgaagcaagtcagcaccgtgccctggagcagagtcagagcctgcctctgccagctccaacatccacctccccctcccggggaaactcaaggaacataaaaaagttggaggagcggaaaaccgatccacttagcctcgaaggctatgtcagctccgctcctctcaccaagcccccagagaaagggaagggttggagcaaaacatcacatagcctggaggcacctgaggatgacgggggatggtcgagcgccgaagagcagataaattcttctgatgctgaggaggatgggggactggggcctaaaaagctcgtcccgggtaaatacacagtagtggcagaccatgagaagggagggccagacgccctgcgggtcaggtcaggggatgtggtggagcttgtccaggaaggcgatgagggcctctggtag

SEQ ID NO: 229767 - DNA, 411 bp, synthetic construct
  misc_feature 1..411: note = Description of Artificial Sequence: Synthetic coding sequence
  source 1..411: mol_type = other DNA
atgcaccaggacatcgtgcctttatgcgcagcagacattcaggatcagctgaaaaagcggtttgcttacctgagcggaggcagagggcaggacggatctccagttataacctttcctgactatcccgctttttccgagattcccgacaaggaatttcagaacgtgatgacatatctaacttcaatacctagcctgcaggatgcgggtatcggctttatcctggttattgacaggagacgagataaatggacaagtgttaaagcaagcgtgctgagaattgccgcttctttccctgccaatttacaactcgtgttggtgctgagacctaccggcttcttccagagaacattaagcgacatcgcctttaagttcaatcgagacgactttaaaatgaaagtacctgtgatctag

SEQ ID NO: 229768 - DNA, 3372 bp, synthetic construct
  misc_feature 1..3372: note = Description of Artificial Sequence: Synthetic coding sequence
  source 1..3372: mol_type = other DNA
atgacagtccgcaggctgtctctcctgtgcagggacctgtgggccctctggctcctgttgaaagcgggagcagacgagataatgcatcaggacatcgtcccactgtgtgcagcggacatacaggaccagcttaagaagagatttgcctatctctcagggggtaggggccaggacgggagtccggtgatcacttttcccgactaccccgctttttcagagatccccgacaaagagtttcaaaacgttatgacttatctcacatccatccctagccttcaggacgctgggatcggcttcattctggttatcgacaggagaagggacaaatggacatccgtcaaggcttccgtccttcgaattgccgcatcctttccagcaaatttgcagctcgtcctggtcctcaggccaaccggctttttccagcggacactcagtgatatcgcctttaagttcaacagagacgattttaaaatgaaagtacccgtcataatgctctcctctgtccccgatttacatggatacattgataaaagtcaacttaccgaggatctgggtgggactctagattactgtcattcacggtggctgtgccaaaggactgccatcgaaagcttcgcattaatggtgaagcaaaccgcacagatgttacagtcttttggaacggagttggccgagacggagctacccaacgatgtccagtcaaccagctcagtgttgtgcgctcacacggagaagaaagacaaagccaaagaagaccttagattggctctgaaagaaggtcattctgtcctggagtccctcagagagctccaggccgagggaagcgaacccagcgttaatcaagatcagctggacaatcaggctactgtgcagagactgctggcccagctgaacgaaactgaagccgcttttgatgagttctgggccaaacaccagcaaaagctcgagcagtgtctccagctgagacattttgagcagggcttccgggaagtgaaggcgattttagatgcagctagtcagaaaattgctacgtttacagatatagggaactccctggctcatgtggaacatctcctgagagatctggctagtttcgaggagaagagcggggtagcagtggaacgggctagggccctttccctagacggcgaacagcttatcggaaacaaacactacgctgtcgactcgatacgacctaaatgtcaggagctcagacacctctgtgatcagtttagcgccgagatcgcaagaaggaggggtctcctgagcaaaagcctggaactgcacaggcgccttgagacgtcaatgaaatggtgcgacgaggggatttacctgctggcctcccagccagtggacaagtgccagtcgcaggacggcgctgaggcagcactccaagaaattgaaaagtttcttgagaccggggcagaaaataagatccaagaattgaacgcaatctacaaagagtacgaatccatcctgaatcaggacttgatggagcacgtacgcaaagtctttcagaaacaggcaagtatggaagaagttttccaccgcagacaggcttctcttaagaagctggccgctaggcaaacacggccagttcagcccgtggcgcctcgcccagaggctcttgccaaaagcccatgcccaagccccggaatccgacggggttccgaaaattcctccagcgaaggcggagccctcaggcgtggaccgtaccggagagctaagtccgaaatgagcgagtctcggcagggaaggggctctgcgggtgaagaggaagaaagcctggcaatcctgaggaggcacgtgatgagtgagctgctggacaccgagcgagcgtacgttgaagaactgttatgcgtgctggaggggtacgcagctgaaatggacaatcccttgatggctcacctcttaagcacaggcctgcacaataagaaggatgtgttatttggcaacatggaggagatttaccacttccacaaccggatcttccttagggagctcgaaaattacactgactgccctgaactggtcggaagatgttttttagagcgtatggaagacttccagatctacgagaagtactgccagaacaagccacgttcagagagtctgtggcgtcagtgcagcgattgtcctttctttcaggagtgccagcgaaaactggatcataagctatcgttggatagctatcttttgaagccggtccagcggataacaaaatatcagctgctcctcaaggaaatgctaaagtattcaagaaattgtgagggcgcagaagacttgcaggaagctctatctagcattctcggaatcctgaaagcagtgaatgactccatgcacctaatcgccattaccggttatgacggtaacctcggcgacctaggaaagctgctgatgcagggatcctttagtgtctggaccgaccacaaaaggggccataccaaggtgaaggagcttgccaggttcaaacctatgcagagacatctgttccttcacgaaaaagccgttctcttttgcaaaaagcgagaagagaatggggaggggtatgagaaagcgccaagctacagctacaaacagagcttgaatatggctgctgtgggtatcaccgaaaatgtcaagggcgacgccaagaagttcgagatttggtataatgccagggaggaagtgtacatcgttcaggcgccaacgccagagattaaggccgcatgggtgaacgagatcaggaaggtgctgacgagccagctgcaggcatgccgtgaggcctcacagcatagagcgctggagcagtcccaatccctccccctgcctgcgcctacctccacttcaccatcacgaggcaattcacgaaatatcaaaaaactggaagagcgcaaaactgatccactatcactggagggctatgtgagctccgcaccactgacgaagcctccagaaaagggcaagggctggtctaagacctctcattccctagaagctcccgaagacgacggcggttggagtagtgcagaggaacagattaatagctctgatgcagaggaagatggcggactgggcccaaaaaaacttgtgcccggaaaatacactgtggtcgctgaccatgagaagggcggaccagatgccctgcgcgtgaggtcaggtgacgtggttgagctcgtccaagaaggagacgagggcctgtggtacgtgcgggatccgaccaccgggaaagagggatgggtacccgcatcttctctgtcagtgagactgggtccatccggttcagcacaatgtctcagtagctcagaatcttcgccaggcagcgcggtgctaagtaatagctcctcttgctcagaggggggacaggcccctttttcagatttacagggatag

SEQ ID NO: 229769 - DNA, 741 bp, synthetic construct
  misc_feature 1..741: note = Description of Artificial Sequence: Synthetic coding sequence
  source 1..741: mol_type = other DNA
atgcgtttctggctgcggactgaggagatggcactcgaggaaatggtgcagcgcctgaacgccgtgtccaaacacactgacgagatcatgcatcaggatatcgtccccttgtgtgcggctgacatccaggaccaactgaagaaaagatttgcctacctttcagggggacgtggccaggacgggtccccagttatcaccttccccgactatccagctttttccgagatccctgataaggagttccagaatgtgatgacatacctgacctcaattcccagtctgcaggatgcaggcattggcttcatcctggtgatagatcggcgaagagataaatggacttccgtaaaggcctccgtgctgaggattgcggcaagcttccccgcaaaccttcaattggtgctggttttacgcccaacaggcttctttcaacgcaccttatcagatattgctttcaagttcaaccgcgacgatttcaagatgaaagttcctgtgattatgttaagttcggttccggatctgcatggctacatcgataaatctcagctcacagaagatcttggagggacacttgattattgccactcaagatggctttgccagagaacagctattgagtcctttgctctaatggtgaagcagactgcgcaaatgctccaaagtttcgggaccgaattggctgagaccgagctcccgaatgatgtgcagtctacctcctcagtcttgtgtgctcatactgagtag

SEQ ID NO: 229770 - DNA, 3342 bp, synthetic construct
  misc_feature 1..3342: note = Description of Artificial Sequence: Synthetic coding sequence
  source 1..3342: mol_type = other DNA
atgggagatggcaaggccgtaagaatatccgtcgctgagatgaaatcctattacctatactctgaatggtgttcgtggctcctgagcgtggctgaggacgaaatcatgcatcaggatatcgtacctctgtgcgccgctgacattcaggaccagctgaagaagcgcttcgcgtatctcagcggtggtcgcggacaggacggctcacccgtaattacattccccgattatcctgcgtttagcgagatccctgataaggagtttcagaatgtcatgacatacctgaccagcattccctccctacaggacgctggaattggtttcattctggtgatcgataggcgtcgagacaagtggacatcagtgaaagctagcgttcttcggatcgcggcaagcttccccgcaaatctgcagctggtcttggtcttacggcctactggcttcttccagcgcacgctgtctgatatcgcttttaaattcaatcgggacgacttcaagatgaaggtgccagtgattatgttgtcctcagtccccgatttacatggctacatagacaagagtcagctgacagaggatctgggcggaactttggactattgtcacagccggtggctttgccagagaacagcgatcgaatccttcgccctgatggtgaagcagactgcccagatgttgcagtccttcgggaccgagctggccgagacagagctgcccaacgatgttcagagcacctcctccgtcctgtgtgcccacaccgagaaaaaggataaggccaaggaagatttgcgcctggcactgaaagagggacatagcgtgcttgagtccctgagagagttacaggccgaggggagcgaaccatctgtgaatcaagaccaattggataaccaggccaccgtacagcgtctgctcgcacagctgaatgagacagaggcagcatttgatgaattctgggccaagcatcagcagaagttagagcaatgcctgcagctccgacacttcgaacagggatttagagaagtcaaggctattctcgatgctgcgtcacagaaaattgccactttcacagatataggaaactctctggcccatgtggaacatctgctgcgggatctggcctctttcgaagagaagagtggggtcgccgtggagagagcgagagccctgtcactcgacggagagcagctgattggcaataagcactatgcagtggactctattcggccaaagtgtcaagagctgaggcacctgtgtgaccaattctcagcagagatagcaaggcggagaggcctcctctcaaagagcctggagctgcacaggagacttgaaacttccatgaagtggtgtgacgagggcatctaccttctcgccagccagcctgttgacaagtgccagtctcaggacggtgctgaagctgccctccaagagattgagaagtttctggagacaggcgctgagaataagattcaggagctcaatgcgatatataaggagtacgaatctatcctaaaccaggacctgatggagcatgtcagaaaagttttccagaaacaagcctctatggaggaggtgttccatcggagacaggccagcttgaagaaactggccgcaagacaaacaaggcctgtgcaacctgtggcccctcggccagaggctctggctaaatccccctgcccgtcccctggcattcggcgaggatctgagaactccagctcggaaggtggtgcccttcggcgtggcccttatcggagggccaagagcgagatgagtgaatcccgacaaggtcgcggatcagctggagaggaggaagagtcccttgctattcttcgtcggcatgtcatgagcgagctcttggacaccgaaagagcctatgtggaggaactcctgtgcgttctcgagggctacgcagccgagatggataatcctctgatggcccatctattgtccactgggctccacaacaagaaggatgtgctctttggtaacatggaggagatttaccacttccacaatagaatatttctcagggagttagaaaactacactgactgtccagagttagtgggacggtgtttcctggaaagaatggaggatttccagatctacgaaaagtattgtcagaacaagccacgcagcgagagtctttggcgtcagtgtagtgactgtccattcttccaggaatgtcagcgtaagcttgatcacaagctgtcactcgactcttatctgctgaagcccgtccagagaattacaaaatatcaactcctcctgaaggagatgctaaagtatagtcgcaactgtgagggtgccgaagatttacaggaagcccttagctcaattctggggatcctaaaggccgtcaacgacagcatgcatttaattgctatcaccggatacgacgggaatctgggtgatttaggcaagctccttatgcaaggatctttcagcgtctggacggaccacaagcgcggtcacaccaaagtgaaagaactggctcgcttcaaacccatgcagcggcacctgttcctgcatgagaaggcggtcttattttgcaagaaacgggaagaaaacggggaagggtacgagaaggctcccagttacagctataagcagagcctaaacatggccgctgtgggtattacagaaaatgtgaagggagatgcaaagaagttcgagatatggtataatgctagggaagaggtgtacattgtccaggcccctactcctgagattaaagccgcatgggtgaatgaaattaggaaagtgcttacctcccaactgcaggcatgtagagaagccagtcagcatcgggctctggaacaatcccaatctttgccattgccggcacctactagtaccagcccctcccggggtaacagccggaatattaagaagcttgaggagcggaaaaccgatccactgagcctcgagggatacgtgagcagtgccccactgactaagccacctgagaagggcaagggatggagcaaaacttcacacagcctagaagcacctgaggatgacggaggctggtcatccgcagaagagcaaattaattccagcgatgccgaagaagatgggggactaggcccaaaaaagctggtgccaggcaagtatacagtcgtcgctgaccacgagaagggtgggcctgatgcactgagagtgcgtagcggggacgtggtagagctggtgcaggaaggagacgaggggctctggtacgtgcgggaccccaccaccggtaaagagggttgggtgcctgcgtcttcgttgagcgtgcggcttggaccatcaggaagtgcacaatgtctgagttcatcagggaaagcacacgtgcctagggcccacccctag

SEQ ID NO: 229771 - DNA, 2712 bp, synthetic construct
  misc_feature 1..2712: note = Description of Artificial Sequence: Synthetic coding sequence
  source 1..2712: mol_type = other DNA
ttgaagatgcccgtgattatgctcagctccgtgcccgatctccacggctatattgacaaatcccagctgactgaggacctgggaggaactctcgactattgtcattccagatggttgtgccagaggacagctatcgaatctttcgccctcatggtaaaacagactgcccagatgctgcagtcctttggaaccgagctggctgagaccgaactgcctaatgatgttcagagcacttcaagcgtgttgtgcgcgcacaccgaaaagaaggacaaggccaaggaagaccttcgcctggctcttaaagaaggacactccgtgctcgagagtttgcgagagcttcaagcagaggggagcgagccatcagttaaccaggatcagctagataaccaggccacagtccagcgcctgcttgcgcagcttaatgaaactgaagccgctttcgatgagttttgggccaagcatcagcaaaagctcgagcaatgcttacaactgcgccatttcgagcagggcttccgcgaagtcaaggccatcttggacgcagcttctcaaaaaattgccacatttaccgatatagggaattctttggcccacgtggaacatctattgcgcgatctggcttctttcgaggagaagagcggcgtcgctgtagagcgggcacgcgctctgtccctagacggcgagcagctgattggaaacaaacattacgctgttgactcgatcaggccgaaatgccaagagctccgccacctctgcgatcagttctcggctgaaattgccagaagacggggactgttatccaagagcctcgagttacatcgaagattggagacatccatgaagtggtgtgacgagggaatctatctgctggcttctcaacccgtggacaaatgtcagtctcaggatggagccgaggcagcattgcaggagatagaaaagtttttggaaacaggagctgaaaataagatccaggaactgaacgcaatctataaggagtatgagagtatcttaaaccaagacctcatggaacatgtgcgtaaggtgttccagaagcaggcatcgatggaagaggtgttccaccggaggcaggctagcttgaagaaactggccgctaggcaaacaagacctgttcagcctgtggcaccacggcctgaagcactggccaagtccccatgcccatctccaggaatccgcagaggaagtgagaacagctcatccgaaggtggcgcactccgcagaggtccatataggcgggctaaatcagagatgagtgaaagtagacaaggccgaggctctgctggggaagaagaagagtcgctagcaatccttagaaggcacgtaatgagtgagctgctggataccgaaagagcttacgtcgaggagcttctatgcgtgctagaaggatatgcagcagagatggataaccctctcatggcccatttgttgagcacagggctgcacaataagaaggacgttttatttgggaacatggaagagatctaccactttcataaccgaatattcctgcgggagctagaaaattatactgattgcccagagctggtgggcagatgcttcctggaacggatggaggattttcagatctacgagaaatactgtcagaataagcctaggagtgagtccctctggaggcagtgcagtgactgcccattcttccaggaatgccaacgtaagctcgaccacaaactttccctagattcttacctgttgaaaccggtccagcgtatcacaaaataccagctgttactaaaggagatgcttaagtatagtcgaaattgcgagggagccgaggatcttcaggaggctctgagttcaattctcggtatcctcaaagccgtcaacgacagtatgcacctcattgcaattacaggctacgacggtaatttgggagatctgggtaaactccttatgcaggggagctttagcgtatggactgatcacaaaagaggacatacgaaggtgaaagagttagctcgattcaaaccaatgcagaggcacctgttcctccacgaaaaagcagttcttttttgtaagaagcgggaggagaacggcgagggatacgagaaggctccttcatattcatataagcagtccctaaacatggcggcagtcggcatcaccgagaatgttaagggcgatgccaagaagttcgagatttggtacaatgctcgggaagaagtgtacatcgtccaagccccaacccccgagataaaggctgcatgggtcaacgaaattcgcaaggtgctgacttcccaactccaggcatgtcgtgaagcctcacagcacagggccttagagcaatcccaaagtctgcccctgcctgctccaacttcgaccagcccatcccggggaaacagccgcaacattaagaaactggaggaaagaaaaacagatccgctgagtctggagggttacgtcagctcagccccactcacgaaaccaccagaaaagggtaaaggctggtctaagaccagccacagtctagaagctcctgaggacgatggtggctggtcctccgctgaagagcaaatcaactcatccgatgctgaagaagacggcggtttagggccaaaaaaacttgtacccggaaagtacactgtcgtggctgaccatgaaaagggtgggccagatgccctgcgtgtgcggtctggcgacgtggtcgagctggtccaggagggcgacgagggcctttag

SEQ ID NO: 229772 - DNA, 3414 bp, synthetic construct
  misc_feature 1..3414: note = Description of Artificial Sequence: Synthetic coding sequence
  source 1..3414: mol_type = other DNA
atgttcgattgctggagatttatactctgcaagcgaccaggcagtaactcctatagctcccctcagcgcccaaacgaggcgaaaaaagaagagacggaccatcagatcgatgtaagcgacgtcattcgcctggtgcaggacacccctgaggccacagccatggctacggacgagataatgcaccaggatatcgtgcccctgtgcgctgcagatatccaggatcagctgaagaaacgcttcgcttatttatctggcggacgaggtcaggacggcagccccgtcatcacatttcccgattaccccgctttttcagaaatacctgataaggagttccagaatgtgatgacttaccttacttcaatcccttctctgcaagacgcgggaatcgggttcatcctggtaattgataggagacgtgataagtggacatcggtcaaagcatccgtcttgaggatcgctgcaagctttcctgctaatctccagttggtcttagtgcttagacctacagggttttttcagagaaccctgagtgatattgcattcaagtttaatagagacgatttcaagatgaaagtgcccgttattatgctgtcctctgtgcccgacttgcacgggtatatcgataaatcccagttgacagaggacttgggcggaaccctagattattgccattctcgatggctgtgtcaaaggaccgccatcgagagctttgcattgatggttaagcaaaccgctcaaatgcttcagagcttcggtactgaactcgccgagaccgaacttccaaacgatgtgcagtccacttcttctgttttatgtgcacacacagagaaaaaggacaaggcaaaagaggacctgagactcgccctgaaggaggggcattcggtcttagaatcgctgagagaattacaggcagaaggctccgaaccctccgttaaccaggaccagctggacaatcaggcaacagttcagcggctccttgctcagctcaacgagactgaggctgccttcgatgaattttgggccaagcatcagcagaagctggagcaatgtcttcagctgcgacactttgagcagggtttccgagaggtaaaagcgattctggacgcagcctcccagaagatcgccactttcactgacattgggaattccttggcacacgtcgagcacttgttaagagatctagcatcctttgaagaaaaatccggagtggctgtggaacgcgctcgcgctctgagcttggatggtgaacagctgattgggaataaacactacgccgttgactccattcgacccaagtgccaggaactgcgacacctctgcgatcaattcagtgcagagatcgcacgaaggcggggtctcctgagcaaatcactcgagctgcaccgcagactggagactagcatgaaatggtgtgacgaagggatctacctgttggcctcccagcccgtggacaagtgtcagtcacaggacggtgccgaagccgctttacaggagatcgaaaagtttctggaaacgggcgcagagaataagatccaggagctcaacgctatttataaagagtatgaaagcatcctgaatcaggacctcatggaacacgtcagaaaggtgttccagaaacaggcttcaatggaagaagtgtttcaccgtcgacaagcgagcctgaagaaactggccgcaaggcagacccgcccagtccagcccgtcgctcctcggccagaagcactggcaaaaagcccctgtccctctcccggaataaggcgcggaagtgagaactcctcctccgagggaggggcactgcggcgaggaccgtacaggcgggcaaagagcgagatgtctgagtctcggcaggggcgtgggtcagccggtgaagaagaggaaagtctggcaattctcaggcgccacgtcatgagcgaactgttggacacagagcgggcttatgtcgaggagcttctgtgcgttttggaaggctatgccgctgaaatggacaatccactgatggcccatttgctgagtaccgggctgcacaataaaaaggatgttctgttcggcaacatggaggagatttatcacttccataataggatctttctgcgcgaactggagaactacactgattgccctgaactggttggcaggtgttttctagagcggatggaagacttccagatctacgagaagtactgtcaaaacaagcctaggagcgagagtctttggcggcaatgttctgattgtccattcttccaagaatgtcagaggaagctcgatcataagctgagtttggatagttatctactgaaacccgtgcagcgtatcacgaagtaccagctcctgcttaaggaaatgttgaaatattcccgcaactgtgagggagctgaagacctgcaggaagcactgtccagcatactgggcatcctgaaggcagtgaacgatagcatgcatctcatcgccattacaggatatgatggaaatctgggggaccttggcaagttgctcatgcaaggttctttttctgtgtggacagatcacaagcgaggacacactaaagtaaaagaattggcccgatttaagcccatgcagaggcacctctttctgcacgagaaagctgtgttgttttgcaagaaaagagaggagaacggtgaggggtatgaaaaagcacctagttactcatacaaacagagcttgaacatggccgctgttggaattactgaaaatgtgaagggcgatgcaaaaaaatttgagatatggtataatgctcgggaggaagtgtacatcgtgcaggcccctacacccgagataaaagcagcatgggtcaatgagatcaggaaggtcctgacatcccagctgcaggcgtgccgggaggccagtcagcaccgagcgttggaacaatcccagtcactgccattgccggctccaactagcacttccccatctcgcggtaactccagaaatatcaagaaacttgaggagcggaaaacagatcccctttccctagagggttacgttagcagtgcccctttaacgaagccacctgaaaagggtaaggggtggagcaaaacaagccatagtctggaggctccagaggacgatggcggatggtctagcgccgaggagcagatcaattcttcggacgccgaggaggatgggggactgggccctaagaagcttgtcccaggtaagtacacagtagtcgccgatcacgagaaagggggaccagacgccctccgggttaggtcaggagatgtggtggagcttgttcaggagggggacgagggcctgtggtacgtgcgcgacccaacgacagggaaggaaggatgggttccagctagcagtctctcagtccgcctgggaccatcaggatccgctcagtgtctgtcatcatccggaaaggcacacgttcccagggctcacccctag

SEQ ID NO: 229773 - DNA, 3378 bp, synthetic construct
  misc_feature 1..3378: note = Description of Artificial Sequence: Synthetic coding sequence
  source 1..3378: mol_type = other DNA
atgcgcttttggcttcgcaccgaagaaatggccctcgaggaaatggtgcagagactgaacgcagtgagcaagcacacagatgagattatgcatcaggacatcgtgcctttgtgcgctgctgacatccaggaccagctaaaaaaacggtttgcatacttgagcggaggtagaggccaggacggctcacctgtgattacatttcctgactaccccgcatttagcgaaattcccgacaaggagttccagaacgtgatgacgtatctgacatcaatcccaagcctacaggacgcgggaataggattcatcttggtcatcgaccgccgtcgcgacaagtggacaagtgtgaaagcctctgttctgcgcatagcggcaagctttccagccaatttgcagctggtattagtgctgcgcccaaccgggttttttcagcgtaccctctcagatattgcctttaagtttaacagggacgatttcaagatgaaggtgccagtcatcatgttatcttccgtgccagatcttcacggctacatagataaatcccagctgaccgaggacttgggaggaaccctagattattgtcattcccgatggctctgccagaggacagccattgaatcctttgcattgatggttaaacagacagctcagatgctgcaaagcttcggaacagagctggccgagacagaactcccaaatgacgtccagagcaccagctctgtgctttgtgcccacacagaaaagaaagataaagctaaagaggaccttagacttgcgttgaaagaggggcattctgtgttggagagcctgagggagctgcaagcagaaggatccgaaccatccgtgaaccaggatcaactggataaccaagcgactgtgcaacgcttactagctcaattgaatgaaacagaggccgcattcgatgagttttgggccaagcatcagcaaaaattggagcagtgcttgcagttgcgtcactttgagcagggcttcagagaggtgaaagctatcctcgatgccgcttcccaaaaaattgccacattcaccgacattggaaatagcctggctcacgtggagcacttgctgagggatctggccagctttgaggagaagagcggagtggcagttgagcgcgctagggccctgtccttagacggagaacagctgattggcaacaagcattacgccgtggacagtattcgcccaaagtgtcaggaattacggcacttatgtgaccagttctccgccgagatcgcacgcaggcggggattgctgagcaagtctttggagctccatcgcagactggagacatccatgaagtggtgcgatgaaggtatttaccttctggcaagccagcctgttgataaatgccaatctcaggatggggctgaggccgcactgcaggagatcgagaaattcctggaaaccggggcagagaataagatccaggagctcaacgcaatctataaagaatacgaaagcatattgaaccaggaccttatggagcacgtgagaaaggtgttccaaaagcaggctagcatggaggaggtatttcataggaggcaggcaagcttaaaaaagttggccgcaagacagacacggcctgttcagccggtcgcacctaggcccgaggccctcgcaaagtccccatgtccatccccagggataaggcgtgggagtgaaaatagtagcagtgagggcggtgcgctccgaagaggcccttacaggagagccaagagtgagatgagtgaaagtcggcagggaagaggcagcgccggagaagaggaggaatcattggctattctgcgtcggcacgttatgtcagagctgctggataccgagcgagcatacgtcgaagagctcctatgcgtactggagggttacgctgcagaaatggacaatccactaatggcacatcttttgagtacgggtctgcataataaaaaggatgttctttttggcaatatggaggagatttaccattttcataacagaatttttcttcgggagcttgagaactacacagattgtcccgagctagtgggtcgctgtttcctggagcggatggaggacttccaaatttatgaaaaatactgccagaacaaaccacgttccgagtccctttggagacagtgcagtgattgcccatttttccaggaatgtcaaaggaagcttgaccacaagctgtctctggactcttacctcctgaaaccagtgcagaggatcaccaagtaccagttgctgctcaaggagatgctgaaatacagcagaaactgtgaaggcgctgaagacctgcaggaggcactgtcatccattttgggaattcttaaggccgtcaatgattctatgcacctgatcgccatcaccggctacgatggcaaccttggggacctaggcaaactgttgatgcaagggagcttttccgtgtggaccgatcacaagcgaggccacaccaaagtaaaggaattggccagatttaaacctatgcaacgtcatctcttcctgcatgagaaggctgttctgttctgcaaaaaaagagaggagaacggggaggggtacgaaaaggccccatcctacagttacaagcaatcccttaatatggctgccgtgggtataacagaaaatgtgaaaggtgacgcgaagaagtttgaaatttggtacaacgctcgggaagaggtttatattgtgcaagctcctactccggagatcaaagccgcttgggtgaacgagattcgaaaggtcctgacctcacagctgcaggcttgcagagaggcttcacagcatagagcacttgaacagtctcagtccctccctctccccgctcccacgtctacttccccatcacgagggaattccaggaatatcaagaaattggaggaacgtaagactgaccctctctccctggaaggctacgtgtccagcgctcctctgactaaaccgccagagaaggggaaagggtggtccaaaacttcgcatagtcttgaagcccctgaggatgatgggggatggtcctccgcagaagagcaaatcaacagttctgatgccgaggaggacggtgggctaggtcctaagaagctcgtgccaggtaagtatactgtggttgccgatcatgaaaaggggggacctgatgccctgagggtccgttcgggggacgtagtggagcttgttcaggaaggcgacgaagggctgtggtacgtgagggacccaacaacagggaaagaaggctgggtgcccgcaagcagcctgtcagttcgactgggcccatccggcagtgctcagtgtcttagttcgtcagagtctagccccggaagcgccgtactgagcaactctagctcatgttccgaagggggacaggcacccttctccgatctgcagggctag

SEQ ID NO: 229774 - DNA, 1713 bp, synthetic construct
  misc_feature 1..1713: note = Description of Artificial Sequence: Synthetic coding sequence
  source 1..1713: mol_type = other DNA
atgagccgattggaagctaagaagccaagtctctgtaaaagcgagccactgacaacagagcgggttcgcaccactctgagcgttctaaaacgcatcgttacctcatgctacgggccatctggacgattgaaacagctgcacaatggcttcgggggatacgtgtgcactacctctcagagttctgccttgctcagtcacctgctcgtgacccatcctattttgaaaatcctgacagcctccatccagaatcatgtgtctagcttttctgactgcgggctgtttacagccattctttgctgtaacctgatcgagaatgtgcagagattgggtttgacgcctactaccgtgattcggctgaacaaacatctgttaagcctctgcattagttacctaaagagtgagacttgtgggtgtcgtatccctgtggatttttctagtacgcagatcctgctgtgcctagttcggagcatcttgacgtcgaaacccgcatgcatgttgaccagaaaggagacggaacacgtctctgccctcatactgagggcgttccttctcacaataccagagaatgcggagggccatatcatcctcggaaagtcactgatagttcctctgaagggacagagggtaatcgacagtaccgttttgcccggaattctcatcgagatgtccgaggttcagctcatgaggctcctacccatcaagaagtccaccgccctaaaggtggcccttttttgcactacccttagcggggacacatccgacactggagaagggacagttgttgtctcgtacggcgtctccctggagaacgcagttctggatcagcttcttaatctgggaagacagctgatctccgaccacgtcgatctggtcctctgtcagaaggtaatacatccctcactaaagcagtttttgaacatgcataggattatagccatagatcgcatcggggtgaccctgatggagcccctgaccaagatgacaggcactcagccaattggatcattgggttcgatttgtcccaattcctacggcagtgttaaggacgtgtgcaccgccaagttcgggtcgaagcattttttccaccttatcccaaacgaagctaccatctgcagtctacttctgtgcaaccgaaacgatacggcatgggatgaactaaagctgacatgtcagacggccctgcacgtcttgcaactgactttgaaggaaccgtgggccctgctgggcggagggtgcaccgaaacgcaccttgctgcgtatatcagacacaaaacacacaacgaccccgaatctattcttaaggacgacgagtgcactcaaaccgaactccagctgatcgccgaggcattttgtagtgcactcgaaagcgtggtcggcagtctggagcacgacggtggggagattctcacggacatgaagtatgggcacctctggtctgtgcaggctgattctccttgtgtcgctaactggcccgatttgctttctcagtgtggctgcggattgtacaactcacaagaagaactgaactggagcttcctgcgctccacacgcagaccatttgtgcctcaatcatgtctgccccatgaagctgttggctctgctagcaatctgacacttgactgcctgaccgccaaattgagtggcctgcaagtcgctgtggagacggccaatctgatcttggacctgtcttacgtgattgaggataaaaactag

SEQ ID NO: 229775 - DNA, 1713 bp, synthetic construct
  misc_feature 1..1713: note = Description of Artificial Sequence: Synthetic coding sequence
  source 1..1713: mol_type = other DNA
atgagtcgtttggaagcgaaaaaaccaagcctgtgcaaaagcgagcctcttaccaccgaacgagtgagaacaacactgagcgtcctcaagcgcatcgtcacatcttgctatggcccatccggccgtttaaagcaactgcataatgggtttggtgggtacgtctgtactacgtcccagagttccgccctgctgagccacctgctggtcacacatcctattttgaaaattctgactgcctcaatccagaaccatgtgtcatccttcagcgattgtgggctctttacggcaattctttgttgtaacctgattgagaacgtccaacggctcggcctgacaccaaccaccgtgatccggcttaataagcaccttctgtccctgtgtatttcttatttgaaatccgagacctgtgggtgcagaataccagtggatttttcttccacccagatcctcctgtgcttagtccgaagtatactgacttctaaaccagcttgcatgctcacgaggaaagagaccgagcatgtctctgccctgattctcagagccttccttctgacaattcccgaaaatgccgaagggcatattattctcggcaaatcactgatcgtgccgctcaaaggacagagagttattgacagcactgtgctgccgggaatcttaattgagatgagcgaggttcaactgatgcgactgctacccattaaaaaatcaaccgcgctgaaggtggccctgttttgcacgaccctttccggtgatacttctgataccggcgaggggactgtcgtggtttcttatggggtgtccctggaaaatgctgtgctcgaccagttactcaatttaggtcgacaactcataagcgaccacgtggatcttgtactctgtcagaaagtgattcaccccagtctcaaacagttcctcaatatgcatcggattatcgcgattgatcgtattggcgtcaccctgatggaacctctcacaaagatgaccgggacccagccaatcggaagtctgggatcgatttgtccaaatagttacgggtctgttaaagacgtgtgtacagcaaagttcggttcaaaacacttcttccatctgatccccaatgaggcaacaatatgttcgctacttctgtgtaacaggaacgacacagcctgggatgaattgaagctgacctgtcaaacagctctgcacgtcttacagctaaccctgaaggagccctgggctctcctgggaggtgggtgcactgagacgcaccttgctgcttatatccgacacaagacccacaacgaccctgaatcaattctcaaagacgatgaatgtacccagaccgagcttcagctcattgcggaggctttctgtagcgccttagaatcagtcgtggggtcgcttgagcacgacggaggagaaatcctgacagacatgaaatacgggcatctgtggtccgttcaggccgactcaccatgtgtcgcgaattggcccgaccttctgtctcagtgcggatgtgggctttacaacagccaggaagagcttaattggagtttcctccgatcgacccggcgaccctttgtccctcaatcctgcctgccacacgaggcagtcggatccgcctctaatcttactcttgactgtcttaccgcaaagctgagcggactacaagtcgccgtagagacagctaacctgatcctggacttatcatacgtgatcgaggataaaaactag

SEQ ID NO: 229776 - DNA, 2145 bp, synthetic construct
  misc_feature 1..2145: note = Description of Artificial Sequence: Synthetic coding sequence
  source 1..2145: mol_type = other DNA
atgcctgtgagattcaaaggcctgtcagaataccaacgaaatttcctttggaaaaagagctacctttcagagtcctgtaattcaagcgtgggcagaaaatacccatgggccggacttagatcggatcaactgggcatcacaaaggagccttctttcatttcaaaaagacgggtaccctaccatgaccctcaaattagcaagagtctcgagtggaatggtgccatcagcgagagcaacgtcgtggccagcccagaacccgaggcccctgagactcctaagtctcaggaggctgagcagaaagatgttacccaggagagagtacactctctggaggcctccagggtccccaagaggactcgcagtcactcagccgacagtcgggcagaaggcgcttctgacgtggagaacaacgagggcgttacaaaccacaccccagttaatgagaatgtcgaacttgaacattccacgaaggtcctgtctgagaacgtcgacaacggcctggatcggcttctccgcaagaaagcaggactcacagtggtgccaagttataacgcactgcggaatagcgaataccagcgccagtttgtctggaaaacgtctaaagagactgcaccagcctttgcggctaatcaggtgttccataataagagccagttcgttccaccttttaagggcaacagcgtgatacacgaaacagagtataaacggaatttcaaaggactgtcaccagtcaaagagccaaagctgcggaacgacctgagggaaaacagaaatctggaaaccgtgtcccctgaacggaagtctaacaagatcgacgacagacttaagctcgaggcagagatggagttgaaggatctccatcagcccaagcgaaaactcacgccttggaagcatcaacgtctgggaaaggtgaacagcgaatatcgagcaaagtttttatctcccgcacaatacctgtacaaagctggcgcttggactcatgtcaagggtaacatgcccaaccaagtcaaagagttgagagaaaaggcggagttctatagaaagcgcgttcagggcacgcacttctcccgagaccacctgaatcagatacttagtgactcaaactgctgctgggatgtttcctccacaacgagctccgaaggcaccgtgagtagcaacataagagcgctggacctcgccggagacccaacctcccataagacgctgcagaaatgtcccagcaccgagccggaagaaaagggaaacatagtagaggaacagccccagaagaataccacagagaagcttggagtgtccgccccaactattccagtgaggcgtcgcctggcttgggatactgagaacactagcgaggacgtacagaagcagcctggtgaaaaagaggaagaggacgacaacgaggaagaaggtgataggaaaaccggcaaacaggcattcatgggggagcaggaaaagcttgatgtgagggagaaatctaaggccgacaaaatgaaagaaggtagtgactctagtgtcagtagcgaaaagggcggtcgactgcccacaccaaaactgagagagcttggtggaatccagcggacccatcacgatctcacaaccccagccgtgggaggtgctgtcctggttagtcccagtaagatgaaacctccagctccggagcagcgtaagcgtatgactagtcaagactgtctggagacctccaagaatgacttcaccaaaaaggagtctcgagcggtcagcctgttaacttctcccgctgccggaataaagacagtggatcctcttccgcttagagaggattccgaggacaacatacacaagtttgctgaagccactctgcctgtgagcaagattccaaaatacccgacaaaccctccaggccaactcccgtccccaccgcacgtgccatcctactggcatccgtctcggagaattcaggggtctctgcgggaccccgaatttcagcacaacgtggggaaggctaggatgaataacctacaactaccccagcacgaggcttttaacgacgaagacgaagacaggttgtccgaaatcagcgcccgtagtgccgcttccagcttgcgtgctttccagacactcgcaagagcaaaaaaaagaaaggaaaacttttggggtaaaacatag

SEQ ID NO: 229777 - DNA, 210 bp, synthetic construct
  misc_feature 1..210: note = Description of Artificial Sequence: Synthetic coding sequence
  source 1..210: mol_type = other DNA
atgcccgttaggttcaaaggcctttcggagtaccagagaaacttcctgtggaaaaaatcctacctgtccgaatcttgtaatagcagcgtggggagaaagtatccatgggcaggtttgagaagcgatcagctaggcaatcaaggaagatgcagaacgaagatacaacactctgatatcagctctctgctgattctggtctgcagtacttag

SEQ ID NO: 229778 - DNA, 669 bp, synthetic construct
  misc_feature 1..669: note = Description of Artificial Sequence: Synthetic coding sequence
  source 1..669: mol_type = other DNA
atgcccgtgcggtttaaaggcctgtcagagtatcagcggaacttcttatggaaaaagtcgtatctgtcagaatcttgcaacagtagtgtcgggagaaaatacccttgggctgggcttcgctctgatcagctcggcatcacgaaggaaccttcatttatctcaaaaaggcgcgtgccatatcatgacccccaaatttcgaaatcgttggaatggaatggagccatcagcgagtctaacgtagtggcatcccctgagcccgaggctcccgagactccaaaaagccaggaggctgagcaaaaggatgtgactcaagaaagagttcattccctcgaagcctctagagtgccgaagcgcacccggagccatagtgcagactccagagccgaaggtgcatccgatgtcgagaacaacgaaggcgtgaccaaccatacgcccgtgaatgagaacgtggaactcgagcactcaacaaaagtcttaagtgaaaacgtggataacggcgtggggattttcactgccttcctttttaagtctattgagttcttcattggattcatcgtcatctcggtaattctgcactttgtcttccagaacttccccttactcttttcttgccttatgtctattagaatagttgataaccgattgcttaccctcgtcattgtcaattag

SEQ ID NO: 229779 - DNA, 2040 bp, synthetic construct
  misc_feature 1..2040: note = Description of Artificial Sequence: Synthetic coding sequence
  source 1..2040: mol_type = other DNA
atgcctgtgagattcaaaggtctctctgagtaccaaaggaacttcctgtggaaaaaatcatatctttcggaaagctgtaattcatccgttggtcgaaagtatccctgggccggtttgagatccgaccaattaggcattaccaaggaacccagcttcataagtaagcggcgagtaccttatcacgatccgcagatatctaaatccctcgagtggaatggggcaatcagtgagagcaacgtagtggcaagccctgaacctgaggcccctgaaacccctaaatcacaggaggctgagcaaaaggatgtaacccaggagagagttcattcattagaagctagcagagtccctaagaggactcgcagccactctgcagatagcagagcagaaggagctagtgacgtcgagaataacgaaggcgtcactaaccatactcccgtcaacgagaacgtcgaactggagcacagtacaaaggtgctgtctgagaatgttgataacggagtatttcacaataaaagtcagtttgtgccacctttcaaaggcaattctgtgatacacgagacagaatacaaaaggaactttaaaggcctgtctcctgttaaagaaccgaaactccggaatgacttgcgggaaaataggaatctggagacagtgagccccgaaagaaaatccaacaagatcgacgacaggttgaaacttgaggcggagatggaactaaaggatctgcatcagccgaagagaaagctaacaccatggaagcatcagaggctgggaaaagtgaattctgaatatcgtgctaaattccttagcccagctcagtatctctataaggccggagcttggacacacgttaaaggcaacatgccgaatcagggctccctcaacgctatgtggtacgccgaggttaaagaattgcgggagaaggccgagttttatcgcaagcgggtgcaaggaacacacttcagccgcgaccacctcaaccagatcctaagcgactccaattgctgctgggacgttagctctactacctcctcagaagggaccgttagcagcaatattagggccctggatcttgctggggatccgacctcccataagactctgcagaagtgtccaagcacggagcccgaggaaaaggggaacatagtggaggagcagccccagaagaataccactgagaaactgggcgtgagcgctccaactatacctgtcagacgtcggttggcttgggatacagaaaacacaagcgaggatgtgcagaagcagccaggagaaaaggaggaggaggatgacaatgaggaggaaggcgacaggaaaacgggcaaacaggccttcatgggagagcaggagaaactggatgtccgggaaaagagtaaagcagacaaaatgaaggaaggcagcgacagctctgtgtcatccgaaaaggggggaaggctgcctactcctaagctgcgtgagttgggtggcatacaacgaacccatcatgaccttaccacaccagccgtggggggtgccgtgctggtgtcaccaagtaagatgaagcctccggcacccgagcagcgcaagagaatgaccagccaggattgtcttgagacttccaagaatgactttacgaaaaaagaatcccgcgctgtatctttgctgacctctcccgctgccggaatcaagacagtggatccattaccactgcgcgaggacagtgaggacaatatccacaaatttgcggaggccactctgcccgtgagtaaaattcctaaatacccgacaaaccctccgggacagctgccctcacctccccacgtgcctagttactggcacccttcccgaaggatacaggggtccctcagagaccccgagtttcaacacaacgtgggaaaggcaagaatgaataatctgcagctaccacaacacgaggcatttaacgacgaggatgaggataggttgtctgagatttctgcaagaagtgcagcgtctagtctccgtgcttttcagactctggcgagagcaaaaaagaggaaggaaaacttttgggggaaaacatag

SEQ ID NO: 229780 - DNA, 2715 bp, synthetic construct
  misc_feature 1..2715: note = Description of Artificial Sequence: Synthetic coding sequence
  source 1..2715: mol_type = other DNA
atggacaggtacctgcttttagtgatttggggggaaggcaaattcccctctgccgcatccagggaagccgagcacggccctgaagtaagcagcggagagggtacagagaaccagccagactttacagccgctaacgtgtaccacctgctaaaaagaagcatcagcgcttctattaatcccgaagatagcacattccccgcatgtagtgtgggaggtattccagggtccaagaaatggttttttgccgtgcaagcaatctacggcttctaccagttctgctcctccgattggcaggagatccatttcgatacagagaaagacaagatcgaggacgttctacagacgaatattgaggaatgcctcggcgctgtggagtgctttgaagaggaggacagtaactcccgtgaatcactgtctctcgccgatctctacgaggaagcagctgagaacctgcaccagctctccgacaagctgcctgcgccaggacgggctatggtggatattattctcttgctgtccgataaggaccctccaaagctgaaggactacctcccaacagtgggagccctcaaacacttgcgagagtggtatagtgccaagataacaatcgccggaaatcactgcgagatcaattgccaaaagatagctgaatacttatctgccaatgttgtgtcgctggaggacctgcggaatgtcatcgattctaaagaactgtggcgcggtaaaatccagatatgggagcggaaattcggtttcgaaatttcattccccgagttctgtcttaaaggagtgaccctgaagaacttttccacatcgaacctgaataccgattttctggctaagaagattattccctccaaggacaagaacattctccctaaggtttttcactattatggccctgcgctggagtttgttcagatgattaaactgtctgacctccccagctgctatatgtcagacatagagttcgagctgggcctgactaacagcaccaagcagaactctgtgctcctgctggagcagataagctccctgtgcagtaaagttggagctctgtttgtgctcccctgcacaatttcaaacattttgattccccctcccaaccagctctcatctaggaagtggaaggaatacattgcgaagaagcctaagacaatcagcgttccagacgtggaagtaaagggagaatgttcctcatactacttattgctgcagggcaatggcaaccgacgctgcaaggctacacttatacacagtgccaaccagatcaacggttcttttgccttgaacctgatccacggcaaaatgaagaccaagacagaggaggccaaactgtcatttccctttgatttgctgagtctcccacattttagcggtgaacagatcgttcagagagagaaacagcttgctaacgtccaggtgctcgctctcgaggagtgcctaaagcggagaaaattggctaagcagcccgagaccgtcagcgtagccgagttgaagtctctgctcgttctcacccgaaaacactttctcgactacttcgatgctgttattcccaaaatgatcttgcgcaagatggacaagatcaaaaccttcaatattctgaacgatttcagtcccgtggagccgaactctagtagtttgatggaaactaatccgttagagtggccagagcgccatgtcctgcaaaacttagagacttttgaaaaaaccaagcagaaaatgaggactgggagcctgccgcattcatctgaacagctgctgggccacaaggagggccctcgggattccattacactgcttgacgctaaggaacttttgaagtacttcacctccgatggtctgccaatcggagatctacagcctctgcctatccagaaaggagagaaaactttcgttctgacccctgaattgagtccagggaaactgcaggtgctgccatttgagaaagccagtgtttgccattaccacggcatcgagtactgcttggatgaccgcaaggcactggaacgggatggtgggttttctgagctgcaaagcagactgatcaggtacgaaacccaaacgacctgcactagggagagctttccagtgcccaccgtcttgagtccactcccgtctcctgtggtctccagtgatccgggttccgtgccagacggtgaggtgctccagaacgagctgagaaccgaagtgagccgtttaaagcggaggtccaaggacctcaattgcctttacccaagaaagagactggtaaaatccgagtctagcgaatcactcctgagccagaccacaggtaattcaaatcactaccatcaccacgtgacaagtcgcaaaccgcagactgaaaggtccctccccgtcacctgccctcttgtgcctattcctagttgcgagactcctaagttagcaaccaaaacgtcctctggacagaagtctatgcacgagagcaaaacatctcggcagatcaaggagagccggtcccagaaacatacacgcattttgaaggaggtcgtgaccgagacgcttaaaaagcactccatcacagagactcacgaatgtttcacggcctgcagtcagcgactgtttgagatcagcaagttctatctcaaagacctgaaaacttcccgcggtttgtttgaagagatgaaaaagaccgcaaataataacgctgttcaagtgatagattgggtgttggagaagacttctaagaagtag

SEQ ID NO: 229781 - DNA, 1374 bp, synthetic construct
  misc_feature 1..1374: note = Description of Artificial Sequence: Synthetic coding sequence
  source 1..1374: mol_type = other DNA
taaatggctgagacagtttggagtacagatactggagaggcagtgtacaggagtagggaccccgtgcggaacctgaggcttcgcgtacatctgcaacgaataacttcctctaattttctgcactatcagccagcagctgagttaggaaaagatcttattgatctcgctacatttcgaccacagcctactgcctccggccatcgccctgaggaggatgaggaggaagagattgtcattggctggcaggaaaagttgttctcccagttcgaagtggatctctaccagaacgagactgcatgtcagtcacctttggattatcagtatcggcaggagatactaaagctggagaactctgggggaaagaaaaacaggagaatattcacctacactgattccgacaggtataccaatctcgaagagcactgccagaggatgacgacagccgcatctgaagtgccttcctttttagtcgagaggatggcaaacgtgcgccgtcgcaggcaagacagaagaggtatggaggggggtattctaaagagtagaattgtgacctgggaaccatccgaagagttcgtgagaaataaccacgtgataaacacccccctgcagacaatgcatatcatggcggatctgggaccatataaaaagctcggatacaagaaatacgaacacgtcttatgcactctgaaggttgacagcaatggagtgatcactgttaaacccgatttcaccggcctgaagggaccatatcgcatcgaaactgagggcgaaaagcaggagctctggaagtatactattgacaatgtttctccgcacgctcagccagaagaggaggagcgggagagacgggtgtttaaagatctttatggcaggcacaaggagtatctgagctcgctggttgggaccgattttgaaatgacggtaccaggcgctctgcggttatttgtgaacggtgaggttgtcagtgcgcaaggatatgaatacgataacctatacgtgcatttttttgtggaactaccgacagcccactggtcatctcccgcttttcagcagctgagcggagtcacccagacatgcacgacaaaaagtttggcgatggataaagtggcccatttttcctatccttttaccttcgaggctttctttctgcacgaagacgagtcctccgatgctctgcctgaatggccagtgctatactgcgaagtactctctctggatttctggcagaggtacagggtcgaggggtacggagcagtcgtgctacccgctactcccggaccatcttggaaccgggcaccctttcggaagggctgtggcgtgtgctggacggtctggaaaggcagcgcttcacgcgttccattcacgatgtgttag

SEQ ID NO: 229782 - DNA, 1566 bp, synthetic construct
  misc_feature 1..1566: note = Description of Artificial Sequence: Synthetic coding sequence
  source 1..1566: mol_type = other DNA
atggctgaaaccgtttggtctacagataccggagaggctgtgtaccggtcccgcgacccagtacggaatctgagactgagggtgcatctccaacggataacctcttcaaatttcctccattatcagccggcagctgaactgggcaaagacctcatcgatcttgctaccttccgacctcagcctacagctagcgggcatcgtcctgaggaagacgaggaagaggagatcgtgatcgggtggcaggaaaagctgttttctcagtttgaggtggacctttatcagaatgagaccgcttgtcagtccccactggattaccagtaccgccaggagatactgaaactcgagaacagtgggggaaaaaagaatcggagaatcttcacatatactgacagtgataggtacactaatctggaggagcactgccagcggatgaccaccgctgcctcggaggtccccagtttcctggtggaacggatggccaacgtgaggcgcagacgacaagatcgacggggtatggagggaggtatactcaagtcgaggatagtaacgtgggagccaagtgaggaatttgtgcgaaacaaccatgtaatcaatacaccactgcagaccatgcacatcatggccgacttgggtccgtataagaagctaggatacaagaaatacgaacatgttctttgtacccttaaagtcgactctaatggggtaataactgtgaagcctgattttacaggactgaaaggcccttaccgcatcgaaacggagggagagaagcaggaactgtggaagtacactatcgataacgtcagtccccatgctcagccagaggaagaggaacgggagcgcagagtgtttaaagatctctacggtcgacataaggaatatctctcttctctggtgggtacggactttgaaatgaccgttcccggtgctctcagacttttcgtgaatggcgaggtggtgtcagcccaaggctacgagtacgataatctgtacgtccacttcttcgtggagctgccgacagcacattggtcttctccagcctttcagcaattgagcggggtgacgcagacctgtacgacgaagtccctcgcgatggacaaagtagctcactttagctacccgttcacgtttgaggcattttttctgcacgaagacgagtcaagcgacgcacttcctgaatggccagtgttatactgtgaagtgctaagcctggacttttggcagaggtatcgcgtggaaggctatggggctgtggtcctgccggctacaccaggttctcacacgttaacagtgtcgacatggaggcctgtcgaattaggtacagtggcggaactgaggcgcttttttatcggtggtagtcttgaattagaggaccttagctacgtcagaataccgggaagtttcaaggcgttgctatcttcatcaaagacaaaagaaggccgaaaagttgatggcgagcgcgtgttgaacccacagcctgtttcactttctctctttcctggaaagcctcattctaccgcttggggtctgctgaggctgcgttacgaattgtttctcagcaaatag

SEQ ID NO: 229783 - DNA, 1680 bp, synthetic construct
  misc_feature 1..1680: note = Description of Artificial Sequence: Synthetic coding sequence
  source 1..1680: mol_type = other DNA
atggcagagaccgtctggtctacagataccggagaggctgtgtatagaagtcgagatcctgtgcgtaacctaaggctaagagttcacctacaaagaataactagttcaaattttctgcattaccagcctgcagccgaattaggcaaagacttgatagatttggccactttccgtccccagcctacggcgtcaggccaccgaccggaagaagacgaagaagaggagatagttattggctggcaggaaaaacttttcagccaatttgaagtggatctgtaccagaatgagacggcttgccagtcccctctcgactaccagtacaggcaggagatacttaaattggaaaatagcgggggaaaaaagaatagaaggattttcacatataccgactctgaccgctacactaacttggaagagcactgtcaacgtatgactaccgctgccagcgaggtgccgtccttcctcgtggaacggatggccaacgtccggagacgacggcaagaccgcagggggatggaggggggaatccttaagagtagaattgtgacttgggagcctagcgaagaattcgtgcgcaataaccatgtcatcaacactcctctgcaaactatgcacatcatggctgacctcgggccttataaaaaactcggatacaaaaaatatgagcacgttctctgcactctcaaagttgattcaaatggcgttattacagtgaagccagacttcacgggacttaaaggtccttaccggatagaaaccgaaggcgaaaaacaggagttgtggaagtataccatcgataacgttagcccacatgctcagcccgaggaagaagagagagagcgacgcgtttttaaagatctctatggacgtcataaagaatacttaagcagcctggttggaactgattttgagatgacggtgccgggagctcttcggctcttcgttaacggagaagtggtgagcgctcaaggctacgaatatgataacctctacgttcatttcttcgttgagttaccaaccgcacattggagcagtcctgcatttcagcagctgtccggcgtgacacagacatgtacaacaaagagcctggccatggacaaggttgcccatttcagttacccttttactttcgaagctttctttctccatgaggatgagtctagtgacgccctacctgaatggcccgtcctctattgtgaggtgctgagcttggatttttggcagaggtatcgggtggaaggttatggagcagtagtgctacctgcaaccccagggtcgcacacactgaccgtctctacttggcgaccagttgagttgggtacagttgcggagctccggagattcttcattggcggaagcttggagctggaagatctgtcatatgtgcggatacccggaagtttcaagggagagcgactgtcccggttcggacttaggaccgagactaccggaaccgtgactttcagattgcactgcctgcaacagtcccgagcctttatggaatcgagctcgctgcagaagcgtatgcgtagcgtcttggatcgtctggaagggttctcccagcaaagttccatccacaacgtactggaggcttttcgtagagccagaaggcggatgcaagaggcgagggagtctctgcctcaggatctggtcagcccttcaggcacactggtctcatag

SEQ ID NO: 229784 - DNA, 1563 bp, synthetic construct
  misc_feature 1..1563: note = Description of Artificial Sequence: Synthetic coding sequence
  source 1..1563: mol_type = other DNA
atggccgagactgtttggtcaacagacacgggggaggcagtgtatcgctcaagggaccctgtgcgtaatctgcgcctcagggtacaccttcagcgaattacgtcttcgaactttctgcactaccagcctgccgcagagctcggaaaggaccttatcgatctggctacctttaggccgcagccaaccgccagcggtcaccgtcccgaggaagacgaagaagaagagatcgtcatcgggtggcaggaaaagctgttcagtcagtttgaggtcgacctctatcagaatgagactgcctgccagagtcccctcgattatcagtacagacaggagattctgaagctcgaaaattccggcggaaagaaaaaccggagaatcttcacatatactgatagcgacaggtatacaaacttggaggagcactgtcagcgcatgaccacagctgcctcagaggtcccttcttttttggtggaacgtatggccaacgtgagacgtaggcgacaggacagaaggggcatggaggggggaattctgaaaagtagaatcgtaacgtgggagccatcagaagaatttgtgagaaacaaccacgtgattaataccccactgcaaactatgcacatcatggcagacctgggaccatataagaagttgggatataagaaatatgagcacgtcctctgcaccctgaaggtcgatagtaacggcgtaatcacagtgaaaccggactttacaggcttgaagggaccataccgaattgagacagagggcgaaaagcaagagctctggaaatataccattgataatgtttctccccacgctcagccggaagaagaggaacgggagcgccgagttttcaaagatctttatggcaggcacaaagaatacctgagctcattggttggaacagattttgagatgacagtgcctggtgccttacggctctttgtgaacggcgaggtagtgagtgcacagggatacgaatatgataacttatatgtccacttttttgttgagttacctacagcccactggtcttcccctgcgttccagcagctgtctggggtaacgcaaacttgcaccaccaagtctcttgctatggataaagtcgcgcacttctcctacccattcacctttgaggcattttttctccacgaagatgagtcctccgacgccttgccagagtggcctgtgctatactgcgaagttctctcactggacttttggcaaaggtacagggtcgaaggctatggggctgtggtactgccggctacgccgggaagccacactctgaccgtgagtacttggcggcctgtcgaactgggaacggtagcagaattaaggcgcttttttatcggcggatcgcttgaacttgaggacctgagctatgtgaggatccctggatcattcaaagggctaagcagctcaaaaacaaaggaaggtaggaaggttgatggagaacgcgtactaaatccccaacccgtgtcactaagcttgttccctggaaagccccacagcactgcctggggactgcttcgactgagatacgagctatttctgagcaagtag

SEQ ID NO: 229785 - DNA, 1650 bp, synthetic construct
  misc_feature 1..1650: note = Description of Artificial Sequence: Synthetic coding sequence
  source 1..1650: mol_type = other DNA
atggctgtacccgtgagcagcttcgctcagaggaccaggtccagatttagggtccacttgcaaaggataacgtcatcaaatttcctccattaccagcccgcagctgagttgggcaaggacctgatagatctcgcaactttcagacctcagcccaccgcatcgggccaccgacctgaggaagacgaagaggaggagatcgtgattggctggcaagagaaactgttctcacaattcgaggttgatctctaccagaacgagacagcctgtcagtctcctttggattatcagtatcggcaggaaatccttaaattggaaaacagcggcggtaaaaagaatcggagaatcttcacatacacggactctgataggtatactaacctggaagaacattgccagaggatgaccacagctgcatcagaagtgccatccttcctggtggagcgaatggcaaatgttaggcgccgaaggcaggatcggagaggcatggaagggggtattctgaaatcacgaatcgtgacctgggagccttcagaagaatttgtgagaaacaatcacgttatcaacactcctctgcaaactatgcatattatggcagacctcggaccttacaaaaagctcggatataaaaagtatgaacacgtgctctgcactctgaaagtagacagtaacggggtgataacagtgaaacccgatttcacgggtctgaagggcccttatcgcattgaaacagaaggtgagaagcaggagctctggaaatataccattgacaacgtatcaccacatgcccagccggaagaggaggagagagaacgacgggtgtttaaggacctgtatggtaggcataaagaataccttagttcgctggtgggcaccgactttgagatgaccgtcccaggagcgttgaggttgttcgttaatggcgaggtcgtcagtgctcaagggtatgagtacgacaatctatatgtacatttttttgtggagcttcccaccgcccattggtcttctccagccttccagcagctgagcggagtgactcagacctgtactacaaaaagcctcgcaatggacaaagtggcccacttcagctatcctttcactttcgaagcgttttttctccacgaagacgaatccagtgatgcgctgcctgagtggcccgtgctgtactgtgaagtgttgtctctcgatttctggcagaggtaccgtgtggaaggatacggggctgtggtgctgcctgccacccctgggagccataccttgacagtttcaacttggcggccagtggagctcggtacagtggcggagctgcgtcgctttttcatcggtgggagtctggagctggaagacttaagttatgtgaggataccaggctctttcaagggggagagactgagtcgcttcgggctgcgcactgagaccaccggaaccgtgacattcaggctgcactgcctacagcagagccgtgcgtttatggaatcctccagtctgcagaagaggatgaggagcgtcctcgataggttagaagggttcagccaacagtcatctattcataacgtccttgaagcatttaggcgcgcacgaaggcgcatgcaggaagcacgcgaatctctgccacaggacctggtctcgccctccggcaccctggtatcctag

SEQ ID NO: 229786 - DNA, 1071 bp, synthetic construct
  misc_feature 1..1071: note = Description of Artificial Sequence: Synthetic coding sequence
  source 1..1071: mol_type = other DNA
atgcacattatggctgacttgggtccctacaagaagttaggctacaagaaatatgaacatgttctgtgcaccctgaaggtggactcgaacggggtcataaccgtcaagccggattttacaggcctcaagggcccataccgcatcgagacagagggggagaagcaggagctgtggaaatacacaatcgataacgtgagtccgcatgctcaacccgaggaggaagaaagagagagacgagtgtttaaggatctttatgggagacataaagagtatctgagttcactggtcggaacagactttgaaatgacagtccctggcgctctcaggctgttcgttaatggcgaagtggttagcgcccaggggtacgagtacgacaacctgtacgttcatttttttgtagaactgcccaccgctcactggtcttcaccggctttccaacagttatctggcgtcacccagacctgcactacaaagagtttagctatggacaaggttgcccacttcagctaccctttcacctttgaagctttttttctgcatgaagacgagagctccgatgcacttcctgaatggcccgtcctgtattgtgaagtgctgagtctggacttctggcagagatatcgagtggaggggtacggtgctgtggtattaccagcgaccccagggagtcataccctgactgtgagtacatggcggcctgtggagctggggaccgtggctgaacttagacgattctttattggcggatctctggagctcgaggatctgtcctacgtgaggataccgggaagcttcaaaggcgaacgcctgtcccgctttggcctacgaactgaaaccacaggtaccgtaacattccggctccactgtctgcagcagtcacgggcattcatggagtcatcctccctgcaaaagcggatgaggagcgttctggacagactggaaggtttttcacaacagtcttccatccacaatgtgctcgaagcctttcggagggctcgcagacgcatgcaagaggctagagagtccctgccccaagatttagtgtccccctctggcactctcgtctcatag

SEQ ID NO: 229787 - DNA, 4746 bp, synthetic construct
  misc_feature 1..4746: note = Description of Artificial Sequence: Synthetic coding sequence
  source 1..4746: mol_type = other DNA
atgaaagcccagggcgaaacagaggagtccgagaaactgagtaagatgtcctcgctcctggaacgcttacacgctaaattcaaccaaaatcgcccatggtcagagaccattaaactggtgcgccaggtgatggagaagcgagtcgtaatgtcgagtggcggtcaccagcacctggtctcatgtctggaaacactgcagaaagccctgaaagtcactagtctccccgctatgactgatcgtctggaaagcatcgcaagacaaaatggtctgggttcccatctgtccgccagcgggacggagtgctacattacctcagatatgttttacgttgaggtacagctggaccctgccggacaactgtgtgacgtgaaagtggctcatcatggcgagaacccagtgtcttgcccagagctggttcagcagctccgggaaaaaaatttcgacgaatttagcaagcaccttaaaggcctggtgaacctgtataacctccctggcgacaacaaactgaagactaagatgtaccttgcactccagtctttggaacaggatctctctaagatggcaattatgtactggaaggctacgaacgcgggacccctagataagattctccacggcagtgttggttacctgacccccaggtccggaggtcacctgatgaacttaaaatactatgtcagccccagcgacctgctggacgacaagacagcgtcaccaatcattcttcatgagaacaacgtctccaggtccctgggtatgaacgcttccgtcaccatcgaaggaacttcagctgtctataaactccccatcgccccactgatcatgggttcacatccagtggacaataagtggacgccatccttcagctcaatcacctcagcaaattcagtcgaccttcctgcatgctttttcttgaagttccctcaaccaatccctgtcagtcgagcttttgtccaaaagctccagaattgtactggaatccccttattcgaaacacagcccacgtacgctccactgtacgaactcatcacgcagttcgaactgtccaaggatccagacccgatccccctgaaccataatatgcgattctatgctgccctgcctggccaacagcactgctactttctgaataaggatgcacctctgccggacggacggagtctgcagggcaccctcgtgtccaagataacatttcagcacccaggacgtgtgccgctaatcctaaacctgattaggcatcaagtggcctataatactctgattggatcctgcgtgaaaaggaccatcctgaaagaggatagccccggactgcttcagttcgaagtctgtcctctgtccgagagcaggttctccgtctctttccagcatcctgtgaacgatagcttggtttgcgtcgtgatggatgtgcaggactctactcacgtctcttgtaagttgtataagggtctgtcagatgcactgatctgtaccgacgacttcattgccaaagtcgttcaacgctgcatgagcattcccgtcacaatgcgcgcaattaggcggaaagcggaaaccatccaggcagacacaccagctctgtcattgattgcagagaccgtcgaggacatggtcaaaaagaatctgcccccagcttctagcccagggtacggaatgaccactggtaacaaccccatgagcggaacaacaacccctaccaatacttttcctggcggtcctattactaccctgtttaacatgtcaatgtccatcaaggacaggcacgaaagcgttggacacggggaggacttcagcaaggtcagccagaacccaatcctgacatccctgcttcagattactggcaacggaggtagcaccatcggcagctcacctacccctcctcatcatacaccacctccagtgtcctcgatggctggaaatacaaagaaccacccaatgctgatgaatctcctgaaagataatccagcacaggatttttcgaccttatatggcagttcaccccttgaaaggcagaattccagcagtggcagcccgaggatggaaatttgctccggctcgaacaaaacaaagaagaagaaatctagcagactgccacccgagaaaccaaagcaccaaaccgaagatgactttcagcgagagctctttagcatggacgtggactcacagaaccccatctttgacgtgaacatgacagcagataccctagacacacctcacatcactccagctccttctcagtgctccactcctcctactacttaccctcagccagtgcctcaccctcagccctctatccagcggatggtaaggctctcttcttcagatagcataggacctgatgtaaccgacattctatcagatatcgccgaagaggcgagcaaacttccctcaacatctgatgactgtcccgcaattggcactccgctgagggacagtagttcctcgggacactcgcaaagtacattgttcgattctgacgtgttccagaccaataataacgagaatccttatactgaccctgccgacttgattgcggacgcagcaggctcccccagtagcgacagcccgaccaatcatttttttcacgacggggtggattttaatccagatcttttaaattcacagagccaatcgggtttcggagaggaatactttgatgagtcaagccagtccggtgataatgatgactttaaaggttttgcatctcaggccttgaacacccttggggtccccatgcttggaggcgacaacggggaaacaaaattcaaaggtaataaccaggctgatactgtcgatttcagcataatttccgtggctggcaaagcacttgcccctgcagacctgatggaacaccacagcggttcacaaggtccccttctgaccaccggcgacttaggtaaagagaagactcagaagcgcgtcaaggaaggaaacggaacatctaattctacccttagcgggccaggcctagactccaagcccggtaagaggtccaggacaccaagtaacgacggtaagagcaaagacaaacctccaaaaaggaaaaaggccgataccgagggaaagagcccaagccacagctctagtaaccgtccgtttaccccgcctacatccaccggcggatctaagagccctggctccgccggtaggtcacagactcctcctggggtggcaacacctccaatccctaaaattacaatccagattcctaagggaacagtaatggtgggaaaaccatcgtcccactcccaatacaccagcagtggctctgttagctcaagcggctcaaagtctcaccatagccacagtagctcgtccagtagcagtgccagcacaagcggcaaaatgaaaagcagtaagtccgagggcagctctagcagcaagctatctagctctatgtactcaagccaaggttcctctggctctagccagtctaagaacagcagccagtccgggggtaagcccggatcatcaccaataacgaaacacggcctgagtagcggctcaagttcaactaagatgaaaccccagggtaaaccaagctccctgatgaacccatcactgtccaaaccaaacatcagcccatcccacagccgacctccaggagggtccgacaagcttgcctctccaatgaagccagtgcctggaacacccccttctagcaaggcaaagagtcccatttccagcgggtccggcggttcccatatgagcgggaccagctcctccagcgggatgaagtcctcaagcgggctcggctctagtggatctctcagccagaagacccccccttcgtcgaattcctgtacagcatcgagctccagttttagttccagcggctcgagcatgtcctcaagtcaaaaccagcatggatcgtccaaggggaagagtccctcacgcaacaaaaagccttccctcaccgccgtaatagacaaactcaagcatggggtcgttacatctgggcctggcggagaagaccccttggatggccaaatgggagtgtcaacgaattcctctagtcatccaatgtctagcaaacataatatgagtggtggcgagttccagggcaaaagagagaagtctgataaggataaaagcaaagtttctacttcaggatcttctgtggactcgtccaaaaaaacttctgaaagcaaaaacgtcggctccacaggggtagccaaaatcatcatctctaagcatgacggaggatcgccaagcattaaggctaaagtaactttgcagaaacccggagagtcatctggagagggccttcgcccacaaatggcctcgagcaaaaattatgggagcccgttgatctctggtagcacaccgaagcatgagagaggttcgcccagtcattctaaaagccccgcatatacaccccagaatttggacagcgagagcgagtctgggtcctcaatcgccgaaaaaagttaccagaattccccctcaagcgacgatggcatcaggcctctcccagagtactccaccgaaaaacacaaaaaacataaaaaagagaaaaaaaaagttaaggataaggacagagaccgtgaccgcgataaagatcgtgacaaaaaaaaaagccactctatcaaaccagagagttggtccaaatcacccatctcatccgatcagagccttagcatgacctccaacaccatcttaagcgccgacaggccgagccgtctgtcaccggacttcatgatcggagaagaggatgatgacctgatggatgtcgcgctcatcgggaactag

SEQ ID NO: 229788 - DNA, 1671 bp, synthetic construct
  misc_feature 1..1671: note = Description of Artificial Sequence: Synthetic coding sequence
  source 1..1671: mol_type = other DNA
atgaaggcccagggcgagaccgaggagtcggaaaaattgtcaaaaatgtcttcattacttgaacgactgcacgctaagtttaatcaaaatcggccatggagcgagactattaagctggtccgacaggtgatggagaaacgtgtagtgatgtctagcggcggacatcagcacttagtgtcatgcctcgaaaccttgcaaaaggcattaaaggtgaccagcttacctgccatgacagatcgactggaatctatcgctcgacaaaatggcttaggctcccatttaagtgcctcaggcacagagtgctatattacttccgatatgttttatgttgaggtccagctggatcctgcaggacagctgtgtgacgtgaaagtagcgcatcatggtgaaaaccccgttagttgccctgaattggttcagcagctgagagaaaagaattttgacgagtttagcaaacatctcaagggactagtgaacctgtacaatttgcccggtgataacaagctcaagacaaaaatgtacctggctctgcagagtctggagcaggaccttagcaagatggccattatgtattggaaagcaacgaacgcaggtcccttagataagatcctccatggctctgtcggctaccttacccctaggtcgggcggtcacctgatgaatcttaagtattacgtttctccaagcgatctcttagacgacaaaactgcctctcctattattctccatgagaataatgtgagtcgaagcctcggcatgaacgcatccgtgacaatcgaaggcacaagcgccgtgtacaaattaccaatagctcccttgattatggggagccatcctgtcgataacaaatggactccttctttcagtagcataacaagtgcaaactccgtggatttaccagcttgtttctttctgaagtttccacagcccattcccgtctcccgggcttttgtgcagaaactgcaaaactgcacagggattcctctttttgagacccagccgacatacgcaccactgtacgaactaattacccaatttgagctgtccaaggatcccgatcccatcccactgaaccacaatatgcgcttttatgcagctttacctggtcagcagcactgctacttcctgaataaggacgctcccctgcccgatgggaggtctttgcagggaacattggtaagcaagattacgtttcagcatccaggccgagtgcccctgatcctcaatctgatacgtcatcaggtggcttataacactttgataggctcctgtgtcaagcggacgattttgaaagaggacagcccgggacttctgcagtttgaagtttgtccacttagcgagtctagattttccgtgagtttccagcaccctgtgaacgactccctagtttgtgtggtgatggatgtccaggatagcacccacgtttcatgtaagctttacaaggggctctccgatgcgctcatttgtactgacgattttatcgccaaagtggttcagaggtgcatgagcattccggtcactatgagagcaattcggaggaaagccgagactattcaggcggacacccctgccctgagcctgatcgcagagaccgtggaggatatggtaaagaagaacctgccccctgctagtagcccgggaagcaagaaccctgagctgggatcgggctag

SEQ ID NO: 229789 - DNA, 408 bp, synthetic construct
  misc_feature 1..408: note = Description of Artificial Sequence: Synthetic coding sequence
  source 1..408: mol_type = other DNA
atggctgaaaaatttgatcacctggaagaacatctggagaagttcgtggaaaacatacgccagttgggaattattgtgtccgatttccagccatcctcccaggccggacttaatcagaagctcaactttatagtcacaggcctgcaggacattgataaatgccgacagcaattgcacgacattaccgtaccgctcgaggtgttcgaatacatcgaccagggaagaaaccctcagctgtacaccaaggaatgcctcgaacgcgcactggcaaagaacgagcaagttaaaggcaagattgatacaatgaaaaaattcaagagtcttttaatccaggagctatccaaggtgttcccggaagatatggcaaagtaccggagtatacgcggtgaggatcatcccccatcatag

SEQ ID NO: 229790 - DNA, 354 bp, synthetic construct
  misc_feature 1..354: note = Description of Artificial Sequence: Synthetic coding sequence
  source 1..354: mol_type = other DNA
atggctacgtattctttggccaatgagcggcttagagctcttgaggatattgagagagaaatcggggctatccttcaaaacgctggaaccgtgattctggagctttccaaggagaaaacaaatgagcgtctcctggatcggcaggcagccgcattcacagctagtgtgcagcacgtcgaggctgagttgagcgcacaaatacggtaccttacacaagtcgccacgggccagccgcacgaaggtagcagctactcctcaagaaaggactgtcagatggccctgaagagggttgactacgcacgattaaaactcagcgacgtcgccaggacttgcgaacaaatgttagagaactag

SEQ ID NO: 229791 - DNA, 6542 bp, synthetic construct
  misc_feature 1..6542: note = Description of Artificial Sequence: Synthetic coding sequence
  source 1..6542: mol_type = other DNA
atggccgcattcggcattctgtcttacgaacaccgacctctaaagcggccacgtctcggcccacccgacgtttatccacaggatcctaaacaaaaggaggacgaactcacagctctgaatgtgaaacaggggtttaacaatcagcccgcagttagtggtgacgagcacgggagtgctaagaatgtgtccttcaatccggcaaaaattagttctaacttttcttcaattattgccgagaaactgcggtgcaacactctgccagacactgggcgtcgtaaaccacaagtcaaccagaaagataatttttggctggttacagccagatcacagtcagcaatcaatacctggtttactgacctcgcaggtactaagcccctaactcagttagcaaaaaaggtgccaatattttcaaaaaaagaggaagtttttggctacctggccaagtacacagtgcccgtaatgagagctgcctggttgataaagatgacatgcgcatattatgcggcaatctcggaaactaaagtgaagaagcggcacgtggacccattcatggaatggacgcagattatcactaaatacctatgggagcaactccaaaagatggcagagtattatagacctggaccagccggatctgggggatgcggcagcactattggcccacttccgcatgatgttgaggtcgctatacgccaatgggattatacagaaaaactggccatgtttatgtttcaggacggaatgctggacagacatgagtttctgacatgggttctcgagtgtttcgaaaaaatccggccaggggaagatgagctcctgaagctcttgctgccgttgctgttgagatactctggcgagttcgtccagtcagcctatctgagccgtcgactggcctacttctgcactcgcagactggccctgcagctagatggcgtatccagtcattcatcccatgtgattagtgcccaaagtacctccacgttgcccactaccccggctccccaacccccaacctcttccaccccttccacaccctttagcgacttgcttatgtgtcctcagcatcggcctctcgtattcggactctcgtgcatcctgcagacgattctcttgtgttgccccagtgccctcgtgtggcactatagtctgacggatagtaggatcaaaaccggaagccccttggatcacttgcccatcgccccttctaacctgcctatgcctgaaggaaattccgcattcacgcagcaagtgagggctaaactacgcgagattgagcagcaaattaaagagagagggcaggccgtggaggttaggtggtcttttgataagtgccaggaggcaacggccggatttactatcggcagggttctgcacacactagaggttctcgactcccactcctttgagagatccgacttctcaaactcgctcgactcgctgtgcaatcgtatctttgggttggggccttctaaagacggccatgagatctcaagtgacgacgacgcggtcgtgagcctcctctgtgaatgggctgtgtcctgcaagagatctgggcgtcacagagccatggttgtcgcgaagttactggaaaaacgacaggccgaaattgaagcggaaagatgtggcgaaagcgaggctgctgacgaaaaggggtcaatcgcgagcggcagcttgtctgcgccttctgctcccatctttcaggacgttctactccagtttctggatacacaggcacctatgctgacggatcctagatcagagtctgaaagggttgagtttttcaatctcgtccttttgttctgcgagctgattaggcacgacgtgtttagccacaatatgtatacatgtaccctaatctcacgtggtgatttggcttttggggctcctggtccacggccaccttccccatttgatgatcctgctgacgaccccgaacataaggaagctgaggggtcttccagttcaaaactagaggacccagggctcagcgaatctatggatatcgatccttcctcctcagtactgttcgaagacatggaaaagcctgattttagcctcttttccccgactatgccgtgtgaaggcaaaggaagtccctctcccgagaaacctgacgttgagaaggaggtgaagcctcctcccaaggagaagatcgagggaacactcggggtgctttatgatcagccgagacacgtacagtacgctacacattttcccattccccaggaggagtcttgctcacacgagtgcaatcagagattggtggtgctctttggggtggggaaacagagggacgatgccaggcacgctataaaaaagataacgaaggatattctgaaggtgctgaacaggaagggcaccgccgaaacagatcagctagcccctattgtccccctgaatcctggtgacttgacctttttaggaggtgaggatgggcagaagcgcagaaggaaccggccagaggcctttccgaccgctgaggacatattcgctaaattccaacatctgagccactatgaccagcatcaggtgacggcacaggtgtcccggaacgtcctagagcagattacgagttttgcgctaggaatgtcctaccacctgccactcgtgcagcacgtgcagtttattttcgaccttatggagtattccctcagcatcagcggattgatcgactttgcaattcagttgttaaacgagctctccgtggtcgaggcagaacttcttctaaagagcagcgacctggttggtagttataccacctcgctttgtctctgtatcgtcgccgtgcttagacactatcacgcttgtctcattttaaatcaggatcaaatggcccaggtatttgaaggactgtgcggcgtagttaagcatggtatgaatcggagtgacggatctagcgccgagcgatgtatccttgcctacctgtatgatttgtatacgagctgctcacacctgaagaataaattcggagagttatttagcgacttctgttctaaggtgaagaatactatctactgtaacgtggagcccagcgagtcaaacatgcggtgggctccagaatttatgattgacaccctggaaaatcccgctgcccacacgtttacatacacgggcctgggcaagtctctatccgagaaccctgctaatagatactcatttgtttgcaacgctctgatgcatgtgtgtgtgggtcatcatgacccggaccgggtgaacgacattgctatcctctgtgcggagctaactggatactgcaagtcactgtccgccgagtggcttggggttttgaaggctttgtgctgcagctctaacaacggcacttgtggtttcaatgacttgctgtgtaatgtggacgtctccgacctctcttttcatgacagcctcgcgacattcgtggctatcctgatcgccaggcagtgtctcctgctcgaagatttaatccgatgtgctgcaatcccctcactccttaatgccgcatgctctgaacaggacagcgagcctggagcacgactaacttgtcgaatcctcctgcacctgttcaagacccctcaacttaatccctgccagagtgatggcaataagcccacagttggtattagatccagctgcgatcgccatctcctggctgctagccagaacaggatcgtggatggggctgtctttgctgtgttaaaagcggtgtttgtgctgggagatgcggagctgaaaggctctggatttaccgttaccgggggaactgaagaactgccagaggaggaggggggaggtggttcagggggacggagacaaggaggccgtaatatctccgtggaaaccgcgtctttggacgtgtacgccaagtacgtcctgcgcagtatttgtcaacaggagtgggttggcgaaagatgtctcaaatctttgtgtgaagattccaacgatctccaggaccccgtgttatcaagcgcacaagcgcaaaggctaatgcagttgatatgttatccccatcgattactcgataatgaagacggggagaacccacagagacagagaattaaacgcatcctccaaaatttagaccagtggacaatgcgccaatctagccttgaacttcaactgatgatcaagcagaccccaaacaacgagatgaactctttgctcgagaatattgccaaggcaaccattgaggtttttcaacagtcggccgaaacagggagttcaagcgggagcaccgcatcaaatatgccaagctcgtctaagacaaagcccgtcctcagctctctggagcgtagcggtgtctggcttgtcgcacccctcattgccaagctgcctacgagcgttcaaggacacgttctgaaggctgccggagaagagctcgagaaggggcaacaccttggctctagctcacggaaggaaagagacagacagaagcagaagtccatgtctctgctgagtcagcagcctttcctgtccctcgtgctaacatgccttaagggtcaggatgagcagcgggaggggctcttgacttccctctacagtcaggttcaccaaattgtcaacaactggagagatgaccagtacttggatgattgtaagcccaagcagctgatgcatgaagccctcaagcttcgcttgaacctggtggggggaatgttcgataccgtccagaggtccacccagcagaccactgagtgggcaatgcttctccttgaaatcataatcagcgggactgtggatatgcagagtaataatgagttgtttaccaccgtcctcgatatgctgagcgtgctcattaacgggacattggctgccgatatgtcatctatttctcaagggagtatggaagagaacaagagagcatatatgaacctagcaaagaaattacaaaaggaactcggcgaacgccagagcgactccctggaaaaggtccgccagttgttgccgcttccgaaacagacccgcgatgttatcacctgtgagcctcagggttctctgatagatactaaaggcaacaaaatagcaggttttgactcaatttttaaaaaagaagggctgcaggtgtcaaccaaacagaaaatttcaccctgggatctgtttgagggccttaaaccttccgcccctctgagttgggggtggttcggcactgtgagggttgatcgacgcgttgcaaggggggaagaacagcagcggttactcctatatcatactcatctgcggcctcgaccgagagcatactacttagagcccctgccactccctcccgaggacgaggaacccccagccccaactctgctggaacccgaaaagaaggcacccgagccccctaagactgataaaccaggcgctgccccaccctcaaccgaagaaaggaaaaagaaaagcacaaagggaaagaagcgctctcagcccgctacgaagacagaggattatggcatgggccctggcagatccggaccatatggagtgacggtccccccagacctgctacatcacccgaaccctggaagcattacacacctcaattacagacagggctctataggcctgtatacacaaaaccagcccttgcccgctggaggccctagagttgacccctacagacctgtgaggctgccaatgcagaagttacccactaggcccacttatccaggcgtgctacccacgactatgacaggagttatggggctcgaaccttcctcctacaaaactagcgtctaccgccaacagcagcctgcggtaccccaggggcagaggctccgccagcagctgcaggccaaaattcagtctcaaggcatgctgggccaatctagcgtgcatcagatgactccttcctcatcatatggattacagaccagccaggggtacacgccttacgtttctcacgtggggcttcaacagcacactgggccagctggcactatggtgcctccttcttacagcagccaaccataccagagtacacaccccagtactaacccgactctggtggatccaacccggcatttacagcaacggccatccggctatgtccatcagcaagcccctacgtacggacacggacttacgtccacgcagcggtttagccaccagactctgcagcagaccccgatgatttctactatgacacccatgtctgctcagggtgtgcaggctggcgtgcgcagtacagctatactacctgaacagcaacaacagcagcagcaacagcagcagcagcagcagcagcaacagcagcaacagcagcagcagcaacagcaacaataccacatacgacagcaacagcagcaacagatactccgtcagcagcaacagcagcaacagcaacagcaacagcagcagcagcagcagcaacagcagcagcagcaacagcaacagcagcaccagcagcagcagcagcagcaggccgcacccccacagccccagcctcaatctcagccccaattccagcgacaaggtctgcaacagacacagcagcagcaacaaaccgcagctctggtgaggcaacttcaacaacaacttagtaatactcagccacaaccatcaacaaacatattcggcagatatta

SEQ ID NO: 229792 - DNA, 6533 bp, synthetic construct
  misc_feature 1..6533: note = Description of Artificial Sequence: Synthetic coding sequence
  source 1..6533: mol_type = other DNA
atggccgcattcgggattctcagttacgaacacaggcctcttaaaagacctagactgggtcctcctgacgtctatcctcaggacccgaagcaaaaggaagacgaactgacagccctgaacgttaaacaaggctttaataatcaacctgccgtatctggagatgaacacggctccgccaagaacgtgtcttttaatcccgcaaaaatctcgtccaatttctcatctatcattgctgagaaactccgatgcaatacattacctgataccgggcgtcgcaaaccacaggtgaaccagaaggataatttctggctagtgaccgcacgaagccagagcgcaattaacacgtggtttaccgatttagccggtacaaagcccctgacccagctggccaagaaggtgccgatcttctcaaaaaaggaggaggttttcggatatctggcgaaatatacggtcccggtaatgagagcggcttggttgattaagatgacttgtgcctattatgccgcaatctccgagaccaaagtgaaaaagaggcacgttgatccattcatggagtggacccaaattattacaaaatacttgtgggagcaactacaaaagatggccgaatattaccgtcccggaccagcaggctccgggggttgcggatctaccattggcccactgccacatgacgtcgaggtggccataaggcagtgggactatacagaaaaactcgctatgttcatgtttcaagacggtatgttggaccgacatgaattcctgacttgggtcttggaatgcttcgagaaaataagaccaggtgaagatgaacttctcaagcttctcctgcctctgctgctgcgatacagcggtgagtttgtgcagagtgcatatctgtctcgcaggctcgcctacttctgcacacggaggttggctctgcagctggatggtgtgagtagccatagcagccacgtgattagtgcccagagcacctccacacttcctaccaccccagctccacaacctcccacaagcagcacgccatcaacccccttctccgacctgttgatgtgtcctcaacacaggcctctggtcttcgggctatcttgcatcctgcagacaatcttgctgtgttgtccttctgcccttgtgtggcactacagtttgaccgattcccgtattaagacaggatctccgctggaccatctgccgatcgcacccagcaaccttcccatgcctgagggcaactccgcatttacccagcaagtccgtgccaaactgcgggaaatcgaacagcagattaaggagcggggtcaagccgtcgaggttaggtggtcttttgacaaatgccaggaggccacagccggtttcaccatcgggagggtactgcacacactagaggtgcttgactcacactcatttgagcgctccgacttttcaaattctctagactccctgtgcaacaggatctttggtctgggacctagcaaggacggacacgagattagctccgatgatgacgccgtggtgtcgctgctctgcgaatgggccgtgtcatgtaagcgttccggccgacatagggccatggttgtcgctaagctcctggaaaaacgacaagccgagattgaggcagagcgctgcggggaatccgaggctgcagatgagaaggggagcatcgcaagcggttctcttagcgccccatcagcacctatttttcaagatgtcctcctgcaattcctggatacccaggctcccatgctcaccgatcctcggtccgagagtgagcgcgttgagttcttcaacctggtgctgttattttgtgagctcatcagacacgacgtcttctcgcacaatatgtatacttgcactctcatcagtcggggagaccttgcattcggtgcccctggacctcgcccaccaagtccatttgacgatccagcggacgatccagagcataaagaggcagaaggcagctcctcctccaaactcgaggatcctggcctgtctgagagcatggatattgatccttccagttccgtactctttgaggacatggaaaagcccgacttctcattattcagccctaccatgccttgcgaaggaaaggggtctccttccccagagaagcctgatgtagagaaagaggtgaaaccaccacctaaagagaaaatcgaagggactttgggcgttttgtacgaccaaccgagacacgttcaatatgccacacactttcccattcctcaggaagagagttgttcacacgaatgtaaccaaaggttggttgtgttgtttggagtgggtaaacagagggatgacgcacgacacgcgattaagaagattactaaagacatactcaaggtcctcaatcgtaaagggacagctgagactgaccagctggcaccgatcgttcccctgaacccaggcgacctcacctttctgggcggagaagatgggcagaaaagaaggaggaatcggcctgaggcgtttccaaccgccgaagacatttttgcaaaatttcagcatctgagtcattacgatcaacaccaggtcactgcacaagtctcccgaaatgtactggagcagattacaagttttgcattaggaatgtcctaccacctgcccctggtgcaacacgttcagttcattttcgatctgatggagtactcgctgagcattagtggccttattgatttcgccatccagctcttgaatgagttgagtgtggtggaagccgaattgctgttaaaaagttcagatttggtcgggtcttacactacctctctgtgcctttgcatcgtggccgtgctgcggcactaccatgcatgcctgatactgaatcaagaccagatggcccaggtgtttgagggactgtgtggggtagtcaaacatggcatgaaccgatccgatggcagcagcgctgagaggtgtatccttgcctacctgtacgatctctacacaagttgtagtcacctgaagaataagttcggagaactgttcagtgacttctgttctaaagtcaaaaatacaatatattgtaatgtggagccttccgaatcaaatatgcggtgggcaccagaatttatgatcgataccctggagaaccctgccgctcacacctttacttatactggactcgggaaatcactctctgagaaccctgctaaccggtattcatttgtgtgtaatgccctaatgcacgtttgcgtgggtcaccacgacccagaccgggtgaacgacattgctattctgtgtgccgagctcaccggatattgcaaatccctctccgctgaatggctcggggtgttgaaagccctttgttgttcctcgaataatggaacctgtggattcaatgatctcctctgcaatgtggatgtgtcagatctgagctttcatgattctttagccacattcgtcgcgattcttatcgccaggcagtgtttgctgctggaggacctcattaggtgcgccgctattccaagcctgcttaacgctgcctgcagcgagcaagacagcgagccgggtgcccgtctcacctgcaggatacttctacacctgtttaaaactccacagctgaatccctgtcagtccgacggaaataagcccacagtcggcattagaagttcttgtgataggcacctgctagctgccagtcaaaatcgcatcgtggacggagctgtcttcgcagttctgaaggcggttttcgtgctgggcgacgcggagctaaaagggagtggtttcaccgtaaccgggggtacagaggagctcccagaggaagaaggcggagggggatcaggaggcaggcgacaggggggtcgcaatattagtgtggagacagccagtttggatgtctacgctaagtacgtgcttaggtcaatctgtcagcaggagtgggttggggagcggtgcctgaaaagtctgtgcgaagactcaaacgaccttcaggacccagtcctgagttctgctcaagcgcaaagactgatgcagctcatttgctacccccaccggctgctggacaatgaagacggggagaatccacaaagacaaagaatcaaacgcatactccagaacctggatcagtggactatgcggcagtcttcacttgagcttcagctgatgattaagcagactcctaacaacgagatgaattcgctccttgagaatatcgccaaggcaacaatcgaggttttccagcagagtgccgaaactggtagctcttccggttccactgcttccaatatgccttcctcatcgaagactaagccggtgctgagtagccttgagaggtcaggcgtttggctcgtcgcaccgctgatagcaaaattaccaacctcagttcaaggacacgtattaaaagctgctggagaagagcttgaaaaggggcagcacctgggtagctcctccaggaaggagcgggaccgtcaaaagcagaagtcaatgtccctcttatcccagcagccctttcttagccttgtactcacttgtttaaaaggtcaggatgaacagcgcgaaggactgctcacatcattgtactcccaggttcatcagattgtcaataattggcgcgatgatcagtatcttgatgactgtaaacctaaacaactgatgcacgaggcacttaaattgaggttaaacctcgtgggcggtatgtttgataccgtacagagatccacacagcagaccaccgaatgggctatgctcctattggaaattataatcagcggcaccgtcgatatgcagtctaataacgaactgttcacaaccgtgctggatatgctgagcgtactgattaatggaacgctggccgctgacatgtcatccatatcccaaggcagtatggaagaaaataaacgtgcgtacatgaacttggccaaaaaattgcagaaggagctcggggagagacagtctgacagcttagagaaggtcagacagttactccctctgcccaaacaaacgcgagatgttattacctgcgagccacagggatcactgatcgacaccaagggaaataagattgcaggatttgactctatttttaaaaaggaaggtctgcaggtctcaacaaaacaaaagattagtccatgggacctgttcgagggcttaaaaccctccgctccgctttcatggggatggttcggaaccgtgagagtggaccgccgagtggcacgcggtgaggagcagcaacgattactcctgtatcacacccacctccgccctcggcctcgtgcctactatctcgaacctctgcctctgcccccagaggacgaagagcccccagccccaactctgttagaacccgagaaaaaggcccctgagcccccaaagacagataaacctggggctgctcccccttccaccgaggagcgaaagaagaagagtaccaagggtaagaaaaggagtcaaccagccaccaagactgaagactacggcatggggcctgggcgaagcgggccatacggcgtgacggttccccctgatctgctgcatcatcccaaccccggttccattactcatcttaattatcgccagggtagcattggactgtatactcagaatcagcctctgccagcgggtggcccaagggtcgacccctatagacccgtgagactgccaatgcaaaaacttccgaccaggcctacgtaccccggtgtattgccaacaactatgacgggggtgatgggtctcgagccgtcatcctataaaacttccgtctaccggcagcagcaaccggctgtcccgcagggtcagagactacggcagcagctacagcagtcacaaggaatgcttgggcagtcaagcgtgcaccagatgaccccttcatcctcatacgggctgcagacgagccagggatacaccccttatgtcagtcacgtcggcctccagcaacacactgggcctgcgggaaccatggtcccccctagctattcctctcagccctaccagagcactcatccaagtacaaacccaacccttgtcgaccctactcggcacctacagcaaaggcccagtgggtatgtgcaccagcaagccccaacctatggtcatggcctcacaagcacccagagatttagtcaccagaccctccaacaaacacctatgatttctaccatgaccccaatgtccgcccagggcgtgcaggctggcgttcgcagtacagcaatactccctgaacagcagcaacaacagcaacagcagcagcagcagcagcagcagcagcagcagcaacagcagcagcagcagcagcagcagtaccatatccgccagcagcagcagcagcagatcctgcgccagcagcagcagcagcagcagcagcagcagcaacaacagcaacagcaacagcagcagcaacagcagcagcagcagcaacatcagcagcagcagcagcagcaggcggcacctcctcaaccacagccgcaatctcagccacagttccagaggcagggcctgcagcagacccagcagcagcagcagacggcagctttagttaggcagctgcagcagcagctgagcaatactcagccgcagcccagcactaatatttttggcaggtacta

SEQ ID NO: 229793 - DNA, 6530 bp, synthetic construct
  misc_feature 1..6530: note = Description of Artificial Sequence: Synthetic coding sequence
  source 1..6530: mol_type = other DNA
atggcggcttttgggattctttcctatgagcatcgcccactcaaaaggccacgcctgggaccacccgacgtgtatccccaagatcccaaacagaaggaggatgagctgaccgcccttaacgtgaaacagggattcaacaatcagcctgccgtcagcggtgatgagcatggtagcgccaaaaacgtatcatttaatcccgcaaagatctcctccaatttttcaagcattatcgcagagaagcttcgctgtaatacactgccggacaccggacggaggaagccacaggtcaatcagaaagacaatttctggttggtcactgccagatcccagtcggctataaatacctggtttacggacttggcaggaactaaacccctgacccagctggcgaagaaagtcccaattttcagcaaaaaagaagaggtgttcggatacctggccaagtacacagtgcccgttatgagagccgcatggttgattaagatgacttgcgcttactatgctgcaatctccgagaccaaagtgaagaagcgccatgtggacccgtttatggagtggacccagattataactaagtatctttgggagcagctccagaaaatggcggaatactataggcccggtcccgcagggagcgggggttgtggaagcacaatcgggcctctcccccatgatgtggaggtcgccataagacaatgggattacactgagaaactggcgatgtttatgttccaagacggtatgctggaccgccacgaattcctgacatgggtcctcgaatgtttcgagaaaatcaggcctggcgaggatgagctactcaagctcctgttgccccttttactaagatatagtggcgaattcgttcagagcgcttacctctctaggcgcctcgcatacttttgtactcgcagactggccctccagctcgatggagtaagcagccattcctcacatgtgatctccgcccagtccacctccactttgcccacaacccctgcccctcagccaccaacctcctctacccctagcacccccttcagtgacctgctgatgtgccctcagcatcggcctctggtctttgggctttcgtgtatcctccaaacgattctcctgtgctgcccaagcgcactagtgtggcactattctctcacagacagcagaataaaaacaggtagccctctggatcacttgccaatcgccccttcgaacctgccaatgcctgagggaaatagcgcattcacccaacaagtccgggctaaactgagagagattgaacagcagatcaaggaacgcggtcaggccgttgaggttagatggagcttcgacaagtgtcaagaagccactgcaggcttcactattgggcgtgtcctccacactctcgaggtcttggactctcatagcttcgaacgaagtgacttctccaattccctagattcgctgtgtaatcggattttcggactggggccatcgaaagacgggcatgaaattagttcagacgacgatgccgtggtgtccctgctgtgtgaatgggccgtgagctgtaagcggtccggaaggcatagggcaatggtggtggccaagctcctggagaagagacaggctgaaatcgaggccgagcggtgcggagagtctgaagccgctgatgaaaaaggaagtatcgctagcggttctctgagcgcaccttcagctcctattttccaggacgtgctcttacagttcctggacacccaggcacctatgttgacagacccccgatctgaatccgagcgcgtggaattttttaatcttgtgctgctgttctgtgagcttatccggcacgacgttttttcccataatatgtatacctgcaccctcatttctagaggggaccttgctttcggtgctccaggccctagacctccttccccattcgatgatcccgcagacgatccggaacacaaggaagcagaggggtcatcttcgtctaagctcgaggatcccggactgagtgagagtatggacattgacccctctagtagcgtgctgttcgaggacatggagaaaccagactttagcctgttctcacccacaatgccttgcgagggcaaaggttcaccttctcctgagaagcctgatgtagaaaaagaagtgaaacctcctcctaaagaaaaaatcgaaggtaccctcggtgtgctgtacgatcagcctcgccacgtgcagtacgctactcacttccccatccctcaggaagaaagctgtagtcacgagtgtaaccaaagactggtggttctttttggagtcggcaagcagagagacgacgcaagacacgcaattaaaaagattacaaaagacatcctgaaggtactaaatagaaaaggcactgctgagacagatcagctggctcccattgtgcctctgaacccgggtgacttaacattcctagggggagaggacggtcagaagcgacgtcgcaatagacctgaagcctttcccacggccgaagacatctttgccaaatttcagcacctctcacactacgaccagcaccaggtcactgctcaggtcagccggaatgtacttgagcagatcacgagtttcgccctgggaatgagttaccatctcccattagtccagcatgtgcagtttatctttgacctgatggagtattccctcagcatcagcggtttgatcgattttgccattcagctgcttaacgagttaagcgttgtggaagccgaacttctgctcaaatcatctgatctcgtaggtagttatacgacaagtctgtgtctctgcatcgtggccgtgctgaggcactaccatgcctgcctcatactcaaccaggaccagatggcacaagtattcgaggggctgtgcggcgtggttaagcatggaatgaaccgtagcgatggtagcagcgcagagcgctgcattctcgcctatctttatgatctatatacctcttgtagccacttaaaaaacaagtttggcgagctgttctctgacttctgttccaaagtcaagaacactatctattgtaatgttgaaccttccgagtctaatatgcggtgggctcccgaattcatgattgacacccttgaaaacccggcagctcatactttcacgtacactggtctcgggaagtctctcagcgagaaccccgctaatagatattcattcgtgtgtaacgcattaatgcacgtctgtgtcgggcaccacgatcccgaccgcgtaaacgacatcgctattctgtgtgcggagttgactggctattgcaagagtctgagcgccgagtggcttggcgtcctaaaggccctttgttgctctagcaacaatggtacgtgcggctttaatgatttgctctgtaatgtggacgtgtcagacttgagcttccatgacagcctggccacctttgtcgcaattttaatcgcacggcagtgcctgcttctggaggatctaattaggtgtgccgctataccttcacttctgaacgcagcatgctccgagcaagattccgagcctggagcccgactaacctgccgaatcctgctccatctattcaagactccacaattaaacccttgccagagtgatggaaacaagcctacagtcggaatacggtcttcttgtgaccgccatctgctggctgctagtcaaaaccggattgtggacggagctgtgttcgctgtcctaaaggctgttttcgtcctgggcgatgccgagttgaaaggcagcgggttcactgtaactggtggcacggaagagttgcccgaggaggaaggcggaggcggtagcggcggaaggcggcaggggggtcggaatatcagcgtcgaaactgctagcctcgatgtgtatgccaaatacgtgttaagatccatctgtcagcaggagtgggtcggcgaacgctgcttaaagagcctttgtgaggattccaatgatcttcaagatccggtcctgagtagcgcacaagctcagcgattaatgcagctgatatgctatccccatcggctcctggacaatgaggacggagagaaccctcagcggcagagaattaagaggatcctccagaacttggaccaatggactatgagacagagttcactcgaactgcagttgatgattaagcagactccgaataacgagatgaactccctgctggagaatattgccaaggccaccattgaagtctttcagcagtcagccgaaacaggctcgtctagtgggtcaaccgcctccaatatgcccagtagctctaagacaaaaccagtgctgagctctcttgaaaggagtggggtatggctcgtcgcacccctgatagcaaagctgccgacgagcgtgcaagggcatgtactgaaggcagcaggagaggaactggaaaaaggacagcacctcgggtcgtcctcacgtaaggaaagggaccgacagaagcaaaagagcatgagcctgctcagccagcagcccttcctatccctggtgctaacctgcctcaagggccaggatgaacagagagaaggtctcctaacttcactatactctcaggtgcaccagatagtgaataactggcgcgatgaccagtatctggacgattgtaaacctaagcagcttatgcacgaagccctgaagcttcgtcttaacctggtgggaggcatgtttgacactgtccagagaagcacacagcagacaactgaatgggcaatgctgttattggaaattataatctcaggaactgtagatatgcagtctaacaatgaactgttcaccaccgtcctggacatgctttctgtgcttattaatggaactctggcagctgacatgagttcaatctctcaggggtcaatggaagagaataagcgtgcttatatgaatctggctaagaaacttcagaaggaactgggtgagcgacagtcagattccctcgagaaggttcgccagctcctcccattaccaaagcaaactagagatgtgatcacctgtgaaccacaggggtccttgatcgatacaaagggtaacaagatcgccggttttgactcgatcttcaagaaggaaggcctccaggtatcaactaagcagaagatcagtccttgggacctcttcgaaggcttaaaacccagcgcccctctgtcttggggctggtttgggaccgtgagggttgatcggagggtagccagaggcgaagagcaacagcgacttcttctgtaccatacgcacctgagacccaggccgagagcatactacctggagccccttccactgccacccgaggacgaagagcctcctgctccgactctgctggaaccggaaaagaaagccccagagccgccaaagacggataaacctggcgctgcacctcccagcactgaagaacgaaagaagaaaagcaccaaagggaaaaagaggtcccagccagccacaaaaactgaggactacggcatggggcctggccgatctgggccatacggtgtcacagtaccaccagacctcctgcaccacccaaacccaggatctatcacccatcttaactaccgccagggcagtatcgggttatacacacagaatcagcctctaccagccggtgggcctagggtagatccgtacagacctgttcgtttgcccatgcagaaactgccgactcgcccaacctaccctggcgttctgcccacgaccatgaccggtgtgatgggacttgagccatcttcatacaagacaagcgtgtatcgtcagcagcagccagccgtcccgcagggtcagcgcctgcggcagcaattgcagagccaagggatgctgggacaaagcagcgtacatcagatgaccccctccagctcttacgggcttcaaacatctcagggctacaccccctatgtctcccacgtgggcctccagcaacacaccggacccgctggaacaatggtaccaccgtcatactcgtcccagccctatcagtccacccacccctcgaccaatcctacactggtggacccaacgcggcacctgcagcaaagaccttcaggttatgtgcaccagcaagctcctacgtacggccacggcctgacttctacacagcgattcagtcaccaaacactccagcaaactcccatgatctccacaatgacccctatgtccgcgcagggagtgcaagctggagtgagatccacggcgatcctccccgagcagcagcaacagcaacagcagcagcagcaacagcagcagcagcagcagcagcagcagcagcaacagcaacagcaacagtaccatatccggcagcagcagcagcagcaaattctgcgccagcaacaacagcaacaacagcagcagcagcagcaacaacagcagcagcagcagcagcagcagcagcagcagcagcaacaccagcagcagcaacagcaacaggccgcaccccctcagccgcagccccaatctcaaccacagttccaacggcaaggtctgcagcagacccaacaacagcagcagacagctgccttagtacggcagctgcagcagcagctcagcaacacccagccgcaaccctccaccaacatcttcggaaggtacta

SEQ ID NO: 229794 - DNA, 393 bp, synthetic construct
  misc_feature 1..393: note = Description of Artificial Sequence: Synthetic coding sequence
  source 1..393: mol_type = other DNA
tgaaccccgaacaggagacgaaaaaaacagctaaatgctgccttcctgccccaagacgagctgacggccctgaacgtaaagcagggctttaacaaccaacccgcagtgtcaggcgacgaacacgggtcggcgaagaatgttagtttcaatccagccaaaatttcttctaacttttcctctataattgcagaaaagctccggtgtaacaccttaccagacaccggacgtagaaagccgcaggtgaatcagaaagacaacttctggcttgtcacggcacggtcccaatcggcgataaacacttggtttactgacctggctggtaccaagccattgactcaactggccaagaaggtgccgatttttagtaaaaaggaggaagttttcggttactag

SEQ ID NO: 229795 - DNA, 6383 bp, synthetic construct
  misc_feature 1..6383: note = Description of Artificial Sequence: Synthetic coding sequence
  source 1..6383: mol_type = other DNA
gaagacgaattgactgccctgaatgttaaacagggcttcaacaatcagcccgcagttagtggcgacgagcacggttctgctaaaaatgtttctttcaatcccgcaaaaatcagcagcaacttttctagcattattgctgaaaaactgcgatgtaacacactgccagacactgggaggcgcaaaccccaggttaatcagaaggacaatttttggttggtcactgctcggtcccagtctgccattaatacgtggttcactgacctggcaggtacaaaaccattaacgcagcttgcgaaaaaggtgcctatttttagtaagaaagaggaggttttcggctacctagcaaaatataccgtccctgtgatgcgagctgcatggttgatcaaaatgacctgcgcctactatgccgcaatctcagaaactaaagtaaagaagcggcacgttgatccctttatggaatggacgcagattatcactaaatatctgtgggaacagctgcagaagatggctgaatactacaggccaggccctgccggtagtggagggtgcggctcgaccatcgggcctctcccccatgatgtggaagtcgcaatccgacagtgggactatactgaaaagctggccatgtttatgtttcaggacggcatgttggacaggcacgaatttcttacttgggttctggagtgcttcgagaaaattaggccaggggaagatgaactgctgaagctattgctgccattgctgctccgttactccggggaatttgttcagagtgcctacctctcaagacgcctggcgtatttctgcacacgcagattggctctccagctagacggcgtgtcatctcactcctcccacgtgatttcggctcagagcacttctacccttcccaccacacccgcaccacaaccccctacatcttccaccccgtcgacaccatttagcgatctgctgatgtgtcctcagcatcggcctctggtgtttggcctcagctgcatccttcaaacgatcttgttgtgttgcccctccgccctggtatggcattactctttaactgattcccggataaagaccggtagtcctcttgaccacctccctattgcccctagcaatctcccaatgcctgagggcaatagcgcctttacacagcaggttcgggcaaagcttagagaaatcgaacaacaaattaaggagagaggccaggcagttgaagttcggtggagctttgataagtgccaggaggcaacggccggattcaccattggtagagtcctgcacacactcgaggtcttggactctcattctttcgagaggagcgacttttccaattcactcgacagtctttgcaacagaatattcggtctcggaccgtctaaggatggccatgagatttcaagtgacgatgacgccgtggtttcacttctctgcgagtgggcagtgtcctgcaaacggtctggtcgccaccgggctatggtggtggcgaagctcctcgagaagcgccaagctgagattgaagctgaacggtgcggcgagtctgaagctgcagacgagaaaggcagcattgcctccgggtccctgagcgcaccttctgctcctattttccaggatgtcctgctccagtttttggatacccaggcacccatgttaacagatccacgctcggagtccgagagagtggaattttttaatctggtgcttttattttgtgaattgatccggcatgacgtgttcagtcacaacatgtacacttgtacacttattagcagaggagacctcgcttttggagcacccggtcccaggcccccttccccttttgacgaccccgctgatgaccctgagcacaaagaagccgaaggatcctcctccagcaagctggaggatccaggtctgtccgagagcatggacatcgatccctctagcagcgtgcttttcgaagatatggaaaagccagacttttccctgttcagtcctacaatgccctgtgagggaaagggcagcccctccccagaaaaacccgacgtggaaaaggaggtgaaaccaccccctaaagaaaagattgagggaacgctgggggtattgtatgaccaaccccgtcacgtacaatatgccacacactttccgatcccccaagaggagtcatgctcccacgagtgcaatcaacgcctggtagtactttttggtgttggtaagcagagagacgacgcacgtcacgccataaagaagataacgaaagacattctcaaagtgctgaaccggaagggaaccgccgagaccgatcagctggccccaatagtgccgttgaacccaggagatctgacctttttagggggtgaggatggacagaagcggcgtcggaatagaccagaagcattccccacagctgaagacatcttcgccaaatttcaacatctgagccactatgaccaacaccaggtgacggcgcaagtgtctcgcaatgttcttgaacagattacaagcttcgcactggggatgtcataccatcttcctctggttcagcatgttcagtttatcttcgatcttatggagtatagcctctcaatttctgggctgattgacttcgccatccagctacttaatgagctctccgtcgttgaggccgagcttctgcttaagagttccgacctcgtgggttcttacaccacatccctgtgcctatgcatcgtagcagtgctgaggcattaccacgcatgcttgattctgaatcaggaccagatggcccaagtttttgagggactctgcggagtggtcaaacacggaatgaacagatctgacggaagcagtgccgaaaggtgcatcctagcatacctgtatgacctgtacacctcctgcagtcatcttaagaacaaattcggtgagttgttttccgacttctgctccaaagtgaagaacactatttactgcaacgtcgagcccagtgaatctaacatgcggtgggccccagagttcatgatcgacacattggaaaatcctgcggctcatacctttacctacacgggcctgggtaagtcgctatcagagaatcccgcaaacaggtactcgtttgtgtgtaatgccctcatgcatgtttgcgttggacatcacgatcctgatcgggtcaatgacattgccattctgtgcgcagagctcaccgggtactgcaagagtctctcagccgagtggttaggcgtgcttaaagctttgtgctgttcttccaacaatggtacctgcggttttaatgatttgctgtgcaacgtggacgtgagcgatttgagctttcacgacagtcttgccacctttgtggctatcctgatcgcgagacagtgccttttgctggaggacttgatccggtgtgcagcgataccgtccttgttaaatgcagcgtgttcagaacaggactccgagcccggagctcgactgacctgtcgcattctgctgcacctgtttaagactccacaattgaatccatgccaatcggacggtaacaaaccaaccgtagggatcaggagcagctgcgaccgccacctcctggctgcatcacagaatagaattgtggacggcgcagtctttgccgtgctgaaggcagtatttgtcttgggagacgcggagttaaaaggaagtgggtttacagttacagggggtactgaggaactgcccgaggaagagggcggtggtggatcaggaggcagaaggcagggcggaagaaatataagcgtcgagactgcttcccttgacgtttacgctaaatatgtgctccgatcaatctgtcagcaggaatgggtgggggagaggtgtctgaaaagcctgtgcgaagattcaaatgatctccaggacccggtactgtcttccgcccaagctcagcggctgatgcaattaatctgctaccctcaccgactgctggacaatgaggacggagaaaatccacagcgccagaggattaaaagaatactacagaacctggaccagtggaccatgaggcagagctccctcgagctgcagctgatgattaagcagacccccaataacgagatgaatagtctgctggaaaacatcgcaaaagccaccattgaagtcttccagcagagtgctgagacaggaagctcatccggcagtactgccagtaacatgccctcctcttcaaaaacgaagcccgtcctctcatctctagagcgttcgggagtgtggttggtagctcccctgattgccaaactgcccacctctgtgcagggccacgtcctcaaggccgcaggggaggagctcgaaaaaggccagcacctggggtccagctcccggaaagagagggataggcagaagcagaaatcaatgtctttactctcccagcagccttttctcagcctggtgctgacatgtctgaaggggcaagacgagcaaagagagggccttctcacttctctctactctcaggtgcaccagatcgtcaacaattggcgcgatgaccagtacctggacgattgcaagccgaagcaacttatgcacgaagccttaaaacttcggctaaacctcgtgggaggtatgtttgacaccgtgcagcgctccacacaacagacgactgaatgggccatgctcctgctggaaattattatatccggcactgtggatatgcagtctaataatgaactctttaccactgttctggatatgttgtcagtgcttatcaacggtactcttgcggcagacatgagtagtatttcccagggaagcatggaagaaaacaaacgggcatatatgaatctggcgaagaagcttcagaaggagctcggggagcgccagtctgatagcctggaaaaggtgcggcagctgttgccattaccaaagcaaacacgggatgtcatcacctgtgagcctcagggttccttgatcgacactaaaggtaataaaatagcgggatttgattcaatttttaagaaagagggtctgcaggtctcgacaaagcagaagatcagtccatgggatctgtttgaaggcttgaagccatcagcccctttaagttgggggtggtttggtactgtccgagtagatcggcgagtcgccaggggggaagaacaacagcgactgctcttataccatacgcacttgcgccctcggcctcgcgcttactacctggagcctctgccactgccacctgaagatgaggagcccccagccccaacactgctcgaaccagagaaaaaggcgccagagcctcctaagacagataagccaggagccgctcctcccagcaccgaggaacgcaaaaagaagtccacgaaagggaagaagcgcagtcaaccagcaaccaagaccgaagattatggaatgggacctgggagatccgggccttatggcgtgactgttccgcctgatttacttcaccacccaaaccccggaagcataactcatctcaactaccgacagggaagcattggcttgtacacccagaaccagcccctgcctgctgggggtcctagggtggatccataccgtccagttcgccttcctatgcagaagctgcctacccggcctacatatcccggtgtgttgccgaccacaatgaccggcgtaatgggactggaaccttcttcctacaagacgtccgtgtatcgccagcagcaacccgctgtaccacagggacagcgcctacgccagcagctgcaacaaagtcagggaatgttagggcaatcctctgtgcaccagatgacaccctcgtctagctacgggctgcaaacttctcagctgtcccccagctccctgcagggctacacaccttatgtttcacacgtgggattgcagcagcataccggaccagcagatcctacccggcatctgcagcaacgcccttcgggttatgtacatcagcaggctccaacgtatggccacggactgacatcgacacaaaggttttcacatcagaccctgcaacaaacacccatgatctctacaatgacacctatgtcagcccagggggtgcaggccggtgtgcgatctactgctatcctgcccgagcagcagcagcagcagcagcagcagcaacagcaacagcagcaacagcaacagcaacaacagcagcagcagcagcaacagtatcacattcgacagcaacagcagcagcaaattctccgccagcagcaacagcagcagcagcagcagcagcagcagcagcaacagcagcagcagcagcagcaacagcagcagcaacagcaccagcagcagcaacaacagcaggctgcgccaccacagccccaacctcaatcccaaccgcagttccagagacagggcctgcaacagacacagcagcagcagcagaccgcagcattagttaggcagctgcagcagcagctctcaaatactcagccccaaccttcgacaaacatttttggccgatacta

SEQ ID NO: 229796 - DNA, 2778 bp, synthetic construct
  misc_feature 1..2778: note = Description of Artificial Sequence: Synthetic coding sequence
  source 1..2778: mol_type = other DNA
ggtgggagtgggggaagaaggcagggcggacgcaacatatctgttgaaactgccagtttggacgtttacgctaagtacgtgctgagatctatatgccagcaggaatgggtgggcgagaggtgtctaaagagtctgtgcgaggattcaaacgatctacaggacccagtccttagttcagcccaagcccagcggttgatgcagctgatttgttatccacaccgcttactggacaacgaggacggggaaaatccacagcgccagagaatcaagaggatccttcagaatctcgaccagtggacgatgcgacaaagttcccttgaactgcagttgatgattaagcaaactcctaataacgagatgaactctcttctcgagaacatcgccaaggctaccattgaggttttccaacagagcgccgagactggctcaagctctggcagtacagcgtcaaacatgccgtcttcctctaagacaaagcccgtgcttagcagcctggaaaggagcggggtgtggctggttgctcctttaatcgccaagctgcccaccagcgtgcagggtcacgtgctgaaggctgcgggagaggaactggagaaaggacagcatctcggttcttcctctcgcaaagagcgggaccgccagaagcagaagtccatgtcgctgctatcgcaacagccttttctttcattggtgctcacctgcctgaagggccaagatgagcaacgggagggcctgctgacctcactttattcacaagtccatcagattgtcaataattggcgggatgaccagtaccttgacgattgtaagccaaagcagctcatgcacgaggctctgaaactccgactgaatctggtgggaggaatgttcgatactgtccagagatcgacccagcagaccaccgaatgggctatgttgttgctggagattatcatatccggcactgttgatatgcagtccaataatgaactcttcacaaccgtcctcgacatgctgagtgtcttgatcaatggaaccctggctgcagatatgtcttcaatctctcagggctctatggaggaaaataagagagcctatatgaacctggcaaagaaactccaaaaggaactgggggaacgccagagcgactccttggaaaaagtgaggcagttattgccactgcccaagcagacacgtgacgtcattacctgtgaacctcagggtagccttatcgatactaagggaaataaaattgccggtttcgacagtatcttcaagaaagaaggcttgcaggtgagtacaaaacaaaagatctctccatgggatctgttcgagggacttaagccatctgctcccctctcatggggctggttcggcaccgtaagggtagacagaagagtggcaagaggagaagagcagcagcggctgctcttgtaccacacacacctcagacccagaccacgcgcttattatctggagcctcttcctctgccaccagaggatgaagagcctcccgctcctacactactcgaacctgaaaaaaaggccccagaacccccaaagactgacaagcccggagcagccccaccctctaccgaggagaggaagaagaaatccaccaaaggcaagaagcgtagccagcctgcgactaagactgaggattatgggatggggcctggacgatccggcccatatggcgtgacagtgcctcccgacctgctgcatcatcccaaccccggttccatcacccacttaaattaccgacaaggtagcattgggctctatacacaaaatcaacctctgcccgcaggtggaccccgtgtagacccatatagaccagtgagactgcccatgcagaaattgcctactcggccaacttaccctggcgtattgcccacgacaatgaccggagttatgggccttgagccctcatcctacaaaacatcggtgtatcgacaacagcagccagccgtaccgcaagggcaacgcctgcgtcagcagttgcaggcgaagattcagtctcaagggatgctgggccagtcctccgtgcaccagatgacccccagcagctcttacggtcttcaaaccagccaggggtataccccttatgtatcccacgtgggcctgcagcagcacacaggacccgcaggcacgatggtgccaccaagctactccagccagccttaccagtcgactcacccatccacaaaccctactctcgtggatcccacacgacatctccagcagcggcctagcggctacgtgcaccaacaggctccgacttatggtcacggattgacaagtacacagcgattttcccatcaaacgctacagcaaacccctatgatcagcactatgacgccaatgagtgcccaaggggttcaagctggagtgagatcgaccgcgatcttacccgagcagcaacagcagcagcagcagcagcagcagcagcagcagcagcagcagcaacaacagcagcaacagcagcagcagcagtatcacatacgccagcagcaacagcagcagattttgagacaacagcagcagcagcagcaacagcagcagcagcaacagcagcagcagcagcaacagcagcagcagcagcagcaacagcatcagcaacagcagcaacagcaagcagctccgccacagccacagcctcaaagtcagccccagttccagcgccagggcctccaacaaacacaacagcagcaacagacggcagctcttgtgcgtcagctgcagcagcagctctctaatacacagcctcagccttccacaaacatatttggccgatattag

SEQ ID NO: 229797 - DNA, 756 bp, synthetic construct
  misc_feature 1..756: note = Description of Artificial Sequence: Synthetic coding sequence
  source 1..756: mol_type = other DNA
taggaaagaaaaaagaaaagtacaaagggtaagaaacgtagccagccggcaactaaaactgaggattacggcatgggcccaggcagatctggtccttatggagtcaccgtgcccccagacttattgcaccatccaaatccaggatcaatcacccatctgaactatcgccagggcagtatcggcttgtacactcagaatcagcccctgcctgcaggtggccctcgggtggatccctaccgaccggtgaggttacccatgcagaaacttcctaccaggcctacctacccaggggtcctgcctactacaatgacaggagtcatgggcctggaaccgtcgtcttataagactagcgtctataggcaacaacaaccggctgtccctcagggacagagattgcgccaacagctacagcagagccaggggatgctggggcagagcagcgtacatcagatgacaccgtccagctcgtatggactgcagacgagtcagggctatactccctacgttagccatgtagggcttcagcagcacaccggaccagccgatcccacccggcacctccagcagaggccttctgggtatgtccatcagcaggcgcctacatatggacatggactgacaagtacccagcgcttttctcaccagacactgcagcaaaccccaatgattagtaccatgaccccgatgtccgcccagggcgtgcaagccggagtgcgatccacggccatcctgccagaacaacagcagcaacagtag

SEQ ID NO: 229798 - DNA, 6002 bp, synthetic construct
  misc_feature 1..6002: note = Description of Artificial Sequence: Synthetic coding sequence
  source 1..6002: mol_type = other DNA
atggctgcattcggcatcctgagctacgaacataggcccctgaaacgccctaggcttggcccacccgatgtatacccacaggaccccaaacagaaggaggacgaactgacagccctcaatgtgaagcagggatttaacaatcaacccgcagtgagtggtgatgagcacggctctgcaaaaaatgtctcgttcaatcctgcaaagatctcatccaatttttcttctattatagcggaaaagctgaggtgcaacaccctgcctgacacaggacggagaaaacctcaggttaatcagaaggacaacttctggctggtaaccgcacgctcacagtccgccatcaatacatggttcaccgacctggcaggaaccaagcccctaacccaacttgccaaaaaagttccgatattcagtaagaaggaggaggtcttcggctatctggccaagtatactgtacctgtcatgagagcggcttggctaatcaagatgacatgtgcttactatgccgcaataagtgagactaaggtaaagaagcggcacgttgaccctttcatggaatggacccagattattaccaaatatctctgggagcagctgcagaaaatggccgagtattaccgccctggcccagcgggaagcggaggttgcggcagcacaataggacctctcccacatgacgtggaggttgcaatcagacagtgggattatacagaaaagttggcgatgtttatgttccaagacggaatgctggatcgtcacgaatttttgacctgggtcctcgagtgcttcgagaagatcagacccggtgaggacgagctcctgaagttactgctccctctgcttttgagatactctggcgagtttgttcagtccgcatatttgagcaggaggctggcttacttctgcacgcgcagactcgctctgcagctggatggcgtatcctcccactcatcacacgttatctccgcccagtcaacctcaactctccccacgacaccagcccctcagcctcccacgtcctcaacccctagcacaccttttagcgacctccttatgtgtccacagcatagacctctcgtgtttggtttatcttgcattctgcagaccatcctgctatgctgtccttcggccctggtatggcactacagcctcactgattctagaatcaagaccggtagtcctctggatcacctccctatcgctccgagcaacttgccaatgccagaaggcaatagcgcgtttacacagcaggtgagggcaaagttacgcgagatcgagcagcagatcaaagaacggggtcaagccgtggaggtgcgttggtcgtttgacaaatgccaggaggccacagctggtttcacaattgggagggtgctccacacactggaggtcttggactcacattcctttgagagaagtgacttctcaaattccttggattccttatgcaatcgtatctttgggcttggcccatccaaggacggccatgaaattagttctgacgacgacgccgtggtctccctgctctgtgagtgggctgtttcttgtaagcgaagtggcaggcacagggccatggtggtggctaagcttctcgaaaagcgtcaagccgaaatcgaggctgaaagatgtggagagtcagaagccgcagacgaaaaggggagtatagctagcggctccctgtctgccccatccgcaccaatctttcaggatgtcctgctgcagtttctggatacacaggcaccaatgcttacagatcctagatctgaatccgagagggtggaattcttcaacttggtgctcctcttctgtgagttgataaggcacgacgtttttagccacaatatgtatacttgtactctcatctctagaggcgatctcgctttcggcgcaccaggcccacgccctccctctccctttgatgacccggctgatgatcccgaacataaggaggcggaaggatcatcatccagcaaacttgaggatccaggtctctctgaaagtatggatattgacccaagcagcagcgttctgtttgaagatatggagaaacccgacttttctctttttagcccaactatgccttgtgaagggaaaggtagtccatcccccgaaaagccggacgtggagaaagaagtgaagcctcctcccaaagaaaagattgaaggtacccttggagtgctgtacgatcagccaaggcacgtgcaatacgcgacccacttcccaataccgcaggaagagtcttgttctcacgaatgtaatcagcgcctcgtggtgttattcggagtaggtaaacagagagacgatgcccgacatgctatcaaaaagataacaaaggatattctaaaggtgctgaacaggaagggcaccgccgaaactgaccagctggcaccgatcgtgccgttgaatcctggcgacctcacgttccttgggggagaagatgggcagaagcggagaagaaatcggccagaagccttcccaaccgccgaggatatatttgccaagttccagcacctgtctcactacgaccagcaccaggtgacagctcaggtgtccaggaatgtgctggaacagatcacatctttcgctctcggcatgtcttatcatctaccactggtgcaacacgtacagtttattttcgaccttatggagtatagtctatctatctccggcttgatagactttgctatccagctgcttaacgagctgagcgtggttgaggcagagctcctcctcaaaagctcagatctggttgggtcctatactaccagtttgtgtctgtgcatcgtggcagtgctcagacactaccatgcctgtctgatattaaatcaggaccagatggctcaggtctttgagggcctgtgcggggttgtgaagcacggaatgaacagaagtgacgggtcctccgccgaaagatgtatactagcttacttatacgacctctatacaagttgttctcacttgaagaacaaatttggcgaactcttctcagatttctgttccaaggttaagaatacgatatattgtaacgtggagcctagtgaatcgaatatgagatgggctccggagttcatgattgatacattggaaaacccagccgctcacaccttcacatatacaggcctcggcaaatcactttctgagaatccagccaataggtattcctttgtctgcaacgctctaatgcacgtctgcgtagggcaccacgatcctgaccgcgtgaacgacatcgcaatattatgcgccgaactgactgggtactgtaagagcctctctgccgagtggctaggggtcttgaaagccctatgctgtagctctaacaacggtacttgcggatttaatgacctcctttgtaatgttgatgtaagcgatttgtcattccatgatagtctggcaacctttgttgcgatcctgattgctagacaatgtctgctgctcgaagatctgatcagatgtgcggctataccgagcctgttgaacgccgcttgttcagagcaagattccgaacccggagcaagactgacctgtcgcatactgttacatcttttcaagaccccgcagttaaatccttgccagagtgacggaaacaaacccactgtgggaatcaggtcctcctgtgaccgacaccttctcgcggcaagccagaacaggatcgtggatggcgcagtattcgcagtgctaaaggctgtcttcgttctgggggacgcagagctgaagggctctggctttacagtgaccggaggcacggaggagttgcccgaagaagagggcggaggtggctcaggaggacgcaggcaggggggtagaaacatttccgtagagaccgccagtttggacgtctatgcaaaatatgtgttaagaagcatttgtcagcaagaatgggtaggggagaggtgccttaagtctctatgcgaagatagcaatgacttgcaggaccccgtgctatcttccgcccaagcacagcggctgatgcagctgatctgctatccccatagattgttggacaatgaggacggggaaaacccccaacggcagcgtattaaacgaatcctgcagaacctggaccagtggaccatgagacagtcttctctggaactgcagctgatgatcaagcagactcctaataacgagatgaattccttactcgaaaatatagcaaaggccaccatcgaggtgttccagcaatccgctgaaactggcagcagcagcggatccacggcaagcaacatgccttcatctagcaagaccaagcccgttctgagcagcctcgagcggtctggtgtctggctggtggctcctctgatagcgaagctgcccacaagcgtccaaggccacgtgcttaaggccgctggggaggaactggagaagggccagcaccttggatcctcaagtcggaaagaaagggaccggcaaaaacagaagtcaatgagccttttgagccagcagcccttcctgagcctcgtgctgacttgcctcaaggggcaggacgaacagagagaagggctgctgacatcactatacagtcaggtgcaccagatagttaataattggcgggatgatcagtatctggacgattgcaaacctaaacagctgatgcacgaagccctcaagttacgtctcaatttagtcggaggaatgttcgacactgtgcaacgcagcacccagcaaacgaccgaatgggctatgctccttcttgaaatcattatctctggcactgtggatatgcagtcaaataacgaactgttcaccaccgtgttggatatgctgagtgtcctgatcaatggcactctcgccgctgacatgtcctctatctctcagggatctatggaagaaaacaagcgcgcatacatgaacctggcaaaaaagctgcagaaggaactcggcgagcggcagtccgattctctggaaaaagtgcgacaactcctgccactacctaaacaaacaagggatgtgatcacttgcgagccccagggatccctcatcgacactaagggtaataaaatagcgggattcgattctatttttaagaaggaaggcctacaggtgagcaccaaacagaaaattagcccatgggacttatttgagggccttaagcctagcgccccactgtcatgggggtggtttggcacggtcagggttgataggcgtgtcgcacggggtgaggagcagcagaggttactgctataccacacccatcttaggccacggccacgcgcttattatctggagcccctgccccttcctcccgaggacgaagagccccctgccccaacactgctggagcctgagaaaaaggccccagagcccccaaaaacagacaaaccaggtgccgctcctcccagcaccgaagaaaggaaaaaaaagagcacaaaggggaagaagaggagccagcctgccactaagacagaggactacggaatgggtcccggacgttctggcccatacggagtgacagtccctccagacttactgcatcatccaaatcctgggagcattacgcacttaaactatagacaaggaagcatcgggttgtacacccagaatcaaccacttccggctggcggtccacgtgtggacccttaccggcctgttcgtctgccgatgcagaaattgcccactcgacccacttatccaggggtcctgcctacaaccatgactggtgtcatgggacttgaaccatcttcctacaagacaagcgtctacagacaacagcaacctgctgttccccaagggcagcgcctgcggcaacagttacagcagtctcagggaatgctgggtcaaagctccgtgcatcagatgacgccctcctcatcttacgggcttcaaacctcccagggatacaccccatacgtgagccacgttggtctgcagcagcacaccggcccagctgatcctacgcgccacctgcagcagcggccaagcggttatgtgcaccagcaggctccaacctatggtcacggcctcacaagcactcagtctttccacacccgccattgtagcagacaccccta

SEQ ID NO: 229799 - DNA, 2271 bp, synthetic construct
  misc_feature 1..2271: note = Description of Artificial Sequence: Synthetic coding sequence
  source 1..2271: mol_type = other DNA
atggccgcttttggactattatcctatgaacagagacctcttaagcggccacgactgggccctccggatgtgtatccccaggatccaaaacagaaagaggatgagttgaccgctgtgaatgttaaacagggtttcaacaaccaacccgctttcacgggggatgagcatggcagcgcccgaaatatcgtgatcaaccctagtaaaataggagcctatttttcctcgatactggcagagaagctgaagctgaacacctttcaagatacaggaaagaaaaagccccaggtaaacgccaaagataactactggctggttaccgcgcgttcccaaagtgctattcactcatggtttagcgaccttgccggaaacaagcccctgtccattttagccaaaaaagtgcccatcttgtcaaagaaagaggacgtctttgcctacctggctaagtactccgtgcccatggtccgagcgacgtggctaattaagatgacctgcgcctactactcagctataagtgaggcgaagatcaagaagaggcaggccccagaccccaatctggaatggactcagatctctaccagatatctacgtgagcagctcgccaaaatctccgatttctaccatatggcgtccagcacaggcgatggtcccgtaccagtcccccctgaggtagaacaggcaatgaaacagtgggaatataacgagaaactggcctttcatatgttccaggagggtatgctggaaaaacatgagtatctgacatggattcttgacgtcctcgagaagatccgccctatggatgacgatttgttgaagttactactgcctcttatgctgcaatattccgacgagtttgttcagtctgcatacctcagtcggagattggcatatttttgtgctcgcaggctatctttactcctgagcgatagccctaacctgctggccgctcattctccgcacatgatgattggaccaaacaatagcagcatcggagcaccttccccaggcccacctggcccaggtatgtcaccagtgcaactagctttttccgactttctttcctgcgcccagcacggtcctctcgtgtacggtctttcttgtatgctccagaccgtgacattatgttgtccttccgctctggtctggaactatagtacgaacgaaaacaaaagtgccaaccccggaagccccctggacttgttacaggtcgcccctagttctcttccaatgcccggagggaataccgctttcaatcagcaggtgagggctcggatctacgaggtcgagcagcagattaaacagagaggtcgggcagtcgaagtgagatggagtttcgacaaatgtcaggagagcacagcgggtgtcactataagtcgtgtgctgcacacccttgaagtcctcgaccgacactgtttcgaccggacagactccagcaactccatggagaccctctaccataagattttttgggcaaatcaaaataaggataatcaggaggtggcccctaacgacgaagccgtggttacgcttctttgtgaatgggccgtcagctgtaagcgttccggtaaacaccgagccatggcagtggccaagttgctggagaagcgccaggcggaaatcgaagccgagagatgcggagaatcggaggtgcttgatgaaaaggaaagcatctcctccagttccttagcgggaagctcactgcctgttttccagaacgtcctgctgaggtttttagatacacaggcacctagtctgtcggatcctaacagcgaatgcgagaaagtcgagttcgtcaacttggtgctgttattctgtgaatttattagacacgacgttttctcccacgatgcttacatgtgcacactgatttcccggggtgatctgtccgtaactgcctcaaccagacctagatctccagtaggcgaaaatgccgacgaacactactctaaggaccatgatgttaagatggaagagcagagtatcatggctcacatgggcatagattctggaaccacgaacatcttcgacgaagtcgacaagtcagacttcaaaacagacttcgggagcgaattcccgattttttcccccatgcccggagaatcctgcgaaaatgcaaatacctcgctcggacgcaggatgtccgtcaactgcgaaaaactggtaaagagagaaaagccgcgagagctcatctttccatctaactacgacctgctaaggcacctccagtacgcaacacacttccccatccctctggtgtctcactgcttctcctag

SEQ ID NO: 229800 - DNA, 2166 bp, synthetic construct
  misc_feature 1..2166: note = Description of Artificial Sequence: Synthetic coding sequence
  source 1..2166: mol_type = other DNA
atggcagcattcggtcttctgagttatgaacagaggcctttgaaacggcctagactcggtccccctgatgtgtacccccaggaccccaaacagaaggaagatgaactgaccgctgtgaatgtcaaacagggttttaacaaccagcccgcatttactggcgacgagcacgggtcagcgcgaaacattgtcatcaacccctcaaaaatcggcgcttacttcagctccatactggcggagaagctgaaattaaatacctttcaagacaccggcaaaaagaaacctcaagtaaacgcgaaggataactattggctggtaacagccagatctcagagtgccatccacagttggttctcagatctggccggaaacaaaccactctcaatactcgctaagaaagtgcctatcctgagcaaaaaggaggatgtcttcgcgtaccttgccaaatactctgtcccaatggttcgagccacctggctgattaagatgacttgcgcgtattactctgctataagtgaggcaaagatcaaaaagcgtcaagctcctgacccaaaccttgagtggacccagatttctacccgatatcttagagagcagctcgcaaagatctcggacttttaccacatggcttcctccacgggggacggtcccgtgcctgtgcctccagaggtggaacaggctatgaagcaatgggagtacaacgaaaaactggccttccacatgtttcaggaaggtatgctggaaaaacacgaatacctgacctggatcctggacgttcttgaaaaaattcgccctatggacgacgacctcctgaagctattactgccactaatgctgcagtactctgacgagtttgtccagtctgcctatttatcacgacgcctggcatacttttgtgcgcgtcgtctcagtctactcctcagcgacagccctaacctgcttgcggctcactcccctcatatgatgatcggcccaaataactcttcaattggggcaccctctcctggtcctcctggacctggcatgagtcccgtacagctagctttttcggatttcttgagctgcgcgcagcacggacccctggtgtacggcttgtcatgcatgttgcagaccgtcaccctgtgctgcccttccgctctggtgtggaattactcaacaaacgagaataagtctgcgaatccagggtctcccttggatctgctgcaggtcgctccttcatctttgccaatgccaggcggaaacacagccttcaaccagcaggtccgagcccgtatctacgaagtcgagcagcagatcaagcaacgcggacgggcagtggaagttaggtggtcttttgacaaatgccaggaaagcactgcgggtgtgacaatctctcgcgtgcttcatacactcgaggttttggacagacactgcttcgaccgcacggacagttcaaattcaatggaaactctgtatcataaaatattctgggccaaccagaataaggacaatcaggaggtggcgcctaatgacgaggcggttgttaccctcctgtgtgagtgggctgtgtcttgtaaacgcagcggcaagcacagagctatggccgtggcaaaacttttggaaaaaagacaggccgagattgaagccgaaagatgtggagagagcgaggttctggatgagaaagagtcaatttcctcttctagcctggctggatccagcttgcccgtgttccagaatgtactgttgcggttcctcgacacacaggcacccagtctgtctgatcccaactctgaatgtgagaaggtggagtttgtgaaccttgttctgcttttttgcgagtttattcggcacgatgtgttttcgcatgacgcctatatgtgcacactgatatccagaggggatctctccgtcaccgcaagcacaagaccacgcagtcctgtgggtgagaatgctgacgagcactactcaaaggaccacgacgtgaagatggagattttttcacccatgccgggtgaatcttgtgagaacgcaaacacctctctgggcaggagaatgtctgtgaattgcgaaaagctggttaagcgtgagaaacctcgcgagcttattttcccaagtaattatgatctactgaggcacctccagtacgctacccattttccgataccacttgtgagccactgcttttcatag

SEQ ID NO: 229801 - DNA, 6437 bp, synthetic construct
  misc_feature 1..6437: note = Description of Artificial Sequence: Synthetic coding sequence
  source 1..6437: mol_type = other DNA
atggcggctttcggtctattgagttacgagcagaggcctctgaagcggcctagattaggccctcctgatgtttatccacaggatcctaagcagaaagaagacgagctgaccgccgtgaatgtcaagcagggcttcaataatcagcccgcattcacaggagatgagcacggctccgcgagaaacatcgttattaatccctcaaaaattggcgcatacttctccagtatcctagctgaaaaactcaaactgaacacattccaggacaccggcaagaagaaaccccaagtcaacgctaaggacaactactggctagtgaccgctcgttctcagtctgccatacactcctggttcagtgatcttgctggcaataagcccctctccattctggccaaaaaggtgccaatactgtctaagaaagaggacgtgtttgcttatctggccaaatatagtgtccccatggtgagagccacctggctgattaaaatgacttgtgcatactattccgcgatcagcgaggctaagatcaaaaaaaggcaagcgcctgacccgaatttggagtggactcagatatctactagatatctgagggaacagctggccaagatatcggatttttaccacatggcttcgtccactggagatggacccgttcccgtgccacccgaggttgagcaggccatgaaacagtgggagtataatgagaaactcgcctttcatatgtttcaggagggcatgctggagaagcatgagtaccttacctggattcttgatgtgctcgaaaagattcgacccatggatgacgatctcttgaagctgctgctaccactcatgctgcagtatagtgacgaatttgtccagagtgcataccttagcagaagactcgcatacttctgtgcaagacgactgtccctcttgctttccgatagtcctaatttactagctgctcacagcccacacatgatgattggacccaacaattcctctatcggggctcccagtcctggaccacctggcccaggaatgtctcctgtccagctagctttttcagacttcctttcttgtgcccagcacggccctctggtgtacggtctgagctgtatgctccagaccgtgactctatgctgtccctcggcgctagtgtggaattactctactaacgaaaacaagtcagccaatcccggatcccctctggacttactccaggtggcacctagtagcctccccatgcccggtggtaataccgccttcaaccagcaggtaagagccaggatctatgaggtggaacaacagatcaagcagagaggacgcgcagtggaggttcgctggtcctttgataagtgtcaggaatcaacagcaggcgtgacaatttcacgagtgctgcacacactcgaggtactggataggcactgttttgatagaacagatagctccaatagcatggaaacgctctaccacaagatcttctgggccaatcagaacaaagacaatcaggaagtggcccctaatgacgaggctgtggtgaccctcctttgtgaatgggccgtgagttgcaagcggtccggaaagcacagagccatggccgtagctaagctcttggaaaagcgtcaagctgagattgaggcagaacgctgcggggagagcgaagtgctcgatgagaaggagagcatctcgtctagctctctggccggttcaagtcttccggtcttccagaacgtccttctccggtttctcgatacgcaggctccatctctctccgacccaaatagtgagtgcgagaaggtggagtttgttaatctggtccttctcttctgcgaatttattcgccatgatgtgttttcccatgacgcttacatgtgtaccctgatcagtcgcggagatctgagtgttaccgcatctacccgcccaaggtctcctgtaggagagaacgccgatgagcactattctaaagaccatgacgttaaaatggaaattttctcaccaatgcctggcgagtcctgtgagaatgctaacacttcgttgggcaggcggatgtcggtgaattgtgaaaaacttgtgaagcgcgaaaagcccagggagctcatcttcccaagcaattacgaccttctgcgccaccttcagtacgctacgcacttccccattcctttagacgagtctagcagtcatgagtgcaaccaaagaaccatccttctctacggggtggggaaagaaagagatgaagcgcgacaccaactcaagaagatcacaaaagatatcctgaagatcctgaacaagaagtcaactactgagactggtgtgggcgacgagggacagaaagctcggaagaacaagcaggagacttttcccacccttgagaccgttttcaccaagctgcagttgctttcctacttcgatcagcaccaggtaactagccaaatttccaacaatgtgctcgaacagataacctcattcgccagtggcaccagctaccatcttcctctcgcgcaccacatccagctgatctttgatctcatggagccagcattaaacattaacgggttaattgactttgccatccagttactgaacgagctgtcagtcgtggaagccgagcttctcctgaagtcgtcctcgcttgctgggagctacactaccggcctgtgcgtatgtatcgtggcagtattgcgacgctatcactcatgtctgatcctgaaccccgatcagaccgcccaggtgtttgaaggactgtgcggagtcgtcaagcacgtcgtgaacccaagcgaatgttcatctccagagagatgcattctggcctatctatatgatctttatgtgtcctgctcccatctgaggtccaaattcggcgatctgttctcatcagcctgctccaaggtcaagcagacaatctacaacaacgtgatgccggctaactctaaccttcgctgggaccccgactttatgatggactttatagagaacccctccgctcgcagcatcaattactccatgctggggaaaatcctgagcgacaatgcagcaaatcggtattcatttgtgtgtaacacattgatgaatgtgtgtatggggcaccaagacgccggtcgtatcaacgacatcgccaatttttccagcgaactgactgcatgttgcacagtactgagcagcgagtggctcggcgtgcttaaagctctgtgctgcagtagtaatcatgtttggggcttcaatgacgtgctgtgcacagtggatgtgtccgatttatccttccacgattctctggctacctttattgccattcttatcgctcgtcaatgcttttcgcttgaagatgtggttcagcacgtagccctgccctccctgctcgcagcggcttgtggcgacgccgacgccgagccaggcgctaggatgacctgccgtctgctgcttcacctttttcgcgcaccacaggcctgcttcctgcctcaggcaaccggcaaaccttttcccggaatccgctctagctgtgatcgccacctgttggccgcagcacacaacagcatcgaggtgggcgctgtatttgctgttcttaaagctataatgatgctgggagatgctaagataggaaataactcagtgtcatccctgaagaacgacgattttaccatgagaggtttacgatgtgatggaaacgccgatgacatttggacagcctcccagaatccaaagagctgcggaaagtccatctcgatcgagaccgcaaacctccgagaatacgcacgttatgtgctgcggacgatctgccagcaggaatgggtgggcgagcactgcctaaaggaacccgagcggctctgtaccgacaaagagttgattctggaccccgttttgagtaatatgcaggcccagaaactgctgcaacttatttgttacccccatggaatcaaggagtgtactgagggggacaacctacagcggcaacatatcaagcgcatactccaaaatctagagcagtggaccctccggcagagctggttagaacttcagctgatgatcaaacagtgcctaaaagacccgggaagcggctccgtggcagagatgaacaatttgctcgacaacattgcgaaggcgacaatagaagtgttccaacagagcgccgaccttaataactcctccaactcaggtatgagcttgttcaaccctaacagtataggtagtgccgacacaagctcaacaagacaaaacggcattaagacttttttgtctagttcagagagaaggggcgtgtggctggtggcacctttaattgcccgattaccgactagtgtgcaggggagggtgcttaaagctgccggtgaggaactggagaagggtcagcacctggggtccagttctaagaaggagagggaccggcagaaacaaaagtcaatgtcacttctgtctcagcaaccattcctgagtctcgtcctcacctgccttaaaggtcaggacgaacagagagaaggcctattgactagcctccagaatcaagtcaaccaaatccttagtaactggagggaagaaagataccaagatgatatcaaagcacggcagatgatgcacgaggcactgcagttaagactgaacctggtgggagggatgttcgacacagtgcagaggtcaacacagtggactacagactgggctctcctgctattgcagatcataacaagtggcacagtagacatgcataccaataacgagttatttactacagttctcgacatgctgggagttttaattaatggtaccttggcatctgacctgtccaacgcctcacctggcggatccgaggagaataaacgcgcatatatgaatctcgttaagaagctcaaaaaggaacttggtgataaaaggtcagagtctatagacaaagtgagacagttgttgccactgccaaagcagacatgtgatgtgataacttgtgagccaatggggtccttgatcgataccaaaggaaataagatagctggctttgatagcattgataaaaagcagggattgcaagtatctaccaagcagaaggttagtccctgggatctgttcgaggggcagaaaaacccggcacccctgtcatgggcgtggttcggaaccgtgcgcgtcgatagacgggtaatcaagtatgaggagcaacaccatctgttgctgtatcatactcatcccatgccaaagcccaggtcttactatttgcagccactccctttacctccagaagaggaagaggaggaacctacgagtcctgtgtctcaggagcctgagaggaagagcgctgaattatcggaccaggggaagaccaccacagacgaagagaagaaaacaaaaggcagaaagaggaagaccaagagcagctctagagtcgacgaatacccgcagtccaacatatatagagtgcccccaaattattctcctattagttcccagatgatgcatcacccccaatccaccctctggggctacaacctcgtaggacagccccagcagcccggattttttctgcagaaccagtcactgactcccggtggatctcggctcgacccggctggatcttttgtaccaaccaatactaaacaagcactgtcaaacatgctccagcgacgcagtggtgctatgatgcagccaccaagcctgcacgctatcacttctcagcagcaactcatccagatgaagctgcttcagcagcagcaacagcagaggctactccgacaagctcaaactaggccgtttcagcaagggcagcctggtgaccaagccgctctgttcgcggctcaggcccgtccttccccacagttgccccaatatcccggtctccagcaggcacaaacaatgccccaaggatatacaatgtatggcacacaaatgcctctccagcaaacctctcagcagcaggcaggatctgtggtgttgtctccatcctacaattccagagcctatcctgccgctcactccaatcctgttctcatggagaggctgcggcagatccagcaacaaccttccggatatgttcagcaacaggctagtccatacctgcagccactgactggaagccaaaggttgaatcatcaggcccttcagcagagtccgttagtgggtggtggtattgatgcagttttaaccagcgcgcatccaaacttgccatcggtgcccctgcctcaagacccaatgcgacctaggcagcctcaagtccgccaacaacagagactcctccagatgcagcaaccgcagcagccccagcctcagcagccaccccagcctcagcagagctcacagagccagagccagacactgggacttcaggccatgcagccccagcagccactgtttccacgacaagggctgcagcagacccagcagcaacagcaaaccgcggctctggtgcggcagctgcagaaacagttgtcgtctaatcagccccagcaaggcgtgaccccatatggccacccctctcatttcta

SEQ ID NO: 229802 - DNA, 6521 bp, synthetic construct
  misc_feature 1..6521: note = Description of Artificial Sequence: Synthetic coding sequence
  source 1..6521: mol_type = other DNA
atgtcagcttccttcgtcccaaatggggcatcgctcgaggactgccattgcaacctgttctgtcttgccgaccttacaggaattaaatggaagaagtatgtctggcaggggcctacttcggcgcctatactcttcccagtgactgaggaggaccctatactgtcatctttctcgcgctgtctcaaggcagacgtgttgggagtctggaggcgcgatcaaaggccgggacggagagaactgtggattttctggtggggtgaggacccggtcctgctgacccttttcacaatgacctatcagaagaaaaaaatggaatgcgggagaatggatttcccaatgaacgccgttctctgtttccaggctgtccacaatttgctagagagatgcctgatgaacaggaacttcgtgagaatcggaaaatggttcgtgaaaccctacgaaaaagatgaaaaaccaattaataaaagtgagcacctttcttgttcatttacattttttctgcatggcgactccaatgtgtgtacgagcgtggaaatcaaccagcaccagcctgtttacctgctcagcgaggagcacataactcttgcacagcagtctaattcccccttccaggttatcctgtgccctttcggtctaaatgggaccttgacaggccaagcctttaaaatgtccgattccgcgaccaagaaactgattggtgagtggaagcagttctaccctatttcttgttgtctaaaagagatgtctgaggagaaacaggaagatatggattgggaagacgacagccttgcagctgttgaggtactcgtcgccggtgtccgcatgatctaccctgcctgtttcgttcttgtcccacagagtgatatacccacgcccagcccagtgggatccacccactgcagttctagctgcctaggggtgcatcaagtcccagcatctaccagagatcccgctatgtcctccgttacactaactccccctacgtcccccgaagaagtccagactgtggatccccagagtgttcagaaatgggtgaaattctctagcgtgtccgacggcttcaactccgattcaacctcacatcatggtggaaaaatccctcgtaaattggcaaaccatgtcgttgaccgggtgtggcaagaatgtaatatgaacagggctcaaaacaagagaaagtattcagcaagttcgggcggtctctgtgaggaggccacggcagcgaaggtcgcctcctgggactttgttgaggccactcagagaacaaattgctcctgtttgaggcataagaatctaaagtcacgcaacgccggacagcaggggcaagcaccctctctaggccagcagcagcaaattttgccaaagcacaagactaacgagaagcaagagaagagcgaaaaaccacaaaagcggcctctgactcccttccatcatagggtcagcgtctccgacgatgttggaatggatgcagactccgcttctcagagacttgtgatcagcgcccctgacagtcaggtgcggttctctaatataaggacaaatgatgtcgcgaaaactccgcagatgcacggcactgagatggccaattccccccagccaccgcctcttagtcctcatccctgcgatgtagtggatgaaggagtcactaaaaccccttcaacgccacagtcgcagcacttctaccaaatgccaacaccagaccctttggtgccatcaaaacctatggaagacagaattgatagtctgtcccaaagctttcctccccagtaccaagaagctgtagagcctaccgtgtacgtggggacagctgtgaaccttgaggaagacgaagcaaatatcgcatggaagtactacaagtttccaaaaaagaaagatgttgaattcctgcctccacagctgccatctgacaagtttaaagacgatccagtaggaccgttcggacaggaaagtgtcacctcagtgacagaattgatggtgcaatgcaaaaagcctctgaaggtcagcgacgagctggttcagcagtaccaaatcaagaaccagtgtctcagcgccattgcctcagatgctgagcaggaaccgaagatcgacccctacgcttttgtggagggtgacgaggagtttctgttccccgataaaaaggaccgccagaattcagagagggaggcaggtaagaagcacaaagttgaggacggaacctctagtgtgacagttttgtcccacgaagaagacgctatgagtcttttttccccttcgattaaacaggacgcgccaagacccacctcgcacgccagaccacccagcactagcctgatttatgactcggacttagccgtgagttatacggacctcgataatctgtttaattcggacgaggacgagctgacccccggatccaagaagtccgcaaacgggagcgacgataaggcgagctgcaaagagtcgaagacgggaaacctcgatccactatcttgcatcagtactgcagacctgcacaaaatgtacccaacgccaccttccctagagcagcacattatgggtttctctccaatgaacatgaataataaggagtatggttctatggacaccaccccagggggaacagttctggaggggaacagctcatctattggtgctcagtttaaaatcgaagtagatgaagggttctgcagcccaaaacctagtgagattaaagatttcagttacgtatataaacctgagaattgtcagatcctggtagggtgcagcatgttcgcccctctgaaaacgcttcctagccagtatttacccccaattaaattacctgaagagtgtatttacagacagtcttggacggtggggaaacttgagctgctgtcttcgggcccttcaatgccatttattaaagagggcgatggcagtaacatggatcaggaatacgggaccgcgtataccccacagactcatacctcttttggtatgccaccgtcatctgcaccaccatccaacagcggggctggcatcctccccagtcctagcactcccagatttcctaccccacggacacccaggacaccacgcacaccccgtggagccggaggccctgcatctgcccagggtagcgtgaagtacgaaaattccgacttgtactcgccagctagcacccctagcacatgccgacccctaaactctgtggaaccagctacagtgccaagtataccagaagcccactccctctacgtgaacttgatactctccgagtcggtgatgaatctttttaaggactgtaacttcgacagttgctgcatctgcgtttgtaacatgaacatcaaaggcgctgacgtcggcgtctacatcccagatcccactcaagaggcacagtacaggtgcacttgtggattcagcgctgttatgaacaggaagttcggcaataactctggtctctttctggaagatgaactggacatcattggacgtaacacggattgcggcaaggaggccgagaagaggttcgaggctctccgcgctacaagtgccgaacacgtaaatggtggactaaaggaatcagaaaaacttagtgacgacctgatccttctattacaggatcagtgcaccaatctgttttccccgttcggtgcagccgaccaagacccattcccaaagagtggggtgatctcgaactgggtcagggtggaggagagagattgttgtaacgattgttatctcgcgttagagcacggcagacagttcatggataacatgagtgggggaaaagtggacgaagctctggttaagagttcatgcctgcatccctggagtaaacgtaacgatgtgtccatgcagtgttcccaggacatcctgaggatgctgctgagccttcagccggtattgcaggatgccatacagaaaaagcgaactgtgaggccttggggcgtgcagggtcccctcacctggcaacaattccataagatggcaggaagggggtcttatggaacagatgaatcgcctgagcctctgcccattccaacgttcctgcttggatatgactatgattacctggtgttatcccctttcgcacttccttactgggaaaggctgatgctcgaaccttacggctcacaacgggacattgcatacgtcgtgctatgccctgaaaatgaagctcttttaaacggcgctaagtccttttttcgcgacctgactgcaatatacgaaagctgtagattgggccagcatcgccctgtctctagacttctaactgacgggataatgcgggtcggatccactgcttctaagaagctctctgaaaagttagtggccgagtggttttcacaggcggctgacggcaataacgaagccttctctaagctaaaactgtacgcccaagtgtgtcgctacgacctaggaccctatctcgcgagccttcctcttgattcttctcttctctcacaaccgaacctggtggcaccgacaagccaaagtctgatcacccctcctcagatgactaacactgggaatgccaatacccctagcgcaacactggcttctgccgcttcgagcacaatgacagtgacaagcggggtggcaattagcacatccgtggcaacagcaaactcaactcttaccactgcatccacatcatctagttcatccagtaacctgaattctggggtcagctctaacaagcttccaagcttcccgccatttgggtccatgaattcgaacgccgcaggctcaatgagcacacaggcgaatactgtacagtccggccagctgggcggacagcagaccagcgcccttcagactgccggtattagcggcgaaagtagttcccttcccacccagcctcaccctgacgtgtctgagtctactatggatagggataaggtcggcatacctaccgatggggattctcatgctgtgacttaccctcctgctatcgtggtttacatcattgatcccttcacctacgagaacaccgatgaaagcacaaactctagctccgtatggacactgggtttgctgaggtgctttctggaaatggtgcagacacttcccccacatatcaagtcaacggtgagtgtgcagatcatcccctgtcagtacctcctgcagcctgttaaacatgaggaccgcgaaatctaccctcagcatcttaagtctcttgcattcagtgcgtttactcaatgccgtcggccactgccaacgtccaccaacgtgaagaccctgaccggatttggcccaggcctggcgatggagacagctcttcgctcgccagaccggccagagtgcattcgcctgtacgcaccccctttcatcttagctcccgtaaaggataagcagaccgagctaggtgagacattcggggaggctggtcagaagtataacgtcttattcgttgggtattgcttgtcacatgatcagagatggattctcgccagttgtaccgacttgtacggggaactgctcgaaacctgcattatcaatatagacgtgcccaacagagcacggagaaaaaagtcctccgctcgcaagttcggcctgcaaaagctgtgggagtggtgtctcggtctggtgcaaatgtccagcctgccctggcgcgtcgtcattgggaggctcggcaggatcgggcatggagagctgaaggactggtcctgcctcctgtctcggaggaacctccaaagtctttcaaagagattaaaggatatgtgtagaatgtgcggcattagcgccgcagattcccctagcatcctgtctgcgtgtctcgtggctatggagcctcagggctccttcgtgatcatgcccgacagtgtcagtaccggaagcgtatttgggcgatcaactactctgaacatgcagacaagccaactcaatactccacaggatacttcatgcactcacatcctggtcttccctactagtgcctcggtgcaggtagcatccgccacgtacacaaccgagaacctggaccttgcattcaatcccaacaacgacggagccgacggcatgggtatatttgatttacttgatactggggacgatcttgatccggacatcattaatatcttacctgcctctcctaccggctcacccgtgcactcccccggaagccattatccacatggtggggatgccggaaaaggccagtcgaccgacaggctgctgtccacagagcctcacgaggaggtgcccaacatcttacaacagccgctggctcttggctacttcgtcagcaccgcaaaggccggacctctcccagactggttctggagcgcatgcccacaagctcagtaccagtgccctctgtttctcaaagcctcactacacctgcacgtcccttccgtccagtctgacgaactgttgcactccaaacacagccatcccttagatagcaaccagacatctgacgtgctgcggttcgtcctggaacagtataacgctttatcctggctgacctgtgaccccgcaacccaggaccggagaagctgtttacccatacattttgtggtcctaaaccagttatataacttcatcatgaatatgctcta

SEQ ID NO: 229803 - DNA, 6524 bp, synthetic construct
  misc_feature 1..6524: note = Description of Artificial Sequence: Synthetic coding sequence
  source 1..6524: mol_type = other DNA
atgtccgccagttttgtcccaaatggcgctagcctggaagattgccattgtaacctgttctgtcttgccgacctgactggtatcaaatggaaaaagtacgtgtggcagggaccgacatccgctcccatactctttcctgtcactgaagaagatcccattctgagcagtttctcaaggtgtttgaaggccgacgtgctgggggtatggagacgtgatcagaggcctggcagaagagagttgtggattttttggtggggagaagatccgagtttcgctgacctgattcaccacgacctgtccgaggaagaggatggagtttgggagaacggcttgagctatgagtgcagaactctactgtttaaggcggttcacaacctgctcgagcgttgtctcatgaatcgtaattttgtgcgtatcggtaagtggttcgtgaagccctacgagaaagacgagaaacctatcaacaagtcggaacacctttcctgcagcttcacattctttctgcacggtgattcaaatgtctgtacctctgtggaaattaatcaacaccagccagtttatctcctctcagaggagcacatcacactggcccagcaatctaactcaccttttcaggtcattttgtgcccctttggcttgaatggcactttgacggggcaggcattcaagatgtcagattctgctactaagaagctgatcggggagtggaaacagttctaccccatctcctgttgtctgaaagaaatgagcgaggagaagcaggaggacatggactgggaagatgactcccttgctgcagtggaggtgctggtggcaggcgtgcgcatgatctacccagcctgctttgtgctggtaccccagtctgacattcctaccccgagcccagtcggatccacacattgttccagttcttgcctcggagtgcaccaggtccccgctagcactagagaccccgctatgagttccgttaccttgaccccccctacctctccggaggaggtccagaccgtggatcctcagtctgttcagaagtgggtgaaattttctagcgtgtcagacggattcaatagcgatagtacttctcaccatggaggcaaaatccccaggaagctggccaatcatgttgtcgatcgcgtatggcaagagtgtaatatgaaccgcgcacagaataagcggaagtactcagctagctccgggggtctctgcgaggaggccacagctgcaaaagttgcctcatgggatttcgtggaggcgactcagcgcacaaactgcagttgtctgcgccacaaaaatcttaaaagccgcaatgctggacagcagggccaggcaccatccctgggtcaacagcaacagatcttacctaagcacaaaaccaatgagaagcaagaaaagtccgagaagccacagaagagacctctgacaccatttcaccaccgggtctctgtgtcagacgatgtgggcatggacgctgattctgccagccagagactcgtgatttcagcacccgatagccaagtgaggttttcaaacataagaacaaacgacgtagccaagaccccccagatgcacggaacagagatggcaaacagtccacagcctcccccacttagtccccatccttgcgacgtggtcgatgagggagtgacgaaaaccccatccactccacagtcccagcatttttaccagatgcctactccagatccactagtcccaagcaagcccatggaagatcggatagatagcctcagccagtctttcccacctcagtatcaggaagctgtggagccaaccgtttacgttggcacggcggttaatctggaggaggatgaagctaacatcgcctggaagtattataaattcccaaagaagaaagacgtggaatttctgcctccacaactgcccagcgacaaatttaaagacgacccagtgggaccatttggacaagagtcggttacgagcgtcaccgaactgatggttcagtgcaaaaaacccctgaaggtgtccgacgagctggtacaacagtatcagatcaagaatcagtgcctgtctgctatcgcttccgatgctgaacaagaacctaagattgatccatacgcattcgttgagggcgacgaagaatttcttttcccagacaagaaggatagacagaactcagaaagggaggccggtaaaaagcacaaggtggaggacggcactagctccgtcactgtgctcagccacgaagaagacgccatgtccctgttttccccgtcgatcaagcaggacgccccaaggccaacctctcacgcaagacctccaagcacaagtttgatttacgattccgatttagcagtgtcctacactgacctggacaatctctttaacagcgacgaagacgagctcacacctggtagcaaaaaaagtgcaaatggttcagacgacaaggcatcatgtaaggagagtaagaccggcaacctggacccgctgagttgcatcagcaccgccgaccttcataaaatgtatcctaccccaccatccttggagcagcacatcatgggtttctcacccatgaacatgaacaataaggaatacgggagcatggatactacaccaggaggcacagtgctggaaggaaatagctccagcattggggctcagttcaaaatcgaagtcgacgaaggcttttgttcccctaagccatcagagatcaaagattttagttacgtgtataaacctgaaaactgccagatccttgttggctgttctatgttcgctcccctaaagacccttcccagtcaatacctaccccctattaaactgcccgaagagtgcatttaccggcaatcttggactgtggggaaactggaattgctttcatctggtccgtcaatgcctttcatcaaagagggcgacgggagtaatatggatcaggagtacggaaccgcctacactccgcaaacacacacttccttcggtatgccccctagtagcgctcccccaagcaactcgggagccggtatcttaccatccccttctactccacgcttccctacaccgcgaacccctcgtactcctcggactccacgaggtgcgggtgggccagcgagtgcacagggatcggtgaaatacgaaaactcggacttgtactcgcctgctagtacccctagcacgtgccgaccattgaattccgttgagcccgctaccgtgccctccataccagaggcccattctctctacgtcaatctgatcctatctgagtcagttatgaatctcttcaaggattgcaacttcgactcctgctgcatttgtgtgtgcaacatgaatataaagggggcagatgtcggcgtctacattcctgaccctacacaggaggcacagtaccgatgcacctgcgggttctccgcagttatgaatcgaaaatttggcaacaacagtggactatttctggaggatgagcttgatatcatcggacggaatacagattgtgggaaggaggccgaaaaaagattcgaggcactgagggccacctcagctgagcacgtcaatggtggactcaaagagtctgagaagctatcagacgatctgatcctgctactacaggatcaatgcactaacttattcagcccttttggcgcagccgaccaggatccatttcccaaaagcggggtgatctccaactgggtgagagtcgaagagcgcgactgctgcaacgattgttatctggctctcgagcacggcagacagttcatggataacatgagtggcggaaaagtggatgaggcactggtcaaatcctcatgtctccatccctggagcaaaaggaatgacgtcagtatgcagtgcagccaagatatcttaagaatgctcttaagtctgcagcctgtactccaggatgctatccaaaaaaagcgaacggtccggccttggggcgtgcagggcccacttacttggcaacagttccacaagatggctggcagagggtcatacggcacggacgaatctccagagcccttaccaatccccacatttctcttggggtatgattacgactacctagtccttagccctttcgctttgccctactgggaacgtcttatgctggaaccctatgggtcacaacgcgatatagcctacgtggtgctctgccccgagaatgaagccttgttgaacggtgccaagagtttctttagagatttgaccgcaatctacgagtcttgccgcttgggacaacatcgtccagtgtcccgcttgctgacagatgggattatgcgagtcggaagcaccgcgtctaagaaactgtcggaaaaactggtggctgagtggttctctcaggcagctgatggcaacaatgaggccttctccaagttgaagctgtacgcccaggtttgtcggtatgatttagggccatacctggcttctcttccactggattctagtcttctttctcagccaaatctggtcgcacccacaagccagtcgctgataacgcctccccagatgaccaacaccggcaatgccaacactccatctgccactctcgcctctgctgcctcctccactatgactgtgacatcaggcgtggccatatctacatctgtagcgacagcgaactctactttgaccaccgcatccacaagttcgagcagctcctctaatctgaatagtggggttagcagtaacaaactgccgagctttcccccattcggctccatgaacagtaacgcagctgggagcatgtccacacaggcgaatacagtgcagagcggacagctgggcggtcaacaaacttcagcactacaaaccgctggcatctccggggagtcctcatctttgccgacacagccacaccccgacgtgtcagagtcaaccatggaccgggataaagtgggtattcctacagatggggatagccacgccgtcacttaccctcccgcaatcgtggtctacatcattgatccttttacatacgaaaacaccgatgaaagtaccaattcgtctagcgtgtggaccttgggcctgctacgatgctttttggagatggtgcagactctgccccctcatattaaatcaacagtgtcagtccagataattccttgtcagtacctgctgcagcccgtaaagcacgaggatcgtgaaatctacccacagcacctgaagtccctggctttcagcgcctttacgcagtgtagacgtcctcttcctacaagcacaaatgttaagacgcttaccgggtttgggcctggactcgcgatggaaactgccctccggagccctgaccggccagaatgcataaggctttacgcgccaccttttattctggcaccagtaaaggataagcagaccgagctaggggagacctttggtgaggcagggcagaagtataacgtgctcttcgtgggctactgcctgagtcacgaccagcgttggatcctggctagctgcacagatctgtacggcgagctgttggagacgtgcattatcaacatcgacgtgcccaacagagctcgtagaaaaaagtccagtgcaagaaaatttggcctacagaaactctgggagtggtgtctgggcctcgtgcagatgagcagtctgccctggagagtggtgataggtcgcttagggcgaattggacacggcgagctgaaagattggtcctgcttactctctaggaggaacttgcagtctctcagcaagcgcctgaaggacatgtgcaggatgtgtgggatctcagccgctgattcgccgtctatcttgagcgcttgcttagtagcaatggaaccccaaggatcgttcgttatcatgccagacagtgtgtccacaggaagcgtgttcgggagatccaccacccttaatatgcagaccagccaactgaacaccccacaggatactagctgcacccatattctggtgttccctacaagtgccagtgtccaggttgccagcgcaacctatacaacagagaatctggatctggcatttaatccgaacaacgacggggctgacggcatgggcatctttgacctcctggatactggcgacgatctcgacccagatatcattaacatcctgcccgcttcccccactgggagccccgtgcactccccaggaagccattatccccacggtggggacgctggcaagggacaaagtacagatagactgctatccacagagccccacgaggaggtgcccaatatcctgcagcagcccctggctctggggtactttgtgagcacagctaaggcaggcccactgccagattggttctggagtgcttgccctcaggcacagtatcaatgccctctgtttctgaaggcttccttgcacctgcacgtcccgtccgtacagtccgacgaactgttacattcaaaacatagccacccccttgattcaaatcagaccagtgacgtattgcgattcgtgcttgagcaatacaatgccttgtcatggcttacctgcgaccccgctacgcaggaccggcgatcctgtttgcctatccatttcgtagttcttaatcagctctacaactttattatgaacatgctata

SEQ ID NO: 229804 - DNA, 6633 bp, synthetic construct
  misc_feature 1..6633: note = Description of Artificial Sequence: Synthetic coding sequence
  source 1..6633: mol_type = other DNA
atgaccgccgctgcgaactgggttgccaacggagcttcactggaagactgtcatagtaatctttttagtctggccgagttgacagggatcaaatggcgacgatacaattttggcggtcatggtgactgcggacccatcatcagcgctcctgcccaggacgaccctattctactctcttttattcggtgtttgcaggcaaacctgctatgtgtatggaggagagacgtcaagcctgactgcaaagagctgtggatcttctggtggggagatgaacctaacctggtaggcgtgattcatcatgaactccaagtcgtggaggagggtttgtgggagaacggtctctcatacgagtgtcgcaccctgctttttaaagctatccacaatctgctggaaaggtgtctaatggataagaacttcgtgcgtatcggaaagtggttcgttcggccatatgagaaggacgaaaaaccagtcaacaagtcagagcatctctcgtgcgcttttacctttttcctgcatggtgagtccaatgtttgcaccagcgtggaaatcgcgcagcatcagcctatctatctgatcaacgaggagcacatccatatggctcaaagttcacccgctcctttccaggtcctggtttccccctatggcctaaatggtactctgacaggtcaagcctataaaatgtcagaccctgccacacgcaagctgatcgaggagtggcagtacttttatcctatggtgcttaaaaagaaggaggaatccaaagaagaagacgagctggggtatgacgacgactttcctgtggctgtggaggtgatcgtgggtggagtgagaatggtctatccctccgcatttgtgctgatcagccaaaacgatattcctgtacctcaatctgtcgccagcgcgggaggtcacattgccgtgggacagcagggtctgggcagtgtgaaagacccttctaactgtggaatgcctttaaccccacccacaagcccggagcaggcgattcttggcgaatccggagggatgcagtccgctgccagtcatctagtttcccaggacggagggatgattaccatgcatagccccaagagatctggcaaaatcccaccaaaacttcacaaccacatggtccatcgagtgtggaaggaatgcatcttgaatcgaacacaatccaagagatcccagatgagcacccctacattggaggaggagcccgcaagcaacccagctacatgggactttgtcgaccctacgcagcgggttagttgctcttgttcccgacacaaactgcttaagcgctgtgctgtgggtcccaaccggccacccacagtcagtcagccgggattttctgcagggccatcatcttcctcttctttgcccccaccagcttctagtaagcacaagactgctgaaaggcaggagaagggagataagctccagaagagacctcttatcccttttcatcaccggccatctgtggccgaggaactgtgcatggagcaagacacaccaggccagaagctgggactcgccggtattgatagcagtctagaagtctcatcctcgaggaagtatgataaacaaatggccgtgccaagtcgcaacacttctaaacagatgaatctaaatcccatggactcaccgcactctcccattagcccgctgccgcctacactttcaccacagcccaggggtcaggaaacggagtctctcgacccaccatctgtgcctgtcaaccccgcactgtacggaaatgggctcgaattgcagcagttatcgaccttagacgaccgcactgtgcttgtgggacaacgactgccgcttatggctgaagtgtccgagaccgccctatattgcggaatccggccttccaaccccgaaagctctgagaagtggtggcactcctatcggttgccaccctccgacgatgcggaatttaggccacctgaactacaaggggagcggtgcgatgccaagatggaagtaaactcagaatcaacagcgcttcagaggctgcttgctcagcctaataaaaggtttaaaatctggcaggataagcagccccagcttcagcctctgcactttctggaccccctgcccctgtcccagcagcccggtgacagtctgggcgaagtcaacgatccctacacgtttgaggacggggatatcaagtacattttcaccgctaacaaaaagtgcaagcaaggaactgagaaagactctctgaaaaagaataagagcgaggacggctttgggacgaaagacgtcaccacgccagggcatagtactccagttccagatggaaagaatgccatgagcatcttttcgagcgcgacaaaaacggatgtacgacaggataacgccgcaggtcgagccggatcatcttccctgacccaggtgactgacttggcgccttccctgcacgacctcgataatattttcgacaatagcgacgatgacgaactgggggctgtctcccccgctcttagatcatccaagatgcccgctgttggcaccgaggatcgtcccctggggaaagatgggagagcagccgtaccgtacccccctactgttgccgatctccagagaatgtttcctaccccacctagtctggagcagcaccccgctttttctcctgtgatgaattacaaagacggcatcagttctgaaaccgtcacagctttgggaatgatggagagtcctatggtgagtatggtaagcacccagcttacagaattcaaaatggaggtggaagatggacttggtagtccaaagcctgaagagatcaaggacttcagctacgtccacaaggtccctagtttccagccattcgttggaagcagtatgttcgctccactcaaaatgctgccctctcactgcctcctccccctgaaaatccctgatgcatgtctgtttcgcccaagctgggccattcccccaaagatagaacaactaccaatgccaccagccgctaccttcataagggatggatacaataatgtgccttccgttggctcactggcagatcctgactacctgaatacccctcagatgaatacccccgtcacactgaattcagccgctcctgcctccaactctggcgcaggcgtgctgccttcgcccgctacacctcgctttagcgtgcctacccccaggacacctcgtacccctagaacaccacggggtggcggtacagcctccgggcagggctcggtcaaatacgattctactgaccagggctcgccggcatctacgccatcgactaccaggcctctcaattctgtggaacctgccaccatgcaaccgatcccagaagcccactcactgtacgtcaccctaatcctctcagacagtgttatgaatatctttaaagacagaaacttcgactcctgttgcatttgtgcatgcaacatgaacataaagggggcagacgtcggcctttacatccctgattccagtaatgaagaccagtacagatgcacgtgcgggtttagtgccatcatgaaccgtaagttgggttacaacagcggcctctttcttgaggacgagctggacatatttgggaaaaactcagacattggacaggccgctgaacgtagactgatgatgtgccaatctacatttctaccgcaggtcgaagggaccaagaagccgcaggagcctcccatttctctactgctgttgctccagaatcaacatacccaacccttcgcctccctgaactttctcgactatatcagtagtaataacagacaaacactgccgtgcgtgtcatggagctacgatcgcgtacaggctgacaacaatgactattggactgaatgctttaatgcactggagcagggacggcagtatgttgataaccccactggcggtaaagtcgacgaagccctcgtacgtagcgcaactgtacacagctggcctcattccaacgttttagacatcagcatgctgtcatcccaggacgtcgtgagaatgctcctgtcactgcagcctttcctgcaggatgccatccagaagaagaggaccggcaggacatgggagaatatacaacacgtacagggacccctgacatggcaacagtttcacaagatggccggacgagggacatacggatcggaagagagccctgagccgctcccaataccaactcttctggtgggttacgataaagatttcctgacaatttcccctttttcccttccattctgggaacgccttctgttagacccctacgggggacatagagatgtggcatacatcgtggtgtgccccgagaatgaggccttgctagaaggagccaagaccttttttcgagatctgagtgcagtgtatgagatgtgccgccttggacagcataaaccaatctgtaaagtgctccgggacggtattatgagagttggaaagaccgtagcccagaaattgacggacgaactggtgagcgaatggttcaatcagccctggagcggcgaagaaaatgacaaccactcccgtctgaaactctatgcgcaggtgtgccgccaccaccttgcaccctatctggccactctgcagcttgattcatccctacttatccccccaaaatatcagacccctcccgcagcagctcaagggcaggcaactcctgggaacgctgggccactcgctcctaatgggtcagccgcacccccagccggttcagcttttaatccaacctcaaattctagtagtacaaaccctgctgcaagctcaagtgcaagcggaagttctgtgccgccagtgtcctcctcagccagcgcccctggcatcagtcagatttccaccaccagtagctctggcttctcagggagcgtgggagggcagaacccgtcaacggggggaatcagtgcagaccgcacgcaaggcaatatcgggtgcggaggcgatacagaccccggacaatccagctcacagccctcacaggacggtcaggagtctgttacggaacgcgagaggattggcattccaacagaacctgactccgccgattcccacgcccatcctcccgctgttgtgatctatatggtagaccccttcacctatgccgcagaagaagacagcaccagcgggaacttctggctactgtcactgatgagatgttataccgaaatgctggataatctccccgagcacatgcgcaacagcttcattttgcaaatcgtgccttgtcagtacatgttgcagactatgaaagacgagcaggtgttttacattcaatacttgaagtccatggcgttttcggtttattgccaatgtcgaagacctctgccaacgcagatccatatcaaatctctgaccgggtttggacctgcagcttcaattgaaatgactttgaagaacccagaaagaccgtctcccatacagctttactcccccccattcattctggctccgatcaaggataaacagacggagctgggcgaaactttcggggaagcttcgcaaaagtataacgttctgtttgtgggatactgcttgtctcatgaccaacggtggttacttgccagctgtactgatttacacggtgaacttttggaaacctgcgttgtcaacatcgccctgcctaaccgatccagacggtctaaggtttcggctcgcaagatcggtcttcagaaactatgggagtggtgcattggcattgtgcagatgacttctctgccctggagggtggttatcggaagattgggaaggcttggccatggagagttaaaggactggagtatactcctgggggagtgttccttgcaaaccatttcaaaaaagctgaaggacgtgtgccgtatgtgtgggatcagcgcagcggacagcccctccatcttgagtgcctgccttgtcgctatggagccacaaggcagttttgttgtcatgccagacgccgtcactatgggcagcgtgtttggcaggtccacggcactcaacatgcagtcatcacagctgaacaccccacaggacgctagctgcacacacattctcgtctttcccacctcatctaccattcaagtcgcccctgccaactatccaaacgaggatgggttctcccccaacaacgatgatatgtttgttgacttgccgtttcccgatgatatggataacgacataggcatcctgatgacaggtaatctgcactcttcccctaatagtagccctgttccctctcccggaagccccagtggaatcggcgtcggatcacacttccagcacagtagaagccagggcgagcgactgctcagtagagaagctccggaggagctcaaacagcagccccttgccttgggatattttgtgagtactgccaaggcggagaatctgcctcagtggttttggtcctcatgtccacaggcacagaaccagtgcccattgttcctgaaggcttcgctgcatcaccatatctctgtcgcccaaacagatgagcttctgccagccaggaactctcagagagtccctcatcccctagattcgaaaaccacatctgacgtgttgcgatttgtcttggagcagtacaacgcattatcttggcttacatgcaacccagcaacgcaagacaggactagctgtctgccagtccatttcgtcgtgttaacacagctgtacaatgccattatgaacatcctgtac

SEQ ID NO: 229805 - DNA, 4365 bp, synthetic construct
  misc_feature 1..4365: note = Description of Artificial Sequence: Synthetic coding sequence
  source 1..4365: mol_type = other DNA
atggcacctgtacagctcgagaatcaccaactggtgccgccagggggtggcggtggcggatcaggagggccaccaagcgcacctgcccctcccccaccaggcgcagcggtcgccgcagctgctgcggctgccgcatcacctggataccgcctatctaccctcattgagtttctcctgcatcgcgcatattctgagctcatggtgttaacagacctactcccacggaagagcgacgtggagcgaaagatcgagatagttcaattcgccagtagaaccagacagcttttcgtgcgtctattggcgcttgtcaaatgggccaacaatgcagggaaagtggaaaagtgtgctatgataagcagcttcctggatcaacaggccattctgttcgttgataccgctgatcgcttggcctcgctagccagggatgccctggtacacgctcggctgccatctttcgccataccctatgccatcgatgtgctgaccactggatcttatccccgactgcccacctgcatacgcgacaagatcattcctcccgatccgattaccaagatcgaaaaacaggccaccctccatcagttgaatcaaatcttacgtcacagactggttacgactgacctcccaccacaactagccaacctgaccgtggcaaatggacgagtgaaattccgcgtcgagggagagtttgaggccacccttaccgtcatgggggacgatcctgatgtgccatggagactgttgaagctggaaatcctggtcgaggacaaggagacaggcgacggcagagctctggtccatagtatgcaaataagttttatacatcagctcgtgcagagtcgactgtttgcagacgagaagcctctgcaggatatgtacaattgcctgcacagcttctgtctttcacttcaactcgaagtactccatagtcaaacactcatgctgatccgggagagatggggcgatttagtccaggtggaaagataccacgccggaaaatgtctttccctcagcgtatggaaccagcaggtgcttggcagaaaaaccgggaccgcctccgtgcataaagtcactatcaaaatcgacgaaaatgacgtgagcaagcctttgcaaatattccatgatccgcctctgccagctagcgactcaaagcttgttgaaagggctatgaagattgaccacctgtccatagaaaagctgctgatcgactccgttcacgctagagcgcaccagaaactgcaggagttgaaggctatcctgagaggatttaatgccaacgaaaactcctcaattgagactgccctgcccgcacttgtggtgcctatactcgagccgtgcggcaattcagaatgtctgcatatatttgttgatctccatagtggtatgtttcagctgatgctttacggacttgatcaggctaccctggatgatatggaaaagagcgtgaacgatgatatgaagcgcatcataccctggattcagcagctcaagttctggcttggacagcagagatgcaaacagagcattaaacacctgccaacaatttcctcagaaactctgcagctctccaactactccacgcaccctatcgggaacctgtctaaaaataagctgtttataaagttgactcgactgccacaatactacatcgtcgttgagatgctcgaggtgcctaacaaacctacgcagctgagctataagtactatttcatgtccgtaaacgctgcagacagagaggattcaccggcaatggccctcctgttacagcagtttaaagaaaatattcaggacctggtattcagaactaaaacaggcaagcagacaagaacgaatgccaaaagaaaactcagtgacgatccatgtcctgtggaatccaagaagaccaaacgtgcaggcgagatgtgtgcattcaataaagttctcgctcactttgtcgcaatgtgcgataccaatatgccgttcgtcggcctgaggttggaactgtctaatctggagattccccatcagggcgttcaagtggaaggtgatggttttagccacgccatccgcctattaaagattcccccatgcaaaggcatcactgaggaaacccagaaagcactagatcggtcacttctggattgtacatttcgtctgcagggtagaaataacagaacctgggtggccgaactggtcttcgctaactgtcccctgaacgggaccagcacaagagaacagggcccatctagacatgtctacctaacatatgagaacctgctctcggaaccggttggaggcagaaaagtggttgagatgttcctcaacgactggaactctatagccagactttatgaatgcgtgctggaatttgctcggagcctgcctgacatcccggcacatcttaacatcttttcagaagtgcgcgtgtataattatcggaaactcattttatgttatgggacaaccaaggggagttctatctcaatacagtggaacagtattcatcagaagttccatattagcctgggtactgtcgggccaaacagcggatgcagtaactgtcataacactatccttcatcaactgcaggagatgttcaacaaaactccgaacgtggtgcaactgctgcaggtcctgttcgatacgcaggccccactcaacgccatcaataagctgccaaccgtccccatgttagggctgactcagaggaccaatactgcataccagtgcttctcgattctcccgcagtcaagcacacatatacggttggcatttcgcaacatgtattgcatcgatatctattgtcgaagccgcggagtggtcgccatccgcgacggagcctactccctgttcgacaatagtaaactggtggaaggattttacccggctccgggtcttaagactttcttgaacatgtttgtcgattcaaatcaagacgctagacgaaggtcggtgaacgaggatgacaaccctcccagtcctatcggaggcgacatgatggacagcctcattagccagctccaaccccctccacagcagcagcccttccccaagcaaccgggtacaagcggggcttacccccttacatcaccacccacttcctaccatagcacagtcaatcagtccccaagcatgatgcacacccagtccccaggaaacttgcacgcggcaagcagcccttctggtgctcttagggctccctcccccgcatcttttgtcccgacccctccgccatcatctcacggtatcagtattggaccaggagcatcttttgcaagcccccacgggacactcgatccttcctccccttacaccatggtctcacctagtggcagagctgggaactggcccggatcacctcaagtgagcgggccatcacctgccgcacgaatgccaggcatgtcaccagcgaatcccagtttacatagtcctgtcccagatgcttcgcattcccctagggcaggtaccagctcccagaccatgccaaccaatatgccgcctcctcgcaaattgccacagcggagctgggccgcaagcatccctactattctcacccatagcgctctcaacatccttctgctgccttctcccacccccggtctcgttcccggtctggccggatcatacttgtgcagcccgttggagaggttcctgggtagcgtcattatgcgacgccatcttcagagaatcatccagcaggagacactgcagttgattaacagcaatgaacccggtgttatcatgttcaaaacagatgcccttaagtgccgggttgccctgtcccctaaaactaatcagaccttgcagttgaaggtcaccccggaaaacgcaggacagtggaaacccgatgaactccaggtcctcgagaagttcttcgaaaccagagtggctggacccccttttaaggccaacaccttgatcgcttttactaaactgctcggcgctccgacgcatatcctccgcgactgtgtacatattatgaagttggaactgttcccggatcaggccactcagttaaagtggaatgtgcagttttgcctgaccattcctcctagcgcaccccctatagcaccccctggcaccccggcagtggtgttgaagtctaagatgctgttcttcctgcagttgacacaaaagacatcggtgccccctcaggaacccgtgtccatcattgtgcctattatatatgacatggccagtgggactacccagcaagcagacatccccaggcaacagaattcatctgtggctgcgcctatgatggtatccaatatactaaaacggttcgcggaaatgaaccccccaaggcagggggagtgcaccatcttcgccgctgtgagggatctaatggctaacctcacactgccgcctggtggaaggccgtag

SEQ ID NO: 229806 - DNA, 468 bp, synthetic construct
  misc_feature 1..468: note = Description of Artificial Sequence: Synthetic coding sequence
  source 1..468: mol_type = other DNA
gtggctggccctccctttaaagctaataccctgatcgcttttaccaagctgttgggagctccgacccacatcttgcgggactgtgtccacatcatgaagttggaactgttccccgaccaggcaacacagctgaagtggaacgtccagttttgcctcacaataccacctagtgctccgccaattgcccctccaggaactccagcagtggtcctgaagagcaagatgctgttcttcctccagctgacacaaaaaaccagtgtcccaccacaggagcccgtgagcattatagtaccaatcatttacgatatggcttccggaaccacccagcaagccgatataccaagacagcagaattcatctgttgcagctccaatgatggtgagcaatatcctgaaacggtttgcggaaatgaatccacccagacagggcagcattaaggggacgggctgcccaagtgactttctgtag

SEQ ID NO: 229807 - DNA, 996 bp, synthetic construct
  misc_feature 1..996: note = Description of Artificial Sequence: Synthetic coding sequence
  source 1..996: mol_type = other DNA
ccaagcggaagggcgggaaactggccgggtagccctcaagtgtctggtccttcgcctgcagctaggatgccaggtatgagtccagccaatcccagcttgcattccccagtgcctgatgcttcccactctccacgcgctggaacttcatctcagacaatgcctaccaatatgccaccccctcgcaagttgccccagcgcagctgggcagccagcatcccaaccatcttgacgcattctgcactcaacatccttttgctgccctctcccaccccgggattagtgcctggattagctggatcctacctgtgttctcccctggaaaggtttttggggtccgttatcatgagacgtcatctgcagaggattatacagcaggagacactgcagctgatcaactccaacgaacctggtgtcatcatgtttaaaacagacgcactcaagtgtagggtggcgctttctcctaagacgaatcaaactctgcagctcaaagtgactccagaaaacgcgggtcaatggaaacctgacgagctgcaggtcctcgagaagttctttgaaacccgagtcgccggacccccatttaaggccaacacactgatcgcgtttaccaaacttctgggagccccaacacacatcctgcgcgactgtgtccacattatgaagctcgaactttttcccgaccaggcaacccagctgaaatggaatgtgcagttctgccttactattccaccttcagcacctcccattgccccacctggaactcccgctgtagtgcttaaatctaagatgctctttttcttacaacttacgcaaaaaaccagcgtcccacctcaggagcctgtgtccatcattgtccctatcatctatgatatggcctccgggacgacacagcaggccgatattcctcggcagcaaaactcgagcgtagctgctcccatgatggtgtctaatatcctgaagcgtttcgccgagatgaatcccccacgacagggaacatag

SEQ ID NO: 229808 - DNA, 2367 bp, synthetic construct
  misc_feature 1..2367: note = Description of Artificial Sequence: Synthetic coding sequence
  source 1..2367: mol_type = other DNA
atggatgtgtccgggcaggaaaccgactggcgatctacagctttcaggcagaagctggtttcccagatagaagacgcgatgcgtaaagccggtgttgcacactcaaaaagttctaaggacatggaatcccacgtctttctgaaggctaaaacacgggatgaatatctgtctctggtggccaggctaattatccattttcgtgatatccacaacaagaaaagccaggcttccgtgtcagaccccatgaatgcactacagtctttaacaggcggtccagcagctggtgcggcaggcatcgggatgccgcctcggggaccgggacagtcacttggagggatgggttccctgggcgctatgggacaaccaatgtctctctcaggccagcctccacctggaacctccggcatggcaccccacagcatggccgtagtcagtactgccacccctcaaacacagctccaattgcagcaggtcgctttacagcagcagcagcagcagcaacaatttcagcagcagcaacaagctgcccttcagcagcagcagcagcagcagcagcagcagcagttccaagcacagcagagcgctatgcagcagcagtttcaggccgtagtgcagcagcagcagcagttgcagcaacagcagcagcagcagcagcatttgatcaagcttcaccaccagaatcagcagcagatccagcagcaacagcagcagttgcagcgcatcgcacagctgcagctacagcagcaacagcagcagcagcagcaacagcaacagcagcagcagcaagcactccaggcccaacctcctattcagcaacctcccatgcagcaaccacagccacccccaagccaggcattaccacaacagttgcagcagatgcaccacactcagcatcaccaacctcccccacagcctcagcagcctcctgtggctcaaaatcagccatcacagttacctcctcagagtcaaacgcaaccattggtctcacaagcacaggcactgccgggtcagatgctgtatactcagccaccattgaagttcgttcgagctcctatggtcgtgcaacagcccccagtacagccgcaagtgcagcagcagcagaccgccgtccagaccgcacaggccgcacagatggtcgccccaggagtgcagatgatcacggaggctctggcccagggcggaatgcacattagggcacgcttcccccctacaaccgcagtgtcggcaattcctagttccagcatacctctgggacgccagccgatggcccaggtttcccagagttccctgccaatgttaagttcaccatcccccggtcaacaggtgcagacgccacagtcaatgcccccacccccacagccctcgcctcagcccggacagccctcctcacagccgaatagtaatgtctccagtggccctgctccttcgccaagtagcttcctgccatccccttctccccagcccagccaatctcccgtgaccgcaagaaccccccagaacttcagtgtgccctcacctggccctctgaacacacctgtgaatccatccagcgtaatgtcaccagccggtagttcccaggccgaagagcagcagtatctcgacaaacttaaacagctgagtaaatatatagaaccactccggaggatgatcaataaaattgacaagaatgaggatcggaaaaaagacctcagcaaaatgaagtccctgctggacatcctgacagacccctcaaagcggtgtccactcaagacactgcagaagtgcgaaattgcgctcgagaaactgaaaaatgacatggcggtgcccaccccacccccaccacccgtccctcctaccaagcaacagtacctgtgccagccgctcctcgatgccgtgctggctaacattagaagcccagtgttcaatcattctctctacagaacgttcgtgccagctatgaccgccattcacggccctcctataaccgcaccagtcgtctgcaccagaaagcgaaggttggaggatgacgagagacagtcgatcccttctgttctgcaaggggaggttgctcgcttggacccaaagttcctggtgaatttagatccctctcactgtagtaacaacggaaccgtgcatctaatctgcaagctggatgacaaggatctccccagtgtgcctccccttgaactctcagtacccgcagattacccagctcaatctcccctgtggattgacaggcagtggcagtatgatgctaatcctttccttcagtccgtacacagatgcatgaccagtaggctgctgcagttgcccgataaacattccgtcactgccctgctgaatacctgggctcaatcggttcaccaggcttgtcttagcgccgcttag

SEQ ID NO: 229809 - DNA, 2247 bp, synthetic construct
  misc_feature 1..2247: note = Description of Artificial Sequence: Synthetic coding sequence
  source 1..2247: mol_type = other DNA
atggatgtaagcggacaggagacagactggagaagcacggcctttagacagaagcttgtttctcaaattgaggatgcgatgaggaaagctggcgtggcccactcaaaaagctctaaagacatggaaagtcacgtctttctgaaagccaagacacgcgacgaatatctgtcccttgtggctcgcctgatcattcattttagggacattcataacaagaaaagtcaggcgagtgtctctgatcccatgaatgcgctccagtcgctgactggaggtcccgctgcgggtgccgcagggatcgggatgccacccagggggccagggcagtcattaggaggcatgggcagcctgggtgccatgggacaacctatgtctctttctggccagcctcccccagggacctccgggatggcccctcactctatggcggtggtttccaccgcaaccccacagacccagttgcagctccaacaagtcgctctgcagcaacagcagcagcagcagcagttccaacagcagcaacaggccgcattacagcagcagcagcagcagcagcagcaacagcagttccaagcgcaacagtctgctatgcagcagcaatttcaagcagtggtgcagcagcaacaacagctgcagcaacagcagcaacaacaacagcaccttattaagctgcaccaccagaaccagcagcagatacagcaacagcagcagcaactccaaagaattgcccagctccagcttcagcagcaacaacagcaacagcagcagcaacagcagcagcagcaacaggcactccaagcacagccgcctatacaacaaccccctatgcaacagccacagcctccaccctctcaagctctgcctcagcagttacagcagatgcatcatacacagcatcaccaacctcctccacagcctcagcagccacccgtggctcagaaccagccgagccagcttccaccccagtctcagacacaacctcttgtaagtcaggcacaagctctgcctggccaaatgctgtatactcagccgcctctgaagtttgtccgtgccccaatggtggtgcagcagccacctgtgcaaccccaggtgcagcagcagcagacagccgtccagaccgcacaagccgctcagatggtcgcccctggcgtccaggtgtcacaatcatctctaccaatgctctcatctcccagtcccggtcagcaggtacagacgcctcaatctatgcccccaccacctcagccctccccccaacctggtcagccatccagccaacccaattcaaatgtgagcagtggtccggctccatcaccatcctccttccttcctagtccgagtccccagccatctcagtctccagtgacggcaaggacccctcaaaatttctccgtaccatctcccggaccactcaatacaccagtgaacccaagttcagttatgagccctgctgggtctagtcaggcagaggaacagcagtatttggataagctgaagcagctgagtaagtatatagagcccttgcggaggatgattaacaagatagataagaacgaggaccgcaagaaagacctgtctaaaatgaagtccctcttagacatcttgacagaccctagtaagaggtgcccactgaaaactctccagaagtgtgaaatcgcccttgagaagctgaagaacgacatggccgtgccaaccccccctccacctcctgtgccacccaccaagcagcaatatctgtgccagccacttttggacgcagtcctggccaatataaggtccccggttttcaaccactccctttatagaacgttcgtgcctgctatgaccgccatccacggacccccaattactgcccctgtcgtttgtaccaggaaaaggagactagaggacgacgaacggcaaagcatcccatctgttcttcaaggagaagtggccagactcgatccaaaattcttagtgaacctcgacccgtcccattgttccaataatgggacagtacaccttatctgtaaattagatgacaaggaccttccttctgtgcctccactagaattgagtgttccggctgactatccagcccagtctcctctatggattgaccgtcaatggcagtacgacgccaatccttttttgcagtctgtccatcggtgcatgaccagccggcttctacagctgccggacaaacatagcgtaacagctctgctgaatacatgggcacaatctgtccatcaagcctgtctgtccgctgcctag

SEQ ID NO: 229810 - DNA, 2034 bp, synthetic construct
  misc_feature 1..2034: note = Description of Artificial Sequence: Synthetic coding sequence
  source 1..2034: mol_type = other DNA
atggatgtttccggccaggagaccgattggcggagcactgctttcagacagaaactggtctctcagatagaagatgcaatgcgtaaagcaggtgtcgcgcactccaaatctagcaaggacatggagtctcacgttttcctaaaggctaagacacgggacgaatacttatcactcgtggcgagactcattatccacttccgcgacattcataataaaaaatcgcaggctagcgtctcggcccagcttcagctacaacaggtggccctgcagcaacagcagcagcagcaacagtttcagcagcagcagcaggccgctctgcaacagcagcagcaacagcagcaacagcagcaattccaggctcaacaatctgcaatgcagcaacaatttcaggcagtcgtccagcagcagcaacagctgcagcaacagcagcaacagcaacagcacctgataaaactacatcatcagaaccaacagcaaatccagcaacaacaacagcaactgcagagaatcgcccagctgcagctgcagcagcaacaacagcaacagcagcagcagcagcagcagcagcaacaggcgttacaggcccagccccctatccaacagccccctatgcagcagccccaaccaccaccatcccaggctctgccacagcagctccaacagatgcaccatacccagcatcatcagccacctcctcagccccagcaacctcccgtggcccaaaatcagccctctcaactgccccctcagagtcaaacacaaccgctggtctcccaggcccaagctctgccgggacaaatgctgtatacccagcctccgctgaaatttgtcagggcaccaatggtcgtgcaacagccgccagttcaaccccaagtccagcagcagcagactgcagtgcagactgcgcaagcagcgcagatggtcgcgccaggggtgcaggtttctcagtcctctcttccaatgctttcttctccgtcaccaggacagcaggttcaaacacctcagagcatgccgccacccccacagccctcccctcagcccggacagccctcgtcccagcctaattcaaacgttagttcaggacctgcacccagtccatcaagcttcctacctagtccttcgccccagccgtcccagagtcccgtgacagccaggactcctcaaaacttctcggtcccttcacctggaccactgaacactccagtgaatcccagctccgttatgagccccgctggcagcagccaggctgaagaacagcagtatctggacaaactcaaacaactctcaaagtatattgagccacttcgtcgaatgataaacaaaattgataagaatgaggaccgcaagaaggatttgtccaaaatgaaaagcctgctggatattctgaccgatcccagtaaacgatgtcctctgaagacactacagaaatgcgaaatagcacttgagaaactcaaaaacgacatggccgtgccaaccccacctcccccacctgttccgcctactaagcagcaatatctgtgtcaaccattgctggacgcagtgctggccaatatccggagtcccgtttttaatcactcgctctacaggactttcgtgcccgctatgactgccatccacggacccccaatcaccgccccagttgtttgcacaaggaagaggcgtctggaagatgacgaacggcagagtatcccttccgtgctgcagggggaagtggccaggctagatccaaagttccttgtcaacttggatccctcacactgttcgaacaatgggaccgtgcatctcatatgtaagctggatgacaaagatttgcccagtgtgcctcccctcgagctgtcggtgcccgcagactatccggcacagtctcctctgtggatcgaccggcagtggcagtacgacgctaaccccttccttcaatccgtgcatcgctgcatgacaagccggctgctgcagctgcccgacaagcacagtgttacagcgttgctgaacacctgggcacagtccgtgcaccaggcctgtttaagtgctgcctag

SEQ ID NO: 229811 - DNA, 2169 bp, synthetic construct
  misc_feature 1..2169: note = Description of Artificial Sequence: Synthetic coding sequence
  source 1..2169: mol_type = other DNA
atgcgaaaagccggtgttgcacacagtaagtcttcgaaggacatggaaagccatgtttttttgaaggcaaagactagggacgagtacctctcactggtggccagactgatcattcattttcgggatatacacaataagaaatctcaggcaagcgtgtccgatcccatgaacgctttgcagtctttgacaggtggacccgcagccggagccgctggaatcgggatgccacccaggggacccggtcaaagtctgggtggaatgggcagtttaggagccatgggccagcctatgtccctctccggtcagccacctcccggtacatccggaatggctccccattctatggccgtggtgtctactgcgacgccccagactcaactgcagctgcaacaggtggcacttcagcagcagcagcaacagcaacagtttcagcagcaacagcaagccgctcttcagcaacagcaacaacaacagcaacaacaacagttccaggcacagcagagcgctatgcagcagcagtttcaagccgtagtccagcagcagcagcagttacagcagcaacagcaacagcaacagcacctaatcaagttgcaccaccagaaccagcaacagatccaacaacagcagcagcaactgcagcggattgcccagttacagctgcaacagcaacagcagcagcagcagcaacagcagcagcagcagcagcaagctcttcaggcccagcccccaatacagcaaccgcctatgcagcaaccacagcctcccccaagccaggcgctgccccagcagctgcagcagatgcaccatacacagcaccaccaacccccaccccagccacagcagccacccgtggcccaaaatcagcccagtcagctgcctcctcaaagtcagactcagccattggtatcccaggcacaggcacttcctggccaaatgttgtacacacaaccccctctcaaattcgtaagggcccctatggtagtgcagcagccccctgtacaacctcaggttcagcaacagcagactgctgtgcagacagcacaggccgctcaaatggtagcccctggagtgcaggttagccagtctagtctgcctatgctatctagcccatctcctgggcaacaggttcagaccccacagtccatgccaccaccccctcagccaagccctcagcctggacagcctagctcccaaccaaatagcaacgtgagttcaggaccagctccgtcacccagcagttttctgcccagtccaagcccccaaccctcacagtcacccgtaacggcgcgtacgccccagaatttctccgttcccagtccaggtcccctgaacacgcctgtgaacccttctagcgtgatgagccccgctggcagctcccaggcagaggagcaacagtacctcgacaaactaaaacaactgagcaaatatatcgagccactaaggcgaatgataaataagatcgacaaaaatgaggaccgtaagaaggacctcagcaaaatgaagagtcttctcgacatcttgaccgatcctagcaagaggtgccctctcaagaccttgcagaaatgtgaaattgcgttggagaagctgaagaatgacatggctgtccccacccccccacccccaccagtaccacccaccaaacagcaatatctctgtcagcccctcctggacgctgttcttgcaaacattcgtagcccagttttcaatcactcactgtacaggactttcgtgcccgctatgacagctattcatggccctccaattaccgcacctgtcgtctgcacaaggaaacgtaggcttgaggacgacgagcgacagtctattccatccgtcctgcaaggggaagttgctaggcttgaccccaagttcctcgtaaacttggacccttctcattgcagtaataatggtactgtacacctcatttgcaagctggatgacaaagatctaccctcagtgcccccactcgaactgagcgttccagccgactacccagctcagtctcccctgtggattgatcggcagtggcagtacgatgctaatccatttttgcagtcggtccatcgatgcatgacgtctcggttgctccagttacccgacaagcatagcgtaacagccctgcttaacacctgggcacagtctgtccatcaggcgtgtctgagtgccgcttag

SEQ ID NO: 229812 - DNA, 1914 bp, synthetic construct
  misc_feature 1..1914: note = Description of Artificial Sequence: Synthetic coding sequence
  source 1..1914: mol_type = other DNA
atggagagccatgtttttttaaaggctaagaccagggatgagtatctgagtctcgtcgctcgcctgattatccatttccgggatatacacaataaaaaatcccaggcaagcgtctccgcccagcttcagcttcagcaggtcgctctgcagcagcaacaacagcagcaacagtttcaacagcagcagcaggcagctttacagcaacaacagcagcagcagcagcagcagcagtttcaggcccagcagtccgccatgcaacaacagttccaagcagtggtccaacagcagcaacagttgcaacagcagcagcagcaacagcagcatctgatcaagctgcatcaccaaaatcagcaacagattcagcaacagcagcagcagcttcagcgcatagcccaacttcagctgcagcagcaacagcagcagcagcagcagcaacaacaacaacaacagcaggccctgcaggcccagcctccaattcagcagccgcctatgcagcagccacaaccaccaccaagccaggccctgccacagcagctgcaacaaatgcatcacacacaacatcatcagcctcctccacaaccgcagcagcctcctgtggcccagaatcagccctcacagctaccgcctcagtcccaaacccagccactagtttcccaggctcaggctctgccaggacagatgctctatacgcagccacccttaaaatttgtaagggcaccaatggtggtccagcaaccacctgtgcagccccaagtccagcagcaacaaacagctgttcagaccgctcaggccgcacagatggtggctccgggagtgcaagtctcccagagctccctcccaatgctgagctccccctctccagggcagcaagtccaaactccccaatctatgcctccgcctccacagcctagcccacagcctgggcagccctcctctcagcctaacagtaatgtctcctctgggccagcgcctagcccaagctcttttctgccaagccccagtccccagcccagccagtcgccagtcaccgcacgcactccacaaaattttagcgtgccctctcccggaccgctgaatacccccgtgaacccatctagtgtgatgagcccagccggatcaagccaggccgaggagcagcaatacctggataagcttaagcagctttctaaatatattgagcctttgcggcgaatgattaataagatcgacaaaaacgaggatcggaagaaagacctgagcaagatgaagagcttgctggacatactcacagatcccagtaaaagatgtccacttaagacactacagaaatgcgagatcgctcttgagaaactcaagaatgacatggctgtgcctactccgccacccccacctgtacctccgaccaagcaacagtatctttgccagcctctgttggatgctgttctggccaatataagatcgcctgtgttcaatcactcactgtacagaacatttgtaccagcaatgaccgccatccatggaccaccgattactgccccagtggtctgtacccgcaagcggcgactcgaagacgatgagagacaaagtatccccagtgtacttcagggcgaggtcgcacggctggatcccaagttcctggtcaacttggacccatcgcactgctccaataacggcaccgtgcatctgatctgtaagctggacgacaaggacttgccatccgtcccgccactggagctcagtgttccagcagactaccctgcccagagtcccctgtggattgatagacagtggcaatatgacgcgaacccatttctccagtccgtacaccggtgcatgacttcccgcctcctgcagctgcccgacaagcacagcgttactgctctgctgaatacctgggcccagagtgtgcatcaggcttgtttaagcgccgcatag

SEQ ID NO: 229813 - DNA, 2169 bp, synthetic construct
  misc_feature 1..2169: note = Description of Artificial Sequence: Synthetic coding sequence
  source 1..2169: mol_type = other DNA
atgaggaaagcgggtgtggcccacagtaagtcttctaaggatatggaatcccacgtgttcctcaaggcaaagactcgcgatgagtacctgtccttggtagctcggctcataatccacttcagagacatccacaataaaaaaagccaggcttctgtgtccgaccccatgaacgcccttcagtctcttaccgggggacccgctgcgggagccgctggcattggtatgccccctaggggccctggccagtccttgggcggtatggggagcttgggagcaatgggccagccaatgagcttatctggccagccacctccaggcacgagcggaatggcaccacattcaatggctgtagtgtcaacagctactccacagactcaactgcagctccagcaggtcgcgctgcagcagcagcagcagcaacagcaatttcaacagcaacaacaggctgcccttcagcaacagcagcagcaacaacagcagcagcagtttcaggctcagcagagcgccatgcagcagcaattccaagccgtagtacaacagcaacagcaattgcaacagcagcagcagcagcaacagcacctcataaagctccatcaccagaaccagcagcagatccagcagcagcagcaacaactgcagcgtattgctcagctacaacttcagcagcagcagcagcagcaacagcaacagcagcaacagcagcagcaggcactacaagcccagcccccaatccagcaaccccctatgcagcagccacagcccccaccctcacaggcactgcctcagcaactgcagcagatgcaccacacccagcaccatcagcccccacctcagccccagcaaccacctgttgcccagaatcagccctctcagctgccacctcagagccagacacagcctctggtttcacaggcccaggccttgcccggtcagatgctctatacccagcctcctcttaaattcgtccgggctcccatggtggtgcaacaacccccagtacaaccacaggtccagcagcagcaaacggcagtacagaccgctcaggcagcccaaatggttgcaccaggggtgcaggttagtcaatcgagcctgcctatgctgagtagcccatcccccggtcagcaggtccagaccccacagtccatgccacctcctccacagccatctccacagccagggcagccttctagccaacccaacagtaatgtctcaagtgggccagccccttccccctcgagctttctccccagtcccagcccccagccctctcagtcacccgtcacggccaggacacctcagaatttctctgtcccatctcctggtccgctgaacacgcccgtcaacccctccagcgtgatgtcaccagcgggttccagtcaggcagaagaacagcagtacctcgacaagttgaaacagctctccaagtatattgaacctcttcggaggatgatcaacaagatagataagaatgaggaccgcaagaaggacttaagcaaaatgaaatctctactagacatcctaacagacccgtctaaaagatgtcccctcaagacattacagaagtgtgaaatcgcgctcgagaagttgaaaaatgacatggccgtcccaacacccccaccaccacctgttcccccaacaaagcagcagtatttgtgccagccactcctggacgctgtgttggcaaacatccggagccctgtctttaaccattccctttaccgcacctttgttcccgcaatgactgccatacacggccctcccattactgctccagtggtgtgcactagaaaacggcgattggaagatgacgaacgacaatctatcccctcagttttgcaaggggaggtggctagactggatccaaagtttctcgtcaacctcgatccttcgcattgtagcaataacggtaccgtgcacttgatctgcaagttagacgacaaggacctgccctctgtgccgcctcttgagctgtctgtgccagcagattatcccgctcagagccccctctggattgataggcaatggcagtacgacgccaatccctttctgcagtccgtccatagatgtatgacatcacggttactgcagttaccagataagcattccgtgacagctctgcttaatacatgggcacagtctgtacaccaggcttgcctcagcgctgcctag

SEQ ID NO: 229814 - DNA, 2157 bp, synthetic construct
  misc_feature 1..2157: note = Description of Artificial Sequence: Synthetic coding sequence
  source 1..2157: mol_type = other DNA
atgaggaaagctggcgtagctcactctaaatccagtaaggatatggaaagccacgttttcctgaaagcaaaaacccgggatgaatatctctccctggtcgccagactaataatccacttccgtgatatccacaataagaagtcccaagcaagtgtgtccgaccccatgaacgcactccagtcactgaccggaggtcctgcggcaggagcagctggaatcggcatgccgccaagaggcccaggccaaagtctcgggggaatgggctctctgggggcaatgggccaaccaatgtccctcagcggccagccgcctccaggaacgagcggtatggcgcctcacagtatggccgtagtatccacagccacgccccagacacaacttcaactgcagcaggtggcactgcagcagcagcagcagcagcagcaatttcagcagcagcagcaggcggcactgcagcagcagcagcagcagcagcagcagcagcagttccaggcacagcagtcagcaatgcagcaacagtttcaggccgtggtccagcagcaacagcagctgcaacagcaacagcagcagcagcagcacctgatcaagctgcatcaccagaaccagcagcagcagcagcaacaggccttgcaggctcaaccacccatccaacagcctcccatgcagcagcctcagccgccaccgagtcaggctctgcctcagcagttgcagcagatgcaccacactcagcatcaccagccaccaccccaaccacaacagcctccggttgcacaaaatcagccctcccagctgcccccacagtctcagactcagcccctcgtgtcacaggctcaagccctccctggacaaatgctgtacacgcagcctccactaaagtttgttagggccccaatggtggttcagcagcctcccgtacagccccaggtccagcagcagcagacagccgttcagacagcacaggctgcccagatggttgcccctggcgtccagatgattaccgaagctctagcccagggtgggatgcacatcagggcaagatttccccctacgaccgccgtgagcgccattccctcgtcatccattcccctcgggagacagcctatggcccaacaggtccaaaccccccagagtatgccaccgcctcctcagccgtcaccacagccaggacagccttcctcacaacccaactcgaatgtttcttctgggcctgctcctagtccgagttctttcctgccctccccgtctcctcagcccagccagagtccagttactgcacggactccccagaactttagcgtgccgagccctggtcccctcaacacgccagtgaacccctcttctgttatgtctcctgctgggtcttctcaagcggaagaacagcagtatctggacaagctgaagcaactctctaaatatattgaacccctccgtcgtatgatcaataaaatagacaagaatgaagacagaaagaaggacctcagcaaaatgaagtctttgttggatatcctcacagatccgtctaaaaggtgtccactcaaaaccctacagaagtgtgaaatcgccttggagaagctcaagaacgacatggcagtccccactccacccccaccaccggtgccacccacgaagcagcagtacttgtgccagcctctccttgatgccgtgctagctaatatacgtagtcctgtctttaaccactcgctctacagaaccttcgtgcccgcaatgacagcaatccatggaccacctatcaccgcgccagttgtctgtacccgaaagaggagattggaagatgatgaaaggcagagtatcccatcagttctgcaaggtgaagtggccaggctggacccaaagtttcttgtgaacttggatccctcccactgctctaataacggtaccgtccatttgatttgcaagctcgacgataaggaccttccatccgttccacctctagaattgagcgtccctgccgattatcccgcacagtcacctctgtggatcgacagacagtggcagtatgacgccaacccattcctgcagagcgtgcaccgatgcatgacctccaggttactgcagcttcccgacaaacacagtgtaacagcactcttaaacacatgggctcaaagtgtgcatcaggcctgcctgagtgccgcttag

SEQ ID NO: 229815 - DNA, 570 bp, synthetic construct
  misc_feature 1..570: note = Description of Artificial Sequence: Synthetic coding sequence
  source 1..570: mol_type = other DNA
atgcagcagcaattccaagccgtagtgcagcagcaacagcagctgcaacagcagcagcaacagcagcagcacctgattaagctgcaccaccagaaccaacagcagatccagcaacagcagcagcagctgcagcgtatcgcacagctgcaactccaacagcaacaacagcaacaacagcagcagcagcagcagcagcagcaagccctccaggcgcagccccctattcagcagccacctatgcagcagcctcagccccctccatcacaggccctgccccagcagctacagcagatgcaccacacacaacatcatcagcctcctccgcagcctcagcagcccccagtggctcagaaccaaccttcgcagctccccccacaatctcagactcaacctcttgtttcccaggcacaggccttgccaggacagatgctgtacactcaaccaccattgaaattcgtgcgggcaccaatggttgttcagcagcctccagtgcagccgcaggtgcagcagcagcaaacagcagtacaaactgcccaggctgcacaaatggtggcgccaggagtgcagtag

SEQ ID NO: 229816 - DNA, 1956 bp, synthetic construct
  misc_feature 1..1956: note = Description of Artificial Sequence: Synthetic coding sequence
  source 1..1956: mol_type = other DNA
atgagtggagtgagagcagtcaggatctctatcgagtcagcttgtgagaagcaggtgcacgaagttgggctggacggcaccgagacttacctgcctccattaagcatgtcacaaaatctcgctcgcttggcacagaggatcgatttttcacaaggcagcggttcggaagaggaggaggccgctggaaccgagggagacgcccaagaatggccgggtgccggatcttcagccgatcaggatgacgaagaaggagtggtcaaatttcaaccgagcctctggccgtgggattctgtcagaaacaatctgcgaagcgcccttactgagatgtgcgtgctgtatgatgtgttgtcaatcgttcgggacaagaagttcatgaccctcgaccctgtgagccaagacgcacttccccctaaacaaaacccccagactctgcagttgatctcaaaaaaaaagagcctggctggggctgctcagatcctgctgaaaggggctgagagactcacaaagtccgtgactgagaatcaggaaaacaaattgcagagggatttcaacagcgagctgcttcgcctccgacagcactggaaattgagaaaagtgggagacaagatactgggcgaccttagttatcgttcggcgggtagtctgtttccgcaccatggtacctttgaagtaatcaagaacactgatctcgacctagacaagaaaatcccggaagactattgcccactggatgtgcagatccccagtgacctggagggatcagcctacataaaagtgtccatccagaaacaagcacctgacatcggcgacctggggacggtaaatctgttcaaacgaccacttccaaagtctaaacccggttcccctcattggcagacaaaactggaggccgcacaaaatgtcttgctctgtaaagaaattttcgcccagctgtctagggaggccgtacaaataaaaagtcaagtgccacacatagtcgtaaaaaaccagatcatatcccagccattcccaagcctccagctgtcaatttcgttatgtcatagttctaatgataaaaagtcccagaagttcgccacagaaaagcaatgcccggaggatcacctgtatgtgcttgagcacaacctgcacttgctcataagggagtttcacaagcaaacactgagctcgatcatgatgcctcacccagccagcgcacccttcggccataagcgaatgagattgagtggccctcaggccttcgataaaaatgagatcaattcgttgcagtcatctgagggccttctggagaagattataaaacaggctaaacacatctttttgagaagccgcgctgccgctaccatagactctctggcatcacgaatagaggacccccagatccaagcccactggtccaacatcaacgacgtgtacgagtcctcagtgaaggtgctgatcacgtcccagggatatgagcaaatatgcaagtcaatccaactgcaacttaacattggggttgagcagatccgtgtggttcatcgagatggcagagtgattacactgtcgtaccaagagcaagaactccaggacttcctgctttcacagatgtctcagcaccaagtgcacgccgtccagcagttagccaaggtgatggggtggcaggtcctttccttctcaaatcacgtgggactggggccaattgagtctataggaaacgcctcagcaattacagtggccagcccaagcggggactacgcaatcagcgtacgcaacgggcctgagtctgggagcaagattatggtgcagtttccaagaaaccagtgtaaggacttaccaaaatctgatgtactgcaggacaacaaatggagtcatctgcgcggtccttttaaagaggtgcaatggaataagatggagggtaggaattttgtttacaaaatggagttgttgatgtcagcgctgtccccatgcctgctctag

SEQ ID NO: 229817 - DNA, 1866 bp, synthetic construct
  misc_feature 1..1866: note = Description of Artificial Sequence: Synthetic coding sequence
  source 1..1866: mol_type = other DNA
atgtctggagtgcgggctgttagaatcagcattgaaagcgcctgcgagaaacaggtgcatgaagtgggcctggacggaacagaaacgtatctccctccgctgagtatgagccaggaatggcctggagccggttcgagtgcagaccaggacgacgaagaaggagtagtcaaattccagccttcactgtggccttgggactccgttcggaacaacctgagatccgccctcaccgagatgtgtgtcctgtacgatgttttatctattgtccgtgataagaagttcatgactttagacccagttagtcaggacgccctcccacctaagcaaaaccctcagaccctgcagcttatttctaaaaagaagagccttgcaggcgctgcacagattttacttaagggtgcagaacgtctgacaaagagcgtcacagagaaccaggaaaataagcttcaaagagacttcaactcagaactactaaggcttcgccagcattggaaactccgcaaagtcggtgataaaatattaggggacctttcttaccgttctgccggaagtctcttcccccaccacggaactttcgaggtaattaagaatactgacctggatctcgacaagaagattcccgaagactactgccctcttgacgtgcagattccatccgacctcgaggggagcgcttacattaaggtgtcaatccagaagcaagcgccagacattggggatctaggtacggtaaatctgtttaagaggccgctccccaaatctaaacctggttctccacattggcagactaagctcgaggctgcccaaaatgtgctattgtgcaaggagatctttgcccagctgagccgcgaagcagtccaaatcaagtcccaggttccccatatagtggtgaagaatcagattatatcacaaccattcccgtcgctgcagttgtctatctcactctgccactcttctaacgataaaaaatcccaaaaatttgccactgagaagcaatgccctgaggaccacttgtacgtcctcgaacataacttgcatttgctgattagagagtttcataagcagactctgtcatccatcatgatgcctcaccccgcatcagcacctttcggtcacaagcggatgcgcctgtcagggcctcaggcttttgacaagaatgagatcaattctctgcagtcctctgaggggctgttggagaagatcattaagcaggcaaagcacatctttctaaggtcacgggcagcagccacaatcgattccctagctagtcgaatcgaggaccctcaaattcaagctcactggtcaaatatcaacgatgtgtatgaaagctcagtgaaagtactgattaccagtcagggatatgagcagatatgcaagagtatccagctgcaattgaacattggggttgagcagattagggttgtacatcgggacggcagagtgatcacattgtcgtatcaggagcaagagcttcaggacttcctgctgtcccagatgtcccagcaccaagttcatgccgtgcagcagctggcgaaggtgatgggctggcaggtgttatctttcagcaatcacgtgggccttggaccgatcgagtccataggtaatgcctctgcaatcacggtggcatcccccagtggcgactacgctatatccgttaggaatggtccagaaagtggatcaaagataatggtccagtttccgagaaaccagtgtaaagatctgccaaagtcagatgtgctgcaggataataagtggagtcacctccgcggaccatttaaggaggtccagtggaataaaatggagggcaggaacttcgtttacaagatggagttacttatgagcgccctgagcccttgtctgctgtag

SEQ ID NO: 229818 - DNA, 438 bp, synthetic construct
  misc_feature 1..438: note = Description of Artificial Sequence: Synthetic coding sequence
  source 1..438: mol_type = other DNA
atgtcgggggtgcgcgctgttaggattagcatcgagtctgcctgtgagaaacaggtgcacgaagttggtctcgatgggactgaaacttacctgccaccactgtctatgagccagaatctggcccgtctagcccagcgcattgattttagccagggttcgggctctgaggaggaggaagccgctggcacagaaggcgacgcccaggagtggcctggcgcaggctcatcagcagaccaagacgatgaggagggcgttgtcaagtttcagcccagcttgtggccttgggatagcgtgagaaacaacctgcggtcagcccttacggagatgtgcgtattgtacgacgtgctctctattgtaagggacaaaaaatttatgacgctggatccagtgtcccaggacgccctaccaccgaagcaggtgtttgtggacttcaattag

SEQ ID NO: 229819 - DNA, 627 bp, synthetic construct
  misc_feature 1..627: note = Description of Artificial Sequence: Synthetic coding sequence
  source 1..627: mol_type = other DNA
atggaggcacctcctgttacgatgatgccagttactggaggtacgatcaatatgatggaatatctcctccagggtagcgtgctggatcactctctggagagcctgatccatcgtttaaggggactctgtgataatatggaacctgaaacattccttgatcatgagatggtttttctactgaaaggccagcaagcaagtcccttcgtgctgagagcccgtcgcagtatggaccgggctggagcaccatggcatctccgttacctgggccagcctgaaatgggggataaaaaccgtcacgcgctagttcgaaattgtgttgacatagcaactagtgagaacctcactgactttcttatggagatgggctttagaatggaccacgagtttgtggcaaagggtcatttatttcgcaaaggcatcatgaaaatcatggtttacaaaatctttcgtattctggtccctgggaatacagattctacagaggcactatcactttcctacctagtggagttgtccgtagtcgcccctgccggtcaggatatggttagcgacgacatgaagaatttcgctgaacagctgaaaccactcgtgcatctggaaaaaattgaccctaaaagactgatgtag

SEQ ID NO: 229820 - DNA, 627 bp, synthetic construct
  misc_feature 1..627: note = Description of Artificial Sequence: Synthetic coding sequence
  source 1..627: mol_type = other DNA
atggaggctccccctgtgacgatgatgcctgtcacaggaggaaccatcaacatgatggagtatctgctgcaggggtccgtgcttgatcactcattggaatctttgatccatagactgagggggttgtgcgataacatggaacctgagacgtttctggatcacgaaatggtgttcctcctgaagggccagcaggcttcaccattcgtgctccgagctcgaaggtctatggaccgggctggagctccttggcacttaagatacctcggacagcccgagatgggagacaaaaaccgtcacgccttagtcaggaactgcgttgatatcgccacatccgagaatctcacggatttcctaatggagatgggttttcgaatggatcatgagttcgtggctaaagggcatctgttccggaaaggtatcatgaagatcatggtctataagatctttcgaatccttgtgcctgggaacactgattctacagaggcactaagtctcagttaccttgtcgagctctcggtggtagcccctgctgggcaggacatggtatccgacgacatgaagaacttcgcggagcagctgaaacctctagtccaccttgagaaaattgatcccaaaagactgatgtag

SEQ ID NO: 229821 - DNA, 585 bp, synthetic construct
  misc_feature 1..585: note = Description of Artificial Sequence: Synthetic coding sequence
  source 1..585: mol_type = other DNA
atggaaaacttcacagcactgttcggagcccaggccgaccctcctccgcctccaacggcactcggttttggaccaggaaagccgccacctccccctcctcccccagctggtggaggtccaggaaccgcgccaccacccacagctgctaccgcgcctcctggagctgataagtctggagcagggtgtggtcccttttacttgatgagggagctccccggaagcactgagctaactgggtccacgaatctgattactcattataacctggagcaagcctataacaaattttgtgggaagaaggtgaaggagaagttatccaatttcctgccagatttaccaggcatgatcgatcttcccggaagccacgacaactccagtctcaggagtcttatcgagaaaccaccaatccttagctcttcttttaatccaatcactggtacgatgctggccggattccggttgcacacaggcccactgccagagcagtgtcgcctcatgcacatacagccgccaaaaaaaaagaacaagcacaaacacaaacagtctagaactcaggaccctgttccgccaggaaaaccttcatag

SEQ ID NO: 229822 - DNA, 735 bp, synthetic construct
  misc_feature 1..735: note = Description of Artificial Sequence: Synthetic coding sequence
  source 1..735: mol_type = other DNA
atggagaactttaccgcactgtttggggctcaggctgacccccctcctccaccaaccgctttgggatttggacctggtaaaccaccaccacccccaccgcctccagcagggggtggacccggaacggcccctccccctaccgcggcaacagcccctcctggcgctgataaatccggcgctggctgcggtccattctacctgatgcgggagctccccggaagcacagagctgaccggttccacaaacctaataacccattacaacctcgaacaggcttacaataaattctgtggcaagaaggtgaaagagaaactgagcaactttctccccgacctcccaggtatgattgacctccccggatcccacgataatagcagcctgcgatccctcattgaaaaaccaccaatcctcagctctagttttaatcctatcactgggacgatgctcgcgggatttcggctgcacaccggccctttacccgagcagtgccgcctgatgcacattcaaccccctaagaagaaaaacaagcacaaacacaaacagtcccgcacccaggaccccgtcccaccagaaactccttcagactcggaccataaaaagaagaaaaagaagaaagaagaggatcctgagcgcaagcgcaagaagaaagagaaaaagaagaaaaagaatagacactcgccggatcaccccggaatggggtcaagtcaggcctcatcctcatctagtctccgctag

SEQ ID NO: 229823 - DNA, 639 bp, synthetic construct
  misc_feature 1..639: note = Description of Artificial Sequence: Synthetic coding sequence
  source 1..639: mol_type = other DNA
atgggcgtgacctgtgtcagccagatgccagtggctgagggaaaatccgtccagcagaccgtggagctcttgacgaggaaactggagatgctgggggcagagaagcaggggaccttttgcgtcgattgcgagacttaccataccgccgctagcacccttgggagtcaagggcaaacaggcaagttaatgtacgtgatgcataactctgagtaccccctgagctgcttcgcattatttgagaacggcccttgcctgattgctgacaccaatttcgatgtcttgatggttaaactcaaagggtttttccagtctgctaaggctagtaaaatcgagacacgaggcactcgctatcagtactgcgatttcctggtcaaggttggtactgtgaccatggggccatccgccagaggcatctctgtcgaggtggagtacggcccttgcgtggtggcaagcgattgctggagtttgctgctcgagtttctgcaatctttccttggttcccacacacctggggcaccagcagttttcggcaataggcatgatgctgtctatggcccagccgacaccatggtccagtacatggaacttttcaacaagatcaggaaacagcagcaggtgccagtcgcagggatcagatag

SEQ ID NO: 229824 - DNA, 423 bp, synthetic construct
  misc_feature 1..423: note = Description of Artificial Sequence: Synthetic coding sequence
  source 1..423: mol_type = other DNA
atgcctgtcgcagaagggaagtcggtgcagcagaccgtcgaactgctgacaagaaagctggagatgctcggcgcagaaaaacagggaaccttctgcgtcgattgtgagacctaccatacggctgcctccactttagggtctcagggtcagaccgggaagttaatgtatgtgatgcataactcagagtatcccttgtcttgcttcgcacttttcgagaacggcccatgtctcatcgcagatacaaatttcgacgtccttatggtgaagctgaagggctttttccagtcggccaaagccagtaagatagagactaggggtactcgctaccagtattgcgatttcctggtgaaggtgggcaccgtgaccatggggccaagcgctaggggaattagcgtcgaggtggagtatggcccatgtgtgtag

SEQ ID NO: 229825 - DNA, 438 bp, synthetic construct
  misc_feature 1..438: note = Description of Artificial Sequence: Synthetic coding sequence
  source 1..438: mol_type = other DNA
atgggggttacatgcgtatcccagatgcccgtggcagaaggaaaatctgtccagcagacggttgaactcctaacccggaaattagaaatgctcggggcagagaaacaaggaacattctgtgtggattgcgaaacctatcacactgccgcatcaacactcggctcgcagggccaaaccggtaagctgatgtacgtcatgcacaattcggaatacccgttgtcatgttttgccctgtttgaaaatggcccttgcttgatcgccgacacaaattttgacgtgctgatggtgaagctgaagggtttttttcagtctgcaaaagcctctaaaatcgagactcgagggacccggtatcaatattgcgacttcctcgtaaaggttggcactgtcactatggggccaagtgcgcgagggatctccgtggaggttagaccctggtag

SEQ ID NO: 229826 - DNA, 372 bp, synthetic construct
  misc_feature 1..372: note = Description of Artificial Sequence: Synthetic coding sequence
  source 1..372: mol_type = other DNA
atgggggtgacctgtgtgagccagatgcccgtggcagaaggcaagtcagttcagcaaaccgtggagctgctgacacggaaactggagatgttaggggctgaaaagcaggggaccttttgtgtcgattgtgagacatatcatactgcagccagcacactgggaagccagggccagacaggaaaactgatgtatgtgatgcacaattccgagtaccctctgtcttgctttgcgctgtttgaaaatgggccatgtcttattgccgatacgaatttcgatgtcctgatggtgaaactgaagggctttttccagagcgccaaggcgtccaagattgagacgcggggtacgcggtggagcatggccccagtctggtag

SEQ ID NO: 229827 - DNA, 435 bp, synthetic construct
  misc_feature 1..435: note = Description of Artificial Sequence: Synthetic coding sequence
  source 1..435: mol_type = other DNA
atggccgaccggctaacacagctgcaggacgcggtgaacagtctggccgatcagttctgcaacgcaattggggtactgcaacaatgtggcccaccagccagtttcaacaatattcagaccgccatcaacaaggaccaacccgctaatccaactgaggaatatgcacagctatttgctgccttgatagcgaggaccgcgaaagatatcgacgtgctcatagattctctgccctctgaggaatccactgctgcgcttcaagccgcaagtctgtacaaactggaggaggaaaaccacgaggctgcgacatgtctggaggatgttgtctaccggggagatatgcttcttgagaagattcaatccgccttagccgatatcgcccagagccagctgaagaccaggtcagggacacactctcaatccctgccagattcttag

SEQ ID NO: 229828 - DNA, 4098 bp, synthetic construct
  misc_feature 1..4098: note = Description of Artificial Sequence: Synthetic coding sequence
  source 1..4098: mol_type = other DNA
atggaaacgcaactgcagtctatattcgaggaagtcgtcaagacagaggtgatcgaggaggccttcccaggaatgtttatggatacgccggaggacgagaagaccaagttgattagctgcttaggagcattcagacagttctggggagggctgtctcaggagagccacgagcagtgcattcagtggatcgtcaaattcattcacggccagcattctccgaagcgaatcagcttcctgtatgactgccttgcgatggccgtggagactggattgctcccaccaaggcttgtttgcgagagtcttatcaacagtgatacccttgagtgggagagaacccagctatgggcgctgactttcaagctggttcgcaagattataggtggggtggactacaagggggtccgtgatctgctaaaggtgatcctagaaaagattctgacaatcccaaataccgtgtccagtgcagtcgtgcagcaactactcgcggctcgcgaagtcatcgcctatattctggagaggaacgcttgcctgctgcctgcatattttgctgtgacagaaattcgcaaactatatccagagggaaagcttccgcactggttgctgggaaaccttgtaagcgattttgtggacactttccgtcctacagccagaatcaactccatctgtggcagatgtagcttgctgccagttgtgaacaatagcggagctatttgcaactcgtggaagctagaccctgccactctgcggtttccactgaagggcctccttccctacgacaaggatctgtttgaacctcagaccgcacttctacgttacgtcctggaacagccctattctagagacatggtatgtaatatgctgggcctcaataaacagacccttaacattgcccagcataaacagcgctgcccagtgctggaagaccaactcgttgatctagtggtctacgctatggaacggtctgaaaccgaagagaaatttgacgatgggggtacatctcagctgttatggcagcatttatccagtcaattaattttcttcgtactgttccaatttgcaagctttccccacatggttcttagcctgcatcagaaactggcaggtcgtgggttgatcaaaggcagggatcacctgatgtgggtgctcctccagttcattagcggtagcattcagaaaaacgccctcgccgattttctgccggttatgaagctgtttgacttgctgtaccccgaaaaagaatatattcccgtccctgacatcaataagcctcaatccacgcatgcctttgctatgacttgtatctggatccatctgaaccgcaaggcccagaacgataattccaaactgcagattcccatccctcatagtctccgattgcaccatgagtttttacagcagagcttgcgaaacaagagcttacagatgaacgattacaagattgccctgctctgtaatgcttacagcactaattctgagtgtttcaccttacctatgggagctcttgtcgaaaccatctatggcaatggcataatgcgtatacccctgccagggaccaactgtatggcgtccgggtccattacaccactccctatgaatttactggattcactgacagtccacgcaaagatgagcctgatccattccatcgctacaagggtcatcaagctggctcacgcgaaaagttccgtagcgttagcaccagcgctggtagagacttacagtagactgctggtgtatatggaaattgagagcctcgggatcaaaggattcatttcccagctgctcccgacggttttcaaaagccacgcttggggcattttgcatacgttgctagagatgttcagctatcggatgcatcacattcaaccgcactatcgtgttcaactgctcagccatctgcataccctcgctgctgtggctcagacgaatcagaaccagcttcatttatgtgtagagagcactgccttaaggctgataacagcactgggcagctctgaggtgcaaccccagttcacaagattcttgtccgaccccaaaacggttttaagcgcagagagtgaggagctcaatagggccctgatcctgaccttagcaagagctacgcacgtcacagatttcttcacaggctcggacagtatccagggcacttggtgcaaggacatactgcagaccattatgagtttcacaccacataattgggctagccacacactcagctgcttcccaggcccattgcaggccttcttcaagcagaacaatgtcccacaagaatcccgttttaacctgaagaaaaatgtggaagaagaatataggaaatggaaaagtatgagcaacgagaacgatattatcacccactttagtatgcagggctcacccccactgttcctctgcctcctttggaagatgctattagaaacggaccatattaaccagatcggttacagagtactggagcggatcggagctcgtgcgctagtggctcacgtgagaactttcgccgatttcctggtgtacgagttcagtacctctgcaggtggccaacagctgaacaagtgtatagagattctgaatgatatggtttggaagtacaatatcgtcacccttgaccgcctcattctttgcttggccatgcggtctcacgagggtaacgaagcccaagtgtgttattttattattcagttgctcctcctcaagcctaacgattttagaaatcgagtttctgactttgtgaaggaaaactcccctgaacactggctccagaacgattggcatactaaacatatgaattaccataagaaatatccggaaaagttgtatttcgagggccttgctgaacaggtggacccacccgtgcagattcagtcaccctatcttcccatttacttcgggaacgtctgcctgaggtttctgccagtgttcgacatcgtcatccatagattcctggaactgctgccagtgagcaaatcactggaaacattactcgaccatctcggtggactgtataaatttcatgaccggccagttacttacctctacaataccctccattactatgaaatgcatctgcgcgacagggcttttcttaaaagaaaactggtgcatgctattatcggctctctgaaggacaatcgccctcagggctggtgtctgtccgatacttacttaaaatgcgccatgaatgcgagggaagagaacccttgggttcccgacgatacgtattactgccgtctgataggccgattagtagacaccatggcaggcaagagtccgggaccttttccaaattgtgattggaggtttaatgaattcccaaaccctgccgcacacgcccttcacgtcacctgcgtggaactgatggccctcgcagtctccggtaaggaggtgggaaacgcccttctcaatgtcgtcctcaaaagccagcctctggtaccccgagaaaatattaccgcctggatgaatgccataggcttgatcatcactgcactgcctgagccttactggatcgtgctccatgacaggatagtgagcgttatttcatccccgtcactcacctcagaaactgagtgggtgggatacccttttcggttattcgatttcaccgcttgccaccaatcctactcagagatgtcttgttcctataccctggctttagcccacgccgtgtggcaccactcctccataggacagttaagcctcattccaaagtttttgaccgaggtactcttgccgatcgtgaagactgagtttcaactgctgtacgtgtatcacttagttgggcctttcctgcaaagattccagcaggaaaggacacgctgcatgatcgagattggggtggctttctatgacatgctcctgaacgttgatcagtgcagcactcacctgaattacatggaccctatatgcgacttcctgtatcatatgaaatatatgtttacaggcgattccgtgaaggagcaggtcgaaaaaataatatgtaacctaaaacccgcactaaagctgcggcttcgctttattactcatatttcaaaaatggaacccgcagccgtgccccctcaggctatgaattctggaagcccggctcctcagtcaaaccaatag

SEQ ID NO: 229829 - DNA, 2661 bp, synthetic construct
  misc_feature 1..2661: note = Description of Artificial Sequence: Synthetic coding sequence
  source 1..2661: mol_type = other DNA
atggagacacagttgcagagcattttcgaagaggtggtaaagacagaagtcattgaagaggccttccccggtatgtttatggacactccagaggacgaaaaaactaagctgatatcgtgcttaggcgcatttcgccagttctggggcggtctgagccaggaatctcacgagcagtgcatccagtggatcgttaagttcatccatggtcaacactccccaaagaggatttcctttctgtacgactgtttagcgatggccgttgagacaggcctcctgcctccaagactggtgtgtgagagtctcatcaactctgacacattagaatgggaaaggactcaactctgggccctgaccttcaaactggtgaggaagatcatcggcggagtcgattacaagggcgtaagagatcttcttaaagtgatcttggaaaagatcctgaccatccccaataccgtgagtagcgcggtggtgcagcagttactggccgcacgagaggtgatagcttatatcctagaaagaaatgcgtgcctgctgcccgcttactttgctgttacagagattcgaaaactgtaccccgagggaaagttgccccactggctgcttggaaatctggtgagtgactttgtagacaccttcagacctaccgccaggatcaactccatctgcggcaggtgtagtctgcttccggtggtcaacaactccggtgctatttgtaacagctggaaacttgaccccgcaacgctccgatttccacttaagggcctgctgccttacgataaagatctcttcgaaccacagacggccctcctcagatacgtgttggaacagccatacagtcgggacatggtttgtaacatgcttggtttgaacaagcagactcttaacatcgcccagcacaaacaaaggtgtccagtcttagaagatcaattagtagatttggtggtgtacgccatggagcggagcgagacagaggagaaattcgatgacggcggtacgagccagctgctctggcagcacctgtctagccaattgatcttctttgtactgtttcaattcgcgtcatttcctcatatggttctgagccttcatcagaaattagcgggacggggtctgatcaaagggcgtgaccacctcatgtgggtgctgctccagtttatcagcggatccatccagaagaatgctctggcggacttccttcctgtgatgaaactattcgacctattatacccagagaaagagtacattcctgttccggatatcaacaaaccgcagagcacccacgcctttgccatgacatgcatatggatccacctgaatcggaaggcgcagaatgataattccaagttgcagattcctataccccattccttgcggttgcaccatgagttcttgcaacagagtctacgtaataagtccctgcagatgaacgattataagatcgctttactctgcaacgcgtactccaccaactctgagtgtttcaccctgccaatgggagccttggtggagactatatacggcaacggtataatgaggatcccgctgccaggaacaaattgtatggctagtggatccattaccccccttccaatgaaccttctggacagtctaaccgttcatgctaagatgagcctgatccactccattgctacgcgagtcattaaattggcacatgccaagtcgagtgtcgctctggcccctgcgctggtggagacatattcacggctgcttgtgtacatggagattgagagcctggggatcaagggcttcatctctcagcttttgccgaccgtgttcaagtctcatgcatggggcattcttcacactctgcttgagatgttctcctaccgaatgcaccatatccaaccacactatcgggtgcagctactcagccacctgcatactctcgctgcagtggctcagacaaatcagaatcagttacacttatgcgtggaaagtaccgcattacgcctgataacggctctcggctcgtccgaggtgcaaccccaatttactaggtttttaagtgatccaaagaccgtgttgagtgctgaaagcgaagaacttaaccgtgccctgatcctcactcttgcgcgtgcgacacatgtcacagatttctttacgggtagcgattcaatccagggtacctggtgcaaggacatcctccaaacaatcatgtctttcactcctcacaattgggcttctcacactctctcttgcttccccggacccctgcaggctttcttcaagcagaataacgtacctcaggaatctagattcaatctgaagaagaatgtggaggaagagtatcgaaagtggaaatctatgtctaacgagaatgatattatcacacacttctccatgcagggctctccccctctttttttgtgcctcctgtggaagatgttattagaaacagaccacatcaaccagattggttatagagtactggaaagaatcggagctcgcgctttggtagcccacgtgcgaacatttgcagacttccttgtttacgaatttagcacttccgcaggcggacagcagcttaataaatgcattgaaatcctgaatgatatggtgtggaagtataatatagttactctggaccgtctgattctctgtctggtgagaatcaacacgttcctctcactgttctcctag

SEQ ID NO: 229830 - DNA, 4125 bp, synthetic construct
  misc_feature 1..4125: note = Description of Artificial Sequence: Synthetic coding sequence
  source 1..4125: mol_type = other DNA
atggagacgcagctgcaaagcatctttgaagaggtggtgaagaccgaagtcatcgaagaagcgtttccaggaatgtttatggacactcccgaggacgagaaaacaaagctgattagttgtttgggggcttttaggcagttctggggcggactgagccaggaatcccacgagcagtgcattcagtggatagtaaagttcatacacggtcagcactcgccgaagcggatttcctttctctacgactgcttggcaatggccgtggagaccgggcttttgcctcccagactagtttgtgagtctttaatcaacagcgacactctggagtgggagagaacacaactgtgggctctcactttcaagctcgtcagaaaaataatcggcggagtggattacaagggggtaagggatctgctcaaagtgatcttagaaaaaattctgaccattccgaatacggtttcctctgcagtcgtgcagcagttgctcgcagctcgggaagtgattgcatacatcctcgagagaaacgcctgcctcctgcccgcttactttgccgtgaccgagatcaggaagttataccccgaaggaaagctgccacattggctccttggaaatttggtgtctgattttgtagacactttccggcctactgcaagaatcaattcgatctgcggaaggtgctcccttctgcccgttgtcaataacagcggcgctatttgcaacagttggaagctggatcctgcaacgcttcgattcccgctgaaaggccttctcccctacgacaaagatctgtttgagccccaaaccgcgctcctgcgatacgtgttggaacagccgtactcacgggacatggtttgcaacatgcttggattaaataaacagacgctgaatattgctcaacataagcaacggtgccccgtgctggaagaccagcttgtggacctcgtcgtgtatgccatggaacggagcgagaccgaagagaaattcgacgacgggggaactagccagcttctttggcagcacctcagttcacagctgatcttctttgtgctctttcagtttgcgtccttcccacacatggtgctatccctgcaccagaagttagccggaagaggtcttatcaaggggagggaccacctgatgtgggtcttactgcaattcatatccggatcaatccagaaaaacgcactagccgatttcttgcctgtgatgaaactctttgacctactgtatcctgagaaggagtacatcccagttccggacattaacaagcctcagtccacgcatgcctttgcgatgacttgcatttggatacatttaaacaggaaagcccagaatgacaatagcaagttacagattcccatcccacattccttgcggttacatcatgagtttctacagcagtcactgcgcaacaagtctttgcagatgaacgattacaaaatcgccctgctgtgcaacgcgtatagcactaattctgagtgcttcactctcccaatgggcgcattggtcgaaacaatttacggaaacggtataatgcgaattcctctgcccggtactaattgcatggcgtccggcagcatcacccctctaccaatgaacctcctcgatagcctgaccgtccacgccaagatgtctctgattcactcgatcgctacccgggtaatcaagctggcgcatgctaaatcctctgtagcattggcacctgctcttgtcgaaacttactcccggctcctcgtctacatggagatagaaagcctcggaattaagggattcatctcccagctgctccccaccgtcttcaaatcccatgcttggggcatactccatactcttcttgagatgttttcttataggatgcatcacatccagccccactacagagtgcagctgctcagtcatctgcatactctggctgccgtcgcacagaccaatcagaaccagttacacctttgcgttgagtcgaccgcactcaggttaatcacagctctcgggtctagtgaggtgcagccccagtttaccagatttctgagtgaccctaaaacagttctgagtgcagagagtgaagaactaaaccgagctctcatactaacgctggcaagggccacacatgtgacagacttctttactggctcggatagtatccagggaacttggtgcaaagacattctccagacaattatgtctttcactccgcacaattgggcctcacacaccttgtcctgtttccctggccctctccaggctttctttaagcagaacaatgtgccccaggagtcgagattcaatttaaagaaaaatgtggaggaagaataccgaaagtggaagagcatgtctaacgagaacgacattatcacccacttctcaatgcaggggtcacctccccttttcctgtgtctcctctggaagatgctgctggaaaccgaccacattaaccagattggctacagggtactggaacgaatcggcgcaagagccctggtagcgcatgtccggacatttgccgacttcctagtgtatgagttctctacttcagcaggaggacagcagctgaataagtgcattgagatacttaatgacatggtgtggaaatacaacattgtcaccctagaccggcttatcttatgcctggcaatgaggagccacgaaggtaacgaggcgcaggtttgttatttcatcatacagcttctgttacttaaacccaatgattttcggaatcgtgtgtccgactttgtcaaggagaactcacctgagcattggttacagaacgattggcacaccaagcacatgaactaccataaaaaataccccgagaaactgtactttgaaggactggcagaacaggtggatccacctgtacaaatccagtccccatacctgcccatctattttggcaacgtatgtttgcgcttcttacccgtgttcgatatcgtgatccatcgcttcctagagctgttacctgtcagtaaatcactcgagacactactcgatcatctggggggactgtataagtttcacgatcggccagtcacatatctctataacacacttcactattacgagatgcacttgagagaccgagcattcttgaagaggaaacttgtccatgccattatcgggtccttgaaagataatcggccacaggggtggtgtctgtcagacacatacctgaagtgcgccatgaacgctcgcgaagaaaacccctgggtcccggatgatacatactactgtcggttgatcggccgattggtagataccatggcgggaaagtcacccggacccttccccaactgcgattggagatttaacgagttcccaaatcctgccgctcacgctttacacgtgacatgcgtcgaactgatggccctggcagtgtcaggaaaggaggttggtaatgccctcctgaacgtcgtcctgaagtctcagccgttggtgcccagagagaacataaccgcgtggatgaacgccatcgggctaattataaccgccctcccagaaccatactggattgtgctgcatgacagaattgtgtcagtcatttccagcccttcactcacaagtgaaacagagtgggtggggtatccttttagactgttcgattttaccgcgtgtcaccaaagttattccgagatgtcttgttcctatacacttgccctggcacacgcagtgtggcatcacagctcaatcggacagctgagcctcattccaaagttcctaaccgaggtcctactgcccattgtgaagacagagttccagttactgtatgtatatcatctggtgggcccttttctgcagcggttccagcaggagcggaccaggtgcatgatcgagatcggagttgcgttttatgacatgctcctcaatgttgaccagtgttcaacccacctgaactatatggacccaatttgcgattttctgtatcacatgaagtacatgttcaccggggattccgtcaaggaacaggtcaagaaaattatttgcaatcttaagccagccctgaaattgagattaagatttataacccatattagcaaaatggagcctgccgctgtgccgccacaggcaatgaattcggggagcccggctcctcaatcaaaccaagtaccagtgagtctgcctgtaacgcagtag

SEQ ID NO: 229831 - DNA, 4095 bp, synthetic construct
  misc_feature 1..4095: note = Description of Artificial Sequence: Synthetic coding sequence
  source 1..4095: mol_type = other DNA
atggagacccaactccagtccatttttgaagaagtggtcaaaactgaggtgattgaggaagcctttccagggatgttcatggatacccctgaggacgagaagacaaaactgattagctgtcttggagcattcagacaattctggggcggattgtcacaagagagccacgagcagtgtatccagtggatcgtgaagttcattcatggccagcactcaccaaaacgtatcagttttctctatgactgcttggccatggccgtggagacagggctgctcccgcctcgcttggtgtgcgagagccttatcaactcggacacattggaatgggagagaactcagctttgggcactcaccttcaagctcgttcgcaagattataggcggagtggactacaagggtgtaagggaccttttaaaagtaattctggagaagatcctcactataccaaatacagttagcagcgctgtggtacagcagctgttagcggcaagagaagtgatcgcctacatcctggagagaaatgcctgcctactgcccgcttactttgcagttaccgagattcggaaactgtacccggaggggaagttgccccattggttactggggaacctggtcagcgacttcgtggataccttcagaccaacggctcggattaacagcatatgcggtcggtgtagccttctccctgtcgtaaacaatagcggcgcaatctgtaatagctggaagctggatcctgctaccttacggttccctttaaaaggactgctgccttacgataaggatttgtttgaaccacagacggcccttctccgttacgtcctggagcagccgtacagccgcgatatggtatgcaacatgctgggcctgaataagcagcataaacagcgctgtcccgtgctggaagaccagctggtggatttggtggtctatgctatggaacgctccgagacagaggaaaagttcgacgacggcggaaccagtcagcttctgtggcagcatctttcctcgcagttaatctttttcgtgctgtttcagttcgcctcttttccacacatggtactatcacttcatcagaagctcgctggaaggggccttatcaaaggtagggaccacctaatgtgggtcctactgcagttcatcagtggtagtatccagaaaaatgccctggccgatttcttaccagtaatgaaactcttcgaccttctctatcccgaaaaggaatacatccccgtgccagacatcaacaaaccccagtctacccacgccttcgccatgacttgtatttggatccacttaaaccggaaagcccagaacgacaactccaaactgcaaatccccataccacatagcctgcggctgcaccatgagtttcttcaacagtctctgcggaataagtctctgcaaatgaacgattacaaaattgcactgctctgcaacgcctactctaccaactccgagtgcttcactctgcctatgggagcactggtcgaaaccatttacggcaatggaatcatgcggatcccattacccggaactaactgtatggcctcggggtcaatcacgccactgcccatgaacctgctggattctctgaccgtgcatgcaaagatgagccttattcattctatcgcgaccagggtcatcaagctggctcatgcgaagagctccgttgctctcgccccagctttggtcgagacctactctcggctccttgtctacatggagatagaatctttggggataaaaggatttatctctcaactccttccaacagtgttcaaatcgcacgcctgggggatacttcacaccctccttgaaatgttctcctaccgtatgcaccacatccagccccattatcgggtgcagctgttaagccaccttcataccctcgcagccgtggcacagactaaccagaatcaactgcatctgtgcgttgagtcaaccgccctgaggctcatcaccgcattgggttcaagtgaggtgcagccccagtttaccaggttcctttcagatcctaagacggtacttagcgccgaatccgaggaactgaatagagcactaattctcacgctagcacgggctacacacgtcaccgatttcttcactggcagcgacagcatccagggcacctggtgcaaggacatccttcagactattatgtcttttacacctcacaactgggcctcccacacactttcatgttttcctggacctctccaagccttcttcaaacaaaataacgtcccccaggagtctagattcaatctgaaaaagaacgtagaggaggaataccgtaagtggaaatctatgtccaacgagaacgatattatcactcatttctccatgcaggggtctccccctcttttcctgtgccttctctggaaaatgttacttgagactgaccacataaatcaaattggctacagggtgctagaacgtatcggggcacgtgctttggttgcccacgttaggaccttcgctgactttctggtgtatgaatttagtacttcagctggaggacagcagctgaataaatgtattgagatccttaatgacatggtctggaagtacaacattgtaactctcgaccgcctaattctttgccttgctatgagatcccatgaggggaatgaagcgcaggtgtgttattttatcattcaattgttgctgctcaaaccgaacgactttcgtaatcgagttagcgattttgttaaggagaattccccggaacattggctgcagaatgattggcatacgaagcacatgaattatcataagaagtaccctgaaaaactgtacttcgagggcttagccgaacaggtcgatcccccagtgcagatccagtccccctatctgccaatttacttcgggaatgtctgcctgcggttcctgccggtttttgacattgtcatccacagattcctcgagcttcttcccgtctctaaatccctcgaaaccttattggatcatctgggcggtctatataaatttcacgatagaccagtgacctatttgtacaacacactgcattactacgagatgcatctgagagatcgtgccttcctgaaacggaagctggtgcacgctataatcggcagcctcaaggataatcggccacagggctggtgcctctctgatacatatctcaagtgtgctatgaacgcccgtgaagaaaatccctgggtgccagatgacacgtattattgcaggctgatcggccgtctagtagatacgatggccggaaaatcacccggaccttttcctaactgtgactggagattcaacgagtttcctaatcctgcagcccatgccctgcatgtgacctgtgtcgagctaatggcactggcagtgagtgggaaggaggttggcaacgcacttctgaacgtggtattaaagagccaacccctcgtgcccagagagaatatcacagcttggatgaatgcaatcggtttgattatcaccgccttgcctgaaccatactggatcgtgctccacgatcggatcgtctcagtcatctcttctccatctctgacctccgagaccgaatgggttgggtacccctttcgactatttgacttcaccgcctgtcatcagtcttacagcgagatgagttgttcctatacgctggctcttgcacatgccgtgtggcaccattcctctattgggcagctttctctgattcccaagttcctcactgaggtgttgcttcccatagttaagacggagtttcaactcctctacgtgtatcatcttgtgggtcccttcctgcaaagattccagcaagagaggactcgctgtatgattgagattggggtagccttctatgacatgctgttaaacgtggatcaatgctccacacatctgaactacatggaccccatctgtgacttcctgtaccatatgaaatacatgttcacgggcgactcagtgaaggagcaagttgagaagataatttgcaaccttaagcctgccctgaagctgcgactgagattcatcacacatatcagtaaaatggagcccgcagcagtgcctccacaagccatgaattccgggtcacccgcacctcaatctaaccaagtggacacacttacgtag

SEQ ID NO: 229832 - DNA, 4107 bp, synthetic construct
  misc_feature 1..4107: note = Description of Artificial Sequence: Synthetic coding sequence
  source 1..4107: mol_type = other DNA
atggagacccagctccagagcattttcgaggaagtggtgaagacagaggtgattgaggaagcattcccaggaatgtttatggacaccccagaagatgaaaaaaccaaattaatttcatgccttggggcttttcgccagttctggggtggcttgtctcaggagtctcacgagcaatgcatccagtggatcgtgaagttcatccatggccagcactcgccgaagaggatcagcttcctatatgattgtctagctatggcggttgagacgggtctgctgcctcctaggctggtctgtgagtctctgatcaattctgatacactggagtgggaaaggacacaactttgggcactcaccttcaaactggtgcggaaaattatcgggggagtagattataagggcgtgcgggacctcctgaaagttatcttagagaaaattcttactatccccaatactgtctcttcggctgtcgtgcagcagctgctggccgctcgagaggtgatcgcatacattctggagagaaatgcatgcctgctgccagcctacttcgcggtgacagagatccggaagctctatcccgaggggaaactcccgcactggttattaggcaatttggtcagcgattttgtggatacattccgccctacagctcgcattaactccatttgcgggaggtgctcactattacctgtcgtgaataactcaggcgcaatatgcaactcttggaagctggatccggctaccttaagatttcccctgaaagggctgctgccctatgacaaggacctgttcgagccgcagaccgcgctgctacgatacgtcttagaacaaccgtacagtagggacatggtgtgtaacatgctgggcctgaataagcagcataagcagcgctgtccggtgttagaggaccaacttgtggatctggtagtgtacgccatggagcgctctgaaactgaagagaagttcgatgacggaggaacatctcagcttctatggcagcacttatccagtcagctgatcttcttcgtgctcttccagttcgcatccttcccgcatatggttctgagtctgcaccagaagctagcaggccgaggattaattaaggggagagatcatctgatgtgggtgttgctgcaattcatttcaggcagtatccagaagaacgcactggcagatttcctccccgtcatgaaactattcgacttactgtacccggagaaggagtacatccccgttcctgatattaacaaaccccaatccacccacgcattcgctatgacctgcatctggatccacctcaatagaaaggcgcagaatgacaattcgaaactgcagatcccgatcccccacagtctccgtctgcaccacgagtttctccaacagtcattgaggaataaatcactgcagatgaatgattacaaaatcgccctactctgcaacgcttatagtaccaattctgaatgttttaccctgccaatgggagcattagttgagacgatttatggtaacggaattatgcgcatccccctgccaggcacaaactgtatggccagcggcagcattacgcccttgccaatgaatttacttgatagtttaaccgtgcatgctaagatgtctttgatacatagcattgccaccagggtaatcaagctcgcccacgctaaatcatccgttgcactggccccagcgctggttgagacctatagccgtcttctcgtttacatggaaattgaatccctgggtatcaaaggcttcatatcccagctgttacccacagtctttaagtctcatgcttggggcattcttcatactctgcttgaaatgttcagctatcgtatgcaccatattcagcctcattatagggttcagctgttgtcacatctgcacactctcgctgcggtggctcagactaaccagaatcagttgcacctttgtgtagaaagtacagctctgcggctgattaccgccctgggtagctcagaggtgcagccccagttcaccagattcctgtctgaccctaagacagtactgtccgccgagagtgaagaactgaaccgcgctcttattctgaccctggcacgggctacccatgtaaccgacttcttcacaggatctgactccatccaaggtacatggtgtaaggacattcttcaaacaattatgagcttcaccccccataattgggctagtcatacgctgtcctgtttccctgggccactgcaagccttttttaaacagaataacgttccccaagaaagccgctttaacctgaagaaaaacgtagaagaggagtaccggaaatggaagagtatgagcaatgaaaacgacatcattacgcatttttccatgcagggatctcccccactgtttctgtgccttctgtggaaaatgctgctggagacggatcacattaaccagataggctatcgggtcctggaacgcataggggcaagagcgttggtagctcacgtgagaacctttgccgattttctggtgtatgagttttctacaagtgctggtggccagcagctgaacaagtgcattgaaatactgaacgatatggtgtggaagtacaatattgtgacgttggaccggcttatcctgtgtctcgccatgcgcagtcacgagggcaacgaagcccaggtgtgttattttatcatacagttgctactcctgaagcccaacgacttccggaatagagtgtccgactttgtgaaagaaaattccccagagcattggttgcagaacgactggcataccaaacacatgaattatcataagaaatatccggagaaactgtacttcgaaggactggccgagcaggtcgacccacctgtgcagatccagagcccttatcttcctatttatttcggaaacgtgtgcttgaggttcctgcccgtattcgatatagtcattcatagattcctagaactcctgccagtgagtaagagcctggagacattgctcgaccacctgggtggcctgtataagtttcatgataggcccgtgacatacttgtacaacaccctgcattactatgagatgcacctgcgggacagagccttccttaaacggaagctagtgcacgctattatcggctccctgaaggacaatcgtcctcagggctggtgcctctcagatacgtacctgaagtgcgcaatgaacgccagggaggagaacccatgggtgcccgacgacacttattactgtcgtctcatcggcagactggtcgacaccatggcaggtaaaagcccaggcccatttcctaactgcgactggagatttaatgagttccccaaccccgctgcacacgcacttcatgtaacttgcgtggaactgatggccctggccgtctctgggaaagaggtgggcaatgcactacttaatgttgttttgaaatcgcagcctcttgtccctagagaaaacattaccgcatggatgaatgcgataggcttgattatcaccgcgctgcccgagccctattggattgttctccacgatagaatcgtaagtgttattagctctccatctcttacatccgagactgagtgggtcggctatcccttccgactgtttgatttcacagcctgccatcagagctactccgagatgtcttgctcctacaccctggctcttgcacacgcagtgtggcaccacagtagtattggtcagctgtccttaattcccaagtttctcaccgaagtcctcctgccaatcgtgaaaactgaatttcagctgttgtacgtttatcacctggtgggacctttcctgcaacggttccagcaagagaggacccgatgtatgattgagattggagtggcattctacgacatgttactcaatgtcgatcagtgttccactcaccttaattacatggacccgatatgtgacttcctctatcacatgaaatacatgttcacgggggactctgttaaggaacaggttgagaagattatttgtaacctgaaaccagcacttaaactccgtctgcggtttattacccatatatctaaaatggaacccgcagccgtccccccacaggccatgaactctggttcacccgcaccacaatctaaccaagtgccagtctctctgccagtcacccaatag

SEQ ID NO: 229833 - DNA, 4125 bp, synthetic construct
  misc_feature 1..4125: note = Description of Artificial Sequence: Synthetic coding sequence
  source 1..4125: mol_type = other DNA
atggagacccagttgcagagtatctttgaggaagtggtgaaaacagaggtgattgaagaggcatttccaggcatgtttatggacactcccgaagatgaaaaaaccaaactgataagctgccttggagcattcagacagttttggggcggactgtcccaagaaagccacgagcagtgcattcaatggatcgtgaaatttatacacggtcagcactccccgaagcggattagctttctgtatgactgcctggcaatggctgtcgagacaggactgctgcctccacgcctggtgtgtgagtctctgatcaacagtgataccctcgagtgggagagaacccagttgtgggctcttacattcaagctggtgcggaagattataggcggagttgactacaaaggcgtgagggatctgttgaaggtcatcctcgaaaagattcttacaattcccaacaccgtgagttccgctgtggttcaacagttactagccgcaagggaagtgattgcctatatcctagagcgcaatgcctgtctactccccgcttatttcgccgttactgagattcgcaaattgtaccctgagggcaagctacctcattggctccttggaaatctagtgagcgattttgtcgataccttccgaccgactgctcgcattaatagcatctgtgggaggtgctccctcttacctgtcgtcaataactcaggtgccatctgcaactcttggaaactcgatcccgcaaccctccggttcccactgaagggcctcctgccctacgacaaagatctgttcgagcctcagacagccttgttacggtatgttttagaacagccatatagtagagacatggtgtgtaatatgctcggactgaacaaacagcttatttctgcccttcaacacaagcaacgttgtcctgtcttggaagaccaactggtcgacttggtggtgtacgctatggagcgcagcgaaacagaagagaagttcgacgatggcggaacaagtcaattactgtggcagcatttgtcatcccaactgatattcttcgtcctcttccagtttgcgtctttcccccacatggtgctctcattacaccagaagctcgctggcagaggcctgatcaaagggagggaccacttaatgtgggtcctgctccagttcatcagcggctctatccagaaaaatgcactcgccgacttcctgcctgttatgaagctgtttgatttgctttaccctgaaaaggagtatatccccgtacccgatataaacaagccacagagcacgcacgcattcgctatgacttgtatctggattcatttgaatcgcaaggcgcaaaatgacaacagtaaactacagattccaataccccacagcctccggctccaccacgagtttctgcagcaaagtctgcggaacaagagtctgcaaatgaatgactataagatagcattgctctgcaacgcctactccactaatagtgagtgcttcacgctccctatgggagctctcgtggagaccatttacggaaatggtatcatgcgcatccccctgcctggaaccaattgtatggcctctggctccatcactccattaccgatgaacttacttgatagccttacagtgcatgcaaagatgtcattgatccatagcatcgcaacccgggtgattaaactggcccatgcaaagagctcagtggctttagcgcctgccttggtggagacctacagtcgcctgctcgtgtatatggaaattgagagtctgggcatcaagggttttattagccagttgctgcccaccgttttcaaaagccacgcatggggcatcctccatacgctgcttgaaatgttctcttacaggatgcaccacatccagcctcactatcgcgtccaactgctgtcacacctccatacgctagcggctgttgcccagacaaaccagaaccagttgcatctgtgtgtagagtcaacagcactacggcttatcaccgccctcggatcctcagaggtccaaccccaattcacccgcttcttaagcgaccccaaaacggtcttatccgccgaaagtgaggaattgaatcgcgctctaatccttacgctcgcaagagccacgcatgtcacggatttcttcaccggcagcgattccattcaaggtacgtggtgcaaagatattcttcaaacaatcatgtcctttaccccacacaactgggcatcccacacactgagctgttttccaggccctctgcaagccttttttaagcaaaataatgtcccgcaggagtctcgattcaatcttaaaaaaaatgtcgaggaggaatatcggaagtggaagtcaatgtcgaatgaaaatgatatcatcacccacttctcaatgcaaggttcacctcccctgttcctgtgcctgctgtggaagatgttgctcgagaccgaccatataaatcagatcggatacagggtccttgagcgtatcggagctagagctttggtggcacatgtgcggacgtttgccgacttccttgtctacgaattctctacttctgccggagggcaacagctgaacaaatgtatagagatccttaatgatatggtgtggaaatacaatatcgtcacattagatcgactgattttgtgcctggctatgcgtagccatgagggaaatgaagctcaggtctgctactttatcattcaactgctgctgttgaaacctaatgactttagaaacagggtctcagatttcgtcaaggaaaacagccccgagcactggttacagaacgactggcataccaagcatatgaattatcacaagaagtatcccgaaaagctgtactttgagggtctagcagaacaggtggatcctcctgtgcagatccaatccccttatctgcctatctattttggaaacgtctgtctgagattccttcccgtctttgatattgtcatccatagattcctggagctgctgcccgtgagcaagagccttgagacgctgctcgatcatctaggtggcctgtataaatttcatgatagacccgtgacctacctatataacactctgcactattacgagatgcaccttcgggaccgcgcatttctcaaacgtaaactggtccatgccatcatcgggtcactgaaagacaatcgaccacaggggtggtgtctcagtgatacttatttgaaatgtgctatgaatgccagagaagagaatccctgggtgccagacgatacttattactgtagacttattgggaggttagtggacaccatggccggaaaaagtccaggacccttccctaattgcgactggcggttcaacgaatttccaaatcccgcagcacacgccctccatgttacatgcgtggagctcatggccttagccgttagcggcaaagaggtgggtaacgctctgttaaacgtggtgctgaaatcacagcccctcgttccaagagagaacattaccgcttggatgaatgccattgggctcattatcacagctctcccagagccctactggattgtgctgcacgaccgcatcgtgtcagtgatatcatctccctctttaacctcggaaactgaatgggttggctacccttttcggctgttcgactttaccgcatgccaccagtcttattccgagatgtcctgttcctatacgctcgctctggcgcacgctgtatggcaccactccagcattggacagctaagtttaataccaaaatttctgactgaggtccttctccccattgtaaagaccgaatttcagctcctatacgtctaccatctggtcggcccattcctccagcgcttccagcaagagcggacaaggtgtatgattgaaattggggtggccttctatgacatgctacttaatgtcgatcagtgctccacgcacttgaattatatggatccaatctgcgactttctctaccatatgaaatacatgtttactggagatagcgtgaaagaacaggtggaaaaaattatctgcaatctaaagccagctttgaaactgagactcaggttcatcacccacatttcaaagatggaaccagccgcagtgccaccccaggccatgaatagcgggtcccccgctcctcagagtaatcaggtgcccgtgtctctgcccgtgacgcagtag

SEQ ID NO: 229834 - DNA, 114 bp, synthetic construct
  misc_feature 1..114: note = Description of Artificial Sequence: Synthetic coding sequence
  source 1..114: mol_type = other DNA
atggaaacccagcttcagtccatcttcgaggaggtagtaaagactgaagtgatagaggaggcttttcctggcatgtttatggacacgcctgaggacgaaaaaagtagcaagtag

SEQ ID NO: 229835 - DNA, 132 bp, synthetic construct
  misc_feature 1..132: note = Description of Artificial Sequence: Synthetic coding sequence
  source 1..132: mol_type = other DNA
atggagacccagttgcagtccatttttgaagaggtggtgaaaaccgaggtgatagaagaggcattcccgggtatgtttatggatactcccgaagatgagaaaaccaaactttttatggaaatggagctgtag

SEQ ID NO: 229836 - DNA, 1428 bp, synthetic construct
  misc_feature 1..1428: note = Description of Artificial Sequence: Synthetic coding sequence
  source 1..1428: mol_type = other DNA
atggagacgcagctgcagagcattttcgaagaggttgtcaagaccgaggtgattgaagaagcattccccggtatgttcatggacacgccagaagatgagaaaaccaagctcatttcgtgcctcggcgcatttagacagttctgggggggtttgtcacaggaatcacacgaacaatgcatccagtggatcgtgaaattcatccacggacagcacagcccaaagcgtatctctttcctgtacgactgtctggccatggctgtggagacggggctgctccctccgcgactggtctgcgaaagcttaatcaatagtgataccttagaatgggagagaacgcagttgtgggccctcacctttaagctggtgcgtaagataatcggcggtgtcgattataagggagtccgtgacctgttgaaggtcattctggaaaaaatcctgaccattccaaacactgtgtcctccgcagtcgtgcaacagctgttggccgctcgggaagttatcgcctatattctagagaggaacgcttgcctattgcccgcttattttgccgtgaccgaaataaggaagctctaccctgaaggaaagctgccccattggctgctcggcaacctggtctccgattttgtagacaccttcaggcccacggcgaggattaacagcatatgtggtaggtgctccttgctgcccgttgtcaacaattccggagcaatctgtaacagctggaagctggaccccgctactctcaggtttccgttgaaaggcctgctgccatatgacaaggacctgtttgagcctcagacagcacttctgcggtacgttctggagcaaccttactcgagagacatggtttgtaacatgctcggcttgaacaagcagcacaaacagcggtgtccggtactcgaggaccagcttgtggacctggtggtgtatgccatggagcgtagcgaaaccgaggaaaagtttgacgacgggggaacctctcaattgctgtggcaacacctgagctctcaattaattttctttgttctgttccagttcgcctcctttccacatatggttctgtcactccatcagaaattggccggaagagggctgatcaaggggagagaccacctgatgtgggttttgttgcagttcatatctgggagtatacaaaaaaatgccctcgcagatttcctccctgtgatgaaactttttgatcttctctatcccgagaaggaatacatcccagtgccagatatcaataaacctcaaagcactcacgctttcgccatgacctgtatctggatccatctgaatagaaaagcccaaaacgataacagcaagctacagatacccattcctcattctctgaggctgcaccacgaaagtgccttcgccaactgctttcaaatcacctgcatgggcgatctgacccacaccccctag

SEQ ID NO: 229837 - DNA, 429 bp, synthetic construct
  misc_feature 1..429: note = Description of Artificial Sequence: Synthetic coding sequence
  source 1..429: mol_type = other DNA
atgcaccatatccaaccccactacagagtgcagttgctttctcacctgcacaccttggcggctgtcgcccaaaccaaccaaaatcagctgcacttgtgcgttgagtcgacagctctgcgactcattaccgccctaggcagctctgaggtgcagccccagttcacacggttcctatccgatccaaaaacagtgctctcagccgagagcgaggagctaaatcgagccctcatcctcactctagctagagcaacacacgtgacagacttcttcaccggatccgactctattcagggcacatggtgcaaagatatcctgcagacaattatgagctttacccctcacaactgggcttcccatactctgtcttgctttccaggccctctccagacactgcttatactgggagagctcgccttacggaagacctag

SEQ ID NO: 229838 - DNA, 2661 bp, synthetic construct
  misc_feature 1..2661: note = Description of Artificial Sequence: Synthetic coding sequence
  source 1..2661: mol_type = other DNA
atggaaacacaactgcagagtatcttcgaagaggtggtgaagacggaggtgatcgaggaggcttttcctgggatgtttatggacacacccgaggacgagaaaaccaaactgattagctgcttaggcgctttcagacagttttggggtgggctgagccaggaatcgcacgaacaatgcatccagtggatcgtaaagttcatccatggccaacatagccccaagagaatttcatttttatatgactgcctggcgatggccgtcgagaccggcctgctccccccacgcctggtctgcgaatctctgattaactccgacactctggagtgggagcgcacccaactgtgggccctgacattcaagcttgtgcggaaaatcattggtggggtcgactataaaggagtcagggatttgctgaaagtgattttagagaaaatcctcacaattcctaatacggtgagttcagctgtcgtccagcagctgctggccgctcgcgaagtgatagcgtatattctggagagaaacgcctgtctcctgcctgcttacttcgcggtgacagaaatccgaaaattgtatccagagggtaagctgccccactggcttctgggcaacttggtttctgactttgtcgataccttccggccaaccgccaggatcaattccatttgcggcagatgctccttgctgcctgttgttaacaacagtggagcaatctgtaattcttggaagctggatccggcaactctccgattcccactgaagggcctcctgccatatgataaggatctgttcgagcctcagactgctttgctgcgctatgtactggagcagccgtattcccgcgatatggtttgtaacatgctgggcttaaacaaacaggtcctgaaaatcttcaaacacaagcagcgctgtcctgtgctggaggatcaacttgtcgatctcgttgtttacgcaatggagcggagcgaaacagaagagaagttcgacgatggcggtaccagccagctcctctggcagcaccttagttcccagctcattttttttgtgctgtttcagtttgcttcatttccccatatggtacttagcctgcaccaaaaactcgctggcagggggctcataaagggtcgagaccatttaatgtgggtgctgcttcagtttatctctgggtccatccagaagaatgcccttgctgacttcctgccggttatgaagctgttcgacttgttatacccagaaaaagaatacattccagttccagatatcaacaagccgcagtcaacccacgccttcgcaatgacctgcatttggattcaccttaaccgtaaagcccagaatgataattctaagttgcagatcccaatccctcatagcctgaggctgcaccacgaatttctgcagcagagcctcagaaacaaaagcctgcagatgaacgattacaagatcgccctcctgtgcaacgcctacagtacaaattctgaatgcttcaccctaccaatgggcgcactagtggagactatatacgggaatggtattatgagaattcccctaccaggaactaactgcatggccagcggatcaatcacccccctgccgatgaacctgctggactccctgaccgtgcatgctaaaatgtctctcattcacagtattgctacaagagttataaaactggcccatgcgaaaagctccgtcgccctggccccagcgctcgtggaaacgtactccagattgctggtatatatggagatcgagtcgcttggaatcaaagggttcatcagtcagcttctccctactgtttttaagtcgcacgcttggggtatcctgcataccctcctagaaatgttttcttatagaatgcaccacatacagccccattatcgggtacagcttttgtctcacctgcacacgctggcagctgtggcccagacaaaccagaaccagcttcacctctgtgttgagtcgacagcattaagacttatcaccgctctaggatccagtgaggtgcagcctcagttcactagatttctctccgatccaaagaccgtgctctcagccgaatccgaagagcttaacagggccctcattctcaccttagccagggcaacacacgtgacggatttctttacaggtagtgacagcattcaggggacatggtgtaaagacatcctccaaaccattatgagtttcacgccacacaactgggcttcccatacactgtcatgttttccagggcctcttcaggcctttttcaaacagaataatgtcccgcaggagtcaagattcaatctgaagaagaacgtagaagaggaatatagaaaatggaaatccatgagtaacgaaaatgatatcattacacacttctccatgcagggctcccctccactgtttctgtgcttgctctggaagatgctcctggaaactgatcatataaatcagatcgggtaccgagtcctcgagcgtattggtgctagggcactcgtagcccacgttcggacttttgccgactttcttgtctatgaattctcaacctctgctgggggacagcaactgaataagtgcatcgagattcttaatgatatggtgtggaagtacaatatagttactctggacagactgattctctgtttagtcagaattaataccttcctgtccctattctcatag

SEQ ID NO: 229839 - DNA, 3030 bp, synthetic construct
  misc_feature 1..3030: note = Description of Artificial Sequence: Synthetic coding sequence
  source 1..3030: mol_type = other DNA
atggagcgcagcgaaacagaagagaagttcgatgatggtggaacctctcagttactgtggcagcacctgtcctctcaactgattttcttcgtgctattccagtttgcctcattcccacacatggtgctgtccctacatcagaaatacattcccgtccccgatattaataagccccagtccacccatgcatttgccatgacttgcatctggatccatcttaatcgtaaggcccagaacgacaattctaaattgcaaatcccaattccccatagtctaagactccatcacgagtttttgcagcaatctctccggaacaagagtctgcagatgaatgactacaaaattgccctgctgtgcaatgcatattctacaaatagcgagtgtttcacgctacctatgggggctctggtggaaaccatatacggcaacgggattatgaggatccctctcccaggcacaaactgcatggcaagcgggagcattactcccctgccaatgaatctcttggatagtctgaccgtgcatgccaaaatgtccctgatacattctatcgctacccgcgtaatcaaactggcgcacgccaaaagttctgttgcgctcgccccagctttggtcgagacttactcccgactacttgtatacatggaaatcgaaagcctgggaatcaaggggtttatttcccagttgcttccaaccgtgttcaaatctcacgcgtggggcatccttcacactctgctcgagatgttctcctatcggatgcaccatatccagccacactaccgagtgcaattattgtctcacctgcataccttagccgctgttgctcagaccaatcaaaatcagttgcatttgtgcgtggagtctacagctcttaggctgattaccgcccttggatctagcgaggtacaaccacagtttaccaggttcctgagcgatcccaagaccgtcctcagcgctgagtctgaggagctcaaccgcgcactcattttgacactggccagagcgacccacgtgacagatttcttcaccggctctgatagcattcagggaacctggtgtaaggatattctccagactattatgagctttacaccgcacaattgggcctcccacacacttagctgctttccaggcccactccaggctttctttaaacagaacaatgtgccgcaggagagcaggttcaacctcaagaaaaacgtggaagaggagtatcgaaagtggaaatccatgtccaacgagaacgacatcataacccatttctccatgcagggctctcctcctttgtttctgtgccttctttggaagatgctactcgagacagatcatatcaaccaaattggatacagggttctggagaggattggcgcacgagccttggtggcccatgtgaggacatttgccgactttctcgtgtatgaattttctactagtgctggcggtcagcaacttaataaatgtattgagattctgaacgacatggtgtggaagtacaacatcgtcacactcgacagactcatcctctgccttgccatgaggtcacacgaggggaatgaggcacaagtgtgttatttcattatccaactgctgcttttgaagccaaatgacttcaggaatcgcgtaagtgattttgtgaaagaaaattcccccgaacactggcttcaaaatgactggcacacgaaacacatgaattaccataaaaaatatcctgaaaaactttattttgagggcctcgccgagcaagtggaccccccagtgcagatccagtcgccctacctccctatttacttcggcaacgtgtgcctgaggttcctccccgtctttgacatcgtcatccatcgctttttagagctcttgcctgtgtctaagagtctcgaaactttgctggaccacctaggaggcctgtacaaattccatgacagaccagtgacctatctatacaacacattacactactacgagatgcacctccgcgaccgcgctttcctgaagagaaagctcgtacacgcaatcatcggatctctgaaggacaataggccccaaggatggtgcttgtctgacacttaccttaagtgtgctatgaacgcaagggaagaaaacccttgggttccagatgatacgtactactgtaggctgattggccgtctggtcgacacaatggccggaaaaagcccaggaccttttccaaattgcgactggagatttaatgaattccctaatccggcagcacatgcgctgcacgtgacatgtgttgagctgatggccctcgccgtgtctgggaaggaagtcgggaacgctctgctgaatgtggttctcaagtcacagcccctcgtgcctcgcgaaaacatcacagcttggatgaatgccatagggcttatcatcactgccctgccagaaccttactggattgtactgcacgataggatcgtctctgtaatctctagcccttcccttacttcagagactgagtgggttggatacccctttaggttgtttgattttaccgcgtgccaccaatcctattccgaaatgtcatgttcctatacactggcactggcccatgctgtatggcaccatagctcgattggccaactctccctgattcctaaatttctcacggaagttcttctgcccatcgtgaagaccgagttccagctcctttatgtgtaccacctggtgggcccatttctgcagcgattccagcaggagcggacccgctgcatgatcgaaatcggagtggctttctacgacatgctgctaaacgtcgaccaatgttccacccacctaaactacatggatccgatctgtgacttcctctatcatatgaagtacatgttcaccggggacagtgttaaagaacaggtcgagaaaattatctgtaatctgaaaccagcccttaagctgcggttgcgatttatcacccacatcagcaagatggagccggctgcagtgccgcctcaggcaatgaattcaggaagccccgctcctcaaagcaatcaagtacccgtgtccctgccagtgacccagtag

SEQ ID NO: 229840 - DNA, 2970 bp, synthetic construct
  misc_feature 1..2970: note = Description of Artificial Sequence: Synthetic coding sequence
  source 1..2970: mol_type = other DNA
atgaaggtggtcaacctcaaacaggcaatcctccaggcttggaaggagaggtggtcagactatcaatgggctattaatatgaagaaattcttcccaaagggggctacatgggatatcctcaacttagccgacgctctgctggaacaagccatgattggaccctcacctaacccgctcatcttgtcttacctcaagtacgcaatctcgagccagatggtgagctactccagcgtactaacagccatcagcaaattcgatgacttctccagagacctctgcgtgcaggctctgttggacatcatggacatgttctgcgacaggctgtcatgccatggaaaagccgaagagtgcatcggtttgtgtcgcgctctgctgagtgctctccactggttgctgcggtgcacagcagcaagcgctgagcgactgagagagggcctggaggccggtacacccgctgccggagagaaacagcttgccatgtgtctgcagcgcctggaaaagacgctcagttcaacaaaaaatagagccctcctgcatatagccaaacttgaggaagcttcttcttggaccgcgatcgaacattcattgttaaagctcggggagatcctggctaacctttcgaatccccagctccggagccaggcagaacagtgtggtaccttgatccgatctatcccaacgatgctttccgtccacgcggaacaaatgcataagactggtttcccgaccgttcacgctgtgattctgctggaaggaacaatgaatctgaccggtgagacccagtccctggtcgaacaactgacaatggtgaagagaatgcagcacatcccaaccccactcttcgtcttggagatctggaaagcctgtttcgtaggtctgatcgagtctccagaagggacagaagagctcaaatggacagcgttcacttttctgaagatccctcaagttctggtgaagctgaagaaatacagccacggggacaaagattttacggaggatgtgaattgcgctttcgagtttcttctcaaattaacaccactcctggataaggccgaccaaaggtgcaattgcgattgtactaactttttactccaggagtgcggtaaacaggggctgctctccgaggcctcagtgaataaccttatggccaagcgcaaggccgacagagaacatgcaccccagcaaaagtctggagaaaacgcaaatatccaaccaaacatccagttaatcctgcgagccgaaccaacagtgactaacatcctgaagaccatggatgccgatcatagcaaatctcctgagggactgctcggcgtgctgggccacatgctgagtgggaagtctctagacctgctccttgccgcagctgctgctactggcaaactgaagagttttgccagaaagttcataaatctaaacgagttcaccacatacggctccgaagaatctaccaagccagcctctgtccgtgcactgctgttcgatatctcattcctgatgctttgtcacgtggcccaaacatatgggagcgaggtcatcctgtctgagtccaggaccggagctgaggtgcctttctttgaaacctggatgcagacctgcatgcccgaggaaggcaaaatcttaaacccagaccacccctgtttcaggccggactccaccaaagtggagtccttagtggccttgctaaataacagctccgagatgaaactcgtgcagatgaagtggcatgaggcatgcctatctatttcagccgctatcctggagatcctcaacgcttgggaaaatggagtgctggcttttgagtctatccagaagatcactgataacattaaaggcaaagtctgctccctagcggtctgcgcagtggcatggctggtggcccatgtccggatgctgggactagatgaacgggaaaaatctctgcagatgattagacagttggctggaccattattttctgagaacacactgcagttctacaatgaaagggtggttataatgaatagcatactcgaacggatgtgtgccgacgtactgcagcagacagctacacaaatcaaatttccctcaactggcgtcgacacaatgccgtactggaacctgctgccacctaagagaccgataaaagaagtccttactgatatctttgccaaagtccttgaaaagggatgggttgactcacggagtatccacatctttgatacgctcttgcatatgggtggggtttactggttttgcaataatctcatcaaggagcttcttaaagagactcgtaaggaacacacattgcgggctgtggagctgttatatagtatcttctgtttggatatgcagcaggtaactctcgtgctattgggtcacattctccccggactacttaccgactctagtaaatggcatagtctcatggatccgccaggcacggcacttgcaaagcttgccgtgtggtgcgccttgtcaagttactcgtcgcacaagggccaagcctccacaagacagaaaaagaggcaccgtgaggatattgaggattatatctctctgttccccctggatgacgtgcaaccgagcaagctgatgcggttactcagcagtaatgaggatgatgctaatattctgtctagccctacagaccgcagcatgagtagttcactgtctgcatcccagcttcacacagtgaatatgcgggatcccttaaatagagttctcgccaatctctttctgcttattagctcaattctgggcagtcgcaccgctggaccacatacccagtttgtgcaatggtttatggaagagtgtgtcgactgcctggagcagggagggaggggtagtgtgctgcaattcatgccattcactacagtttctgagctggtgaaagtctccgccatgagctctcctaaggtagtcctcgccattactgacctgagtctgcccctgggacgacaagtggcggctaaggctatcgctgctctctag

SEQ ID NO: 229841 - DNA, 2970 bp, synthetic construct
  misc_feature 1..2970: note = Description of Artificial Sequence: Synthetic coding sequence
  source 1..2970: mol_type = other DNA
atgaaagtggtgaacctcaaacaggcgatactacaggcatggaaagagagatggagtgattatcagtgggccataaatatgaagaagttctttcccaaaggcgctacctgggacatcttgaatctggccgacgcccttctcgagcaggccatgatcggacctagcccgaatcctctgatcctctcgtacttaaaatacgcaatttcaagtcagatggtcagttactcaagcgtccttactgccataagcaagttcgacgatttctctagggatctttgtgtgcaggcactgcttgacattatggacatgttttgtgatcggctgtcatgtcacggaaaggcggaagagtgcatcgggctgtgccgcgcactactgtcagctctgcattggctgctgcgctgtaccgcggcttccgccgaacggctgcgtgagggcctcgaggcagggacccccgctgccggtgagaaacagcttgcaatgtgtctacagcgcctcgagaagacattgagctctactaagaaccgcgctttgttgcacatcgctaagctagaggaggcctctagttggactgcgatcgaacactctctcctaaagctgggcgagattctggccaaccttagcaaccctcagttgcggtcacaggccgagcaatgtggcaccctgattcgctcaatcccgactatgttgtcagtgcatgctgaacaaatgcacaaaacgggcttcccaaccgtgcatgctgtgattctgttggaaggcaccatgaatctcaccggtgagacccagagtctggttgagcagctcactatggtgaaacgcatgcagcacatccctacccccctcttcgtccttgagatctggaaggcctgttttgttggccttatcgagagccccgagggcactgaggagctcaaatggaccgccttcactttcctgaagattccacaggtcctggttaagctgaagaaatactcgcacggcgacaaggattttacagaagatgtcaattgcgcgttcgagtttttgcttaaacttactcctttattggataaggcagaccagcggtgcaattgcgactgtaccaacttcctgttgcaagagtgtggcaaacagggtctccttagtgaggctagtgtgaacaacctgatggccaagcgcaaagccgatcgggagcatgcgcctcaacagaagtctggggaaaacgcaaatatccaacccaacatccaactgatactccgggcagaacccactgtgaccaatattttgaagacaatggacgctgaccactctaaatctcctgagggacttctcggagtcctgggccatatgctctcaggcaaatccctggacctgttactggccgctgcagcggctacgggcaaactaaagagctttgccagaaagttcataaatctcaatgaattcaccacgtatggttcagaagagagtactaaaccagcatcagttagggccctgctgtttgatatatcttttctaatgttgtgccatgtggcacaaacctatggaagcgaggtgatcctgtcagaaagccggaccggtgccgaggtgcctttttttgagacatggatgcaaacttgtatgcccgaggaaggaaagatcttgaaccctgatcacccatgtttccgaccagacagtacaaaggttgagagcctcgtcgccttactgaacaattccagcgagatgaagttggtccaaatgaagtggcacgaggcttgtctttccatatccgccgcaatcctggaaattctcaacgcatgggagaacggcgtgctagcttttgagtccatccagaaaataaccgataatattaagggtaaagtttgtagtttggcagtgtgcgctgttgcatggcttgtggcccatgtgcggatgctgggcttggacgaaagagaaaagtcactgcagatgatccgtcagctagctggtcctttattttccgaaaacaccctgcagttttataacgagcgagtcgtcataatgaactcaattttggaacgcatgtgtgcagatgtgctccaacagaccgcaacacagattaaatttccatcaaccggcgtagatactatgccatactggaatctcctgcctccaaaaagacccataaaggaggtcttgacagatatctttgccaaggtgctggagaaggggtgggttgatagtcggagtatccacatattcgatacgctcttacatatgggcggagtatactggttctgtaacaatctgataaaagagctattgaaggaaacaagaaaggaacatacactcagagctgttgagctactttacagcatattctgtctagacatgcagcaggtgactcttgtgctactgggtcacattctcccagggttgctgaccgatagctctaagtggcattccttgatggaccccccaggaactgccctcgcgaagcttgctgtttggtgcgcactgtcctcttattctagccataaggggcaggcttcaacacggcagaagaaacggcatcgggaagacattgaagactatatttcactcttcccgctggatgatgtgcagccctctaagctcatgagacttctctctagcaatgaagatgacgccaacattctctcctccccaacagatagatcgatgtcatcttccctgagcgcatcacagcttcatactgtgaacatgagagatccacttaacagagtgttggcaaatctgttcttactcatttccagcatcctgggcagtagaactgccggtccccacacccagttcgtccagtggttcatggaggaatgtgtggattgcctggagcaagggggtagaggctcagtattgcagttcatgcccttcacgacagtatctgaacttgtgaaggtcagcgcaatgagttcgcccaaggtggtgctggcgatcaccgatctgtctctgcccttgggcagacaggtggcagctaaagccatcgcggcactttag

SEQ ID NO: 229842 - DNA, 2931 bp, synthetic construct
  misc_feature 1..2931: note = Description of Artificial Sequence: Synthetic coding sequence
  source 1..2931: mol_type = other DNA
atgaaggtagttaacctgaaacaggcaattcttcaggcttggaaagagcgttggagcgactatcagtgggcgatcaacatgaaaaagtttttccccaaaggcgctacatgggacattttaaacctcgccgatgctctgctggaacaggccatgatcggccctagccccaatccactcattctgagctacttgaaatatgcaatcagctctcagttcgacgatttttccagagatctgtgtgtgcaagccctcctggacataatggatatgttctgtgacaggctgtcatgccacggtaaggctgaagaatgcatcggactctgccgagcgctgctgtctgctctgcactggttactgaggtgtactgcagcatcggccgaaagactgcgggagggactggaagctggcacaccagccgcaggtgaaaaacagctcgccatgtgtcttcagcgcctagagaaaaccctatcctctactaagaatagggctctgcttcacattgcaaaactcgaagaagcttcctcctggactgcgatcgagcacagcctgctgaaactgggcgagatcctcgccaatctctctaacccacagcttcgcagccaagccgagcaatgtggcactcttatacggtcaattcccactatgctctcagtgcatgctgaacagatgcacaaaacaggatttcctacagtgcatgccgtgatcttgctcgaggggacaatgaacttgactggcgaaacacagtccctagtcgagcagctgacaatggtcaagcgtatgcagcatatcccgaccccgctcttcgtgctcgaaatttggaaagcatgtttcgttggcctcattgagtcccccgagggcacagaggagctgaagtggactgccttcaccttcttgaagatccctcaggtcctggtcaagctgaagaagtacagtcacggggacaaagattttactgaagacgtgaattgtgcttttgagttcctgcttaagctgacccctctcctggataaggccgatcagaggtgcaactgcgactgcacaaactttctgctacaggagtgcggcaagcagggactgctgtctgaagctagtgtcaacaacttgatggctaaaagaaaggccgatcgcgaacacgcacctcaacagaagtcgggcgagaacgcgaatatccagcctaacattcagctgatcttgcgcgctgagcctaccgttactaacattcttaaaaccatggatgctgatcactcaaagagcccagagggcctgctgggcgtgctaggccacatgctgtccggaaagtccctcgacctcctgttagctgccgcagctgcaactggcaagctgaagagctttgcccgaaaattcataaacctgaacgagttcaccacatatggtagtgaggagagcactaaaccagcatccgtaagggccctattgttcgatatcagtttcctgatgctgtgtcacgtcgcccagacatacggcagtgaggttattttgtctgaatctagaacaggggctgaagtgcctttcttcgagacatggatgcaaacgtgcatgccagaggaaggcaagatcctcaatccagaccatccctgcttcagaccggattcgacaaaggtggagtctctggtggctctcctgaacaactcatcggagatgaagctggtgcaaatgaaatggcacgaagcttgcctgtccattagcgctgcaatactggagatacttaatgcttgggagaacggcgtgctcgccttcgagtctatacagaaaattacagataatatcaagggtaaggtgtgttctctggctgtgtgtgcagttgcctggcttgtggcccacgtgcggatgcttggacttgacgagagggagaagagtcttcaaatgatacgacagcttgcaggaccccttttttcagagaatactttacagttttataatgaacgggtggttatcatgaactccatactcgaaaggatgtgcgccgacgtgctgcaacagacggctactcagattaagtttccgagtactggcgtcgacacgatgccttactggaatctgttgccacctaaacgtcctattaaagaggtgctgaccgatatctttgctaaagttcttgaaaaaggctgggtggactcacgtagcatccatatattcgacactttactgcatatggggggagtgtactggttttgtaacaacttaatcaaggagctgttaaaagaaaccaggaaggagcataccttacgcgcagtagaattattgtattctatcttttgcttggatatgcagcaggttaccctggtgctcctgggtcatatcctgccgggactcctgacagattcgtctaagtggcacagtttaatggacccccctgggaccgccctcgcgaagttggcggtgtggtgtgccctttcttcgtacagctctcataaaggtcaggcctccactcgccaaaaaaaaagacaccgggaagacattgaagactatattagcctctttcctttagatgacgtgcagccgtccaaattaatgcgcctgttgagctccaacgaagatgatgcgaacattttgtcctcaccgaccgaccggtcaatgagcagctccctttctgcctctcagttgcacactgtaaatatgcgcgacccactgaatagggtgctcgccaatctattcttgctcatttcttccatcctggggagccgaacggcgggaccccacacacaatttgtccagtggtttatggaggagtgcgttgattgtctagaacagggaggtcggggatcagttcttcaattcatgccatttactactgtttcagaactcgtaaaggtgtccgccatgtcgagtcctaaggttgtgctggctataaccgatctgagccttcctctcggccgtcaggtggctgcaaaagccatcgcagctctgtag

SEQ ID NO: 229843 - DNA, 2970 bp, synthetic construct
  misc_feature 1..2970: note = Description of Artificial Sequence: Synthetic coding sequence
  source 1..2970: mol_type = other DNA
atgaaggttgttaatctcaagcaggctatcttgcaggcctggaaagaaagatggagtgattaccagtgggccatcaatatgaagaaattcttcccaaagggggctacatgggatatcttaaatcttgccgatgcgctcttggaacaggcaatgatcggaccgtccccgaatcctctgatcctcagctacctgaagtatgccatttcctcgcagatggtctcttatagctctgtgctgacagctatctcaaaattcgatgacttctcaagagatctttgcgtgcaggctctactcgatatcatggacatgttctgtgaccggctgagctgccacggcaaggctgaagagtgtattgggttgtgtagagcattgctatccgcgcttcactggctgttacgatgtaccgccgcatctgccgaacgccttagggaaggcctcgaagccggaacaccagctgctggggaaaaacagctggccatgtgtttgcagcggctggagaagacattatcttcgacaaagaaccgagctctcttgcatatcgcaaaactcgaagaggctagctcctggactgccatagagcatagcttacttaaactcggcgagattctcgcgaacctgtcgaatccacagctgcggagtcaggcagaacagtgcggaaccctaataagatctataccaactatgttgagcgtgcacgctgaacagatgcacaaaacaggtttcccaaccgttcacgcagtgattctgttggaaggcacgatgaatttaaccggagagacccagtcactggtggagcagctcacgatggtcaagcggatgcaacacatacccaccccgttgtttgtattggaaatctggaaggcctgttttgtaggattgattgaaagtcctgagggaacagaggagttaaagtggactgcattcaccttcttgaagatcccacaggtactcgtcaaacttaagaagtactcacacggggataaggacttcacggaggatgtgaactgcgcattcgaattcttgttaaagctgacacctctgctcgataaagccgatcagcggtgtaattgcgattgtacaaatttcctccttcaggagtgcgggaagcaaggactgctttcagaggcctcagtaaacaacctgatggccaaacgaaaagcagaccgcgaacacgcacctcagcagaaaagcggcgagaatgccaacatccagccgaacattcagctgatcctacgtgcggaacctacagtgacaaatattttaaagaccatggacgctgatcatagcaaatcccccgagggactgctgggcgtactcggccatatgttgagcggcaagtctctcgatctgctcttggctgctgcagctgcgacagggaagcttaaaagcttcgccagaaaattcataaacctgaacgagtttaccacctacggctccgaagaaagtaccaagcctgcctctgttcgtgccctactgtttgacataagcttcttaatgttgtgtcacgtcgctcagacttacgggagcgaagtcatcctttcggagagtaggaccggagccgaggtgcccttctttgagacttggatgcaaacctgcatgcccgaggaaggcaaaatactgaaccctgatcacccttgcttccgcccagattccacaaaggtggagtctttggttgcccttttaaataactcaagcgagatgaaacttgtgcaaatgaagtggcacgaagcatgtttatcaatctccgctgcaatcttggagattctgaatgcctgggagaacggagttctggccttcgagtcaatccagaagatcaccgacaacatcaagggtaaggtgtgctctctagccgtctgcgccgtagcgtggctggttgctcacgtgcgtatgctgggcctcgatgaaagagaaaagtccctccagatgattcggcagctggccggacctcttttttcagagaatacgctccaattttacaacgagagggtggtgataatgaatagtattctggagaggatgtgcgccgatgtgctgcagcagaccgcgacccaaatcaagttccctagcaccggcgtggacacaatgccatactggaaccttctgccacctaaacgacccattaaggaagtgttgacagatatcttcgccaaggtgctcgagaaaggatgggtggattcacggtccattcatattttcgatacacttcttcatatgggcggagtgtattggttttgcaacaacctgattaaggaactgctcaaggagactaggaaagaacacacgctgagagccgtggagttactctatagcatattctgtctcgatatgcagcaagtgactctcgtgctgctaggacacatcttgccgggactgctcactgattcttccaagtggcactcactaatggacccgccaggtaccgccctggctaaactcgctgtctggtgtgctttaagcagttacagctctcataaaggccaagcctccactaggcaaaagaaaaggcaccgagaggatattgaagactacatttctttatttcccttagacgacgtccagccttcaaaattgatgagactcttgtccagcaatgaggatgacgccaacattctctctagccccaccgacagatccatgtctagctcgctgtccgcatcccaactgcacactgtcaacatgcgggatcctctcaacagggtgcttgcaaacttatttttgctgatcagctctattcttggttcgaggacagctggaccccatactcagttcgtgcaatggtttatggaggagtgcgtggactgcctggaacagggaggtagaggaagcgtgctccagtttatgccattcacaacagtcagtgagctggtgaaggtctccgcgatgagttcacccaaggtagtcctcgccattaccgacctgagcttaccgctcggccgtcaagtggctgccaaggcaattgctgcactgtag

SEQ ID NO: 229844 - DNA, 864 bp, synthetic construct
  misc_feature 1..864: note = Description of Artificial Sequence: Synthetic coding sequence
  source 1..864: mol_type = other DNA
taaaatctcatcaaggaactcctcaaggaaacccggaaggagcataccttaagagccgtagagctgctgtatagtatattttgtcttgatatgcagcaggtcaccctagtcctcctcggacatatacttcctggcctgttgacggactcgagcaagtggcatagtctcatggacccccctgggacagcacttgccaagttagcggtgtggtgcgctctcagctcatattcatcccataaagggcaggccagtacaaggcagaaaaagcgccaccgcgaggacattgaggactacatcagtctcttccccctggacgatgtccagccttctaagctcatgcggctgctgtctagtaacgaagatgacgcaaacatcctatccagccccaggagctccctgggcagtccatgtactagctacctccgctgggttaaggtcggactcggtcatcccagaggcgcacccctcctgcatagtgctggctgtttccccgcattgcacctcttgcgcccaactgccgacaggtccatgtcaagcagcctgagtgccagccagctgcatacagtgaatatgcgtgacccccttaacagggtcttagccaatctattcctgctgatatcctcgattcttgggagccgcacagcgggtcctcatacccagtttgttcaatggtttatggaagagtgcgtcgactgtttagagcaggggggacgtggatctgtgctgcagttcatgccgttcacaactgtgagtgagctcgtcaaggtctcagcgatgtcctccccaaaggttgtgctggcaattaccgatctgtcactccctttagggagacaggttgctgccaaggctattgcagctctgtag

SEQ ID NO: 229845 - DNA, 906 bp, synthetic construct
  misc_feature 1..906: note = Description of Artificial Sequence: Synthetic coding sequence
  source 1..906: mol_type = other DNA
atgaaggtggtgaaccttaagcaagcgattctgcaagcttggaaagagcgatggagtgactatcaatgggcaataaacatgaagaaattcttccccaagggcgcaacatgggacattttgaacctggccgacgctctcctggagcaggcgatgattggtccttcccctaatccgctcatccttagttacctgaaatacgcaatcagctcccagatggtttcctattctagtgtgttgaccgccatttctaaattcgacgattttagtcgcgacctgtgcgtacaggctctgctggacatcatggacatgttctgcgaccgactcagttgtcatgggaaagctgaagagtgtatcggactttgcagagctcttctgagtgccctgcactggcttttacggtgtacagccgcatccgcagaacgattgcgagaaggactcgaagcgggaaccccagctgccggtgaaaagcagctggctatgtgcctccaaaggctagaaaaaaccctgtccagcacgaagaatcgggctctgcttcatattgctaagttagaagaggcctccctgcacacaagccagggcctcggtcagggtgggactcgagctaatcagcctacggcctcttggacagcaattgagcacagcctgctgaaactgggggaaatcctcgcgaacctatctaatccccagctgagatcccaggctgagcagtgtggcaccctgataaggtcaatacctactatgctgagtgtgcacgccgagcaaatgcacaagaccggctttcccacagtccacgcagtgatcctcctggaggggaccatgaatctgactggggagactcagagtctggtggagcaactgactatggtgaagaggatgcagcacatccctaccccactcttcgtttag

SEQ ID NO: 229846 - DNA, 2700 bp, synthetic construct
  misc_feature 1..2700: note = Description of Artificial Sequence: Synthetic coding sequence
  source 1..2700: mol_type = other DNA
atgcctctggtgccacgctggtgtccaaccctgttgtcgtcccagcccagcgtcagttgtcatgggaaggcagaggaatgcattggactgtgtagggctcttctgagcgccctgcattggctgctgcgctgtactgccgctagtgccgaaaggctgcgagagggattggaagccggaactccagccgcaggagaaaagcagctggccatgtgtctgcagcggctggagaagacactcagcagtaccaagaatcgggctctgctgcacattgctaagttagaagaggccagttcttggaccgccatcgagcattctctgctgaaactgggcgagatattagcaaatctcagcaacccacaactcaggtcacaagccgaacagtgtggaacgctgataagatccataccaacaatgctgagcgtgcatgctgagcagatgcataaaactgggttccctaccgttcatgctgttatcctgctggaaggaacgatgaacctcaccggcgaaacgcagtctctggttgagcagttaacaatggtcaagaggatgcagcacatacctactcctcttttcgtgttggaaatctggaaagcttgctttgtagggttgatagagtcccctgaaggtacagaggagctgaaatggacagcgtttacttttcttaagatcccccaggtcctggtgaagctcaagaagtatagtcacggcgacaaggatttcacagaggacgtcaattgtgctttcgagttcctgctcaagctgacccctctgcttgataaggctgaccagagatgcaactgcgattgcaccaacttcttgctgcaagagtgcgggaagcagggcctgctgtcagaggcgagcgtgaacaacctgatggctaagaggaaggccgaccgcgagcatgctccccaacagaagagtggagagaatgccaacatccagccaaacatccagttgatcttaagagccgagcctactgttactaacattctgaagacaatggacgccgatcattcaaagagtccagaaggactgctgggggtgctgggtcacatgctctcaggcaagtccctagacctactgctggcagctgctgctgcgacaggtaagctgaaatcctttgcacgaaagttcataaatttgaatgagttcaccacctacgggtcagaagagagcaccaaacctgcaagtgtacgcgcattgctgttcgatatcagctttctcatgctatgccacgtcgcgcaaacctacggtagcgaggtcatcctgtctgagtcacgcacaggcgctgaggtcccatttttcgagacatggatgcagacttgcatgccagaagagggaaaaattctgaatcccgatcacccttgcttccgtcccgactcaactaaggttgagagcttagtggcgctcttgaataatagtagtgaaatgaagctagtgcagatgaaatggcatgaagcttgtttatctattagcgcagcaatccttgaaatcttaaacgcgtgggagaatggggtcctcgcgtttgagtctatccaaaaaatcacagacaatatcaaggggaaggtatgttccctcgctgtatgtgcagtggcgtggctggtggctcatgtgcgcatgctcggattggatgagcgggagaaaagcttgcaaatgatacggcagctcgccggaccactgttctcagaaaatacactgcagttctacaatgaacgcgtagtgatcatgaattcaatcctcgagcgaatgtgcgcagacgttctgcagcagaccgctacccaaatcaagttccccagcaccggtgttgataccatgccgtactggaacctgcttcctcccaagcgacccatcaaagaagtgctgaccgatatcttcgctaaggtactggaaaagggctgggtagactcaagatcaatacatatcttcgatacactcctccacatgggcggtgtttactggttttgtaataatcttattaaggagttgctgaaggagactagaaaagaacacactctgcgcgcagtcgagcttttatactctatcttttgcctcgatatgcagcaggtcacactggttctactcggtcacattctccccggacttctaaccgatagttcaaagtggcacagcctgatggatcctccaggaaccgccctggctaagctggctgtgtggtgtgccctgtcttcctacagttcccacaaggggcaggcttctactcggcagaagaagcgccaccgggaggatattgaagactatatctctctgtttccactggatgacgtgcagcccagtaaactgatgcggcttctcagctccaatgaagatgacgcaaacatcctgagctcccccacagatcgttccatgagttcgtccttgtcagcctcacagctccacacagtgaatatgagagatcccctgaatcgtgtgttggcaaatctgtttctgctgatttcctctatccttggcagcagaaccgccggaccacacactcagttcgtacaatggttcatggaagaatgtgtcgattgcttagaacagggtgggcgaggatccgtacttcagttcatgcccttcacaacagtttccgaactggtgaaagtctctgcaatgtcttcccctaaggtggtcttggcaattactgacttaagcctgccactcggcagacaggtcgcagccaaggcaatcgctgcgctttag

SEQ ID NO: 229847 - DNA, 756 bp, synthetic construct
  misc_feature 1..756: note = Description of Artificial Sequence: Synthetic coding sequence
  source 1..756: mol_type = other DNA
atgaaaaaattctttcctaagggcgctacctgggatatactcaatttagcggacgctctgctggaacaggcaatgatagggccttcccctaaccccctcatactgagctacctgaaatacgccattagctcacagatggtgagctatagcagcgttctcacagccatcatggaaatattgaatgcctgggaaaacggtgtgcttgccttcgaatcaatccagaagatcacagacaacattaaaggaaaggtctgcagtttggccgtctgtgcggtcgcctggttagttgcacacgtgagaatgctcgggctggacgaacgagagaaaagcctacagatgatcagacaactggctgggcctctattttccgaaaacacacttcagttctacaacgaacgggtggtcataatgaattcaatccttgaaagaatgtgcgcagacgtactacaacagacagcaacccagatcaaatttccctccaccggtgtcgataccatgccgtactggaacctgcttccacccaagagacccataaaagaagtattgactgatatctttgcaaaggtgttggaaaaaggatgggtagattctcgatcaatacatatcttcgacactctcctgcacatggggggagtgtattggttctgcaacaatctcataaaggaattactaaaggagacccggaaagaacatactctccgcgcagtggagctgctgtactctatattttgcctcgacatgcagcaggtaacctag

SEQ ID NO: 229848 - DNA, 2466 bp, synthetic construct
  misc_feature 1..2466: note = Description of Artificial Sequence: Synthetic coding sequence
  source 1..2466: mol_type = other DNA
atgattggaccctccccaaacccgctgattttaagctacttaaagtatgcaatcagttcccaaatggtcagctactcttctgtgctaacagccattagcaagttcgacgactttagtcgcgacttgtgtgtgcaggccctgttggatattatggatatgttctgcgaccgcctctcttgtcacggcaaggcggaggaatgcattggactctgcagagccctcctgagtgccttacactggctgctccggtgcactgctgcatctgcggagcggctcagagagggtttggaagccggaactccggctgccggagaaaagcagctcgccatgtgtttacagcgcctggagaagacactaagctccacaaagaatagagctttactccacatcgccaagcttgaggaggcatctagctggacggctatagagcacagtctcctgaaactcggtgagattctcgccaacctgtcaaacccccagctaaggtcccaagctgagcagtgcgggactctcattcgatcgatacctaccatgctgtccgtgcacgcggagcagatgcacaaaactgggtttcccacagtgcacgccgtgatcctcctcgagggaactatgaatttaaccggagagactcagagtctggtagagcagctgactatggtaaagaggatgcagcatattcccaccccactcttcgtcttggagatttggaaggcttgttttgtgggactgattgaatctcccgagggaaccgaggaactcaaatggacagctttcacgtttctgaaaatcccccaggtcttggttaaactgaagaaatattcacacggagacaaggactttacagaagatgttaattgtgcctttgagtttcttttaaagttgacacccctattggataaggctgatcaaagatgcaactgtgattgtaccaattttctacttcaggagtgcggtaagcagggcctactgtctgaagcgagcgtgaacaatctcatggccaagcggaaagctgacagagagcatgcgcctcagcagaagtcgggcgagaatgccaacatccagcccaatatccaacttatcctgcgtgccgaaccgactgtgactaacatcctgaagactatggatgctgatcatagcaaatcccccgaggggctgctgggcgtgctggggcatatgctatcaggtaagtcgcttgaccttctgctcgccgcagctgccgcaaccggaaaactgaaatctttcgcccgaaaattcatcaacctcaacgagttcactacctacggatccgaagagtcgactaagcctgcaagcgtgcgcgcactactctttgatatctcattcctcatgctgtgccacgtcgcccagacgtatgggtctgaagtgattctttcagagagccgcactggggcagaggtgcccttttttgaaacatggatgcagacctgtatgccagaagagggaaaaatcctgaatcccgaccatccatgctttcgtcctgatagtacgaaggttgagtcactcgtcgccctgctgaacaattcatccgagatgaagctcgtccaaatgaaatggcacgaggcctgtctaagcatctcagcagcaattctggaaatactgaacgcctgggaaaacggggtccttgcttttgaatccattcagaagattaccgataatatcaaaggcaaagtttgcagcctcgctgtttgtgctgtggcatggctggtggcccacgtgcggatgcttggcctcgatgaacgcgagaaaagtctgcagatgatccggcaacttgccggacctttatttagtgaaaatactctccagttttataacgaaagggtcgttattatgaacagcattttggaacgtatgtgcgccgacgtgctgcagcagaccgcaacacagatcaaattcccttccaccggagtggatactatgccttattggaacctgctacccccaaaaagaccaatcaaggaggtacttacagatattttcgcaaaggtgctggagaagggctgggtcgacagccggtctatccatatcttcgatactcttttgcatatggggggtgtctactggttttgcaataacctgataaaagagttgctgaaggagacccgtaaagaacacacactgcgagcagtagaactgctctattctatcttttgccttgatatgcaacaagtaaccctcgtgttgctgggccacatcctgccgggattgctcacggattcatctaagtggcattcactgatggatccccctggaaccgcgttagctaagcttgcagtctggtgtgctctgagttcgtattcaagccataaggggcaggccagtacacgtcaaaagaagcggcacagagaagacatcgaggattatatttcaccaaaggtagtgctggccattacagacttaagtctgcctctgggccgtcaagtcgctgccaaggccattgcagctctgtag

SEQ ID NO: 229849 - DNA, 1026 bp, synthetic construct
  misc_feature 1..1026: note = Description of Artificial Sequence: Synthetic coding sequence
  source 1..1026: mol_type = other DNA
atgaagaagttcttccctaagggcgcaacctgggatatcctgaatcttgccgacgccctgcttgagcaggcgatgataggtccctctcccaatcccctcatattgtcttacttaaagtacgccatcagttcccaaatggtgtcctacagctctgttctgacagccatcagcaaattcgacgatttcagcagggacctgtgtgtgcaggcactactcgatatcatggatatgttctgtgaccgcctgagctgtcatggcaaggcagaggagtgcattggtctgtgtcgtgcactgctgagcgctctccactggctgttgagatgtacagccgcaagtgccgagagattgcgagaaggcttagaggcaggcacgccagcagctggggaaaaacaacttgccatgtgcctccagcgactggaaaaaacactgtcatccactaaaaacagagcgctcctccacatcgctaaattagaggaggcatcctcatggaccgcaatcgaacatagtcttctcaaactcggagagattctggccaacttatccaacccacagcttcgtagccaggctgagcagtgcggtactctcatacgcagcatccccactatgctttcagtacacgctgagcagatgcacaagacaggttttcccacggtccatgctgtaatcttgctggaaggtaccatgaacctcaccggggagactcaaagcctcgttgagcagcagaccgctactcagataaaatttcctagcactggagtggacaccatgccttattggaatttacttcctcccaagaggccaatcaaggaggttctcacagacatattcgcaaaggtgctggaaaagggatgggtcgactctcgcagcattcatattttcgacaccctactgcacatgggtggagtgtactggttttgtaacaatctcattaaggagcttctgaaggagaccaggaaggagcacactcttcgagccgttgagcttctgtattcgatcttctgtcttgatatgcagcaggtcacctag

SEQ ID NO: 229850 - DNA, 2796 bp, synthetic construct
  misc_feature 1..2796: note = Description of Artificial Sequence: Synthetic coding sequence
  source 1..2796: mol_type = other DNA
atgaaggtcgtgaaccttaaacaggcaatcctccaggcttggaaagagcggtggtcagattaccagtgggccattaacatgaagaaattctttccgaaaggggctacatgggatatcctgaacttagctgacgccttgttagagcaagctatgatcggccctagtcccaatccattgatcttaagctacctgaagtacgcaatcagtagccagatggtatcctactcttcagtcctcacggcaattatgtgtttgcagagactcgagaagaccctgtcatcgacgaagaacagggccttgctccacatcgccaagctggaggaagcaagcctgcatacgagccagggacttggacagggcggaacccgcgcaaatcaacctaccgcatcttggaccgcaatcgagcactccctcctgaagctgggagagatccttgccaatttgagcaacccacaactgaggtcccaggcggaacagtgtggtacgcttatacggtccatcccaacaatgctgagtgtgcatgcagaacagatgcataaaacaggtttccccaccgtgcatgccgttatcctcttggaagggacgatgaatttgactggggagacccagtcattagtagaacagctgacaatggtcaaaagaatgcagcatatcccaactcctctcttcgtgctggagatatggaaggcatgctttgtcgggttgatcgagagccccgaaggcactgaggagctgaaatggactgcctttaccttccttaagataccccaggtgctggtgaaattgaaaaaatacagccacggcgacaaagactttaccgaagacgtgaattgtgcgtttgagttcctgttgaagctcacaccactactggacaaggccgaccaaagatgcaactgtgactgcaccaactttctcttgcaggaatgcggtaagcagggattactgtcagaggccagtgtgaataatctaatggcaaaacgtaaggccgatcgcgagcatgccccacagcaaaagtcgggcgaaaacgccaacattcagcctaatatccagctgatactgagagccgaaccaaccgtaacaaatatcttgaagacaatggacgctgaccatagtaagagtcctgagggcctgttaggagtcctgggtcacatgctgtctggcaaaagtctagacctgctcctggccgcagccgctgccacaggcaagcttaaatccttcgctagaaaatttataaacctcaacgaattcactacttacggttctgaggaaagtacaaaacctgcttccgtacgagcactcttattcgatatatctttcctgatgctctgtcatgtggcacagacctatgggagcgaggtgattctgtcagaaagccgaacaggcgctgaggtaccattttttgagacatggatgcagacgtgcatgcctgaggagggtaaaatcctcaatcctgaccatccttgtttcagacccgacagtacgaaggtcgagagcctggtggcacttttaaataattcctccgagatgaaacttgttcagatgaagtggcacgaggcgtgcctgagtattagtgccgcaattctcgaaatcctgaacgcctgggaaaacggagtgctcgccttcgaaagtattcagaagatcactgacaatatcaaaggaaaagtttgttcattggcggtgtgcgctgtcgcgtggctcgtggcacacgtgcgcatgctgggcctggatgaacgcgagaagtctctccagatgatacgccagctcgcagggcctctattttcagagaacactttgcagttctataatgagcgcgtcgtgatcatgaatagcatcctcgagcggatgtgcgccgatgttcttcaacagaccgctacgcagattaaattcccttctaccggcgtggataccatgccttactggaacttactgcctcctaagcgaccaataaaagaggtactgactgacattttcgcgaaggttttagagaagggctgggtcgacagccgctctattcatatttttgatacactgctacatatggggggagtctactggttctgtaataacctaatcaaggagctccttaaagaaaccagaaaagaacataccttacgagctgtcgaattgttatactcgattttctgtctggatatgcagcaagtcaccctggtactgctgggccatattctccctgggttgctcaccgactcctctaagtggcacagtctgatggaccccccaggaacagctctggcaaaacttgctgtttggtgtgccctttcttcctatagcagtcataaaggccaggcgtcaacgagacagaagaaaagacaccgggaagacattgaagactacatttccttattccctttggacgacgtccagccgtctaagctgatgcgcctcctgagctcaaacgaagacgatgcaaatattcttagctcaccaactgatcggtccatgagctcttctctgagcgcctctcagctccacacggtgaacatgagggacccactgaaccgggtactggctaatctgtttctgctaatctcatctatcctagggagtcgaaccgccggaccccatacacagttcgttcagtggttcatggaggagtgtgtggattgcctcgaacagggagggcgaggtagcgtgctgcagttcatgccattcaccaccgtgtctgaactggtaaaggtctccgccatgtcttctccaaaagtagtgctcgccatcactgacttgagtctgccactcggcagacaagtggcagcaaaagcaatcgcagccctatag

SEQ ID NO: 229851 - DNA, 444 bp, synthetic construct
  misc_feature 1..444: note = Description of Artificial Sequence: Synthetic coding sequence
  source 1..444: mol_type = other DNA
atgaagaagttcttccccaaaggagccacatgggacatccttaatttggccgacgcactcctagaacaggccatgattgggcctagccccaatcctctcatcctttcataccttaaatatgctatctccagccaaatggtgagttacagcagtgtgctcaccgccatctccaaattcgacgatttttcacgggacctatgcgtccaagcactcttagacatcatggacatgttttgcgaccgactgtcttgccacggcaaagctgaggaatgcatcggcttgtgccgggcattgctttccgctctgcactttatgccttttacaactgtgtcagagctggttaaagtgagcgccatgagctctccgaaggtcgtccttgctataaccgatctgtcgctccctctgggacggcaagtggcagccaaagcaatcgccgctctgtag

SEQ ID NO: 229852 - DNA, 921 bp, synthetic construct
  misc_feature 1..921: note = Description of Artificial Sequence: Synthetic coding sequence
  source 1..921: mol_type = other DNA
atgaagaaatttttccctaaaggggctacgtgggatattttaaacctggccgatgctctcctcgagcaggccatgatcggcccttcaccaaaccctcttattctcagttacctgaagtacgccatatcttcacagatggtgtcctatagctcagtgttgactgccatttccaagttcgacgatttcagccgagatttatgcgtccaggccctgctcgacataatggatatgttttgtgatcgattgtcctgccacggcaaggctgaagagtgcatagggctctgtcgagctttactgtcggccctgcattggctgctgaggtgtactgctgcctccgcagaaagactccgggagggactcgaggctggcacccccgcagcgggagaaaaacagctggctatgtgcctgcagaggctggagaagactttgagcagtactaagaatagggctctgctccatatcgcaaagttggaagaagcgtcaagctggacagcgattgaacacagcctgttgaaattaggtgagatcttagctaacctgagtaatcctcaattgagatcccaggcggagcagtgtgggacgttaataaggtccattccgacaatgctctccgttcatgcggaacaaatgcacaaaactggctttcccaccgtgcatgctgtcatattgttggagggcacgatgaatttaaccggagaaacccagtccttagttgagcagctgactatggtgaaaaggatgcaacacattccaacaccactgtttggacggggaagcgtgctgcagttcatgcccttcaccacagtatcagaattggtcaaagtcagcgccatgagctctcctaaggtcgtcctggccatcactgatctctccctcccactgggcagacaggttgcagccaaggctatagccgcactatag

SEQ ID NO: 229853 - DNA, 2244 bp, synthetic construct
  misc_feature 1..2244: note = Description of Artificial Sequence: Synthetic coding sequence
  source 1..2244: mol_type = other DNA
atggtgccaggctcggaggggccagctcgggcagggagcgtggttgctgatgtggtgttcgtaatcgagggcactgcaaatctgggcccttactttgaggggttaagaaagcattatctgctgcccgcaattgagtacttcaacgggggaccgcctgccgaaaccgacttcggcggtgattatggagggacccagtacagccttgtagtgttcaacactgtggactgtgcgccagagagctacgtccagtgccacgcccctacctcttcagcctacgaatttgtgacctggctcgatggcatcaagttcatggggggaggcggtgagtcttgtagtctgatagctgaaggactgtccaccgctctgcaacttttcgatgactttaagaagatgcgcgaacagataggccagacccatcgagtctgtcttctgatatgtaattcaccaccatatctgctcccagcggtcgaatctaccacttacagcggatgcacaaccgagaacctagttcaacaaattggcgagcgcggaattcacttcagtatagtgtcccccagaaagttaccggctttgcggctcttgtttgagaaagccgcacctcccgcactgctagagcccctgcagcccccaacagatgtgtctcaggacccccgacacatggtgcttgtgcgtggattagttctgcccgtggggggaggttcggccccaggacctctgcagtcaaaacagcccgttccactgccaccagccgctcctagcggggcaactctgtccgccgctccccagcagcctctcccaccagttccaccccagtatcaggtacccggtaacctctccgctgcacaagtggctgcacaaaatgccgtcgaagccgctaaaaaccagaaggctggattgggaccacgattctcacccatcactcccctccagcaggcagctcccggagtgggacctcccttcagccaagcccctgcccctcagttgccgcctgggcctcctggagccccaaagccccctcctgcctcacagcctagtctcgtcagtacggttgcacccggttctggactggcccctaccgcacagccaggcgcaccaagtatggctggtacagtggccccagggggagtgagtgggccatcccctgcccaattgggtgcacccgcacttggcggtcaacagagcgtatcaaacaagctcctggcttggagtggagtgttggagtggcaagagaagccgaaacccgcatccgtggacgcaaatacaaagctcacccggagtctcccttgccaggtttacgttaatcacggcgaaaacctcaaaaccgaacagtggccccagaaattgattatgcagcttattccgcagcagctattaacgaccctggggccactgtttcgaaattcaaggatggtgcagttccatttcaccaacaaagacctggagagcctcaaggggctgtaccgaatcatgggcaacgggttcgcaggctgcgtgcactttcctcacaccgccccatgtgaggtgcgagtcctgatgctgttgtactccagtaagaagaagatcttcatgggcctaatcccctacgatcagtcgggattcgtgaatggcattagacaggtgattaccaatcataagcaggtccagcagcagaaactcgaacaacagcagcggggtatgggcggacagcaggcccctcccggtttgggcccaattttggaggaccaagctagacccagccaaaatttattacagctgagaccaccacaacctcagccacaagggaccgtgggcgcaagcggagccaccggccaaccacagccccagggcacagcgcagccccctcccggtgctccacaggggcctccgggagctgctagcggtcctccaccaccaggacctatcttaaggccgcagaaccccggagccaacccccaactccgtagcttgctgcttaatcccccaccgcctcagaccggcgtgcccccaccgcaggcttcacttcaccatcttcagccacctggagctccggcactgctccccccacctcaccaggggctcggccagccacagctcggaccccctctgctccacccaccacccgcacagtcctggcccgcacaactccctccgcgtgcccctctgccaggccagatgttgctgagcggcggacctcgcggtcccgtaccacagcctgggctacaaccctctgtaatggaggacgatatcctgatggatctgatctag

SEQ ID NO: 229854 - DNA, 2268 bp, synthetic construct
  misc_feature 1..2268: note = Description of Artificial Sequence: Synthetic coding sequence
  source 1..2268: mol_type = other DNA
atggtccccggatcagaggggcctgccagggcagggagtgttgtggccgacgtcgtgtttgttatcgagggcacggccaatctggggccatattttgaggggctgcggaaacactacttgctgcctgctatcgagtactttaacggtgggcctccagccgagactgacttcgggggagactacgggggaacgcagtactctctggtggtattcaatactgtggactgtgcacctgaaagttacgtccagtgccatgcacccacatccagcgcttatgagtttgtgacctggctggacgggatcaaatttatgggaggcggaggagaatcctgctctctcatcgctgaggggttgtccaccgccctgcaactgtttgacgatttcaaaaagatgcgggaacagattggtcagactcaccgtgtgtgtctgctgatttgtaatagtccaccctatctgttgcccgctgtggaatctacgacatacagcgggtgtaccacagaaaatctcgtccagcaaatcggggagcgcggaattcattttagtattgtatcccccagaaagctacctgcgctgcggctgctatttgaaaaggccgcacccccagccctgctggaaccattgcagcccccaaccgatgtgtcacaggatcctcgccacatggtgcttgtgcgcggactggtactgccagtgggaggcggatcagctccaggcccacttcagagcaaacagcctgtaccccttccacctgcggcaccttccggagctacactgagtgccgctccccagcagccgcttcccccagtgcccccacaatatcaggtgccaggtaatctcagcgcagcacaggtggcagcgcaaaatgcggttgaggcagccaaaaatcagaaagccggtttgggtccccgatttagccctatcacaccattgcagcaggccgcacctggcgtgggtcccccattctcccaagctcctgcccctcagcttccgcctggacctcccggagcccctaagccaccgccagcttcgcagccctcacttgtgagcacagtggccccagggtctggactggctccaaccgcccagcccggagccccttcaatggccggtacagtcgctcccggtggcgtttcgggtccctctccagcgcagttgggagctcctgccctaggaggccagcagtccgtgagcaacaagctgctagcttggtccggggtactcgagtggcaggaaaagccaaagccggcttcagttgatgcaaacacaaaattgacccggtctctcccatgccaggtgtacgtcaaccatggggagaacttgaaaactgaacagtggccccagaaactcattatgcaacttattccccaacagctgctgaccacccttggacctctttttagaaactccaggatggtgcagtttcacttcacgaacaaagacttggagtctctaaaagggctctacaggataatggggaacggatttgctggctgtgtgcatttcccccacacggccccttgcgaagtccgagtgctgatgctgctgtacagcagcaagaagaagatctttatgggtctgatcccttacgatcagtctggctttgttaacggcatcaggcaggtgatcacaaaccataagcaggtgcagcaacagaagcttgaacagcaacagagaggcatgggaggtcagcaggcacctcctgggttgggcccaattctcgaggatcaggcgagacccagccagaacctgcttcagttgcgtccacctcagccccagcctcagggcaccgttggagcgtctggggcaacaggccagccacaaccgcagggcactgcacagccccctccgggagcccctcagggtccccctggagccgcatccggacctcccccaccaggcccaatcctgaggccacagaatcctggcgctaatccccagctgcgttcactcttactgaatccaccgcctccacagaccggcgttccacctccgcaggcctcactccatcatcaccttccctccccgggaccacataacttcccactcggcctgcactgccaggtgcggggaccaggaggtgggcaaagaagcggactgagtgtcccagccgctccaggtctggagcaccaggacagggtcctgctaggatccaaggatatcgggtccaaaaacgagggctctcccatccgggcatgttcaccagcatcttggagaacaacatcctcctggatctccagcgaatcccccaccccgaataaggtcccattttag

SEQ ID NO: 229855 - DNA, 2349 bp, synthetic construct
  misc_feature 1..2349: note = Description of Artificial Sequence: Synthetic coding sequence
  source 1..2349: mol_type = other DNA
atggtaccaggctcagaagggcctgccagagccggaagcgtggtcgccgatgtggttttcgttatcgaaggtaccgcgaatctggggccttactttgaaggattgagaaagcactacctgctgccagcaattgaatatttcaatggagggccacccgctgagacagattttggcggtgactatggcggaacacagtacagcctagttgtgttcaatacggtcgattgcgcccctgaatcatatgtacagtgtcacgcccctacatccagtgcgtacgagtttgttacatggttggacggcattaagtttatggggggtggcggagaatcctgtagcctcatagctgagggcctgtccaccgcccttcagttattcgacgatttcaaaaagatgcgagaacaaataggtcagactcaccgcgtgtgtttacttatctgtaatagtccaccatacctactgcctgccgtggagagcacaacctattccgggtgcaccaccgagaatctggtgcagcagatcggcgagcggggaattcatttttcaatcgtctcgccgagaaaattaccagctctcagactgttgttcgaaaaggctgctcctcccgcactgctggaacctcttcagcctccaacagacgtcagtcaggacccacgccacatggtactcgtaaggggacttgttctacctgtgggaggcggttctgcccctggcccacttcagtctaaacagcccgttcccctgccacccgctgcgcctagcggcgctacgttgtcagccgcaccgcagcagcccctccctcctgtacctccccagtatcaggtgcctggcaacctgtccgccgcacaggtagctgcacagaacgctgtggaggcagccaagaaccagaaagccggactaggtcccaggttctcacccattacccctttgcagcaggcagcccctggcgtgggccctccgttctcccaggcacccgctcctcagctcccgccaggaccacctggagcccctaaaccaccgcctgcctctcaacccagcctggtcagcactgtcgcgccaggttcagggctggcacctacagcacagcccggagctccctctatggctggtacagtggcgcctggcggtgtgagtggcccatctcccgctcaacttggggctcccgcacttggtggccagcagagtgtgtctaacaagctgctggcctggtccggcgtcctagaatggcaagaaaagcccaaaccagccagtgtggacgccaatactaagctgactcgctcacttccatgtcaagtatatgtgaaccacggcgagaatctaaagaccgaacagtggccgcagaaactaatcatgcagctgattccccagcagttgttgactacattgggtcccctcttccgaaattccagaatggtgcagttccactttacaaacaaagatctggagagtctgaaggggttataccggatcatgggtaacggatttgctggctgcgtgcatttccctcatacagcaccatgcgaggtccgggtgctgatgttgctgtattcaagcaagaaaaagatcttcatgggcttgataccctatgatcagtcgggcttcgtgaacggtataagacaagtcataacgaaccataagcaagtgcagcagcaaaaactggaacagcagcaaaggggcatgggtggccagcaggcacccccaggactcggccctatattagaggatcaggcacgaccaagccagaatctgctgcagctgcggcctccacagcctcagcctcaaggaacagtcggagccagcggtgcgactggccaacctcaaccccagggaaccgcccagcctcctcccggagcgccacagggtccccctggggctgcgtcaggtccacctcctcctggtcccatccttcggccacagaatcctggagcaaacccccagcttcggtcactactgcttaacccaccgcctccacaaactggtgtcccacctccacaggcctccctacatcacctgcagccccctggagctcccgcattgctgccacccccacatcaggggctgggacaacctcaactggggcctccactcctgcatcccccacccgctcagtcatggcccgcacagctacccccaagggctccattgccagctgctaagagaaagcgggaaggcgaaggacgtgtgttccgcgaaaagtgggagcgtgcctacttttttgttgaggttaagagcatgcccatgtgcctgatatgtaagcagatcgtgtccgtgctgaaagagtacaatctgaaacggcactatgaatccaagcattctaagtcatatgatcagtatactgaacagactcgatag

SEQ ID NO: 229856 - DNA, 1449 bp, synthetic construct
  misc_feature 1..1449: note = Description of Artificial Sequence: Synthetic coding sequence
  source 1..1449: mol_type = other DNA
atggtcccgggtagcgaaggtcctgcaagggcaggctcagtggtggctgacgtggtttttgtcatcgaagggaccgccaatctgggtccttacttcgaagggttgcggaagcattacctgctgccagcaatcgaatacttcaatggagggcctcccgcaccattttctcaagctcccgcaccacaacttccccctggacctcctggagctccaaaaccgccaccagcctcacaaccaagcctggtgagtaccgtggcacccggatccggcttggcacctacagctcagcccggagccccttctatggccggtacagttgctccagggggtgtgagcgggccttcacctgcacaattaggagcacccgcactgggaggtcaacagtccgtctctaataagcttctggcctggtctggcgtgttggagtggcaagagaagccgaagcctgcatcagtggacgcgaatacaaagctaactcggagcctcccttgtcaagtctatgtaaaccatggcgaaaatctgaaaacggagcaatggccacagaaattaattatgcagctcatcccgcagcagcttctcacaacattaggacccctgtttagaaattctcggatggtgcagtttcatttcacgaacaaagatctggagtctctcaagggcctgtaccgaatcatgggcaatggctttgccggttgtgtgcactttccccacacggctccttgtgaggtgcgtgtccttatgttgttgtatagcagcaagaaaaaaatcttcatgggtctgattccttatgatcaatctgggttcgtaaatggtattcggcaggtcattactaatcacaagcaggtccagcagcagaagctcgagcagcagcagcgagggatggggggtcagcaggcacctccgggtctgggaccaatacttgaggatcaagccaggccttcccagaatcttctgcaacttaggcctccccagcctcagccccagggcacagtgggcgcatcaggagccacagggcagccccaacctcaggggactgctcagccacctcccggtgctcctcaggggccacctggagccgcaagcggcccaccccctccaggtcccatcctcaggccgcagaatccaggcgctaatccacagcttaggtctctattactcaaccccccaccacctcagacaggcgtccctccgcctcaggcgagcctacaccacctgcaaccacctggggcaccagctctgctgccacctcctcatcagggcctcggccagccacagctgggacctccgctcctgcacccaccccctgcacaaagttggcctgcccagctgccaccaagagcccctctgcccggtcagatgctgcttagtggcggaccccgaggcccagtccctcagcccggactccagcccagcgtaatggaagatgatatccttatggatctcatctag

SEQ ID NO: 229857 - DNA, 2385 bp, synthetic construct
  misc_feature 1..2385: note = Description of Artificial Sequence: Synthetic coding sequence
  source 1..2385: mol_type = other DNA
atggtccccggttcagaagggccagccagggccggaagtgtggtggctgatgtagtgtttgtcatagaagggacagcaaaccttgggccatatttcgaaggcctgcgcaaacattatctgttgccggcaattgaatacttcaacggcggaccccctgccgaaacagattttggtggggactatggcggtacacagtacagtttagtggtgttcaatactgtggattgcgccccagagagttatgtacagtgtcacgctcccacctcatctgcatatgagttcgtgacctggctggatggcataaagtttatgggcggaggaggcgagagttgctcactgattgcagaaggactctctactgctctccagctgtttgacgacttcaaaaagatgcgagagcagatcggccagacacacagggtgtgtctgttgatttgtaattccccaccttaccttctccccgcagtggagtccacaacttacagcggctgtacaaccgagaatttggtacagcagatcggagagagggggatccatttttctatcgtgagcccacgaaaactgccggctctcaggctgctcttcgagaaagccgctcccccagccctcctagagccccttcagccacccacagatgtatcacaggatccacgccacatggttctcgtgagaggcctggtcctgccggtgggcggtgggtctgcacccggaccactgcagtccaagcagccagtccccctgcctccggctgccccttccggcgcaacgctgtcggctgctcctcagcaacccctgccacccgtccctccccagtaccaggtgcctggcaacttgagcgctgcacaagttgccgcacagaatgccgtcgaggcagcaaagaatcaaaaagccggactgggcccaaggtttagtcctattaccccgttacaacaggctgctcctggggtggggcctcctttctcccaagcaccggcaccccagctcccccctggaccgcctggggctccaaagcctcccccagcctcccagcctagcttagtctctacagtggcccctggatcaggacttgcgcctactgctcaacccggagctccttccatggccggtacagttgcgcctgggggagtgtcaggtccttcacctgcccagttgggggctcccgcacttggaggacagcagtcagtgtcaaataaacttctggcatggtccggagtgctcgagtggcaggagaagcccaagccagcttctgtcgacgctaacacaaaattgactagatcccttccttgccaggtctacgtgaatcatggtgaaaacctgaagaccgaacagtggccccaaaaattgataatgcaacttattcctcagcaacttctcacaactctgggtccccttttccgcaacagccgcatggtccagttccatttcaccaacaaggatctggagagcctgaaaggactgtaccgcatcatgggcaatggattcgccggatgcgtccacttcccccacaccgccccatgtgaggtgagagtgttgatgttactttattcttctaagaaaaagatattcatgggactcatcccatatgaccaatctgggtttgtgaacgggatacggcaggtgatcacaaatcacaagcaggtgcaacagcagaaactggagcagcaacagagggggatggggggacagcaagctccaccagggctgggcccaatactggaggatcaagcccgaccttctcagaatcttttgcagctgcggcctccccagccacaacctcagggaactgtgggcgcatccggcgctacgggccaaccccagccccagggcactgcccaacccccacctggggcacctcaagggccacctggagcagcgtccggacctccaccacccggtcccattctgagaccccagaaccctggcgctaatcctcagctccgcagcctgctcttaaatcccccacctccccagactggggtgccaccgcctcaggccagcctccatcatctacagccacctggtgctccagccctccttcctccgcctcaccagggactggggcagccccagctgggccctcccctgttacatccccctcccgacggagccaggcggagtgacgcggctgagagaggatcccctggccctggaaggagtccccagtcccctcccctgcccctcggatttccagtgaggcagagagtcacggccttccacgtgtccattactagcgggaaaactaaagagcgccgtcgtggaccttgcgtctctcggaagatgggtgcaagtcttttcctgtgcggaagtgaggagcatgcgtacgtcttcaatatgcagacaaatcgggtgtgcgtggagcgtatccaacctgaaacacccctctag

SEQ ID NO: 229858 - DNA, 2175 bp, synthetic construct
  misc_feature 1..2175: note = Description of Artificial Sequence: Synthetic coding sequence
  source 1..2175: mol_type = other DNA
atggtgcccggatccgaggggcctgcacgcgcagggtcggttgtggcggacgtggtcttcgtgatcgaaggcaccgcgaatctcgggccttactttgaggggctgagaaagcactatctactgccggctattgagtatttcaatggtggccctcccgctgaaaccgatttcgggggtgactatgggggaacacagtactccctcgttgtctttaatactgtggactgtgcgcctgaatcctatgtgcaatgccatgccccaacatcttcagcctatgagtttgtaacttggctggacggaatcaaattcatggggggaggtggagaaagctgctccctgatcgccgagggactgtccacggctctgcagctgttcgatgacttcaaaaaaatgcgtgagcagatcggtcaaacacatagagtgtgtctacttatttgtaacagtcctccatacttattgcctgcggtggagagtacaacttattctggctgcaccacagagaatttggtgcagcagatcggggagagaggtatccatttctctattgtcagtccaaggaaattacccgctcttaggttgctgtttgagaaagcagctccgcctgccctcttggagcccctgcaaccccctacagacgtgagccaagaccccagacacatggtcctagtacggggactcgttctgcccgtgggtggcggatctgcaccaggccctctgcaatcaaagcagcccgtccccctgccccctgccgctccatcaggagccactctgtcggcagcccctcaacagccactgcctcctgtgcctccccagtaccaggtccccggtaacctgagtgccgcacaggttgcagcccagaatgccgtcgaggcggcaaagaaccagaaggccggtctcggacctcgcttcagtcctattactccactgcagcaggccgctcccggtgtgggccctcccttttcccaggctccagcaccacagttgccacctgggcctcctggtgcccctaaaccacctccagcctcacagccaagtctcgtgtcaacggtggctcctggctcgggcctggctccaacagctcagcccggagcaccaagcatggcgggaaccgtggccccaggaggcgtctctggccctagccctgctcagctgggagccccagccctggggggtcagcagtccgtgagtaacaagttgttagcatggagcggggtcctcgagtggcaggagaagcctaaacccgcatccgttgatgccaataccaaattgacccgcagtctgccttgccaggtgtacgtgaatcacggagagaacctcaagacggaacagtggcctcagaagttaataatgcagcttatcccccagcagttgctgaccacattgggcccactgtttaggaacagccgcatggtccagttccattttactaacaaggacttagaatccctgaaaggactgtataggatcatgggaaacggtttcgctggatgtgtgcactttccacatactgccccatgtgaggtgagggttctgatgctgctgtacagctccaagaaaaaaatcttcatggggcttattccatacgaccagagcggatttgtgaacggcataagacaggtgataaccaaccataagcaggtacagcagcagaagctcgagcagcagcagcggggaatgggagggcagcaagctccacccggactcggcccaatcctggaagaccaggcccgaccaagccagaatctgctccagctcagaccaccacagccccagcccccacccggagccccacaagggcctccgggagccgcatcaggccctcctcctcccggtcccattcttaggccacagaacccaggagcgaatcctcagcttaggtccctgctactaaacccccctcctcctcaaactggtgtgccgcctcctcaggcttctctgcatcacctgcaaccgcctggagcacccgctctgctccctccaccacaccagggcctgggtcagcctcaactgggtccaccgctgcttcacccacctcccgcacagagctggccagcccagctgccgccacgcgctcctctgcccggtaaaggcactcggggaagagcagaagtatggactgagtgtccatcctcaagttgggccagagccccaagacctagtgcgcctggcaagtag

SEQ ID NO: 229859 - DNA, 753 bp, synthetic construct
  misc_feature 1..753: note = Description of Artificial Sequence: Synthetic coding sequence
  source 1..753: mol_type = other DNA
atgttactgtactcctctaagaagaagatatttatggggctcatcccatacgaccagtccggctttgtcaatggcatccgtcaagtcatcacgaatcacaaacaggtccagcagcagaagctggaacagcagcagaggggtatgggcggtcagcaggctccgccaggattaggcccaatccttgaggaccaggccagaccctcccagaacctgctgcagctcagaccgcctcaaccacagccccaggggacagtgggagcctcaggcgctacgggccagccacagccgcagggaaccgcccagcccccacccggagcacctcaaggcccacctggggcagccagtgggcctccaccaccagggccaatctttggacctcgtacgctcggacctacactgagttgtgaggcctcgagctcaacacaccatagacggcgtctaggatgcccacacccgcgaccccctagcactacttcttcacatcagggcctcctgcgatgctgccttcgcagacagggacttggccaaccacaattgggcccacactcttgtatacaccaccttcccagcccaggaccgcacaacttccccctagggctgcactgccaggtacgtggccctgggggaggacagagaagtggcctgtcagttcctgccgcacccggactggaacaccaagatcgcgtgctgctcggatccaaagacataggttcaaagaacgaaggctcacctatggcttttgccgagctgtag

SEQ ID NO: 229860 - DNA, 1605 bp, synthetic construct
  misc_feature 1..1605: note = Description of Artificial Sequence: Synthetic coding sequence
  source 1..1605: mol_type = other DNA
atggttccaggatccgaaggccctgccagggctggttccgtcgtggccgatgtcgtgttcgtgatcgaaggtactgccaatttaggtccatatttcgagggcctccgcaagcattacctgctcccagccatcgaatattttaacggcggacctcctgccgagacggactttggcggagacgtgcctggcaatctgtccgccgctcaagttgccgctcaaaacgccgtggaggcagctaagaatcagaaggctggcctgggaccccgattctcacctatcaccccacttcaacaggccgctcctggcgttggcccaccctttagccaggcaccagcgcctcagctgccgccaggaccgccaggagcaccaaaaccccctcctgcgtctcaaccatcccttgtctcaaccgtggcccctggttctgggctggctcctacagcacagcctggggctccttccatggccggaactgtggccccaggcggagtcagtggaccatcccctgcccaattaggtgccccagcccttggcggacagcaatctgtatccaataagcttctggcctggtctggggttctggaatggcaggagaagcccaagcctgcgagcgtggacgccaataccaagctgactcgtagcttaccttgccaggtgtacgttaaccatggcgagaaccttaagactgaacagtggcctcagaagctaattatgcaactaattccacagcagctgcttacaacccttggccctttgtttcgtaatagtcgtatggtgcagttccacttcactaataaagacctcgagtccctgaaagggctgtacaggatcatggggaacggatttgcaggctgtgtgcactttccacataccgcaccgtgtgaagtgagggtgttaatgcttctttattctagcaaaaaaaagatctttatgggattaattccttacgatcagtctgggttcgtgaacggaatccggcaagtgatcacaaatcataagcaggtgcaacagcaaaagctcgaacaacagcaaagaggcatggggggacaacaggcccctccaggcctgggaccaatcctcgaggaccaggctagaccctcccaaaatttgcttcaactacggccaccccagccccaacctcaaggaaccgttggcgcatcgggcgcaaccggccaaccacagccccagggaacagcccagcctcctccaggcgctcctcaagggcctcccggagctgcttcgggccctcctcctcctggtccaatcctcagaccacaaaaccctggggctaaccctcaacttcggagcctcctgctgaaccctccaccccctcagacaggcgtcccccctccccaggcgagcctccatcacctccaaccgccaggagctcccgctctgctgccacctccacaccaaggactgggccagccacagctggggcctcctctcctccatccaccacccgctcagtcatggccagcacaacttcccccacgggcacctctgcccggtcagatgctcctcagcggtggacctaggggaccggtccctcaaccagggctccagccctcggtgatggaggatgacatccttatggaccttatttag

SEQ ID NO: 229861 - DNA, 1194 bp, synthetic construct
  misc_feature 1..1194: note = Description of Artificial Sequence: Synthetic coding sequence
  source 1..1194: mol_type = other DNA
atggtccctggaagcgagggaccagcccgtgcaggctcagtagtagcagatgtagtgtttgttatcgaaggcacagcaaatttaggtccttatttcgaagggctacgtaaacactatcttttgccagctattgagtactttaacgggggaccaccagccgaaactgatttcggcggagactacggagggacacagtactccctcgtggttttcaacaccgtggattgcgcacccgagagctatgtccagtgtcatgcgccaacatctagcgcgtatgagtttgtgacctggcttgacggcatcaagtttatgggaggaggcggagagagctgttctcttatagccgagggcctttccacggccctgcagctgttcgatgacttcaagaagatgagagagcagattggacagactcaccgcgtgtgcttgctgatatgcaattcccctccttacctgctcccagcggtggagtccaccacctactctggctgcacaacagaaaatctggtgcagcaaatcggcgagagggggatccacttcagcattgtgagccctcgtaagcttcccgctctgaggctgctgtttgagaaagcagcaccaccagcgctcctcgaacccctgcagcctccaacggatgtcagccaggatcctaggcacatggtgctggtaagaggactggtgttgcccgtgggcggtggaagtgcacctggcccactgcaatccaagcagcccgtccctttaccacccgcagccccaagcggggcaactctgtccgccgcaccacagcagcctctccccccagtcccgccacagtatcaggtacctggcaatttgtcggccgcacaagttgccgctcagaacgctgtcgaggctgcaaaaaaccagaaggccggactcggacccaggttcagtcccatcactcccctacagcaagctgcgccaggagtgggccctccgtttagtcaggctccggcacccgcacttcttcctccccctcatcagggtctcggccaaccacaattgggtccccctctgttgcacccgcctcctgctcagtcctggcccgcacaactcccgccacgggctcctctgccaggccagatgcttttaagtggaggcccaaggggcccagtcccccagcctggcctacagccaagcgtgatggaggatgacattctgatggacctcatttag

SEQ ID NO: 229862 - DNA, 780 bp, synthetic construct
  misc_feature 1..780: note = Description of Artificial Sequence: Synthetic coding sequence
  source 1..780: mol_type = other DNA
atggtcccgggatctgagggcccagccagagctgggtccgtcgtggccgacgtcgtgttcgtgattgagggaacagcgaacctcgggccatatttcgagggattgaggaaacactaccttctcccagctatcgagtactttaatggagggccaccagccgagaccgatttcggtggcgactacggaggtacgcagtactccctcgtggtctttaatacagtggactgcgccccagagtcctatgtacaatgccatgcgcctacctccagtgcttatgagttcgttacctggttagacggaatcaagtttatggggggaggtggcgagagctgttccctgatcgctgaaggcttgtccacagccctgcaactgtttgacgactttaagaagatgagagagcaaataggccagactcacagagtgtgtctgctgatctgcaattccccaccgtatttattgccggctgtcgaaagtacgacgtactccggatgtaccacagagaatctggtccaacagatcggcgaacgcggaatccatttttctattgtgagtcctcggaagctgcccgctctgcgcctactatttgagaaggcagcaccaggactcgctggcgctgccgctgcatctgatcgctgcgaacccggacccgaagcgcacggagcagggtctggcactcgggctgcctgctgggggtggttatctccaagacctcctcccgttaaagccgcaagtcctcctgcttcacggaggaccctgcgctgccaggttcgttgttgttag

SEQ ID NO: 229863 - DNA, 1803 bp, synthetic construct
  misc_feature 1..1803: note = Description of Artificial Sequence: Synthetic coding sequence
  source 1..1803: mol_type = other DNA
atgaccgccgctcctgcgtccccccaacagattagggaccgcctcctccaggccattgaccctcagtccaacatcaggaatatggtggccgtcctggaggtgattagtagtctggaaaagtaccccatcacgaaggaagctctggaggagaccaggctgggaaaactgataaatgacgtccggaagaaaacaaagaatgaagagttggctaaacgcgctaaaaaactgctaaggtcctggcagaagctgatcgagcccgcacatcaacacgaagcagccctgagggggttagccggtgcgactggaagtgccaatggtggcgcacacaattgtcggccagaggtcggagccgctgggcctccgaggtctatacacgatctgaagagtcgcaatgatctccagagactgccgggtcagaggctggaccgactggggtcgagaaagaggcgcggagaccagagggacctgggccatcctggtccaccacctaaagtgagcaaagcttcccacgacccactggttcccaacagcagcccccttcctactaatgggatctccgggtcccccgaatcctttgcctcctccctcgacggatcaggtcatgcgggacccgagggctcaagattagagcgggatgaaaacgacaagcactcaggtaagattcctgtgaatgcagtgcggccacacacctcaagtccaggacttggcaagcctcctggaccttgcttgcagcctaaagcctcagttttgcagcagctcgacagagtcgatgagaccccaggaccgccacaccccaaaggtccgcctcgctgcagcttcagtccgcgaaactccaggcatgagggaagctttgcccgacaacagtcattgtatgcgcctaaaggaagtgttcctagtcccagtcccagacctcaggctctggacgctacgcaggtacctagtccccttccgctcgcccagcctagcaccccccctgtgcgaagactcgaactgcttcctagtgcggagagcccggtatgctggctggagcaacctgaaagtcaccagcggttagcgggtcctggttgcaaagctggcctctcccccgcagaaccgcttctgtctcgcgctggattctccccagattcatccaaggccgactcggacgcggcttcctcaggtggctctgactcaaaaaaaaagaagcggtaccgacccagggactataccgtgaacctggacggtcaggttgctgaggccggagttaaacctgtgagattaaaggagagaaaactcacatttgacccaatgaccaggcaaatcaagcccctgactcagaaggaacccgtcagggccgacagccccgtgcacatggagcagcagagtagaactgagctcgataagcaggaggccaaagcatccttgcagtcccccttcgaacagaccaattggaaggagctttcccgcaatgaaatcattcagtcctacttatctaggcagtccagcctgctgtcctccagcggcgctcagacacccggagctcaccatttcatgtccgaatatcttaaacaggaagaatccacccggcagggggctcgccaacttcacgtcctcgtcccacagtcaccgccaaccgacctgcctggcctgactcgagaggtaacccaggacgacctggatagaatccaagcttcgcagtggcccggtgtcaatggttgtcaggatactcaggggaattggtatgactggactcaatgtatctcgttggaccctcatggcgatgacgggcgactgaatatcctaccctatgtgtgcctggactag

SEQ ID NO: 229864 - DNA, 282 bp, synthetic construct
  misc_feature 1..282: note = Description of Artificial Sequence: Synthetic coding sequence
  source 1..282: mol_type = other DNA
atgaccgcagcacctgcatcccctcagcaaatccgggatagacttctgcaggcaatcgaccctcaatcaaacatcaggaacatggtggccgtgctagaagtcatctctagcctggagaaatacccgatcactaaggaggcactcgaggagactcgtctcggcaagctgatcaacgatgtgcgcaagaaaacgaagaacgaagagctggctaagagggccaaaaagctgctccccggttggcagtgggcatgccgtccgcgtggccagcccccaggcgcttag

SEQ ID NO: 229865 - DNA, 936 bp, synthetic construct
  misc_feature 1..936: note = Description of Artificial Sequence: Synthetic coding sequence
  source 1..936: mol_type = other DNA
atggcagacgttatcaatgtctccgtgaaccttgaagctttcagccaggcaatctctgcaattcaggctcttcgttcttcggtgagtcgggtcttcgactgcctgaaggacggcatgcgcaataaagagaccctcgaagggagggagaaggcctttatcgcacacttccaggacaacctccattcggtgaaccgcgatctgaatgaactggagcggctgagcaacctggtgggcaaaccttctgagaaccatcctctgcataattcgggcctgttatcacttgatcccgtgcaagacaagacccctttgtactctcagttactgcaagcttacaaatggtccaacaagctgcagtaccatgctggattggcttcaggcctgctcaaccagcaatcgctaaaacgttctgccaaccaaatgggggtgtctgccaagcgacggcctaaagcacagccaacaactctggtgttaccccctcaatacgtcgatgatgtgattagcaggattgaccggatgtttccggagatgtctattcacctgagtaggcctaacggcacaagtgcaatgctgctggtgacactggggaaggtgcttaaggttattgtagtgatgaggtccctttttatcgacaggaccatcgtcaaggggtataatgagaacgtatatactgaggacggtaagctggacatctggtctaagtctaactatcaggtgtttcagaaggtgaccgaccatgccactacggccctgcttcattaccagctgccacagatgcctgacgtcgtagttagaagctttatgacatggctgagatcttatataaagctatttcaagctccttgccagcggtgtgggaagttccttcaggatggcctgcctcccacatggcgcgattttaggacactggaggccttccatgatacgtgtcggcagtag

SEQ ID NO: 229866 - DNA, 714 bp, synthetic construct
  misc_feature 1..714: note = Description of Artificial Sequence: Synthetic coding sequence
  source 1..714: mol_type = other DNA
atgaggaacaaggagaccctcgagggtagggagaaggctttcatcgcacacttccaggacaacttgcacagtgttaatcgggacctcaatgagctcgagcggctgtccaatctggtcgggaagccctctgaaaaccatcccctccacaattcaggattgctatcactggacccagttcaagataagactcctctgtacagtcagcttctacaggcctacaagtggagtaacaaactccagtatcatgccggtctggccagcggtctactgaaccagcagagcttaaagcggtcagccaatcaaatgggagtatccgccaagagaagacccaaagcccagccgaccacactagtcctgccgcctcagtacgtcgacgatgtgatctcgcgcatagatcgcatgttccccgaaatgtctattcatttgagccgacccaacggaaccagcgcgatgcttctcctggacatctggagcaaatcaaattatcaggtatttcagaaggtcacggaccacgcaacaacggctctgctgcattatcagctcccacagatgcctgacgtcgtggtgagaagctttatgacatggcttaggtcttatattaagctgtttcaggcaccatgtcagagatgtggcaaatttctacaggatgggttgcctccaacctggagggattttaggacccttgaagcattccacgatacttgtagacagtag

SEQ ID NO: 229867 - DNA, 828 bp, synthetic construct
  misc_feature 1..828: note = Description of Artificial Sequence: Synthetic coding sequence
  source 1..828: mol_type = other DNA
atggccgacgttatcaatgtctcagtcaatctagaggccttttcccaagctatctcggctattcaggccttacgtagcagcgtgagtcgtgtgtttgactgcctcaaagacggcatgcgcaataaggaaactctcgagggacgtgagaaagcatttatcgcgcacttccaggataaccttcactccgtcaatagagatctgaacgagctcgaacgcctcagcaatctcgtcggtaaaccaagtgagaaccaccctctgcacaactccggtttattaagcctagatccggtacaggataagacccctttgtattcacaattactgcaggcctacaagtggtccaacaaacttcagtaccacgctggactcgccagcggtctacttaaccagcagtctctcaaacggtccgcgaatcagatgggagttagtgccaagcgacggccaaaggcccagcccactactcttgttctgccaccacaatacgtggacgacgtgatcagccggattgatcggatgttccctgaaatgtccatccatctatcaaggccaaatgggacaagcgccatgcttcttctggatatctggtccaagagcaactaccaggtgtttcaaaaggtgaccgaccacgccactactgcccttctgcactaccagctgccacagatgcccgatgtggtggtcagaagcttcatgacatggctgaggagttacattaagcttttccaggcaccctgccagcgctgcggcaaattccttcaggacgggcttccacctacctggagagatttcagaactctggaggcattccatgacacatgtcggcagtag

SEQ ID NO: 229868 - DNA, 666 bp, synthetic construct
  misc_feature 1..666: note = Description of Artificial Sequence: Synthetic coding sequence
  source 1..666: mol_type = other DNA
atgcttaagtcaaatggcgagagacgcagccggaacgccctgcctgctgtttacgcaagaaagatggcagcctcccaacagcaagctagtgcggcatcgtccgctgccggtgtcagcggaccttcttccgccggaggcccagggcctcaacaacagccgcagccccctgcccagctggtggggcctgcccaaagcggcttgctccagcaacagcaacaggatttcgatccggtgcaacgttacaaaatgctcattcctcaactgaaagaatctttgcagactctgatgaaagtggctgcccaaaacctgatccaaaatacgaatatagacaatggccagaagtccagtgacgggcctattcaaaggtttgacaagtgcctggaagagttctatgccctctgcgatcagctggagctgtgcttacggttggcacatgaatgcctgtcccagtcttgtgatagcgctaaacatagtcccaccttggtacctacagctacgaagcccgatgcagtacagcccgatagtctgccatatccacagtatctcgcagtgatcaaggctcagatttcatgtgccaaggacattcacaccgctttgctcgactgcgctaataaggttaccggcaagacgcctgcccctcctgctgggccaggcggtactctgtag

SEQ ID NO: 229869 - DNA, 420 bp, synthetic construct
  misc_feature 1..420: note = Description of Artificial Sequence: Synthetic coding sequence
  source 1..420: mol_type = other DNA
atgttaattccacaactgaaggaatctctgcagacgcttatgaaggttgcggcacagaacctgattcagaacacaaacatagataatgggcaaaaatcttccgacgggccaattcaacgattcgacaagtgccttgaagagttttatgccctgtgtgaccagttggagctttgtttgcgtctggcccatgagtgcttatcacagtcctgcgattccgctaagcactcacccaccctggtgcctactgcaactaagcccgacgccgtgcagcccgacagtctgccttaccctcagtatttggccgttatcaaggctcaaatcagctgtgcaaaggatatccacacagcgctcttggattgcgctaataaggtgaccggaaagacccctgcgcctcctgctggccctgggggtaccctttag

SEQ ID NO: 229870 - DNA, 537 bp, synthetic construct
  misc_feature 1..537: note = Description of Artificial Sequence: Synthetic coding sequence
  source 1..537: mol_type = other DNA
atgagcacaccgcctttggccgcatcggggatggctccaggccctttcgctggaccacaggcccagcaggcagcacgtgaggtgaataccgcgtcactgtgtaggatcggccaggagacagtgcaggacatagtgtacaggaccatggaaatatttcagctcctacggaatatgcagctgcccaatggggtgacctaccacacaggcacttatcaggatcggctcaccaaactccaagacaatttgcgtcaactcagcgttctttttaggaaactgcggctcgtgtacgacaagtgcaatgaaaactgcggcggtatggacccaattcccgtcgagcagttgataccctacgtcgaggaggatggaagcaaaaacgacgatcgagctgggcctccacggttcgcctctgaagaacgcagagagatcgctgaggtgaataaaaaactgaagcagaagaatcagcagctgaagcagataatggaccagctgcgaaacctgatctgggacattaacgccatgttagctatgagaaattag

SEQ ID NO: 229871 - DNA, 813 bp, synthetic construct
  misc_feature 1..813: note = Description of Artificial Sequence: Synthetic coding sequence
  source 1..813: mol_type = other DNA
atggctgcctccagttccggcgagaaggaaaaagagaggttaggaggtggccttggggtcgccggaggaaattccacccgagaaaggctgctgtcagcgctcgaggacctggaggtgttgtctagagagttgatcgagatgctggcaattagtcgcaaccagaaactgctacaagccggagaggaaaaccaggtactagaactattgatacatcgtgacggggaattccaggaactgatgaagctggctttgaatcagggaaagattcatcacgagatgcaggttctggagaaggaagtcgagaaaagggatagcgatatccagcagctccagaagcagcttaaagaggccgaacagatcctggccaccgccgtctaccaagccaaagagaaactgaagtccatcgagaaggccagaaaaggtgctatctcgagcgaggagatcataaaatatgctcatagaatatcagctagtaatgccgtgtgtgctcccctcacgtgggtgcctggcgatcctcggagaccctatcccaccgacctggagatgagatctgggctgttaggacagatgaataacccgtcaactaacggtgtgaatggacacctgcctggggatgcgttggctgccggacggctacctgatgtcttggcgccacaatacccatggcaatctaatgacatgtcaatgaatatgctgcccccaaaccacagctcagactttttgctggaaccccctgggcataataaagagaacgaggacgatgtggagatcatgtctaccgactcttcatcatcctctagtgaaagtgactag

SEQ ID NO: 229872 - DNA, 675 bp, synthetic construct
  misc_feature 1..675: note = Description of Artificial Sequence: Synthetic coding sequence
  source 1..675: mol_type = other DNA
atgctagctatttcccgcaatcagaaacttttgcaggcgggtgaagaaaatcaggtcctggagttgttaatccatagagacggggaattccaagagctaatgaagctagctttgaaccaggggaaaattcaccacgagatgcaggtgctggaaaaagaagtggagaagagggactctgatatccaacagctacaaaaacaactcaaagaggccgagcagatccttgccacagctgtctaccaagccaaagagaaactcaaatcaatcgaaaaagctcggaagggcgctattagttcagaggagattatcaaatacgcccatcgtatatcagcgagtaacgctgtgtgcgccccacttacctgggttcctggagatcctcgacgcccttaccccacggacttggagatgcgcagcgggctgctgggtcagatgaataatccctctactaatggagtgaacggccacttgcctggcgacgcattggcagccggtagactgcctgacgttctggcccctcaatacccttggcaatccaatgatatgtcaatgaacatgctgccccctaaccactccagcgactttctgctcgaacctccgggacacaacaaagagaacgaggatgatgtggaaatcatgtctacagattcttcaagctcatcctctgagagtgattag

SEQ ID NO: 229873 - DNA, 747 bp, synthetic construct
  misc_feature 1..747: note = Description of Artificial Sequence: Synthetic coding sequence
  source 1..747: mol_type = other DNA
atgaagctcttatggtggtgtgattggctgcccgagagatcacacgtgttcacacaaagggaactgatcgaaatgctcgctatatctaggaaccaaaagctgctccaagctggggaggagaaccaggttcttgagcttctgattcacagagatggggagttccaagagttaatgaagctcgctctgaaccagggtaaaattcatcatgagatgcaagtcctggaaaaggaggtggagaagagagactccgacattcagcagctccagaagcagctgaaggaggctgaacagatactcgccacagccgtataccaggccaaggagaagctgaaatccatagagaaggcccgtaaaggtgcgatttctagtgaagagattattaaatatgcccaccgcattagcgccagtaatgcagtttgcgctccgctaacgtgggtccccggagaccctcggaggccgtatcccactgatttagagatgcgctctggcttactgggacagatgaacaatcctagtacaaatggtgtgaacggtcatttaccaggcgacgccctggctgccggacgcctgccggatgtcttggcgcctcagtatccatggcagagcaacgacatgtctatgaacatgttgccccctaatcacagctcagacttcctgctggaaccccctgggcataacaaggagaatgaggatgacgttgagatcatgagtaccgattcctccagttccagctctgagtctgactag

SEQ ID NO: 229874 - DNA, 717 bp, synthetic construct
  misc_feature 1..717: note = Description of Artificial Sequence: Synthetic coding sequence
  source 1..717: mol_type = other DNA
atgaagctgttgtggtggtgcgattggctgccagaacgctctcatgtgttcactcagagggagctcatagagatgcttgcaatatcaagaaaccaaaagcttctacaggctggcgaagaaaatcaggtgctggagctattaatccacagagatggtgaattccaagagcttatgaaattagctctgaaccaaggtaaaatccaccatgagatgcaagtactggagaaggaagttgagaagagagattccgacatacagcagttgcagaaacagctgaaagaagccgaacagattctggctaccgccgtctatcaggcaaaggaaaaattaaaatcaattgagaaggcccgtaaaggtgcgatcagcagtgaggagataatcaaatacgcacatcgcatttccgccagcaacgccgtctgcgccccactgacatgggtacccggtgacccaaggaggccatatccaacagatcttgaaatgaggagtggcctacttggacagatgaataatccttccactaatggcgtgaacggccatttgccaggggacgcgttggcggctggcaggttgcccgatgtgttggcccctcagtatccttggcagtctaacgacatgtccatgaatatgctgccccctaaccacagctcagactttttgctggagccaccagggcataataaagagaatgaggacgatgtcgagatcatgtcaacttag

SEQ ID NO: 229875 - DNA, 702 bp, synthetic construct
  misc_feature 1..702: note = Description of Artificial Sequence: Synthetic coding sequence
  source 1..702: mol_type = other DNA
atgggggaaccccagcaggtgtctgctttgcccccacctccaatgcagtatattaaggagtataccgatgaaaacattcaagaggggttggcacccaaaccccctccgcctatcaaagattcttatatgatgtttggaaatcagtttcagtgtgacgatttgatcattcgccctctggagtcgcagggaatagagcggctccatcctatgcagtttgatcacaagaaagaactccgaaaactcaatatgagcattctgatcaacttcctagatctcctggacattcttatccgatcacccggaagtattaaaagggaagaaaaattggaagatctaaagcttctttttgtccatgtgcatcacctgataaacgaataccgtccacaccaggccagggagacccttcgggtcatgatggaagttcagaaaagacagcgcctggaaacagccgagaggttccagaagcacctcgagagggtgattgagatgatccaaaattgtcttgccagcctgcctgacgacctgccccactccgaggccggaatgagggttaagacggagccaatggacgctgacgactctaacaattgcacaggccagaatgagcatcagagagaaaactccgggcatcgcagagatcagatcatcgagaaggatgccgctctgtgtgtcctgattgatgagatgaacgaaagaccctag

SEQ ID NO: 229876 - DNA, 702 bp, synthetic construct
  misc_feature 1..702: note = Description of Artificial Sequence: Synthetic coding sequence
  source 1..702: mol_type = other DNA
atgggggagcctcagcaggtgagtgctctgccaccccctccaatgcagtatatcaaggagtacacagatgagaacatccaagaaggactggccccaaagcccccaccacctattaaggattcatacatgatgtttgggaaccagttccagtgcgatgacctcatcattcgccctctggagagccaggggattgagcgactgcacccaatgcaattcgatcacaaaaaggagctgcggaaattgaacatgagcatcctgatcaattttctcgaccttcttgatatactgattaggtcaccaggctctattaagcgggaagagaagcttgaggatctgaagcttctgttcgttcacgtccaccatctgattaatgagtaccgtccacaccaagcacgagaaactcttcgagtaatgatggaggttcagaagagacagcgtctcgagacagccgaacgtttccagaaacacttggaaagggtgatagaaatgattcaaaactgtctggcaagcctccccgatgatctgccacactctgaggcaggtatgcgcgtgaagaccgaacccatggatgccgacgattcaaacaattgcaccggacagaacgagcaccaaagagagaattctgggcaccgccgagaccagattattgaaaaggatgccgcactgtgcgtgttgattgacgagatgaatgagcgaccgtag

SEQ ID NO: 229877 - DNA, 588 bp, synthetic construct
  misc_feature 1..588: note = Description of Artificial Sequence: Synthetic coding sequence
  source 1..588: mol_type = other DNA
atgggcgaacctcagcaggtcagcgcgttgcccccaccgcctatgcaatacatcaaagaatacacggatgagaacattcaggaaggcctggccccaaaacctcccccacccatcaaggatagctacatgatgttcggtaatcagtttcagtgcgatgatctgatcatccgcccacttgaaagccaaggaattgaacggctgcacccaatgcagttcgatcacaaaaaagaactgagaaagctgaatatgtccatccttatcaactttttggatctgctggacatccttatccgctctcccggatcaattaagcgggaggagaaacttgaggatttgaagcttctttttgtccacgtgcatcatctgattaatgagtatcgccctcatcaggcaagagaaacattgcgcgtcatgatggaggtgcagaagcgccagagactcgagactgcagaaaggttccaaaagcatttggagcgcgtcattgagatgatccaaaattgccttgccagtctcccagacgatcttcctcattccgaggctggcatgagagtgaaaacagaacccatggacgctgacgactcaaactag

SEQ ID NO: 229878 - DNA, 441 bp, synthetic construct
  misc_feature 1..441: note = Description of Artificial Sequence: Synthetic coding sequence
  source 1..441: mol_type = other DNA
atggcgtcagccggagtagcagccggaagacaggcggaagacgtgctgccgcctaccagtgaccagccactacccgacacgaagcccctgcccccaccacaaccgccacctgtgccggcacctcaaccacagcagtcacccgcaccccgtccccagagccccgcacgagcccgagaggaggaaaattactccttcctacctttggtgcacaatattattaagtgcatggataaggactcaccagaggttcaccaggatctcaatgcactcaaatctaaatttcaggaaatgagaaagctcatctctacgatgccagggatccatctgtctcctgagcagcaacagcagcaattacaatccctgagggagcaagtgcgtacaaagaacgaactactgcagaagtataaaagcctttgcatgttcgaaatccctaaggagtag

SEQ ID NO: 229879 - DNA, 894 bp, synthetic construct
  misc_feature 1..894: note = Description of Artificial Sequence: Synthetic coding sequence
  source 1..894: mol_type = other DNA
atgtctaaccgggtggtttgtagggaagccagccatgccggatcatggtacactgcctctggcccacagttaaatgctcaactggaagggtggctgtctcaggtacagtctacaaagcgaccagcacgcgctattattgcccctcatgccggatacacatattgcggcagctgtgcagctcacgcatacaagcaggtggacccgtcaattacacggaggatcttcatcctgggtccgtctcatcacgtgccgctgagccgctgcgccttgtcgtcggtggacatctacagaaccccactttatgacctgcggatcgaccaaaagatctatggggaactttggaagaccggcatgtttgaacgcatgtcccttcagaccgatgaagatgaacacagcattgaaatgcacctgccatacaccgctaaggctatggagtctcataaggatgaattcaccatcattcccgtcctggtgggagcactctccgagtcgaaagaacaggagtttggcaagctcttttctaagtatctcgccgacccaagtaatttgttcgtggtgtcctctgacttctgtcattgggggcagagatttcgctacagctactatgatgagagccagggagaaatttaccggtctatcgagcatctcgataagatggggatgagcatcatcgagcagctggacccggttagtttcagtaactacctgaaaaagtatcataacaccatttgcggacgccaccccatcggtgtgcttcttaacgccattactgaactccaaaagaacggtatgaacatgtcattcagttttctgaattatgcccagagctctcagtgtaggaactggcaggactcatctgtgtcttacgctgccggtgcgttgacagtccattag

SEQ ID NO: 229880 - DNA, 903 bp, synthetic construct
  misc_feature 1..903: note = Description of Artificial Sequence: Synthetic coding sequence
  source 1..903: mol_type = other DNA
atgcctctttggcgagccgataaatgtcaggacgtacagtctgcttcctggaggcctagaagggctgacggaccacagctgaacgcacagttggaggggtggcttagccaggtccaaagcaccaagcgccctgctagggcaattatagctccacacgctgggtacacatattgcgggtcctgcgcagcccacgcctacaaacaggttgacccatccatcacccggcgaattttcattctaggcccaagccaccatgtgccattgagtagatgcgctctgtcttcagttgatatctacagaactcctttatacgacttacggatcgaccagaagatttacggagagctttggaaaactgggatgtttgagagaatgtcgttacagacggacgaagatgagcacagtatcgaaatgcacttgccgtacacagcgaaggccatggaatcacataaagatgaattcaccataatccccgtgcttgtgggcgcactcagtgagagtaaagaacaggagttcggaaaactcttttcgaagtacctcgccgatcctagcaacctcttcgtagtaagctcagatttctgccattggggccagagatttagatattcctactacgatgaaagtcagggtgagatctatcggtctatcgaacacctggataagatgggcatgtcaatcatagagcagttggaccctgtttctttctcaaactacctcaagaagtaccacaacactatctgcggccgtcatcccataggcgttctgctgaacgctattaccgaattgcagaagaacggtatgaatatgtctttttcctttctcaattatgcccagtccagccagtgtaggaattggcaggattcttccgtttcttacgctgctggggcactaaccgtacattag

SEQ ID NO: 229881 - DNA, 894 bp, synthetic construct
  misc_feature 1..894: note = Description of Artificial Sequence: Synthetic coding sequence
  source 1..894: mol_type = other DNA
atgtccaatcgggtggtctgtcgcgaagctagccacgccggatcctggtatacagccagcggccctcagctgaatgcacagctagaaggctggctctcccaagtccagtcaactaaacgtccagctcgtgctatcatagctccccacgctggttatacttattgcggctcatgtgcagctcacgcctataagcaggtcgatccatcgattactcgtcggatctttattctgggtccctctcatcacgtgcccctctcccggtgcgccttgtcaagcgttgatatttaccgcacccccctgtatgacctgcgaatcgaccagaaaatttacggcgaactgtggaagaccggtatgtttgaacgcatgtcactccagacagatgaagatgaacactctatagaaatgcatctgccgtacacagcaaaagctatggagagccataaagatgagtttacaatcatccctgtgctggtgggagctcttagcgaatcaaaagaacaagaattcggcaaattattctccaaatacctggcagatcccagcaacttgttcgttgtgtcctctgacttctgtcattggggacagcggttcagatattcctattacgacgaatcccaaggggaaatctaccgcagcatcgagcatctcgataagatggggatgagcattattgagcagctcgacccagtctcgttctccaattacctgaagaagtatcacaacaccatctgcggccgtcatcctattggtgttctacttaacgcaataactgagcttcagaaaaacggaatgaatatgagcttttcgtttctaaattatgcacagagttctcaatgtcggaactggcaggatagttcagtgtcttatgccgctggggcactcacagtgcactag

SEQ ID NO: 229882 - DNA, 825 bp, synthetic construct
  misc_feature 1..825: note = Description of Artificial Sequence: Synthetic coding sequence
  source 1..825: mol_type = other DNA
atgtccaacagggtggtctgcagagaggcttcacatgcgggatcctggtacactgcaagcggtccccaactgaatgcacagttggaaggatggctgagtcaagtccagagtactaaaagacccgctagggcaatcattgcacccaggcgaattttcatcctggggcctagtcatcatgtccccctgagcagatgtgctctgtcttctgtggacatttaccggacccccctctatgatcttcggatcgaccagaaaatctatggggagctttggaagactgggatgttcgagcggatgagtctgcagaccgacgaggatgagcacagtattgagatgcaccttccatacaccgctaaggctatggaaagtcacaaggatgagtttacaattattcccgtgctggtcggtgctctgtcagaaagtaaggagcaggagtttgggaaactgttctcaaaatacctagctgatcctagcaaccttttcgtcgtgagttccgatttctgccattggggccagcggttcaggtacagctattacgatgaaagccaaggagagatctatcggtccatcgaacaccttgataaaatgggcatgagtattattgaacagctggacccagtcagcttctcgaactatctgaagaagtaccacaacacaatatgcggacgccatcccatcggggttctgctcaatgcgattaccgagcttcagaaaaatggcatgaacatgtcattttccttcctgaattatgcacagagctcccaatgtagaaattggcaggatagctccgtctcttatgccgcaggcgcactaaccgtgcactag

SEQ ID NO: 229883 - DNA, 63 bp, synthetic construct
  misc_feature 1..63: note = Description of Artificial Sequence: Synthetic coding sequence
  source 1..63: mol_type = other DNA
atgtcaaaccgcgtagtgtgtagagaagcgtcgcacgccggtagctggtatacggcttcgtag

SEQ ID NO: 229884 - DNA, 5477 bp, synthetic construct
  misc_feature 1..5477: note = Description of Artificial Sequence: Synthetic coding sequence
  source 1..5477: mol_type = other DNA
atggaagacacccaggctattgattgggacgtggaagaagaggaagagacagagcagtcctctgagtccctgcgctgtaacgtcgagcccgttggcagactgcacatctttagtggggcacatggacctgaaaaagattttcccctgcacctaggcaagaacgttgtgggtaggatgccagactgtagcgtggcccttccattccctagcatcagcaagcaacacgctgagatcgaaatcctggcgtgggacaaagctcctatcctgcgggactgtggatctctcaacggaacgcagatattaaggccccctaaagtgctgtcccctggagtttcccatcgcctccgcgaccaggaattaatactgtttgccgacctgttgtgccagtatcataggctggatgtttccctccccttcgtcagccgaggaccgcttaccgtggaagagacaccacgagtacaaggagaaactcagcctcagcgcctcctcctggcagaggatagcgaggaggaggttgactttctatctgaacgaaggatggtgaaaaaaagccgaacaaccagtagttccgttatcgtccctgagagcgatgaggaaggtcacagccctgtcctgggcggtctcggaccaccctttgcctttaacctgaattcagataccgatgtggaagaaggacagcagcccgcaactgaggaggctagctccgctgcacgccgtggcgcaaccgtggaagccaagcagagcgaagcagaggtggtgactgaaattcaactggaaaaagaccagcccctggtcaaagagcgcgataacgacaccaaggtgaaaaggggtgctggtaacggcgtagtgccggctggggtcatcctcgagcgaagccagccacctggcgaagacagtgacaccgatgtagacgatgattctcgtcccccaggaaggcccgcagaagtgcacttggagcgcgctcagcctttcggattcattgatagcgacactgatgccgaagaggagagaattcccgctacaccagttgtgatccctatgaaaaagaggaagatatttcacggcgtcggtacaaggggaccaggggcacccggactggcccatctacaggagtcccaggcaggaagtgatacagacgtggaagaagggaaagcaccccaggccgtcccactcgaaaaatcccaggcatcaatggtcattaatagtgacaccgacgacgaagaagaagttagtgcagcgctcacactggcccacctgaaggaaagccagcctgcaatttggaatcgggatgccgaagaagatatgccccagcgcgtggtgctgctgcagaggtctcaaacgacaacggagcgcgatagcgataccgacgtggaggaggaagagttgcccgtcgagaacagagaggcggttctcaaagaccacactaagatccgggcactagtacgggcacactcagaaaaggaccagccccctttcggcgatagcgacgactctgttgaagccgacaaatcttctcctggaattcacctagagcggtcccaggcatctacgacagtcgacattaatactcaggtcgagaaagaagtgccacccggaagtgccattatccatattaaaaagcatcaggtttcagtggaaggtactaaccagactgacgtgaaggcggtgggcggtccagctaagctgctcgtggtcagtcttgaggaggcctggccacttcacggtgactgcgaaaccgatgccgaggagggcacatctctcacagcaagcgtggtggctgatgtgcgaaaatcccagctcccagctgagggagacgctggggctgagtgggcagcagccgtgttaaaacaggagcgagcccatgaggtgggggcacagggcggtccacccgtggcacaagtagaacaggacttgccgatcagccgggaaaatttgacggacctcgttgtggataccgacacactaggtgaatctactcagcctcagagagaaggtgcgcaagtcccaaccgggcgagagcgcgagcagcacgtaggcggtaccaaagatagcgaagacaattatggcgactctgaggacctggatctccaagccacacagtgttttttagaaaatcagggcctcgaggctgtacagtcaatggaggacgagcccacccaggcattcatgttaacgccgccacaggaattaggcccttctcattgtagttttcagacaaccggacttttgaactgcaaaatgccccctgccgaaaaggcaagccgcattcgggcagccgagaaagtcagcaggggggaccaggagagtcctgatgcctgcctacctcctaccgtgcccgaagcccctgccccaccccagaagcccttaaatagtcagagccagaagcacctggccccacctccccttctcagtcctctattgccatctattaagccaacagtgcggaaaacccgccaggatggaagccaggaggccccagaagcccctctgtcctctgaactggagcctttccaccctaagcccaagatcaggacgcgtaagtcttcaaggatgacaccattcccagctacgtctgccgctccagagcctcaccctagtacttcaacagcccagccagtgacaccgaagcccacttcccaggcaactcgatcccgtacaaaccgatcttctgtgaagaccccagagcctgttgttcccaccgcaccagaactgcaacctagtacatcaactgatcaacctgtgaccagcgaaccaacatctcaagtgaccagggggaggaaaagtcggagctcagtaaaaactcccgaaacagttgtgcctacagcacttgaactgcagccctctacctccaccgaccgcccagtcacgagcgagcccacatcacaggcaacacggggtagaaaaaatcgcagcagcgtaaagactcccgaacctgtcgttcctactgcccctgagcttcagcccagcacttccacggaccaacctgtcacaagcgaacctacctaccaagccacgcgtggaaggaaaaatcgctccagcgtgaaaacccccgagcctgttgtccccacagcccctgaactccgaccaagcacgagcaccgatcgcccagttacccccaagccgacctctcggactactcgatctcggaccaacatgagcagcgtcaagaccccggaaacagtcgtgcctactgcacctgagcttcaaatctctacatcgaccgaccagcccgtcaccccaaaaccgacctccagaacaacaagatccaggaccaacatgtccagtgtcaaaaaccccgagagtacagtgccgattgccccagagctgcctccaagtaccagcacagagcagccagtcacgccggaacctacgagccgagccactcgtgggagaaagaaccgaagtagtgggaagactccagaaactttagtacctacggcacccaagttagagccgtccacaagtacagaccagcctgtgacgccagagccgacctcgcaggccacccgtggcagaaccaaccggtccagtgtgaagaccccggaaaccgtcgtgcctaccgctcctgaattacagccgtcaacgagcacagatcagcctgttactcctgagcctacatcccaggcaactagggggagaaccgacagatcttctgttaagactcctgagacagtcgtgcccacagccccagaactccaggcatctgcttcgacagaccaaccggttacctcagaacccactagtcgaacaacacgcggtcgtaagaacagatcctcagtgaagacacccgaaaccgtcgtgccggcagcacctgaactccagccctctacctcaacagaccagccggtcactcctgaacctactagtcgagccactagagggaggacaaacaggagcagtgtgaagacccccgagagcatagtcccaatcgcccctgagctgcagccgagtactagtcgcaaccagctcgtgactccagaacccacttcccgagccactcgctgccggaccaaccgttcctccgtcaaaacaccagaacctgtggttcccaccgcacccgagccacaccctacaactagtacagaccagccagtcacacccaagctgacttctcgggctactcggagaaaaacgaataggagctccgttaagactccaaagcccgtggagccggctgcctccgacctcgagccattcactccaacagatcaatctgtcacacccgaggcgattgctcagggtggacagtctaagacactcagatccagcacagtgagagccatgcctgttcccacaacaccagagttccagtcccccgtaacaaccgaccagcctatttcacccgagccaatcacccaaccttcctgcattaagagacagcgggcagctggtaaccccggtagtctcgccgcacccatcgaccacaagccttgctcagcccctctcgaacctaaaagtcaggcaagccggaatcaaagatggggtgctgttagggctgccgagagcctgaccgctatccccgagccggcaagcccacagctgctggaaactcctattcacgcgtcacagattcagaaggtggaacccgcaggaaggtcacgatttactccagagttgcagcctaaagcgtcccagtcacgtaaacggtccttggcaactatggattctcctccccatcagaagcagccacagcggggagaggtgtctcagaagacagttattatcaaggaggaagaagaggatactgccgagaaacctgggaaagaagaagacgtcgtaacccccaagccaggaaagcggaagcgcgatcaggccgaagaagagccaaacagaataccctctagatccctgcgcagaacaaaacttaatcaggagtcaacagccccaaaggttctgtttactggggtggtggacgccagaggcgagagggctgtcttggcccttgggggttccctcgcgggtagcgcagccgaagccagccacctggtgacggaccgaatcagacgcaccgtgaagttcctttgtgcactcggacgaggaatccccatcctttccctggattggctgcatcagtcaaggaaagcaggctttttcttgccaccagatgagtacgtcgtgaccgacccagagcaggagaagaatttcggcttcagcctgcaggatgccctaagcagggctcgagaacggagactccttgaggggtatgagatatacgttacgcccggtgtccaaccccctccgcctcaaatgggtgagatcataagctgctgcggcggtacttatctgccctcaatgcctaggtcctacaaaccccagcgagtcgtgatcacctgtcctcaggacttcccacactgcagcatccccctgagagtgggccttcccctgttatcaccggagtttctactgaccggtgtccttaagcaggaagccaaacctgaggcattcgtgttgtcccctctggagatgagtagtaccta

SEQ ID NO: 229885 - DNA, 6269 bp, synthetic construct
  misc_feature 1..6269: note = Description of Artificial Sequence: Synthetic coding sequence
  source 1..6269: mol_type = other DNA
atggaggacacacaggctatcgattgggacgttgaagaggaggaagaaactgagcaatcctcggaatctctcaggtgcaatgtagagccagtgggccgactgcatatcttcagtggggctcacggtcccgaaaaagatttcccgctgcatcttggtaaaaacgttgtcggcaggatgcccgactgcagtgttgccctgcccttcccctcaattagtaaacagcatgcagaaattgaaattctggcttgggataaagcacccattctccgtgattgcggctcccttaacgggactcaaattctgagacctcccaaggtgctcagccccggagtcagccatcggcttcgcgaccaagaattgattcttttcgccgatctcctgtgccagtaccacagacttgatgtttcactcccttttgtttctcggggtcccctgaccgttgaagaaacaccacgcgtgcaaggcgaaacccagcctcagcggctccttcttgccgaggatagtgaggaggaagtagatttcctgtccgaacggagaatggtgaagaaatctagaacaacgtcctctagtgtcatcgttcccgaatcagatgaggagggccacagccctgtgctggggggacttggtccaccattcgcttttaatctgaacagcgacacggacgttgaggaaggtcagcagcctgccaccgaggaggcatcatccgctgccagaagaggagccactgtggaagcgaagcaatcagaagctgaggtagtgaccgaaattcagctcgaaaaagaccagccactggtcaaagaaagagataacgacacaaaggttaagagaggggcagggaatggagtggtccccgcaggcgttattctagaaaggagccagccacctggggaggactctgatacagacgttgacgacgattcccgccctcccggtcgaccggctgaagtgcatctggagagagctcagccatttggctttatagacagcgacacagatgcagaggaagaacgcatacctgctaccccggtggtgatcccaatgaagaagcggaaaatctttcacggcgtgggaacacggggtcctggcgctcccggtctggctcacttgcaggaaagtcaggccggatccgacactgacgtggaggaagggaaagcccctcaggccgtaccactggaaaaaagccaggcctcaatggtgatcaacagtgacactgatgatgaagaggaggttagtgccgctctcacccttgcacacttgaaggaatcccagccggcaatttggaaccgtgatgctgaagaagatatgcctcagagagttgtgcttctacagcgaagtcagaccacaaccgagagagactctgacaccgatgttgaggaggaggagttgccggttgagaaccgggaggccgtccttaaggaccacaccaagatcagggcactggtaagagctcatagcgagaaagaccaacccccttttggagatagcgacgattccgtggaagctgataaatcctccccaggcattcacctggaacgctctcaggcctcaaccactgtagacattaacacccaggtcgagaaagaagtaccaccgggtagtgccattatccatatcaagaagcaccaagtgagcgttgaaggaaccaaccaaacggatgtcaaagcggtgggtggacccgctaagctccttgttgtgagcctggaggaggcctggcctctgcatggggactgcgagacggatgcagaagaggggacttcgctgactgcgtcagtcgtagctgacgtacggaaatcacagctgcctgctgagggcgacgctggagccgaatgggccgctgctgtgttgaaacaagaacgcgcacatgaagtcggagcccagggcggtccaccagtggcccaagtagaacaagacctgccaatctcccgggagaatttgaccgacctggtcgtggacactgacacgctaggggagagtactcagcctcaacgagagggcgcacaggtgcctactgggcgtgagcgggaacagcacgttggcggaactaaagactctgaggacaactacggcgactcggaggacctggacctgcaggctacacaatgtttcctcgaaaaccagggcctggaggcagttcaatctatggaggatgagccaactcaggcctttatgctgacaccaccgcaggagctcggaccctcccattgctcttttcagaccaccggtactctggatgagccttgggaagtcttagctacgcagcccttctgtctaagagaaagcgaggatagcgaaacccagccattcgatactcatttagaggcatacgggccttgtctgtcaccacctagggctataccaggagaccagcatccggagtctccagttcacactgaacctatgggcatccaaggcagagggcgacagaccgtagataaagtgatgggaatacccaaggagaccgcagagagagtgggtccggagcgcggacctctggagcgtgagacagagaagctcctgccagaaagacagactgacgtaaccggcgaagaagaattaacaaagggtaaacaggatagagagcagaagcagctcctggctcgagacacccagaggcaggagtccgataaaaacggcgagtccgcctcgcctgaaagagaccgcgagagtcttaaggtggaaatagagactagtgaagaaattcaggaaaagcaagtccaaaaacaaactctgccatccaaggccttcgaaagagaagtagagcgaccggttgcaaacagagaatgcgatcctgccgagctggaagagaaggttcccaaagttattttggagcgggacacgcaacggggagagcctgagggtggatctcaggaccagaagggtcaagcaagttctcccacccctgaaccaggtgtaggtgccggtgatcttcccggacccacaagcgccccagtgccctccgggtctcagtccggcggtcgtggatccccagtctcgccgaggcggcaccagaaagggctactgaactgtaaaatgcccccagctgaaaaagcgtcccggatcagggctgccgagaaggtaagccgaggcgatcaggagagcccagacgcctgtctcccccctactgttccagaggcaccggcaccaccacaaaagcctcttaacagtcaatcccagaagcacctggcccctcccccactcctgagccctctgttgcctagcatcaagcccactgtgcgaaagaccagacaggatggctcacaggaggcaccggaggcacccctgagcagcgagctcgagcctttccatccaaaacctaagatacgcactagaaagagttctcgtatgacgcctttcccagccacctcagccgctcccgaaccacacccttcaacaagcaccgcccagcccgtgacgccgaagcccacttcgcaagctacccggtcgcgcaccaacagatcctctgtgaagacccctgaaccggtggtgcccactgctcccgagctgcaaccaagtaccagtacagatcagccagtcacgagcgagcccacaagccaagtgactcggggacggaagagccgctcatccgttaagactcccgaaaccgtcgtccctaccgctcttgagctgcaaccttccacgagcacagaccgcccagtcacatccgagcctacatctcaagcaacgcgcggtcgcaaaaacagaagctcagtgaaaaccccagagccagtggtgcccaccgccccagaactgcagccctccacgtctaccgaccagcccgtcaccagtgagcccacctatcaggccacacgcggaagaaagaaccgctcctcagtcaagactcctgaacccgtggtgccaacggcgcctgaactccgcccatcgacgagcacggataggccagtcactcccaaacctacgagtcggaccacacggtcaaggaccaacatgtcatcagtcaagacgcctgaaactgtcgtgcctactgctcccgagctccagatttctacctccacagatcagcctgtcactcccaagccaacctctcgcacaacacgctctcgaacaaatatgagcagcgttaagaatccagagagcactgtaccaattgcgccagagctacctccatctacttcaacagagcaaccggtgacgccagagcccaccagccgcgctacccgcggacgtaaaaacagaagtagtgggaagaccccagaaacactggtgcctactgccccaaaactggagccctccacgtcaactgatcaacccgtaacccctgaaccaacaagccaggctacccgcggtcggactaatcggagttccgtcaagacccccgaaaccgtggtcccaacggcccctgaattgcagccatcaactagcaccgatcagcctgtgacccctgaacctacttcccaagccacacgtggaaggaccgatagaagctctgtgaagaccccggagactgtggtgcctaccgctcccgagttgcaggcgtctgccagcacagaccagcccgtaacttccgaacctacttctcgaaccacgagaggaaggaagaatcgcagtagcgtcaagacaccggaaaccgtggtcccagccgctcccgagctgcagccatccacaagtactgaccagcccgtgacccctgagcctacttctcgggctacgcggggacgcacaaataggagttccgtgaaaacccccgaaagcatcgtaccaatcgcacccgagcttcagccgagcacctcacgcaatcaactagtgacaccagagccaacatccagagccacacgatgtcgtactaatcggagcagtgtcaagacaccagaaccagtagtgccgactgctccagaacctcaccctaccacaagtaccgaccagccggtcacgcctaaactgacttctagggctacacgacgcaagactaacaggtcaagtgttaagacccccaaacctgtcgaaccagccgcatccgatctcgaacccttcaccccaacggatcagagtgtgacccccgaagccatagcacaggggggacagagcaagaccctgcgttcgagcaccgtgcgggcaatgccggtgccaaccactcctgagttccaatcccccgtgacaaccgaccaacccatttctcccgagcccatcacccagccatcctgtataaagcgccagagggccgcaggaaaccctggaagcttagcagctccaatcgatcacaagccatgctcagcccctctggagcctaaatcccaagctagcaggaaccagcgctggggggcagtccgggcagccgaatcattgaccgccattcccgaaccggcaagtcctcagctgcttgaaactcctattcatgcgtcacaaatccaaaaggtggagcccgctggccgttcacgctttactccggaactacaacctaaggcttctcagtctaggaagaggtcattggccacaatggacagccctccacaccagaagcaaccccaacgcggagaggttagccaaaagaccgttattataaaagaggaagaagaggatactgccgagaagccaggtaaggaagaggatgtcgtgactccaaaacctggaaaacgaaaacgagatcaggccgaagaagagccaaacaggatcccttcgagatctctcagacggaccaaattaaatcaggagagcaccgcaccaaaagtattattcaccggtgtagtggacgctaggggggagcgggcagtgcttgcccttggcggaagtctcgcaggatctgctgccgaagcctcacatctggtgactgatcgaatcagaagaaccgtgaaatttttgtgcgctttgggcaggggtatccctatcctttccctggactggctgcatcagtcaagaaaagcaggattctttctgcccccagatgaatacgtggtcaccgatcccgaacaggagaagaatttcggattttccctgcaggacgctttatcaagagcacgcgagcggaggctactggaaggatatgagatctatgttacaccgggagtgcagccaccccctccgcagatgggagaaataatttcctgctgtgggggtacgtatcttcccagcatgccacgctcttacaaacctcagcgcgtcgtaattacgtgtccacaagattttccccactgttcgattccactgagggtaggtctacctctcctgagtccggaatttctgttgactggagttctgaaacaggaggccaagccagaggctttcgtgctaagtcccttggagatgagttccacata

SEQ ID NO: 229886 - DNA, 489 bp, synthetic construct
  misc_feature 1..489: note = Description of Artificial Sequence: Synthetic coding sequence
  source 1..489: mol_type = other DNA
atggaagacactcaggcaatcgactgggacgttgaggaagaagaggagaccgagcaaagtagcgaaagcctgcgctgtaacgtggaaccggtcggtcgactccacatcttttctggcgctcatggtcctgagaaggatttcccacttcacctgggaaagaacgtcgtgggtcgcatgccagattgtagtgtcgcgctaccattcccatctataagcaaacagcacgccgaaattgagatcttggcttgggataaggcacctattcttcgggactgtggaagcctgaatggcactcaaatactgaggcctcccaaggtgctttctccgggagtctcacatagattacgggaccaggaactcatcctattcgccgacctcctctgccaataccacaggctcgacgtgtcccttccgttcgtatctcggggtcccttgactgtggaggaaacccccagggtacagggggaaacacagcctcagcgcctatag

SEQ ID NO: 229887 - DNA, 342 bp, synthetic construct
  misc_feature 1..342: note = Description of Artificial Sequence: Synthetic coding sequence
  source 1..342: mol_type = other DNA
atggaagacacccaggccatcgattgggacgtcgaagaggaagaagaaactgaacagagcagcgagtcattaagatgtaatgttgaacccgtgggtcggctgcatatctttagcggtgcccacggtcccgagaaggattttccactccaccttggaaaaaacgtcgtgggtagaatgcctgactgcagcgtggccttgcccttccctagcattagcaaacaacacgcagagatcgaaatccttgcctgggataaggctcccattctcagagactgcgggagcctgaacggcacccagattcttaggcccccaaaagtattgagccctggtgtcagccattag

SEQ ID NO: 229888 - DNA, 384 bp, synthetic construct
  misc_feature 1..384: note = Description of Artificial Sequence: Synthetic coding sequence
  source 1..384: mol_type = other DNA
atggaggacacccaagccatcgattgggatgtggaagaggaggaagagacagaacagtcctcggaaagtctgcgttgcaacgtcgagccggtaggcagactccacattttctcaggggctcatggcccagaaaaagacttccctcttcacctaggcaagaatgtggtgggaaggatgccagattgcagcgtcgctctgccgttcccctctatttctaagcaacacgccgagatcgagattctggcctgggacaaggcccctatcctgagagattgcgggagcctgaacggaactcaaatactgagaccacccaaagtgcttagcccaggagtgtctcacagactgcgcgaccaggagcttatactgtttgccgacctgttatag

SEQ ID NO: 229889 - DNA, 489 bp, synthetic construct
  misc_feature 1..489: note = Description of Artificial Sequence: Synthetic coding sequence
  source 1..489: mol_type = other DNA
atggaggacacacaagccatcgattgggatgtcgaggaagaggaagagaccgagcagagttcagagagtctccgatgcaacgtagaacctgtaggcaggctgcatatttttagcggcgcacatggaccagaaaaggatttccccctgcacctgggcaaaaacgttgtgggtaggatgccagattgtagcgtggcattgcctttcccgagcattagtaagcagcacgccgaaatcgagattcttgcttgggataaagcacccatcctgagggattgcgggtctttgaacggtacacagatcctcagacctcctaaggttctaagtccgggtgtgagccaccggttgcgggaccaagaactaatcctttttgctgatctgctatgtcagtatcacaggctggatgtgagtttaccctttgtctccagaggcccactgaccgtggaagagaccccccgtgtacagggggaaacgcagccacaacggctatag

SEQ ID NO: 229890 - DNA, 921 bp, synthetic construct
  misc_feature 1..921: note = Description of Artificial Sequence: Synthetic coding sequence
  source 1..921: mol_type = other DNA
tgacacgtggggggaacaaaggatagcgaggataactacggcgacagcgaggaccttgatctgcaagccactcagtgttttctcgaaaatcagggtctggaggccgtccagtcaatggaagatgagccaacccaggcctttatgctgaccccccctcaggagctggggccaagccactgttccttccagaccacagggctgctaaactgcaaaatgccccctgcagagaaggcttccagaatcagagctgcagagaaagtttcacgcggagatcaggagtcccctgacgcctgcctaccccctactgttcccgaagctccagcaccacctcagaagcctcttaactcccagtcacagaagcatcttgctcctccccctttgctgagtccattactcccatcaatcaagcctactgtgagaaaaacccgccaggacggttcacaagaggcaccagaggcccctctttcgtcagaactggagcctttccaccccaaacccaagataagaaccaggaaatcttcccggatgaccccgttcccggctaccagtgcggctcccgagccacatccatctacctcgactgcccaaccagtgacccctaagcccaccagccaggctaccaggtctcgcaccaacagatcatcagtcaagaccccagagcccgttgtccctaccgctccggagcttcagcccagcacttccacggaccagcccgttacttctgagccaacctcccaggtgactcgtggacgcaagtcacgatcaagcgtgaaaactcctgagactgtggtccccaccgcgttagagctgcagccaagcacttccactgaccgtcccgtgacttcagaacctacctcacaggctactcggggaaggaagaaccggtcctcagtcaaaacgccagagccagtagtcccatag

SEQ ID NO: 229891 - DNA, 384 bp, synthetic construct
  misc_feature 1..384: note = Description of Artificial Sequence: Synthetic coding sequence
  source 1..384: mol_type = other DNA
atggaggacacccaggccatcgactgggacgttgaagaggaggaggaaacagaacagtccagtgagtccttacggtgcaatgtggagcccgtgggtcggttgcacattttctcaggtgctcacgggcctgagaaggatttcccactacatctgggcaagaacgtggtgggcagaatgcctgattgctctgtggcacttcctttccctagtatttcaaaacagcacgccgagatagagattctggcctgggacaaagcgcctatcctgcgagactgcggttcactgaatggtacacagattttgcggcctcccaaagtgctgtcacccggtgtttcacacagactgcgggaccaagaattgatattgtttgccgacctgctatag

SEQ ID NO: 229892 - DNA, 921 bp, synthetic construct
  misc_feature 1..921: note = Description of Artificial Sequence: Synthetic coding sequence
  source 1..921: mol_type = other DNA
tgacatgtaggtggaacaaaggattccgaggataactacggggattccgaggacctggacttgcaagctacacagtgctttcttgagaaccagggtctggaagctgtgcagagcatggaagacgagcccacacaggccttcatgctcacaccaccacaggagctgggccctagccattgtagcttccagacgaccggcttattgaactgtaaaatgcctccagccgagaaagcctccagaattagggctgctgaaaaagtctccagaggagaccaggagtccccagatgcctgccttccccctaccgtgcccgaagcccctgctcctcctcagaaaccactgaatagtcagtctcagaaacacctggccccaccaccactgctctcaccattattgcccagcatcaaacctaccgtccgtaaaactcggcaggatgggtcccaggaagcccctgaggccccactctccagcgaactggaacctttccaccctaagcccaaaatccggacccggaaatctagccgcatgactccattcccagccaccagtgcagcccctgaaccccacccctccactagcacggctcagcccgtcacaccaaagccgactagccaagcgacacggtctaggactaataggtcctctgtcaagaccccagagccagtggttccgaccgcgccagaactccaacccagcacaagcaccgatcagcccgtgacaagtgagcccacttcacaggtcactaggggcagaaaatcgagatcgtccgtgaaaacaccagagaccgtggtgcctactgcattggaactacaaccctctacatcaactgaccgacccgtgacctcggagccaacctcgcaggcgacacgcggtcgcaagaaccggtctagtgtgaagaccccagagccggtagttccgtag

SEQ ID NO: 229893 - DNA, 921 bp, synthetic construct
  misc_feature 1..921: note = Description of Artificial Sequence: Synthetic coding sequence
  source 1..921: mol_type = other DNA
taacacgttggcggtaccaaagactccgaagacaactatggcgactcagaggacttggatcttcaggccacacaatgcttcttagagaatcaggggttggaggcagttcagtcaatggaagacgaacctacacaggcctttatgctcacaccccctcaggaactgggcccatcccactgtagctttcaaacaacagggttactaaattgtaagatgccaccagctgaaaaggcctcccgtatcagggccgcagagaaggtcagcaggggtgatcaggaatctcccgacgcttgccttccccctaccgtgcccgaagccccagcccctccccagaaaccactgaacagccagtcccagaagcacttggcccctcccccactgttgtccccattactgccctctatcaagcctactgtgaggaaaacccggcaggacgggtctcaggaggccccagaggcacccctgtcttctgaactcgaaccctttcaccccaaacccaaaataagaactcgaaaaagctcgaggatgaccccattccccgcaaccagcgcggctccagagccccatccctctaccagtactgcccagcccgtaacccccaagcccacatcccaggccactcgttcaagaacaaataggtctagtgtcaagacaccggagccagttgttcccacagcaccagagctccagccctcaaccagtacggatcagcctgtgacgtctgaaccaacatcacaagtgacgcgcggacgtaagtcaagatcatctgtaaagacacctgaaactgtcgtgcctacagccctcgagttacagcccagcacttccacggatcgccctgtaacttcagagcccacttcacaggcgacccggggaaggaagaacagaagcagcgtcaaaacgccagagcctgtcgtcccatag

SEQ ID NO: 229894 - DNA, 6269 bp, synthetic construct
  misc_feature 1..6269: note = Description of Artificial Sequence: Synthetic coding sequence
  source 1..6269: mol_type = other DNA
atggaggacacacaagcaattgactgggatgtggaagaagaggaggagactgaacagagcagtgaaagcctcaggtgtaacgtagaacctgttggccgtttgcacattttctctggggctcatgggccagagaaggatttccctttgcacctgggaaaaaatgtagttggtagaatgcctgactgtagcgttgcgctgccattcccttcaatctcgaaacagcatgcagagattgaaatactggcttgggataaggccccaatcctccgagactgcggttctcttaatggcacccagatattgcgccctcctaaggttctcagtcccggtgtatctcacaggctgagggatcaggaactaatactgttcgccgatctcttgtgtcaataccatagattagacgtttcactccctttcgtgagcagggggcctctaactgtcgaagaaacacccagagtgcagggagaaactcagccgcaacggctcctgctggcagaagactctgaggaggaagtcgatttcctgtctgagagaaggatggttaagaaatctcggacaactagctcttctgtcatagtgcccgagagtgatgaagagggtcactcccctgttctaggaggattaggaccaccgtttgccttcaacctcaactcagacacagatgtggaagagggacagcagcccgcaacagaagaggcgagctctgctgcacgacgaggtgcaaccgtggaagcgaaacagtcggaagccgaggtcgtgactgaaatccagctcgagaaggatcagccattggttaaggaaagggacaatgataccaaggtgaagcgaggggctgggaacggagtggtcccggctggggttattctggagagaagccaaccccctggggaagactcagacaccgatgtcgacgacgactcccggcctccaggcaggcctgcggaagtacacttagaacgcgcacagccctttggctttattgacagtgataccgacgccgaggaggaacggatacctgccactccagtggtgatccccatgaaaaagaggaaaatttttcacggcgtgggaacccgtggaccgggtgctcccggactggcacacttacaggagtcccaggcgggatcagatacggacgtcgaagagggcaaggcacctcaggcagtacctctggaaaaaagtcaagcctctatggtgattaattcggatacagacgacgaggaagaggtgagcgccgcactgaccctcgctcacctcaaagaaagtcagcctgcaatttggaaccgcgacgccgaggaggacatgccccagcgcgtggttcttctgcagcgatctcagactaccacagagcgagatagtgatactgatgtcgaagaggaagagttgccagtcgaaaaccgcgaggcggtgctcaaggatcataccaagatccgtgctctggtaagagcccacagcgaaaaagaccaacccccattcggagatagtgatgactcagtggaagccgacaagtcatcacctggaatccacctggagcgcagccaggctagcacgacagtggatatcaatacccaggtggaaaaggaggtcccacctggtagcgccatcatacacatcaagaaacatcaggtttctgtggaaggaacaaatcagaccgacgttaaggcagtaggaggccctgccaagcttctggtcgtttccctggaggaggcctggcctctgcacggggactgcgaaaccgacgcagaggagggtacttctttgacagccagtgtggtcgcagacgttcgtaagtcccagttacccgctgagggcgatgcaggcgctgaatgggctgctgcagtacttaaacaggaacgggcacacgaagtcggggcacagggtgggccacctgtggctcaggtggaacaggatctgcctatcagccgtgagaatctgacggacttggtggttgacaccgacaccctgggcgagtctacccagcctcaacgtgaaggcgcacaggtacctacaggacgcgaacgtgaacagcacgtggggggtaccaaagattctgaagataactacggtgactcagaggacctggatctgcaagcaactcagtgttttctggagaatcagggtctggaagcagtgcagtcaatggaagacgaacctactcaagcttttatgctaacacctccccaggagctcggaccctctcactgctcgtttcagaccactggcactctcgacgagccttgggaagtactggcgacccagccattctgtctgcgcgaatccgaagactccgaaactcagccctttgacacccacttagaagcatacggcccttgtctgtcacctcctagggcaattcccggtgaccaacatccagaatcacccgtgcacaccgaaccgatggggatccagggacgtggcaggcagaccgtcgacaaggtgatggggattcccaaagaaacagccgaacgcgtgggaccggaacggggtcctttggagagagaaaccgagaagttgcttccggaaagacagacagacgtaaccggtgaggaagaactcactaaagggaaacaggaccgggagcagaagcagctactggctagagatactcagagacaggaaagtgataagaatggagagtcagcgtcacccgagcgtgatagggaatccctcaaggtggaaatcgagacaagtgaggagatacaggaaaagcaggtccagaaacagactctccctagcaaagcttttgagcgcgaggttgaaagaccagtggcaaatcgcgaatgtgatcccgctgaactggaagaaaaagtgcctaaggtcatccttgaaagggacacacaacgaggcgagcccgagggtgggtcacaggatcagaaagggcaggcaagctcccccaccccagaacccggagttggagcgggagatctcccgggaccaacctcagcaccggtgcctagcggttcgcaatctgggggaagaggcagccctgtgagcccaaggaggcaccagaaggggctactgaattgcaagatgccccctgccgagaaagcctctcggatccgagcggcagagaaggtttcccgcggagaccaggagagtcctgacgcatgcctgcccccaactgtccccgaggcacctgcacccccacagaaaccgttgaactctcaatcccagaagcatttggccccacctcctctcctgagcccattactaccgagcatcaagcccactgttcggaagacaaggcaagatggcagccaggaagcccctgaggccccattgtccagcgaacttgagcccttccatcccaaacctaagatccggacaaggaaatcatcaagaatgactccctttcctgccacatcggcagccccagagccccatccctccaccagcaccgcgcaacccgtcacccccaagcccacctctcaggcaacccggagtaggacaaacagaagcagcgtgaagacacccgagccggtagtccccaccgcccctgagctccaaccctccaccagcactgaccagcccgtcacctccgagcccacctcacaagttactagaggtcgcaagtcccgatcatctgtgaagacccccgaaacagtggtaccaaccgctcttgagctgcagcccagcacctctaccgacaggcctgttacttccgagcccacctcgcaggctactaggggcagaaagaatcgtagtagcgtgaaaactcccgaacccgtagtgccgactgcgccagaactgcagccaagtacttctaccgaccagcctgttacttccgagccaacctaccaggcgaccagaggtcggaagaacagaagcagcgtgaagacccccgagcctgtcgtgcctaccgcacctgagctgagacccagcacatccacagaccggccagtgactcccaagcccaccagcagaactacaagaagccgaactaacatgtcaagcgttaaaacccccgagaccgttgtgccaactgccccagagctacagattagtacctccaccgatcagcctgtcacaccaaagccgacatcgcgtactacacgttcgcgaactaacatgagcagcgtcaaaaacccagaatccacagtgccaatcgcccctgagctgcccccatccacaagtactgagcagcccgttactccggagccaacttctcgcgctacaagaggacgtaaaaaccgctctagcggcaagacacctgaaacacttgtccctacagctcctaaattagagcctagcacttcaacagatcagccagttacccctgaaccgacctcccaggccacacggggacgcaccaatcgctcttctgtcaagacgcccgagaccgtggtgcctaccgccccagagctacagcctagcaccagtactgaccaaccggtcaccccggagcctacatctcaggctactagaggtagaactgatcggagttcagtgaagacacctgagaccgttgtgccgactgcacccgaactacaagccagcgcgagtacagatcaacctgtgactagcgagcctacgagtcggactactcgaggacggaagaatagatcctccgtgaagacacctgaaacggtagtgccagctgctcctgagctccagcccagcacgtccacagatcaacccgtaacccccgaacctacatccagagcaacacgtgggaggacaaatcgttcctctgtgaaaaccccagagtctatagtaccaattgccccagagctgcaaccctctacaagtcgcaaccaattagtcacccctgaacctacctccagagcgacacgatgccgtacgaaccgtagcagcgtgaaaaccccagagcccgtcgttcccaccgcaccagagcctcaccctacaacaagcactgatcagcccgtcacgccaaaattaacgagcagggccacacggaggaaaaccaataggtctagcgtcaagacccctaaacctgtggagccagccgcttcagatcttgagcccttcacaccaaccgatcagtcagtaacgccagaggccatagctcagggaggtcagtcaaagacgctccggtcctctaccgtccgtgctatgcctgtgcccaccacccccgagtttcagagtccagtcactacagatcaacccatttcccccgagcctatcacccagccttcatgtattaaacgccagcgagcagctggtaacccgggatcgctggcagcccctatcgatcacaagccctgtagcgcccctctcgagcccaagtcacaggctagccgcaatcaacgttggggcgcagtccgggctgctgaatcgttaaccgccattcccgaacccgcttccccccagctgcttgagactcctatacacgccagccaaatccagaaagttgaacccgcaggtcgttctcgattcacacctgagctccagcctaaggcctcgcagtccaggaaacggtccctggctaccatggactcccccccacaccagaaacagcctcaacgtggtgaagtcagtcagaagactgtgataataaaagaagaggaagaggataccgccgaaaagcccggaaaagaggaagatgtggtgacgcccaagcccggaaaaaggaaacgggaccaagcggaggaagagcccaatcggatacctagtagaagcttacgtcgcactaaacttaatcaggaatctactgctcctaaggtgctgttcacaggagtcgttgatgctcgaggcgagcgcgcagttcttgcactgggtggaagccttgcagggtcggccgcagaggccagccatctggttacagatcgcatcagacgcaccgtgaagtttctgtgcgccctgggaagggggattcccatcctgagcctcgattggctgcatcaaagcaggaaagcgggattcttcctgccaccagatgagtatgttgttactgaccctgagcaggaaaaaaatttcggctttagcctgcaagatgcgctcagtagagcccgagagaggcgcctcctcgaaggatatgaaatctacgttacacctggcgtgcagccaccccctccccagatgggtgaaatcattagctgctgtggcggtacgtatcttccgtcgatgcccagaagctacaagccacagagagtcgtgataacttgcccacaggattttcctcactgttctatccccctaagagtgggcctaccattgttgagccccgagttcctactgaccggcgtgctgaagcaggaggccaagccggaggcatttgtgctgtcacctctcgaaatgtcctctacata

SEQ ID NO: 229895 - DNA, 6269 bp, synthetic construct
  misc_feature 1..6269: note = Description of Artificial Sequence: Synthetic coding sequence
  source 1..6269: mol_type = other DNA
atggaagacacccaggccattgactgggacgttgaagaggaagaggagactgaacagtcctctgaatcccttcgctgcaacgtggagcctgtgggccgactacacatcttctcaggagcacatggacccgagaaagattttcctctccacttgggtaagaatgtcgtaggcaggatgcctgactgtagcgttgcactgccatttccaagcattagcaaacagcacgccgagatcgagatcctagcatgggataaagcccctattttgcgcgattgtggcagtctcaatgggacccagatcctccggcctcctaaggtcctctcaccaggcgtgtcccaccggctccgggaccaggagttaattctgttcgccgatctactgtgccagtaccaccgcctggatgtgtccctcccatttgtgagccgcggtccacttaccgttgaggaaaccccacgggtccagggggagacccagccccagcgactgctgctcgccgaggacagcgaggaggaggtcgacttcctaagcgagaggcggatggtgaagaagtctcgcaccaccagctcctcagtgatcgtccccgagtcggacgaagagggacattcaccagtgctgggcggtttaggacccccattcgcatttaacctgaattctgatacagacgtggaagaagggcagcagcccgctacggaggaagcttcttctgccgcaaggagaggtgctaccgtggaagccaagcaatcagaagctgaggtggtgaccgagatccaattagaaaaagatcagcccctcgtaaaggagcgggataatgacaccaaagtgaaacggggtgccggtaacggagtcgttcccgctggcgtgatcctggagcgcagtcagcctcctggggaggacagcgatacagacgtagatgatgattcccgcccacccggaaggccagccgaagtgcaccttgagcgtgcgcagccattcgggtttatagattccgataccgacgccgaggaagaacgaattcccgcaacacccgtggtgatccccatgaaaaaaagaaagatcttccatggtgtgggaacgagaggacccggagccccagggcttgcgcacctccaagagagtcaggcagggtctgacacagacgtggaagaagggaaggctccacaagcagttcccctagaaaaatctcaggccagcatggtcattaacagcgatacggacgatgaggaggaggtgtccgcagcccttaccctggctcacctaaaagagtcgcaaccggctatctggaatcgggacgcagaggaggacatgccccaacgtgtggtgctactccagcgttctcagacaaccacagaacgggactcagacaccgacgtagaagaggaggaattacctgtcgaaaatagggaggcggttctcaaagaccataccaagatccgtgcgctggtgcgagcccactctgagaaggatcagccaccctttggcgattctgacgactccgttgaagccgataaatccagccccggtatacacctggaacgtagtcaggcctcaaccacggtcgacattaacacccaggttgagaaagaggtcccgcctggatcagccattatccacattaagaagcatcaggtgtccgtcgagggtacgaaccaaacagacgtgaaagccgtaggcggtcctgccaagctgctcgtggtgtctctggaagaagcgtggccgctccacggggactgtgaaacagatgccgaggagggcacatcactgaccgctagcgtcgtggctgatgttcgtaagtcccagctgcccgcagaaggtgacgcaggggcagagtgggccgctgccgtcctgaagcaggagagggctcacgaggtcggagcacagggcggaccacctgttgctcaggtggagcaggacttacctatatccagagagaacctgacagaccttgtcgttgataccgacaccttgggcgagtccacgcagcctcagcgtgaaggagcgcaggtccccaccggcagagagagagaacaacatgtcggcggtacgaaagacagcgaggataattatggcgactcagaggatctggacctgcaggccactcagtgctttttagaaaaccagggtttagaagctgtacagagcatggaagacgagccaactcaagccttcatgctgacaccccctcaggaactgggtccatcgcactgttccttccaaacaaccggcaccctggatgagccctgggaggttttagccacccagcctttctgcttaagagagagtgaagatagcgagactcagccattcgacactcacctggaggcctatgggccatgcctgtcacccccaagagccataccgggtgatcagcaccccgagtcacctgtgcataccgagccgatgggcatacaagggagggggagacagacagtggacaaggttatgggcattcctaaggaaaccgccgagcgcgtagggccagaacgtggcccattagagagggaaacagaaaaattgcttccagaacgtcagacagatgtaaccggggaggaggaactaacaaagggtaagcaagacagggaacaaaaacaactcctcgctagagacacccagaggcaggaaagcgataagaatggggagtccgcctcaccagaacgggatcgagagagtctcaaagtggagatcgagacatccgaggagattcaggaaaaacaggtacagaagcaaacattgccttcaaaggcttttgaaagagaggttgaaaggccagtggctaacagagaatgcgatcccgctgagttggaggagaaggtccccaaggtgattctggaacgggatactcagcggggagagcctgagggcggatcacaggaccagaagggacaggcctcctcacctacccctgaacccggagtgggagcaggagatctgcctgggcctaccagcgctccagtgccgtcggggagccaatcagggggtcgcggtagtcccgtgtccccacggagacaccagaaggggttattaaactgtaagatgccacccgctgagaaagcgagccgcatccgtgccgcagagaaagtgtccagaggtgatcaagagtcaccggacgcttgtctccctccgacagttcccgaagcccctgccccacctcagaagcctctgaactctcagagccagaaacacctcgctcctccgcctctcctgagccctctgctgccgagcatcaaaccaaccgtccgaaaaacccggcaagatggttctcaggaagccccagaggcgccattgtctagtgaactcgagccattccatcctaagcccaaaattagaacccggaagtcttctagaatgaccccattccctgccacatccgccgctcctgagccccaccctagtacctcgaccgcccagccagtgactcccaagcctacgtctcaggctacacggtcgagaaccaacaggagctccgttaagacaccggagcctgtcgtgccaacagcacccgagctgcagccctcaacttccactgatcaacctgtgacgagtgagccaacctctcaagtgactcgtggcagaaaaagccgcagctccgtcaaaacccctgagaccgtcgtacctaccgcactggagctgcagccttctacatcgaccgataggcccgtaacctcagagcccacatcacaggccacacgcggacgcaagaaccgttcatctgtgaaaactcccgagcccgtggtgcccaccgctcctgaattacagccgtccacatccaccgaccagccagtgacaagtgagcctacttatcaggccaccagaggcagaaaaaaccggtcgtcggtgaagacacccgaaccagtggtcccaacagcacctgagctgcgaccttcaacaagcactgatcgcccagtgaccccaaaacccacatcacgcacgacaaggagccgtaccaatatgagtagcgtgaaaacacctgagacagtagtcccgactgcgccagaactgcagatttcaaccagtaccgaccagccagtgacacctaaacccacgtctcggactacaagatctcgcaccaacatgagcagtgttaaaaaccccgaatcgacggtgcccatcgctcctgaactgccaccatctacgagcacagaacagcctgtgacacctgaacccacatcacgcgcaacccgtggacgcaagaatcgatctagcggcaagacccccgagacactggtgcctacggctccaaaattggagccgtctacgtccaccgatcaacccgtgactccggagcccacatcccaggctacccggggaaggacgaatagaagtagtgtgaagactcctgagactgttgtccctaccgctcccgagcttcaaccttcgacatcgacggaccagcccgtgacacctgagccaacgtcccaagctacaagagggcgaactgatcgtagtagcgtaaaaactccagagactgttgttcccaccgctcccgagttacaggcgtccgccagcaccgaccaaccagtgacgtctgagcccacaagtcgcaccacccgcggacgcaaaaatagatcgagcgtgaaaacccccgaaaccgttgttcctgctgctcccgagctacagccctctacctctactgaccagcccgtaacgcctgaacctaccagtcgcgctaccagaggaagaacaaataggtccagcgttaagactccagagtccatcgtaccgatcgcacctgaactgcaaccctctaccagtagaaaccagttggtgactccggagccaacctccagagcaactaggtgcaggacaaatcgctctagcgtaaagactccggagccagttgtccctaccgccccagagccacacccaactacatccactgaccaacccgtaaccccgaagttgacctcccgagctacacgacgaaaaacgaaccgatccagtgtgaagactccaaaacccgtcgagccagctgcttcagatctcgaacctttcaccccaaccgatcaatcagtgaccccagaggccatcgctcaaggcggacagtccaaaaccctgaggtccagcactgtccgggcaatgcctgttcctactactccagaatttcagagtcccgtcactacagaccaaccaattagccctgaaccgatcacacaaccatcatgcattaaacgtcagcgtgctgcaggaaacccgggatcccttgcagcccctatcgaccacaagccatgctcagcacctctggagcccaaaagccaggcgtcccggaaccagcgctggggagccgtgagggccgcagaatccctaacagcgatcccggaaccagcttccccacagctattagagacacctatccacgcgtcccaaatccagaaggtggaacctgcaggcaggtctcggtttacgcccgaactgcagccaaaggcgtcgcaatccaggaaaagaagcctggccacaatggatagcccaccacaccaaaagcaaccacaacgtggggaggtctctcagaagacagtgatcattaaagaggaggaggaggacacagccgagaagcccggaaaggaggaggatgtggtaacgccaaagcccggtaagaggaagcgcgaccaggctgaagaagaaccaaacagaattccttcccgctctctacgacggacaaagctgaatcaggagtcaacggccccaaaagtactgttcactggcgttgtggatgccagaggcgaacgcgctgttctggctctggggggttcacttgccggatctgctgccgaggccagtcacttagtcacagacagaattaggagaaccgttaagtttctgtgtgcattgggccgtggtatcccaatactgtcacttgattggttacatcagtcacggaaagccggattcttcctgccgcctgacgagtatgtcgtgacggacccggagcaggaaaaaaactttggcttttctcttcaggacgccctttctcgcgctagagagagaaggttgctggagggctatgagatctatgtgacccctggagtgcagccgccacctccccagatgggagagatcatctcctgctgtggcggtacctacctccccagtatgccacgcagttacaagcctcagcgcgtggtaattacttgcccccaggactttccacactgcagcattccactccgagtcggcctgcccttactctcccccgagttcttactgaccggagtgctgaagcaggaggcaaaaccagaggccttcgtacttagtccactagaaatgagcagcaccta

SEQ ID NO: 229896 - DNA, 4968 bp, synthetic construct
  misc_feature 1..4968: note = Description of Artificial Sequence: Synthetic coding sequence
  source 1..4968: mol_type = other DNA
atgtatcataggctggatgtgtctctccctttcgtgtctcgtgggccattaacagtggaggagacccctcgtgtgcaaggggaaacccagccacaaaggttgctgctggctgaggattcagaagaggaagtcgactttctgtcggaaaggagaatggtgaaaaagtcccgtactacgtcatcctctgtcattgtgcctgagtccgatgaggagggccacagccccgtcctgggaggactgggccctccattcgctttcaatctgaatagcgatacggacgttgaggaaggccagcagccagcaactgaggaggcatccagtgctgccagaaggggagcgacagttgaggctaagcagtcagaagcagaggtagtgactgagatccagctagagaaagaccaacccttggttaaggaaagggacaacgacaccaaggttaaacgcggtgcaggcaacggggtggtgccggcaggggtcatcctggagcgctcgcagccacccggtgaagactccgacactgatgtcgatgacgattcgagacctcctggcagacctgccgaagtccatcttgagagagctcagcctttcgggtttattgattcagacaccgacgcagaggaggagagaatccctgctacccctgtggtgatccctatgaaaaagcggaaaatctttcacggggtggggacgagaggccctggagcccctggcctagctcatctccaggagtcccaggcaggaagtgacaccgatgtggaggaagggaaagcacctcaggccgttcccctcgagaagtcgcaagccagcatggtgattaacagcgatactgatgacgaagaggaggtgagcgcagcactcactctcgcacatctcaaagagtcacagcccgcaatatggaaccgcgacgctgaagaggatatgccacagagggtggtgctgctgcagcgcagccagacaacaaccgagcgggattccgatacagacgtcgaagaagaagaactgcccgtcgagaatcgggaggcagtgctaaaagatcatactaagatccgggctctcgtgcgcgctcactccgagaaggatcaacccccattcggcgactctgacgacagcgtggaagccgacaaatccagcccagggatacatctcgaaagatcccaggccagcaccactgtggacatcaacactcaggtcgaaaaagaggtgccgcctggctctgctatcatccacatcaaaaagcatcaggtctcagtggagggaacaaaccagacagatgtgaaagccgttggcggtcccgcaaagctcctggtcgtgtctctggaggaagcttggcctttgcacggcgattgtgaaactgacgctgaggaagggacctccctaactgcctccgtggttgcggacgtcagaaagtctcaattacccgctgaaggtgatgccggagccgaatgggccgcagcagtgctgaaacaggaacgcgctcacgaagtgggggctcaggggggtcccccagtcgcccaggtggaacaggacctgccgatatcgagggaaaaccttactgacctagtcgtagacaccgatactctaggcgaatctacccagccacagcgggagggggctcaggttcctactggacgggagagggagcaacatgtgggaggtacaaaggattccgaagacaactacggagattctgaggacctagacctgcaggctacccagtgctttcttgagaatcaaggactggaggtccagagtatggaggatgaacctacccaggccttcatgctgacaccccctcaagagctaggcccatcccattgttcctttcagactaccggcctcctgaattgcaagatgccaccagccgaaaaagcctctaggatacgcgctgcagagaaagtttcaaggggcgaccaagaatcacctgatgcatgtttgccccctaccgtaccggaggctccagccccaccccaaaagcctttgaactcacagagtcagaagcatttagcacccccaccactgctttcaccactcctaccatctatcaaacccacagtgcgtaaaaccagacaggacggctctcaggaagctccggaggcacccttgagtagtgaactggaacccttccatcccaagccaaagatccgaaccagaaagtcatcccgcatgacaccgttccccgctacaagcgccgcacccgagcctcacccatctaccagcactgctcagcctgtgacgcctaagccaacctctcaggcgactagatccagaaccaatagatctagcgtaaaaactccagaacccgtggttcctactgcccctgagctccagccttccacttcgaccgaccagccagtgactagcgagccaacttcacaggtcactagaggtcgcaaaagccgatccagtgtcaaaactcccgaaacagtcgtccccactgcactggaattacaacccagtaccagcaccgataggccagtcacttcagaaccaacctctcaggcaacgagggggcgaaaaaataggagctccgtgaaaacaccggaacccgtcgtgcccaccgctccggagctacaaccatcgaccagtacagaccagcccgtgacaagcgagcccacataccaggccactcgaggccgaaagaacaggtcttcggtgaagacccccgagcctgttgtccctactgcacctgagcttcgcccatccacctcgacggacaggccagtgaccccaaaaccaacatcccgtaccactagatcgcggacaaatatgtcgagtgtgaagaacccggaatcaactgtccccatcgctcctgaactccccccttctaccagcactgagcagcccgtgacacccgaaccgacttctagggccacccgcggtagaaagaaccgatcctcggggaaaactccagaaactcttgtgccaacagcgccaaagctggagccatcgacgtcgacagatcaacccgttacgccagaacctacatctcaagcaacccgcggacggaccaacaggagctctgtaaagacccccgaaaccgtagtgccaaccgccccagagctgcagcccagcacttctactgatcagcctgttacaccagagcctacctcacaggctactagagggaggacagacaggtcgagcgtgaaaactccagagacagtggtgcctacagcacctgagctgcaggctagcgccagcaccgatcaaccagtcacaagtgagccaaccagcaggaccacccggggtaggaagaaccgctcctccgtgaaaacccccgaaaccgtagtgcccgcagctccagaattacagccttctacatctaccgaccagcccgttacaccagagcctacttctagggcaacccgcggtcgcactaacagaagttcagtgaagactcctgagagtatagttccgatagcccctgagctgcagccatcgacctctagaaaccagttggtaacgcccgaacccaccagtagggctacacgctgccggacaaacagatctagtgtcaagactcctgaaccggtggttcctaccgcacctgaaccccaccccaccacatcaacagatcagccagtaacacctaagctcacctcacgcgctactcgacggaaaaccaatagaagcagcgtgaagaccccgaaacccgtcgagcccgcagcttccgacctggagccctttactcccacagatcagtctgtgactcctgaagcaatcgctcagggtggtcagagtaagaccctgcggagttcaacagtgcgggcaatgcccgtgcctacaactccagagttccagagtcctgtgactacagatcagcctatatccccagaacccatcacacaaccgtcatgtattaagagacagcgtgcagcgggaaacccaggcagcctggcagcacctatagaccataagccatgctccgcccctctggagcctaagagccaggcttcacgaaatcaacggtggggcgctgttcgcgctgccgagtcccttaccgctatcccggagcccgcttctccacaattgctagagaccccaatccacgctagtcagatccaaaaagttgagcctgcagggcgtagccgcttcacgcctgagcttcagcctaaagcttcccagtcgcgcaagagatcactggccacaatggatagcccacctcatcagaagcaacctcagagaggggaagtttcacagaagaccgtgatcatcaaagaggaagaggaagacacagcagagaagcctgggaaggaagaagacgtggttacccccaagcctggcaagaggaagcgggaccaggccgaagaggagcctaaccggatcccaagtcgaagtctgagaagaacaaaactgaaccaggagtcaaccgcccctaaagtgctcttcacaggcgttgtcgatgcccgtggggagagagcggtgctggcacttggcggttcgctggctggctcagctgctgaagcatctcacctcgtgacggacaggattaggcgcacggtgaagtttctctgcgccctgggtagagggatccccatcctcagcctggactggttgcaccaatctcgaaaagccggatttttcctgccccctgacgaatacgtggtcacagaccctgaacaggagaaaaactttggattcagcttgcaggacgccttgagtcgcgctcgggagaggaggctgcttgagggttatgagatctatgttacccccggtgtgcagccccctccgcctcagatgggtgaaatcatttcatgctgtggtgggacttatttgccttctatgcccagaagttacaagccccaacgagttgtcatcacctgtcctcaggacttcccacactgcagtattcccctcagagtgggcctgccactcctgagccccgaattcctattgacaggagttctgaagcaggaagccaaaccagaagctttcgtattgtctccacttgagatgtcaagcacgtag

SEQ ID NO: 229897 - DNA, 489 bp, synthetic construct
  misc_feature 1..489: note = Description of Artificial Sequence: Synthetic coding sequence
  source 1..489: mol_type = other DNA
atggaggatactcaggcgattgattgggatgtagaagaagaggaagaaacggagcagtcatctgagtccctccggtgtaacgtggaaccagtgggcaggctgcacatattttctggagcgcatggacctgagaaggactttcccctgcatctcggaaaaaatgtggtgggcaggatgcccgactgcagcgtggccctgcctttcccttcaatctccaagcagcatgcagagatcgaaattctcgcttgggataaagcgcctatcctaagggactgtggcagcctgaacggtacccaaattctgcgtccgcctaaggtgctaagccctggggtctctcatcgtctgagagatcaagagttaatactttttgctgatcttctgtgccagtaccacaggctggacgtgtctctaccgttcgtctccaggggcccactaacagtagaggagactccacgcgtgcaaggggagactcaaccccagcgcctgtag

SEQ ID NO: 229898 - DNA, 342 bp, synthetic construct
  misc_feature 1..342: note = Description of Artificial Sequence: Synthetic coding sequence
  source 1..342: mol_type = other DNA
atggaggatacccaggccattgattgggacgtcgaggaggaggaggagaccgagcaatcatcagagtccctgcggtgcaatgtggaaccagtgggaaggctacacatcttctccggagcacacggaccagaaaaggacttccctctgcacttgggaaaaaacgtggtgggcagaatgcctgattgttccgtggccctgccgtttccgtctatcagcaaacagcacgcggaaatagaaattttggcctgggacaaggcccctatcctgagggactgtggatcccttaatgggactcaaatcttacgcccaccgaaggtgctgtccccaggagtttctcactag

SEQ ID NO: 229899 - DNA, 342 bp, synthetic construct
  misc_feature 1..342: note = Description of Artificial Sequence: Synthetic coding sequence
  source 1..342: mol_type = other DNA
atggaggatacacaagcaatcgactgggatgtagaggaagaggaggagactgagcagtccagcgaatcacttcgatgcaacgtggagcccgtgggccgattgcatatcttctcgggggcacacgggccagagaaggatttcccattacatctgggaaagaatgtagtgggcagaatgcctgattgttctgttgccctaccattcccaagtattagcaagcaacacgccgagatcgagattctggcctgggataaagcccctattttgcgtgactgcgggtcccttaatggaacccaaatcttaagaccgcctaaggtactatcgcctggcgtaagccattag

SEQ ID NO: 229900 - DNA, 384 bp, synthetic construct
  misc_feature 1..384: note = Description of Artificial Sequence: Synthetic coding sequence
  source 1..384: mol_type = other DNA
atggaggatacccaggctatcgattgggatgtggaagaggaagaagaaacagagcagtctagcgagagtttgcgctgcaacgttgagccagtgggcaggctgcacatatttagtggcgctcacgggccagagaaggacttccctttgcatcttggcaaaaacgtggtgggcaggatgcccgattgttctgtggctctccctttcccatctataagcaagcagcatgcggagattgagatcctggcatgggacaaggctcccatccttcgcgattgcggttctctgaacggaacccaaattctgaggccccctaaagtgctctcccccggtgttagccatcgactcagggatcaggagctgatccttttcgcagacctgctctag

SEQ ID NO: 229901 - DNA, 489 bp, synthetic construct
  misc_feature 1..489: note = Description of Artificial Sequence: Synthetic coding sequence
  source 1..489: mol_type = other DNA
atggaggatacgcaagccatagattgggatgtggaggaggaggaagaaactgaacagtcatccgaatctctccgctgtaacgtggagccggtcggcaggctacacattttttccggggctcacggtcctgagaaagactttccacttcatttggggaaaaatgtggtcgggcgtatgcctgattgctccgttgccctgccgtttccatccatctcaaaacagcatgccgaaatcgagattctggcctgggacaaggctcccattttgagagattgcggctccctcaatggcacccaaatactcaggccaccaaaagtcctcagtcctggggtatctcataggctccgcgatcaggaacttatactgttcgcggacctcctctgccagtatcaccgactggacgttagtttaccctttgtctcgcgaggtccactcacagtggaggaaacacccagggtgcaaggagaaacccaaccacagcgcctttag

SEQ ID NO: 229902 - DNA, 342 bp, synthetic construct
  misc_feature 1..342: note = Description of Artificial Sequence: Synthetic coding sequence
  source 1..342: mol_type = other DNA
atggaggatacccaggcaatcgactgggatgtcgaggaggaggaggagacagaacagtcatccgaatccttgagatgtaacgtggagcctgttggcagattgcacatcttttccggggcacacggcccagagaaggactttcccctgcatctgggaaagaacgtcgttggtcgaatgccggactgcagcgtcgctttgccatttccttccatatcaaaacagcatgctgagatcgagattttggcctgggataaggccccaatccttcgcgactgcggatctctcaacgggacacaaatcctcaggcctcccaaggtgctcagccccggtgttagccactag

SEQ ID NO: 229903 - DNA, 489 bp, synthetic construct
  misc_feature 1..489: note = Description of Artificial Sequence: Synthetic coding sequence
  source 1..489: mol_type = other DNA
atggaagacacgcaggccattgattgggacgtggaggaggaagaggaaacagagcagagctcagaatctctccgctgtaatgtggagcccgtcggaagactgcacatctttagtggcgcacacgggccagaaaaagacttcccgctccaccttggaaagaacgtggtcggaaggatgcctgattgcagtgtggcgctgcccttcccctcaatcagcaagcaacatgccgagatcgagattcttgcctgggataaagcccctatcctacgtgactgcggtagcctgaatgggacgcaaatcctgcgacctcctaaagtactgagcccgggagtttctcacagactacgagatcaggagctgattctgttcgcggatctgctttgtcagtaccaccgtctcgacgtgagcttgccattcgtgtccagaggaccactcacagtggaggagaccccacgcgtacagggagaaacacaaccacaacgactctag

SEQ ID NO: 229904 - DNA, 384 bp, synthetic construct
  misc_feature 1..384: note = Description of Artificial Sequence: Synthetic coding sequence
  source 1..384: mol_type = other DNA
atggaggatacccaggccattgactgggacgtggaggaagaggaggaaaccgagcagagtagcgaatcactgcggtgcaacgtagagcccgtgggaaggctccatattttttctggcgcacatggccctgagaaagattttcctctacatctgggcaaaaatgtggttggacgcatgccagactgttctgtcgcgcttccattcccctccatcagtaaacagcatgccgaaatagagatcctggcttgggacaaggcaccgatcctccgtgattgcggaagcttgaatggaacccagatcttgcgaccacctaaagtactttcccctggagtttcacacagactgcgagaccaagagttgattctgttcgccgacctcctttag

SEQ ID NO: 229905 - DNA, 921 bp, synthetic construct
  misc_feature 1..921: note = Description of Artificial Sequence: Synthetic coding sequence
  source 1..921: mol_type = other DNA
tagcatgtcggaggaacgaaggacagtgaggacaattacggtgatagcgaggatctcgatcttcaagcgacccagtgtttccttgagaaccagggcctggaggcagttcagtctatggaagacgaaccgactcaagctttcatgttaaccccaccccaggaattaggaccaagccattgttcgttccagactacaggacttctgaactgcaaaatgccccctgccgaaaaagcaagtcgtattcgcgcagccgaaaaggtaagccgtggggatcaagagtcacccgacgcctgcctgcctccaaccgtacctgaagcccctgcacctccccagaagccacttaacagtcagtcacagaagcatctcgcaccccctcctctgttgagtcctctgctgcctagcattaagcctaccgtacggaaaacaaggcaggacggctcacaagaggcacctgaggcgccattaagctccgaactggagccattccacccaaagccaaagatcaggacacggaagtcaagccgcatgacccccttcccggctacaagcgcagctccagaaccacacccctccacatccactgctcagccagtaactcctaagcccacatcacaggcaacccggtcccgcaccaaccgctcaagcgttaaaactcctgagcctgtggttcctacagcccctgaacttcagcctagcacaagtaccgaccaacccgtgacctctgagccaacaagccaagtcacccgcggtcgcaagtcgcgaagttccgtaaagacacccgagaccgttgtgcccaccgctctcgaactccagccgtccaccagcaccgatagacccgttacaagtgagcctacttcccaggctacccgcggtcggaagaaccgcagctcagtgaaaacgcctgagcccgttgtgccttag

SEQ ID NO: 229906 - DNA, 6269 bp, synthetic construct
  misc_feature 1..6269: note = Description of Artificial Sequence: Synthetic coding sequence
  source 1..6269: mol_type = other DNA
atggaagacactcaggccatagattgggacgttgaggaggaggaagaaactgaacagagctcagagtccttacggtgtaatgtagaacctgttgggaggctgcacattttctcaggtgcccacgggcctgaaaaagatttcccactccacttaggcaagaacgtcgtcgggcgaatgcctgactgcagcgtggcactccccttccccagtatctcaaagcagcatgccgagattgagattttggcttgggataaggcccctatactgagggactgtggttcattgaacgggacccagatactcagacctcccaaagtcctctcacctggcgtgagccatcggctgcgagaccaggaactgattctattcgccgatctgctgtgtcaataccacagactggacgttagccttcctttcgtgagcagaggacctctgaccgtagaagagacgccaagagttcagggcgaaacacaacctcaacggcttttactggctgaagactccgaagaagaagtggacttcttaagcgagagacgtatggttaagaaatctcgtaccaccagcagcagtgtcatcgttcctgagtctgatgaggaaggccattcaccagtactgggcggactaggaccaccctttgctttcaacctgaactccgataccgatgtcgaggagggccagcagccggcaaccgaggaagcgagttctgcagctcgcaggggtgcaaccgtagaggcgaaacaatctgaggctgaggtagttacagagattcaacttgagaaggaccagccgctggtcaaagaacgggacaacgatacaaaggtcaagagaggcgctggcaacggggtagtgcctgccggagtcattctggagagaagccaacctcctggagaagatagtgacactgacgttgatgatgattccagacctcccggaaggccggcagaggtgcacttagaacgcgctcagccattcggattcattgatagcgacacagacgcggaggaagagcgtatccccgctacgcctgtagtgatccccatgaagaaacgtaaaattttccacggcgtggggacgcgcggaccaggagccccagggttggctcatctgcaggagagccaggccggttccgataccgacgtcgaggaggggaaggctccccaagccgtgccgctggaaaagtctcaggcttccatggtgattaactctgataccgatgatgaggaggaggtttccgcggctttaacgctcgcgcatctgaaggagagccaaccggctatctggaatagagacgcagaagaagacatgccccagagagttgttttgctccaacggtcacagactaccactgagcgtgattcggacacagacgtcgaagaggaggaattacctgttgagaacagggaagctgttctgaaagaccacacaaagatccgcgcactcgtgagagcacactccgagaaggatcagcccccattcggcgactccgacgactcagtggaagcagataaaagttctccgggtatccacctggagagatcacaggcttcgacaaccgttgatataaatactcaggtggaaaaagaggtgcctcctggcagcgctattatccacataaaaaagcatcaggtgtccgttgaggggaccaaccagaccgacgtcaaagctgtgggcggacctgcaaaactactggtcgtcagtcttgaggaggcctggcccctgcatggagactgtgaaaccgacgctgaggaaggaaccagtctcaccgcttcagtggtggccgacgtgagaaagtctcaactccctgccgagggtgacgcaggcgctgagtgggcagcagcagttcttaaacaagagagggctcatgaagtcggcgctcagggagggcctcctgtggcacaggttgagcaggacctgcccattagtagggaaaatctgactgaccttgtggtggataccgatactcttggagaatctacacagcctcagcgggaaggcgcacaagtgcctacagggcgagaaagagagcaacacgtgggcggaaccaaggacagtgaggataattacggggatagcgaggatctggatctgcaagccacccaatgttttcttgagaaccagggactagaggcagtgcagagcatggaagatgagcccacacaggcttttatgttgactcctcctcaggagctggggccatctcactgctcctttcaaactaccggtacactcgacgagccttgggaggttctggcaacacagccattttgcctgcgggagtcagaggattccgagacacagccttttgacacccacctggaggcctatggcccatgcctgtcccccccacgtgcgattcctggggaccagcatccagagtctcccgtgcacacagagcctatgggaattcagggacggggacggcaaacggtagacaaggtgatgggcattccgaaagagacggccgagagagttggacccgaacgcggaccgcttgaacgagagacagagaagctcctgcccgagcgtcagactgatgtgactggcgaggaagagttgaccaaaggcaagcaagatcgggagcaaaaacaactgctggccagggatacacagagacaggaaagcgacaagaatggagagtccgcctcgcctgaacgagacagggagagcctgaaggtggagattgagaccagtgaagagatacaggagaagcaggtgcagaagcagactctgcccagcaaggcttttgagcgggaggttgaacgacctgttgcaaacagggagtgcgatcccgcagaactggaagagaaagtcccaaaagtgattctggagcgcgacacccagcggggtgaacccgagggaggttctcaggatcaaaaagggcaggctagcagtccaacgcctgagccaggcgtgggcgctggcgacctcccgggtccgacctccgctcctgtgccatcagggagtcaaagtggcggaagaggcagccccgtttctccccgtaggcatcagaagggcctgttgaattgtaaaatgcctcctgcagagaaagccagcagaataagagccgcagagaaggtatcccggggtgatcaggagtcgccagatgcatgcctgccccctacagtgcccgaagctcctgcgcctcctcaaaaaccgctgaactcccagtcccagaagcacttagctcctccacctctgctctctccgttgctgccatccatcaagcctaccgtcagaaagacccggcaggacgggtcgcaggaggccccagaggctccgctgtccagtgagttggaaccctttcatcccaaaccaaagattaggacgcgcaaatctagccggatgacaccctttccggctacaagtgcggctcccgagccccatccatcaacgagcacggctcaaccagtcaccccaaaacccacatctcaggcaacccggtcacgcactaacagaagcagcgtaaaaactcccgaacccgtcgtcccgaccgcacctgaactgcaaccatccacttcaacagatcagcccgtgacctctgagccgacaagccaagtgacaaggggaagaaagagtcgttctagcgtcaagacacccgaaacggtggtgcccaccgccttagagttgcagccaagtacatccacagaccggcctgtgacttctgaacccacctcacaagccaccaggggacggaaaaatcgctctagtgtaaagactcccgaacctgtggtcccaaccgcccctgaactccagcctagcaccagtacagaccagcccgtaacgtccgaacccacatatcaggcaaccaggggccgtaaaaacagaagtagcgtgaaaactccagagcctgttgtaccgactgcccctgaacttagaccttccacaagcaccgacagacctgtcaccccaaaaccaacaagtcggacgacgcggagccgaactaacatgtcctccgttaagactccagaaaccgttgtgccgacagccccagagctgcagatttctacctctactgaccagcctgtgactcctaagccaacatcccgcacaacccggagccggactaacatgtcttcggtgaaaaatcccgagagcacagttccaatcgcacccgaactgcccccttctacttcgaccgagcagccggttactcccgaacctactagtcgggcaacccgagggaggaagaacagatcctcgggtaaaacaccagaaacacttgtccccactgcaccaaagctggaaccgagcaccagtaccgatcaacctgtgaccccagagcccaccagtcaagccactagagggaggaccaatcggtcaagcgtcaagacccctgagaccgtggtaccaactgcgcctgaactccaaccctctacaagcaccgaccagcctgtgactcctgaacctaccagccaggcaacacggggacgcacggaccggtcaagtgttaagactcctgaaacagtcgtgccgaccgcgcctgagctacaggcgagcgccagcacggatcagcctgtgacttctgaacccacctcgcgtaccacacggggaagaaaaaatagaagctcagtcaagactcctgaaacagttgttccagccgcaccagaacttcagccgagtacaagcaccgatcagccagtgactcccgagcctacctctcgtgccactcggggaaggacaaatagaagttccgtcaagactcctgaaagcatcgtgcccatcgcgcctgagctgcaacctagcacgtcccggaaccagcttgtaacgccggagcctacatcccgagccaccagatgcaggaccaacagaagctccgtaaagacacccgagcccgtcgtgcctactgcaccagagccgcacccaacaaccagcactgatcagccggtgacacctaaactgacttcaagggcaacccggagaaaaacgaatagaagctcagtaaagacccctaagcctgttgagccagccgctagcgacttagagccgtttactcccaccgatcaatcagttacaccagaggcgatcgctcagggtggccagtctaaaaccttgaggagttccactgttcgggctatgcccgtccctactactccagagttccaatccccagttacaaccgaccagcctatttctcccgaacctatcacccaaccaagttgtatcaagaggcaaagggcagccggaaaccccggatctctcgcagcccctatagatcacaagccttgtagcgcacctctggaacctaagtctcaggcatcccggaatcaacgttggggtgccgtgcgcgcagctgaatcactcacagccattccggagcccgcaagtccacagttgctggaaacccccatacacgcatctcagatccagaaagtggagcccgctgggagaagtcgcttcactccggaactacaacccaaggcctcccagtcccggaagcgcagcctcgccacaatggacagccccccacaccagaagcagccgcagcgcggtgaggtctctcagaaaaccgttattatcaaggaagaagaagaggatacggccgagaagcccggtaaagaagaagatgtggtgacgcctaaacccggtaagcgtaaaagggaccaggccgaggaagaacccaatagaatcccaagtcgcagtcttcggagaacaaagcttaaccaggagtctacagctcctaaggtgctgttcacaggagttgtggacgcacgcggagaaagagccgtcttagctctcggtgggtctctggcagggtcagctgccgaggcatcacacctcgtgacagaccgcatcagacgtacagtcaaattcctgtgtgctctaggaagaggcatccctatccttagtctggactggctgcaccagagcagaaaggcaggattctttcttccacccgacgaatacgtggttactgatccagaacaggaaaaaaacttcggcttttctcttcaagatgctcttagtcgggctagagagagaagactgctggagggctacgagatttacgtgaccccaggagtgcagccaccacccccacagatgggcgaaattatttcctgctgtggagggacatatcttccttcaatgccaaggtcttacaaaccacagcgtgtcgtaatcacctgcccgcaggacttccctcattgctcaatccccctgcgggtggggcttccccttctgagcccggagttcctgctaacaggagttctgaagcaggaagccaagcctgaggcttttgttctgagtcccctagaaatgagctccacgta

SEQ ID NO: 229907 - DNA, 5408 bp, synthetic construct
  misc_feature 1..5408: note = Description of Artificial Sequence: Synthetic coding sequence
  source 1..5408: mol_type = other DNA
atggaagacacacaggccatcgactgggacgtagaagaagaggaggagactgagcagtcatctgagtccctgcggtgcaatgtcgagcccgtgggacgattacatatcttctcgggcgctcacggacccgaaaaagattttccactgcatctgggcaaaaatgtggtgggcagaatgccagactgctcggtcgccctaccctttccaagcatctccaagcagcacgcagagatcgagattctggcttgggataaagctcctatactgagagactgcggctcactgaacggcacgcagatccttcggccacccaaggtcctttctcctggagtttcgcatagacttagagaccaggagctgattctgtttgccgacctgttatgtcagtaccatcggctcgacgtgagcctccctttcgttagtcggggtccactcacggtggaggaaacgcccagagtgcagggtgagactcagcctcagcgcttgctcctggcagaagattctgaggaggaagtggatttcctcagcgaacgccgtatggttaagaagtcgcgcaccacctctagctctgttatcgtcccagagtctgacgaagaggggcacagtcctgtccttggcggtctggggcctccctttgccttcaacctgaacagcgatacggatgtggaggagggccagcagccagcaactgaggaagccagttctgcagcaagacggggagctactgttgaggccaagcaatccgaagcagaggtagttacagagattcagctggaaaaggaccagcctctggtgaaggaaagggataacgacacgaaagtaaaaaggggggcaggcaatggcgttgtgccagccggagtgatcttggaaaggtctcagccccctggggaagattccgataccgatgtggatgacgactctcgcccacctggaagacccgcagaggttcacttggaaagagcgcagccctttggcttcatcgactccgacacagatgccgaggaggaaaggataccagccacccccgttgttataccaatgaaaaagcgaaaaattttccacggcgtgggcacaaggggtcccggagccccaggtctggcccacctacaggaaagccaagcgggtagcgacacagacgtggaggaagggaaggccccacaggctgtgcccctcgagaagtcacaggcttccatggtgatcaactctgacaccgacgatgaggaggaagtgagcgcagccctgactctggcgcatctgaaagagagccaaccagccatttggaatcgagatgccgaagaggacatgcctcaaagagtggttctgttgcagaggtctcaaaccacaacagagcgggactcagacaccgacgtggaagaagaagagctgccagttgaaaaccgggaagccgttctcaaagatcacacaaaaatccgcgctctggtgcgcgctcatagcgaaaaggatcaaccgccattcggggactctgacgattccgtcgaagcggataagagctccccaggaatccacctggagaggtcacaggcttccacgacagttgatataaacactcaggtagagaaggaagtgccgccaggctctgccatcatccacattaaaaagcaccaggtgagcgtagagggtacgaatcagactgatgtcaaggcggtgggagggcctgctaaactgttagtggtgtccctggaagaagcctggcctctgcatggcgattgcgagaccgacgcagaggaaggcacatctctgaccgctagcgttgtggcggatgtgaggaagtctcagctccctgccgagggcgacgccggagcagaatgggcagctgctgtattgaagcaagagagggcacatgaagtcggagcccagggaggccctccggtggcacaagtggaacaggacctgcctattagccgagagaacctgaccgacttggtggttgacacggatacactgggggagagtacacagcctcagagggagggcgcacaggtccctactggtagagagcgggaacagcacgttggaggcacgaaggatagcgaagataactatggcgacagtgaggatctggacctgcaggccactcagtgtttccttgagaaccagggccttgaggcggtgcaaagtatggaagatgagcctactcaggcctttatgcttactccccctcaggagctcggcccatcccattgcagcttccagacaaccggcacactcgacgaaccttgggaggtgctggccacacagcctttctgccttagggagagcgaagatagcgaaacccagccttttgacacgcacctggaagcttatggaccttgtctcagcccgcctagagcaatcccaggtgaccagcacccggagagtcctgtgcacacagagcctatgggcattcaggggcgtggtcgccaaacggtggacaaagtgatgggtatccctaaagagactgccgaacgagtgggtcccgaaagaggtcctctcgagagggagacagagaagctgctgcccgaaaggcagaccgacgtcactggagaggaggaactgactaaaggaaaacaggaccgggagcagaagcagctgctagcacgggatacacagaggcaggagagcgataaaaatggtgagtccgcgtcccccgagcgtgatcgagaaagcctgaaggtggaaattgaaaccagtgaggagatccaagaaaagcaagtgcagaaacagaccctacccagcaaagccttcgagcgggaagtggagaggccagttgccaaccgggagtgcgatccagcggaactggaggagaaagtgcccaaggttatactggagagagacacacaacgcggagaacccgagggtggcagtcaggaccagaagggtcaggccagcagcccgactcccgaacccggtgtcggtgccggagatctaccgggaccaactagcgccccagtgccctccgggtcccaatccggcggtcgcggttcaccggtaagtccccgacggcatcaaaagggcctgctcaattgcaagatgccccctgcagagaaggctagcaggattagggcggcagagaaggtgtcaaggggcgatcaggagtcacccgacgcctgcctgccacctacggtccctgaagcgcctgcaccaccacagaagccattaaatagtcagagccagaaacatctggccccacctccactcttatctccgctgctgcctagtattaagcccaccgttcggaagaccagacaggacggctcccaggaggctcctgaagcccctctgagcagtgagctagagcctttccatcccaaacctaaaatcagaaccaggaagtcgagcagaatgactccttttcctgcgacctcagcggctccaaagctggagccttccacatctaccgatcagccagttacccctgaacccacatctcaggctacgcgagggcgtacaaaccggagttcagtgaaaactcccgagactgtggtgccaaccgcccctgaactccagccaagcacgagtactgaccagccagtaaccccagaaccgacttctcaggcaacacggggtagaacggatcggagctctgtgaaaacccctgagacggtggttcctacggctcccgaattacaggcctcagcttctactgaccagcctgtcacgtccgaaccgacatccagaactacacgcggacgtaaaaatcggtcaagcgtaaaaactcccgaaactgtagttcctgcagccccagagctccaaccttcaacatccacggatcagcccgtgacgcctgaaccaacctcacgagcaactcggggaagaaccaacagatcatcagtcaagactcccgaatctattgtgcccattgcccctgagcttcagccctccacctcacgcaatcagctggtgacccctgagccgacctctcgtgctacaagatgcaggactaacagaagcagtgttaaaacccccgagcccgtagtgcctaccgctcctgagccgcaccccacaacttcgactgaccaaccagttacacccaaattgacctcccgggctacgagaagaaaaacaaatcggagctcagtgaaaacccccaaacctgtggagcctgcagcctcagacttggaaccttttacgccgactgaccaatctgttacccctgaagcaattgcacaggggggacagtccaagaccttaaggagttccactgtccgggctatgcccgtacctaccactccagaatttcagtcccctgtgaccacagaccaaccaatcagtccagagcctatcacacagccttcttgcatcaagagacagcgagctgccggaaatccgggttcgttagcagctcccatagatcacaaaccatgctccgcccctcttgaacccaagagtcaggcgtcacgcaatcaacgctggggagctgtgcgcgctgccgagtctctgacagcaatccctgaaccagcctcccctcagctccttgagaccccaatccacgcctcccagattcagaaggtggagcctgcgggaaggagccggtttaccccggagctgcagcccaaagcaagtcaaagtcgtaagcgcagtctggctactatggattcccctccacatcagaaacaaccccaacggggagaggtctctcagaaaactgtgataatcaaggaggaggaggaggataccgccgagaagcccggaaaagaggaagatgttgtgacacccaaaccaggcaagaggaaacgcgatcaagcagaggaggagcctaaccggatcccatccaggagccttaggcgcactaaactcaaccaagagagcacagcacccaaggttttatttaccggtgttgtggacgcaagaggagagcgggcagtgctggcgctggggggaagtctagccggatccgccgctgaggcaagccaccttgttaccgatcgaattagacgcactgtgaagtttctttgcgcactgggacggggtatccccatactgtccctggattggttgcatcagtcccgcaaagcgggattctttttgccaccagacgaatacgtggtcaccgatcctgagcaagagaaaaactttggcttttcactgcaagatgccctcagcagggccagggaaaggcgactgctggaaggatatgaaatctacgttacacctggggtgcagcctcccccaccacaaatgggcgagatcattagttgttgtggcggaacatatctccctagcatgcccaggtcttataagcctcagagagtggtgattacctgccctcaagatttccctcactgcagtattcctctacgcgtcggcctgccgcttctgtcccctgaattccttctcaccggggtgctcaaacaggaggctaagccagaagccttcgtgctttcccctctggaaatgtcctcaaccta

SEQ ID NO: 229908 - DNA, 342 bp, synthetic construct
  misc_feature 1..342: note = Description of Artificial Sequence: Synthetic coding sequence
  source 1..342: mol_type = other DNA
atggaagatactcaggccattgactgggacgtcgaagaagaagaagagactgaacaatcatcggagtctttacgatgcaatgttgagcctgtgggtagacttcacatcttttcaggggctcatggtccggagaaagattttcccctgcacttgggaaaaaatgtggtcggccgtatgcctgactgtagtgttgcattaccttttccctctatttctaagcagcatgccgagatcgagattctcgcatgggataaggcgccaattctgcgagattgtgggtcattgaatggaacccaaatcctccgcccaccgaaggtgctctcacctggcgtatcccattag

SEQ ID NO: 229909 - DNA, 6269 bp, synthetic construct
  misc_feature 1..6269: note = Description of Artificial Sequence: Synthetic coding sequence
  source 1..6269: mol_type = other DNA
atggaagatactcaggccatagactgggacgttgaagaagaggaagagactgagcagtctagcgaatccctacgttgtaacgtcgagcctgtgggtcggctgcacatcttcagtggtgcccatggtcctgagaaggattttccgctccacctgggaaagaatgtcgttggccgaatgcctgactgctctgtggctctgccatttccctcgatcagcaaacaacatgcggagatcgaaatcctagcatgggacaaagcccctatactgcgggattgcggctctttgaacggaacccagatactgcggccacctaaagttttgagccctggcgtctcccaccgactgcgggatcaagagctcatcctgtttgcagacctcctgtgtcagtaccaccggctggacgtaagtttgccctttgttagtagaggacccctgactgtggaggaaacgcctcgcgtccagggggaaacccaacctcaacgactcctattagcagaggattcggaggaagaggtcgattttctttcagaacgccgtatggtgaagaagtcccgaacgaccagcagttccgttattgttccggaatctgatgaggagggccattcacctgtgcttgggggactggggccaccgttcgcatttaatctgaactccgataccgatgtcgaagaaggtcagcagcccgctactgaggaggcgtccagcgcagcacggcgtggcgcaactgtggaggccaaacaatccgaggctgaggttgtaaccgagatccagctggagaaggaccagccactggtgaaagaacgggacaacgataccaaggtaaagcgcggtgccggtaatggagtggtgcccgcaggggtcatcctggagcggtctcagcctcccggtgaggattctgataccgatgtcgatgacgattcccgcccacccggacggcctgcagaagtgcacctggagagagcccagcccttcgggtttattgacagcgatacagacgccgaggaagagaggatcccagcaacaccagtcgtaatacccatgaagaagcggaagatctttcacggcgtcggcaccagaggacctggagctcccggactcgcccacctgcaggaatcacaggcaggatctgataccgatgttgaggaagggaaagctccacaggcggtgccgctggaaaagagtcaggctagtatggtcatcaactctgacaccgacgatgaagaagaagtgagcgcagctctaacccttgcccacctcaaggaatcgcagcccgcaatttggaacagggatgccgaagaagatatgccgcaacgcgtcgtgttactacaacgttcacagaccaccacagagagagattctgacacagatgtggaggaagaggaacttcctgtggaaaatcgcgaggccgtgttaaaggaccacaccaagataagagcactagtccgcgctcattcagagaaggaccagccaccatttggtgattctgatgactcagtcgaggccgataaaagtagccccggaatccatctcgagaggtcacaggctagcaccacagtggacataaacacacaggtagaaaaggaagtgccgccaggatcggccatcatccacatcaaaaagcaccaggtgtcagttgagggaacaaatcaaaccgacgtgaaggctgtcggaggccctgcgaaactcctggtggtgtccttagaggaggcatggccccttcacggtgactgtgaaactgatgcggaagagggcacatctctcacagccagcgtcgtggctgacgtccggaaatcccagttgcctgcagaaggagacgcaggggctgaatgggctgcagctgtcctgaaacaggaaagagctcatgaagtgggagcccaggggggaccaccagtggcccaagtggagcaggatctccctatttccagagagaacctgactgatctggtggtagatacagatacgcttggcgaatctactcagcctcaaagggagggggcacaggtgcccacaggtagagagagagagcaacacgtgggcggtaccaaggatagtgaggataactacggggacagcgaagatttggatctgcaggcgactcaatgctttctggaaaaccagggattagaagcagtgcagagtatggaagacgagccgacacaggcctttatgctcacccctccacaggagctcggtcctagccactgctcctttcagaccactgggacgctcgacgagccttgggaggtgttggccacacagccattttgcctacgcgagagtgaggactctgagactcagccttttgacactcatcttgaggcttatggtccctgcctgtcccccccacgggctatcccaggggaccagcatccggaaagtcctgtacacactgaacccatgggtattcaagggagaggcaggcagacagtcgacaaagttatgggcatcccaaaagaaaccgctgagcgcgtcggacctgaaaggggacccctcgaacgtgaaacagaaaagttgctaccggaacgccagacggacgttacaggtgaagaggagttaacaaagggtaaacaagaccgcgagcagaagcaactattggcccgtgatacccaacggcaagaaagcgacaagaacggcgagagcgcaagccctgaaagggaccgcgagagtctaaaggtcgagatagaaactagtgaggagattcaggagaagcaggttcaaaaacagaccttaccttctaaagcctttgaacgggaagtggaacgaccggtggctaaccgagagtgtgaccctgccgaacttgaagagaaggtgcctaaggtgatattggagcgggacacgcagaggggagagcctgagggcggatcccaggatcagaaggggcaggctagcagcccgacccctgaaccgggagtcggagccggtgatctgcccggaccaacttccgcccctgtgccgtccggtagtcagtcagggggacgtgggagtcccgtctcgccacggaggcaccaaaaggggctgttaaattgcaagatgccgccagcggaaaaagcctctaggattagggctgctgagaaagtgtctcgcggagaccaggaaagtcctgacgcttgcctcccaccaactgtgcctgaggctcctgctccacctcagaagcctcttaattcccagagtcagaagcatctcgccccacctccccttctttctcctctcctgccttccatcaagcccaccgtcaggaagacccggcaggatggctcccaggaagctcctgaagctccactgagttcggaactcgaacctttccaccccaagcctaaaatcagaacccggaagtcgagcaggatgactccgtttccagccacgtcagctgcgcctgagccgcacccttccacaagcaccgcccagcctgtgacgccgaagccaactagccaggcaacaaggtctcgaacaaacagatcttctgtgaagacgcccgaaccagtggtccccactgccccagagctgcaaccaagtacttctaccgatcagccggtgacgtccgagcctacctcacaggtgactagaggcagaaaatcaagatcttcagtaaaaacccccgaaactgtggtgcctactgccctcgaactccagccatctacctctactgacagacccgtcactagcgagccaacctcccaggctaccaggggcagaaaaaatcgaagttccgttaagacacccgaacccgtggtgcccactgcacccgaactacagccgtctacttcgactgatcagcccgtgactagtgagcccacctatcaggctacgcgcggacgtaaaaataggtctagtgtaaagacccccgagcctgttgtccccactgctcctgagcttaggccttctacctcaaccgatagacctgtcacgcccaagccgacctcacgaaccaccagatctcggaccaacatgtcatccgtgaagaccccagagactgtagtgcctaccgctccggagctgcagatttctacgtccacagaccagccagtgaccccaaaacctacctcccgaaccacgagatcccggacaaatatgagttccgtaaagaatccagaaagtactgtccccatcgcacccgagcttccgccaagcacaagcacagagcagccagtgaccccggaaccaaccagtcgagcgacacggggaaggaaaaacagaagctcaggcaagaccccggaaaccctcgtgcctaccgcgcctaaactggagccaagcacctccactgaccagcccgtaactccggagcctacttctcaagcaactcgaggaagaacaaacaggagtagcgtgaaaacccccgagacggttgttcctacggcacccgaacttcaaccttcaacctcaacggaccagcccgtcacacccgagccgacaagccaggcgactaggggacgcacggaccgctccagcgtaaagaccccggaaacagtcgttcctacagccccagaactgcaggcttcagcctctaccgaccagccagtcacctcagagcccacttcaaggaccacacgaggcagaaagaaccgtagctctgtcaagacccctgagacggtcgtgcccgcagccccagccctacagcccagcacctccacagatcagccagtaacgcccgaacctacatctagagccacccgcggaaggacgaacagaagctccgtgaagactccagagagtatcgtccctattgctcctgaactgcagccttccacaagcaggaatcaactggtgacaccggaacctacttccagggcaacaagatgcagaactaatagaagctccgtaaagacaccagagcccgtggttccaactgcaccagaacctcatccaactacatcgacggatcaaccagtgactcctaagctcacatcccgggctaccagacggaagacaaacaggtcttccgtcaagaccccgaagccagtggaacccgcagcctcagaccttgagccctttacaccaacggatcagtctgtcaccccagaggcgatagcccaggggggacagagcaagacccttcggtcctccacagttagagcgatgcctgttcccactacccccgagtttcaaagcccggtaacgacagaccagccaattagccccgagcctatcacccagcctagttgcatcaagcggcagagggcagccggaaacccaggttcccttgctgccccaatcgaccataagccttgctcagcccctttagagcccaaatcacaagcatccagaaaccagaggtggggcgctgtgagagctgccgaatccctaaccgcaattcctgagcctgcatcaccccagttgctggaaacccctatccatgcttctcagattcagaaagtggaacctgccggaaggtcaaggttcaccccagagcttcagcccaaggcctcacagagtagaaaaagaagtctggcaactatggactctccgcctcaccagaaacagccccagagaggcgaagtgtcgcagaaaaccgtgataatcaaggaagaagaggaagacacagctgaaaaaccaggtaaagaagaggatgtggtcactcctaaacccggtaagaggaagcgggatcaagccgaagaagagccgaatagaatcccgtccaggtctctccggcgtacaaaactgaatcaggagtctaccgccccaaaggtactgtttaccggggtggtggacgcacgtggcgagcgcgctgtccttgctctgggagggtctttggctggatctgcagccgaagcatctcacttggtcacggaccgcattcggagaactgtgaaatttctgtgcgccctgggcagaggcatcccgatcctctctcttgattggctgcatcagtcacgcaaagccggtttttttctgcccccagacgagtacgtggtgaccgatcctgagcaggaaaaaaattttgggttctctctgcaggatgcgttatccagggctcgtgaaaggaggctactggaaggctatgagatatacgttacccctggggttcagcccccaccccctcagatgggagagataatctcttgttgcggcggaacctacctcccatccatgcccagatcatataagcctcagagagtggtgatcacttgtccacaggatttccctcactgctccatccccctgagggtcggtctccctttactttcccccgagttccttctgaccggcgtcctcaaacaggaagctaagcctgaggcctttgttctatcccctttggaaatgtcctcaacata

SEQ ID NO: 229910 - DNA, 738 bp, synthetic construct
  misc_feature 1..738: note = Description of Artificial Sequence: Synthetic coding sequence
  source 1..738: mol_type = other DNA
atggaggacactcaggcgatagactgggacgtggaagaggaggaggaaactgagcagagtagtgagagcctacgatgcaacgttgagcctgtggggaggctgcatattttttcaggagctcacggtcccgaaaaggactttcccctgcatctcggcaagaatgtggtcggcagaatgccagactgctcagtcgctctgccgttcccgtcaatttccaaacagcacgctgaaatcgagatcctggcttgggataaggctccgattctacgggactgcggctcacttaatggcactcagatcctaaggccaccaaaggtgctgtcacccggagttagccataggctacgtgaccaggagctgatcctcttcgccgacttactatgtcagtatcaccgactcgatgtgtctttgccatttgtcagccggggacccttaactgtcgaggaaacaccaagagtccagggagaaacgcagccacaaaggctcctccttgccgaagactcagaggaggaggtcgactttctgagtgagcggagaatggtgaagaagagtcgtaccacaagctcctccgtcattgttcccgagtccgacgaggagggccattccccagttctcggtggactcggcccaccattcgcctttaatctcaattccgacacagatgttgaagagggccagcagccagccaccgaggaggctagtagcgctgctcgcaggggagccaccgtagaggcttag

SEQ ID NO: 229911 - DNA, 342 bp, synthetic construct
  misc_feature 1..342: note = Description of Artificial Sequence: Synthetic coding sequence
  source 1..342: mol_type = other DNA
atggaggacactcaagctatagactgggatgtggaggaggaggaagaaacagaacagtctagcgaatccctccggtgtaacgtggagcccgtggggagactccacatattcagtggggctcatggcccagaaaaggatttccctctgcacctgggcaaaaacgtcgttgggcgtatgccagactgctctgttgctctgccgttcccctccatttcaaagcagcatgctgaaatcgagattctcgcttgggacaaggccccaatcctgcgtgattgtggcagtctgaacggtacccaaatcctcagaccaccaaaggtcctgtcgcctggtgtgtctcactag

SEQ ID NO: 229912 - DNA, 384 bp, synthetic construct
  misc_feature 1..384: note = Description of Artificial Sequence: Synthetic coding sequence
  source 1..384: mol_type = other DNA
atggaagacacccaggccattgattgggatgttgaagaggaagaggaaacagaacaaagctccgagtctttgaggtgcaacgtggaaccggtcggcaggctccatattttttcaggggcacatggaccggagaaagactttccgctacacctgggcaagaacgtcgtaggcaggatgcctgattgctcagtagctctgcctttcccaagcatttccaaacagcacgcagagattgaaatattggcttgggacaaagcccctatcttaagagactgcggttcccttaatggaacgcagattctgaggcctccaaaagtgctctccccaggcgtttctcaccggcttcgagatcaggaactgatcctgttcgccgaccttctctag

SEQ ID NO: 229913 - DNA, 6269 bp, synthetic construct
  misc_feature 1..6269: note = Description of Artificial Sequence: Synthetic coding sequence
  source 1..6269: mol_type = other DNA
atggaggatacccaggcaatagattgggatgtggaggaggaagaggaaacagagcaatctagcgaaagtctgcgatgcaatgtagaaccggtcggccgtcttcatattttctcaggagcccatggacctgagaaagatttccctttacatctggggaagaacgtggtgggtagaatgccagattgttctgtggccctgccatttccatcaatttccaaacagcacgccgagattgagatccttgcttgggataaagcacccatcctccgagattgcggctccctcaacggaacacagattctgcgccctcctaaggtgctgagccccggtgtgagccacaggctgcgagaccaggaactgatcttatttgcggatctgttatgtcagtaccacagactcgacgtgtccttacctttcgttagccgtggccctttgaccgttgaggagaccccacgggtacagggagaaacccagcctcaacgactgctcctggctgaggactcagaggaagaggtcgacttcctcagtgagaggagaatggttaaaaagtcgaggacaacttcatcctcagttatcgtgcctgagagcgatgaggagggccactcccctgtactgggaggtcttggtcctcctttcgctttcaacctgaactccgacaccgacgtcgaggaagggcagcagcctgcaactgaggaggcatcttccgcggcacgccgtggggctaccgttgaagccaagcagagtgaagcagaggttgtgacggaaatacagctcgagaaggaccagcccctggttaaggagcgggataacgacacaaaagtcaaacggggagcgggaaacggcgtcgtcccagctggtgtgatactggagcgcagccagccacccggtgaagattcagacaccgatgtggacgacgattcccgccctccaggcaggcccgctgaagtgcatctggagagagctcagccatttggctttatcgactccgacactgacgccgaagaggaaaggatccctgccaccccagtggtgattcccatgaagaagcgcaagatcttccacggcgttgggactcgcggacctggagccccaggactggcccaccttcaagaatcccaggcaggatcagatacagacgtcgaggaggggaaggcgccacaggctgtgccgcttgaaaaatcccaggcctctatggtcataaattctgacacggacgacgaggaagaggtgagcgcggctctcaccctggcccacctcaaggagtctcagccagccatttggaacagagacgcagaagaggatatgcctcagagggtcgttctgctgcaacgcagtcaaacaacaacagagcgtgatagcgacacggacgttgaagaggaggagttgcccgtggagaatagagaggccgtcctcaaggaccatacgaaaataagagcactggttcgggctcactctgagaaagatcaaccccctttcggcgattcagatgattctgtggaggccgataagtcaagcccgggaatccacctggagaggtcccaagcatcaacgacagttgatatcaatacccaagtggagaaggaggtgcccccaggtagcgcgatcatccacattaagaagcatcaagtgtctgtggagggaactaatcaaaccgatgttaaggcagtagggggtccagccaagctattagtcgtgtccctggaggaggcctggcctctgcacggagactgcgaaaccgacgcagaggagggaacctcattaacggcctccgtggttgcagatgtaaggaagtcccagctccccgcagagggcgacgctggggcagagtgggccgcagctgtgctgaagcaggaacgggctcatgaagtcggcgctcagggcggaccacctgtagcccaagtggagcaggatctgccaatctcaagagagaacctgaccgaccttgttgtggatacagatacccttggtgagagtacccagcctcaaagagagggggcacaggtgcccacaggcagggaacgggagcaacatgtcggaggcactaaagatagcgaagacaattatggcgactcagaagacttagacctacaggccacccagtgcttcctggagaaccagggactggaagccgtgcaatccatggaggacgagccgacccaggcattcatgctcacccctcctcaggaattaggaccttctcactgctctttccagaccacagggactctcgacgaaccctgggaggtgcttgctacccaaccattttgtctccgcgaatctgaggatagcgagacacagccctttgatacacacttggaggcgtatgggccttgcttgtcgccaccaagggcaatacccggagaccaacatcctgagtctcccgttcatactgagcctatggggattcagggcagagggcgtcaaaccgtggacaaagtcatgggcatcccaaaagagactgctgaacgcgtgggccctgaaagagggccactcgagagggagactgagaagctgttgcctgagaggcaaactgacgtgaccggggaagaagagttgaccaagggaaagcaagaccgggagcagaagcagcttctggctcgggatacccagcgtcaagaatcagacaaaaatggcgagtcagccagcccagaacgtgacagggagagcctgaaagtggaaattgaaacatccgaagaaattcaggagaagcaggttcagaaacagaccctcccatctaaggcctttgagcgagaagtcgaacggccagtggccaatagggagtgtgaccccgctgagctggaagagaaggtgcccaaagtaatcttggaaagagacacccagcggggtgagccggaaggtggctcacaggatcaaaagggtcaagcgtcctccccaacccctgagccaggagttggagctggtgacctacccggacccacgagcgcacctgtgccctcaggctctcagagtgggggaaggggctctcctgtttccccccgaaggcaccagaaaggactgctcaattgtaagatgcctccagccgaaaaggcctcccgtatacgcgcagcggagaaggtatctcgaggggaccaggagagtcccgacgcatgtctgcctccgacagttccagaggccccagcgccaccgcagaaacctcttaattctcaatctcagaagcaccttgcaccaccacctttattgtccccacttctgcccagtatcaagcctaccgtcaggaagacaagacaggatggctcgcaggaagcccctgaagcaccgttgagcagtgagctggagcctttccacccgaagcccaaaattcggacccggaaatcttccaggatgacaccatttcctgcgacctccgcagcccctgaaccacatcccagcaccagcaccgctcagcctgtgaccccgaagcccacatctcaggcaacacgttccaggactaaccggtcctctgtaaagacacccgaacccgtcgttccgaccgcccctgagctccagccaagcacttccactgatcaacctgttaccagcgaaccaacctctcaggtcaccagaggccgaaagagccggtcatctgtcaagactcctgaaactgttgtgccaacggcactcgaactccagcccagcacgtcgactgaccggccagtgaccagtgaacctacctcacaggccacacgcggacgaaaaaatcggtccagcgtgaaaacacccgagcccgtagtgccgacagccccagagctgcaacctagcacttcaaccgaccagccagtgacatctgaacccacgtatcaggcaactaggggcaggaaaaacagatcctccgttaagacaccagaaccagtggttcccactgctcctgagctgcgcccatccacctccaccgatcgccctgtcacccctaagcctacttccagaacgacaagaagccgcaccaacatgtcctcagtgaagacccccgagactgtagtgcctactgcgccagagctgcagatcagcaccagtactgaccaacctgtgacgccgaaaccgacctctcggaccacaagaagcaggaccaatatgagttctgtgaagaatcctgagagtactgttcccattgctccggagttaccccctagcaccagcaccgaacagcctgtcacgcccgagccaacgagcagagcaacccggggtcgaaagaacagatcttctggcaagacccctgaaacccttgtgcctactgccccaaagcttgaaccctccacatctaccgaccagccagtcacacccgaacccacaagccaagcaacccggggacgaacaaacagatcctcagtgaagacacccgagaccgtggtgccaaccgctccagaactgcagccttccacatctaccgaccagcccgtcacccctgagccaacctctcaggcgactcgcggtcgaacagacaggagcagtgtgaagacccccgagactgttgttcctacggcaccagaattacaggccagcgcctccaccgatcagcctgtcacctccgagccaacatccagaacaacgcgcggtcggaaaaatcgctcttctgtgaaaacacctgaaacagtagtcccagccgcacctgagttacagccttctacctccactgatcagcctgttactcccgagccaacatctcgggctacacggggtcggaccaacagatcatctgtgaagactcctgagtcaattgtgcccattgcgcctgagttgcaacctagcaccagtcgaaaccagctcgtgacaccagaaccaacctcccgggcaactagatgccggacaaatcggagttcagtgaagacaccagaacccgtcgttcccactgcacctgagccccaccctacgacttctacagatcagccagtgactcccaagcttacttcccgtgctacacgcagaaagaccaataggtcatccgtgaaaactccgaagccagtggagcctgccgcttctgacttggagccttttacgcctactgatcaatcggtgacccccgaggcaatcgcccagggtggccagtctaaaacattgaggtcctccacggtgagggccatgcctgttcctactacgccagagtttcaatcgccggttactaccgaccagccaatttcgcccgaacccataacacagccgtcctgcatcaagcgccagcgggctgcgggtaacccaggcagccttgccgctccaattgatcacaagccctgttcagcaccgctcgagcctaagagtcaggcctctagaaaccagcggtggggtgccgtgagggcagcagagagcctgacagccattcctgagcctgcctccccccaactcctggaaacacctatccacgccagccaaatccaaaaggttgagccggctggaagaagcaggttcacaccagaactgcagccaaaagcctcacagtccagaaagcgctccctggccaccatggatagcccgccacatcagaagcaacctcaacgaggagaagtgtcccaaaaaaccgtgatcatcaaggaggaggaagaggatactgcagaaaaacctggaaaagaggaagacgtcgtcactccgaaaccaggcaaaaggaaaagagaccaagccgaggaggagccaaaccggatcccgtccagatcactgcggcgtactaagctgaaccaggagtctaccgccccaaaagttttgttcacaggcgtggttgacgctcggggtgagagggctgtgctcgcgttggggggtagcctcgccggttcggccgcagaggcaagccatcttgtgaccgacagaatcagaaggaccgtgaagtttctctgtgcactgggacggggaattcccatattatccttagattggcttcatcagtctagaaaggctggtttctttctcccacccgatgagtatgtggtgaccgacccagagcaggagaagaatttcgggtttagcttgcaggacgcactatctcgcgcaagagaacgaagactgctggagggctacgagatctacgttactcctggcgtccagcctcccccacctcagatgggtgaaatcatatcttgctgcggtggcacctacctgccctcgatgccacggtcatataagcctcagagggtggtaatcacttgtccccaggattttcctcactgctcgatcccactcagggtgggccttcctctgctgagccctgaattcctgctaacaggcgtgctgaagcaggaagccaaaccggaagcattcgtgctttcaccactggagatgagcagcaccta

SEQ ID NO: 229914 - DNA, 489 bp, synthetic construct
  misc_feature 1..489: note = Description of Artificial Sequence: Synthetic coding sequence
  source 1..489: mol_type = other DNA
atggaagacactcaggcgatcgactgggacgtggaggaggaagaggaaacagaacagagcagtgaatctttacgatgcaacgttgaacccgtggggagactgcacatctttagcggagcacatggccctgagaaggattttcccttgcatttgggaaagaacgttgtgggtcgaatgcccgattgcagtgtcgccttaccctttccgtcaatttccaaacagcatgcagaaatcgaaattcttgcttgggataaggcacctatccttcgagactgtggatctttaaacgggacacaaattctccgtccacctaaggtactatcacccggagtgagccaccggctccgggatcaagagcttatactgtttgccgacctgttgtgtcagtatcaccggcttgacgtgtcccttccttttgtatcaagaggacccctgaccgtggaagagacaccacgtgttcaaggcgaaacccaaccccagagactgtag

SEQ ID NO: 229915 - DNA, 921 bp, synthetic construct
  misc_feature 1..921: note = Description of Artificial Sequence: Synthetic coding sequence
  source 1..921: mol_type = other DNA
tgacatgtagggggaaccaaggactccgaagataattacggagactccgaggatctggatctgcaagctacacagtgcttcctggaaaatcaggggcttgaggctgtgcagagtatggaggacgaacccacccaagctttcatgctgactcctccgcaggagctgggtccctctcattgcagtttccaaaccactggtctgctgaattgtaagatgccacccgctgagaaggctagcaggattcgggcagcagaaaaggtttcaagaggagaccaggagtcaccagacgcctgcctacctccaaccgttccagaggcccctgcccctccgcaaaaaccactgaattcacagagtcaaaaacacttggcccctccgcctctgctatcacctctgctccccagtatcaaacctacagtgagaaaaacacggcaagacggttctcaggaggctccagaggccccattgtcctcggagctggaacctttccatcctaaaccaaagattagaacccgcaagtcctctaggatgacccctttcccagccacctctgccgctccagagcctcacccatcgaccagcaccgcacagccggtaactcctaagccaactagccaggctacccgaagccggacgaaccggagcagtgtaaaaactcctgagcccgtcgttccaaccgctcccgagcttcaaccgagcacatctactgaccagcctgtcacgagcgagccaaccagccaagtcactagaggacgcaagtcacggtcatccgtaaaaacccccgagacagtagttcccacagcactggagctgcagcccagtactagcacagatcggccagtgacaagtgagccaacctcacaagccacccgcggtaggaaaaataggtcatcagtaaaaactcccgagcctgtggttccatag

SEQ ID NO: 229916 - DNA, 921 bp, synthetic construct
  misc_feature 1..921: note = Description of Artificial Sequence: Synthetic coding sequence
  source 1..921: mol_type = other DNA
taacatgtgggcggtaccaaggactccgaagataattacggcgattctgaggacctggacctgcaagcaactcagtgctttttggagaaccagggtctcgaggccgtacagtcaatggaggatgaacccactcaggctttcatgttaacacctccccaggaactcggaccctcccactgcagtttccaaacaaccgggctgcttaactgtaaaatgccgcctgcggaaaaagcatcaagaattagagccgctgagaaagtgtcccgaggagatcaggagtctcctgatgcttgccttccacctacagtcccggaggctccagccccaccacagaaaccgcttaactcgcaatcacagaaacacctggccccaccacctctcctctcacctctgctgccatctattaagccaactgtccgaaaaactagacaggatgggtcccaggaggctcccgaggcgccacttagctctgagttggagcctttccacccaaagcccaagatacgaacgcggaagtcctctcgtatgactccatttcccgcaacttcagccgcacccgagccccatccatctactagcactgcacaacctgtcacccctaagcctacctctcaagccacaaggagccggaccaaccgctcgtcagtgaagaccccagagcccgtcgtgcccaccgctcccgagcttcagccctccacctctaccgaccaaccggtgacgtctgagcccaccagccaggtgactaggggcagaaagtcccgcagcagtgtcaaaacccctgagactgtggtgcctacagcattagaactccaaccatctacttccacggataggcccgttacctctgagcctacctcacaagcgacaagaggccgtaagaatcgctcttccgtcaagacaccagagcctgtcgtgccttag

SEQ ID NO: 229917 - DNA, 384 bp, synthetic construct
  misc_feature 1..384: note = Description of Artificial Sequence: Synthetic coding sequence
  source 1..384: mol_type = other DNA
atggaggacacccaagcaatcgactgggatgttgaggaggaggaggaaacagaacagtccagcgagtccctccggtgcaacgttgaacctgtgggacgattacatatcttctccggcgcacacggaccagaaaaagacttccccctgcatctgggcaagaacgttgtgggacgtatgcctgactgcagcgtggcgcttccttttccttccatcagcaagcagcacgctgaaatcgagattctcgcctgggacaaagcgccaattttgagagactgtggctcactgaatggcactcaaattctcaggccacctaaagttctcagcccaggcgtgagccaccgtttgagggaccaggaactcattctgttcgcggatctgctgtag

SEQ ID NO: 229918 - DNA, 921 bp, synthetic construct
  misc_feature 1..921: note = Description of Artificial Sequence: Synthetic coding sequence
  source 1..921: mol_type = other DNA
tgacatgtgggtggcaccaaggattccgaagacaactacggggactccgaggatctggatctgcaggctactcagtgtttcctagaaaaccagggactggaggcagtgcagagtatggaagacgaacccacgcaggcttttatgctcaccccacctcaggagttgggcccatcacattgcagtttccaaacaacagggctgcttaattgcaagatgcctccagcggaaaaggcttctcggatcagggccgctgaaaaggttagtaggggggatcaagagtctcccgacgcgtgcttgccccctacagttccagaggccccagcccctcctcagaagcccttaaactcacaaagccagaagcacttagctccaccgcctctgctgagtcctttactgccgagtatcaaacccactgtgcggaaaactcggcaggatgggtcccaggaagccccagaggcccctctcagcagcgaactcgaaccctttcaccccaagcccaagattagaacacggaaaagctcgaggatgactcctttccccgcaacttccgccgcaccggaacctcatccctccaccagcaccgctcagcctgttaccccaaaacccacctctcaggcaacccgttcccggacgaatcggtcgagcgtcaagacccctgagccggttgtgccaaccgctcctgagctccagccatcaacgagcactgaccagccagtgacaagcgagccgacgtctcaggtcaccagaggacggaagagccggagtagtgtgaaaacccctgaaaccgtggtgcctacagcgttagagctccagccctccacctcaacagacaggcctgttaccagtgaacccacaagtcaggccaccaggggaaggaagaatcggtcaagtgttaagacaccagaaccagtagtcccgtag

SEQ ID NO: 229919 - DNA, 489 bp, synthetic construct
  misc_feature 1..489: note = Description of Artificial Sequence: Synthetic coding sequence
  source 1..489: mol_type = other DNA
atggaggacacccaagctattgactgggacgtcgaggaagaagaggagactgaacagagctcagaaagcttgagatgcaacgtggagccggtgggccgtctccacatttttagcggagcccatgggccagagaaggactttccccttcatctcggcaaaaatgtggtaggcaggatgcccgattgcagtgtcgccctcccgtttccctccatatctaagcaacacgcagagatcgagatcctggcttgggataaggcaccaatcctccgcgattgcggcagccttaatggtactcagattctgaggcccccaaaggtcctctcccccggagtcagtcacaggctccgggaccaggagctgatcttgtttgctgacctgttgtgccagtaccacaggctcgacgtcagtctccctttcgtgtctcggggacccttaactgtggaggagaccccccgtgtgcagggggaaacccagcctcagcgactgtag

SEQ ID NO: 229920 - DNA, 6269 bp, synthetic construct
  misc_feature 1..6269: note = Description of Artificial Sequence: Synthetic coding sequence
  source 1..6269: mol_type = other DNA
atggaagacacccaggcgatcgactgggacgtggaggaggaagaggagaccgaacagtcatccgaatcgctccgctgcaatgtcgaacctgtcggcaggcttcatattttctccggagcccacggccctgagaaggactttcctctccacttgggaaaaaacgtggttggcagaatgccagattgcagcgtcgctctcccatttccgagtatttctaaacagcatgctgagatcgaaattctggcatgggacaaggcaccaatcctgagggattgcggcagcctcaacggcacccagatcttacggcctcctaaggttctctctccgggagtgtcccatcgcttaagggaccaagagctcatattgttcgcagacctgctttgccagtatcaccggctcgatgtgtcattaccgttcgtgtcaaggggaccattgacagtcgaggaaacaccaagagttcagggggaaacccagccgcagcgtttgcttttagctgaggacagcgaggaggaggtggatttcctctctgagaggcgcatggtgaagaagtctaggacgactagctcctccgtgatcgtccccgagtcggatgaagaggggcactcccccgtgctcggcggactcggtcccccatttgcctttaatctaaacagcgatactgatgtagaagagggacagcagccggcaacagaggaagcatcaagtgccgctaggagaggcgcaactgttgaggccaaacagagcgaagcggaggtcgtgactgaaattcaacttgagaaggaccagccactcgtgaaagaacgagataatgataccaaagtgaaacgtggggctggaaatggcgtggtgcccgcaggcgtgattctggaaaggtcacagcctcccggagaggatagcgataccgatgtggacgacgactcccggcctccaggaaggcctgcggaagtgcatctggagagggctcagccttttggatttattgatagtgatactgacgctgaggaagagcgcatccccgctactccagtggtgattcccatgaaaaagcgaaagatattccatggcgttggaacgcggggacctggtgcacccggtcttgcacacctgcaggagagccaggcaggatcagacaccgacgtagaggagggcaaagccccacaagccgttccactggagaagtctcaggcttccatggtgataaatagcgataccgatgatgaggaggaagtatcagccgctctcacactggcccacttaaaggaaagccagcctgctatctggaaccgggatgcggaagaggacatgcctcagcgggttgtcctcctccaaaggtctcagaccaccactgagcgggattctgataccgacgtggaggaggaagagcttcccgtagagaaccgagaagctgttcttaaagaccatactaaaatccgggctctggtccgggctcactccgagaaggaccagcctccgttcggtgatagcgatgactctgtcgaggccgacaagtccagccccggtatacaccttgagcgcagtcaagctagcacaacagtagacataaacactcaggtggaaaaggaagtccctccaggatccgcaattatccatatcaaaaagcatcaagttagtgtggaagggaccaaccagaccgacgtgaaagcggtgggcggaccagcaaaactgcttgtcgtgtcacttgaagaggcttggcctctacacggtgattgcgagaccgacgccgaggaaggcacgtcgctgaccgctagtgttgtggcagacgtgaggaaatcacaactgccggctgagggagatgctggcgcagagtgggccgctgccgtgttaaagcaagaaagagctcacgaggtaggcgcacagggcggtccccctgtcgcccaggtggagcaggatttgcctataagtagggagaacctgactgacctcgtcgtggacaccgatacattaggtgagtccacgcagcctcaacgcgaaggggctcaggtacccactggaagagagcgcgaacagcacgtcggcggaaccaaggactccgaagacaactatggagattctgaggacctggacctgcaggcaacacagtgctttctcgagaatcagggcttagaggccgtacagagcatggaagacgagccaacgcaggcctttatgctaactccgccacaggaactgggtcctagccattgctcgtttcaaactacagggacactggatgagccgtgggaggtgctggctacccagccattctgcctgcgagaatccgaggacagtgagacgcagccttttgacacacacctcgaagcctatgggccttgtctctcccctccgcgagccattcctggagaccaacacccagaatccccggtccataccgagcccatgggtatccaaggcagaggacgacagacagtcgataaggtcatggggatccccaaggagaccgcagagcgcgtcggcccagaacgaggcccactggagcgggaaacagaaaagctgctgcccgagcgacagacagatgtgacaggagaggaggagctcaccaaaggcaagcaggatagggaacagaaacagctgctcgccagagacacgcaacgacaagagagtgataagaacggggaatctgcctctcctgaacgtgatagagaaagtctcaaggtggagatagagacctcagaggagattcaagaaaaacaagtacagaaacagacacttccaagcaaggcttttgaaagggaagtggaacgaccagtcgccaatcgggaatgcgacccagccgagctggaagagaaggtgcctaaggtcatcctcgagagggacactcaacgaggggaacctgaagggggtagccaagaccagaaaggccaagctagctccccaactccggaaccaggagtgggtgctggagatctgccgggacccactagcgcccctgtgccttcagggagccagtctggagggaggggatcaccagttagcccgcgtaggcaccagaaaggcctgttgaactgcaaaatgcccccagctgagaaggcttccagaatcagggcggcagaaaaggtctctcggggagatcaagaatccccagatgcttgcctgccaccaacggtccccgaagcaccggctccacctcagaagccccttaattcccaaagtcagaagcacttggccccacccccattgttgagtccgctgctgccttctattaaacctactgtccggaagacccgacaggacggatctcaggaagctccggaagccccattgtcctccgagctggagcccttccatcctaagcccaaaatccgcacaaggaaaagcagcagaatgaccccattcccagccactagcgctgcgccagaaccccatccctcaacgagcacagcgcagcctgtgacaccgaagccgaccagtcaggccacccgatccaggacaaaccgaagctcagtaaagactcctgagcctgtcgtgcccaccgcaccagagctccagccttctacttctacagaccagccagttaccagtgaaccaaccagccaagtgacacgcggacggaaaagccggtctagcgtgaagacaccagaaacagtagtgccaacggctttggagctccagccttccacttcaacggacagaccggtgacctccgaaccaacttcacaggccactagaggcaggaaaaatcggtccagcgtgaagactcccgaaccagtcgtgcctactgcacccgaactgcagccatccacatccaccgatcaacctgtaacttccgagccgacctatcaggcgacgcgcggacgtaagaaccgctcctcggtgaagactcctgagccagttgtccccaccgcacccgagctgcgcccatccacctcgacggataggccagtgacccctaaacctacgagtaggacaacacggagcagaactaacatgagtagcgttaagacacctgagaccgttgtgccgaccgctccagagttgcagatctccacctccactgatcagcctgtcacccctaaacccaccagcagaacaactagatccagaaccaacatgagtagcgttaagaatccagagtcaacagtgcctattgcaccggagcttccaccttcgacatccaccgaacagcccgtgactccagaacccacatctcgggctaccaggggacgcaaaaaccgctcatcggggaaaaccccagagaccttagtgcctaccgctcctaaactggagcccagtacaagcaccgatcagcctgtgaccccggaacctacgtcacaggctaccagaggccgaaccaaccgtagcagtgtaaagacccccgagaccgtggtccctaccgccccagagttgcaaccatccaccagcaccgaccagcctgtgacgccagaacctacgagtcaagccacgcggggacggacggaccggagtagtgtcaaaacaccagaaaccgtagtgccgacagctccagaactgcaggcctctgctagcaccgaccagccagttacgtcggaacccacatcgcgtacaaccagaggacgaaaaaacaggagctccgtcaagacccccgaaaccgttgtcccagctgcccctgagctgcagccatctacttccacagatcaacctgtaactcccgagccaacaagcagggcgacccgtggccgaaccaacagatcctctgttaaaacacctgagagcattgtgccgatcgcccctgagttgcaaccatctacgagtcgtaatcaactggtcacgcctgagcccaccagccgcgctacccgctgtagaacgaataggtctagcgtcaagacccctgagccggtcgttccaaccgcaccagagccccacccaactactagtacagaccagcccgtgacccctaagttaacatcccgtgccactcggaggaagacgaacagatcgagtgtgaagaccccaaaaccggttgaacccgctgcctccgatctcgagcccttcactccgacagatcagtcggtgacccccgaggccatcgcgcaaggaggtcagagtaaaacccttcgttccagcactgtcagagctatgccagtgccaacgactccagagttccaatctcctgtgacaacagatcaacccatctcccctgagccgattacacagccctcatgcatcaagaggcagcgtgccgctggtaatccgggtagtctcgctgcacccattgaccacaaaccctgctctgccccactggagcccaaatcacaagcgtcaagaaatcagcgctggggagccgtcagggccgcagagtcactaaccgccattccggagcccgcatccccacaacttctggagactccaatccacgcgtctcagatccaaaaggtcgagcccgctggaagatcccgcttcacaccagaattacaaccaaaagcttcacagtcacggaagagaagtctcgcaacgatggatagccctcctcatcaaaaacagccacaacgcggtgaggtttcccaaaagaccgtgattatcaaggaagaggaagaggataccgccgagaagcccggaaaagaagaagatgttgtcactcccaagcctgggaaacggaagagagatcaggcggaggaagagccaaaccgtatccctagccgctctctccgacgtactaaactgaatcaagagtccactgcccctaaggtcctgtttaccggtgttgtggatgccaggggggagagggcagtcctcgctctaggaggcagcctcgctggttccgccgcagaagccagccacctggtcactgatcgcatcagaaggactgtaaagtttctgtgtgccctcgggagaggcatccctatcttgtcgttggactggttacaccagtcccgcaaagctggattctttctgccccctgatgagtatgtggtgaccgaccctgagcaagaaaagaattttggattttcactgcaggatgctctgtctcgcgctagagagagacggctgctcgaaggatacgaaatttacgtaacacccggtgtacaaccaccccctcctcagatgggcgagatcatcagctgctgcgggggaacatacctgcctagcatgcctcgatcatataaaccccagcgggtagtgatcacttgtcctcaggattttccacattgctccatccctttgagagtcggactgccactgttgtccccagaattcctgctgaccggggttctcaaacaggaggccaaacccgaagcattcgtgctgtcacccctcgagatgagttcaaccta

SEQ ID NO: 229921 - DNA, 735 bp, synthetic construct
  misc_feature 1..735: note = Description of Artificial Sequence: Synthetic coding sequence
  source 1..735: mol_type = other DNA
atggaggacacccaagctattgattgggacgtcgaagaggaggaggagacggaacagtcctccgagtctctccgctgcaatgtagagcccgtgggcagactgcacattttctctggcgctcatggtcccgagaaagacttcccactccacttgggcaaaaatgttgtcggtaggatgccagattgttccgtcgcactacctttcccatcaatttctaaacagcatgccgaaatagagatactggcttgggacaaggcacccatcctgcgggattgtggctccctgaatggcacgcaaatcttgagacccccaaaggttctttctccgggagtatcccatcggctcagggaccaggagctgatcctttttgctgatctgctgtgtcagtatcatcgcctggacgtgagtctgccctttgtgtcccgaggacccttgaccgttgaagaaacaccccgtgtgcagggtgagactcaaccccaaagacttctgctagcagaggactcagaagaagaagtagatttcctgtccgaacgccgaatggtaaagaaaagcagaaccacttcatcgtctgtgatcgttccagaaagcgacgaggagggccactctcctgtcttggggggactggggcctccttttgcctttaacttgaacagcgacaccgacgtggaggagggacagcaaccacatcggggagggctattatcatgtcaaaagcgatgtcactgccgaggctag

SEQ ID NO: 229922 - DNA, 384 bp, synthetic construct
  misc_feature 1..384: note = Description of Artificial Sequence: Synthetic coding sequence
  source 1..384: mol_type = other DNA
atggaggacacccaggcgatcgattgggatgtagaggaggaggaggagactgagcaatcttcagagagcctgcggtgtaatgtggaacccgttggacggctccacattttcagtggggctcacggccctgaaaaggacttccctcttcacctcggaaaaaatgttgtgggacgcatgccagattgttctgtggcactgccatttccctctatttccaaacaacacgccgaaatcgagatcctcgcttgggataaggctcctattttgcgggactgcggctccctgaatgggactcagatcctcagacccccaaaggtactgtcaccgggagttagtcatcgcctgcgagatcaggagttgatccttttcgcagatctgctttag

SEQ ID NO: 229923 - DNA, 342 bp, synthetic construct
  misc_feature 1..342: note = Description of Artificial Sequence: Synthetic coding sequence
  source 1..342: mol_type = other DNA
atggaggacacacaagctatcgactgggacgtggaagaggaagaagaaactgaacagagttcagaaagcttgaggtgcaatgtggagccagtcggacgtctgcacatcttctccggtgcacacggaccagagaaagactttcccttgcatctaggcaaaaatgtagttggcaggatgcccgattgttctgttgctttgcccttcccatctatcagcaagcagcatgcggagatcgagatcctcgcatgggataaagctccaattctgcgagattgtggatcgcttaacgggacccaaatcctgaggcctcccaaagtgctatcccctggtgtttcgcactag

SEQ ID NO: 229924 - DNA, 5408 bp, synthetic construct
  misc_feature 1..5408: note = Description of Artificial Sequence: Synthetic coding sequence
  source 1..5408: mol_type = other DNA
atggaggacacccaggccatagactgggacgttgaggaggaagaggaaaccgagcagagctcagagagcctgcgctgcaacgtagagcccgtggggaggcttcacattttttccggcgctcacggcccagagaaggacttcccactccatctggggaaaaatgttgtcggtcggatgcccgattgcagtgtggctctgccattccctagtattagtaaacagcacgctgagattgagattctggcttgggacaaggcccctatcctcagggactgcggatcattgaacggcactcagatcttaaggccccctaaggtgttaagtcccggtgtgagtcaccgcttgcgggaccaggaactgattctgttcgcagatctgctgtgccaataccatagactggatgtcagtctccccttcgtatcacggggaccattaactgtagaggagactccacgagtgcagggcgagacccagcctcagagacttctgttggccgaggactccgaggaggaagtcgacttcctgtccgagcgcaggatggtcaaaaagagcaggaccacatcctcttctgttattgttcccgagagtgatgaggaggggcacagccccgtgctggggggactgggtcccccatttgcctttaatctgaactctgatacagacgttgaggagggtcagcagccagctacggaagaggcctcatccgctgcccgacgcggtgccaccgtggaggcaaagcagagtgaggctgaggtcgttaccgaaatccagcttgagaaggatcagccactggttaaagaacgggataacgatacaaaggtcaaacgcggtgccggtaacggcgttgtacctgcgggagtaatcctggagcggagccaacctccgggagaggatagtgacacagatgtggacgatgattctagacccccaggtaggcctgcagaggttcatttagagagggcgcaacccttcggtttcatagatagtgacactgatgccgaggaagaacgaatccccgctacgcccgtcgtgatacctatgaagaaaaggaagatctttcacggcgtaggcacacgtggccctggagcaccaggcctggctcatcttcaggagagtcaggcgggttcagacactgacgtcgaggagggaaaggcaccccaggcagtaccactggaaaagtcacaggcgtccatggtgatcaacagcgataccgacgacgaagaggaagtgagcgcggcactgaccttagctcacctgaaggaatctcagccggctatttggaatagagacgccgaagaggatatgcctcagcgggtagtgctcttgcagcggagtcagaccactactgagagagattccgacacagacgtcgaagaggaggagttgccagtggagaatcgggaagcagtgctgaaagatcacactaaaatccgagcgcttgtccgtgctcactcagagaaggaccagcccccatttggcgacagtgatgattcggtcgaggccgacaagagttcccctggcattcacctcgaacgcagtcaggccagcactaccgtggacatcaacacacaggtagagaaggaggtccctccagggtcagccatcatccatattaaaaagcaccaggtatcagtagaaggcaccaatcagactgacgtgaaagctgtgggcggtccagctaaactcctcgtggtgtcactcgaggaggcctggcccctgcacggagattgcgagactgacgcggaagaagggacaagtctaaccgcaagcgtggtggccgacgtgagaaaatcccagctgccagcggagggggatgccggagcggaatgggcagctgcggttctgaaacaggaaagggcgcacgaggtaggcgctcagggcggaccacccgtcgctcaggttgagcaggatctgcccatttcccgtgaaaatcttacagacctggtggtagacacagacacattgggcgagtctacgcagccacagagagagggtgctcaggtgcctacaggcagggaacgggagcagcacgtgggagggaccaaggactcagaggataattatggcgattctgaagatttggatctgcaagccacacagtgctttctagagaaccagggcctcgaggctgttcaatccatggaagatgagcctacgcaggccttcatgctgactcctcctcaggaactgggaccgagtcattgctcattccagaccactgggacactggacgaaccgtgggaggtcttggcgacccagccattctgcctgcgggagagcgaagattccgaaactcagcccttcgatacccatctcgaagcttatgggccatgtctgtcgcctccacgagccatccctggcgaccagcaccccgagtcaccagtgcatactgagccgatgggaatccagggacggggtcgccaaaccgtggataaagtgatggggatccccaaggaaacagctgaaagagtgggtcctgagcggggtcctctggaaagagaaaccgagaagctgctcccagaacgccagaccgatgtcactggggaagaagagctcaccaaaggaaagcaggaccgcgaacaaaagcagctgctggcaagggatacccaaaggcaagaatcagataagaacggagagtcagcatctccggagagggatcgtgaatcgctgaaagtcgaaatcgagaccagcgaagagatccaggaaaaacaagtgcagaagcaaactctcccatcaaaggccttcgaacgcgaggtggagcgacctgtggccaatagagagtgcgatccagccgaactggaggagaaggtgcccaaggtcatcctggaacgcgatacccagcgcggagagcctgaaggaggctcacaggatcagaagggccaagcctcctctcccacaccagaaccaggtgttggagctggggatctccctggcccaacttcagctcccgtcccctcgggctcccaatccggcggaaggggctcacctgttagtccacggcgacaccagaaggggctgctcaactgcaaaatgccacctgctgaaaaagcatcccgcataagggcagctgagaaggtatcacgaggggatcaggaatcgcctgacgcatgtctcccaccgactgtgcccgaggcaccagctcccccacagaagccccttaacagtcagtctcagaagcacctcgctccaccaccactgctatcacctctgcttccttcaatcaagcctaccgtaaggaagacccgacaggacggctcccaggaagcccctgaggcaccattgtcctctgagctggagcctttccatcctaagccgaaaattcggactaggaagagtagcagaatgacccccttccccgcaacatccgccgcacctaagttagagccaagtacatccaccgatcagcccgtcaccccagagccgacatcacaagccacacgcggaaggaccaaccggtcttctgttaaaacaccagaaaccgttgtgccgactgccccagagcttcagccaagcactagtactgatcaacccgtgacccccgaacccactagccaggcaactaggggccgaactgaccgcagtagcgtgaagacacctgaaacagtggtgcctacggcccctgagctgcaggcatctgccagcaccgatcagccagtcacatcagagcccacttctagaacaacccggggtagaaaaaacaggtcttccgtgaagactcctgagaccgtagtcccagccgctccagagctccagccctcaacaagcactgaccagcccgtcacacctgaaccaacatctcgtgcaacgcgcggaaggactaatcgaagttctgtgaaaacacccgaatcaatcgtcccaatcgcacccgagctgcagccatccacgagtcggaaccaattggtgacaccagagcccacaagtagagcgacccggtgccgcactaaccgctccagcgtcaagacgccagaaccagtggtacccactgcccctgagccgcatcctaccacatcaacggatcagcccgtcacacctaaactgacatccagggctacacgaagaaagactaatcgttccagtgtgaagacccctaagccagtggagcctgccgcttccgacctcgaaccgttcacaccgacagaccagtccgtaactcctgaagctatcgcccagggcggacagagcaaaacccttagatcctccactgtgcgggcaatgcctgtacccaccacgccagaattccagtccccggttactaccgaccagcccatctcacccgagcccattacacagccttcatgtatcaaacgccagcgagccgcagggaaccccggatctctcgcggctcctatcgaccacaagccctgttctgcccctctggagccaaaaagccaggcttcgaggaatcaacgatggggtgccgtgcgggctgccgaatccctcacagccatccccgaacccgctagcccacaactgctggaaacaccaatccacgccagtcaaatccagaaagttgagcctgctggacgatccagattcactcctgagctccagcctaaagcgtcacagtccaggaaacgaagcctggcaacaatggatagccctcctcaccagaagcagcctcagaggggcgaggtcagccagaagactgtgatcataaaagaggaagaagaagatacggccgaaaagcccggtaaggaagaagacgtggttacgccaaagcccggaaaacgaaaacgggaccaagctgaggaggagccaaatagaatcccttcccgctctctgagacggactaagctgaatcaagagtcaactgcccctaaggtgctcttcacaggcgtcgtggacgctagaggtgaacgcgcagtgctcgcactggggggatctctggccggttccgcggctgaagcgtcacacctggtgacagacaggatacggaggactgtgaagtttctctgtgccctaggtcgcggaattccgatattgtccttggactggctccatcagtctaggaaagccggatttttcctcccacctgacgagtatgttgttacagacccagagcaggagaaaaatttcggcttctctctgcaagatgctctgtcacgagccagagagagacgactgctcgaaggatacgaaatctacgtgactccaggagtgcagcctccacctccccagatgggggaaattatatcctgctgcggcggaacttacctgcccagtatgcctcgctcctataaaccgcaacgagtggttatcacctgccctcaggacttccctcactgttcaattcccctgagagtggggctacccctgctttcgccagagtttctgttgacaggggtgttgaagcaggaggccaaaccggaggccttcgtcctgtccccactggaaatgagctcgacata

SEQ ID NO: 229925 - DNA, 735 bp, synthetic construct
  misc_feature 1..735: note = Description of Artificial Sequence: Synthetic coding sequence
  source 1..735: mol_type = other DNA
atggaagacactcaggccatagattgggacgtggaagaggaagaagagacggaacagtcaagcgagagcctgcggtgcaacgtggaaccagtggggcgtctgcatattttcagcggggctcatggacctgagaaggacttccccttacacctcggtaaaaatgtggtgggacgaatgcctgactgcagcgtcgccctaccatttccctccatttcaaaacagcacgccgaaatcgagatcctggcctgggacaaggcaccaatcctgcgcgattgtgggagcctgaatggcacgcagattcttagaccgccaaaggtcctgagccccggtgtcagtcaccgactccgggaccaggaactgattctttttgccgacctgctgtgccagtatcacaggcttgacgtgtcactacctttcgtgagtcgagggcctttgacagtggaggaaacgccccgagtacaaggagagactcagccgcagcgccttttactggccgaagacagtgaggaggaggtggactttctttccgagcggagaatggtaaaaaaatccagaactacaagctccagcgtcattgtacctgaaagcgacgaagaaggtcactcccctgtcctaggagggctgggacccccttttgcctttaacttgaactctgataccgatgtcgaagaaggtcagcagccacacaggggaggcttactgtcctgccagaaaaggtgtcattgtcgaggctag

SEQ ID NO: 229926 - DNA, 5408 bp, synthetic construct
  misc_feature 1..5408: note = Description of Artificial Sequence: Synthetic coding sequence
  source 1..5408: mol_type = other DNA
atggaagacacacaggcaattgattgggatgtcgaagaggaggaggagacagagcagagcagcgagtcactgcgatgcaacgtggagcctgtaggcagactgcatatattcagtggtgctcacggccctgagaaggacttcccactgcacctgggaaaaaatgttgtgggcaggatgcccgactgcagcgtggccctccctttccccagcatctcgaagcagcatgctgagatcgaaattctagcttgggacaaggcgcctatcctaagggattgcggcagcctgaatggcacccaaattctacgtcccccaaaagttctatccccaggcgtcagccacaggctgagagaccaagaactcatattgttcgctgacctcttgtgccagtatcacagactcgatgtgagtttaccttttgtctcgaggggacctctcacagtggaggagacccctagggtgcagggcgagacccagccgcagaggctgctgttagccgaggactccgaggaggaagtcgactttctctccgaacggcgtatggtcaagaaatcccgtactacaagtagctctgtgattgttcctgagagtgatgaggagggacatagtcccgtgctcggaggtctgggacctcccttcgctttcaacctcaacagtgacactgacgtcgaggaggggcagcaacctgccacagaggaagccagcagtgctgcaagacggggagccaccgtcgaggccaagcagtcagaggccgaggtggtcaccgagatccagctggagaaggaccagcctctggtaaaggagagggataacgatacgaaggtgaagcggggagccggtaatggagtggtgccggcaggcgtgatcctcgaacggagccagccacccggagaggactcggatacagacgttgacgacgattcgaggcccccaggtcgacccgctgaggtccacctcgagcgcgctcagcccttcgggtttattgactctgatacagacgcggaagaggagaggataccagcaaccccggtcgtgattcctatgaagaagcgcaagattttccacggtgtgggaacaaggggacccggtgctccagggttagcccatttgcaggagtcccaggcaggatccgataccgacgtggaagaaggaaaagcaccgcaagccgttccgcttgagaagagtcaagcaagcatggtcattaactccgatacagacgatgaggaagaagtgtctgcggctctgacgcttgctcatttgaaagagtcacagcccgctatctggaatagagacgccgaggaagacatgccccaacgagtcgtcctcctgcaaagaagccagaccactacagagcgagactctgacaccgacgtggaggaggaggagcttcccgttgagaatagggaggcagtcctgaaagaccacaccaagatcagggctctggtccgtgctcacagtgaaaaggatcagccccctttcggtgattcagacgacagcgttgaggctgataaaagttcaccgggaatacatctcgagcgatcacaggctagcactacagtcgacatcaacacacaggtggaaaaagaggttcctcctggctccgccatcatacatataaaaaagcaccaagtgagtgtcgagggaacaaaccaaaccgacgtgaaggccgtgggcggaccggctaagctcctagtggtgtctctcgaagaggcctggcccctgcacggtgattgcgagacagatgccgaggaggggacctccctgacagcatctgttgtcgctgatgtgcgtaagtcccagctgcctgccgagggtgatgccggtgctgaatgggccgcagcggtcctgaagcaggagcgggcacacgaggtcggggcacagggaggtccccctgtggctcaggtggagcaggatctgccaatctccagggaaaatctgactgacctggtagtggacacagatacactgggcgagagcacccagcctcagcgcgaaggggctcaggtgcccacaggaagggaaagagaacagcacgtcggcggaactaaggactcagaagataactacggggactccgaggacctggatcttcaagcaactcaatgttttctcgagaatcaggggcttgaggccgtgcagtccatggaagacgagccaacccaggcgttcatgctgactcccccacaggaactgggcccaagccactgttctttccagactaccggaacgctggacgagccatgggaggttcttgcgacccagcccttctgcctccgcgaatcagaagattctgagacccagccctttgacacccacctcgaggcctatggcccatgccttagtccaccccgtgccatcccgggagaccagcaccccgagtcgcccgtgcataccgagccaatgggcatacagggccgaggtaggcaaactgtggacaaggtgatgggtattcccaaggagactgcagagcgagtcgggcctgaaagggggccacttgaacgagaaaccgaaaagcttctcccagaacggcagacagatgtgaccggggaagaggagctaacgaagggcaagcaagaccgggaacaaaaacaattactcgctagagatacgcagaggcaagagtcagacaaaaacggggaatctgcttctcccgaacgggatagggaatctctgaaagtcgagatcgagactagcgaggagatacaggaaaagcaagtgcagaagcaaaccttacctagcaaggcattcgagagggaagtggaacgtccggtggcaaaccgcgaatgtgacccggctgaactggaggagaaagtgcccaaagtcatccttgagagggacacacaaaggggagagcccgaaggcggaagtcaagaccagaaggggcaggcctctagtcccacccccgaaccaggtgtcggagctggcgacctgcccggtcccacaagcgctcctgtccccagcgggagccagtccggcggaagaggatcacccgtgtcccctcgaaggcaccaaaaggggctgttaaattgtaaaatgcctcccgctgagaaggcttccagaattagggctgcagagaaggtgtccagaggcgatcaggagtctcccgacgcgtgtctccctccaactgtgcctgaagccccagcgccacctcagaaacctctaaacagccaatcccagaaacacctagcacctccccctttattgagccccctgctgccaagtataaaaccaaccgtccgcaagacgaggcaagatggctctcaggaggcccctgaggcccctctctctagtgagttagagccattccatccgaagccgaagattcggactcgaaagagttccagaatgacaccgtttccagctacatctgctgccccaaagctcgaacccagcacatctaccgaccagccagtcaccccggagccgactagtcaggccacccgtggtcggacgaaccgaagttccgtaaagactccagaaacggtagtgccaaccgctcccgagcttcagccaagtacatctaccgaccagcccgtgacacccgaacctacatcgcaagcaaccagagggagaactgataggtcaagcgttaaaacaccagaaactgtagtccctacagcacccgagctgcaagccagtgcaagcaccgatcaacccgtgacgagcgagcccacctcaaggacgacccggggtagaaaaaaccggtcatctgtgaaaaccccagaaaccgtggtgcctgcggctccggagctgcagccgagcacttccacagaccagcctgtaacgcccgagcccacttcacgggctactagagggaggaccaataggagctcggtcaagacgcccgagtccatcgtgccgatcgctccagagcttcagcctagtactagtcgcaaccaactggtcacaccagaacctacttcccgggctacaagatgtcgcacgaaccgcagctcagtcaaaacacccgaacccgtggtgcccacagccccagagccacatcctacgacctcaaccgatcagcctgtaacacccaagctcaccagccgggcaacaaggcgcaagactaaccggtccagtgttaagactccaaagcccgtggagccagccgctagtgatctggagcctttcacgcctacggatcagtccgttaccccggaggccatcgcccaggggggtcagtccaagactttgaggtcctccaccgttagagcaatgcctgtgcctaccacccctgaattccaatcccccgtcaccacggatcagcctattagtcccgagcctattacacagccatcctgtatcaagcgtcaaagagcggcaggaaacccaggctccctggctgcacccatagatcacaagccgtgtagcgcacccttggagccaaaatcccaggccagtcggaatcagcgctggggcgctgtaagagccgctgaaagtctgaccgccataccagagccagcttcccctcagctgctagagacacctatccacgccagtcaaatacagaaagtagagcctgctggaaggtcacgcttcactccagagcttcagcccaaagcaagccaatccaggaagcgttccctggctaccatggacagtccccctcaccagaaacaaccccagagaggagaagtgtcacagaaaactgtgatcatcaaggaagaggaagaggacaccgccgaaaaacccggtaaggaggaagatgtagtcactcctaagccgggtaagcggaagcgtgatcaggccgaggaagagcccaatagaatacccagcaggtcccttcggcgaacgaagcttaaccaggagtctacagcccctaaagtgctctttacgggtgttgttgatgcccgtggggaacgggctgtgcttgccctaggcggtagcctagcaggatcagccgctgaagcctcccatttggtcactgacaggatccggagaacagtgaaatttttatgtgcactgggacgaggcattccaatcctcagcttggactggctgcaccaatccagaaaagctggcttcttcctcccccctgacgagtacgtcgtaaccgatccagagcaggagaaaaattttgggtttagtctacaggatgcactgagtcgcgcaagggagaggcggttgttggagggctatgagatttacgtcaccccaggagttcagcccccaccgcctcagatgggtgaaatcatatcttgttgcgggggaacctatctcccaagcatgcccaggagctataagcctcaacgggtggtgatcacctgcccccaggacttcccccattgctctatccctctccgcgtgggcttgccgctcttaagtcctgaatttctgcttacaggggtgctgaagcaagaggccaagccagaggcttttgttctgagccccctggaaatgagctctaccta

SEQ ID NO: 229927 - DNA, 735 bp, synthetic construct
  misc_feature 1..735: note = Description of Artificial Sequence: Synthetic coding sequence
  source 1..735: mol_type = other DNA
atggaagacactcaggcaattgactgggacgtggaggaagaggaggaaactgagcagtcttctgagagccttcgctgcaatgtcgagcctgtcgggcgacttcatatcttcagtggcgctcatgggccagagaaggacttccccctccacttgggtaagaatgtggtcggcagaatgcccgactgcagcgttgcccttccatttccctcgatcagcaagcagcatgctgagattgagattctagcttgggacaaggctccaatcttaagggattgcgggagcctaaacgggacacagatcctccgtcctccgaaggtgttgagcccgggtgtgtcgcacaggctccgcgatcaggaattgatcttgttcgcggatttactttgtcaataccatagacttgatgtatctctaccattcgtctcacgtggtcctctcaccgtggaagagacacccagagtgcagggggaaacccaaccacagagactcctgctagcggaggactccgaagaagaagtcgacttcctctcagagcgccgaatggtgaaaaagagtcgtacgacttcatcgtcagtgatagtacccgaatctgacgaggaaggccatagcccagtgctgggaggcctaggtccgcctttcgcctttaatttgaactccgacacggacgtggaggagggacagcagcctcacagaggaggactcttatcttgccagaagaggtgtcactgtcgcggatag

SEQ ID NO: 229928 - DNA, 735 bp, synthetic construct
  misc_feature 1..735: note = Description of Artificial Sequence: Synthetic coding sequence
  source 1..735: mol_type = other DNA
atggaggacacacaggccatcgactgggatgttgaagaagaagaagagaccgaacagagcagcgagagtctccgctgcaacgtggagcctgtgggtagactacatattttttcgggggctcatggccctgaaaaagacttccctctgcacttgggaaagaatgtcgttggccgaatgcccgactgtagcgtggctctgcccttcccatctatttcaaaacaacatgccgagatcgagattctcgcatgggacaaagcacctatcttaagagactgcggatccttaaacggcactcagatcttgaggccccctaaagtgctgtcaccaggcgtttcccacaggctccgggatcaggaactgattctgtttgcagatctactttgtcaatatcacaggctggatgtgtccttgccattcgtctctcggggtccactgaccgtggaggagactccgagagtacagggggaaactcagccccagcggctgctgctggcagaggacagtgaggaagaggtggactttctctcggaacgccgtatggtgaagaagtctagaaccactagctcaagtgtgatcgttccagaaagcgatgaggaaggccactcccccgttctgggaggactcggaccaccattcgctttcaacctgaatagtgataccgatgtagaggagggacagcaaccacaccgcggaggtctgctctcgtgccagaagagatgccactgtagggggtag

SEQ ID NO: 229929 - DNA, 738 bp, synthetic construct
  misc_feature 1..738: note = Description of Artificial Sequence: Synthetic coding sequence
  source 1..738: mol_type = other DNA
atggaggacacacaagctatcgactgggacgtcgaagaagaagaagagactgaacagtcgagtgagagtctgagatgcaatgtagagccggtaggtcggctccatattttttcaggcgctcatgggccagagaaggactttccgcttcatttagggaaaaacgtggtgggcagaatgcccgactgcagtgtggctctacctttcccttctattagcaagcagcatgccgaaatcgagattctcgcatgggacaaagcaccaatcctcagggactgcggatccttaaacgggacccagattctgcggccacccaaggtgttgagccctggtgtgtcacaccgccttcgcgatcaggagctcattctgttcgctgatctgctttgccagtaccatcggttggacgtgtcattacctttcgtgtctagaggacccctaactgtggaggagactcccagggtgcagggtgaaacacagccccagcggctactcctcgccgaggatagcgaggaggaggttgatttcctgtccgaaaggcgtatggtcaaaaagtctaggactaccagttccagtgtgatcgtgccggagtctgatgaagaggggcatagtcccgttctgggcggtctgggtccaccatttgccttcaatttgaactcggatacagacgtcgaggagggccagcagccagccaccgaggaggcatcctctgccgctaggaggggggctacagtagaggcatag

SEQ ID NO: 229930 - DNA, 5477 bp, synthetic construct
  misc_feature 1..5477: note = Description of Artificial Sequence: Synthetic coding sequence
  source 1..5477: mol_type = other DNA
atggaggacacccaggctatcgactgggacgtggaagaggaagaagagacagagcagtcttccgaaagtctgcggtgtaatgtggaacccgtggggagactgcacattttctctggagcccatggacctgagaaggacttcccccttcacctcggcaagaatgttgtcggacggatgcctgattgtagtgtggcactccccttcccgagcattagcaaacaacatgctgagattgaaatcctcgcatgggacaaagctccgatactccgagattgcggatccctgaatggtactcagatattgagaccaccaaaagtgttgtcgccgggtgtgtcccatagattacgcgaccaggagctcatactctttgccgatcttctgtgccagtatcaccgtctggacgtctccctgcccttcgtctccaggggtcctctcactgtagaagagaccccccgagtccagggagagacccagccccagaggcttctccttgcagaggatagtgaggaggaagtggattttctgtccgagcggaggatggttaaaaagagtcgcaccaccagttcatccgtcatcgttcccgagtccgacgaggagggccacagccccgtgctgggaggcctcgggccaccttttgcctttaacctaaacagtgatacagatgtcgaagagggccagcaaccagccacagaagaagcgagcagcgcggcacgtcgcggagccacagtggaggcaaagcaaagcgaagcggaagtggtgacggagatccagctcgagaaggatcaaccactggtgaaagagcgtgacaatgatactaaggttaagcgcggagcgggaaacggggtggtgccagctggggtgatcctggaaagatcccagcctcctggggaggactccgacactgacgttgatgacgactctaggcctcccggtcggccagcagaggtgcacttggagcgagcccagcccttcggatttattgacagcgatacagatgctgaagaggagcggattcccgctacacccgtggtcattcccatgaaaaaaagaaagatatttcacggagtgggtacccggggtcctggcgcaccaggccttgcgcatctgcaagagtcgcaggcaggctcggacactgacgtggaggagggcaaggccccacaggcagtgcctctggagaagtcccaggcttctatggtgattaactccgacacagatgatgaagaagaggttagtgccgcacttactctggcacacttgaaagagtcccaaccagcaatatggaacagggatgcggaagaagacatgcctcaaagggttgttctgctgcagcggagccagaccacaacggaacgagatagtgacaccgatgtggaggaagaagagctgccggtggagaaccgggaggctgttctgaaggatcatacaaaaatccgggctctggtgcgggcacactcagaaaaggaccagcctcctttcggcgatagtgacgactcagtggaagcagacaagtcgtctccaggcatacatctggagagatctcaggccagcaccacagttgacatcaacacccaggtcgaaaaagaggttcccccagggtccgcaatcattcatataaaaaagcatcaggtaagcgtcgaaggcacaaaccagacggacgtgaaggctgtcggaggaccagccaagctcctggtggtcagtcttgaggaagcctggccactccacggagactgtgaaacagatgcagaagagggtacttcattaacagcttcagtcgtggcagacgttcgtaaatctcagttacctgccgagggagatgccggagcagagtgggcagctgccgtgctaaagcaggagagggcccatgaagtgggagcacaggggggtccacccgtggcacaagtcgagcaggacttgccaatctctcgtgagaaccttactgatctcgtggtcgacactgatacactgggcgaatcaacgcagccacaaagagagggagcccaggtccccacggggagggagagggagcagcacgtcggaggaactaaagatagcgaagataattatggtgactcagaggatctcgatctgcaggcaactcagtgcttcctcgagaaccaaggactggaggctgtccaaagtatggaggatgagccaacacaggcgttcatgttgacgccccctcaggaactcggacccagtcattgttcatttcagaccaccggattgctcaactgtaagatgccccctgctgagaaggcatcacgcatcagagctgctgagaaggtgtcgagaggtgatcaggagtccccagatgcatgcctgccacccactgtgccggaggcccctgcaccaccccagaagcccttgaattctcaatcacaaaagcatctagccccaccacccctgctgtcccctctacttcctagcataaagccgaccgttcgcaagactcgacaggacggatcccaggaggctccagaggcacccttaagtagcgaactggagcccttccacccaaaacccaaaatcaggacaagaaagagctctaggatgaccccctttccggcaacaagcgcagcacctgagccacacccttctacttcaaccgcccagcctgtgactcctaagcctacatctcaagctaccaggagcaggactaataggtcatctgtcaaaacccccgagccagtagtgccaacggctccagaactgcagccatcaacaagcactgaccagcctgtcacttctgaaccaacctcacaagttacacgaggacggaaatcgagaagctcagtcaaaacccccgagactgtggttccaactgcccttgaactacagcccagcaccagcactgaccgtcccgttacctcggaacccacctcgcaggcaactcgcggacgtaagaaccggtcgtcagtgaaaaccccggagcccgtggtaccgaccgcccctgaactccagccaagcacatctactgaccagccagtcacctcagagccgacataccaggctacccgagggagaaagaaccggtctagcgtgaaaactccggagcccgtagtgcctacggcaccagaattgagaccgtccacgagtacagatagacccgtaaccccaaaaccgacttcccgaacgactaggagtagaacaaacatgagctctgtgaaaacacccgaaacagtggtgccaacagctccggaactccagatctccacaagtacagaccagcccgtcaccccaaagccaacaagtagaacgacacgttctcggacaaacatgtcgtctgtcaaaaatcccgagagcaccgtgcctatcgcacccgagctgcccccatctacttctaccgagcagcctgtgactccggaaccaactagccgagccacccgagggcgaaaaaatagatcatctggaaaaactcctgaaacactcgtgccaacagccccaaagttggaacccagtacatctacagatcaacctgttactcccgagccaacgtcccaggcaactaggggacgcacaaacagatcttcagtaaagactccagagaccgtcgtccctactgctccagaactgcaaccctcgacatccaccgaccaacctgttactcccgaacccacctcacaggccaccagggggaggacggacaggagcagtgtgaagaccccagagaccgtcgtccccacagcccctgaactccaagctagtgccagtacagatcagccagtgacaagtgagcctacaagtcggacaacccggggtagaaagaacagatcgtcagtgaagactcctgaaaccgtggtacccgcagccccagaactgcagccttcaacctcaaccgatcagccagttacccctgaacccacatctcgcgctacccggggaagaactaatcggtccagtgttaagaccccagagtccatcgtgcccatcgctcctgagctgcagccaagcacctctcgaaatcagctggtgactcctgaaccaacttccagagccacacgatgccgaaccaaccgtagtagcgttaaaacccctgagcccgttgttcctactgcgcctgaacctcaccccaccaccagtaccgatcagcccgttacgccaaaactgactagccgcgctacccggagaaagacaaatcgctcttctgtgaaaacacctaagcccgttgagccagccgcttcggatctggagccatttactccaacagatcagtccgtgactcccgaggccatcgctcaaggcggtcagtctaaaaccctccgtagttcgaccgtgcgcgctatgcctgtacccacaactcctgaatttcaaagcccggttacaaccgatcagcccatatctcccgaacccattacccaaccgtcctgtatcaagagacaaagggccgctggcaaccctggcagccttgccgcacccatagaccataagccatgctccgcccctctcgaacctaagagccaagctagccggaaccagcggtggggcgcagtgcgcgcagccgagtctttgaccgccatccccgaaccagcctcccctcagcttcttgagacccctattcacgcttcacagatccagaaagttgagcccgctggcaggtcgaggtttacacccgagcttcagcctaaggcatctcagtctcgaaagcgctccttggctacaatggactctccacctcaccagaaacagccgcagcggggagaagtgtcccagaaaaccgttattatcaaagaggaagaggaagataccgccgaaaagcctggcaaggaagaggatgtagtgacccccaaacccggaaagaggaaacgagaccaagcagaggaggagccaaatcgtataccctctcgttccctgagacgcactaaattaaaccaggagtccacagcccctaaggtcctgtttacaggcgtggttgacgcgcgtggcgagagggccgtgctggcacttggtgggtcactcgcgggatcagccgctgaggcatctcaccttgttacagacaggatccggcgaacagttaagtttctgtgcgccctgggtaggggaatccctatcctcagcctggattggctgcatcagagtaggaaggccggattcttcctgcctccagatgagtacgtagtgaccgaccctgagcaggaaaaaaacttcggcttctctcttcaagatgcactgagcagggctcgcgaacgtcgtctgctggaaggctatgagatttatgtaacgcccggagtgcagcccccacccccacaaatgggagaaatcatttcttgctgtggcggaacttatctgccctccatgccacgttcctataagccacagagagtggtgattacctgtccgcaagacttccctcactgctcgatacctctacgggtgggtcttccattgctatcacctgagtttctgctaacaggcgtcctgaaacaggaggcgaaacctgaggctttcgttttaagccccttggaaatgtcttctacata

SEQ ID NO: 229931 - DNA, 738 bp, synthetic construct
  misc_feature 1..738: note = Description of Artificial Sequence: Synthetic coding sequence
  source 1..738: mol_type = other DNA
atggaagacacccaggctattgactgggatgtcgaggaggaagaggagacagagcagtcctctgaatctttacgatgcaatgtggagcccgtcgggaggctgcacattttctcaggtgcacatggcccagaaaaagactttcccctgcacctgggaaaaaatgtggttggtaggatgccagactgctctgttgcattgccgttcccaagcatatccaagcagcacgctgaaattgaaatccttgcctgggataaggcaccaatattgagggactgcgggtcccttaacggaacacagatactgagacccccaaaagtactgtcaccaggtgtcagtcatcggttgcgggaccaggagcttatattgttcgccgacctcttatgtcaataccaccgcctagacgtctcactcccctttgtcagcagaggccctcttaccgtcgaagagaccccccgtgtgcagggtgagactcagccacaaaggcttctgctagcggaagattctgaggaggaggtcgactttctttccgaaagacggatggttaagaagtcaaggaccacatcgtcaagtgtaattgtacccgaaagtgacgaggagggacactcccccgttctgggcggactaggacccccatttgcttttaacctgaatagtgatacagacgtcgaggagggacagcagccagccacagaagaagcatcttccgctgccagacgaggcgcaactgtggaagcctag

SEQ ID NO: 229932 - DNA, 5408 bp, synthetic construct
  misc_feature 1..5408: note = Description of Artificial Sequence: Synthetic coding sequence
  source 1..5408: mol_type = other DNA
atggaggacacacaagccatcgattgggacgtggaggaagaggaggaaactgaacagtctagcgagtctttgcggtgcaacgtggagcccgttggccgtcttcatatttttagcggtgcccacggcccagaaaaggacttccctctgcacctgggcaaaaacgtggtggggaggatgcccgattgttcagttgctcttcctttcccttcaataagcaagcagcatgccgagattgagatccttgcctgggacaaagcaccaatcctgcgagattgtgggtctctgaacgggacgcagattttgcggccaccaaaggtcctttcaccaggcgtgtctcatcgactgagggaccaggaacttattctgtttgcagatttgctttgccagtatcatagactggatgtgtcactgccatttgtcagcagggggccactgaccgttgaggagaccccaagggtccaaggggaaacacaaccacagagactgctgctcgccgaggattcagaggaagaggtagattttttgtccgagcggaggatggtcaaaaaaagccggaccacctctagctctgtgattgtccctgaatccgacgaggaagggcactcacccgtgctgggaggtttggggcctccctttgcctttaatctaaattcagacaccgatgtggaagaaggacagcaacccgctactgaggaagcctctagtgctgcccgacggggagcgacagtggaagctaaacagagtgaggctgaagtggtaacagagattcagctggagaaagaccagcccctggtcaaagaacgcgacaacgatacgaaggtgaaaagaggcgctggtaatggggtggtgcctgccggagtgatactggaacggtcacaaccgccaggcgaggacagcgataccgatgttgacgatgactctcgccctcccggtcggccagcagaagtccatctagagcgagcccagccattcggatttatcgattcagatactgatgccgaagaggagcgcatacctgcaaccccagtcgtgatccccatgaagaaacggaagatctttcatggagtcggtaccagggggccaggagcccctggcctcgctcacctccaagaatctcaggccggaagtgacaccgatgtagaagagggtaaggccccacaggctgtgcccctggaaaagtcacaggcatcaatggtcattaactcagataccgacgatgaggaagaagtcagtgccgctttgaccctcgcacatctcaaggagtcccaacctgctatatggaatcgggatgcggaagaggatatgcctcagagggttgttctcctccagcgctcccagacgacaaccgaacgcgactcggataccgatgtcgaagaggaggaactgccagtggaaaaccgcgaagccgtgctcaaagaccacacaaagatcagagctctcgtgcgtgcacatagtgagaaggaccagccaccttttggggattctgatgactctgtcgaagcagataagtcttcccccggtattcatctggaacgaagccaagcctctacaacagttgacataaatacccaggtggagaaggaggtgcctccaggatccgccattatccatatcaagaaacaccaggtgtcagtcgagggaactaatcaaaccgacgtcaaggcggtggggggaccggcaaagctactcgtggtgagtcttgaagaggcttggcctcttcacggagactgcgaaaccgacgccgaggagggaacgtcccttaccgccagcgtggtcgccgacgttcggaaaagtcagctccctgccgagggagacgcaggcgcagagtgggccgctgctgtacttaagcaggaacgggcacacgaggtaggcgctcaggggggtccacccgtcgcccaggtggagcaggatcttcctattagcagggagaatctcaccgatttagtggtggatacagacactctcggcgaaagcactcagccccaacgcgagggagcccaggtgccaacagggagagagcgcgaacagcacgtgggaggtacaaaggactcagaggacaactatggcgattcagaggacctcgatcttcaggccacccagtgctttttggagaatcaaggattggaggctgtccagtccatggaagacgagccaacgcaagcctttatgctgactccccctcaggagctgggcccaagccattgctcgtttcagaccactgggaccttagatgagccatgggaagttctggcaacccagccattttgcctacgcgagtctgaagacagtgagacccagccatttgacacccatcttgaggcctatggaccttgcctttcaccgccacgtgccatacccggagatcagcaccccgaatctccagtccacacagaacctatgggtatccaaggaagaggacggcaaactgtggataaggtaatgggaatccctaaagaaacagctgaaagagttggacctgaaaggggcccactcgagcgcgagaccgagaagctgctgccagagcggcagactgacgtgaccggagaggaggaattaactaaagggaagcaggatagggagcagaaacaactgcttgccagagatactcagcggcaggagagtgacaaaaatggtgaaagtgcctcccccgagagggaccgggagagtctcaaggtggaaattgaaaccagcgaggagattcaggagaaacaggtgcaaaagcaaacactgcccagcaaggcttttgagagggaggtcgagcggccagtggcgaacagggagtgcgatcctgctgagctggaggagaaggtccctaaagtgattctggaacgcgacacccagcgcggagagcccgagggcggatcccaagatcagaaaggacaggccagctcccctacccccgagccgggtgtaggtgctggggaccttccaggcccaacatcagccccagttccatcagggagccaatctggagggagaggctcacctgtgagtccacgtcggcaccagaaaggtctgcttaattgcaagatgccccctgcagagaaggcctcccggatcagggctgcagaaaaagtgtcgcgcggagatcaggagtcgccagatgcatgcctgcccccaacggttccagaggcccctgcaccaccccagaaacccctgaactcccagagccagaagcacttagctccgccacccctgctttcaccactgttacccagcatcaagcccacagtacgcaagactcgccaggatggttctcaggaagccccagaggcacccctgagctcagaactggaaccgtttcaccccaaaccgaaaattcggaccagaaagagttccaggatgacccctttccctgcaacttcggccgcaccaaagctagagccatccactagtacagaccagcccgtcactcctgagcctacctcccaggcaacccggggacggactaataggtcttctgtgaagaccccagagacagtggtaccaaccgcccctgagctgcagccaagcacgagcacagaccaacccgttacacccgaacccacctcacaggctacaagaggtcggacggacaggtccagtgtgaagaccccagaaacggtggttcctaccgccccagagctccaggccagtgccagtacagaccaacctgtgacaagcgagcctactagccgaactactcggggtagaaaaaacagatcctccgtgaagacacccgagactgttgtacctgcggcaccggagctccagccgagtacttcaactgaccagccagtcacgcccgagccaacctctagagcgactagaggccgaaccaacagatccagcgtgaagacccctgaaagtattgttcctattgctcctgagttacaacccagtacttcaagaaaccagctggttacacccgaacccacctctagagccacacgatgccgaacaaacaggtcatcagtgaagactcccgaacccgtcgttcctacagcccctgagccacaccctaccacctccacagatcagcccgtcaccccaaagttgacttcaagagcgacaagaaggaaaaccaacagatccagcgtgaagacccctaaacccgtcgagcccgctgcgtctgacctggaaccatttacccctaccgaccagtctgtgacccctgaagcaatagcacagggtggccagtcaaaaaccctacggagctccaccgtccgagccatgcccgtacccactacccctgaatttcagtctcccgtcacgaccgaccagccaattagcccagaacctatcacacagccttcgtgcataaagcgacagcgagcagcagggaaccctggatccctggctgccccaattgaccacaagccctgctcagctcctctggagcccaagtcccaggcgtccaggaatcagaggtggggagctgtaagagccgctgaatcgttgaccgctatccctgagccagcctccccccagctgctggagacaccaatacatgcgtcccagatccagaaggtggagcccgcaggacgctcacgcttcaccccagagctgcagcccaaggcatctcagagccgcaaaaggtcattggcaactatggattctcctccccatcagaagcagccacagcgcggagaggtctcacagaaaacggtgatcatcaaggaggaagaggaggacacagccgaaaagccgggaaaggaagaagacgtggtgacccctaaacccggaaagcggaagcgcgatcaggccgaagaagaaccgaaccgaataccgagtagatccctacgccgaacaaaactgaaccaggagtccactgcacctaaggtcctcttcacaggagttgtcgatgctcgcggtgagcgcgctgtgctggcacttggaggcagccttgccggaagcgcggctgaggccagccacctggtgactgaccgcattaggagaaccgttaaattcttatgcgccttgggcagaggcatccccatcctgagcctggactggctgcaccagagccgcaaagcaggttttttccttcctcccgacgagtacgtcgttactgatcccgagcaggagaagaacttcgggttctcactgcaggacgcattaagccgcgctcgagaacggaggcttctggagggatatgagatctacgtgactcctggcgtgcagccacccccacctcagatgggggagatcatctcctgttgtggcggaacataccttccttcaatgcccaggagttacaagccccaaagagtcgtaataacctgtcctcaggactttccccattgttcaatcccgcttcgggtgggtttgcctctgctgtctcccgaattcctgctgacaggcgtcctgaagcaagaagccaagcccgaagcttttgtactgtccccactggaaatgtccagcacgta

SEQ ID NO: 229933 - DNA, 738 bp, synthetic construct
  misc_feature 1..738: note = Description of Artificial Sequence: Synthetic coding sequence
  source 1..738: mol_type = other DNA
atggaagatacccaggccatagattgggacgtggaagaggaggaagaaacagagcaatcatccgagtctctgcgctgcaacgtggaacctgtcggacgcttgcacattttcagtggcgcacacggcccagagaaggacttcccactgcacctgggaaagaacgtggtaggtagaatgcctgattgcagcgttgcgcttccattcccttccatctcaaaacaacatgccgagatcgagattcttgcctgggataaggcccctattcttagagactgcggcagtttgaatggcactcagattctcagaccacctaaggtgctgagcccaggcgtatcgcaccgattgcgagatcaggagctgatcttatttgccgatctcctttgccagtaccaccgactggatgtctcactgccatttgtcagcagaggcccactgactgtggaggaaactccacgggttcagggagagacgcagccacaaaggctgctcctagccgaggactctgaggaggaggtcgacttcttatctgaaaggcgcatggtgaagaaaagccgaacaacgtctagttctgtgatcgtgcctgaaagcgacgaggaggggcactcccccgtgctcggcggactgggtcccccatttgcttttaacttgaattcagatacagatgtggaggagggccagcagcccgcaactgaggaggcgtcctccgccgctcgtagaggcgctaccgttgaggcttag

SEQ ID NO: 229934 - DNA, 5408 bp, synthetic construct
  misc_feature 1..5408: note = Description of Artificial Sequence: Synthetic coding sequence
  source 1..5408: mol_type = other DNA
atggaggatacccaggccattgactgggatgtcgaggaagaagaagagacagagcagtcttccgaatctctgaggtgtaatgtcgagcctgtaggacggctgcatatcttttctggggctcacggcccagaaaaggatttcccgctccatttggggaagaatgtggtgggtaggatgccggattgcagcgtggcactgccattccctagtatatcaaaacagcacgcagagatcgaaatcctggcttgggacaaagcaccaatcttaagggattgcggatcactcaacggtacacaaatactgagacctccaaaggtgctcagtcctggcgtttcccataggctccgcgatcaggaactcattctgtttgccgatctcttatgccaataccatcggttggacgtatctcttccatttgtaagcagaggtccactgacagtcgaagagacacccagagtccaaggagaaactcaaccccagaggttgctgcttgccgaagacagcgaagaggaggtagactttctaagcgagagaaggatggtaaagaagagtcggacgactagcagctctgtgatcgtgccagagtccgacgaggaaggccactcccccgttctgggcggattgggcccaccttttgcgttcaacctgaatagcgacacagacgtagaggagggccagcaacctgcaacagaggaggccagcagcgcagcccgaagaggggcaaccgtggaggcaaagcagtccgaggcagaggtcgtgactgagattcagttggaaaaggaccagccccttgtgaaggagagagataacgataccaaggtgaagcgcggtgccggaaacggggtggtcccggctggagtgatccttgaaagaagccagcctcccggagaggattcagatacagatgtggacgacgactcgcgccctcctgggcgtcctgctgaggtccacctggaacgcgcacaaccttttggttttatagactcagatacagatgccgaagaagagcgcattcctgcaactcctgtcgtgattcccatgaaaaagcgcaagatctttcacggggtcggaacaagaggccctggggcacctggtctggctcacttacaagaatcccaggccggttccgacacagatgtggaagaaggtaaggcccctcaggccgtgcctttagagaagtctcaggcttcaatggttattaatagtgatactgatgacgaggaagaggttagtgccgctctaaccctggctcatcttaaagaatcacagcctgccatttggaaccgagatgcagaggaggatatgcctcaaagggtggtgctcctccaaaggtctcagaccacgacagagcgcgatagtgacacggacgttgaagaagaggagctgccggtggagaaccgggaggcagtgcttaaagatcacactaagatccgggcactagtgagggcgcattcagaaaaggaccaaccacctttcggcgatagcgatgattccgttgaagcagacaaaagttcacccggaatacacctggaacggagtcaggcttctactacggtcgacataaacacacaagtagaaaaggaggtccctcctggctctgcaattattcatattaaaaagcaccaggtgtctgtcgagggaacaaaccagaccgacgtcaaggccgtcgggggaccagccaaattgctggtggtctcattggaggaggcttggcccctgcacggtgattgtgagaccgatgctgaggagggcactagtctgactgcatccgtcgtggccgacgtccgcaagagccagctgcctgctgagggtgacgctggagctgaatgggcagctgctgtgctgaagcaggaacgtgcgcatgaggtgggcgcacagggagggcctccggtggcacaagtggagcaggatctccctatttccagagagaatctgaccgacctagtcgtggatacagacacccttggcgaatccacccagccacaaagagaaggagctcaggtgccaacgggtcgggagcgcgaacagcatgtggggggtaccaaagacagtgaggacaattatggcgactctgaagatttggatctacaggccactcagtgctttctcgaaaaccagggactcgaggcggtgcagtcaatggaggacgaaccaacccaggcctttatgcttactcctcctcaggaactggggcctagccattgtagtttccaaacgacaggaaccctagacgaaccttgggaggtcctagctactcagcctttttgtttacgcgagtctgaggatagcgagactcagccttttgacacacatctagaggcctacggcccttgcctgtcgccccctagagccattcctggcgaccagcaccccgagtcaccagtgcacaccgaacctatgggtatccaaggcagagggcgtcagacagtcgataaggtgatgggaatccccaaagagactgcagagcgggtgggccctgagcgtgggccactggagagagaaaccgaaaaactattacccgaaaggcagactgatgtgacaggggaggaagaacttaccaaaggtaagcaggaccgggaacaaaaacagttgttggctcgtgatactcagagacaggagagtgacaagaacggagagagtgcgtcccctgaacgggacagagaatccctgaaagtggaaatcgaaacttccgaggagattcaagaaaagcaagtccaaaagcaaacgttaccttctaaggcatttgagcgggaggtcgaaagacctgtcgccaatagagagtgcgacccagccgagctggaggagaaggttcctaaggtaatacttgagcgcgacacccagagaggggaaccagaggggggatcacaggatcagaaaggccaggcttcatctccgactccggaacctggcgtgggcgctggcgacctgccgggacccacctccgcacccgttccatctggcagccaaagtgggggaagaggctcccccgtgtcccctcggcgtcatcagaaaggcctcttgaattgcaagatgccccctgcagaaaaagcctcccgaattcgggctgcggaaaaagtgagtcgaggggatcaggagtcgcctgatgcctgtttaccaccaacagtccccgaagcgccagcccctccacagaagcccctgaatagccaaagtcaaaagcatctggcgccaccgcctctactcagccctctactcccatcaattaagcccactgtcaggaagacccggcaagatggcagccaggaggcccctgaggctcccctgagtagtgagcttgaacctttccaccccaaacccaagatccgtacacggaagtcctccagaatgacccccttcccagctacctccgcagcaccaaagctggaaccttctacatccaccgaccagcccgtcaccccagaaccgacatcccaagccacaaggggacgaaccaatagaagctctgttaagacaccggagactgtggttcccaccgctccagagttgcaaccttccaccagtactgaccagcctgtcacacccgaaccaacctcacaggccaccagaggtaggacagaccgttcctcagtgaagaccccagagacagtggtccctactgctccagaactccaggcatctgcctctacggaccaaccggtaactagtgagccaactagcagaacaacacgcggtcggaagaatcggagcagtgtcaagacccctgagaccgtagtcccagccgctcctgcgctgcaacccagcacgagtaccgaccagcctgttaccccagaacctaccagcagggcgaccagggggagaactaaccgaagtagcgttaagactcccgagagcatcgtgcccattgcgcctgagcttcaaccatcaaccagtcgaaatcagttggtaacgcctgagcctacgagcagagccactcggtgccggactaaccgcagctcagttaagacaccagaaccggtggtgcccactgcccctgagccacaccccactacctctaccgaccagcccgttacacctaaactcacctcacgagccacaaggcgcaaaaccaatcgatcgtctgtaaagacccccaagcctgtcgagccagctgcctcagatctcgaaccatttactcccaccgatcagagcgtgacaccagaagccatcgcccaagggggtcagagcaaaactctcagaagtagcaccgtgagagcaatgccagttcccaccactccagaatttcagagtcctgttaccacggaccagcctatttctcccgagccgataactcagccttcgtgtattaaacgtcagcgcgctgcaggcaaccccggatcgcttgccgctccaattgaccacaagccgtgcagcgccccactagaacccaagtctcaagcgagccgtaatcaacgatggggagccgtccgggctgcagaatctctgactgccatccctgagcccgcatcgcctcaattactggaaactcctattcatgccagccagattcaaaaggtggaaccagcaggcaggtcacggttcacaccagagctgcagcccaaagcaagccagagcaggaagcgtagtttagcaacaatggattcccctccccaccaaaaacagcctcagcgcggagaagtgtcacagaagacagtcattattaaggaggaggaggaagatactgctgagaaacccggaaaggaggaggatgtagtgacccccaaacctggcaagcggaaacgggatcaggccgaagaggaacccaacagaatcccttcccggtcccttagacgcaccaagctgaaccaagaatccactgcgcctaaagttctcttcacaggcgtcgtggatgcacgaggggagagggccgtgctcgccctgggcggttctttagcaggtagtgccgcagaagcgagccatctggtgacagatcggatccgtagaactgtaaagtttctgtgcgccttgggcagaggcataccaattctcagcctggattggctgcaccagtcccgaaaggcgggattttttctgcctccagatgagtatgtggtaactgatcccgagcaggagaaaaacttcggattcagccttcaagatgctctgtctagggcccgagaaaggcgcctgctcgagggctacgagatctacgtcacccccggagtccagcctcccccaccacagatgggtgaaattataagctgttgcgggggaacctatcttcctagcatgccacgcagttataaaccccaacgggtggtgattacctgccctcaggactttccccactgcagcatcccactcagagttggcctcccactactcagccccgagtttttgttgacaggagtgctgaagcaggaagctaagccagaagcgtttgttttgagcccactcgagatgtccagcacata

SEQ ID NO: 229935 - DNA, 5477 bp, synthetic construct
  misc_feature 1..5477: note = Description of Artificial Sequence: Synthetic coding sequence
  source 1..5477: mol_type = other DNA
atggaggatacacaggctatagattgggatgtagaggaggaggaggaaacggagcagagtagtgaatctctacgctgcaatgtggagccagtgggtcgcctacatatcttctctggggctcacgggcctgagaaggactttcccttacatctgggcaagaacgtcgtgggtcgcatgccggattgtagcgtcgcactgccttttccttccatttctaaacagcacgcagaaatcgagattctcgcctgggacaaagcgcctatactgcgagactgcggaagtctaaatggaacacaaatcctgaggccgcctaaggtgctgtctcctggtgtttcgcatcggctacgcgaccaggagcttatcctgttcgctgacctcctgtgtcagtatcaccggctggacgtcagcctgccttttgtgagccgaggacccttaaccgttgaagaaacgccgcgagttcagggtgagacgcagccgcaaagactgctgttggcagaagattctgaggaggaggtcgatttcctgtccgaacgcaggatggtgaaaaagtccagaacaacgagcagctccgttattgtgcctgagtcagacgaggaaggtcattctcctgtgctagggggactgggccctccgttcgccttcaatctgaactccgacacagatgtggaggaggggcaacaacccgcaacagaggaggcatcttctgcagctagaaggggagctaccgtagaagctaaacagtcagaggctgaggtggttactgagattcagctggagaaagatcagcccctggtcaaggaacgggataacgatacaaaagttaaacggggagccggtaatggtgtcgttcccgctggggtcattttagagcgcagtcagccccctggtgaagattctgacaccgatgtagatgacgattctcgcccaccaggtaggccagctgaggtacatctggagagggcccaaccattcgggttcattgattccgacaccgacgccgaggaggaacgtattccagccactccagttgtcatcccaatgaaaaagaggaagatattccacggcgtgggcacccggggaccaggcgctcccggtttagcacatctacaggagagccaggctgggagcgacacagatgtggaggaaggaaaggcccctcaggctgtgcctctggagaaatctcaggcttccatggtcatcaattcggataccgatgacgaggaagaagtgagcgccgcactcacgctggcgcatttgaaagagagtcagccggctatctggaatagggatgcagaggaagacatgccccaacgcgtggtgctgttgcaacgcagtcaaacaaccacggagcgcgattccgacaccgatgtagaagaagaagagcttcccgtagagaaccgggaggctgtactgaaggaccacacaaagatccgggcactggtaagagcccacagtgaaaaggatcagccgccattcggcgatagcgacgacagtgtggaagccgacaagagttctcctggcatccatcttgagagaagccaggcttccactacagtggacatcaatacgcaagtcgaaaaagaggtgcctcctggatccgccatcattcacattaagaagcaccaagtgtctgtcgaagggaccaatcagacagatgtcaaggccgtgggaggaccggctaagctgctggttgttagtctcgaagaggcttggccattacatggcgactgcgagaccgacgccgaggagggaacaagcctgactgcatcagtggtcgcggacgtgagaaagagtcagctgcctgccgagggggacgctggcgcagaatgggcggcagccgtcctgaagcaagagcgggcacatgaggttggggctcagggcggtccacccgtagcccaggtcgaacaagatctgccaataagccgtgagaacttgactgacctggtggttgataccgacacacttggggagtccacacaaccccagagagaaggcgctcaggttccaacaggcagagagcgcgaacaacacgtgggcggaactaaggacagtgaggacaactacggtgattccgaggaccttgatctacaggccacacagtgttttctggaaaatcagggccttgaggccgtccagagtatggaggacgaacccacccaagcttttatgctcacgcctccacaagaattgggcccatcccattgctctttccagaccactggactcctgaactgcaagatgccccctgcggagaaggctagtcgaattcgtgccgcagagaaagtgtcaagaggtgaccaagagtcacctgacgcatgcctgccccctactgtgcctgaagcccctgccccaccccagaaacccctcaactcacagagccagaagcatctggccccaccgcctcttctgtcccctctgttaccatccatcaaaccaaccgtcaggaagaccaggcaggacggatcacaagaagcacctgaggcccctctcagctccgagctcgagccgttccacccaaaaccaaaaatcagaacccgcaaatctagcagaatgacaccttttcctgccactagcgcagccccagaacctcatccatcgacctccacggctcaacctgtgactcccaagcccactagtcaggccactcggtcacggaccaatcgctcttcagtaaaaacccctgaacccgtggtcccaacagcccctgagcttcagccctcaacctctaccgatcaaccagttacatccgagcccacctcacaggtgaccaggggtagaaagtctcgctcctccgttaaaactcccgagaccgtagtacctactgccctggagttacagcctagtacgtccactgaccgaccagtcacctctgagcctaccagccaagccacacgtgggaggaaaaaccgttctagtgtgaaaactccagaacctgtggtgcccactgcaccagagctgcagccttctaccagcaccgaccaacctgtgacctccgagcccacttatcaggctacgagagggaggaaaaatagatccagcgtcaaaacgcccgaaccagttgtccctaccgcaccagaactccgtccatcaactagcactgatcggccagtgacgcccaagccaacatctagaaccacacgcagccggaccaacatgtcgtccgtgaagacgccggagactgtggtgccgaccgcaccagaactccagatctctacttccacggatcagcctgttacccctaagccgaccagccggacaacaagaagtcgcactaacatgtcttccgtcaaaaatcccgaatctacggtgccaatcgcgccagagctgccccctagcaccagcacagagcagcctgtaaccccagaacccacttctcgcgctacccggggtcggaaaaatcgctcatcgggaaagactcctgaaactctggtccccaccgctcctaagctggaacctagtacaagcaccgaccaacccgtgacaccagagcctacgtcacaggcgacacgtgggaggactaacagatctagcgtgaagacgccagagacggttgtaccaacagcccctgagctgcagcccagtacatccacggatcagcctgtaacacccgaaccgacgtcccaggccactcgaggacgcaccgatcgtagctccgtgaaaacccccgaaactgtggttcctacggccccagaactccaggccagcgcctccactgaccaacccgtcacctcagaacccaccagccggactacacgaggaaggaaaaataggtcatcagtgaaaacccctgagacagtggtccctgcggcacccgaacttcagccttctactagcacagaccagcccgtgactcccgagcctacatccagagccactaggggaagaactaacagatcttccgtaaaaacccccgaaagcatcgtccccatcgctcctgagcttcaaccttcaacctcccggaaccagctggtaacgcctgagccaacctcacgagccacgcggtgccgaacaaatcggtcgtcagttaaaacacccgagcctgtggtgccaaccgccccagagccccatccaactacgtcgacggatcaaccagtcaccccgaaacttactagcagagctacaaggcgcaaaaccaatcgctctagcgttaaaacacctaagccggtcgagccagccgcaagcgacctggagccttttactccaactgatcagtccgtaacaccagaggccatagctcagggaggtcaaagcaagacgttgcggtcaagtacggtgagagctatgccagtcccgaccacccctgaatttcagagcccagtcactaccgatcagcccatttctcctgagcccatcacacaacctagctgcattaagcggcagagagcagctgggaacccgggatctttagctgcgccaatagaccataaaccttgctcagctcccctcgagccaaagtctcaggcttcacgaaatcagcggtggggagccgtgcgcgctgcagagtctttgaccgcgattcccgaacccgctagcccccagctgctcgagacccccatccacgccagtcagattcagaaggtggaacccgcaggcaggagccgttttactccggagctgcagcctaaggccagccagagcaggaaaaggagcctggccactatggatagtccaccacatcaaaagcagccccagcgaggggaggtgtcacagaaaactgttattatcaaagaagaagaggaagatacagcagagaaaccgggtaaagaagaggatgttgtcacccctaaacccggaaagcgaaagcgagatcaggcagaggaggaacccaaccggatcccttctcggagcctccgtcgtactaaacttaatcaggagagtacagcaccaaaagtcctttttaccggggttgtcgatgctcggggtgagagggctgtccttgccctgggtggcagtctcgctggctctgcggctgaggcttctcacctggtgactgaccggatccgcaggacagtaaaatttttgtgtgcgctggggagggggatacccatactctcactggattggttacaccagtcccgtaaagcagggttttttctcccccctgacgagtacgtggtcacagaccctgaacaggaaaaaaatttcggctttagtcttcaggatgccttaagtcgcgctagagagaggcgtctactggagggctacgaaatttacgtcacaccgggagtgcagccacctccacctcagatgggagaaattatcagttgctgcggaggcacttatctccccagtatgcctagatcatataaaccacaacgcgtggtcataacgtgccctcaggactttccacactgcagcattcctcttagagtgggcctgcccctgctatctcctgaatttttactcacaggcgtcctgaagcaggaagcaaagcctgaggcttttgtgctgtctcctttggagatgtcctccaccta

SEQ ID NO: 229936 - DNA, 4968 bp, synthetic construct
  misc_feature 1..4968: note = Description of Artificial Sequence: Synthetic coding sequence
  source 1..4968: mol_type = other DNA
atgtaccatcgcctcgatgtgtctctcccatttgtcagccgcggacccctgacagtggaagaaacccccagagtgcagggtgagacacagccccagcggcttctccttgccgaagattccgaagaggaagtcgacttcttatccgagaggcggatggtgaaaaagtccaggacaacgagcagcagtgttattgtccctgagtccgacgaagaggggcattccccagtgctgggcggtctggggcctcccttcgcatttaacctcaattcggatacagacgtggaggagggacagcagccagctaccgaggaggcgtcttctgccgctagaagaggggcaactgttgaagccaagcagagcgaagccgaggtggtgaccgaaatccagctcgagaaagaccagcctctcgtcaaagagcgcgacaatgacactaaagtcaagcggggagctggaaatggagtcgtgcccgctggggtgatattagagcggtcgcaaccaccaggcgaagattctgataccgatgtggatgacgactccagacccccaggccgtcccgcagaagtccatcttgagcgggctcagccatttggcttcattgattctgataccgatgcagaagaagagaggattccggctacgcccgtcgtaatccccatgaaaaagaggaagatattccatggggtaggcacaagaggcccaggagctcccggattggcccacctacaggagtcacaagctggcagcgataccgacgtagaagaaggaaaggctccacaggctgtgcccttggaaaaatctcaggcgagcatggtgattaattcagatacggatgacgaagaggaggtctccgctgcattgaccttggcccatcttaaagagtctcagcctgctatctggaaccgcgatgcagaggaggatatgccacaacgcgtggtgctactacagaggagccagactaccaccgaaagggattctgacacagatgtcgaggaggaggagctgccagtcgaaaaccgcgaggccgtcctgaaggaccatacaaaaatccgagctctagtccgagcccactccgagaaggatcagcctccctttggcgatagcgatgactcagtagaagccgataagagctcgcctgggattcacctggagcggtctcaggcgagtactaccgtagacataaacacgcaggtcgagaaagaagtgccgcctggctcagctatcattcacatcaagaaacatcaggtgagcgtggagggaaccaaccagaccgacgtgaaggccgtggggggtccggcaaagctcctggtcgtgagtttagaggaggcttggccacttcacggcgactgcgagacagatgccgaagagggtaccagtctcacagcctccgttgtggccgatgtgcggaaatcacagctgcccgctgaaggggacgccggtgccgaatgggccgctgcggtgctgaagcaggagcgcgctcatgaggtgggcgcacaagggggaccccctgtggctcaggtcgaacaggatttgccaatttcccgtgaaaacctgaccgacctcgtggtcgataccgacacactgggagaaagtacacagccccaaagagaaggtgcccaggtgccaacggggagggaacgagaacagcatgtcggtggtacgaaggattcagaggataattacggtgacagcgaagacctggacctccaagctacccagtgcttccttgagaatcaaggtttagaagtacagtccatggaagacgagcctacccaggcattcatgctgacccctccccaggaactggggccaagccactgttctttccaaacaacagggctgctgaactgtaagatgccacccgcagagaaagcaagtaggatcagggcagcagagaaagtctccagaggcgatcaggaaagcccagacgcttgtctgcctcccacggttcctgaagccccagcacctcctcagaaaccactgaacagccaaagccagaagcacctggcgcctccaccccttctttcacccctgttgcccagcatcaaaccaaccgtccgcaagacccgtcaggacggatcccaagaggctccggaagcccctctctcatctgagttggagcctttccaccccaagcctaagattcggacaagaaagtctagccggatgacaccttttccagctacatctgctgcgcctgaaccacatccctctacgtcaaccgctcagccggtgacacccaaaccgactagccaggctactcgttctcggactaaccgatcatctgtcaaaactccagaaccagtggtgccgaccgctccggaattgcagccctccaccagcaccgatcagcccgtaactagcgaaccaacctctcaggtgacccgcggacgtaagagccgctcatcagttaaaaccccggagacagtcgtcccaacagcccttgagctgcagccttctacatcgacggaccgcccagtgacctcggaaccaacatctcaggcgacacggggtcgtaaaaacagatcttcagtgaaaacacccgaacccgtggttccaacagccccagaactccaaccatctacttcgacagatcaacctgttacaagcgagcccacctaccaggccactagaggccgaaagaatcgatctagtgtgaagacacctgagcctgtggtgcccacagcacctgagctgaggccttcgacctctaccgataggccggttacccccaagccgacctcccggacaactaggagtagaactaacatgagctccgttaagaatccggagtctaccgtcccaatcgcacccgagctgccgccaagcaccagtacggaacagccagtcaccccagaaccaacctcaagggccactagagggagaaaaaataggagtagcggaaagacgcctgaaactctggtccctacagccccaaaattggagccatccactagtactgaccagcccgtcacaccggagccaacatctcaagcaaccagaggtcgaaccaacaggtcgagcgttaaaactcctgaaaccgtggtgcccacggccccagaactccagccttctaccagcaccgaccaacctgttaccccggaaccaacctctcaagcaacccgcggacgtaccgacaggtcttctgtgaaaaccccggagactgtggttcctacggccccagagctccaggccagcgcaagcaccgaccagccagttactagcgagccaaccagcagaactacaagagggagaaagaaccgatcctccgtaaaaacacccgaaaccgttgttccagccgcaccagagcttcagccctcaacttccaccgaccagcctgtaaccccagagccaacctctcgcgcaacacgcggtaggaccaatagaagcagcgttaaaacgccagaaagtatcgtgcctatagccccagaactgcaacctagcactagcagaaatcaattagtcactccggaaccgacgtctcgggcaacaaggtgtcggaccaataggtcatcagtgaaaactccagaacccgtcgtgccaacagctccggagccacaccccacaacgtcaacggaccagccagtgacaccgaaactcacttcgcgggctacccgacggaaaaccaatagaagttccgttaagacaccaaagcctgtcgagcccgctgcctctgacctcgaaccattcacacctacagatcagagtgtgaccccagaagccattgctcagggcggtcagtccaaaactctgaggtcatcaaccgtgcgggcaatgccagtgcctacgacaccagagttccaaagtcctgtcacgaccgatcagccaataagccctgaacctatcacacagcctagttgtatcaagcgccagagggctgctggaaatcccggttcattagcagcacctatcgaccacaagccctgcagtgcacctctggaaccgaaaagccaggcctcccggaaccagcgatggggagctgttcgggcagctgaatctcttacggctataccggaaccagcttcccctcaattactagagacccccattcatgcttcgcagatccagaaagtggagccagcgggaaggtcacggttcaccccagagttgcagccaaaggcctctcagtcacgcaagcgctccctggcaacgatggactctccccctcaccaaaagcagcctcagagaggggaagtctctcagaagaccgtgattataaaggaagaagaggaggacaccgcggaaaagccgggtaaggaagaggatgtggtgactcctaagcctggaaaacgaaaaagggatcaggccgaggaggaacccaaccggatcccctcacgctctctccgtcgcactaagttaaaccaagagtcgaccgccccaaaagtccttttcaccggggttgttgacgccaggggcgagcgggctgtgctggctcttggtggctcactggccggttctgccgcagaagcttctcacttggtcacagaccggataaggcgtactgtgaagttcctttgcgcactcgggaggggtatcccaatcctgtcgcttgactggcttcaccagtcccggaaggcgggattttttttgccacctgatgagtacgtcgttactgaccctgaacaggagaagaactttggtttcagcctacaggatgctctctctcgggcaagggaacgccgtctcctcgaggggtatgagatatatgtgacccccggtgtgcagccccctccaccgcagatgggtgaaatcatctcatgctgtggaggtacttatctgccaagtatgccaagaagttataagcctcaacgtgtggtaataacctgcccacaggacttcccgcattgtagcattcccctaagggtggggctcccccttctgtcccctgaattcttgctcactggcgtgctgaagcaggaagccaagcctgaggcctttgttctgtctcccttggaaatgtcatcaacttag

SEQ ID NO: 229937 - DNA, 4968 bp, synthetic construct
  misc_feature 1..4968: note = Description of Artificial Sequence: Synthetic coding sequence
  source 1..4968: mol_type = other DNA
atgtatcatcgactggatgtgagccttccattcgtgtcccgcggaccgctgactgtcgaagagactccaagagtgcaaggtgagactcagccgcagaggcttcttcttgcggaggacagcgaggaagaggtcgactttctgtcagagaggcggatggtgaaaaagtcccggacaacatcctcatcagtcatcgtccccgaaagtgatgaggaagggcactcacctgtccttggtgggctaggacctcccttcgcttttaatctgaattcggacactgatgtggaggagggccagcagcctgcaacggaagaagcaagcagcgccgctaggcggggagctacggtggaggccaagcagtcagaggccgaggtggtgactgaaatacaattggagaaagaccagcctctggttaaggagagagacaacgacactaaagtgaaacgcggagctggaaacggagttgtccccgctggcgtgattctggaacgttcacagccacccggagaagatagcgacaccgacgttgatgatgacagtagacctcccggacgtccggcagaggtgcatctggaaagagcgcagcctttcggcttcatcgatagtgacactgacgcagaggaggaacggattccagctacgcccgtagtcatccctatgaagaagcgcaaaatttttcacggggtaggtacacgaggcccaggcgcaccaggattagcccatctccaggagtcccaggccggttccgatacagatgtggaagaaggcaaagccccacaggctgtgccactggaaaagagccaggcttccatggtgatcaactctgacacggacgatgaggaggaagtgtctgcagcattaaccctagcccatctgaaggagtcacagccagctatttggaaccgggatgccgaggaagacatgccccaacgggttgtgttgctccagcggtctcagacaacaaccgaacgggattccgacactgacgtagaagaggaagagctgccggtggagaatagggaagccgttctgaaggatcatactaaaattcgcgctctggtgcgggctcactccgaaaaagaccagcccccttttggggattctgatgattctgtggaagctgataagtccagcccaggcattcaccttgagagaagccaggcaagtaccactgtggatatcaacacacaagtggaaaaggaagtgccccctgggtccgctattatacatattaaaaaacaccaagtgtctgtagagggaactaatcaaaccgacgtcaaggcggtcggtggcccagccaaactcctcgttgtcagcctcgaggaagcctggcctttgcacggcgattgcgagacggacgccgaggaggggacgagtctgacagcatccgtggtcgcagacgtgcgaaagtctcagcttcctgccgaaggcgatgcgggagccgagtgggcggctgctgttttaaaacaagaaagagctcatgaggtgggcgctcaggggggaccaccagtggcccaggtggaacaggatctgccgatcagccgtgagaaccttaccgacctggtggttgacaccgatacactaggagaatcaacccagccacagcgtgagggggcacaggtacccactggtagggagcgggaacagcacgtgggaggaactaaagactcagaagataattacggtgacagcgaggacttggaccttcaggcaactcagtgcttcttagaaaaccaggggctggaggtccaatcgatggaagacgagcctacgcaggccttcatgctcactccccctcaggagctgggacccagtcattgttccttccagactactggcctattgaattgtaagatgcctcccgctgagaaggcgagtaggatccgggctgctgagaaggtgagtcgcggtgatcaggaaagcccggatgcctgcctgccaccgactgtcccagaagctccggctcccccacagaaaccactcaattctcagtcccagaagcatctcgctcccccaccccttctgagcccactcctgccctccattaaaccaacagtacgtaaaacaagacaggacggctcacaagaagcccctgaggcgccactgtcctccgagctagaaccttttcatccaaaacctaagattcgtacgagaaagtcttccagaatgaccccatttccagccaccagcgcagctcctgagccccatcccagtacctctacggcccagcctgtgacacccaagccgaccagccaagccacccgctctcgcaccaaccggtcatcagtgaaaaccccggagcccgtcgtgcccactgctcctgagctccagccctctacttccacagatcagccagtaacttctgagcctaccagtcaggtcacacggggacgcaaatccagaagctcagtcaagactccagagaccgtggtcccgacggctcttgaactccaaccatcaacttcaaccgataggccagttacatctgagcccacgtcacaagccacacggggtaggaagaaccggagctcagtcaaaacgcccgagccagtggtacctaccgctcctgagctccagcctagtacgtcgaccgatcagcctgtgacttctgaaccaacataccaggccacccgcggaagaaaaaatcgaagcagcgttaagaccccagagcctgtggtgcctactgccccagagctgagaccctccacttcaaccgatcggccagtgacccctaaaccaactagcagaacaaccaggagcaggaccaatatgagttcggtgaaaaaccctgaatccaccgtacctatcgcacccgagctccccccttcaacgtcaacagagcaaccagtgacccccgaacctaccagccgggctacaagggggagaaagaatagaagctcgggaaagacccccgagaccctggtaccaaccgcgcctaagctggagcctagtacaagcactgatcagcccgtcacaccagaacctaccagccaagccactagaggccgaacaaatcgcagctccgtgaagacccccgagaccgtggtcccaactgctccagagttgcagccctccactagcaccgatcagccagttacccccgaacctacttcccaggccacccgagggcgaacagaccggtctagtgtaaaaacaccagaaacagtagtgcctaccgctccggaattacaggcctctgcttccacagatcagccagtgacctccgagccaaccagccgtactacaaggggacgaaagaaccggtctagtgtgaagactccggagacagtggtgcctgcagcgccagctctccaaccatctacatccaccgaccagccggtgacgcccgaaccgacctcaagggccacacggggaagaacaaacaggagctccgtcaaaactccagaaagcatcgtacccattgctcctgagctacagccctctacgtcaagaaaccagcttgtgactcctgagccaacctcccgcgcaacaaggtgcagaacaaatcgatcaagtgtgaagacgcccgaaccagtggtgcctactgctcctgagccccatcccacaacatctaccgaccagccggttactcctaagctgacttcacgcgcaaccaggcggaagacgaatcggtcaagcgtaaaaacccctaaacctgtggaaccagcagcgagtgacctggagcccttcacccctaccgatcagtccgtgacaccagaagccattgctcagggtggccagtctaaaaccttgagatcttccaccgtccgggctatgccggtgccgactaccccggaatttcaatcccctgtcacaacagatcaaccgatttcacccgaacctataactcagccctcctgcatcaagaggcagagggctgcaggcaatcccggtagccttgctgcacccatcgatcataaaccatgctctgctccgctggaaccgaaatctcaggcctctcggaaccagcggtggggcgctgtgcgcgcagctgagtctctgactgctattccagagccggcttcaccgcagctcctggagacaccaatccacgcctcccagattcagaaggtcgaaccggctggacgctccaggttcacccctgagctgcagcctaaggcctcacaaagtcggaagaggagcctggccactatggacagccctcctcatcagaagcagcctcagaggggcgaagtgtctcagaagaccgtgattatcaaagaggaggaagaggatacggccgagaaacccggaaaggaagaggatgtcgtcacacccaagcctgggaaacggaagcgcgaccaggccgaagaggagcccaataggattcccagccgatcacttcgcaggacgaagctgaatcaggagagtactgctccgaaagtgttgttcacgggcgtggtcgatgcgcgaggcgaacgggctgtcctggcactcgggggtagtctggccggtagtgctgccgaggcctctcacctggtgaccgatcgaatacggagaaccgttaaatttctgtgtgccctgggcagaggaattcccatactatctctcgactggttgcaccagagccgcaaagccggtttcttcctgcctcccgacgagtatgtcgtcacagatcccgaacaggaaaagaattttgggttcagcttgcaggacgcactcagcagggccagggagagacggctgctggagggctatgagatttatgtgactcccggagtccagcccccaccgccacagatgggcgaaatcatttcctgttgcggtggtacatatttacccagcatgcctcggtcttataaacctcaacgagtggttataacctgcccccaggattttccccactgcagcatccccctgcgggtcggcctcccactcctgtccccggaattcctgctcaccggcgttcttaagcaggaggcaaagccagaggccttcgtgctttctcctctggagatgagctcaacatag

SEQ ID NO: 229938 - DNA, 666 bp, synthetic construct
  misc_feature 1..666: note = Description of Artificial Sequence: Synthetic coding sequence
  source 1..666: mol_type = other DNA
atggaagacacccaggctatagattgggatgtcgaagaggaagaagagacagagcagagtagcgaaagcctgcggtgcaacgtcgagccagtcggtcggctgcacatcttctccggtgcccacgggcctgagaaggattttccactccatcttggcaaaaatgtggtaggaaggatgcctgattgcagtgtggccctgcctttccccagcatctctaagcaacatgccgagatcgagatcctggcctgggataaagcacccattctgagagattgcgggtccctcaacggcactcagattctgagctcatcgctgccgcctccccagaccagcttactcccactgtctcttaggcttaggttgctgggcgaggaacaaatcgatcctctgagccggctgctcaagcagcttagccctcagccactgtcataccgcctgcctcctccccaaaccagcctgagtccactgtccccgcatcttggcccactgggtgaagaaaaaatcggccctttgtctcggcctttgaagcaactgtgcccacagcccctcagctcgagtctacctccaccccagacaaacctgtcccctctgagcccacacctcggacctctgggcgctgggcaaataggtccgttgtctaggcctttgaaccaattgtcactgtag

SEQ ID NO: 229939 - DNA, 666 bp, synthetic construct
  misc_feature 1..666: note = Description of Artificial Sequence: Synthetic coding sequence
  source 1..666: mol_type = other DNA
atggaggacacgcaggccatcgactgggatgtggaggaggaggaagagactgaacagagcagtgaaagcctgcgctgcaacgtagagccggttgggagactacacattttcagtggggcacacgggccagaaaaagactttcccttacatctgggaaagaacgtcgtggggaggatgcctgactgtagtgtagctctgcccttcccatccatcagcaagcagcacgctgagatcgaaatcctggcatgggacaaagccccaatattgcgagattgcggatctctgaatgggacgcaaatcctgagtagctcactcccaccaccacagacatccctgctgccattgtccctgcgtctgagactgctgggcgaggaacaaattgatcccctcagcagactcctgaaacagctcagtccacagcccctaagctaccgcctcccgccacctcagacaagcctgtcccctctgtcacctcatctcggccctctgggtgaggagaaaatagggcctctgagccggcctcttaaacagctttgcccccaacccttaagtagtagtctcccaccaccacagaccaacctgagtccgctcagcccacacctcggccctttaggggcaggtcagataggtccactgagtcgacctctgaaccaactcagcctctag

SEQ ID NO: 229940 - DNA, 738 bp, synthetic construct
  misc_feature 1..738: note = Description of Artificial Sequence: Synthetic coding sequence
  source 1..738: mol_type = other DNA
atggaagacacacaagcaatcgattgggacgtcgaggaagaagaagagaccgagcagtcctctgagagtctcaggtgcaacgtcgagccggttgggagactgcacattttctctggcgctcacgggccagaaaaagacttccccttgcatcttggtaagaacgtcgttggacggatgcccgactgtagcgtcgccctcccttttccatccatatctaaacagcacgctgaaatcgaaatactggcctgggacaaagcccctatcctccgcgattgtgggagcctgaacggaacccaaatcctaaggcctccaaaagtgctgtcacccggagtgagccatagactacgcgatcaggagctgattctatttgctgacttgctctgtcagtaccaccgccttgacgtgagccttccatttgtgtcgagagggccattgacagtcgaggaaacaccaagagtgcaaggggagacgcagccccagcggctgctgttagcagaggatagcgaggaagaagtcgatttcttatctgagcgaagaatggtgaagaaaagcaggacgaccagctcgagtgttatcgtaccggaatcagacgaggagggacatagtccggtactcgggggtctggggcctccttttgcttttaacttgaactccgataccgatgtcgaggaggggcagcagcccgctacagaagaagcttcctccgccgctcggcgtggggcaaccgttgaagcctag

SEQ ID NO: 229941 - DNA, 4968 bp, synthetic construct
  misc_feature 1..4968: note = Description of Artificial Sequence: Synthetic coding sequence
  source 1..4968: mol_type = other DNA
atgtaccaccggctagatgtctcactgcccttcgtttccaggggtccactgaccgttgaagaaacacccagggttcaaggcgaaactcagccccagcggctccttctggctgaagactccgaagaggaggtggacttcctaagcgagagacggatggtgaaaaaatcacgaactacttcttctagcgttatcgtaccagaatccgacgaggaggggcacagccccgtactggggggactaggtccacccttcgcctttaacttgaatagcgatacagatgtagaagaggggcaacagcctgccacagaggaagcttcttccgcagctaggcgtggtgcaacagtagaggctaagcagtctgaggccgaggtggtgacagaaattcaactggagaaagaccaacccttagttaaagaaagagacaacgacactaaagtgaagagaggcgctggaaatggtgtggtgcctgctggggtcatactggaaagatctcagcccccaggtgaggacagtgacaccgatgttgacgatgatagtaggccccctggccgaccagccgaggttcacctggaacgtgcccaaccttttgggttcattgattccgacacagatgctgaggaggaacgcattcctgccactccggttgttatcccgatgaagaagcgtaagatcttccatggtgtgggaactcgcggaccaggcgcacccggactcgcccacctgcaggagagtcaagcaggatcagacaccgacgttgaagaagggaaggcaccgcaggcagttccactggaaaaatcccaggcatcaatggttatcaattctgacacagacgatgaggaagaagtgagcgccgctctcacactggcccatcttaaggagagccagcctgcaatttggaaccgcgacgcggaggaagacatgcctcagcgcgtggttttgctgcagcggtcccaaacaaccacagagagagattcagatactgacgttgaagaagaagagctgccagtggagaacagggaagcagtgctgaaagatcacaccaaaatacgggctctggtaagggctcactccgagaaagaccaacccccattcggagacagtgatgactccgtggaagcagacaaatcaagtcccggtatccacctcgaaaggagccaagctagcacaacagtggacatcaacacacaagtggagaaagaggtgccacccggatcggccatcattcacataaaaaaacatcaagtatcggtggaagggacaaaccagacagacgtgaaagcagtgggtggtcctgccaaactccttgtggtgtccctagaagaggcctggccactccatggggactgtgagaccgatgccgaggaaggtacaagtctgacagcctctgtggtcgcggatgttaggaaatcacagctacccgctgaaggagatgctggtgcagaatgggccgctgcagtcttaaagcaagagagggcacatgaagtcggcgcacaaggcggaccaccggtagcccaggtggagcaggaccttcctatttccagagaaaatctaaccgatctcgtggtggatacggacaccctgggggagtccacacagcctcagcgcgagggggctcaagtaccaactggcagggaacgggagcagcacgtgggcggaaccaaagattcagaggacaactacggtgatagcgaggatctcgatctccaagctacgcaatgttttttggagaatcagggtcttgaggtccagagtatggaagacgagcctactcaggcctttatgctgacccctccccaagagctcggcccttcgcactgcagcttccagacaactgggctcctcaattgcaagatgccacccgctgaaaaagcttccaggataagggctgccgaaaaggtgagcaggggagaccaagagtctcctgacgcatgcctccctcctaccgtgcccgaagcccctgctccaccccagaaaccattgaactcgcaatcacagaaacatcttgctccgccacctttgctgtccccactgcttccatctatcaagccaactgtgaggaagacccggcaagacggatctcaggaggcaccagaggctcccctcagtagtgagctggaaccatttcaccccaagccgaaaattaggactaggaagtcctctcggatgacaccatttccagccacatcagccgctccggaaccccatccatcgaccagcacagcacagcccgtcacccccaagccaaccagtcaggcaacccgttcgcgaacaaatcggagttcagttaaaacaccagagcctgtcgtgcctactgcccctgagctgcagccgtcaacaagcactgatcagcccgtgacaagtgaacctacaagtcaggtcacacggggacggaaaagccgcagcagcgttaagacacctgagaccgtggtgcccaccgccctcgagctgcagccgtccacgtccactgacaggcctgtgaccagtgagcccacgtcccaggctacaaggggacgtaaaaacagaagctctgtgaaaacccccgaaccagttgtgcctacagcccctgaactgcagccttcaacgagcactgaccagcctgtaacatctgaaccaacataccaggctactaggggccgaaagaatcggtccagtgtcaaaacccctgagccagtcgtccctaccgctcctgagttgagaccaagcacttccactgaccggcctgttaccccaaagcccaccagcagaaccacacgcagcaggacaaatatgtcctcagtaaagaatcccgagtccactgtaccgatcgctcccgagttgcccccaagcacttccacagaacagcctgtcacgccggaaccgacttctcgcgctaccagagggcgaaagaaccggagctccggaaaaacacccgaaacattggtgcctaccgcgcctaagctggagccatcgactagcaccgaccagcctgtgacacccgaacctacctcccaggccacccgcggacgtacaaaccgatcctccgtgaaaactcccgagacagtggtacctactgctccagagctgcaacctagcacaagcactgaccagcccgtgacccctgaacctaccagccaggccacaaggggcagaaccgaccgctcttccgtgaaaactccagagactgtggtgcccaccgctcctgaattgcaggcttccgcttctaccgatcaaccagtgacctccgagcccacatcccggactacgcggggacgcaaaaataggtcatcggttaagacacccgagacagtggtgcctgctgcccctgagctccagccctccacgtctaccgatcagcccgtcacccccgagcctaccagtcgggctacccggggaaggacaaaccgctctagcgtcaaaacaccagagagtatagtccctattgctccagagttgcagccctcaacctcgcgcaaccagctcgtgacaccagagcctacatctcgcgcaacaaggtgtaggaccaacaggagttccgtcaaaacaccagagcctgtggttcctacagcccctgaaccgcaccccaccacttccacagatcagccggtgacaccaaagctgacaagccgcgctacccgcagaaaaaccaatcggtcaagtgtcaaaacaccaaaacctgttgagccagcggctagcgacctggagccttttacccccacagatcagtcagtcacgcctgaagctatcgctcaggggggtcagtctaaaactttgcgctcttccactgtgagagctatgcctgtgccgactacaccagagtttcaatcccctgtcaccaccgaccagcccatttccccggaacctattacccaaccatcatgcattaaaagacagagggcggctggcaaccccggttccctcgctgcccctattgaccataaaccctgcagtgcacccctggagccgaaaagtcaagctagccggaaccagagatggggggctgtacgtgccgcagagagtctgacagctataccggagccagcttctcctcagctcctagagacgccaattcatgcttcacagatccagaaggttgagcccgctggcagaagccgctttacgcccgagttgcagcccaaggcctcacaaagccgcaagcgcagcttagctacaatggatagcccaccgcaccagaagcagccacagcgaggggaggtcagtcaaaaaactgtcataattaaggaggaagaggaggacaccgcagaaaaacctgggaaggaggaggacgtggtgacccccaaacccggtaaacgcaagcgtgaccaggcggaggaggaacccaatcgcattcctagcaggtctctgcgccgaaccaagctgaaccaagaatctaccgcccctaaagtgctgttcaccggcgtggtggatgctcggggagagagagccgtcctggccctgggcggtagccttgccggttcagcagccgaagcctcccacctggtgaccgacaggattcgaaggaccgtgaagtttctgtgcgccctcggcagggggatccccatcctaagcttggactggttacaccagtccaggaaagccggttttttcttgccgccagacgagtacgtggtcacggaccccgagcaggagaaaaatttcggattcagtctgcaggacgccctctcccgggcacgggagcgacgcctgctcgaggggtacgaaatatatgtcaccccaggtgtgcagcctccacctccacagatgggggagataatttcctgttgtggcggaacctacctgccttcaatgccccgatcttacaaaccgcagcgtgtggtcataacttgcccccaggactttcctcactgctccatcccactcagggtggggctgcccctgttgtcccccgaattcctcctgacaggcgtgctgaaacaggaggccaagcctgaagcatttgtattatctcctctagagatgagcagcacttag

SEQ ID NO: 229942 - DNA, 5477 bp, synthetic construct
  misc_feature 1..5477: note = Description of Artificial Sequence: Synthetic coding sequence
  source 1..5477: mol_type = other DNA
atggaagacacacaagccatcgattgggatgtcgaagaggaagaggagacagagcagtcgtccgaatctttgaggtgcaacgttgagcccgtgggtcgtctccatatattctctggggcacatggacccgaaaaagatttcccattgcatctgggaaagaacgtcgtcgggagaatgcctgattgttccgttgcactgcccttcccatctatttccaaacagcatgctgaaatcgagattctggcctgggacaaagcacccattctccgtgattgcggctcactcaacggcacacaaattctccgacctcctaaggtgctgagccccggtgttagtcaccgtctgcgcgaccaggagctcatattgtttgccgacctattgtgtcaatatcatagattggatgtgtctttaccattcgtctcccgcggacctctcactgtagaagagacccctagggtccaaggcgagactcagcctcagcgtctgctcctggcagaggattccgaggaagaggtggatttcctcagtgagaggcggatggtgaagaagagcagaacaacaagttctagtgtcatagtccctgaaagcgatgaggagggccattctcccgtactggggggattgggtccccctttcgcattcaatctgaactctgataccgacgtagaggagggacagcaacctgcaactgaagaagcgtcatccgcggcacgccgaggcgctactgtggaggccaagcagtctgaagctgaggtggtcactgagattcaacttgaaaaggaccagcccctagtgaaggagagggacaatgacaccaaggtgaagcggggtgcgggaaacggagtagtcccggctggagtgatactggagcggagtcaaccaccgggtgaggactctgataccgatgtcgatgatgattctagacccccaggaagacccgctgaagtgcatctagagcgggctcagccctttggcttcatcgacagtgataccgacgcggaggaggagagaattcccgcaacccctgtggtcatccccatgaaaaaacgcaagatcttccatggcgtgggaacccgcggaccaggtgctcccggtctggcgcacctgcaggaaagccaggccggaagcgacaccgacgtcgaagagggcaaagcccctcaagctgtgccattagaaaagtcgcaggcgtccatggtgatcaattcagatactgatgacgaggaggaagtttcagccgctctcacattggcacatctcaaagaatcgcagccagctatatggaacagagatgctgaagaggatatgccgcagagggtcgtgctcctccaacgtagccaaacaaccaccgagagagacagcgataccgacgtagaagaggaagagctgcccgtcgaaaacagagaggccgtcctaaaggaccacaccaagatcagagcgttggtgcgcgctcactccgaaaaagaccagccgccttttggggattctgacgactctgttgaggctgacaaaagttcacccggaatccacctggagcggtctcaggccagcactactgtggatattaatactcaagttgaaaaagaggtccctcccggatctgctatcattcatattaaaaagcaccaggtcagcgtggagggcacgaatcagactgatgtgaaagcagtgggtgggccagccaagttgcttgttgtttccctcgaggaggcatggcctttgcacggtgattgcgagactgatgccgaggagggtacttcactgacagcttcagtggtggccgacgtccgtaagtcacagctgcccgctgaaggtgatgctggcgctgaatgggcagccgcagtactgaaacaggagcgggcacatgaggtaggcgctcaggggggtcccccagttgcccaggtcgaacaggatctccccatcagtcgtgagaatctgaccgaccttgtcgtggatacagatactctgggcgagagcacccagccccagcgcgaaggcgcacaagtgccgacaggcagggaaagggagcaacatgtcggaggcaccaaggactccgaggacaactatggagactctgaggacttggacctacaggctactcagtgcttcctggagaaccagggattagaggctgttcagagcatggaggatgagcccacccaagcgtttatgttgacaccgcctcaggaactgggcccatctcactgtagctttcagacaacgggcttgcttaactgcaaaatgccacctgctgagaaggcatccagaatacgggctgctgaaaaggtgagtcggggagatcaggagtccccagatgcctgtctcccacctaccgtccctgaggcgccagcccctccacagaaacccctaaattctcagtcccagaaacaccttgctccgcctcctcttctgagccccctgctgccgagcattaagcctacagtgcggaagactcggcaggatgggtcacaggaggctcccgaggcccctctgtcttctgaactggaacccttccatcccaaacctaaaatccggactaggaagtcatcacgtatgacacctttccccgctacgtcagccgcacctgagccccacccatccactagcacagctcaaccagtgacgcctaagcctacctctcaggccacccgtagcagaactaaccgctccagcgtgaaaacccctgaacccgtggtgcccaccgccccagaactccaaccgagtacttccaccgatcagcctgtcacaagtgaacccacttcacaggtaacaagaggaagaaaaagcaggtcctctgttaagactccagagacagtggtccccaccgctctggaattgcaacccagcacatccactgacagacccgtcacgtcagagccaacaagccaagcaacacgcggtaggaagaatcgatccagcgttaagactcccgaaccagtggtgcccacagccccagagcttcagccttctacctctactgaccagccagtgacttcagagccaacatatcaagccacaagaggacgcaaaaaccggagctcggtgaagaccccagaacccgtggtgcccactgccccagaactgaggccatccacctcaacagatcggcctgttaccccaaagccaacatcacggactacgcggtctcgcacaaatatgtcctcggtcaaaacacctgagacggtggtccctacagctccagagcttcagattagtacctctacggatcaaccagtgactcccaagccaacgtctagaacaactcgttctagaacaaatatgagctccgttaaaaacccagaatcaaccgtgcctatagctccagagttaccaccttccactagtacggagcagcctgttacacccgagcctactagccgcgctacaagggggcgtaagaatcgctcctccggaaagacccccgagacgctggtcccaacagctcccaaactggaaccaagcacttctactgatcagccagtgacccctgagccaacctctcaggcgacccgcggtagaaccaacaggtcgtctgtgaagacacccgagaccgttgtgccaactgcaccagagttgcagccaagcacgagcaccgaccaacccgtgacccccgaaccaacctcccaggcgacaaggggcaggactgacaggtcgagcgtgaaaactcctgagacagtggttcctacggcaccggaacttcaagcatccgcctccactgaccagcctgtcactagtgagccaacaagtagaactacacgcggtcgcaaaaaccggagctccgttaagaccccggaaaccgtggtcccggcagccccagagcttcagccgagcacctctacagatcagccggtcaccccggaacctacatccagggcaacaagggggaggacaaaccgctctagtgttaaaacaccagagtcaattgttcccatcgcaccagaactgcagcccagtactagccgaaaccagctggtcacccccgagcctacttcccgggcaacaaggtgcagaaccaatcgctctagcgtcaagacccctgaacccgttgtgccgaccgccccagaaccacaccccaccactagtactgatcagcccgtgactcctaagctgacaagtcgtgcaactaggcgtaagactaacaggtcttccgtgaagacccctaagcctgttgagcctgccgcttccgatcttgagcctttcacacctacagaccagagtgtgacccctgaggccattgcacagggagggcagtcaaagaccctgagatcttcaacggtccgcgcaatgccagtccccaccacccctgagttccagagccccgtgaccactgatcaaccgataagtccggagcctataacgcagccctcgtgcattaagcgacagcgcgcagccggaaaccccggttcactagcagcccctattgaccataaaccttgttcagccccattggagcccaagagtcaggcatctcgtaaccaacgatggggtgcggtgcgtgccgcagaatcgttgaccgccattcctgagcccgcatctccccaactgttagagacacctattcacgcctctcagatacagaaggtcgaacctgcaggtcgctctaggttcacacccgagctccaacctaaagcttcccagtcacgcaagcggagccttgccactatggactcaccaccccaccagaaacagccacaaagaggcgaagtgtcccagaagaccgtcatcataaaggaggaggaagaggacactgctgaaaaacccggaaaggaggaggatgtagtgactcccaagcctggcaagcggaaaagagaccaagctgaagaggaacccaaccgtattcctagtcggtctttgaggaggacaaaattaaaccaggagagcaccgctccaaaagtgctattcactggtgtagtcgacgcccgtggagaacgagccgttctggctcttggcggaagcttggctggaagtgcagccgaggccagccatctggtgaccgacaggattaggagaaccgtcaagttcttgtgcgccctgggcagggggatccccatcctgtcattggattggctccatcagtccagaaaagccggattcttcttgccacccgacgagtacgttgtcactgaccccgagcaggaaaagaattttggcttctctctgcaagacgctttgtctagagcaagagagaggcgcctgctcgagggatacgaaatatatgtgaccccgggagtgcagccccctcctccccagatgggggagattatctcatgctgtggaggcacgtacctgcccagtatgccacgcagctacaagcctcagagggtagttattacttgccctcaggacttccctcactgcagcataccgctaagggtcggcttgcctctgttaagcccagagtttctattgacaggcgtgttgaaacaagaggcgaagccggaagcgtttgtgctgtctcccctggagatgtcatcaacgta

SEQ ID NO: 229943 - DNA, 4968 bp, synthetic construct
  misc_feature 1..4968: note = Description of Artificial Sequence: Synthetic coding sequence
  source 1..4968: mol_type = other DNA
atgtaccacaggctggacgtctctctcccatttgtgtcaaggggaccgctcaccgtggaggagaccccacgggtgcagggagaaactcagccccagcgactgctgcttgccgaagattcggaggaggaagtggactttttaagcgagcgacgaatggtaaaaaagtcacgcacaacctccagctcagtaatcgttcccgaaagcgacgaagaaggccattctcccgtgttaggcggactcggcccaccattcgcgttcaacctgaattcagatacagacgtggaagaaggacagcagcctgctactgaagaggctagcagcgcagctagaaggggagctactgtggaggccaagcagagcgaagcagaagtggtgacagaaatacagctggagaaggaccagccgctagtgaaggagcgtgataatgacacaaaagtcaagcggggagcaggaaatggggtggtccccgctggtgtgattctggaaaggtcgcaaccacccggagaggattcagatactgatgtcgacgacgactcccggcctcccggacggcctgcagaagtgcacttagagcgggctcagcccttcggttttattgattcagacactgacgccgaggaagaaaggataccagccacccccgtagtcatcccgatgaaaaaaaggaaaatctttcatggcgtggggaccagaggcccaggcgcacccggattagctcatcttcaggagtctcaagccggttcggacaccgatgtggaggaggggaaggcccctcaggccgttccgctggaaaaaagccaggcgagcatggtgatcaacagcgacactgacgatgaggaggaagtgagcgccgctctgaccctggcacatctgaaggaatctcagcccgcaatttggaatcgcgacgcggaagaggacatgcctcaaagagtcgtgttactccagagatcccagacaaccactgagcgagacagtgatacggacgtggaagaggaggaattaccagtcgagaaccgggaggccgttctgaaggaccataccaagatcagggccctggttcgcgcacattctgagaaggatcaacctccttttggagatagcgacgatagcgtggaggccgacaagtctagtccaggcatccacttggaaaggagccaggcgagtaccactgtagacataaacacacaggtggagaaagaggtaccccctggatctgcaatcattcacattaagaagcatcaggtgtctgtggagggaactaatcagaccgatgtgaaggccgttggaggccctgccaagttgttggtggtctcgctggaggaagcttggccgcttcacggcgactgcgagacagatgcagaggaggggacctcactgacagcaagcgtcgtcgctgacgtgcgcaaatctcagctgccggctgagggagacgctggggcagaatgggctgccgctgtgctgaagcaggagcgagcccacgaggtcggagcccaggggggacccccagtggcgcaggttgagcaggacctacccatcagcagagaaaacctgaccgatttagtggtggatacagacaccttgggcgaatctacccaaccccagagagagggcgcacaggttcctacaggcagggaaagagagcaacacgtggggggtacaaaagactccgaagataactacggggactctgaggatctcgatctccaggccacccagtgctttctcgagaatcaggggctggaggtccagagtatggaagacgagcccacacaagcgtttatgcttacaccacctcaggaacttggacctagccattgtagcttccagaccaccggactgttgaattgcaagatgccccctgcagaaaaagcgagccgaatccgcgctgccgagaaagttagccgcggagatcaggagtctccggatgcctgtctgcccccaacggtaccagaggctccagctccccctcagaaaccattaaactcacagtcgcaaaagcatctcgccccacctcccctactcagccccctgctgccctccatcaagcccacggtgcggaaaacccggcaagacggctcacaggaggcaccagaagcgcctctgtcttctgagctggaacccttccaccccaaacccaagatccgaactcgaaagtcaagccggatgaccccctttccggctactagtgctgctcccgaaccccacccctccacttctacagcccagcctgtgactccgaagcctacgtcccaagctaccaggtctaggactaaccgaagctcagtgaagacccctgaaccagtggtacccactgcccctgagctgcaaccatccacttctactgaccaaccagtaacaagtgagccaacatctcaggtgacacgagggaggaagtccaggtccagcgtgaagactcccgagacagtggttcctactgcactggaactgcaacccagcaccagcaccgatcgccctgttacttcagagccaacgtctcaggcgacccggggacgtaagaataggagtagcgttaagactccagagccagtcgtgccaactgcacctgagctgcagccctcaacttccactgaccagccagtgactagcgagccgacctaccaggcgactcggggaaggaagaataggtcctctgtgaagactcccgagccagttgtgccaaccgcccctgagctgagaccatctaccagcacagatcgcccagtcactcccaagcccaccagtagaaccacccgaagcaggacaaacatgagcagtgtcaaaaatcccgagtcaacggtaccgatagccccagaactcccccctagtaccagcaccgaacagcccgtgaccccagagcctacctcccgtgcgacaaggggtcggaagaacaggtctagtgggaaaacgcccgaaaccttggttcccacagctccaaagctagagccgtccacatccacagatcagccagtgacacctgaaccgaccagccaggcaaccagggggcgaaccaataggagctcagtaaaaactcctgaaactgtcgtgcccaccgcgccagaactgcagccatccacgtcaactgatcagccggtgactcccgaaccaactagtcaggctactcgtggcagaacagacagaagcagcgtgaaaacacccgaaaccgtggtccccacagcacccgagctccaagcttcagcatcaaccgaccaacccgtgacctcggagcctaccagcagaaccactaggggcagaaagaatcgctcctccgttaagacgccggaaacggtcgttccggctgccccagagctacagccatccacttcaaccgatcagccggtcacacctgagcctacctcgagagcaacccggggacgcacaaataggtccagcgtgaaaacaccagagtctatcgtacccatcgcaccagaactgcagccttccacaagtaggaatcaactcgtaaccccagaacctacatcacgcgcaactcgatgccggaccaataggtcttccgtcaagactcccgagcccgtggtacccaccgccccagagcctcacccgacaactagcaccgatcagcctgttacaccgaagttgacgtcccgcgctacccgccgaaagacgaatcggtcaagcgtgaagacacctaaacccgtcgagccggcagcttcggacctagagccctttacgcccaccgatcagtccgtgactcctgaggcaattgcccaaggcggtcagagcaaaacgctgagatctagcacagttagagccatgccggttcccaccacccctgagtttcagtctcccgtgacaacagatcagccaataagtccagagccaattacgcagccatcttgcataaagcggcagcgggcagccggtaatccaggaagcctcgcagcgcctattgaccacaagccgtgctcagcaccactcgagccaaagtcacaagcctctaggaatcaacggtggggggcagtgcgggcagccgaatctctcacagccatcccggagcccgcttctccccagctcctggagaccccaattcacgcctcacagattcagaaggtggagcctgccggtaggtccagattcacccctgaactgcaacccaaggcctcccagtcacgaaagcgctctttagctacaatggattcccccccacatcagaagcagccacaaagaggggaagtgtctcaaaagacagtgatcattaaagaggaagaagaagacaccgccgagaagccaggaaaagaagaggacgtggttacccctaagcccggaaagagaaagagagaccaggctgaggaagagcccaataggataccgtcccgttcattgagacgcaccaaacttaatcaggaatccaccgctcccaaggtcctattcactggggtggtcgatgccaggggcgagagagctgtgctagcactggggggttctttggccggttccgccgcagaagcttcacatctggtcactgaccgaattcgccgtactgtgaaatttctgtgtgcactggggcgagggattcccatcctctcccttgactggctgcaccagtcccgaaaggctggattcttcctgcctcctgatgaatacgtcgtgacagaccctgagcaagagaaaaacttcggtttctctctgcaggacgcactgtcgcgggcacgcgaacgccgacttctggaagggtatgaaatatatgtgacccctggtgttcagccccctcctccacagatgggagaaattatctcctgttgcggtggcacctacctccccagtatgccacgcagctataaaccacagcgtgtggtgatcacttgtccgcaggattttccccattgttcaatacctttacgcgtgggtctgcctcttctgagtcccgaattcttgctgacaggagtcctgaaacaggaggctaaacctgaggcttttgtgcttagtcccctggaaatgagcagtacttag

SEQ ID NO: 229944 - DNA, 4968 bp, synthetic construct
  misc_feature 1..4968: note = Description of Artificial Sequence: Synthetic coding sequence
  source 1..4968: mol_type = other DNA
atgtatcaccggcttgacgtgtcgctgccctttgtcagcagaggccctttgaccgtggaagaaactccccgagtgcagggggagactcaaccgcagagactgttgcttgcagaggacagcgaagaggaagtagacttcctctctgaacggcgaatggtgaagaagtcccggacaacgtcatcatcagtgatagtccccgaaagtgatgaagaaggccattccccggtgctgggaggcttaggccctccctttgccttcaatttgaattccgacaccgacgtggaagaggggcaacagcctgctaccgaggaggctagcagcgccgcaaggagaggtgcgactgtagaagctaaacagtccgaagccgaggtcgtcacagaaatccaactcgagaaagaccagcctctggtaaaagaaagggacaatgataccaaggtcaaaaggggagcagggaatggagttgttccagcaggggtgatccttgagcgttcgcagccccctggcgaggactccgacaccgacgtcgacgatgatagtagacccccagggcgacccgcagaggtccacctagagcgcgctcagccttttgggttcatagactctgacacagacgccgaggaagagaggatcccagccactcccgtcgtgattcccatgaagaaaagaaagatattccacggagtgggcacaaggggacctggcgctcccggactcgcacaccttcaggagtctcaggctggcagtgatacagacgtcgaggaaggcaaagcaccccaggccgtgcctttggagaagtcccaggcaagtatggtgatcaactccgatacggacgacgaggaggaagtgagtgctgccctgactctggcgcatctgaaggagtctcagcctgccatctggaaccgggatgccgaggaagatatgcctcagagagtggtgctgctgcaacgttcacaaacgaccacagagagagatagcgatacagatgtcgaggaagaagagctgcctgtcgagaatagagaggctgtcctgaaggaccatacaaagatcagagctcttgtgcgggctcactccgagaaggaccagccaccctttggcgactcggacgattccgttgaggctgacaagagttcaccgggaattcatctggagagatcacaggcttcaaccactgtagatattaatacgcaggttgagaaggaggtcccaccagggagtgccatcattcacattaaaaaacaccaagtgtcagttgaaggcacgaatcagacagacgtgaaagcagtcgggggaccggcaaagctgctggtggtgagcctagaagaggcctggcccctccatggcgattgcgaaactgacgctgaggagggcacgagcctgactgcatcagttgtggccgacgttcgcaagagccagctccctgctgaaggcgatgctggtgctgaatgggccgctgcagtgctcaagcaggaaagagctcacgaagtcggcgcacagggcggtcccccagtggcacaggtggagcaggatctaccaatctcccgggaaaacttaacagacctggtggtcgacacagatacactgggtgagtccacccagcctcagcgcgaaggagctcaggtgccaaccggaagagaacgtgagcaacacgttggcggtaccaaggatagcgaggacaactatggcgattcagaagatcttgatcttcaggccacacagtgcttcttagagaaccagggcctcgaagtccaatccatggaagacgaacccacccaggctttcatgctgacaccgccacaggagttaggtcctagccactgtagcttccaaacaactggcctgctcaattgcaagatgcccccagcggagaaggcaagtaggatacgagccgcagaaaaggtgtctcgcggtgatcaagaaagtcccgacgcttgcctcccccctacagtacctgaagcccctgcccctcctcaaaagcctctaaatagccagtcccagaagcacctcgcccctccccctctgctctcccccctactgcccagcatcaaaccaaccgtgcgaaagacgagacaggatggaagccaggaggcacctgaagccccactctctagtgagctcgagcccttccatcctaagcccaaaatcaggacacgtaaatctagtcggatgactcccttccccgctacaagcgctgcacccgagccacatccatcaacttctactgcccagcctgtcactcctaagccgacgtctcaggctactcgttctcgtacaaaccgcagcagcgtgaaaacaccagaacctgtggtgcctacagcgccagaactccaaccctcaacatctactgaccagcctgttacaagtgaaccgacctcacaggtgacaagggggagaaagtcacgttctagcgttaagaccccggaaaccgtggtccctacagcacttgagctgcagccttccactagtacagataggcccgtgacctcagagccgacctctcaggctacccggggaagaaaaaatcgatcctcagttaaaacccccgaacctgtggtaccaacagcacctgagctgcaaccatccacttcaaccgatcagcccgtcacctctgagcccacctaccaggctaccagaggtaggaaaaaccggtcgagcgtgaagactcctgaaccagtcgtgcccaccgctcctgaattgaggccttcaacttccaccgaccgacccgtcacaccaaagccaacatcccggacaacccgttccaggaccaatatgagcagcgtgaaaaaccccgaaagcacagtgccaattgccccagaactgcccccatccacttccaccgaacagcctgtgacacccgaacctacttcaagggctacccggggtaggaagaatcgatcctcaggcaaaactccagaaaccctggttcctacagctccaaagctcgagccttccaccagcactgaccagcccgttacacccgaaccgacttcacaggccactaggggcagaacaaaccggtcaagcgttaagactcctgagaccgtcgtgcctaccgccccagaacttcagccatcaacttccacagaccaacccgtgactcctgaacccacctcgcaggcgactcgagggcgtactgatcgttcttcagtgaagacgccagagactgttgttccgacggcacccgagctccaggcatccgcttccacggaccagcctgtcacatcagaaccaactagccgcacgactcgcggtagaaaaaacaggtcctctgtgaagacacctgaaacagttgtgcctgctgcccctgagttgcagcctagtacttcgaccgatcagcctgtgacacccgagcccactagtagggccacccgcggaaggactaacagaagcagcgtaaaaactcctgagagcattgtgccaatagctcctgagctccagccttccacgagcaggaaccagctggtcacccctgagccaacttccagggccacgagatgccgcacgaatcgctcctctgtgaagacacccgagcctgtcgtgcccacagccccagagccacatccaaccactagcacggatcagccagtgacgccaaagctaacgagcagagccacacgccgtaagacaaataggagctccgttaagaccccaaagccggttgagccggcagcaagcgacttagagccattcacacctaccgaccagagcgtcacaccagaagcgatcgctcaagggggacagtctaagacactccgctctagtacagtgagggcaatgcccgtgccgaccactcctgagtttcaatctcccgttactaccgatcagccgatttcacccgaaccaataacacagccctcctgcattaagcgccagagggctgccggaaatccgggaagtttggcagccccaattgaccacaagccctgttccgcgcctttggagcccaaaagccaggcaagcaggaaccagcggtggggtgcggtgcgagcagccgaaagcctcaccgctatcccagagccggctagcccccagcttctggagactccaatacacgcttcccagatacagaaggtagaacctgccggaagaagtagattcaccccagaacttcaaccaaaggctagccagagtcgaaagcgtagtctggctacaatggactccccccctcaccagaagcagccgcagagaggggaagtgtcccagaagactgtcatcataaaggaagaggaagaggacacagcggagaagccgggaaaggaagaagacgttgtgacacccaagcctggtaagcggaagagagaccaagctgaagaggagcccaatcgcatcccgtctcgctctttgaggagaactaagctgaaccaggaatcaacagcgccaaaagtgttgttcacaggggttgtcgacgctaggggagaacgtgccgtgcttgctctggggggaagcctggcaggaagcgccgctgaagcaagccacctcgtgacagatagaatccgccgtacagtgaagttcctgtgtgccttaggcaggggcattccaatcctatccctggattggctgcatcagtctaggaaggccggattcttcctgccacccgacgaatacgtcgttactgaccccgaacaggagaagaactttgggttttcccttcaagacgcgctgtcccgagccagggaacgaaggctgctcgagggttacgagatttacgttacacctggtgtgcaacccccaccacctcagatgggcgaaatcatatcttgttgtggaggaacctatctgccatccatgccacgctcatacaaaccacagcgagtcgttatcacttgcccccaggacttcccacattgctcgatcccacttagggttggtctcccactcctgtctcccgagttccttctgaccggcgtacttaagcaggaggccaaacctgaggcttttgtattatcgccccttgaaatgagctccacctag

SEQ ID NO: 229945 - DNA, 735 bp, synthetic construct
  misc_feature 1..735: note = Description of Artificial Sequence: Synthetic coding sequence
  source 1..735: mol_type = other DNA
atggaagacacccaggccatcgattgggatgtggaagaggaggaagaaaccgaacaatcgagcgaatctcttcgatgcaatgttgagcccgttggccgactgcatatttttagcggagctcacggcccagagaaggacttcccacttcacctgggcaagaatgtggtgggtcgcatgcctgattgcagcgttgcgctcccctttccttccatctccaagcagcacgccgagattgagatactggcctgggataaggccccaattctgcgtgattgcggctcactgaacggtacacaaatattgcgtccgccaaaagttttatccccgggtgtgagtcacagactgagggaccaggaactgatcctttttgcggacctgttatgtcagtatcataggcttgatgtatctctgccattcgtgtccaggggaccattaaccgtggaggagactccaagagtgcagggtgagacccaaccccagaggctgttactcgccgaggactccgaagaagaggtagatttcctttctgaaaggcggatggtgaagaaatcaagaaccactagtagttctgtgattgtgcccgagtccgacgaggaaggccactcgccagtgctgggaggcctaggaccaccctttgcatttaacttgaactccgatactgatgtcgaggagggtcagcagccacaccggggagggctattgtcatgtcaaaagaggtgtcactgccgagggtag

SEQ ID NO: 229946 - DNA, 5408 bp, synthetic construct
  misc_feature 1..5408: note = Description of Artificial Sequence: Synthetic coding sequence
  source 1..5408: mol_type = other DNA
atggaagatacacaagccatcgactgggacgtcgaggaggaggaggaaaccgagcagtcttccgagtcactaagatgcaatgtcgaacccgtggggcgattacacatcttctccggtgctcatggccctgaaaaggacttccctctccacttgggcaaaaacgtcgtcggtagaatgcctgactgtagtgttgcgctgccatttccttcaatttccaagcagcacgctgagatagagatcctcgcctgggacaaagccccaattctcagggattgtgggagtctgaacggaacccagatcctgcggcctcccaaggtgctcagccccggagtgtcacacaggctccgtgaccaggagctcattctgttcgccgatctgttgtgtcagtatcacagattagacgttagtcttcccttcgtttctagaggaccactgacagtggaagagactccccgagtgcaaggagaaacacaaccacagcggcttctgctagctgaagattccgaggaggaagtagacttcctgtcggaaaggcgaatggtgaagaaaagtcgcactaccagcagcagcgtgattgtacccgagtcagatgaggagggccactctcctgtactgggaggacttggccctccgtttgccttcaatttgaacagtgatacagacgtggaagagggtcagcagcccgcaactgaggaggccagcagcgctgccagaaggggcgcaacagtggaggcaaaacaatctgaagccgaggtggtgaccgagatccagttggagaaggatcagcctcttgtgaaagagcgcgacaatgacaccaaagtgaagcgcggagctggaaacggtgtggtgcctgcaggggttatcctcgaaaggagtcagccaccaggcgaggatagcgatacggatgtcgatgacgatagccgcccacccggacggcctgctgaagtgcatctagagcgggcacagcccttcgggttcattgacagtgatactgacgctgaagaggagcgcataccagccactcccgtggtgattcccatgaagaagagaaagatttttcacggggtgggaactcgtggcccaggggcaccagggctcgcccacctgcaggagtcacaggcaggttctgataccgacgttgaggagggtaaagcccctcaagccgtgcctctggagaaatcccaggcatctatggtcatcaatagtgacaccgacgacgaggaggaggtcagcgcggctcttaccctcgcccacttgaaggaatcccaacctgccatttggaaccgcgatgctgaggaggatatgccccaaagagtggtgttgctgcagagatcgcagacaactactgagagggactcggacacggatgttgaagaagaagagctcccagtcgagaatagggaggctgttttgaaggatcataccaagatcagagccctggtgcgggcacattccgagaaggaccagcccccattcggggactctgacgacagtgtggaagccgacaagtccagtccagggatccatttagagagatcacaggcatcgactactgttgacattaacacccaagtcgagaaagaagtgccaccagggtctgctatcatacatatcaagaagcatcaggtgtctgtcgagggaactaatcagaccgacgttaaagcagttggcggacctgcgaaactactcgtggtgtctctggaggaagcgtggccccttcacggagattgcgagacagacgcagaggaaggcaccagcctgaccgctagcgtggtggctgatgtgcgcaagtctcagctgcctgcagagggggacgccggtgccgaatgggcggcagcggtccttaagcaggaacgcgctcatgaagttggtgcccagggcggtccacctgtggcgcaggtcgaacaggacctgcctattagccgcgagaatctgaccgacctggttgtggacaccgatacgctcggcgaatctacccagccccagcgagagggcgctcaggtgcctacgggcagggagcgagagcaacatgtagggggtactaaggactcagaagacaactacggtgattccgaagacctagatttacaggccacccagtgttttctggaaaaccaaggcttggaagccgtgcagagcatggaggacgagcctacacaagcatttatgcttaccccccctcaggaactggggccatcccactgcagctttcagacgaccggaaccctagatgagccttgggaggtgcttgccacccaaccattctgcctacgtgagtccgaggattccgagacacaacccttcgacactcacttggaggcatatggcccttgcctctccccgcctcgcgcaatccctggagaccaacaccccgagtcacctgttcacaccgagccaatgggtattcaggggagaggaaggcagactgttgacaaggtcatgggcatccctaaggagactgccgaaagggtgggccctgagagggggcctctcgagcgggaaacagagaaacttctgccagaacggcaaactgatgtgactggagaagaggaactcaccaagggtaaacaggaccgggaacagaagcagcttctggctagggacacccaacgacaggaaagcgataagaacggtgagtcagctagcccggaaagagaccgcgaatcactaaaagttgaaatcgaaacttccgaagaaattcaggagaaacaggttcagaagcaaacactgccttccaaggcattcgaacgggaggttgagcgccctgtggcgaatcgagaatgtgatccggcagagttggaggaaaaggtgccaaaagtcatccttgaacgggatacccagcggggtgagccagaaggagggagtcaagaccaaaaggggcaggcctccagcccaacccctgaacctggagtgggagccggtgatctgcctgggccaacatctgctccggtaccaagcggaagccagtcaggaggcaggggttctcctgtatcacccagacggcaccagaagggtctcctgaactgcaagatgccaccagccgagaaagcgtcgcggattagggcagcagaaaaagtatctagaggtgatcaagagtcaccagacgcgtgcttacctcccaccgtgcctgaagctccagctcctccccagaagccactgaacagtcaatcccaaaaacacctagcccctcctcctttgctatccccactcctaccatcaattaagccaaccgtccgcaagacacgacaagacggatcccaggaggcacctgaggcgcctctctcctccgaactggagcctttccatcccaaaccaaagatccggaccaggaagtcctccaggatgacaccgtttcctgccacctcggcagcccctaaacttgaaccgagcacctcaaccgatcagccagttaccccagagcccacctctcaggccaccagaggcaggacgaatcgctctagcgtcaaaacccccgagacagtcgttccgacggcacccgaactgcagccatcaacaagcaccgatcagcccgtgacacccgaacccacgagccaggcaacacgagggaggaccgacagatcctctgtcaagacaccagaaactgttgtgcctaccgccccagagctgcaggcatcagcatctactgatcagcccgtcaccagcgaacccactagcaggaccacaaggggcagaaagaaccgaagttcagtgaaaactccagaaacagtggtccctgcggctcctgaactgcagccgagtacctctactgatcagcccgtgacccccgagccgacgtctagggcaaccagaggacggactaatagatcctcagtcaagactcccgagagcatcgtccctatcgccccagaactgcagccgtcaacttccagaaaccagctggtcactcctgagccaactagcagagctacccgttgccgaaccaaccgctctagtgtgaaaactcctgaacccgtggtaccaaccgcgccagaaccccacccaacaacatccaccgaccagccagtgacccccaaattgacctccagagcgaccaggaggaaaaccaacaggtcttccgttaaaactcctaaacccgtggaaccagcagcatccgatctcgagcctttcactcccaccgaccaatcagtcactccggaagccatcgcgcagggagggcagtccaaaaccctgcgctcaagcactgtaagagccatgcctgtccccacgacacctgagtttcagtccccagtgacaacggatcagcctatctctcctgaaccaatcacccagccttcatgtataaagaggcagagggcagctggaaatccgggaagcttggccgcaccgattgatcacaagccctgttcagccccactagagccaaaaagtcaggccagcagaaatcagagatggggggctgtgcgggctgctgaatctctcaccgcaataccagagcctgccagtcctcagctgctagaaaccccaatccatgccagtcagatccagaaagtggagcccgctggccgtagtagattcacccccgaactacagccaaaagcttctcagtctcgaaaacgcagtctggccacaatggactctcccccacaccagaagcagccccagaggggcgaggtgtcacagaaaacagtaatcattaaggaagaagaggaggacaccgcagaaaagccgggtaaagaagaggacgtcgtgaccccaaagccgggtaagagaaagagagatcaggctgaggaagagcccaatagaatcccaagccggtcccttcgcagaactaagctgaaccaggagtccactgctccgaaggtcctcttcacgggtgtagttgacgcacggggagagcgcgcagtcctagccctgggagggtcccttgctggcagcgccgctgaggcgagccatttagttacagacagaataagacgcaccgtcaaattcctctgtgccctggggcgtggtatcccaattttgagcctcgactggctgcaccagtcccggaaagctggcttcttcctgccacctgacgaatacgttgttaccgaccccgaacaagaaaagaactttggatttagtctccaggatgctctgagccgcgctcgcgagcgacgtctcctggagggctatgagatttacgtgacacctggagttcagcccccacccccacagatgggcgagattatttcgtgctgcggtggcacgtatcttcccagcatgccgcgttcttacaagccacagagggtggtcatcacatgcccacaggacttcccacattgtagtattcctcttcgggtagggttacccctgctgtcccctgaattccttttgacaggcgttctcaaacaagaagccaaacccgaggcatttgtgcttagtccactggagatgtccagtacata

SEQ ID NO: 229947 - DNA, 4968 bp, synthetic construct
  misc_feature 1..4968: note = Description of Artificial Sequence: Synthetic coding sequence
  source 1..4968: mol_type = other DNA
atgtatcatagattggatgtaagcctccccttcgtatcacgcggtccactaacagtcgaggaaacccccagagtgcagggtgagacccagccccagcgactccttctcgctgaggacagcgaggaagaagtggacttcctctctgagagacgtatggtgaaaaagagccgaaccacatccagttccgtgatcgtgcctgagtccgacgaggaggggcatagcccagttttggggggattgggacccccattcgcctttaacttaaacagtgatacagatgtcgaggaaggacagcagcccgcaaccgaagaagccagctctgccgcacgcagaggcgcaacagtcgaggccaagcagtcagaagccgaagtcgttactgagatccagttagagaaagatcagccactggtcaaagagagagacaatgacacaaaggtgaaaagaggagcaggcaatggtgtcgtacccgctggtgtcatcctcgaacgaagccaaccccctggtgaggattcagacacagacgttgatgacgatagccgacctcccggaagacctgctgaggtgcacctggaacgtgcccagccctttgggttcatcgattcagacactgacgctgaggaagaaaggatcccagctacaccagtcgtcatcccaatgaagaaaaggaagatttttcatggcgtcggcacaagaggacccggagcacctgggctggcgcacctgcaggaatctcaggcgggatcagataccgacgtcgaagaaggcaaggccccacaggcggtgcctctggagaagagtcaggccagtatggtcatcaatagcgacacggatgatgaggaagaggtgtcagctgctctgaccctggcccacctaaaagaatcacagccagctatctggaaccgagacgcagaagaggacatgccccagagggttgttctgcttcagcgctcccagacaaccacagaacgcgatagcgatactgacgtggaagaggaagagttgcctgtggaaaaccgcgaggcggtgttgaaagatcatactaaaatcagagcgttagtacgcgctcactctgagaaggaccagcctccattcggcgacagcgatgactccgtcgaggcggataaaagtagccccggaattcacttggagagatcacaggctagcactacagtcgatatcaatactcaggtagagaaggaagtgccgcctgggtccgccattatccacataaaaaagcatcaggtgagtgtggaggggactaatcagaccgacgtgaaggcagtgggtggcccagcgaaactgctggtggtcagcctggaggaggcatggcctctccacggcgattgtgagacggacgccgaagaggggacatcacttaccgcaagtgtggtggcagatgtgagaaaaagtcagctgccagcggagggcgatgccggtgcggagtgggccgctgccgtcttaaaacaggagcgggcacatgaggtgggggcacagggtggacctccagtcgcacaggtggaacaggacctaccaatttctagagaaaatctcacagatctggtagtcgacactgatacactcggtgaaagcactcagccccagagggaaggtgcacaggttccaaccgggagagaacgtgaacagcatgtagggggaacaaaggactcagaggataattatggcgatagcgaggacctcgacctccaggcaacccagtgcttcctggaaaatcaggggctggaagtgcagagcatggaagatgaacctacccaggcattcatgctgactccgccacaagaactggggccttcccactgcagcttccaaacaaccggcctgctgaactgtaaaatgccccctgcagagaaagcttcaagaatccgggctgcagagaaggtgagcagaggtgatcaggaaagcccagacgcctgtcttccccctaccgtccccgaggcccctgcaccaccccagaaacctctgaattctcagtcccagaagcacttagcaccaccacctctgcttagccctctactgccctcaatcaagcctacagtgcggaaaacccggcaggacgggagtcaagaggcccctgaagcaccactctctagtgaactcgagccgttccaccctaaaccgaaaatccgtacacggaaaagtagccgcatgacacccttcccggctacttccgcagctcccgaacctcacccctctacttcaacagctcagcccgtgacgcctaagcccacctcccaagccactaggagccgaacgaatcgctcctctgtaaagacacctgaacctgtcgttcctacggcgccagaactgcagccatcaacctctacggaccagcctgtcactagtgaacccaccagtcaggtaacgaggggacgaaaatcacgcagcagtgtgaagacacctgaaaccgtggtcccaacggcacttgaactacagccgtccacctccactgatcgcccagtaacaagtgagcctacaagccaagccactcggggaaggaagaaccggtcttccgttaagacacctgaacctgtggtgccgactgcaccagagctccaacctagcacaagcactgatcaacccgtgactagcgagcccacttatcaggctacgcgcggacggaagaatagatcctcagtgaagacgccggagccggtggttccgacagctcccgagctgagaccaagcacatcaacagatagacccgtcactccgaagcccacatcgcgcaccactcgcagcagaacaaacatgtcttcggtcaaaaaccccgaatctaccgtgcccatagctcctgaactccccccttccacctccacagaacagccggtaactcctgagcccacaagtagggctacacgcggacggaagaatcggtcatctgggaaaacccccgagacactcgtgccaaccgcacctaaactggagcctagtacctcaaccgaccagccagtgaccccggaaccaacatctcaagcaacacgcggtagaaccaaccgatccagtgtgaagacccccgaaaccgtggttcccacagctcctgaattgcaaccctcaacgagcacagaccaacctgtgactcccgagcccacctcccaggcaacacgagggagaacagaccggtcaagtgtgaagacacccgagacagtggtgccaaccgccccagagttacaagcatctgcttcaactgaccaacctgtcacttccgaacccactagtaggaccacccgcggtaggaagaaccgcagcagcgtcaaaacacctgaaaccgtggtgcctgctgcgcctgagctccagccatctacatctacagatcaaccggttacaccagaaccaacctctcgggcaacaaggggtcggactaacaggagcagcgtgaagacccccgaaagcatcgttcccattgctcccgagttgcagccatccacaagcaggaatcagctcgtgacacctgaaccgacaagtcgcgctacaagatgtagaaccaacaggtccagcgttaagacacctgaacctgtcgtcccgacagcgccagagcctcatcctacaacctctaccgaccaacctgtaacacctaagctaacaagccgggcaactaggagaaagacaaaccgaagctcagtgaagacacctaagcccgttgaaccagccgctagcgatctggaaccgtttacgcctactgatcagtccgtgacccccgaagctattgctcaaggtgggcagagcaagactctgcgttcgtctaccgtcagggctatgcctgtgcccacaactcctgagtttcagagtcctgttaccaccgatcagcccatcagtcctgaaccgatcactcagcccagttgcattaaacggcagagggctgcaggcaaccccggatccctagccgctcccatcgaccacaagccatgttccgccccactggagcctaaaagccaggctagcagaaaccaacgctggggtgcagtacgcgcagccgagtccctgacggcaattcccgagcccgcaagtcctcagctgctggagacccctatccatgcctctcagatacagaaggtggaacccgctgggcgttccagattcacaccagagctccaaccaaaggctagccaaagcagaaaaaggtccctcgccactatggatagccctccacaccagaaacaaccgcagcggggagaggtgtcacagaagacggtgatcattaaagaagaggaagaggacactgccgaaaagccaggtaaagaagaagatgtggtcacccctaagccgggaaagagaaaacgggatcaggccgaggaggagcctaatcggatccctagcagaagtttgagacgaacaaaattgaaccaggagtccacagcccctaaggtgctgttcaccggggtggtagacgccagaggggaaagggccgtgctggccctaggaggctcgttggccggatccgcagctgaggccagccacttggtgactgatcgcattagacgaactgtaaagtttctttgcgccctcgggagaggaatacccatcttaagcttggactggctccaccagagtcggaaggccggttttttcttgccacctgacgagtacgtcgtgaccgacccagagcaggagaagaatttcggattctcacttcaggatgccctgagccgcgctcgtgaacgcaggctgttagagggatacgaaatctacgttacacctggagtgcaacctccccctcctcagatgggggaaattatatcctgctgtgggggtacttacctcccatccatgcctagaagctacaagccgcaaagggtcgtgatcacctgcccacaggattttcctcattgttcaatacccttacgggtcggcttaccccttcttagccctgagtttttgctgactggagtgcttaaacaagaggccaaaccggaagcgttcgtcttgtcacccttggaaatgagttcaacatag

SEQ ID NO: 229948 - DNA, 5408 bp, synthetic construct
  misc_feature 1..5408: note = Description of Artificial Sequence: Synthetic coding sequence
  source 1..5408: mol_type = other DNA
atggaggacacccaagccattgattgggacgttgaggaagaagaggaaaccgaacagagttccgaatcccttcggtgtaacgtggaaccagtgggccgactgcatatattctcaggcgcacacggtcccgagaaagatttccctctgcacctggggaaaaatgtggtcggtcgaatgccagactgcagtgtcgccctacccttcccatcaattagtaagcaacatgcagaaatagagatcctggcgtgggacaaagctccaatccttagagattgtggtagcctgaacggtacccaaatcctgagaccaccaaaggtcctgtctcccggtgtcagccataggctgcgtgatcaggagctcatcctgttcgccgacctgctctgccagtatcatcgcttggacgtttctcttccgtttgtgagtaggggcccactgacagtggaggagacgccaagagtccagggcgaaactcagccacaacggctcctgctggccgaagatagtgaggaagaagttgactttctcagtgaaaggagaatggtcaaaaagagtcgaaccacatcatctagcgtcatcgttccagagtctgacgaagaggggcattctcccgtgcttggtgggctgggacctccgttcgcttttaatttgaactccgatacagatgtagaggaaggacagcagccagctacagaggaagcttccagcgccgcaagacggggagcaacagtggaagccaagcagtcagaagctgaggttgtaaccgagatccagctggagaaggatcagcccctggtgaaagaaagggacaacgacacgaaagttaaaagaggtgccggaaacggggtggtgcccgctggcgtgattctcgaacggtcgcagccacctggtgaggatagcgacaccgacgttgatgacgatagtcgtcctccaggcagaccagcagaggtgcacttggaaagggctcagccatttggctttatcgattcagatacggacgccgaggaggagagaatacccgctaccccggttgtgattcctatgaaaaaaagaaagatttttcatggagtgggcactaggggaccgggagccccaggcctggctcacctgcaggaatcacaggcagggagcgacacagatgttgaagagggcaaggcccctcaagcagtccccctggaaaagagccaagcctctatggtgattaactctgatacagatgatgaggaggaagtcagcgcggcattaactttggcacacttaaaggagagccagcctgcgatttggaatcgggatgccgaagaagatatgccgcagagggtggtgctactgcagaggagtcagaccaccaccgagcgagactcagatacggacgtagaggaggaagaactcccagtggaaaatcgagaggcggtactgaaagatcatactaaaatccgcgctttagtgcgggcacatagcgagaaagaccaacctcctttcggggacagcgacgactctgtagaggctgataagagctctccgggtatccatttagaaaggagccaggccagcactacagtggatataaatacacaggttgaaaaagaagtgccaccgggatctgcaatcatacatattaagaaacatcaggtgtcagtggagggaactaatcagaccgacgttaaagccgtcggaggaccggctaaattgctggtcgtgagcctcgaagaggcctggcctctacatggggactgtgagactgacgctgaagaaggcacctcccttaccgctagcgtagtagccgacgttcggaagagtcaactgccagccgagggagacgccggagcagaatgggctgccgcagtactgaaacaagagagagcccacgaggtgggcgctcagggcggacccccagtggctcaggttgagcaggacctgcccatttcaagagagaacctgactgaccttgtcgtggacacggatacgctaggtgagagtacccagcctcagcgggaaggagcacaggttcctactggacgggaaagagaacagcatgttgggggaacgaaagatagcgaggataattatggtgattccgaggacttagacctgcaagccacccaatgttttctggagaatcaaggcctcgaggcagtacagagtatggaggatgagcccacacaggcattcatgctcacgcccccacaggagttaggaccttcccattgttccttccaaactaccgggacccttgacgagccttgggaggtgttggccacccagcccttctgcctgagagagtccgaggactccgaaacacagccattcgacacacacctcgaagcatacggtccgtgcctctctccaccccgtgctatacctggggatcagcatcctgaaagccctgttcatacagaacccatggggattcagggcagggggagacagacagttgataaagttatgggtattcctaaagagactgcagagagagtggggccagaacgaggacccctagagcgcgaaactgagaagctactccctgaaaggcagaccgatgtgaccggcgaagaggagctcacaaaaggcaaacaggacagggaacagaaacagttgcttgcccgagatactcaacggcaggagtccgataaaaacggtgagtccgcctcaccggaacgggaccgagagtccctgaaggttgagatcgaaacaagcgaagagatccaggaaaagcaggtacaaaaacagactttgcctagcaaagccttcgagcgcgaggttgagcggcctgtggctaatagggagtgcgaccctgcggaactggaggagaaggttcctaaagtcatcttagagcgggacactcagaggggcgaacccgagggaggaagccaagatcagaaaggccaggcttcctcgcccacaccagaaccaggtgtcggtgccggagacctacccggacctacctcggccccagttcctagcggcagccagtccggcggtagagggagcccggtgtcgcctcgacgtcaccagaagggcctgctgaactgcaagatgcctccagccgagaaagcaagccgaatccgggcagccgagaaggtttcaagaggcgaccaggagtcacctgacgcctgtctcccacccaccgttcccgaggcacccgctccacctcaaaaaccgttgaattcccagtcacaaaagcacctcgctccacctcctctcctgtcgccactccttccctccatcaagcccaccgtcagaaagactagacaagatggatcccaagaggcgccagaggcccctctgagtagcgagctagaacctttccaccccaagcctaagatacgtacgcgcaaaagttcccgcatgaccccattcccggctactagcgctgcccctaaacttgaaccttctacatccacagatcagcctgtcactcccgagcccacatcacaggccactcggggaagaactaatcggagcagtgtcaaaactccagagaccgttgtccctacggccccagagctccagccatctacaagtaccgaccagcctgtgacccctgagcccaccagtcaggcaacacgcggtagaactgatcgctcatcagtcaagaccccagaaacggtggtgcccactgcaccagagctgcaggctagcgcgtccactgaccagccggtaacaagcgagcccacctctagaactactcgaggtaggaagaaccgaagtagtgtgaaaacaccagagactgtcgtcccggctgccccagaactacagccaagcacatctacagatcagcccgtgacacccgagccaacatctagggccacgcggggacgtactaaccgttcctccgtgaagacgcccgagagcattgtcccaatcgcccctgagctgcagcctagcaccagccgcaaccaactcgttactcctgaacctaccagccgcgctacaaggtgcaggactaaccggtctagcgtgaagacacctgagcctgtcgtgccaactgccccagaacctcacccgaccacctctactgaccagccagtgactcctaaattgacatcaagagccaccaggaggaagaccaataggagcagcgttaaaacccccaagccagtcgaacctgccgcttccgacctagaaccttttacacctacggatcaatcggtaacccccgaagcaatcgctcaggggggacagagtaagaccctcagatcttcaacagtgagagccatgccagttcctactaccccggagttccagagccctgtgaccactgatcagccgatttcgcccgagcccataacccagccatcttgcatcaaacgacagcgggcagctggcaaccctgggagccttgcagccccaatcgatcacaaaccctgctcagctccccttgagcctaagagtcaggcgtccaggaaccaaaggtggggcgctgtgcgggcagctgagtccttgacagccatcccagagccagcttctccacagctgctggaaacaccgatccatgcgagccaaatccagaaggtggagcccgcaggccgttctcggttcacccctgaactgcagccgaaagccagtcagtcaagaaagaggtccctcgctaccatggatagccctccgcatcagaaacagccgcaaaggggggaggtctcacagaagacagtgataatcaaggaagaggaggaggacaccgctgagaagcccggtaaggaggaagatgtagtgacccccaagccgggaaagcgaaagcgcgatcaggctgaggaggagcctaatcggattcccagccgatccctcagacgcaccaaactgaatcaagaaagtaccgctccaaaagtgttgttcaccggcgtggtcgatgctaggggtgaaagagcggtgctggccctgggaggcagtcttgccggttcagccgctgaagcctcacacttggttaccgatcgcatccggagaaccgtgaagtttttatgcgcgcttggcaggggcattcctattttgtccttagactggctacaccagtcgaggaaggctggtttcttccttcctcccgatgagtatgtcgtgactgacccagagcaagagaaaaattttggattttctctgcaggacgcgcttagcagggccagagaacgacgcctgttggaggggtacgaaatctacgtgacccccggagtgcagcctcctcccccacaaatgggggagatcattagttgttgtggcggtacctatttaccttccatgccacgcagctataagcctcagagggttgttattacctgcccccaggacttccctcattgttccataccgttgagagtcgggttgccattgctctcccccgagtttttgctcaccggcgtacttaaacaggaggcaaaaccggaagcttttgttctgtcgccgctcgaaatgagcagcactta

SEQ ID NO: 229949 - DNA, 666 bp, synthetic construct
  misc_feature 1..666: note = Description of Artificial Sequence: Synthetic coding sequence
  source 1..666: mol_type = other DNA
atggaagacacccaggcaattgattgggatgtcgaggaggaagaagaaacagagcagtcgtccgaatctttgcgttgtaatgtggagccggtgggaaggctccatatcttcagtggtgcccatgggcctgaaaaagattttcctttgcacctggggaagaatgtggtgggcaggatgcctgactgctctgttgcgttaccctttccctccatatctaagcagcacgccgagatagagattcttgcatgggacaaagcgccaatactgagggactgcggtagcctgaatggtacccaaatcctctccagcagcttgcctccacctcagacctccctgctgccactctctttgagacttaggcttcttggcgaggagcaaatagaccccctgagcagattgcttaaacaactgagtccacagcctctcagctacagactgccaccccctcaaacaagtctgtcaccactgtctccgcacctgggtccgttgggtgaggagaaaatcggcccactgtcacggcctctgaaacagctgtgcccccagccgctcagatcaagtctcccgccacctcagacaaacctgtccccacttagcccccacctggggccactgggagctggtcaaatcggccctttaagccgccctctgaaccaactgtctctgtag

SEQ ID NO: 229950 - DNA, 666 bp, synthetic construct
  misc_feature 1..666: note = Description of Artificial Sequence: Synthetic coding sequence
  source 1..666: mol_type = other DNA
atggaagatactcaagccattgattgggacgttgaggaggaagaggagacggagcagagcagtgagtctctgaggtgcaatgtcgagcctgtggggaggctgcatatcttctccggcgcacacggtccggagaaggacttccctctgcatctgggcaaaaacgtggtaggtcgcatgcccgattgctccgtggccttaccatttcctagcatctctaagcaacacgcagaaattgagatcctcgcatgggacaaagcgcctattctcagagactgtggctcactcaacggcacccaaattctgagctcgtcgttaccgcctcctcagacttctttgttgccactctctctccgcctgcgcctgctgggcgaggagcagattgatccattgtcccggctgcttaagcaactgagtcctcagcctcttagctaccggctccctccaccccaaacgtctctcagtcctttgagcccacacctgggccctttgggcgaggagaaaatcgggccactgtcacgccctttaaagcaactgtgccctcagcctctgagcagcagcctgccaccaccacagacaaatttatcaccactgagcccccacttaggaccactgggggcaggacagattggtcccctatcacgccctttgaaccaattaagcctgtag

SEQ ID NO: 229951 - DNA, 738 bp, synthetic construct
  misc_feature 1..738: note = Description of Artificial Sequence: Synthetic coding sequence
  source 1..738: mol_type = other DNA
atggaagacacccaggcaatagattgggacgtcgaggaagaggaagaaactgagcaatcttcagagagtctccgttgtaatgtggagcctgtgggtagactgcatatcttcagcggtgcacacggcccagagaaagatttccctctgcaccttggtaaaaacgtggtcgggaggatgccagactgcagcgtggctctgccatttccatcaatcagtaaacagcatgccgagatcgaaattctcgcctgggataaggccccaattcttagagattgtggttcactcaatggcacgcagatactcagacctcccaaggttctgagccctggggtgtcccatagactacgcgaccaggagctgatactgtttgccgacctcctgtgccagtatcatcgcctggatgtgtctttaccgtttgtatcccgcggaccattgactgttgaggagacacccagagtccagggtgagacgcagccccagcgactgctgctggccgaggattccgaggaagaggtggactttctcagcgagcggcgaatggttaagaagagccgtactacatcttcttccgtgattgtccctgagtcagatgaggagggacactctcccgtcctgggaggactgggcccaccctttgcctttaatcttaatagcgatactgacgtggaagagggccagcagcccgcaacagaggaggccagcagcgccgctcgacgcggtgccacagtggaagcttag

SEQ ID NO: 229952 - DNA, 5477 bp, synthetic construct
  misc_feature 1..5477: note = Description of Artificial Sequence: Synthetic coding sequence
  source 1..5477: mol_type = other DNA
atggaggatacacaggctatcgattgggatgtggaggaagaggaggaaacagaacaatcctcagagtcactgcgatgtaacgtggagcccgtcgggagactgcatattttcagtggcgcacacggaccagagaaggattttccactgcatttggggaagaatgtagttggcaggatgcctgattgttcagtggcacttccctttccttcaatctcaaagcagcatgcagaaatagaaattctcgcctgggataaggcacctatcttgagagactgtggctcattgaacggcactcagatcctacgccctcctaaagtgctgtctcccggtgtgagtcacaggctacgcgatcaggagctgatcttgttcgccgatttgctgtgccaatatcacaggcttgacgtaagcctgccattcgtgagcagaggaccactgaccgtcgaggaaacacctcgcgtgcaaggcgagacccagcctcagaggcttctactagccgaagactcagaagaagaggtcgattttttatctgagcgcagaatggtgaaaaaaagccgaactacatcaagcagcgtgatcgtgccagaatcagacgaggagggccactctccagtgctggggggtttgggcccacctttcgccttcaacctcaatagcgacactgacgtggaggagggacagcagccagctacggaagaggccagctctgcagcccgtagaggggcaaccgtggaggcaaaacaatccgaagccgaggtcgtgactgagatacagctagagaaggatcaacccctagtcaaagagagggataacgacacgaaagtaaagaggggagccggtaacggcgtggtccccgcaggagtcattctcgaaagatctcagccacctggagaagactctgataccgatgttgatgatgattcccggccacctggcagaccagcagaggtgcacttggagcgggctcagccattcggcttcattgatagcgacaccgatgccgaggaagagagaatcccggctactcctgtggtgatacccatgaaaaagcgcaaaattttccacggtgtgggcacccggggaccaggtgcaccgggactggcacatctccaagagagtcaagcaggctcagataccgacgtggaggaggggaaggctccccaggctgtgccgcttgagaagtcacaggcctcaatggtcatcaactccgatactgacgacgaggaagaggtgagtgccgctctgacactggcacacctcaaagaaagtcaacctgccatctggaacagggacgccgaagaagacatgcctcaaagagtcgtcctactccaaaggtcacaaactacaaccgagagagatagtgacactgacgtcgaagaggaagaactgccggtggaaaaccgggaggctgtgttgaaagatcacaccaagatacgcgctctcgtgagggctcactccgagaaggaccagccgcctttcggcgatagtgacgattccgtagaggcagataagtcttctcccggaatacatttagagcgatcgcaggctagtacaaccgtggacatcaacacccaggtcgagaaagaagtccccccaggcagcgccattatccatatcaagaaacaccaggtgagcgtagaggggacaaaccagacagacgtcaaggccgtcggagggccagccaaactgctcgtagtgagccttgaagaagcatggcctctgcatggggactgtgagacggatgcggaggagggaacctctttgaccgctagtgtggtagccgacgtgagaaaaagccagctgccggcagagggagacgccggtgctgaatgggccgctgctgtgctgaagcaggagcgggctcacgaagtgggtgctcagggaggaccgccagtagcccaggtcgaacaagatctgcccatttcaagggagaacttgacagatctagtcgtcgacacagataccttgggcgaatctacgcagccacagcgcgagggagcccaggtaccaacaggcagagagcgagaacagcacgtcgggggaacaaaagactccgaagacaactatggggacagtgaggacctcgaccttcaggcaactcagtgtttcctcgagaaccaaggactggaggccgttcagtcaatggaagacgagcccacccaagccttcatgcttaccccaccacaagagctagggcctagtcactgtagtttccagacaaccgggctcttgaattgtaaaatgcctcctgccgaaaaggccagtcgaatcagggctgccgaaaaggttagtcggggagatcaggaaagcccagatgcttgcctgcctccaaccgtgccagaggcgccagcccctcctcagaagccactgaattcccagtctcaaaaacacctggccccacctcctttactgagtccactgctgccttcaatcaagcctaccgtgagaaagacacgtcaggatggcagccaggaagcccctgaggcgccactgagcagcgaactggagcctttccatcccaagcctaaaatccgtactaggaagagttcaagaatgactcccttccccgctactagcgccgctccagagcctcatcccagcactagcacagcacaacccgtgacaccaaagcccactagccaggctacaaggagccggaccaatagaagttcggtgaaaacgccagagcctgtggttcctacagccccagagctgcagccttctacgtctaccgatcagcctgtcacatctgagcctacctcacaggtcacacgagggaggaaatcaagatcatcggtgaagacgccagagacagtggttccaacagccctggaattgcaaccctccacgtcaacggatagacccgtgacgagcgagcctaccagtcaggctactcgcggtcgtaaaaatagaagctccgtgaaaactcctgaacccgtggtcccaaccgcccctgaactccagccttccacttctaccgaccagcccgtaacctccgagcctacatatcaggccactaggggcaggaaaaataggagcagcgtcaagacccccgagccagtcgtccctactgcccctgaacttcggccttccacgagcaccgacagacccgtgacacctaaaccaacatctcggaccaccagatcccggaccaatatgagttctgtgaagacaccggaaacagttgttcctactgcaccagagttgcaaatctcaacttcaacagaccaacccgtcacacctaaaccaacttccagaaccactcgttcaagaacgaacatgtcaagtgtgaagaaccccgaaagtaccgtgcctatcgcgccagaactgccccctagtacgagtaccgaacaacctgtgactccagaacctacaagccgggctacccggggacggaagaataggtcctccggtaaaacaccagaaacactggtgccaaccgcgccaaagctggaaccgtcgacatccactgaccagcccgtgacacccgaaccgaccagccaggctacccgtggaagaacaaaccggagcagcgtcaaaaccccagagaccgtcgtgccgaccgctccagaattacagccctctacctccactgaccaacctgttacacccgagcctacaagccaggcgacgaggggccgaaccgacaggagtagcgtgaagacaccagagacagttgtgccaacagcacccgaactccaggcgagtgcgagcaccgaccagcccgtgaccagcgaacctacctctagaaccacacgtggtcggaaaaaccgctcctccgtcaagactcctgagactgtggtccctgccgcaccagagctgcagccttccacctcgactgaccagccagttacccctgagccgacctccagggccactaggggcaggactaatcgctcatccgttaagaccccggaaagtattgtaccaattgcccctgaacttcagccctccacatctcggaatcagctggtgacgcctgagcctacatccagggccacaagatgccgcacaaatcggtcctccgtgaaaactcctgaaccagtggtgccaactgctccagagcctcacccaaccaccagcaccgaccagccggtgaccccaaagctgacttctcgcgctactcgcagaaagaccaacagatcttctgtgaagacacctaaacccgtggagcccgcagccagcgaccttgagccctttacccccactgaccaaagcgtgacaccggaggcaattgcccagggcggacagtcaaagacactgcgctcttctaccgtccgcgctatgcctgtccccaccacacccgaatttcaatctcctgtcaccaccgatcagcccattagccccgaacccattacccagccgtcctgcattaaacgccaacgggcagccggtaaccctgggtctttggcggctccaatcgaccacaagccgtgtagcgccccactagagcctaaaagtcaagcctcccgtaaccagcgatggggtgccgtcagggccgctgaaagcttgacagctatcccagaacccgcttcccctcaactccttgaaacgccaatccatgccagccaaattcagaaggtggagccggcagggaggagcagatttactccggagctgcagccaaaagcttcccagagcagaaagaggtccctggctacaatggacagcccaccacaccaaaagcaaccccaaaggggagaagtatcacaaaagacagtgatcataaaggaagaagaggaagacaccgccgagaagccaggtaaagaggaggacgtggtgactcccaaaccgggtaagaggaaaagggatcaagcagaggaggaacccaatagaattccatcccgtagcctgcgacggacgaagttaaaccaggaatctaccgctcctaaagtgctgttcactggggtggtggatgcaaggggggagcgtgcagtactggctctgggcggatccctggctggatctgctgccgaagcgtctcaccttgtgacagacagaatcaggcggaccgtcaaatttttgtgtgccttgggcagaggcatccccatcctgtctttagattggctgcatcaaagccggaaggcaggattctttctgccgccagacgaatacgttgtaaccgacccggagcaggaaaagaactttggtttcagccttcaggatgccctatcacgggctcgtgaacggagactgctggaggggtatgagatctacgtgactcctggggtgcagcctcccccaccacaaatgggcgagataattagctgctgtggcggaacatacttaccctctatgcccagatcttataagccccagcgggtagtgatcacatgtccgcaggattttcctcactgcagcattcccctcagggttggactgccactgctctccccagaatttcttcttacaggggtgcttaagcaggaggccaaacccgaggccttcgtgttgtcacccctagagatgtccagcacata

SEQ ID NO: 229953 - DNA, 735 bp, synthetic construct
  misc_feature 1..735: note = Description of Artificial Sequence: Synthetic coding sequence
  source 1..735: mol_type = other DNA
atggaagatacacaagctatcgattgggacgttgaggaggaggaggagaccgagcagtctagcgaatctcttcgctgtaacgttgagccagtggggagacttcacattttttccggcgctcacggtcccgaaaaagattttcctctacatctgggcaaaaatgttgtgggcaggatgccggactgctccgtagcccttccctttccgagcatcagtaaacaacacgccgagatcgaaatcctcgcttgggacaaggctcccatcctccgggattgtgggtccctgaacggcacacagattttgcggcctccgaaagtcctaagtccgggagtcagccatagattgagagaccaagaactaatcctttttgctgacctgctctgtcaatatcataggctcgacgtatctctccctttcgtgagccgagggccactgacagttgaagaaacaccaagagtgcaaggtgagacgcagccacagaggctcctactagcagaagatagcgaggaagaagttgattttctgtcagagcgtaggatggttaagaagagccgcaccacttccagctcagtaatcgttcctgaatcagatgaggaggggcacagccctgtcctgggcggactcggcccacccttcgccttcaatctcaacagtgacactgatgttgaggaaggacagcaacctcaccgcggtggcctcctgtcctgccagaaacgttgccactgccggggttag

SEQ ID NO: 229954 - DNA, 735 bp, synthetic construct
  misc_feature 1..735: note = Description of Artificial Sequence: Synthetic coding sequence
  source 1..735: mol_type = other DNA
atggaggacacccaggctatcgactgggatgtcgaagaagaagaggaaacagaacaaagctccgagagcttgcggtgtaatgttgaacctgtcggtaggctgcacatcttctccggtgcacatggaccagagaaggactttccgttgcatctgggaaagaacgtagttgggcgtatgcctgactgcagtgtggctctgcccttcccaagcatctcaaaacagcacgcagaaatcgagattctggcatgggataaagcacccatcctgcgggattgcggctctctgaacggcacacagatcctgcgcccaccaaaagtcctcagccccggtgtttctcacaggctgcgggaccaggaattgatcctattcgcagatcttttatgccagtatcaccgtctggatgtttccctcccattcgtgtcaagaggtccattgaccgttgaggagacaccacgagtccagggagaaactcaacctcagagactgctcttggcggaggatagtgaagaggaagtggacttcctgagcgagcggcgtatggtcaaaaagagccggaccacatctagttctgtcatcgtgcccgagagcgatgaggagggacactcccctgtgctcgggggactcggcccacccttcgctttcaacttgaatagtgacacagacgtcgaagagggacaacaacctcaccgcggagggctcctttcctgccaaaagcgctgccactgtaggggatag

SEQ ID NO: 229955 - DNA, 666 bp, synthetic construct
  misc_feature 1..666: note = Description of Artificial Sequence: Synthetic coding sequence
  source 1..666: mol_type = other DNA
atggaggatacgcaagccatcgattgggacgtggaagaggaagaggaaacggaacagagcagtgagtctctccgctgtaacgtcgagcccgtcggcaggctgcatattttcagcggtgctcacgggcctgaaaaagatttccctctgcatttaggtaagaacgtggtgggaagaatgcctgactgcagtgtggccttgccattcccgtctatctccaaacagcatgctgaaatcgaaattctggcctgggacaaagcgcctatactcagggattgcggtagtttgaacggaacacagatcctttcatcgtctctgcccccacctcaaaccagcttgctccctttaagcttgaggctccgccttcttggtgaggaacaaattgaccctctcagccgacttctcaagcagctgtcgcctcagcccctcagctaccgattaccacccccacagaccagcttatcaccactgtctccccatctgggccctttgggcgaagaaaagatcggccctctgtctcgcccactcaagcagctctgcccccagccactttccagttccctgccccctcctcagacaaacttatcacctctgtcacctcacttgggccctctgggtgccggacagataggacctctttcgagacctctcaaccaactcagcctgtag

SEQ ID NO: 229956 - DNA, 666 bp, synthetic construct
  misc_feature 1..666: note = Description of Artificial Sequence: Synthetic coding sequence
  source 1..666: mol_type = other DNA
atggaggatactcaggctattgattgggatgtggaagaggaggaggaaacagagcagagctctgaatccctgcgatgcaatgtcgagcccgtgggacggctccatatcttttcaggagcacacggccctgaaaaggactttcccttgcatctgggaaaaaacgtggtgggacggatgcccgattgctccgtggccttaccatttccgtctatctccaagcagcatgccgagattgaaatccttgcctgggataaggctcccatcttgagagactgcgggtcactgaatggaacccaaattctgtccagcagcttaccacctccacagaccagtctgcttcctctgtccctgcgcttaagattgctgggggaggaacagatcgacccgctcagcaggctcctgaagcagctgagcccccagcccttgtcctatcggctgcccccaccacaaacctcgttgagccccctgtcgccgcatctcggcccactgggagaagaaaagataggtcctctctctagacctcttaagcagttgtgtcctcagcccctctcttctagcctccctcctccacagacaaacctgtctccactgagtcctcacctcggcccactgggcgcaggtcagattggaccgctctccagacctctcaaccaactgagtttgtag

SEQ ID NO: 229957 - DNA, 5477 bp, synthetic construct
  misc_feature 1..5477: note = Description of Artificial Sequence: Synthetic coding sequence
  source 1..5477: mol_type = other DNA
atggaggacacccaggctatcgactgggatgtggaagaagaggaggaaactgagcagtctagcgagagcctgaggtgtaacgtagaacctgtgggcaggctgcacatcttttcgggggcacacgggcctgagaaagacttcccgctgcacctcggaaaaaacgtagtcggtcgaatgccagactgtagcgtggcgttgccctttccatcgatctctaagcagcacgccgagatcgaaatacttgcctgggataaggcccctatcctgagggactgcggtagcctcaatggaactcagatcctgaggcccccaaaagtgttgtccccaggagtgtctcatagacttcgggaccaagaactgatcctttttgcagatttgttgtgccagtaccatagactggatgtgtctttgccttttgtcagcagagggccactcacagtggaggagacgcccagagtgcagggggagacacagccccagcggctcctcttggccgaggacagcgaagaggaggtggatttcctttccgaacgtcgaatggtaaaaaagtctaggactaccagctcctccgtcatcgtacccgagagcgacgaggaggggcacagcccagtcctcggtggcctagggccaccctttgctttcaacctgaatagtgacacagatgttgaggaggggcagcaacctgctaccgaagaggcatccagtgcggctagaagaggtgcaacggtagaagcgaagcaaagcgaggccgaagtcgtcacggagatacagttggagaaggatcagccccttgtcaaggagcgggacaatgacaccaaagtgaagagaggcgcagggaacggcgtggtccctgcaggcgtaatacttgagcgcagtcaacctcctggcgaagattccgacacagatgtcgatgacgatagcaggccacccggacgccctgctgaagtgcacctagagagggcacagccattcgggttcattgacagcgacactgacgccgaggaggagcgcattccagcaacacctgtcgttattccaatgaagaagaggaagatcttccacggtgtgggcaccagggggcctggcgctccgggtctggcccatctgcaggaaagccaggcgggtagtgataccgatgtggaggaggggaaagcccctcaggccgtaccactggagaagtcccaggcaagcatggtaattaatagcgatactgacgacgaagaagaggtgagtgctgccctgaccctggcccacctgaaggaatctcagcccgcaatttggaacagagacgccgaggaagacatgccccagcgcgtggtcctgcttcagcggtcgcaaactactacagagcgcgactccgatactgacgtagaggaagaggagctccctgtagaaaatcgagaagcagtgctgaaagaccacaccaagatccgggcattggtcagggctcattccgagaaagaccagcccccatttggcgatagtgatgactccgtggaggccgataagtcttctccgggaatccatctggagcggtctcaagccagcactacagtcgatatcaatactcaggtggaaaaggaggttccccctggcagcgctattatccatatcaagaagcaccaggtgagcgtcgaggggacaaaccagacggacgtgaaggctgtaggtggccctgccaagctactcgtggtatccctggaagaggcctggccccttcacggggactgcgagacagatgcagaagagggtacatctctcaccgccagtgtagtggccgacgttcgaaagagccagttgccagcggaaggggatgctggagctgaatgggcggcagccgtgctgaaacaggagcgcgcacatgaagttggagcccagggcggtcccccagtggcacaggtggagcaggatctgcctatttctagggaaaatttaaccgacctcgtagtcgataccgacaccctgggggaaagcacgcagccacagcgggaaggtgcccaagtccccaccggaagagaaagggaacagcatgtgggcggaactaaggatagcgaggataactatggtgactccgaagacttagatctgcaggcaacccaatgttttctggaaaaccagggtcttgaggctgttcaatctatggaggatgaaccaactcaagcattcatgttgacacctccccaagaattgggtccttctcactgcagctttcaaaccaccggcctccttaattgcaaaatgcctccagctgagaaagcaagtcggataagggcggcagaaaaagtgtcgcggggtgatcaggagtcacccgacgcgtgtctaccaccaaccgtgcccgaggccccagccccaccacagaaaccattaaattcccagagtcagaaacatctcgcaccgccacccctcctatctccgcttctacctagcatcaagcccaccgtgcgcaagactcgacaggatggatcacaggaggcccctgaggcacctctctcaagcgagctcgagcccttccaccctaagcccaagattcggacccgaaagagctccagaatgacacccttcccagccacttcagcggctcccgagcctcatccctccacaagtactgcccaacctgtaacccctaaaccgactagccaagctactcggtcaagaacaaaccggtcttccgttaaaaccccagagccggttgtgcccacagctcccgaactccaaccctcaaccagtacagaccagccagtgacaagcgaaccgacctcgcaggtgacacgtggaaggaagtcgcggagtagcgttaagacccctgagactgtggtccctaccgctctggagctgcagcccagtacatccactgacagacccgtcacaagcgagccaacctcacaggccaccagaggccgtaagaacaggagctcggtgaagacgccagagcctgtggtgccaacagccccagagctccaaccctcgacatccaccgatcagccagtgactagtgaaccgacgtatcaggctaccagaggacgaaaaaaccgaagttctgtgaaaacaccagaaccagtagtcccaaccgctcccgaactgcgaccatctacaagtacagacagacccgttacgccaaagccaacctcccggacaacgagatcacgcaccaatatgtctagcgtgaagacacctgagacagtcgtgcccaccgcacctgaattacaaatctctacatccaccgatcagcccgtgacccccaaacctacctcccggactacacgttcccgcactaatatgagctcggtaaagaatcctgagtcaaccgtgccaattgcacctgaattacctccgtctacatcgacagagcagcctgtgactcccgaaccaacttctcgcgcaacaaggggccgaaagaatcgttcttccggaaagaccccggagactctggtacctactgcacccaagctagagccaagcactagcacagatcagccagtcactcctgaacctactagccaagccacccgtggcagaaccaacagatcttcggtgaagactcctgagaccgttgttcccacggctcctgaactgcagccctcaacaagtacggatcagcccgttacaccagagcctacttcacaggccacaagaggtcgaacagataggagttctgtaaagaccccagaaacggtcgtgcccaccgcacccgaactgcaggcatccgctagcacggaccagccggtaacaagtgagcccacgtcacggactacgagggggagaaagaataggtcaagtgtgaagacccccgagactgtcgtgcccgctgcacccgaactgcagcctagcactagcaccgaccaacctgtgactcctgaacctacgtcaagggctactcgtggacgcaccaataggtccagtgtgaagaccccagagtcaatcgtccctattgctccagaactccagccctctacctcaaggaaccagcttgtgacgcctgaacccacaagccgcgctactcggtgccggaccaaccggtctagcgtgaagactcctgagccggttgtgcccaccgcccctgagcctcacccaaccacaagcacagaccagcctgtcacacccaagctgacatccagagctacacggaggaagacgaaccgcagctctgtgaaaacacctaaaccagtggagccagcggcttcagatttggaaccttttacaccaactgaccagtctgttacgccagaagccatcgcccagggaggacagtctaagacattgcgtagtagcactgtccgcgcaatgcccgtgcccactacccccgaattccagtctcccgtgaccacagaccagccaatttctccagagcccatcacccaaccttcctgtataaagaggcagcgagctgccggtaatccgggatccctggccgcaccgatcgaccataaaccttgtagcgccccattggagcccaaaagtcaggctagtcgcaatcagcgatggggggctgtgcgtgcagcagagtctctcactgccattccagaacctgcctcacctcagctcctggaaaccccaattcatgccagccaaatccagaaggtggaacctgccggacggtctagatttacccctgagctgcagccaaaagcaagtcaaagccggaagcgtagcctcgctactatggactcaccgcctcaccagaagcaaccgcagcgcggagaagtttcccaaaaaacagtcattattaaggaagaggaggaagacacagccgaaaagccagggaaggaggaagatgttgtgacgcccaagccaggcaaacgcaagagggaccaggcagaggaggagcccaatcggatcccttctcgcagcttaagaaggaccaaactaaatcaggagtcgaccgctccaaaagttctttttactggagtggtcgacgcccgaggggagcgggcagtgctcgctctgggagggagccttgccggttccgctgcggaagcgtcccaccttgtcacagaccgaattcgcagaaccgtgaagttcctgtgcgcgctcggcagaggaattcctatactgtcactcgactggctccaccagtcacgcaaagcgggttttttcctcccaccagatgagtacgttgtgaccgatccagagcaggagaaaaattttggtttcagtctacaagatgcattgagccgcgctcgagagcggagactgctggagggatatgaaatttacgtcactcccggtgtccagccacctcctccgcaaatgggggaaatcatcagttgttgtgggggtacctatctgcctagcatgcccaggtcctacaagccccagagagtagtgataacctgtccccaggatttcccccattgttcaatacccctgcgcgtggggctcccattgttatcacctgagtttttgttaaccggggtgcttaaacaggaagctaagcctgaagccttcgtactctctccactcgaaatgtcttccaccta

SEQ ID NO: 229958 - DNA, 738 bp, synthetic construct
  misc_feature 1..738: note = Description of Artificial Sequence: Synthetic coding sequence
  source 1..738: mol_type = other DNA
atggaggacactcaagccatagattgggacgtggaagaggaggaggagacagagcaaagtagtgagtcacttagatgcaacgtggagcctgtgggcaggctccacatcttcagcggggctcatggccctgagaaggacttccctctccacctcgggaaaaatgtggtaggcaggatgcccgattgctcagtggctcttccatttccttcaatctcaaagcagcacgcagaaatcgaaattctggcttgggacaaggctcctatattgcgggactgcggcagccttaatggaacccaaatcctgcgccctccaaaggtactcagccccggtgtgtcccaccgcttgagagatcaggagctcattctgtttgccgacctgctttgccagtaccataggctggacgtgtcactgccatttgtgagcaggggccctctcaccgtagaggaaacccctagggtgcagggagagactcagccccagcggctgttgctagccgaggacagcgaagaagaggtggactttttgagtgagaggcgtatggtaaagaaatcaagaacaacttcaagtagcgtaatcgttccggagtctgatgaagagggacacagtccagttcttgggggattaggtccccctttcgcttttaaccttaacagtgacaccgacgtcgaggaggggcagcagcctgcaacagaggaagcctctagtgctgccaggcggggagctactgtggaggcatag

SEQ ID NO: 229959 - DNA, 2238 bp, synthetic construct
  misc_feature 1..2238: note = Description of Artificial Sequence: Synthetic coding sequence
  source 1..2238: mol_type = other DNA
atggcttgtcgacagagagggggatcctggtccccgagcgggtggttcaacgctggatggtcaacatatcgaagcatctcattgtttttcgcccttgtcacctcgggcaatagcattgacgtgtcacagcttgtgaaccccgcattccctggcaccgtcacctgcgacgaaagggaaataaccgtcgagttcccaagcagtcctgggacgaagaagtggcatgcttctgtcgtagatcccctgggtctcgatatgcctaactgtacatatatcctggacccagagaaactgacgctgcgtgccacctacgacaattgtacgcggcgtgttcatgggggtcaccaaatgactatccgcgtcatgaataactccgcggcattgcgacatggcgcagtgatgtaccaatttttctgccccgctatgcaggttgaggagacccaagggctctcagcctcaaccatctgtcagaaagacttcatgagtttttccctaccgagggtgttctctggcctcgccgacgactctaaggggacaaaggtccagatgggttggtccattgaagttggggacggggctcgggcaaaaacccttacattgccagaagctatgaaagagggtttcagtcttttgattgataaccaccgcatgacgttccacgttccgttcaatgccacaggtgtcacccactacgtacagggcaattctcacctatacatggtgtccctaaagcttacatttatctctcctggacaaaaagtcattttctcttcccaggctatctgtgccccagatccagtaacgtgcaatgctacacatatgactctgaccattcccgagttccccggaaaactcaagagcgtttcattcgagaatcaaaacattgatgtgtcccagctgcacgataacggaatcgatctggaagcaacaaacggcatgaaattacacttcagcaagaccctcttgaagacgaagttgagcgaaaagtgtttgttacaccagttctacttggcctccttgaaactgacattcctgctacgtccggagaccgtgtccatggtcatttacccagagtgcctgtgcgagagtcctgtcagtattgtaactggcgagttatgcacccaggatggatttatggatgttgaagtctatagctaccagacacagcctgctctcgatctgggtacgctgcgagttggcaacagctcatgccagccggtgtttgaggcccagagccagggtctggtacggttccatatccctctcaatggttgcggaacacgctataaatttgaggacgataaagtggtgtacgagaacgagatccacgctttgtggaccgacttccccccatccaagatatcacgtgactcagaatttcggatgacagtgaagtgcagctatagccgcaacgatatgctcttaaacattaatgtcgaatcattgacccctcctgtcgcgtctgttaagttagggccttttaccctgatcctgcaatcataccctgacaattcctaccagcagccttacggagaaaacgagtatccactggttagatttttgaggcagcctatatacatggaggtgcgggtgctgaacagagatgaccccaatattaagctcgtgctggacgactgttgggccacttcaacaatggatcccgactcatttccacaatggaatgtcgtcgtggatggttgcgcgtacgatctggataattaccaaactactttccacccagtggggagcagtgtcacacaccccgatcattatcagcgattcgatatgaaagcctttgcatttgtgagcgaggcccacgtgctgtcctccctggtctatttccactgttctgccctgatctgtaatagattgtctcctgattccccactgtgcagcgtcacgtgccctgtgagtagcaggcacagaagggccactggcgctactgaggctgagaagatgacagtctccctcccaggtcccattctgctgttgtcagacgacagctccttccgcggagtcggatcaagtgatctgaaagcctctggtagctcgggggagaaatcccggagcgagacaggggaggaagtcggctctcgaggcgctatggatactaaaggacataaaacggccggtgatgtgggatcgaaggctgtggccgctgtagctgccttcgctggtgtcgtggctacactcggttttatctactacctgtacgaaaagcggaccgtttccaaccactag

SEQ ID NO: 229960 - DNA, 1806 bp, synthetic construct
  misc_feature 1..1806: note = Description of Artificial Sequence: Synthetic coding sequence
  source 1..1806: mol_type = other DNA
atggctaagacaccctccgatcacctattgtctactctggaagagcttgttccctatgattttgagaaatttaaatttaagctccaaaataccagcgtgcagaaagaacacagccgcatcccacgaagtcagattcagcgggctcgccctgttaaaatggcgactctactggttacctactacggggaagaatacgccgtgcagctcaccctccaggtgctgagagccataaatcagcggcttctcgctgaagagctgcacagagccgcaatccaggacatgggttcttgttacgtagctcaggtagggcttgaactcctgatctctaacaatccacccattttcgcctccgagacggcgggtatcactggtcgccctccagacaccgcggcttccccaagatgccatgcccaggagggtgatccggtggacgggacatgcgtgagagactcttgctcattccctgaggctgtgtctgggcatcctcaggcgagtggttcacgttctccgggttgtccaaggtgtcaggacagccacgagagaaaaagcccaggctcactctcaccccaaccgcttccacagtgcaaacgacatttgaagcaggtccaactgctgttctgtgaggaccacgatgagccgatttgcttgatttgctctctatcccaggagcaccagggacaccgtgtgcgtccaatcgaggaggtggcactcgaacacaaaaagaaaatccaaaaacaactcgaacacttgaagaaactgagaaagagcggagaagagcaacggagttatggcgaggagaaggcggtgagtttcctgaagcagacggaggcactaaaacagcgtgttcagagaaaactggagcaggtctactacttcctggaacaacaggagcacttcttcgtggctagcctggaagatgttggtcagatggtgggccagattcgcaaagcctacgataccagagtgagtcaggacatcgccttgcttgatgccctgatcggggagctcgaggctaaagaatgtcagagtgagtgggagctgctccaggacatcggcgatattctccatagagcgaaaacagttccagtccctgaaaaatggactacccctcaagagattaagcagaagattcagctactacatcagaagtcagaattcgtcgagaagtccaccaaatatttctccgagacgctgaggagtgagatggaaatgtttaacgtaccggagctgatcggggctcaggcccacgcagtcaacgtcattctcgatgctgagacagcctaccccaatctgattttttccgacgacttaaagagcgtcaggctaggtaacaaatgggagcgccttcccgacggtccccagcgcttcgactcatgtattattgtcctgggcagccccagtttcctgtccggaaggcggtattgggaagtggaagttggcgataagaccgcctggatcctaggcgcttgcaaaactagcatcagtaggaaggggaatatgacgctgagtcccgaaaatggctactgggtggtgattatgatgaaagagaatgagtaccaagccagctcagtgcccccaacacggttactgattaaggagcctcccaaacgcgtggggatttttgtggattatcgcgtgggaagcatctccttctacaatgtgactgcgaggagccacatatataccttcgcatcttgctctttttccggtccattgcagcccattttttcaccagggactcgggacggaggcaagaacactgcgcctctcactatttgcccagtgggcggtcagggacccgattag

SEQ ID NO: 229961 - DNA, 1239 bp, synthetic construct
  misc_feature 1..1239: note = Description of Artificial Sequence: Synthetic coding sequence
  source 1..1239: mol_type = other DNA
atggccaagacccctagtgaccatctcctttctacactggaggaactggtcccctacgatttcgaaaagtttaaatttaaacttcaaaacacgagcgtccagaaggaacatagcaggattccccgatcacaaatccagcgggctaggcctgttaagatggccaccctccttgttacctattatggcgaggagtacgcagtgcaactaacactacaggtcctgcgggcaatcaaccagcggttgctcgctgaggagttgcatagagccgctatccagggtcgccctcctgacactgctgcttcaccacggtgccacgcacaggaaggcgaccccgtcgacggaacatgcgtcagagatagctgttcctttccagaggccgtttccgggcacccgcaagcctcaggtagtaggagtccaggatgccctaggtgccaagattcccacgaacgaaagtctcccggatctttgtctccacagcccctaccacagtgtaagagacacctgaagcaggtgcaacttcttttctgcgaagaccatgatgagcccatctgcttgatctgtagcctcagccaagagcatcagggtcaccgggtgcggccaattgaggaggtagccctcgaacacaagaagaagatacaaaagcagctcgagcacctgaagaagttacgaaaaagcggagaagagcagcgctcctacggcgaggaaaaagccgtgtcctttttaaagcagacagaagcgctcaaacagcgcgtgcaacggaagctcgaacaggtgtactactttctcgaacagcaggagcacttctttgtcgctagtctcgaggacgtgggccagatggtcggacagatcagaaaagcctacgacaccagagtgtcccaggacattgcacttctcgatgcactgattggggaactggaagcaaaggagtgtcaatccgagtgggagctcctgcaagatatcggggacattttgcatagggctaaaacagtgcctgtcccagaaaagtggacgacccctcaggagattaaacagaagatccagttactgcaccagaaaagcgaatttgtagaaaaaagcacaaagtacttctccgagaccctccgcagtgagatggagatgtttaacgatcacagcccgcaacacggcctgggttcctgggaagagcgagattatacccagcacagcatgcaggggccaaagcagggtgtcccttgttttttggttgttaggacagtttag

SEQ ID NO: 229962 - DNA, 1713 bp, synthetic construct
  misc_feature 1..1713: note = Description of Artificial Sequence: Synthetic coding sequence
  source 1..1713: mol_type = other DNA
atggctaagaccccttccgaccatctgctttctactttagaagagttagtgccatacgatttcgagaagttcaagttcaaacttcaaaatacatcggtccagaaggaacatagtcgcattccacgcagccagattcaaagagccagacccgtcaagatggctacattgctcgtcacatactatggcgaggagtatgcagtgcaattgactctccaagtcctccgtgccatcaaccagaggttgttagctgaggaactgcacagggccgctattcagggacggcctccagatactgccgcttccccccgttgccacgcgcaggagggcgatcccgtggacggaacatgtgtcagagattcttgttctttccctgaagcagtttccggtcacccccaagcgtccggcagccgctcaccaggctgtccacggtgtcaagactctcatgagcgcaagagtcctgggagtctttcccctcagcccctcccccaatgtaagcgtcacctgaaacaggttcagctcctcttctgcgaagaccacgatgaacctatttgtttgatctgctctctgtctcaggagcaccagggccatagggtcagacctattgaagaagtggctctggaacacaaaaagaaaatccagaaacagctggagcacctgaagaagctgagaaagtcaggtgaggagcaacgcagctacggggaggaaaaagctgtcagctttcttaaacagaccgaggcgctgaagcagcgcgtccagagaaagctggaacaggtgtactatttcctggagcaacaggagcacttctttgtcgcgagcctggaggacgttggacagatggtgggtcaaatcaggaaggcctatgatacacgagtatcacaagacattgcactgcttgacgcactgattggtgagctggaggctaaagagtgtcaaagtgagtgggagctcctccaagacatcggagatattttgcaccgcgcaaagactgtacccgtacccgagaagtggaccaccccacaagagattaagcagaagattcagttactgcatcagaaatccgagttcgtggagaaatccacgaaatacttctccgaaacccttcggtctgagatggagatgttcaacgtgcctgagctcatcggtgcccaggcccatgccgtcaacgtgatacttgacgcagaaacggcttatcccaatctaatttttagtgatgacctgaaatccgtgaggttggggaacaagtgggagagacttcctgatggcccacagaggtttgactcctgcatcatcgtgcttggttctccctccttcctgtccggcagaaggtactgggaggtcgaggtcggagacaaaaccgcctggatattgggcgcatgtaaaacgtccatttcaaggaagggcaatatgacactatctcctgaaaacggttattgggtggtcattatgatgaaagagaacgagtaccaggcgtcttcagtcccgccaacaaggttgctgatcaaggaaccccctaagcgtgtcggcattttcgtcgattaccgcgttggctcgattagcttctacaacgtgactgccaggtctcatatctatacctttgcttcttgttcatttagcggtcctctgcaaccaatcttctctccaggaacacgagacggtggcaaaaacacagctccgctgacaatttgtcccgtgggcggacagggccctgactag

SEQ ID NO: 229963 - DNA, 1209 bp, synthetic construct
  misc_feature 1..1209: note = Description of Artificial Sequence: Synthetic coding sequence
  source 1..1209: mol_type = other DNA
atggctaagacgccgtcagatcacctgctcagtacattagaagagctggttccgtatgatttcgagaagttcaagttcaagctgcagaacacctccgttcaaaaagagcacagtcgaatcccgcgatcacagattcagcgtgcccgtcctgtaaaaatggcaactctgttagttacatattacggcgaagaatatgccgtgcagctaaccctacaggtgcttcgcgcaattaatcagagacttttggctgaggaactgcaccgtgccgcaatccaaggacgtcctcctgacacggctgcgagcccgaggtgtcatgcccaggaaggtgaccccgttgacggcacgtgtgtgcgcgacagctgttctttccccgaagccgtgagcgggcacccccaggctagtggatctcggtctccaggatgccccagatgtcaggatagtcacgaaaggaagagtcccggatccttgtcaccacagcctcttccccaatgcaagcgacatttaaagcaggttcaactgctgttttgcgaggatcacgacgagcccatctgcctgatttgcagtctctctcaggagcaccagggacacagggtccgcccaattgaagaggttgcactggaacacaaaaaaaaaatacagaagcagctcgaacatctcaaaaaattgcgcaagagtggagaagagcagcgcagttatggcgaggaaaaggccgttagctttttgaaacagactgaggcactgaagcagcgggtgcagcgaaaactggaacaggtatactactttctggagcagcaagagcactttttcgtagctagtttggaagacgtcggccaaatggtggggcagattcggaaggcgtatgatactcgagtctcgcaggacatagcactgctggatgcactaatcggcgaactcgaagctaaagagtgccagtctgagtgggagctgctccaagacattggcgatatcttgcaccgggcaaaaactgtcccagtgccggaaaagtggaccaccccccaagagattaagcagaaaatccaattactgcatcagaagtccgaatttgtggaaaaaagtaccaagtatttttcagaaaccttaaggagtgagatggaaatgtttaacggcgagtcctctggcaacggggtctgttggcctggtgtggtggccgtcttcccgtgtgctgtcgacctaaggggcccaatttag

SEQ ID NO: 229964 - DNA, 1338 bp, synthetic construct
  misc_feature 1..1338: note = Description of Artificial Sequence: Synthetic coding sequence
  source 1..1338: mol_type = other DNA
atggccaagacaccaagtgatcatctgctgagcacgctcgaagaactcgttccttatgatttcgaaaaattcaaatttaagctgcaaaacacttcagtgcagaaggaacatagtaggattccacggagccaaatacaaagggctaggcccgttaagatggccacgctgctggtaacatattatggggaggagtatgccgtacagcttactctgcaggtgttgagagccattaatcagaggttattggcagaggagctgcatcgggctgctattcagggcaggcctcccgatactgcagcatcccctcgctgccatgctcaagaaggagaccccgtggacggtacatgcgtgcgggattcttgtagcttccccgaagcagtgagcggccacccccaggccagcggcagccgctctcccggttgtccccgatgtcaggatagccatgagaggaaatctccagggagcctgtccccccagccactgccacaatgcaagcgccacctgaagcaggtacagttgctgttttgtgaggaccatgatgagcctatttgcttaatctgcagcctttctcaggaacatcaggggcatcgtgtccgccctatcgaggaagttgcactggaacataaaaaaaagatccaaaaacaattggaacatttaaaaaaactgcgcaaatcgggcgaggaacagaggagctacggggaagaaaaggccgttagctttctcaagcagaccgaggcattgaaacagcgcgtccaacggaagctggagcaggtctattacttccttgagcagcaggaacacttttttgtcgccagtttggaagatgtgggccagatggttggtcagatcagaaaggcctacgatacacgtgtaagtcaggatatcgccctcctcgatgcgctgatcggcgagctcgaagccaaggagtgtcagtccgagtgggaactgctgcaagacatcggcgacatcttacacagagccaagactgtacccgtgcctgaaaaatggactactcctcaggaaataaagcagaagatacagttgttgcatcaaaaatccgagttcgtggagaagagtaccaaatatttttccgaaacgctgagaagcgagatggagatgtttaatgatcattccccacagcacggactgggctcttgggaggagcgagactatactcagcacagcatgcagggccctaagcagggcgtgccttgtctgtctttgctgtcaggtcagtgtaaccttgcacccctgaacgcaaacgcccaagatttctttccctacctgatatttttgagatcaagcggggcagattggcgttctggcacctgttgttag

SEQ ID NO: 229965 - DNA, 2067 bp, synthetic construct
  misc_feature 1..2067: note = Description of Artificial Sequence: Synthetic coding sequence
  source 1..2067: mol_type = other DNA
atggccaagacgcctagcgatcaccttctatccacattggaggagctggttccatatgattttgagaaattcaaattcaaactgcagaatactagtgttcagaaggagcatagccgcattccccgaagccagatccagcgagcaagacccgttaaaatggccactctgttggtcacttactacggcgaggagtacgcggtgcagctgacactgcaagtactaagagctataaaccagaggttgcttgccgaggagctccaccgcgctgctatccaggagtattcgactcaagagaacgggactgatgatagtgccgctagtagctcactgggagagaacaaacctaggagccttaagactccggaccatccagagggcaacgaaggaaacggccctcgcccttacggagggggtgccgcatccctccgctgcagccagccagaggccggtagggggctttcacgcaaaccattgtccaagcggagggaaaaagcgtcagaaggcctggatgcccagggcaagcccaggacacgctctccagcgttgccgggaggcagatctcctggcccatgccgtgcccttgagggaggacaggcagaggtaagactgaggcggaacgctagtagcgctggtcgcttgcaaggcttagctgggggagctccgggtcagaaggagtgtagacccttcgaggtctacttgcctagcggtaagatgcgcccaagatctttagaggtgacaatctctaccggcgaaaaggctcccgcaaacccagaaattctcctgacacttgaggagaagactgcagcgaatctggattcagccactgagcctagagcccgtccaacccctgacggaggggcttctgcggatctgaaagagggacccggtaaccctgaacactccgtgacaggaagaccaccagacacggccgcaagcccacgctgccacgctcaggaaggggaccctgtcgacggtacttgcgtacgggactcgtgtagctttcctgaagctgtgtctggtcaccctcaggcttctggcagcagatctcccggatgtccacgttgccaggacagccacgagcggaagtctcctggatctctgagcccgcagccactcccccagtgtaaaaggcacctcaagcaggtacagctgctgttctgcgaagatcacgacgaaccaatttgcctgatctgctccctctctcaggagcatcaggggcaccgcgtgagacctatcgaggaggtcgctctcgagcacaaaaagaagatccagaagcagctcgagcacctgaagaagctcagaaagtctggagaggaacagaggagttatggggaggagaaagcagtttcctttttgaagcagaccgaggctctgaagcaacgcgtgcagcgcaaactcgaacaagtctactactttttagagcaacaggaacatttctttgtggcctctcttgaagatgtcggacagatggttgggcagatcaggaaagcttatgacacaagggtgtcccaagacatcgccctactagacgcgctgatcggcgaactggaagcaaaggagtgccaatccgaatgggagcttctgcaagatattggcgacatactccatagagccaagactgtgcctgtccccgaaaagtggacaacaccccaggaaatcaaacagaaaatccagctgctccaccagaaatctgagttcgtcgaaaagtcaacaaaatacttcagtgaaacactgagatccgagatggaaatgtttaatgtgcccgagcttatcggggcacaagcccacgcagtaaatgtgatactggacgctgaaacagcctatccgaacctgatttttagcgacgatctcaagtccgtgaggctaggcaacaagtgggaaaggctccctgatggtcctcaacgcttcgacagctgtattatcgtgctcggaagcccaagttttctgtcaggcagaagatattgggaggtcgaggtgggtgacaaacgcttcagctgtctgtcacttcggtcgtcatgggattacagaagaccacctccctgcccagcaaattttctccatttttag

SEQ ID NO: 229966 - DNA, 2796 bp, synthetic construct
  misc_feature 1..2796: note = Description of Artificial Sequence: Synthetic coding sequence
  source 1..2796: mol_type = other DNA
atgcctcctttgaagtcaccagccgcattccatgaacaacgcaggagcctcgaaagagcccgtacggaagactacttgaagcgaaaaataagaagccgccctgaacggagtgagctggtccggatgcatattctagaagaaacctcggccgaaccaagtcttcaggctaagcagctgaagctcaagagagccagactggccgatgacttgaacgaaaaaattgctcagcgcccaggacccatggagctggtcgaaaaaaacatcctgccagtagagtcatcacttaaggaggcgattatcgtggggcaggtaaactatcccaaggtcgccgatagctcttccttcgacgaggattcctcagatgctcttagcccagaacagcctgccagccacgaatctcagggcagtgtgcccagccccctagaagccagagtgtccgagcccctgctctccgccacgtcagcatctcccactcaggtcgtttcccagctgcctatggggagagactccagggagatgctctttttggccgaacagccaccactgccaccacctccattactgcctccttcattgacgaatgggaccacaattcctactgccaagagtacacccacgctgatcaaacaatcgcagcccaaatccgcttccgagaaatcccaacgcagcaaaaaggctaaagaactgaagcctaaggtcaagaagctgaagtaccatcagtacataccccctgaccagaagcaggatcggggtgccccaccgatggactccagctacgccaagattttgcaacagcagcaactcttcctccagctgcagatactgaatcagcaacagcagcagcaccataactaccaggcaatactcccagccccaccaaagtctgctggcgaagctctgggctcttctggaacacccccagttcggtcactgagcacaactaactcgtcttctagttcaggagcacccggtccgtgtgggctcgctaggcaaaattcgacctctctaaccggtaagcccggtgcactgccggcaaacctggatgacatgaaggtggcggagctcaagcaggagctgaagctgcggtcactgccagtatccggcacgaaaactgaattaatcgaacgcctgagggcgtaccaggaccagattagccctgtacctggcgctccaaaggcaccagccgcaacctctattttacataaagctggcgaagtggtggtggccttccctgctgcgagactctccactggacctgctttagtagcggctggactggccccagcggaagtcgtggtggcaaccgtcgcaagttccggcgtggtgaaatttgggtctacaggctctacacctcccgtgagcccaacccctagcgagcgatcattactgtccacgggcgatgagaacagcacacccggagatacctttggggagatggtcacttccccacttacccaacttaccctgcaggcctccccgctgcagatattggtgaaggaggagggacctagagcaggaagctgttgcttgtctccaggaggccgagcagagctggagggtcgagacaaagaccagatgctacaggagaaagataagcagattgaggcactgactcggatgctgcggcagaagcagcagctcgtggagcggctgaagttgcaacttgaacaggagaaacgtgcacagcagcctgctcctgcacctgccccactagggacgccagtcaaacaggagaattcattctccagctgtcagctctcccagcagccactcggacccgctcatccttttaatccatccctggccgctcctgccacgaaccacatcgatccatgcgccgtcgccccagggcctccgagcgtggttgttaagcaggaagccttacaacctgaacctgagcccgtgcccgctccacaactgctgttggggcctcagggcccatccctgattaagggtgtggcacctcccacactgatcaccgattccacaggcactcacctcgttctgacagtcaccaataaaaatgctgattctccgggtctctctagcgggtctccccaacagccaagctcgcagccagggagccctgcccctgcgccaagcgcacagatggaccttgagcaccctttacaaccgttatttggcacgcccacatcattgctcaaaaaagagcccccaggttatgaggaggctatgagccagcagccaaaacaacaggagaatggatcatccagccagcagatggatgatctttttgacatcctaatccaatccggagaaatctccgctgacttcaaggagcctcccagtctgccgggtaaggagaaaccgtcccctaaaacggtatgcgggtctcctctagctgcccagccctcacccagcgcagaactgccccaggccgcaccaccccctcctggctcacctagtctgccaggcagattggaggacttccttgaaagttctactggcctgcccctcctcactagcgggcatgacgggccagaaccccttagcctgatcgatgaccttcactcgcagatgctgtcctctaccgcaattctggatcatcctccttcccccatggacactagcgagctgcactttgtgcccgaaccttcctcgacaatgggcctggacttggcggatgggcacttagactctatggattggttggagttgagctccggaggaccagtgctgtcactggctcctctgtcaaccaccgcgccttctcttttttcaactgactttctggacggtcacgacctgcaactccattgggattcatgtttgtag

SEQ ID NO: 229967 - DNA, 2397 bp, synthetic construct
  misc_feature 1..2397: note = Description of Artificial Sequence: Synthetic coding sequence
  source 1..2397: mol_type = other DNA
atgcctccgctgaagagcccagctgctttccacgaacagagacgatctctcgaacgcgcaagaacagaggactacctaaagaggaagattcgttcccggccagaacgctcagaactcgttcggatgcacatactcgaagaaacttcagctgagccatccctgcaagcaaagcaactcaaattaaagagggcacgcttggccgacgacctaaatgagaagatagctcaacggccaggcccaatggagttggtggaaaagaacatcctcccggtagagagcagcttgaaagaagccatcattgtgggacaggtgaattatccaaaagtagcagacagcagctcgttcgacgaggactctagcgacgccttgagccccgagcagcctgcgtcacatgaaagtcaaggatccgtccccagtccattagaagcgagggtctcagaaccgctgctctcagctaccagcgccagccccacccaggtggtgtctcagctaccaatgggacgggacagccgcgaaatgctttttctggcagaacagccgccactgcctccaccccctctgctgcccccttccctgacaaacggcaccactatccccactgccaaaagcacgcccactcttatcaaacagtcacagccgaaatcggcgagtgagaagtcccagcggagcaagaaggccaaagaattaaagccaaaagttaagaagcttaaataccaccaatacatcccacccgaccagaagcaggatagaggggctcctccgatggactcctcttatgctaaaattcttcagcagcagcagcttttcctgcagctgcagatccttaaccagcaacaacaacagcaccataactatcaggccattcttcccgcaccaccaaaaagcgctggggaagctctgggatccagtggcaccccccctgtgcgcagtctaagtaccacaaatagttcctcaagctctggggcacccggaccctgcggtttagccaggcaaaattcaacatcactgaccgggaagccaggagcactgccagcgaatctcgacgatatgaaagtggctgagctgaagcaggagctgaaacttcggagtctgcccgtgagcggtacaaaaactgaattgattgaacgactgagggcctaccaagatcagatttctcccgtgccaggggctcctaaggctcctgcggcaactagcattcttcacaaagccggagaggtggtcgtagcattcccagccgcaagactgagtaccggcccagccttagttgccgcaggcctcgccccagctgaggtggtggtggccaccgtggccagctcaggtgtggtaaaattcgggtctacagggagtacccccccagtcagcccaacgccctcagagcgaagcttactgagcaccggcgatgagaacagcacgccgggtgatactttcggcgaaatggttacctcacccctgacacagctgaccctgcaggctagccccctgcaaatcctggtaaaggaggagggacctcgtgcagggagttgctgtctctcacctgggggtcgggctgagctggagggacgcgacaaggaccagatgctccaagaaaaggacaagcagattgaagcactcactcggatgcttcggcaaaagcagcagttggtggagcggctaaaactgcagttggaacaggagaagagggcccagcaacccgctcccgctcccgctcctctgggcacacccgtgaaacaggagaactccttcagctcatgccaactgagccagcaacccctgggacccgctcatccctttaacccctccttggcagccccagccaccaaccacattgacccctgcgcagtagcacctgggcctccatctgtcgttgtgaagcaggaagctcttcaaccagagcccgagcccgtgcctgcgccacagctccttttggggccacagggaccatctcttattaagggcgtagccccaccaactctgataacagatagcacaggcacacacttagtcttgaccgtgaccaacaagaacgcggattccccgggactatccagtggtagcccacagcaaccaagcagccagcccggaagccctgctccagccccttctgcccagatggatctggagcacccactgcagccactgttcggcacacccacaagcctgcttaagaaagagcccccagggtatgaggaagctatgagccagcagcccaagcagcaagaaaacggatcttcttcacagcaaatggatgacctgttcgatatcctcattcagagtggagggaatcctaggaatttcagccggtttcagggggcagcgattccggctcgcgagggagaggctatccccgaagactcactttgggttccaccgggatccactgctattactttttgctag

SEQ ID NO: 229968 - DNA, 2646 bp, synthetic construct
  misc_feature 1..2646: note = Description of Artificial Sequence: Synthetic coding sequence
  source 1..2646: mol_type = other DNA
atgcctcccctgaaatcacccgcagccttccacgagcagcggagaagcttagagagggcacgcacagaggactatctgaaacggaagattcgcagcagacctgaacgctcggaactcgtgagaatgcacatcctggaagaaacttctgccgaaccatctctgcaagcgaaacagcttaagctcaagcgcgcaagactggctgacgacctcaacgagaaaattgcccagaggcctggaccaatggagctcgtagaaaagaatatcttgcctgttgaatctagtctgaaagaggcaattatcgtcggacaggtgaattacccaaaggttgccgatagcagttccttcgatgaggacagcagcgacgccctgtcaccggaacaacccgcatctcatgagagtcaaggatctgtgccctcacccctcgaagctagggtcagtgaacccctgctgtccgcgacatctgcgtcgccgacacagcagtcccagcctaaatcagctagcgagaagagtcaacgctccaagaaagcaaaagaattgaagccaaaggtgaagaaactgaaatatcatcagtatattccccctgatcagaagcaagatagaggagcgccacccatggactcctcctatgcgaaaattctgcagcagcagcagttgttcttgcagctgcaaatcctgaatcagcagcaacagcaacaccacaactatcaagccatcctgccagccccaccgaaatctgcaggggaggcgttgggctccagtggaacaccccctgtgcgaagcctgtccaccacaaacagcagctcttcatccggcgcacctgggccatgcgggttggcgaggcagaactcgacctccctcacaggaaaaccgggagctttgccagctaatcttgatgacatgaaagttgccgaactgaagcaagagttaaagcttcgttctctccccgtctccggaactaagacagagctaattgagaggctgagagcgtatcaggatcagatatctcccgtgccaggcgcaccaaaggctcccgctgccacatctattctgcacaaggccggagaagtggtcgtcgcttttccggctgctcgattgtccacagggccagcgctggtggcagctggcctcgctcctgccgaggtagttgtagctacagtggcctcctccggggtggtaaaatttggctctaccggttctaccccacctgttagtcctactccttcagagagatcactgctcagcaccggggacgaaaatagtaccccgggtgacaccttcggagagatggtgaccagtccactaacccagctcaccctgcaagcctcaccattgcagattttggtcaaagaggagggccctcgcgctggttcttgctgtctttctccgggaggacgcgctgaactcgagggcagggacaaggatcagatgctgcaggagaaggacaaacaaattgaagcccttacacgtatgctccggcagaagcagcagctagttgagagattaaaactccagctggagcaggagaaaagggcacagcagcctgcacctgcgcctgcacccctcggaacacctgtaaagcaggaaaactctttctcaagctgccagttgtctcaacaacccttaggtccagctcacccattcaacccatccctggcggcacctgccacaaatcacattgatccttgtgccgtcgcaccaggtcctccatctgttgtggtcaagcaggaagcgcttcagccggagcctgagcccgtgcctgctccccagctactgctggggccacagggaccctcgctcatcaaaggagtggccccaccgactttaattacagacagtacaggcacccatctagtgctcacggtcaccaataaaaacgctgactctcctggtttaagcagcggttcaccacagcaaccgagctcacagcccggatctccagccccagccccatccgcacagatggatctggaacaccctctccagcccctattcggaaccccaaccagcctgctcaagaaggaaccccctggatatgaggaggcaatgagccagcagcctaagcagcaggagaacggctcttcttctcagcagatggacgacctgtttgatatactgatccagagcggcgagataagcgccgactttaaggagccaccaagcttgccaggcaaggaaaaaccaagccccaagaccgtgtgtgggtctcccctggccgcacagccaagcccaagcgcagaactgccccaggctgctccacctcccccaggtagcccaagtctgcctggacggctcgaggatttcctggaatcctccacggggttgcctctgctaactagtggacacgatggacctgagcctctgtccttgatcgatgacctacattctcagatgctcagcagtaccgctattcttgaccaccctccgagcccgatggacaccagcgagttgcattttgttcctgaaccttcatcaaccatgggtctagatctggctgatggccatctagatagcatggactggctggagctctcttcaggtggacctgttttgtctctggccccactatctaccacggcaccatcgctgttcagtaccgactttttggacggccacgacctccagctccactgggatagttgcctgtag

SEQ ID NO: 229969 - DNA, 2796 bp, synthetic construct
  misc_feature 1..2796: note = Description of Artificial Sequence: Synthetic coding sequence
  source 1..2796: mol_type = other DNA
atgccacccctgaaaagccctgcagcattccatgagcagcggaggagcctcgaacgagctaggaccgaagattatcttaagcgcaagataagaagtagacctgaacggtcagagctggtaagaatgcatatcttagaggaaactagtgcggagccatcactgcaggccaagcaacttaaacttaagagggctcgcctcgccgatgacctgaatgagaaaatcgctcaaaggcccggaccgatggagttggtggagaaaaatatcctccctgtggagtcctccttaaaggaggccatcatcgtgggacaggtgaattaccccaaggtggcggattccagcagcttcgacgaggattcttctgacgctctgtctccagaacagcctgcttcacatgaatcccagggttctgtgccaagccccctggaggcacgcgtatctgagccgttgctcagcgccacatccgcctcccctactcaagtggttagccaactgcctatgggtagagacagtagggaaatgctgtttctcgctgaacagcccccactgcccccaccccctttgctccctccgagcctaaccaatggaactacaattcccaccgcaaagagcaccccgaccctgatcaaacaatcccagcccaaatccgcaagtgaaaaaagtcagcgaagtaagaaggctaaagaactcaaacctaaggttaaaaaactaaagtaccaccagtatattcctcccgatcagaagcaagaccggggagccccacccatggatagctcttatgctaagatccttcagcagcaacagcttttcctgcaattacaaatactgaaccagcagcagcagcagcatcacaattatcaggccatcctgcccgctcctcctaaaagtgctggtgaggctctggggagcagcggaactcccccagttagatctttatctaccacgaacagcagttccagctctggagctcctgggccttgcggattggcacggcagaactcaacctccctcacgggaaagccaggcgcactgccagccaatttggacgatatgaaggtagccgagttaaagcaagaattgaagctgcgctccctgccagtctctggtacgaaaacagaactgatagaacgcctgagagcctatcaagaccaaatctcccctgtacccggagccccaaaggcccctgcagcaacctctattctgcacaaagccggagaggtggttgtggcatttcccgcagccagattgtctacgggcccagccctggttgctgcaggactcgcgccagcagaggtggtggtagctaccgtggcgtcttctggagttgtcaagttcgggtccaccgggagtactcccccagtctcccctaccccatcagaaagatctttgctgagcactggtgatgagaactctacccccggtgatacattcggcgagatggtaacttcgccacttacgcagctgaccttacaagccagccctctgcagattttggtgaaggaagaggggccacgggctggaagctgctgcttgagtccgggaggccgtgccgaactggaaggaagagacaaggatcagatgctgcaagaaaaagataagcaaatcgaagcactaaccaggatgcttcgacagaagcagcaactagttgaaagactgaagctgcagctggagcaggagaagcgagcccagcagccagctcccgctcctgccccactcggcacccccgtcaagcaagaaaatagcttctccagctgtcaactgagccaacagcccctggggccagctcatcccttcaatcctagcctggcagctcccgctaccaaccatatagatccttgcgcggtggcgcctggcccaccctctgtcgtggtcaaacaggaagctctgcagcccgaaccagaacccgtgcccgctccccagctcctacttggaccgcagggcccaagtttgataaagggggtcgccccacccactctgattactgactccacaggaactcatctggtactcaccgtaacaaataagaatgccgactctcctggtctcagctccggatccccccaacagcctagctcgcagcctgggagtccagcgccagctccctccgcccagatggaccttgagcatccgctgcagcctctttttggcacccccaccagcctcctcaaaaaagagccgcctgggtacgaagaggccatgtctcaacagccaaagcagcaggagaatggctccagcagccaacaaatggatgatctatttgatattctcatccagagcggggaaataagtgcagatttcaaggaaccgccttctctgcccggaaaagagaagccctccccaaagacagtctgtggcagccctcttgccgcacagccaagtccttcggctgaactcccgcaggccgctccccctccgccaggaagcccctcgttaccagggagattagaggactttctggagtcgtcaactggactgccactcctgacctccggtcatgacggaccggaacccctatctctcatcgacgatttgcacagccagatgctgtccagcactgctattctagaccacccgcctagtcctatggatactagcgagcttcattttgtccctgagccctcaagcaccatgggactggacctggcagatgggcacctagatagcatggattggcttgagctatcaagtggcggtcctgtgcttagtttagccccactgtcgaccactgccccttccctgtttagcactgatttcctcgatggccacgatttgcaactgcactgggactcttgcctttag

SEQ ID NO: 229970 - DNA, 258 bp, synthetic construct
  misc_feature 1..258: note = Description of Artificial Sequence: Synthetic coding sequence
  source 1..258: mol_type = other DNA
atgcttagctccaccgccatcctggaccacccacctagccccatggacaccagtgagcttcactttgtacccgaaccaagcagcaccatgggcctggacctggctgacgggcatcttgactctatggattggctggaactcagttctggcggtcctgtgctgtccctcgctcccctctcaactaccgcgccttccctgttttccaccgattttctggacggacatgacttgcagctgcattgggacagttgtttgtag

SEQ ID NO: 229971 - DNA, 1524 bp, synthetic construct
  misc_feature 1..1524: note = Description of Artificial Sequence: Synthetic coding sequence
  source 1..1524: mol_type = other DNA
atggctggaaggggttctttagttagctggagagcattccatggttgcgacagtgccgaagagttaccgagagttagccctaggtttctccgagcttggcaccctccacccgtgagcgctcgaatgcctacaagaagatgggccccagggacacagtgcatcaccaagtgcgaacacacccgcccaaagccgggagagctagcttttagaaagggggatgtagtgaccatcctcgaggcctgcgaaaataagtcttggtatcgcgtgaaacaccataccagcggccaagaggggcttttggccgctggcgctctgagggagcgggaggccttgtcagcggatcccaagctcagcctcatgccctggttccatgggaaaattagcgggcaggaagcagtccaacagcttcagccacccgaggatggattgtttttggtcagggagtccgcacggcacccgggtgattatgtgctatgcgtctccttcgggagagacgtcattcactacagagtgctgcacagagacggccatctcacaatcgatgaggccgttttcttctgtaatctcatggatatggtagagcactattccaaagataagggagcgatctgtacaaaactggtcagaccaaagcgtaagcatggcaccaagtctgctgaggaggaactcgccagagcgggatggctcctgaacttacagcatctgactctgggggcacagatcggggagggtgagttcggagcggtcctgcagggtgagtacttgggccagaaggttgctgtgaagaatattaagtgtgatgtgactgcccaggcatttctcgacgaaaccgccgtcatgacaaaaatgcagcacgaaaatctggtccgtctgctaggagtgattcttcatcagggcctgtatatagtgatggagcatgtgtcaaagggcaacctggtcaattttctgcgaactcgcggtcgtgcgttagtgaacaccgctcaactgctccagtttagtcttcatgtcgccgaaggaatggagtatctggaatcgaagaaactggtgcatcgggaccttgcagccagaaacattctggtttcggaggatctggtggccaaagtgtcggatttcggcctggccaaggctgaaaggaagggattggatagctcacgtctcccggtgaagtggaccgctcctgaagctcttaagcatggtaagtttaccagtaagtctgacgtctggtcctttggagtgctactctgggaagtcttctcctatggcagagccccttacccaaagatgtctctgaaagaagtgtccgaagctgttgaaaagggctacaggatggagccacctgaaggctgcccaggccctgtacatgtgctcatgagttcatgctgggaagctgaaccagcacgacggccaccttttcggaaattggcagagaaactagctagagaattgcggagcgccggagcccctgcctcagttagcggccaggacgccgacggatccacaagcccacgaagtcaggagccttag

SEQ ID NO: 229972 - DNA, 1401 bp, synthetic construct
  misc_feature 1..1401: note = Description of Artificial Sequence: Synthetic coding sequence
  source 1..1401: mol_type = other DNA
atgcctacccggaggtgggccccaggcacacagtgcatcacaaagtgcgagcatacaaggccaaaaccgggtgaactcgccttccgcaaaggggacgtagtgactatcttggaggcttgcgagaataaaagttggtatcgagtcaagcatcacacaagcgggcaggagggcttgttggcagccggagcgctaagggagcgcgaggcgctgtcggctgacccgaaactatctcttatgccgtggtttcacggaaagatctcaggacaagaggccgtacagcagctgcagcccccagaagacggactcttcctcgtacgtgagagcgccaggcacccaggcgattatgtcctttgtgtgagcttcgggcgtgacgtgatccactatcgagttctgcacagggacgggcatttgacgattgatgaggcggtgtttttttgcaatctcatggacatggtagagcactattccaaggacaaaggagctatctgtactaaactcgtgagaccaaagcgcaaacacggaacaaagtctgcagaggaagagctggccagggcaggttggctactgaatctgcagcacttgactcttggtgcccagattggggaaggcgagttcggcgcagttctgcaaggggagtatttaggacagaaagtcgctgtcaagaacatcaagtgtgacgtgacagcacaggcattcctggacgagacagcagtgatgaccaagatgcagcacgagaatttggtgcggcttctcggggttatcctacatcaaggactgtacatcgtgatggaacatgtatccaagggaaacttagtgaatttcttgcggaccaggggaagagcgcttgtgaataccgcccagctgcttcagtttagcctacacgtcgcagagggaatggaatatttggagtcgaaaaagctggttcatcgagacctggctgcacgtaatattctcgtgtcggaagatctggtagcgaaagtctctgacttcgggctcgctaaggccgagcgaaaaggcctggacagcagccgccttcctgttaagtggacagcccctgaagcactgaaacacggaaagtttactagcaagtcggatgtgtggtcttttggagtcctcctgtgggaggtcttttcttatggcagggctccttaccctaaaatgagtcttaaggaggtctcggaggccgtggagaaagggtatagaatggaaccccctgaaggatgcccgggtcccgtgcacgttctcatgtcttcatgttgggaagcagagcccgctaggagaccaccttttagaaagctcgctgagaaactggccagagaattgcgaagtgcgggtgcccctgcatccgtctccgggcaggacgcagatggcagtacctccccgagaagccaggagccctag

SEQ ID NO: 229973 - DNA, 1527 bp, synthetic construct
  misc_feature 1..1527: note = Description of Artificial Sequence: Synthetic coding sequence
  source 1..1527: mol_type = other DNA
atgcaaggacattttcccgctgaacggagggaggggaggcctcgaagggggactaggggacagcagcagctattggtgtcaccccgtttcctgcgggcatggcacccccctcctgtgtccgctagaatgcccaccagaagatgggcacccggaactcagtgcattaccaaatgtgagcacacacgcccaaaacctggcgaactcgcttttaggaagggggacgtagtgaccatccttgaggcatgcgaaaataaatcatggtaccgagtcaaacaccatacttcaggacaagaaggccttctagctgccggtgccctccgcgagcgggaagctttgtccgcagatcccaaattaagcctgatgccttggtttcacggcaagataagtgggcaagaggcagtccagcaattgcaaccccctgaagatggactctttctggtgcgcgaatctgctcgtcatcccggtgactacgtactatgtgtcagcttcgggagggatgtgatccactatagggtactacatcgggacggccaccttacgattgacgaggccgtctttttctgcaatctcatggatatggtcgaacattattctaaggacaagggagcaatttgtacaaagctcgtgcgtccgaagcgcaagcacggaacaaaatctgccgaggaggagttggctagggctggttggctgctgaatctgcagcatctcactttaggcgcacagatcggggaaggcgagttcggcgcagtgctgcagggggagtatctgggacagaaggtggctgtgaagaatattaagtgtgacgtgacggcacaggcatttttggatgagacagcagtgatgaccaagatgcaacacgaaaacctggttcgccttttgggggtaattctgcaccaggggttatacatagtgatggagcatgtcagtaagggtaatttagtgaacttcctacgtacccgcggtcgggcattagtgaatacggctcagcttctccagttttccctccatgtggccgaaggcatggaataccttgaatcgaagaagctagtgcacagagacctggctgctcgaaatatcctagtgtctgaggatttggtcgcaaaggtctctgatttcggcctggcgaaagccgaacggaagggcctcgacagctcgaggttgccagtgaagtggactgctcccgaggctctgaagcacggtaagtttaccagtaagagtgacgtgtggtcctttggagtcctgctttgggaagtattcagttatggaagggccccttatccaaagatgtcactgaaagaagtgtcagaagcagtggagaagggctatcggatggagcccccagaggggtgccccggtcccgtacatgtgttgatgtcttcctgttgggaagccgaaccagccagacgtcccccttttagaaaactcgcagagaaactggctagagagttgcggtctgcaggcgctcctgctagcgtcagtgggcaagacgccgatggcagcacctctccgcgatctcaggaaccatag

SEQ ID NO: 229974 - DNA, 1134 bp, synthetic construct
  misc_feature 1..1134: note = Description of Artificial Sequence: Synthetic coding sequence
  source 1..1134: mol_type = other DNA
atgacccaggagccatttcgtgaggaactggcttatgatagaatgccgaccttggaacgtggcaggcaagatccagcgagctacgctcccgatgctaaaccttccgatctgcagctgtctaagaggttgccaccgtgtttttcccacaaaacgtgggtgtttagcgtcctgatgggttcctgtctgctcgtaaccagcggtttctctctgtatttagggaacgtgtttcccgctgagatggactatctgcgctgcgcggctggaagctgtattccctcagctatcgtgagtttcactgtgtctcgacgcaatgcaaacgtcattccaaacttccagatcttattcgtgtcaacatttgcagtcacaacaacttgtctcatctggtttggatgcaaactggtgctcaacccatctgcaataaacattaatttcaacctgatcctgctgctgttgctcgagctcctgatggctgcaacagtgattatcgccgcaaggtcttccgaagaggactgtaagaaaaagaaaggaagtatgtctgactcggcaaatattctggacgaagtgccgttccctgctcgcgttttaaaaagctatagcgtggtagaagtgatcgccggaattagtgctgtccttgggggtataatagctctgaatgtagacgatagcgtaagtggtccccacctgtctgtgaccttcttttggattcttgtggcatgcttcccaagcgccatcgccagtcatgtggccgctgaatgcccatccaaatgtctggtggaagtgctgattgcaatttcgtcactcacatcacctctcctgttcaccgcttccggatacctgtcattcagcatcatgcgtatcgtggagatgtttaaagattatccgcctgccatcaagccaagctacgatgtgcttctcttgctgctcctgctggttcttctcctgcaagccggattgaataccggaacggccatccagtgtgtcaggttcaaggtttcagccaggctgcaaggggcttcatgggacactcagaacggaccccaggagcggctggccggagaggtcgccagatctcccctaaaagaatttgataaggagaaggcctggagggctgtggtggtccagatggcacagtag

SEQ ID NO: 229975 - DNA, 1134 bp, synthetic construct
  misc_feature 1..1134: note = Description of Artificial Sequence: Synthetic coding sequence
  source 1..1134: mol_type = other DNA
atgacacaggaacctttccgtgaagaactcgcttatgacagaatgcctactctcgaacggggtagacaggacccggcatcttacgcacctgatgccaagccttctgatctgcaactctccaaaagactgcccccatgtttctctcataagacatgggtctttagcgttctgatgggctcctgcctgctggtaacctccggctttagcctctaccttggcaacgtgtttcccgcagagatggactacctgagatgcgcggctgggtcatgcattcccagcgcaattgtatcattcaccgtttctcgcagaaatgcaaacgtaattccgaattttcagatcctgttcgtcagcaccttcgccgtcaccacaacttgcctgatttggtttggctgtaagctcgtgctgaacccctcagccataaatatcaacttcaatctcattttgctgttactgctggagctgctgatggcagctacagtgattatcgccgctaggtcttctgaagaggactgcaagaaaaagaaaggatcgatgtctgattcagcaaacattctcgacgaagtgcctttccctgctcgggtgctgaaaagttatagtgtggtggaagtgatcgctggaataagtgccgtgctggggggaataatcgcacttaatgtagatgattctgtctcagggcctcatttaagcgtgacctttttctggatcctcgtcgcgtgcttccctagcgctatcgcctctcatgtggcagccgaatgccctagtaaatgtctcgtggaggttttaatagcaatttctagtctcacctctccccttctttttaccgcctctggttacctctctttttccattatgagaattgtcgaaatgtttaaagattatcctcccgctattaaaccttcttacgacgtcctgctgcttctgctgctgctggttctgctcctgcaagcaggcctcaacaccggcactgcaatacagtgtgtgaggtttaaggtgtcggctcgcctccagggagccagttgggatacccagaacggcccacaggagcgactcgccggagaagtcgcccgaagtccattgaaggagtttgacaaagagaaagcatggcgcgctgtagttgttcagatggcacaatag

SEQ ID NO: 229976 - DNA, 1044 bp, synthetic construct
  misc_feature 1..1044: note = Description of Artificial Sequence: Synthetic coding sequence
  source 1..1044: mol_type = other DNA
atgacacaggagccattcagggaggaacttgcctatgatcggatgcctacactggagcgaggtcgtcaggatcccgcatcatacgcacccgacgcaaagccttcagatctgcagctgtccaagcggctccccccatgcttttctcacaagacatgggtatttagtgttttgatgggctgtatcccaagtgcgatcgtttcttttacagtgagccggagaaacgcaaatgtcataccaaacttccagattctgtttgtgagcaccttcgcagtgactaccacttgtctgatatggtttggatgcaaactagtgctgaacccaagtgcaattaacatcaactttaacctgatactgctgcttctactcgagctcctgatggccgctaccgtgataattgcagcccgatcatctgaagaagactgtaagaagaaaaagggtagcatgtccgactccgctaacatccttgatgaagtcccattccctgcgcgagttctcaaatcttacagtgtagtcgaggtgatcgccggtatctcagcggtcctcggaggcatcatcgcacttaatgtggatgactccgtgtcaggtccgcatttgtcagttaccttcttctggatactggtcgcttgcttcccttccgctattgcgtcacacgttgccgctgagtgtcccagtaagtgcttggtggaggttcttatcgctatttctagccttacctcacccttgctgttcactgcttctgggtacctaagtttcagtattatgaggattgtagagatgtttaaggattatccaccggctataaaaccctcgtacgatgtcctactactgctccttctgcttgtgctgctcctgcaagccggtctgaacaccggaactgctatacaatgtgttcgattcaaggtttcagcaagattgcaaggggcttcctgggacacacagaatggcccacaggaacgtttagcaggtgaggtggccagatcccccctgaaagagttcgataaggagaaagcttggcgagccgtagtggttcagatggcgcagtag

SEQ ID NO: 229977 - DNA, 672 bp, synthetic construct
  misc_feature 1..672: note = Description of Artificial Sequence: Synthetic coding sequence
  source 1..672: mol_type = other DNA
atgactcaagaacccttccgggaagagctcgcgtacgaccggatgccgacactcgagcgaggccgtcaggaccccgcttcttatgctcccgacgccaaaccaagcgacttacagctctccaagaggctgccaccctgtttttcccataagacatgggtgtttagcgtccttatggggtgcatcccttctgctatcgtgagctttaccgtgtcaaggagaaatgctaatgtgattccaaactttcagatcctttttgtgtctaccttcgcagtgacgacaacttgcctaatatggtttggatgtaagctcgtactgaatcccagtgctatcaatataaattttaacctgatactgttgctgcttctggaattgctgatggcagccacagtcataattgcagcgaggtcttcggaggaggattgcaagaaaaagaagggtagtatgagcgattccgcaaatatccttgacgaagtcccctttccagcgcgtgtgcttaagtcctatagtgtggtggaggtgatcgccggtatctccgccgtgctaggcggaattatcgccctaaacgtggacgactccgtctctggaccgcatctctctgttacctttttctggatcctggtagcctgctttcccagcgccatcgcctcccatgtcgccgctgaatgtccttag

SEQ ID NO: 229978 - DNA, 978 bp, synthetic construct
  misc_feature 1..978: note = Description of Artificial Sequence: Synthetic coding sequence
  source 1..978: mol_type = other DNA
atgacacaagagcccttccgagaggagcttgcatacgacagaatgcccacgctagagcggggaagacaggaccccgcttcctacgcgccagacgctaaaccttccgacttgcaactgtcaaaacggctgcccccttgcttcagtcacaaaacctgggtcttttcagttctgatgggctcgtgtctgctggtgacgtcaggattttccttatatctcggcaacgttttcccagctgagatggattatctgcggtgcgctgctggttctattaatttcaacctgatcctccttctactccttgagctattaatggctgcaacagtgatcatcgccgctcgatcctccgaggaagactgtaagaaaaaaaaggggtcaatgtcagattccgccaacatcctggacgaggtacccttcccggcacgcgtgctgaagtcctattctgtggtagaggtcatcgctggcatcagtgctgtcctcggcggaatcatcgcactgaacgtcgacgattccgtgtccgggccacacctgtccgtgacatttttctggatcctagtagcctgtttcccatccgccattgcttctcatgtggctgcggagtgcccatctaagtgcttagtggaggtcttgatcgctatctctagcctgacttcaccactgctgtttactgcgagcgggtatttgtcgttctcaattatgcggatcgtggaaatgtttaaggactacccaccagccattaaaccaagttacgacgttttactgctgctccttctactggtgctgctcctccaggcaggcctgaatacgggcacagccatccagtgtgtgaggtttaaagtctctgcacgactgcagggtgccagctgggacacccaaaatggaccccaggaaagactggctggggaggttgctagaagtcccctcaaggaatttgataaggagaaggcatggagagctgtggtcgtgcagatggcccaatag

SEQ ID NO: 229979 - DNA, 897 bp, synthetic construct
  misc_feature 1..897: note = Description of Artificial Sequence: Synthetic coding sequence
  source 1..897: mol_type = other DNA
atggattatctgcgctgtgccgctggttcatgcattccttccgcaatcgtgtcattcaccgtgtcaagaaggaatgccaatgtcattcccaattttcaaatccttttcgtgtcgaccttcgcagttaccactacttgcctgatttggttcggctgcaaactggtgctgaaccccagcgctatcaatattaatttcaacctgatactcttgctgctcttggagttgttgatggccgctaccgtgattatagccgcacgctccagcgaggaagattgtaagaagaagaaggggagcatgtctgacagcgccaatattctggatgaggtcccttttccagctagggtcttgaagagctacagcgttgtggaggttatcgctgggatttcggcggtcctcggcggtattatagcgcttaacgtggatgatagcgtgtccggccctcacctgtcagtgaccttcttttggatcctagtggcgtgcttcccctccgccattgcttctcacgttgcagccgaatgcccgagcaagtgtctcgtagaagtactgatcgccattagtagtctaacttcgccactgctctttactgcctctggctatctgtccttctctattatgcgcattgtagaaatgtttaaggattacccacctgccatcaagccctcatatgacgttttgctgctgttgctgctccttgtgctgctgctacaggcaggcctaaacaccgggaccgcaatccagtgcgtgagatttaaggtttccgcccgtcttcaaggagcctcctgggatacccagaatgggccacaagagcgtctggccggtgaggtggccaggtccccgctgaaggagtttgataaagagaaagcctggcgagccgttgttgtgcagatggctcagtag

SEQ ID NO: 229980 - DNA, 1032 bp, synthetic construct
  misc_feature 1..1032: note = Description of Artificial Sequence: Synthetic coding sequence
  source 1..1032: mol_type = other DNA
atgacccaagaaccgttccgggaagaactagcttacgataggatgcctacccttgaacggggacggcaggatcccgcatcatacgccccagatgctaagccaagcgacctacagctatctaaacgactccccccttgctttagccacaaaacttgggtcttttcggtgttaatggggtcttgtctgcttgtcacctctggtttctccctgtatcttggtaatgtgtttcccgctgagatggattatctccgctgtgctgcaggatcctgcattccttcagctatcgtttctttcacagttagtaggaggaatgccaatgttatcaacttcaacctcattctcctgctgttgctcgaattacttatggctgcaaccgttatcattgcagcacgatctagcgaggaggattgtaagaagaaaaaggggtccatgtccgactccgccaatatacttgacgaggttccattccctgcccgtgttctgaaaagttacagcgtggttgaggtcatcgccggtatctctgccgtgttgggagggatcatagcacttaacgtggatgacagcgtgagcggcccacatctctccgtcacatttttctggattcttgtagcatgctttcctagcgcaatagcgtcccacgttgctgccgagtgcccaagtaagtgtctagttgaggtgctgatcgctatttcctctctaacatctcccctcttgtttaccgcgtctggctatctgagcttcagcattatgaggattgtcgagatgtttaaggattatcctcctgctataaaacccagctatgacgtgctgcttctattactgctgctcgtcctgctacttcaggccggactgaacaccgggaccgccattcagtgtgtgagatttaaagtaagcgctcgactgcaaggggcttcctgggacactcagaacggcccacaggaaaggttggcaggcgaagtggcacggagtcctctgaaggaattcgataaggagaaggcatggcgggcagtggtagtgcagatggcccagtag

SEQ ID NO: 229981 - DNA, 267 bp, synthetic construct
  misc_feature 1..267: note = Description of Artificial Sequence: Synthetic coding sequence
  source 1..267: mol_type = other DNA
atggcatcaagcgacgtcaagcccaagagtgttagccatgcgaagaaatggagcgaggagatcgaaaatctgtatcggttccagcaagcgggttatcgtgacgagacagagtatcggcaggtcaagcaggtgtcaatggttgacaggtggccagagacagggtacgttaagaagctccagaggagagacaatacattctactactataacaagcagagagagtgcgatgataaagaggttcataaggtcaaaatatacgcatactag

SEQ ID NO: 229982 - DNA, 267 bp, synthetic construct
  misc_feature 1..267: note = Description of Artificial Sequence: Synthetic coding sequence
  source 1..267: mol_type = other DNA
atggcaagttcagacgtgaaacccaaaagtgtgtcacatgctaagaagtggagcgaggaaattgaaaatctgtaccgtttccaacaagcaggctatcgggacgaaacagaatataggcaggttaaacaggtcagcatggtggataggtggccggaaaccgggtatgtgaaaaagctccagcgacgcgacaacactttctactactacaataagcagcgggagtgtgatgacaaggaggtgcataaagtgaaaatatacgcctattag

SEQ ID NO: 229983 - DNA, 1488 bp, synthetic construct
  misc_feature 1..1488: note = Description of Artificial Sequence: Synthetic coding sequence
  source 1..1488: mol_type = other DNA
atgggatctaaaagaaggaacctgagttgctctgaaaggcatcagaagctagttgacgagaactattgtaagaaactccacgtgcaagcactgaagaatgtgaattctcagatccggaatcaaatggtccagaatgagaatgacaatcgggtgcagcgcaaacagtttttacgtctgcttcagaatgaacagttcgaattggatatggaagaggcgatacagaaggctgaggaaaacaaaaggctcaaggagctccagttgaagcaagaggagaagttggctatggaacttgccaagctgaaacacgagagtctgaaggacgagaagatgaggcaacaggtgcgggaaaatagtatcgaactgagggagttggagaagaaactcaaagccgcttacatgaacaaggaacgggcagcacaaattgcagagaaggatgccattaaatatgaacagatgaagagggatgccgagattgcaaagacgatgatggaggaacataaacggataattaaggaggagaatgcagccgaggacaagcggaacaaggctaaggcccaatattatctggacctggaaaagcaactagaagagcaggagaagaagaaacaggaggcctacgaacagctcctcaaggagaaactcatgatagacgagatcgttcggaagatttacgaggaggaccaactggagaaacaacagaagctagaaaaaatgaacgccatgcggagatacatcgaagaattccaaaaggagcaagccttgtggagaaagaagaaacgagaagaaatggaggaggagaaccgaaaaatcattgaattcgccaatatgcagcagcaacgggaagaagaccgcatggccaaggtacaggaaaatgaagagaagcgactgcagctgcaaaacgcccttacacagaaactcgaggaaatgctccggcagagagaggacctggaacaagttaggcaggaactgtaccaggaggagcaggcagagatatataaatccaagctgaaggaagaagccgagaagaaattgcgaaagcagaaagaaatgaaacaagactttgaagagcagatggccttgaaggaacttgtcctgcaggcagctaaagaggaagaagagaacttccgcaaaactatgctggccaagttcgctgaggacgacagaattgagttaatgaatgcacagaaacagcgcatgaagcaacttgagcatcggagagcagtcgagaagttgattgaagaacgtagacagcagttcctcgctgacaagcagagagagctcgaagaatggcagcttcagcagcggcgacagggcttcataaatgccataattgaggaagagaggctcaagctgcttaaagaacatgctacgaacctgctgggctatctccctaagggagtgttcaagaaagaggacgatatcgacctcctgggtgaagaatttcggaaggtgtaccagcagaggtccgagatctgtgaagagaagtag

SEQ ID NO: 229984 - DNA, 1173 bp, synthetic construct
  misc_feature 1..1173: note = Description of Artificial Sequence: Synthetic coding sequence
  source 1..1173: mol_type = other DNA
atggcacagcgctatgacgacctgccccattacggaggcatggatggtgtcgggattcccagtactatgtacggagatcctcatgctgcacgttcaatgcagcctgtgcatcatctgaatcacggtccgcctctgcattcccatcagtacccacataccgctcataccaatgccatggccccttctatgggatcatcggtcaatgatgctttgaagcgtgacaaggacgccatatatgggcaccctctgttccccctcctggccttaatcttcgagaagtgtgaacttgccacctgcactcctcgggagcccggagtcgccggtggcgacgtgtgctctagcgaatctttcaacgaggacattgcggttttcgcgaagcaaattcgcgctgaaaaacctttatttagcagcaacccggagctcgacaatctcatgatccaggcaattcaagtcctgagattccacttacttgaacttgaaaaggtgcatgagctttgcgataatttttgccacaggtatattagctgcctgaaagggaaaatgccaatcgacctggtcattgatgaccgcgagggagggagcaaatcagatagtgaagatattacacgatcagcgaacctcactgaccagccaagttggaacagggatcacgatgatactgccagtactcgaagcggaggaactccgggacctagttccggcggtcacacatcgcacagtggagataactcttctgaacagggcgacgggctggataattcagtggccagtcccagtaccggagatgacgatgaccctgataaagataagaaaaggcacaagaagaggggaatctttcccaaggttgcaaccaacattatgagagcttggctcttccagcacttgacacatccctatccttctgaagaacagaagaagcaactagcccaggacactggcttaactattctgcaggtgaataactggttcattaatgcgcgtcggaggatcgttcaacctatgatcgatcaaagtaacagagctgtgtcccagggtacaccctataaccccgacgggcagcctatgggcggattcgtgatggacggacaacagcatatgggcatccgagcccctgggccaatgagtggaatggggatgaacatgggcatggaaggccagtggcactacatgtag

SEQ ID NO: 229985 - DNA, 1392 bp, synthetic construct
  misc_feature 1..1392: note = Description of Artificial Sequence: Synthetic coding sequence
  source 1..1392: mol_type = other DNA
atgcagtacgatgacctgccccattatggcggaatggatggtgtgggaatcccaagtaccatgtacggtgatcctcatgcggctcgttccatgcaacccgtgcaccacctcaaccacggacctcctctgcacagtcaccagtacccccatactgcccatactaacgccatggccccttcaatgggctcttctgttaatgacgcattgaaaagggacaaagatgccatttacggacaccccctgttcccgctcctggctttgatttttgagaaatgcgagctcgctacatgtacaccacgtgaaccgggtgtggcagggggagatgtatgttcgagcgagagttttaacgaggatatcgctgtgtttgccaaacaaattcgcgctgagaagcccttattctctagcaaccccgagctcgataacctaatgatacaggccatccaggtgctgagattccacttactggagctggagaaggtgcatgagctgtgcgataacttttgccacagatacatcagctgtctgaaaggcaagatgcctatcgatctggtgatcgacgacagggaaggaggcagtaagtccgattcagaggacatcacacgatccgccaatcttacagaccagcctagttggaaccgggatcatgatgatacagcaagcaccagatccggaggcactcccggaccttcgtccggtggtcacacctctcactccggtgacaattcatccgaacagggtgacgggctggataactcagtcgcctcgccatctactggcgatgacgacgaccctgacaaggacaagaaacgccataagaaaagaggaattttccccaaggtagcgactaatattatgagggcgtggttatttcagcatttaacgcacccttaccccagcgaagagcaaaaaaaacagctggcccaagacacaggtctcaccatattgcaagtcaataactggtttataaacgcccgtcgcagaattgtgcagcctatgattgatcagtctaatcgggcagtcagccagggcacgccttacaatccagacggacaaccgatgggcggttttgtgatggacgggcagcagcacatgggaatcagggcccctggtttgcagtctatgcctggcgaatatgtggctcgaggtggtcctatgggcgtgagtatgggtcagccatcatacacacagcctcagatgcctccccaccctgcccagctcaggcacggaccaccgatgcacacgtatatcccagggcatccgcaccatcctaccgtcatgatgcacggagggccacctcaccctggcatgccgatgtctgcctccagtccaaccgttctgaataccggcgatccgacaatgagcggccaggtaatggatatccatgcacagtag

SEQ ID NO: 229986 - DNA, 762 bp, synthetic construct
  misc_feature 1..762: note = Description of Artificial Sequence: Synthetic coding sequence
  source 1..762: mol_type = other DNA
atgattcaagcgatccaagtgttgagattccatctgctcgaactggagaaagtacacgaactgtgcgacaacttttgccaccgatacatttcctgtctgaaaggaaagatgccgatcgacctggtcattgacgacagggaggggggatctaaatcagactcagaagacattactaggagcgccaatctcacggaccagcccagttggaatcgggaccacgacgatactgcaagtactcggtcaggcggaacacccggaccttcttcgggagggcacacatctcacagtggagacaacagctccgaacagggcgacggattagataatagtgtggcctccccttccactggggacgacgacgatcccgataaagacaaaaagagacacaagaagcgcggaatattccccaaggtggctactaatattatgcgtgcttggctcttccaacacctaactcacccctacccaagtgaggaacagaaaaaacagttggcgcaagacaccggcctcaccatcctccaggttaataattggtttatcaatgcaaggcgccgtatcgtccagcctatgatcgatcagtctaaccgcgcagtatctcaggggaccccttataatcctgatgggcagcctatggggggattcgttatggatgggcagcagcacatggggatacgggcaccgggtccaatgagtggtatgggtatgaatatgggcccaccatgtatcagaacgttcctggataccctgacgacgcaacaatag

SEQ ID NO: 229987 - DNA, 1398 bp, synthetic construct
  misc_feature 1..1398: note = Description of Artificial Sequence: Synthetic coding sequence
  source 1..1398: mol_type = other DNA
atggcccagcggtatgatgacttaccgcactatggtggaatggatggtgttggcattccatcgacgatgtacggggacccgcatgctgcacgctctatgcagcctgtgcaccacctgaaccacggcccaccattacacagtcaccagtatccccatactgcacataccaatgctatggccccttccatggggtcctccgttaatgacgctctgaaaagagacaaagacgcaatctatggccatcctctgtttcccttgttggctttaatcttcgaaaagtgtgaactggccacctgcacaccacgcgaaccaggcgtggcgggaggagacgtgtgcagcagcgaaagcttcaacgaggacattgctgttttcgccaagcagatcagagctgaaaagccattattttcgagcaaccctgagttagataacttgatgatacaggccattcaggtactgaggtttcacctcctcgaactggaaaaggtgcatgagctgtgcgacaatttttgtcacaggtacattagctgtcttaaagggaaaatgcccatagatctcgttatagacgaccgagagggcggttccaaatctgacagcgaggacataactcggtccgcaaatctcactgatcagccatcctggaaccgagatcatgatgacaccgctagcactcggtccgggggaactcctgggccaagttctggcggacacaccagccacagtggcgataatagttccgagcagggtgatgggctggacaactccgtcgcatcaccctccactggcgatgacgacgacccagacaaagacaaaaaaagacataaaaaacggggtatcttcccgaaggtcgcaacgaatatcatgagggcgtggctgtttcagcacctgacccacccttatccaagcgaagaacagaagaagcagttggcccaggacactggactgaccatactacaggtgaataactggttcatcaacgctcgacgcaggatcgtgcagcctatgatcgaccaaagcaatagagctgttagtcaggggaccccctacaatccagatggacaacccatggggggttttgtgatggacggacaacaacacatgggaattagggctcccggactccagtcaatgccaggagagtacgttgcccgtggcggtccgatgggcgtgagcatgggtcagccctcatacacccagccccaaatgcctccccaccctgcacagctgcgacacggaccgcctatgcatacttatattcctggacaccctcatcaccctacagtaatgatgcacggcggacctccccatcccggtatgcccatgtcagccagtagccccacagtgctgaacacaggggaccccacaatgtctggccaagtgatggatattcatgctcagtag

SEQ ID NO: 229988 - DNA, 423 bp, synthetic construct
  misc_feature 1..423: note = Description of Artificial Sequence: Synthetic coding sequence
  source 1..423: mol_type = other DNA
atgaagaagaacggtgacgagaagtcacctctggggacagagatcatgatgactaggcacctcttggttcaagaagaacctcaggctcttcctgctgtggccacccggcacaccgtgggtaccacagcggtatctaagcacccttatccatctgaggagcagaagaagcaacttgcccaggacaccggactcaccatccttcaggtgaacaattggttcataaacgctcgacggaggattgtccagcccatgatagaccagtccaatcgggcagtctctcaaggcacaccttataatccagacggtcaaccaatgggaggctttgtgatggacgggcaacagcacatgggcattcgtgcaccaggccctatgagtggcatgggaatgaatatgggtatggaaggccagtggcattacatgtag

SEQ ID NO: 229989 - DNA, 663 bp, synthetic construct
  misc_feature 1..663: note = Description of Artificial Sequence: Synthetic coding sequence
  source 1..663: mol_type = other DNA
atgcaaccggtgcaccacttgaatcacggacccccactgcacagtcaccagtacccccacaccgcacacacaaatgccatggcccctagcatgggcagttcggtcaatgatgcactaaagagagacaaggatgccatttatggccacccgctctttccattgctcgcacttatctttgagaagtgcgaattggccacatgcaccccacgtgaacccggtgtcgcaggaggtgatgtctgctctagcgaatcatttaatgaggacatcgctgtctttgcaaagcagattcgagctgagaagcctctgttttcatccaatccagaacttgataacctcatgattcaagccatacaggtgttacgctttcacctcttggagctggagaaggtgcacgaactctgcgataatttttgccacaggtacatatcttgtttaaaaggcaagatgccgatagaccttgtcatcgacgaccgcgagggcggatcgaagtccgactcagaggatatcacaaggtctgcaaatctgacggaccagccctcatggaatagagaccatgatgacaccgcctccaccagaagtggcggaacacccggacccagttccggagggcacacatcccattccggtgacaacagcagcgaacaggcaccactaccgttctag

SEQ ID NO: 229990 - DNA, 540 bp, synthetic construct
  misc_feature 1..540: note = Description of Artificial Sequence: Synthetic coding sequence
  source 1..540: mol_type = other DNA
atgaagtcactcctgactttctacaagtgtggatccgagctcctccctgcagctgtgtggagtgctggtgggtctccatcactgttcagcgacctgaagtccaagaagggaaagaaattctctagagatcacatcgaagtcaccatcagcaactgcggcgtaaatggcaacgcgaagggcgatggactcgataatagcgtagcatccccttctaccggtgatgacgacgatccggataaagataagaagcggcataaaaagcgtggcattttcccgaaagttgctaccaatattatgcgcgcatggctctttcagcatctcacccacccgtacccctcggaggagcagaagaaacagctagctcaggatacaggattgaccatattgcaggtgaacaactggtttataaacgccagacggaggatcgtgcaaccaatgattgatcagagtaaccgagcggtgagccagggaactccttataatcccgatggacagccgatgggcggtttcgtcatggacggtcagcagcacatggggtag

SEQ ID NO: 229991 - DNA, 978 bp, synthetic construct
  misc_feature 1..978: note = Description of Artificial Sequence: Synthetic coding sequence
  source 1..978: mol_type = other DNA
atggcccaaggactccgtctacaaggtagccgtcggaaaggtagacaccctttatttccactgctggccctgatctttgagaaatgtgaactagccacgtgtactcctagggaaccaggagtggccggtggagatgtatgctctagcgagtccttcaatgaggacatcgccgtcttcgctaaacagatcagagcagagaaacccctattttcatccaacccggagttggacaatttaatgattcaggcaatccaggtgctccgatttcatcttcttgagctcgaaaaagttcacgagttgtgtgacaatttttgtcaccgctacatttcctgtctgaaaggtaagatgccgattgatcttgtaatcgacgaccgagaaggaggatcaaagtccgattccgaggacatcactcggagtgctaacctgaccgaccaaccttcctggaatagggaccatgacgacacagcatctacacgctcggggggaacaccaggaccctcttcagggggtcacacttctcattccggtgacaattcaagcgagcagggcgatggcctcgacaactcagtcgctagcccctctacaggcgacgatgatgaccctgataaggataagaagcgccataaaaagcgtggaatttttccaaaggtggcgaccaacattatgcgcgcatggctgttccagcacctgacacatccctatcctagcgaagagcagaagaagcaactggctcaggataccggtctgactatcctccaagtgaacaactggtttattaatgcccgacgacgcatcgtgcagccgatgattgatcagtctaaccgagcagtttcgcagggaacaccctacaacccggatgggcagccaatgggcggattcgtcatggacgggcagcagcacatgggaatcagagcccctggccctatgtctgggatggggatgaatatgggaatggaggggcagtggcactatatgtag

SEQ ID NO: 229992 - DNA, 1113 bp, synthetic construct
  misc_feature 1..1113: note = Description of Artificial Sequence: Synthetic coding sequence
  source 1..1113: mol_type = other DNA
atggcccagcggtacgatgacctccctcattacgggggaatggacggcgtcgggatccctagcacaatgtacggcgatccgcatgcagcaagaagcatgcagccggtgcaccacttgaaccacgggccaccactccactctcatcagtacccccatacagctcatactaacgctatggctccttccatggggagttctgttaacgatgcgttaaagcgtgacaaagatgcgatttatggtcatccactctttccacttctcgccttgatcttcgagaaatgtgagttggcgacttgtacacccagggaaccaggagtggcaggcggtgatgtgtgctctagcgaatcttttaacgaggatattgctgtgtttgcgaaacagatccgggcagagaagcccctgttcagctctaaccccgagctggacaatctgatgattcaggcaatccaagtgctgcgttttcatctgctggagctcgagaaggtccacgaactctgcgataacttttgccatcgctatatatcttgtctgaaggggaagatgccaatagatctcgtaatcgatgatcgggaaggaggttcgaaatccgattccgaggacattacccggtctgcaaatcttactgatcagccgagctggaatagggatcacgatgacacagcctcgacccgcagcggagggactcccggaccatcatcgggtggacatacgtcccattcaggcgataacagttccgagcaaggcgacggtttagacaacagcgtggctagtcctagcaccggggatgatgatgacccagacaaagacaagaagcgccacaaaaaacgcggaatctttcctaaggtggccaccaacatcatgcgtgcgtggttgttccagcatcttactcacccctacccctcagaggagcagaaaaaacagctcgcacaggacacgggcctgacgatcctgcaagtaaataattggttcattaacgccaggcgcagaattgtgcagccaatgatcgaccagagcaatcgcgcagggaaatctcctattgttacagtgttcaaatcccggaagcggaagccaagctcatcgcattccccagggggtccgcttcccggaaagtag

SEQ ID NO: 229993 - DNA, 2259 bp, synthetic construct
  misc_feature 1..2259: note = Description of Artificial Sequence: Synthetic coding sequence
  source 1..2259: mol_type = other DNA
acaacggccatggctcacaggaagcttgaatcggtgggaagtgggatgctggaccacagggtgaggcccggtcctgtgccacacagtcaggagcccgagagcgaggacatggagctccccttagagggatacgtccccgaaggcttagagctggccgcactgagacctgaatctccagccccagaggagcaagaatgccacaatcatagccctgacggcgactcatcttctgattacgtaaataacacctctgaagaagaggattatgacgaggggctacctgaggaggaggagggaataacctactacataaggtattgccctgaggatgattcctacctcgaggggatggattgtaatggagaggagtacctggcccatagcgcgcaccccgtcgacacagacgaatgccaagaggccgtagaagagtggaccgacagtgcagggcctcacccccatgggcatgaggctgagggatcgcaggattaccccgacgggcagctgcctattcccgaagacgagccgtcagttctcgaggcccacgatcaggaggaggacggccactactgcgcttctaaggaaggctaccaggattactacccggaagaggcaaatgggaacacaggcgcaagcccttataggctacgcagaggggacggcgatctggaagaccaggaagaggatatagatcagatcgtggctgagattaagatgagcctgagtatgacatctatcacctcggcgagtgaggcttcccccgagcacggacccgagcctgggccagaggacagtgtggaagcctgtcctcccatcaaggcaagttgctccccatcaaggcatgaagccaggcccaaaagcctgaatctgctacccgaggcaaagcaccctggggatcctcaacgcggtttcaagccaaaaacccggaccccagaagaacgactgaagtggccacacgagcaggtttgcaacggcctggaacagcccagaaagcagcaacgctcagacttaaatggcccagtagataataataatattcctgagacaaagaaggtggccagctttcccagctttgtggcagtgccaggcccttgtgaacccgaagatttgattgacggtattatcttcgcagctaactacctcgggagcacccaactcctctccgaaagaaacccttccaagaacatccgtatgatgcaagcccaggaagccgtctctcgtgtcaaaaggatgcagaaggccgctaagattaagaagaaagctaatagtgagggcgacgcgcagacgttgaccgaagtggatctgttcatctctacacaacgcatcaaagtgctaaacgcagacacgcaagagacgatgatggaccacgccttaaggactatatcttacatcgccgacataggcaacatcgttgtgttaatggccaggaggcggatgcccaggtccgcgtcacaagactgtatcgagacaaccccgggagcgcaggaaggtaagaagcagtataaaatgatttgccacgtctttgagtccgaggacgcccaacttatcgcccagtccattggacaagccttctctgtcgcataccaagagttcttacgggcaaacggaattaaccctgaggacctctctcagaaagagtattccgacattattaacacccaagaaatgtacaatgatgacttaattcacttcagcaattccgagaactgtaaagagctacagctggaaaagcacaaaggtgagattctgggcgttgtggttgtcgagtccgggtgggggtcaatcctcccaactgttattctggccaacatgatgaacggaggaccagctgccagatccgggaaattgtctattggagaccaaatcatgtctatcaacggtaccagtctggtgggcctccccttagctacctgtcagggaatcatcaaaggtttaaagaaccagacacaggtgaagctgaatatcgtctcttgcccccctgtcacaacagtgctcatcaagagaccagacctgaagtatcaactgggattcagcgtccagaatgggatcatctgttcgctcatgagaggaggcatagcagagcgaggaggcgtcagggtcggccatcgcataatagaaataaatggacagtctgtggtcgcaactgcacatgagaagatagttcaggctttgagtaattccgtgggtgagatacacatgaagactatgcctgctgccatgtttcggctcctcactggtcaggagacgccgctgtatatctag

SEQ ID NO: 229994 - DNA, 1413 bp, synthetic construct
  misc_feature 1..1413: note = Description of Artificial Sequence: Synthetic coding sequence
  source 1..1413: mol_type = other DNA
atggctcagcggtacgacgagctgcctcattatgggggtatggatggtgttggtgtccccgcatctatgtatggagacccccatgcaccacgcccaattcccccagtgcaccacctaaaccatggaccccctctccatgcaacccagcactacggcgctcatgccccacaccccaatgttatgccagcttccatgggatctgcagtaaatgatgcattaaaaagggacaaagatgccatctatgggcatcctctgtttcccctcctcgcacttgttttcgagaagtgcgaattggctacctgcaccccccgagaacctggcgtcgccggtggcgacgtgtgcagcagcgattccttcaacgaggacatcgccgtgtttgctaagcaagtgcgagccgagaaaccacttttctccagcaatcctgagcttgacaacctaatgattcaggcgattcaagtcctccgctttcacctattggaactcgagaaggtgcacgagctgtgtgataacttctgtcaccgatatataagctgtttgaagggaaaaatgccaatcgatctggtaatagacgaaagggatgggagtagcaagagcgatcatgaggagctcagcggcagttccacgaaccttgctgatcacaatccgtctagttggcgtgaccacgatgatgcgacatccactcactcggccggtacccctggaccttcttcggggggtcacgcaagccagagtggcgataattcttccgagcagggcgacgggctggacaatagcgtggcctccccgggaaccggggatgatgacgaccctgataaggataaaaagcggcagaagaagcgtggcattttcccaaaggtggcaactaatattatgagggcgtggctgtttcaacatcttactcatccatatccatcggaagaacagaagaaacagctcgcccaagatacagggctgaccatactccaggtgaacaactggttcatcaatgccaggcggcgaatcgtgcagcctatgattgaccagagtaaccgcgcagtgagtcagggcgcagcgtattctcccgagggacagcccatggggtcctttgtgctcgacggtcagcagcatatgggtattaggcctgccggactgcagtcaatgcccggtgactacgtgtcccaaggtggcccaatggggatgtctatggctcagcccagctataccccgccacagatgacgcctcaccctacccagctgcgtcacgggccaccaatgcactcgtatctgcctagtcaccctcaccacccagcaatgatgatgcacgggggaccaccgacacatcccggaatgacgatgtcagctcagagccccaccatgttgaactccgtggaccccaatgtgggcggacaagtgatggatatccacgcccagtag

SEQ ID NO: 229995 - DNA, 1146 bp, synthetic construct
  misc_feature 1..1146: note = Description of Artificial Sequence: Synthetic coding sequence
  source 1..1146: mol_type = other DNA
atggacggtgttggagtgcccgctagcatgtatggggaccctcatgcaccgaggcccattccaccagtgcaccacctaaatcatggcccaccattgcacgcaacccagcactacggtgcacacgcaccacatcccaacgttatgccggcatccatgggatcagctgtgaacgacgcattaaaaagggacaaggacgctatatatggccaccccctctttcccctcctcgcattagtcttcgagaaatgtgagcttgctacctgcactcccagagagcccggtgtggctggaggcgacgtctgcagtagtgattccttcaatgaggacattgctgtgttcgccaaacaagtacgtgcagaaaagccgctcttctcaagcaatccggagctggacaacttaatgatccaggcgatccaggtgctccgctttcatctcttggaactcgaaaaagtccatgaactgtgcgataacttttgccaccgctatatctcatgtttgaagggcaagatgcccatcgatctggtgatcgacgaacgggacggttcatctaagagcgaccacgaagagctgtctggcagcagtacgaatctggctgaccacaaccccagctcttggcgcgatcacgacgacgctacatctacacattcagcaggaacccccggaccttcaagtggtggacacgcatcacagagcggggacaattcctccgagcaaggtgacgggctggataattcagttgcctctcccggaactggagatgacgatgatcctgacaaagataaaaaaaggcagaaaaaacgtggtatcttcccaaaagttgcgacgaacattatgcgggcttggctatttcagcatttgacccacccatatcccagcgaagagcagaagaagcagctagcacaggataccggcctgactattctgcaggttaacaactggtttatcaatgcaaggagacgcattgttcagcctatgatcgatcagagcaaccgcgcagtatctcagggagccgcatacagcccggaaggccagcccatgggcagcttcgtgttggacggtcagcaacatatgggaatacgccctgccggtccaatgtccgggatgggtatgaacatggggatggatggtcaatggcactacatgtag

SEQ ID NO: 229996 - DNA, 1413 bp, synthetic construct
  misc_feature 1..1413: note = Description of Artificial Sequence: Synthetic coding sequence
  source 1..1413: mol_type = other DNA
atggcccagcgctatgatgagctgccgcattatggtggtatggacggagtgggcgtgcccgcatctatgtacggcgatccacatgctccacgccctattccccctgtccatcacctcaatcatggtcctccactacacgcaacacagcattatggcgcacacgccccacatcccaacgttatgcctgctagtatggggtcagcagtcaatgacgcactgaaaagagacaaagacgctatctatggccaccctctcttccctctgctagccttggtgttcgaaaagtgcgagttagccacctgtactcctagggaacccggtgttgctggcggagatgtgtgctcaagtgactctttcaacgaggacatagccgtctttgcgaagcaggttagagccgaaaagcctctgttctcaagtaatccggagttggataacctgatgattcaggctatccaggttttaagattccatctcttagagctggaaaaggtgcacgaactgtgcgacaacttctgtcaccgctacatcagttgtttgaagggtaaaatgcccattgatttagtaattgatgagcgcgatgggtcgtccaagtctgaccatgaagagctatccggttcttctacaaacttggccgatcacaatccctcttcatggcgggaccatgacgatgccacatccacgcacagcgctggcacacccggtccaagcagcggcggacacgcttcccagagcggtgacaacagttccgaacaaggcgacggcttggataacagtgtggctagcccaggcaccggcgatgatgacgatccagataaagacaaaaagagacaaaagaagcggggtatcttcccaaaggtcgcgaccaacataatgcgagcttggctttttcaacacttgacccatccatacccttccgaagagcagaagaaacaactggcacaggacaccggcctgacgatattgcaggtaaataattggtttatcaatgcccgacgtcggatcgtacaaccaatgatcgatcagagcaaccgagccgtgtcccagggcgctgcttattcacccgagggtcaaccaatggggtccttcgtgctggacggacagcagcatatggggatacggcctgcgggtctgcagtccatgccaggcgactacgttagccagggaggccctatgggcatgagtatggcacagccatcttatacccctcctcagatgacacctcaccctacccagttaaggcacggaccacctatgcattcctacctcccatcccacccacaccaccccgcaatgatgatgcatgggggacctcccactcatccagggatgaccatgagcgcgcagagcccaaccatgttaaacagtgtggatcctaatgtcggtggacaggtgatggatattcacgcccagtag

SEQ ID NO: 229997 - DNA, 921 bp, synthetic construct
  misc_feature 1..921: note = Description of Artificial Sequence: Synthetic coding sequence
  source 1..921: mol_type = other DNA
atggctttggtatttgagaaatgcgaactggctacttgcacacctcgggagcctggcgtcgccggaggagatgtttgcagcagtgattctttcaacgaggatatcgccgtcttcgctaagcaggtgcgcgcagagaaacctctgttttctagcaatccagagctggacaatctgatgatccaagccattcaggttctccggtttcacctcttggagctggaaaaggtgcacgaactgtgtgataacttttgccaccgctacatctcctgcctcaaaggcaaaatgcccatcgatttggttatcgatgagcgagacggatcaagtaaatctgatcacgaagagctgagtggctcctcaaccaatctggctgaccataacccatcttcttggagagatcatgacgatgcgacatcaacccacagcgccggtactcccggaccttctagtggtggtcacgcctcccaatccggcgacaattcatctgagcaaggagatgggctcgacaattccgtggcatcacccggaacaggcgacgatgacgatccagataaagataagaaacgccagaaaaagcgaggtatctttccaaaggtcgcaactaatataatgagagcttggttgttccagcacctgactcatccatacccttcagaagagcaaaagaagcagctggctcaggataccggccttacaatcctgcaggtaaacaactggtttataaatgctcggaggcggatagttcagcctatgattgaccaaagcaaccgcgcagtaagccagggtgccgcatacagtcctgagggccaaccaatgggttcttttgtgctggacgggcagcagcacatgggcattaggccagccggacctatgtctgggatgggaatgaatatgggaatggatggacagtggcactacatgtag

SEQ ID NO: 229998 - DNA, 921 bp, synthetic construct
  misc_feature 1..921: note = Description of Artificial Sequence: Synthetic coding sequence
  source 1..921: mol_type = other DNA
atggctctcgttttcgaaaagtgtgaactggcaacctgcactcctagagagccaggagtagctgggggtgacgtgtgctcaagtgactcttttaacgaggatatagcggttttcgctaagcaggtacgcgctgagaaaccacttttcagttcaaaccccgaactggacaatctcatgatacaggcgattcaggttctcagatttcaccttctagaactcgaaaaggtccacgaactctgtgataacttctgtcacagatacatatcatgtctaaaagggaagatgcctatcgatctggtgattgatgaacgggacggcagctccaagagcgatcacgaggagctgtcgggctcatccacgaacctcgcagaccacaacccttcttcatggagagatcacgacgatgcaacctccacccacagtgccggaactcccggtccttccagcggcggacacgcgtcccagtcaggagataactctagcgaacagggagacgggctcgataattcagttgccagcccgggtacaggagatgacgacgatcctgataaagataaaaagcggcagaagaagcgtggcattttccctaaagttgcaacaaacattatgcgggcttggctttttcagcacctgacccacccctatcctagcgaggagcaaaaaaagcagctcgctcaggacacagggctgacaatcctgcaggtgaataattggtttattaatgcccgacggagaatcgtccagccaatgattgaccagtcaaatcgggctgtttcccagggggcagcttacagccccgaggggcagccaatgggttcctttgtgctggacgggcaacagcatatgggcatccgacccgctggaccaatgagcggaatgggcatgaatatggggatggacggacagtggcactacatgtag

SEQ ID NO: 229999 - DNA, 1206 bp, synthetic construct
  misc_feature 1..1206: note = Description of Artificial Sequence: Synthetic coding sequence
  source 1..1206: mol_type = other DNA
atggcacagcggtacgacgaactaccccattatgggggaatggatggcgtgggggttcctgccagcatgtatggcgacccgcatgcgccacgccctatcccccctgtgcaccatttaaaccacggcccacccctacatgcaacccagcattatggtgctcacgccccacaccctaacgtcatgccggcttccatgggaagtgcggttaatgacgccctgaaaagagataaggacgccatttacggacaccctttgtttcctctgctcgctctggtttttgagaagtgtgaactcgccacttgcaccccaagagaaccgggagttgcaggtggcgacgtttgctccagtgattcgttcaatgaagacattgccgtcttcgctaagcaggtgcgcgcagaaaaacctcttttctcctctaaccctgagttagataacctgatgatccaggctattcaagtgcttcgcttccatctgttggagctggagaaggtgcatgaactgtgtgacaatttctgccaccgatatatttcctgcctgaaaggcaagatgcctatcgatttagttatcgacgagagggacggaagtagtaagagtgatcatgaggaactttctggttcatccactaatttggcagatcataatccctcctcttggagagatcatgatgatgccacctcaactcattccgctgggacacccggtccatcaagtgggggacacgctagtcagtctggggacaattcttcggagcagggcgatgggttggacaatagcgtggcatctcctggcactggagacgatgacgaccccgacaaagacaagaaacgacaaaagaaaaggggaattttccccaaagtggctactaacattatgcgggcttggctctttcagcacctgacgcacccttatccgagtgaagaacaaaagaaacagctggctcaagataccggactcaccatcctgcaagttaacaactggttcatcaatgctcgaagacgcatagtacaacctatgatcgatcagtctaaccgtgccggtttcctgctggacccatcagtgtcgcagggcgctgcctactctcctgaggggcaacccatgggctcctttgtgctggacgggcagcagcacatggggattcgcccagcaggtcctatgagcgggatgggtatgaacatgggaatggacggccaatggcactacatgtag

SEQ ID NO: 230000 - DNA, 1185 bp, synthetic construct
  misc_feature 1..1185: note = Description of Artificial Sequence: Synthetic coding sequence
  source 1..1185: mol_type = other DNA
atggcgcagagatacgacgaacttcctcattatggagggatggacggcgttggggtacccgcttccatgtatggggatccccacgctccccgacccatcccccctgttcaccaccttaatcatgggcctccccttcacgcaacgcagcattacggcgcacacgcaccccaccccaacgtgatgccagccagcatgggatccgccgtaaacgacgctctgaaacgtgacaaggatgccatttacgggcaccctctgtttcccctgctggcactcgttttcgaaaagtgtgaactcgccacgtgcacaccaagggagcccggagtggcgggaggagacgtttgctctagcgactccttcaacgaagatatcgcagtctttgccaagcaggtccgtgccgaaaaacccctgttttcctcaaacccggaactggataatctaatgatccaggctatccaggtcctacgtttccatttactggagttggagaaggtacacgagttgtgtgacaacttttgtcatcgttatatctcatgcctgaagggaaagatgcccattgatctcgtgatcgatgaacgcgacgggtctagtaagagtgaccacgaagagctgtccgggtcttccacaaatctggccgaccataatccatcttcctggagagatcatgatgacgccacctccacccatagcgcaggcacacccggaccatcgagtggcggtcacgcatctcagtcaggcgacaactcttctgaacagggcgacggccttgacaatagcgttgcttctcccggaaccggtgacgacgatgaccccgacaaagacaaaaaacgccaaaagaagagaggcatttttcccaaggttgccactaatataatgagagcctggctgtttcagcaccttacccacccctacccctctgaggagcaaaaaaagcaactagcccaagatactggtttgacaattctgcaagttaacaattggtttattaatgcacggagacgtatcgttcagcccatgattgaccagtctaaccgcgcagtctcacaaggcgcagcctattcacctgagggacagccaatgggttcattcgtcctggacggacagcagcacatgggaattcgccctgctgggcctatgtccggcatggggatgaatatggggatggatgggcaatggcattacatgtag

SEQ ID NO: 230001 - DNA, 717 bp, synthetic construct
  misc_feature 1..717: note = Description of Artificial Sequence: Synthetic coding sequence
  source 1..717: mol_type = other DNA
atggatggtgtgggtgtccccgctagtatgtatggcgacccccacgcacccaggcccattccccctgtccaccatctaaaccatggaccccctctccatgccacgcagcattatggggcacacgccccacacccaaacgttatgcctgcctcaatgggctccgccgtgaacgatgccctgaagcgggacaaggacgctatctatggccaccccttatttccattgcttgcattggtctttgagaagtgtgaactggccacatgtacaccaagggagccaggcgtggccggaggggatgtatgctcatcagatagctttaacgaggacattgccgtgttcgctaagcaggtgcgagcagaaaaacccttgttctctagtaacccagagttggataacctgatgatacaggccatccaggtcctaaggttccacctgctggagctcgagaaagtccatgagctttgtgacaacttttgccatcggtacatcagctgcctgaaggggaaaatgcccatcgacttggttatcgacgaacgcgacggctcttccaagtccgatcacgaagagctgagtggatccagcacgaacctcgccgaccataacccttcctcctggcgtgatcacgacgacgccacttccacacatagcgcaggtacccccggaccatcctccggcggtcacgcatcacagtcaggtgataattcctccgagcagtag

SEQ ID NO: 230002 - DNA, 240 bp, synthetic construct
  misc_feature 1..240: note = Description of Artificial Sequence: Synthetic coding sequence
  source 1..240: mol_type = other DNA
atggctctagtctttgagaaatgcgaactggctacatgtacccccagggaacctggagtggctggcggagatgtgtgttcttccgatagctttaacgaggacatcgccgtctttgcgaaacaggtgcgcgctgagaagcccctattttcaagtaacccagaactagataatcttatgatacaggccattcaggtgctccgcttccacttactcgaacttgagaaagtctcaaggaagtag

SEQ ID NO: 230003 - DNA, 1167 bp, synthetic construct
  misc_feature 1..1167: note = Description of Artificial Sequence: Synthetic coding sequence
  source 1..1167: mol_type = other DNA
atggatggagtaggagtcccggcaagcatgtacggagaccctcacgcgcctaggccgataccccctgtccaccatctaaatcatgggcctccactgcatgcgacccaacactatggggcacatgcccctcatccaaacgtaatgccagcaagtatgggttccgctgtgaacgatgccctgaaacgtgacaaagatgcgatttacggtcaccctctgtttccactattggccctggtcttcgaaaagtgcgaactagccacttgcactcctcgtgaacctggggtagctggcggagatgtctgctccagcgacagcttcaacgaagatatcgccgtgtttgcaaaacaagtaagagcggagaagcccttgttcagctctaaccctgaactcgataatctaatgattcaggccattcaggtgctgaggttccacctcctcgaactggaaaaggttcacgaactctgtgataacttctgccatcgctatattagctgcctgaaaggcaagatgccaatagatctggtgatcgacgaacgcgatggatcttctaagtctgaccatgaggaactgagtggaagctcaaccaacttggccgatcataacccctcaagctggagagatcatgatgatgccactagcacacactcagccggaacacctggcccaagttccggcggacacgcctctcagagtggagataactcctctgaacagggtgacggactggataactctgtcgcctcaccagggacaggagacgacgacgaccccgataaagataagaagagacaaaaaaagcggggtatctttccaaaagtggcaaccaatatcatgagagcttggctgttccagcatctaacacatccttatccatccgaggaacagaaaaaacagttagctcaggataccgggctcaccatacttcaggttaataattggtttatcaatgcccgtcgcaggatcgtgcaaccaatgatcgatcagtcaaatcgggcagggttcttactggacccatcagtctcacagggtgctgcttacagccccgagggccagccaatgggcagtttcgtgctggatgggcagcagcacatgggtattcgccctgccggacccatgtcaggcatgggaatgaacatgggaatggatggacagtggcactatatgtag

SEQ ID NO: 230004 - DNA, 1185 bp, synthetic construct
  misc_feature 1..1185: note = Description of Artificial Sequence: Synthetic coding sequence
  source 1..1185: mol_type = other DNA
atggcccagaggtacgacgaacttcctcactacggaggcatggacggtgtgggggtccctgcatctatgtacggtgacccccacgctcctaggcctatcccccctgtccaccacctcaatcatggtcccccacttcacgccactcagcattacggtgctcacgccccacaccctaacgtgatgcccgcatcaatgggaagcgccgtgaatgacgctttgaagagagacaaagatgcaatttacggccaccccctgtttcccctattggctctagtgtttgaaaagtgcgagcttgcaacctgtactcctagggaacccggtgtggctggtggtgacgtgtgttcttccgactcattcaacgaggatatcgcggtttttgccaagcaggtgagggccgaaaagcccctattttcttccaaccccgagttggacaacctcatgattcaagccatccaggtgcttcgcttccatctgctcgagttagagaaagtgcacgagctgtgtgacaacttctgccataggtatatatcctgcctgaagggcaagatgccaattgacctcgtgatcgacgagcgggacgggagcagcaagagcgatcatgaagagctgtctggatctagcacaaatctggctgaccataatcctagcagctggagagatcatgacgacgcgaccagtacacacagtgccggtaccccagggccaagttctggtgggcatgcctctcagtccggcgacaattcctctgagcagggggacggtctggataattctgtggccagtccaggcacaggagacgatgatgatccagataaagacaaaaagaggcagaagaagcgcggtatattcccaaaagtagccaccaacatcatgagggcctggctgttccagcacctgacgcacccctaccccagtgaggagcagaagaaacaattagcgcaggacacggggctgacaatcctgcaggtcaataattggttcatcaacgctcgcaggcgcatcgtgcaaccaatgatagaccagagcaatcgcgcagtctctcagggggctgcctactcacctgaggggcaacctatgggtagctttgtccttgatggtcagcaacacatgggaatcaggccagcaggcccaatgtctggtatgggcatgaacatgggcatggacgggcagtggcactacatgtag

SEQ ID NO: 230005 - DNA, 1434 bp, synthetic construct
  misc_feature 1..1434: note = Description of Artificial Sequence: Synthetic coding sequence
  source 1..1434: mol_type = other DNA
atggcccagagatacgatgaactcccacattatggtgggatggacggggtcggggtccctgccagcatgtatggggacccccatgccccacgccctatccctccagtgcaccaccttaaccatgggcctccactgcatgccacgcagcactacggggcacacgcaccacacccaaatgtgatgcccgcttcaatgggaagcgctgtaaacgacgccctcaagagggacaaggacgccatttacggccaccccctgttcccattgcttgccttggtcttcgagaagtgcgagctggcgacctgtacgcctagagagcctggggtagctggaggggacgtttgtagctcagactcctttaacgaggacatcgccgtgtttgctaaacaagtcagggcggagaaaccactgttttccagcaaccccgagctggataaccttatgatccaggctatacaagtgctgagattccatctgctcgaactggagaaggtgcacgagctttgcgacaacttttgccaccgctacatatcctgcttgaagggaaaaatgcccattgatctagttatcgatgaaagggacggttcatctaaatccgaccacgaggagctctctggatccagcaccaacctcgcagaccataacccttcttcttggagagaccacgacgatgctacctccacccactccgccggaactcctggtccaagctcagggggacatgcgagtcagtccggcgataattcttctgagcagggcgatgggctcgataactcagtcgccagtcctggtaccggagatgatgacgatcctgacaaggataaaaagagacaaaagaagcgcggaatttttcctaaggtcgccactaatattatgagggcgtggctgttccaacacttgacgcatccatacccatcagaggagcagaaaaaacagctcgcccaagacacgggcttgacgattcttcaggtcaataactggtttatcaacgcgcgacgtaggatagttcagcctatgatcgaccagtccaatcgggcaggcttccttcttgatccaagtgtgtctcagggagctgcctattcacctgaaggacaacctatgggttcattcgtgctggacgggcagcagcacatggggataaggcccgcaggcctgcagtctatgcccggtgattacgtcagtcagggcggtcccatgggaatgtccatggcccagcccagttatactccccctcagatgacaccgcatcctacccaactaagacacgggccaccaatgcatagctacctgcctagtcacccgcaccaccccgcaatgatgatgcatggcggtccccctacacatccaggaatgacaatgtcagctcagtctccgactatgctcaactccgttgatccaaacgtgggcggacaggtcatggacatccatgcccaatag

SEQ ID NO: 230006 - DNA, 1434 bp, synthetic construct
  misc_feature 1..1434: note = Description of Artificial Sequence: Synthetic coding sequence
  source 1..1434: mol_type = other DNA
atggcacagcggtacgatgagctccctcattacgggggtatggacggtgtgggcgtaccagcaagcatgtacggcgacccacacgcccctagaccaatcccaccggtacaccatctgaaccatggcccacccttgcacgctacccagcactatggagcccacgctcctcatcctaacgtgatgccagcctccatgggcagtgccgtgaatgatgctcttaagagggacaaagatgcaatctatggtcacccgctgttcccacttttggccctggtgtttgagaaatgcgaacttgctacctgcacacctcgggagcccggagtggcgggtggagacgtctgtagctctgacagcttcaacgaagatatagctgtgtttgctaagcaggtgagagccgagaaaccattgttcagctccaacccagaactagacaacttgatgatccaagccatccaggtgctgaggttccaccttctggagctggagaaggtgcatgagctatgcgacaacttctgccaccgttacataagttgcctgaagggcaaaatgcctatcgatctggttatcgacgagcgggacggaagttccaaatcagatcacgaggaactctcaggttcaagtacaaatcttgcagatcataaccccagcagttggcgagaccacgacgatgctacatctacacacagcgccggaacacccggtccctctagtgggggacatgcctctcagtctggcgataatagctcagaacagggggatggacttgacaattccgtagcctcgcctggtacgggagacgacgacgaccccgacaaggataaaaaacggcagaaaaagcgcggtattttccccaaggtagcgaccaatataatgagagcttggctgtttcaacacttgacccacccttatccaagcgaggaacaaaaaaagcagcttgcacaagacacagggctaaccattctccaagtgaataactggttcattaatgcaagaaggcgtattgtgcaacctatgattgatcaatcgaacagagccggatttcttctggacccttcagtctctcagggcgctgcgtatagccccgagggacaaccaatgggcagttttgtgctcgacggccaacagcacatgggcatccgcccagctgggctgcaaagcatgccgggagattatgtaagtcagggcggaccaatgggaatgtccatggcccagccctcatataccccaccccaaatgaccccccaccctactcagctgcggcatgggcctcccatgcatagttacctccccagtcatcctcaccaccctgctatgatgatgcatggtgggcctccaactcatccaggcatgaccatgtcagcccagtcacccacaatgcttaactcagtcgatcctaatgtggggggtcaagttatggacatccatgcgcaatag

SEQ ID NO: 230007 - DNA, 357 bp, synthetic construct
  misc_feature 1..357: note = Description of Artificial Sequence: Synthetic coding sequence
  source 1..357: mol_type = other DNA
atgccccgagaggatgcacactttatttatggatatcccaagaaggggcacggacacagttacacaaccgcggaggaagcagccggtatcggaatcttgactgtgatcctgggagtactcttacttattgggtgttggtactgtcgcaggagaaacggttacagagccttaatggacaaatctctgcatgtaggcacacagtgtgccttaacccggagatgtccccaggaggggttcgatcatcgagactctaaggtctccctgcaggaaaaaaattgcgagcccgtcgtacccaacgcaccccctgcttatgagaaactctcagcagaacagtctcctccaccctattccccctag

SEQ ID NO: 230008 - DNA, 357 bp, synthetic construct
  misc_feature 1..357: note = Description of Artificial Sequence: Synthetic coding sequence
  source 1..357: mol_type = other DNA
atgccacgcgaggatgcacattttatttacggataccctaaaaaaggccacgggcattcctacacaacagcagaggaggccgctgggatcggcatccttacggtgattcttggcgtgctacttctgatcggatgttggtattgtaggcgacgcaatggctaccgtgctttaatggataaaagcctgcacgtgggaactcagtgtgccttgacgaggcggtgtccccaggaggggtttgatcatagagatagtaaagtgtccttacaggaaaagaattgtgagcccgtggttccaaacgcccctcctgcctacgagaaactttccgctgagcagtcaccccctccctacagcccatag

SEQ ID NO: 230009 - DNA, 357 bp, synthetic construct
  misc_feature 1..357: note = Description of Artificial Sequence: Synthetic coding sequence
  source 1..357: mol_type = other DNA
atgccacgagaggatgcccactttatttatggatatccaaaaaaagggcacggccacagctatacgaccgctgaggaggccgctgggattggcatcctgactgtcattttgggcgtcctcttactgattgggtgctggtactgtcggaggcgcaacggatacagagccctgatggataaaagtctccacgtggggacacagtgcgcactgacccggcgttgtccgcaagaaggctttgaccatcgagactccaaggtgagtcttcaggaaaagaattgcgaacccgtcgtccctaatgcacccccagcttacgaaaaactctctgcagagcagtctccacccccatacagcccctag

SEQ ID NO: 230010 - DNA, 1269 bp, synthetic construct
  misc_feature 1..1269: note = Description of Artificial Sequence: Synthetic coding sequence
  source 1..1269: mol_type = other DNA
atgtccgtgggcgctatgaaaaagggtgttggcagagcagttggactgggaggcggatccggatgccaggcgacagaggaagaccccctcccaaactgtggagcatgcgccccaggtcaagggggaagacggtggaggctcccacaacctgcatgggtggaagggtcaagcgctcgcctctgggagcaggcaacaggcacaggctggatggacctggaggcaagcctgctgcccacggggcctaatgctagtaatacttccgatggacccgataacctaacatctgccggatctcccccacggacaggctctatttcctatattaacattataatgccttctgtgttcggcacaatatgcctactaggtattataggcaattcgacagtcatcttcgccgtcgtgaaaaagtccaaactgcactggtgtaacaacgtgccagacatctttatcattaacctgagtgtggtggatctgctatttctcctgggcatgccatttatgatacatcagctcatgggaaatggtgtctggcatttcggcgaaactatgtgtacactcatcaccgccatggatgctaactcacagtttacatccacatatatactgacggccatggcgatcgaccgctatctggccaccgtgcaccctatctcttccaccaagtttcgtaagccttccgttgctacactcgtgatctgcctgctgtgggcgctctcttttattagcattacacccgtttggctgtatgcacgtctcattcctttccccggaggagctgtcggctgtggcatcagattaccgaatcctgacacagacctatattggtttaccctatatcagttctttttagccttcgccctccctttcgtggtgattaccgctgcatacgtcaggatcctccagaggatgacatcctccgttgctcctgcatcccagcggtctatccgtctcaggactaagcgggtgacccgaactgctatcgctatctgtctggtcttctttgtgtgctgggccccatactatgttctacagctcactcagctcagtatctctagaccaacgctgacttttgtctatctttataacgctgctattagcctggggtacgccaacagctgcctgaaccctttcgtgtacatcgtgctgtgcgaaacatttagaaagcgcctcgtactatcagttaagcccgcagcccagggccagcttcgggcagtgagcaatgcacagacagctgacgaagaaaggacagaatctaaaggaacctag

SEQ ID NO: 230011 - DNA, 891 bp, synthetic construct
  misc_feature 1..891: note = Description of Artificial Sequence: Synthetic coding sequence
  source 1..891: mol_type = other DNA
atgagtgttggggctatgaagaagggggttggacgcgcagtgggcttgggaggcggttctgggtgccaggcaaccgaggaagatcccctgcccaattgcggcgcatgtgccccaggacagggcggacggcgatggcggctgccccagccagcttgggtggagggcagctccgcaagactctgggagcaggccaccgggaccggatggatggaccttgaggcaagcctgcttccgacgggccctaatgctagcaacacgagtgacggtcccgacaatctgacctccgcaggatctccacctcgcacgggctccatcagctatattaacatcatcatgccctccgtgtttggaaccatttgcttgctgggaattattggaaatagcaccgtgatctttgccgtggtgaaaaagtctaagctccactggtgcaataacgtgcctgacatcttcatcataaatctgtccttcttcctggcttttgcattacccttcgtggtcataacagctgcctatgttcggatcctacagagaatgacctccagcgtggcccctgcttcgcagaggtcaatccggctccggactaagagggtcacacgcaccgctatcgcaatttgcctcgtcttttttgtgtgctgggctccttactacgtgcttcagcttacccagttgtcgattagtaggcctacattgaccttcgtctacttgtataacgccgctatttccctgggatacgccaactcgtgccttaatcctttcgtctacattgtgctatgtgaaacttttaggaaaagacttgtactctctgttaaaccagcagcccaagggcagctgagagccgtgagcaatgcacagacggccgacgaagagcggaccgagtctaagggtacctag

SEQ ID NO: 230012 - DNA, 1023 bp, synthetic construct
  misc_feature 1..1023: note = Description of Artificial Sequence: Synthetic coding sequence
  source 1..1023: mol_type = other DNA
atgaaccccttccacgccagctgctggaacacctccgcagagctgcttaacaaaagctggaacaaggagttcgcttatcaaacagcttccgtcgttgatacggtcattctgccatctatgatcgggataatatgctccaccggtctggtgggcaatatcctgattgtatttactattatccgatcacgaaagaaaaccgtgcccgacatatacatatgtaatttggccgtcgctgacctggtacacattgttggaatgcccttcctcatccaccagtgggcccgaggaggcgaatgggttttcggaggccctctgtgcacaataataacttccctggacacttgcaaccagtttgcctgcagcgcaatcatgaccgtgatgtctgtcgacagatactttgccctcgtgcagcccttcaggctgactagatggcgcactcgctacaaaacgataagaattaatctggggctttgggccgcatctttcatacttgccctgccagtgtgggtgtattcaaaggtcattaaattcaaggacggcgtcgagagttgtgcttttgacctaaccagccccgatgacgtcctttggtacacgctgtacctgaccatcacaacatttttctttcccctccccttgatcctagtttgttatatccttatcctgtgttacacttgggaaatgtatcagcagaataaagatgcacgttgctgtaatccatctgttccaaagcagagagtgatgaagctgacaaagatggttcttgtcctggtggtggttttcatcttgagtgccgctccataccacgtgatacaacttgtcaatctgcagatggaacagcccaccttggcattttacgtgggttattatctatcgatttgcctatcatacgctagcagcagtattaaccccttcctgtacatccttctgtcagggaacttccagaaaaggcttcctcagatccagcggagagccacagaaaaggaaatcaataatatgggaaatactctaaaaagtcacttttag

SEQ ID NO: 230013 - DNA, 1023 bp, synthetic construct
  misc_feature 1..1023: note = Description of Artificial Sequence: Synthetic coding sequence
  source 1..1023: mol_type = other DNA
atgaacccatttcacgctagctgctggaacacgtccgccgaattgttgaacaagtcatggaacaaagagtttgcctaccagacagcctcagtggtggatacagtgattctgccatcaatgatcggcatcatatgcagcactggtctagttggtaatattcttatagtcttcacgatcatccggtctcggaagaagactgtgcctgatatctacatttgcaacctggcagtcgcggaccttgtacatatagtaggtatgccttttttaatccatcaatgggctcgtgggggagagtgggtcttcggaggacccttatgtacgattatcacttcactcgacacctgcaaccagttcgcgtgctcagccattatgacggtgatgagcgtggacaggtacttcgctctggtccagccatttagactgactaggtggcgaacccgctacaaaacaatccgaattaatctgggcctctgggctgcatcattcatcctcgctcttccagtttgggtctattctaaggtcataaagttcaaggatggtgtagagtcctgcgccttcgatctgacatcccctgacgacgtcctgtggtatacattgtatttgaccattactaccttcttcttccccttaccactcattctggtgtgttatattctgatactgtgctatacatgggaaatgtatcaacaaaataaggatgctcgctgctgtaacccttcagtaccaaagcagcgcgtgatgaagcttactaagatggttctggtactcgtagtcgtatttatcctctcagctgcaccatatcacgtgatacagctagtgaacttgcagatggaacagcccaccctggcattttacgtgggctattacctcagcatctgcttatcatatgcgtcatcctcgatcaacccattcctgtatatcctgttgtccggaaactttcagaaaagactgccacagattcagcggcgagccactgaaaaggaaattaacaacatgggtaacacactcaaaagtcatttctag

SEQ ID NO: 230014 - DNA, 1023 bp, synthetic construct
  misc_feature 1..1023: note = Description of Artificial Sequence: Synthetic coding sequence
  source 1..1023: mol_type = other DNA
atgaatcctttccacgcctcatgctggaacacttctgcagagttactgaataaaagttggaataaggaattcgcttatcagactgccagtgtcgtagacaccgttatcctcccatcaatgatcgggataatctgttcaaccggcttagtgggaaacatactgattgttttcaccatcatccgtagtcgaaagaagaccgtgcccgacatttatatttgtaatctagccgtcgcggacttggtgcatatcgtgggaatgccgtttttgatacatcagtgggctcgcggtggtgagtgggtgtttggaggaccgctctgcactatcattactagtttagatacctgtaatcagtttgcctgctctgcaataatgacagtgatgtcagtagacaggtactttgctctagttcagccgttccggctcacccggtggaggacaaggtataagaccatccgcattaacttgggactttgggcggcaagctttattctagcactgcctgtgtgggtttactcaaaggtgataaagtttaaggacggcgtggaatcatgcgcttttgacttgacttcccctgacgatgtgctttggtataccctgtatctgaccattaccacattcttcttccctctccctctaatacttgtgtgctacattctgatactttgttacacttgggaaatgtatcagcagaataaagacgccaggtgctgtaatccttcggtccccaagcaacgggtgatgaaactgaccaaaatggtcctcgtgctggtggttgtctttatcctatctgccgctccgtaccacgtgatacaactggtgaatctacagatggagcagcccaccctcgctttttatgtgggatactacttatctatctgcctgagctacgcgtccagctccattaaccccttcctttatattttgttgtctggcaacttccagaagaggctgccacagatacagaggcgggctacagaaaaagagatcaataatatggggaacacactgaagtcacatttctag

SEQ ID NO: 230015 - DNA, 519 bp, synthetic construct
  misc_feature 1..519: note = Description of Artificial Sequence: Synthetic coding sequence
  source 1..519: mol_type = other DNA
atggccaacggcaccaatgcctctgccccttattatagctacgaatactatctggattatctagacctgatcccagtggacgaaaaaaagctgaaagcacataagcactcgatcgtaatcgcattttgggtgagtctcgccgcttttgtggtgctccttttcctgatccttctgtacatgagctggtctgccagcccgcaaatgcgaaattcaccaaagcaccatcaaacatgcccttggtcacatggtctgaacctgcatctctgtatccagaagtgcttgccatgtcacagagagccattggctacttcccaggcacaagcatctagtgtggagcctggatcccggaccggtccagatcagcccctgcggcaagagagctcttctactctacccctcggcggtttccaaacccatcctacccttttatgggaattgactttgaacggtggtcccttggtgcgctcgaagccttcagagcctccaccgggagaccggaccagccagctccagtcttag

SEQ ID NO: 230016 - DNA, 309 bp, synthetic construct
  misc_feature 1..309: note = Description of Artificial Sequence: Synthetic coding sequence
  source 1..309: mol_type = other DNA
atggcaaacggcacaaatgcatcagcaccctactactcgtatgagtactatctggactatctggacctcattccagtggatgaaaagaaattgaaagcccacaagcactccattgtaatagctttttgggtgagtttggctgcattcgttgtgctgctatttctgatcttgctgtacatgtcgtggagcgcttccccccagatgagctttaacaccgatgagagtttgctgcattcggaagtcctgccacagactcgtgccattagctgcgacgagcttcaggctccgagggaggagggtgctgcctag

SEQ ID NO: 230017 - DNA, 519 bp, synthetic construct
  misc_feature 1..519: note = Description of Artificial Sequence: Synthetic coding sequence
  source 1..519: mol_type = other DNA
atggcaaacggcacaaacgccagtgctccttattattcctacgaatattaccttgactacttggacctgatccccgtcgatgagaagaagctcaaagcacataagcattctatcgtcatcgcattctgggtttctctggccgcttttgtcgtacttctgtttctcattctgttgtatatgtcatggtcagccagcccccagatgcggaatagccctaaacaccatcagacttgcccttggtcacatggcctgaacctccacctgtgtatccaaaagtgcctaccctgtcatcgtgagcccttggctacttcccaggcgcaagcatccagcgtagagcctggatcaagaacgggacctgatcaacccttacgtcaggagagctcttcaacactgccattaggaggcttccagacccaccctacattattgtgggaattaactcttaacggagggcctctggtacggagcaagccctccgaaccccctcccggagacagaaccagccagctccagagctag

SEQ ID NO: 230018 - DNA, 309 bp, synthetic construct
  misc_feature 1..309: note = Description of Artificial Sequence: Synthetic coding sequence
  source 1..309: mol_type = other DNA
atggccaacggaaccaacgcttccgcaccgtattactcctacgagtactacttggattatctggacctgattcccgtggacgaaaagaagttgaaggcgcacaagcactccatcgtgatcgccttctgggtgtctctggccgcatttgtcgtcctgcttttcctcattcttctctacatgtcctggagcgcctctccccaaatgtcctttaatacagatgagtccttattacattccgaggtgttgccccagacccgggctatctcttgcgatgagctccaagcccctcgagaggaaggagctgcttag

SEQ ID NO: 230019 - DNA, 1110 bp, synthetic construct
  misc_feature 1..1110: note = Description of Artificial Sequence: Synthetic coding sequence
  source 1..1110: mol_type = other DNA
atgcctcgggctccaaagcggcagaggtgtatgcctgaggaagatcttcaatcacagtccgagactcagggactcgaaggagctcaagcccctctggcagtagaggaagatgcctcatcatccactagcacaagctcaagtttccctagctcttttccaagcagctcctccagtagctcctccagctgttatccactgatccctagtacacccgaggaggttagtgcggacgacgagacacctaacccgccacagtctgctcagatagcctgtagcagtccctctgtagtggcctcactgccgctcgatcaaagcgatgagggatcatcatcacagaaagaagagtcgccatctactttacaggtcctccccgactctgagtccctccccagaagtgagattgatgagaaagtcacggacctcgtgcagttcctcctgttcaagtatcagatgaaggaaccgatcactaaggccgagattctcgagagcgtcattagaaactacgaggatcacttccccctgctgttttccgaggcaagcgagtgtatgttgttggtgttcgggattgatgtgaaggaggtagaccccactggccattccttcgtgttagtgactagcctgggcctgacctacgacggaatgctgagtgacgtccagtccatgccaaaaaccggcatcttgatcctcattctgagcattgtcttcatcgaagggtattgcactccagaggaggtgatttgggaggccttaaacatgatgggtctctacgatgggatggagcacctcatatacggcgagccgaggaagttactcacacaggattgggtgcaggaaaattacctcgagtacaggcaggtgcctggaagcgatcccgctcgatacgagtttctctggggaccacgggctcacgccgagataaggaaaatgagtctgttgaagtttcttgctaaggtcaatggcagcgatcccagaagctttcctctttggtacgaggaagccctgaaggatgaggaagagagagcacaggataggatcgctactacagacgatacgacagctatggctagtgccagctctagtgctaccgggagctttagttaccccgagtag

SEQ ID NO: 230020 - DNA, 1110 bp, synthetic construct
  misc_feature 1..1110: note = Description of Artificial Sequence: Synthetic coding sequence
  source 1..1110: mol_type = other DNA
atgccacgagcaccaaagagacaacgatgcatgcccgaagaagacctacaatctcagtcggagactcagggcttggagggagcacaggcacccctcgccgtggaagaggacgcatcaagctcaacctcgacgtcttcctcctttcctagtagctttccaagctcttctagcagctccagcagcagctgctacccgctcattccatcaacccctgaggaggtgtctgccgacgacgaaaccccaaatccaccccagagtgcccagatcgcatgttctagtccctctgtggtggcctcactgcccctggaccagtctgacgaggggagctccagccaaaaggaagagtctccttctacattacaggttttgccagacagtgagtcactgcccagatcggagatcgacgagaaggtcacagacctggtacagttcctcttgtttaaataccaaatgaaagaacccatcactaaggcggaaatcctcgaaagtgttatccgcaattatgaagaccattttcccctcctgttctcagaggcctccgaatgcatgctgctggttttcggcatcgatgtcaaggaagttgatcctacagggcattctttcgtcctcgtgacctctctaggactcacttatgatggcatgctgtccgatgtacagagtatgcccaaaactggaattctgattcttatattaagcatcgtatttatcgagggctactgcactccagaagaagttatctgggaggcgctcaatatgatggggctttacgacggaatggagcatctgatttacggcgaacctcgcaagctattgactcaagactgggtgcaggagaattacctggaatatcgacaagttcctgggtccgatcctgctcggtatgaattcttgtggggcccacgggcacacgctgagatccgaaagatgtctttgctgaaattcctcgcaaaggtcaacggaagcgacccaaggtccttccctctttggtatgaagaggccctgaaagatgaagaggaaagggcgcaggataggattgcgaccaccgatgacaccacagctatggccagcgcgtcctcatccgctacagggtcattcagctaccctgagtag

SEQ ID NO: 230021 - DNA, 486 bp, synthetic construct
  misc_feature 1..486: note = Description of Artificial Sequence: Synthetic coding sequence
  source 1..486: mol_type = other DNA
atgccacgcgctcctaagcggcagaggtgtatgccagaggaggatctgcagtcacagagtgagacccagggtctcgagggggcacaggccccactggccgtcgaagaggacgctagttcctctacctctactagcagctcatttccttccagcttcccctcttcatccagtagctcatcatcttcatgctatccactaattccatcaacccctgaagaggttagtgccgatgacgagacacccaaccccccacaatctgcacagattgcctgctcttcaccgtcagtggtggctagcttacccctggatcaatcagacgagggatcctcttcccagaaggaggagtctccttccacgctgcaggtcctacccgattctgaatcgctccctcgaagtgaaatcgatgaaaaagtcacggacctggtgcagtttctgctgttcaagtaccagatgaaggagccaattactaaggccgaaattctgtag

SEQ ID NO: 230022 - DNA, 573 bp, synthetic construct
  misc_feature 1..573: note = Description of Artificial Sequence: Synthetic coding sequence
  source 1..573: mol_type = other DNA
atgccacgagctccaaagcgtcaacggtgtatgccagaagaagacttgcagagtcagtcagagacacaagggctagaaggggcacaagcgcctttagcagttgaggaagacgcctcaagctcgacaagcacctcatcgagtttcccctcgagcttccccagcagcagcagttcatcctcatcatcttgttatcccctgattccttcgacgccagaagaggttagtgccgacgacgagaccccgaatcctccacagagcgcacagatcgcttgtagtagccctagcgtcgtcgcatccctccccttagatcagtcagatgagggatcctcctcccagaaggaggagtcaccttctacccttcaggttcttcctgacagcgaatcgcttcccagatctgaaatcgacgaaaaggtcaccgatctagtgcaattcctgttgtttaagtatcagatgaaggagcctatcaccaaagctgagatcctggaaagtgtgattagaaattatgaggaccacttccccctcctgttctctgaggcttccgagtgtatgctcctggtgttcgggattgactag

SEQ ID NO: 230023 - DNA, 1203 bp, synthetic construct
  misc_feature 1..1203: note = Description of Artificial Sequence: Synthetic coding sequence
  source 1..1203: mol_type = other DNA
atgagtaaagtctcaaccatgtttagtgaagacgatttccagtcaactgagcgagccccatacggaccacaacttcaatggagccaggacctgcctcgcgtgcaagtgtttagggagcaagccaatttggaagataggagtccccgacgcacacaaagaattactggaggcgaacaggtgttatggggtcccattactcagatcttccctacagtgaggccagctgacctgacgagggtgattatgcccctcgagcagcggagccagcattgtaagcctgaagagggactgcaagcccaggaagaggacttgggtttggtcggggcacaggccctccaggctgaggaacaagaggcagctttctttagcagcacactcaacgtcggtacgctggaagagctgcctgccgctgaaagccctagcccgcctcagagcccccaggaggagtctttctcacctacagccatggacgccatttttggttccttatcagatgagggttccggtagccaggagaaagaaggcccttctacaagccccgatcttattgatccagagtcattctcacaggacatcttacacgataaaatcatcgacctggtccacctgctcctaagaaaatatcgagtgaagggcttgataaccaaagcagagatgttaggtagtgtgattaaaaactatgaggactacttcccggagatctttagggaagcgtcagtttgcatgcaattactgtttggtattgacgttaaggaggttgacccgaccagtcactcttacgtattggtgactagcctaaatctaagttacgacggaatccaatgtaatgagcagagcatgccaaaaagtgggctgctgattatagtgctgggggtcatcttcatggagggtaattgcattcccgaagaagtgatgtgggaggtgctgtccatcatgggcgtttatgctggacgggagcacttcctatttggagaacccaaacggcttctcacgcagaattgggtccaggaaaagtacctcgtctataggcaggtgccaggcactgatcctgcatgctacgaatttttatgggggcctagagctcatgccgagacatccaaaatgaaggtcctcgagtacatagccaacgcgaacggccgagatccaacctcctatcctagcctctacgaggatgcgctgagagaggaaggggagggagtctag

SEQ ID NO: 230024 - DNA, 1290 bp, synthetic construct
  misc_feature 1..1290: note = Description of Artificial Sequence: Synthetic coding sequence
  source 1..1290: mol_type = other DNA
atggaaacccagttcaggcggggaggattaggctgttcaccggcatccatcaaacgtaaaaagaagcgcgaggacagtggggattttggactgcaggtttcaacaatgttctccgaagatgattttcagtccactgaacgggctccttacgggccacagcttcagtggagccaggacctgccacgggtgcaggttttcagagaacaggccaatctggaagatcgctcccctaggcgtacacagaggataactggtggagagcaggtcctttggggcccaattacccaaatctttcctactgtccgccctgctgatctgacacgcgtaatcatgcccctcgaacaacgaagccagcactgcaagccggaagaaggcttgcaagcacaggaggaggatctgggactcgtgggcgctcaggcattgcaggcagaggagcaggaagcagcttttttcagttccactctgaatgtcggcacactcgaggaacttcccgcagccgaatccccttcaccccctcagtcccctcaagaagagtcattctcccctaccgcgatggacgctatattcgggtccctctctgacgaaggttccggatcacaagaaaaggaaggtccaagtacctctccagacttgatcgatcctgagagtttttcccaagatattcttcatgacaagatcatcgacttagtccatctgcttctgcggaaataccgggtgaagggcctgattaccaaggcggagatgctgggctctgtgatcaaaaattacgaggattacttcccggagatattccgtgaggcatccgtgtgcatgcagctactgtttggaattgacgtgaaggaggttgatcctacttcccatagttatgtgctggtgacctccctaaatctaagctatgacggcattcaatgtaacgagcagagtatgccaaagagtggcctgctgatcatagtgctgggtgtcattttcatggaagggaattgcattcctgaagaggttatgtgggaggtcctcagcattatgggggtgtacgcaggcagggaacattttctatttggcgagccaaaaagactcttgacccaaaattgggtgcaggagaagtatttggtatacagacaggtgccaggtacagacccagcttgctacgagtttctgtggggaccgagggctcatgccgaaaccagtaagatgaaagtgcttgaatacatagctaacgcaaatggcagggatccaacctcatacccgtccctctacgaggatgcacttagggaagaaggagaaggagtgtag

SEQ ID NO: 230025 - DNA, 945 bp, synthetic construct
  misc_feature 1..945: note = Description of Artificial Sequence: Synthetic coding sequence
  source 1..945: mol_type = other DNA
atgcctctggaacaacgtagtcagcactgcaagccggaggagggtttggaggcacagggcgaagctctcggtctcgttggggcacaggccccagctacggaagagcaggagacagcctcctcaagctctacgctggttgaggtgaccctgcgcgaggtgcccgctgcagagtcaccatctcctccacatagccctcagggcgctagcacactgccaacgactatcaactatactctgtggagccaatctgacgagggctcttcgaatgaggaacaggaagggccttcaacattcccggatctcgagaccagcttccaggtagccctgtcccgcaagatggcagagcttgtgcactttctgttactgaaataccgtgccagggaaccatttacaaaggccgagatgctgggcagtgttatacgtaactttcaggatttttttccagtcatctttagtaaagcctctgagtatctgcagctggtgttcgggatcgaagtggtggaggtcgtgagaattggtcatctttacatactagttacgtgcttaggactgtcttacgacggactactgggggataatcagattgttcctaagacgggcctgctgataatcgtgctcgcgatcattgctaaagagggtgactgtgcgccagaggagaagatctgggaagagttatctgtattagaagcctccgatggacgcgaggacagcgttttcgcacatccacgtaagctgcttactcaggacctcgtccaagaaaattatctggaataccgccaggtgccgggttcggatcctgcctgctatgaattcctatggggaccccgtgccctcgttgagacaagctatgtaaaggttctacaccacctgcttaagatctccggaggcccacatatctcgtaccccccacttcatgagtgggccttccgggagggagaggaatag

SEQ ID NO: 230026 - DNA, 945 bp, synthetic construct
  misc_feature 1..945: note = Description of Artificial Sequence: Synthetic coding sequence
  source 1..945: mol_type = other DNA
atgccactggaacagaggtcccagcactgtaagccagaggagggcctcgaagctcaaggagaggctctcgggctggtgggggctcaggccccagcaacggaagagcaagagaccgcctcttcctctagcacattagtagaggtaacactccgagaggtgcccgctgcagagtccccatccccccctcattcccctcagggcgcatctacattaccaaccaccatcaattacactctgtggtcccagagcgacgaaggtagttccaacgaggaacaggagggacccagcacgttccctgatctggaaacaagcttccaggtcgctctctcaaggaagatggcagaactggtgcactttcttttactcaaatatcgggctagggagcctttcaccaaagccgaaatgctaggaagcgtcatcagaaactttcaggatttctttccagtgatattttccaaagctagtgaatacctacagcttgtgtttggaatcgaggtggttgaggtagtgcgcattggacatctttacattttggtgacatgccttgggctgagttatgatggacttctcggagacaaccagattgttcctaagacagggctgctcatcattgtgctagcaattattgccaaagagggagattgcgcccctgaagaaaagatttgggaggagcttagcgttctggaggcttctgatggcagggaggattctgtgtttgcacaccctcggaagcttctgacacaagacttggtccaggaaaattatctggagtacagacaggtacccggttctgacccagcctgctacgagtttttatgggggcctagagccctcgtggaaacgagctatgttaaagtgctccaccatttgctcaagataagtggtgggcctcatatctcctatcctcctctccatgagtgggcctttcgggagggagaagagtag

SEQ ID NO: 230027 - DNA, 945 bp, synthetic construct
  misc_feature 1..945: note = Description of Artificial Sequence: Synthetic coding sequence
  source 1..945: mol_type = other DNA
atgcccctggagcaaaggagccaacactgtaagcctgaagaggggcttgaggcccaaggcgaagccctcggcctggttggtgcccaagcccctgcgaccgaagagcaagagacagcatcctctagcagtacgctggtcgaggtcaccctgcgagaggtcccggctgccgagtcaccttcccctccccacagccctcagggagcctcaactctgcccacaaccattaattacacactgtggagccagtccgatgagggctcctctaatgaggagcaagagggcccttccacctttcccgatttggagacaagcttccaagtcgcactcagccgaaagatggctgaactggttcactttctcctcctcaagtatagagcccgtgaaccttttactaaggccgagatgctcggtagtgttattaggaattttcaggacttcttccccgttatttttagtaaagcctctgagtacctccagctggttttcgggatcgaggttgtcgaagttgttcgcatcggacacctttacattctggtgacttgcctcggactgtcgtacgacgggctcctcggcgacaaccagatcgtccccaagactggactcttaataatcgtccttgcaatcatagccaaagagggcgactgcgctccagaagagaagatttgggaagagctctctgtcctggaggccagtgatggaagggaggattctgtgttcgctcacccccgaaaactactgacacaggatctggtacaggaaaattatctggagtaccgtcaggtgccgggatccgatcccgcatgctacgaatttctctgggggcctagagctctcgtagagacaagctatgtgaaggtgctccatcatcttcttaagatttccggcggacctcatatctcctatccccctctgcatgagtgggcatttcgggagggggaggaatag

SEQ ID NO: 230028 - DNA, 945 bp, synthetic construct
  misc_feature 1..945: note = Description of Artificial Sequence: Synthetic coding sequence
  source 1..945: mol_type = other DNA
atgccccttgaacagagatctcagcactgcaagcccgaggaaggattggaagcccgaggcgaagcactaggcttagtaggtgcacaggctccagccactgaggaacagcagactgctagctcatcctcgaccctggtagaagtaacactcggggaagtacctgcagccgatagcccatcccctcctcattctcctcagggcgcaagctcattcagtaccaccattaactacaccctgtggcgtcaaagtgatgaaggttcctcaaaccaagaggaggagggcccacgaatgttcccggatctggagtcagaatttcaggcggctatctcaagaaagatggtcgaactcgttcacttcttattactgaaataccgggctcgcgaaccagtgactaaagccgagatgctcgaaagtgtgctgagaaactgtcaggactttttcccagtgatcttctccaaggcgagcgagtacctgcaattggtgttcgggattgaagtagtagaggtggtgccgattagtcatctttatatattagtcacttgtcttggactgtcttatgatggcctgttgggagataaccaggtgatgcctaagaccgggctgttgatcattgtgctggccattatagccatagagggagattgcgcacccgaggagaagatatgggaagaactgagcatgctggaagtctttgaaggccgagaggattcagtgttcgcacacccacgcaagctgttgatgcaggatctcgtgcaggagaactacctggagtacaggcaagtacccggatctgatcctgcttgctacgaattcctgtggggacctagagctcttatcgaaacttcatacgtgaaagtcctgcaccatacactcaaaatcggtggagagccccatatttcctatccacctctgcacgagagggcactcagagagggcgaggagtag

SEQ ID NO: 230029 - DNA, 945 bp, synthetic construct
  misc_feature 1..945: note = Description of Artificial Sequence: Synthetic coding sequence
  source 1..945: mol_type = other DNA
atgccgctggagcaacgaagtcagcattgcaagcccgaggaggggctagaagcccgtggtgaggctcttggacttgtcggcgctcaggcaccagccacagaagaacagcagactgcgagttccagttctactctggttgaggttactctgggtgaggtgcccgcagcggattctccatcgccgccacactctcctcaaggagcatccagcttcagcactacaatcaattacaccctgtggcggcagtccgacgaaggatctagcaaccaggaggaagaagggcctaggatgtttcctgatctggaaagcgagttccaggcagccatctcccgcaagatggtcgagctggtgcactttctgcttctgaagtatcgggcacgcgaaccggttacgaaagccgagatgctggagtccgttctccgcaactgccaggacttcttcccagtcatattttccaaagcttctgaatatctacaactggtcttcggcatcgaggtggtggaggtggtgccgattagccatctgtacattctagttacttgtttaggcctgagctacgacggactcctgggagacaaccaggtcatgccgaagacaggcttactaattatcgtgttggccatcatcgccatcgaaggtgattgcgccccagaggagaagatctgggaggaactgagtatgctggaggtcttcgaaggcagagaagacagtgtgtttgcccatccacgaaagctgctcatgcaagatctcgtccaggaaaattaccttgagtaccggcaggtgcctgggtctgatcccgcttgctacgaattcctttggggaccgagggctcttatagagaccagctacgtcaaagtgctgcaccatacccttaagatcggtggcgaaccccacattagttaccctcccctgcatgaacgagcactgcgcgagggcgaggagtag

SEQ ID NO: 230030 - DNA, 945 bp, synthetic construct
  misc_feature 1..945: note = Description of Artificial Sequence: Synthetic coding sequence
  source 1..945: mol_type = other DNA
atgcctctcgagcagcgcagtcagcactgtaaaccggaggaaggcctggaggcccgaggcgaagctctcgggctggttggagctcaggccccagctactgaagagcagcagaccgcctcttcttcatcgactctggtcgaggtgactctgggagaagtgcctgccgctgattcaccttcaccccctcattcccctcagggagccagtagcttctccaccaccattaattacactctttggcgacagtcagatgaaggcagttccaatcaggaggaggaagggccacggatgttccctgatctggagtcagagttccaggccgctataagcaggaagatggtggaattagtccacttcctgctacttaagtaccgtgcgagggagcctgttacgaaagccgaaatgctcgagagtgtgctgcggaactgccaggatttctttccagtcatcttcagtaaagcttccgagtacttgcagctggttttcggcattgaggtagtggaggtagtcccgatctcccacctctatatacttgttacatgcttgggactgtcttatgacggactgctgggcgacaatcaagtcatgcctaagacaggattgctcatcatcgtcttggcaatcatcgccatcgaaggcgactgcgcacctgaagaaaaaatctgggaggagctcagcatgttagaggtttttgaggggcgtgaggacagcgtgttcgctcacccgagaaaactgttaatgcaggatctcgttcaggagaactacctggaataccgacaggttccaggttctgatcccgcttgttacgagttcctgtggggaccgcgagccctgatcgaaacatcctacgtcaaggttctgcatcatacgctgaaaattgggggagaaccccatatctcatatccccctctacatgaacgagccttacgggagggagaagagtag

SEQ ID NO: 230031 - DNA, 945 bp, synthetic construct
  misc_feature 1..945: note = Description of Artificial Sequence: Synthetic coding sequence
  source 1..945: mol_type = other DNA
atgcccctggagcagaggtcacagcactgtaagccggaggaaggccttgaggcaagaggagaggccttggggctggtcggtgctcaagcacctgctacagaggagcaacagactgcttcatcttcctccactctggttgaagtgacattaggcgaggtccccgctgcagatagtcccagcccaccccattcccctcagggagcttcttcgttctctacgacgatcaattacaccctgtggagacagagcgacgagggcagcagtaatcaggaggaggaaggcccacgcatgttccccgatctcgaaagcgaatttcaagccgctataagtcgcaagatggtggaattggtacatttcttgctgctgaagtatcgtgctcgtgaacctgttacaaaagccgaaatgctcgagtctgttttgcgtaactgtcaggacttttttccagtgatattttccaaggccagtgaatatttgcagcttgtgtttggcatagaggtcgtggaggtggtaccgatcagtcacttgtacatcctggtgacttgccttgggctgagctatgatgggctgttgggtgacaaccaagtgatgccgaagactggtctgctgataatcgttctagctatcattgcgattgaaggagattgcgcccctgaggaaaagatttgggaggaactcagcatgctggaagtgttcgaggggcgagaggactcagtctttgcacatccgcgaaagttgttaatgcaagatttggtgcaagaaaactatctcgagtataggcaggtgccaggatcggaccctgcctgctacgagtttctgtgggggccacgcgcactgatagagacatcctatgtaaaggtgcttcaccacacactgaaaatcggtggtgagccccatataagttacccacccctccacgaacgtgccctgcgggagggagaggaatag

SEQ ID NO: 230032 - DNA, 945 bp, synthetic construct
  misc_feature 1..945: note = Description of Artificial Sequence: Synthetic coding sequence
  source 1..945: mol_type = other DNA
atgccactcgaacagcggtctcagcattgcaagcccgaagaaggcttggaagcacgcggagaagcgttaggcttggtcggggctcaagctccagcgaccgaagaacaggaggccgcttcatcctcctccacattggtcgaggtgacgttaggcgaagtgcctgctgccgaatcccccgacccacctcagtccccccaaggagcgagctcattgcccaccactatgaactaccccctgtggtcccaatcgtacgaagactcctcaaatcaggaagaagagggtcctagtacattcccagacttagaaagcgagttccaggctgcactcagtcggaaagttgccgagctcgtgcactttctgctgctgaaatacagggcaagggagccggtcactaaggccgaaatgttggggtcagtggtcggcaattggcagtacttctttccagttatcttcagcaaggccagctcctctttgcaactggtgtttgggatagagctgatggaagtcgatccgattgggcacctgtacatttttgctacatgtttaggactttcttacgatgggttactgggggacaaccagatcatgccgaaggcaggtctcctgattatcgtgcttgcaattattgccagagaaggagactgtgcccctgaggagaaaatctgggaagaactgagtgtgttagaggtgtttgaaggacgggaggatagtatcctaggtgatcctaaaaagttactaacccaacactttgttcaagagaactacctggaatacagacaagttcccggttcggacccagcctgctacgaattcctttggggacccagggcactggtcgagacatcatatgtcaaagtgctccaccacatggtcaagatctcaggtggtccacatataagctacccccctctgcatgaatgggtcctgcgggagggagaggagtag

SEQ ID NO: 230033 - DNA, 945 bp, synthetic construct
  misc_feature 1..945: note = Description of Artificial Sequence: Synthetic coding sequence
  source 1..945: mol_type = other DNA
atgcccctcgaacagcggagccagcattgtaaacctgaggagggcctcgaagcccgaggcgaagcgttaggtctggtgggagcccaagctcccgcaaccgaggaacaagaggcggcatcttcttctagcaccctggtagaagtaactctgggcgaagtgcccgctgcagagtctcctgaccctccacagtccccccagggagcatcaagcctgcctaccacaatgaattatccactttggtcacaaagctatgaggattcctcaaatcaggaggaggagggaccttccactttccccgatctggagtccgaattccaggcagccttgtcaagaaaggtggccgagctagtgcatttcctcctgctcaagtacagggcgagggagcctgtgaccaaagcggagatgctcgggagtgtcgtcggaaactggcagtacttcttccctgtgatcttctcaaaggcatcttccagcctgcagctggtgtttggcattgagctgatggaggtggatccaattggccacctgtatatctttgcaacctgtctgggcctcagctatgatggtctcctgggcgataatcagatcatgcccaaagctggcctgctcattattgtcctcgcgatcattgccagggagggtgactgtgcaccagaagaaaagatctgggaagaattaagcgtcctggaagtctttgaggggagagaggattcaattctgggagaccctaagaagttgctgactcagcatttcgtgcaggaaaattacctcgagtaccgccaggtgccaggatcggacccagcgtgctatgagtttctttgggggcctcgggcactcgtggagaccagctacgtgaaagtgctgcaccacatggttaagattagtgggggtcctcatatttcttacccccctctgcatgagtgggtgctcagggaaggagaagagtag

SEQ ID NO: 230034 - DNA, 597 bp, synthetic construct
  misc_feature 1..597: note = Description of Artificial Sequence: Synthetic coding sequence
  source 1..597: mol_type = other DNA
atgccgctggaacaaaggtctcagcactgcaagcctgaggaaggcctagaggctcggggtgaggccctcggactcgtcggagcccaggctccagcgacggaagagcaggaggccgcttcatcgagtagcaccctagtcgaagttacgcttggcgaggtgcccgctgcagaatccccggaccccccacagagcccgcaaggtgcatcaagtttgccaactaccatgaactacccactgtggtcccagagctatgaagatagctcaaaccaggaggaagagggcccaagcacctttccagatctggagagtgagttccaggctgcactcagccggaaagtcgccgagctggttcacttcctcctgctgaaatatcgcgcacgggagccggtaactaaagctgaaatgctcggatctgtggtgggaaattggcagtacttttttccggtcattttttcgaaagcctcctcctcactacagctcgtatttggcatagaactcatggaagtggacccaatcggccacctatacatctttgccacttgtttaggactgtcttacgacggcctactgggcgataaccagatcatgcctaaatag

SEQ ID NO: 230035 - DNA, 954 bp, synthetic construct
  misc_feature 1..954: note = Description of Artificial Sequence: Synthetic coding sequence
  source 1..954: mol_type = other DNA
atgtcctctgaacagaagagccagcattgcaagcccgaagaaggcgttgaggcacaagaggaagcactcggtctggtgggagcacaggcgcctacaaccgaagagcaggaggctgcagtatccagctcctcaccactggtcccaggcactctcgaagaggtgcccgctgctgaaagcgccggaccccctcagagtccccagggcgctagcgcattgccaacgactatctcctttacctgctggagacagccaaacgaaggtagttcctcacaggaggaggaaggaccctcaaccagccccgacgccgaaagcctgttcagggaagcactatctaacaaagtggatgagctggcccatttcctgctgcggaaatatcgcgctaaagagttagttacgaaggccgagatgttggagcgggtcataaaaaattacaagagatgcttccccgtgatctttggaaaggccagtgagtcacttaagatgatcttcggcatagacgtaaaggaagtggatcccgcatcgaatacatacacgctggtgacctgtctcggattgtcttatgatggccttctaggtaacaaccagatctttccaaaaaccggccttctcattatcgttcttggcactattgctatggaaggcgattcagcgtcagaggaagaaatttgggaggagctgggggtgatgggtgtgtacgatggcagggaacatactgtatatggggagccaagaaagttgcttacgcaggactgggtgcaggaaaattatttggaataccgacaggtcccaggctcaaatcctgcccgatacgaatttctgtgggggcctcgtgctctggcggaaaccagttacgtcaaggtgctggaacatgtggtaagagtcaacgcacgcgtgcggatcgcttaccctagtctgcgggaggccgcactgttggaggaggaggaaggtgtgtag

SEQ ID NO: 230036 - DNA, 954 bp, synthetic construct
  misc_feature 1..954: note = Description of Artificial Sequence: Synthetic coding sequence
  source 1..954: mol_type = other DNA
atgtcaagtgagcagaaatcgcaacactgcaaacctgaagagggagtggaggcccaggaagaagcactcgggctcgttggtgcccaggccccaaccacagaggagcaggaggctgctgtttcctcttcctccccgctcgtgcctggtactctcgaagaagtccccgctgcagagagcgctggcccacctcaaagtcctcagggagcttctgccctgcctaccactatatctttcacgtgctggagacagccaaacgagggtagctccagtcaggaggaggaaggtccaagcacctccccggacgctgagtcattatttagagaggccttgtcaaataaggtggacgagcttgctcactttctactccggaaatacagagcaaaggaattggtgacaaaagcagagatgctagaaagggtgattaagaactacaagaggtgttttcccgtaatttttggtaaagcaagcgagtctctaaaaatgatttttggtatcgacgtcaaggaggtggaccctgcttcaaacacttatacgctcgtgacctgtctaggcctgagttacgatggacttttaggaaataatcaaatttttcctaaaaccggtctactaatcatcgtattaggcacaatcgccatggagggcgacagcgctagtgaggaggaaatttgggaagagttgggagttatgggtgtgtacgatggcagggaacatactgtttatggtgaaccacgcaaacttttaacacaggattgggtacaggagaattacctcgaatacagacaggtccctggcagcaaccctgctcggtacgagttcctgtggggacccagggccctcgccgagactagttacgtaaaggtactggaacatgttgtgagggttaatgccagagtgaggatcgcctatccgagcttacgagaggccgcacttttggaagaggaggagggcgtgtag

SEQ ID NO: 230037 - DNA, 954 bp, synthetic construct
  misc_feature 1..954: note = Description of Artificial Sequence: Synthetic coding sequence
  source 1..954: mol_type = other DNA
atgtcatccgagcagaagagtcagcactgtaagccagaggaaggagtcgaagctcaggaagaagctctggggttggtcggggctcaagcacctactaccgaggaacaggaagcggcagtgagttcctcctcccccttagtccctggcaccctggaggaggtgccagccgcagaatcagcgggaccacctcagtctccgcagggcgctagcgctcttcctactaccatcagttttacctgttggcgccaaccgaacgagggctcctcatcacaggaagaggaaggtccttctaccagtcccgacgcagaatcactgtttagggaagctcttagcaataaggtggacgagctggctcactttttgctccgaaagtatagggctaaggaactggtcaccaaagcagagatgcttgaacgcgtgatcaagaactataagcgctgcttcccagttatttttggcaaagccagtgaatcactgaagatgatctttggaatcgacgtgaaggaagtggatccagcttctaatacctatactctcgtcacatgtctcggcttgtcttatgacggccttctgggtaacaaccaaatttttcctaagaccggtctcctgatcatcgtactgggcaccattgcaatggagggagactcagctagcgaggaagaaatctgggaagaattgggagtaatgggagtgtacgatggccgagaacacacagtgtacggcgaacccagaaagctcctgacgcaggactgggtgcaggaaaactacctggagtacaggcaggtacctgggagcaacccagcacgttacgagtttctatggggtcctagggcactcgccgagacgtcctatgtgaaagtgcttgagcacgtcgttcgtgtcaatgccagagtgaggattgcctacccctccttgcgggaggcagccctgttggaggaagaggagggcgtgtag

SEQ ID NO: 230038 - DNA, 954 bp, synthetic construct
  misc_feature 1..954: note = Description of Artificial Sequence: Synthetic coding sequence
  source 1..954: mol_type = other DNA
atgtcaagtgaacagaagagtcagcactgcaaacctgaggaaggagtcgaggcgcaagaggaggctctgggcctggttggtgcccaggcgccaactactgaagagcaggaagccgctgtctcttcatcatctccccttgtgccagggacgctggaggaggtccccgctgctgaatcggccggtcctcctcagtcaccacagggggcttctgccttacccactaccatctccttcacttgctggagacagccaaatgagggaagtagttctcaagaggaagaggggcctagcacatcaccagatgcagaaagccttttccgcgaggccctgagtaacaaggtggatgaactggcacattttctgctgcgtaaatacagggccaaagagcttgtgacgaaggccgaaatgctagaacgtgttattaagaactataaacgatgttttcctgtaattttcggcaaggcgtccgagtccctcaagatgatctttggaatcgatgtgaaggaggttgatcctgcctcaaacacatacaccctggtgacttgcctaggtttatcttacgatgggctgcttggaaacaaccagatctttccaaaaacaggactgcttatcatcgtgctgggtaccatcgcaatggaaggcgattccgcttcagaagaggaaatctgggaggagctcggagtaatgggggtgtacgatgggagggagcatactgtgtatggcgaaccgcgaaaactgcttactcaagattgggtgcaggaaaattaccttgaatacaggcaagtccccggaagtaatccggcacgctacgaattcctatggggacccagggcgctggccgaaactagctatgttaaggtcctggagcacgtggtccgggtgaacgcccgagtaaggatagcttacccatcgctacgcgaggctgcactgctggaggaggaagagggggtgtag

SEQ ID NO: 230039 - DNA, 954 bp, synthetic construct
  misc_feature 1..954: note = Description of Artificial Sequence: Synthetic coding sequence
  source 1..954: mol_type = other DNA
atgagctccgaacagaagagtcagcattgcaaacccgaagagggagttgaggcccaggaggaggccctggggctggttggcgcacaagcccctaccacagaggaacaagaagctgccgtgagcagctcttcacccctcgttcctggaactctggaggaggttccagctgcggagtcagcgggtccgcctcagtccccacagggtgcctcagcattgcccacaaccatcagctttacctgttggagacagcccaacgaaggatcatcttcccaagaggaggaaggaccctccacttctcccgacgccgaatcgctgttccgagaagctctcagcaacaaggtcgatgaactagcacattttctgctgaggaaatatagagccaaagagctcgtgaccaaggccgagatgcttgagcgcgtgataaaaaattataagaggtgcttcccggtcatcttcggcaaggcttctgaaagtctgaagatgatttttgggattgatgtgaaggaagttgatcccgcaagcaatacctacaccctcgtaacatgtctcggcctcagctatgacggccttctgggtaataatcaaatttttcccaagactggtctcctgattatagtgctcggaacaatcgccatggagggcgactctgcttctgaggaagagatttgggaggagctaggtgtgatgggagtgtacgatggcagagaacacacagtgtatggtgaaccccgaaagctcctcacccaggattgggtgcaggagaattacttggaatacaggcaagtccccggtagcaaccccgctcgctacgagtttctgtggggccctcgcgcactcgctgagacctcatacgttaaagtgctcgagcacgttgtaagagtaaatgcaagggttcgcatcgcatatccaagtctgcgtgaggctgctctcttggaggaagaagaaggtgtgtag

SEQ ID NO: 230040 - DNA, 954 bp, synthetic construct
  misc_feature 1..954: note = Description of Artificial Sequence: Synthetic coding sequence
  source 1..954: mol_type = other DNA
atgtcgagtgagcagaagtcccagcactgcaaaccagaggagggtgtcgaagcccaggaggaggcactcggcctggtgggcgctcaggcgcctacaaccgaggagcaggaagccgctgtctcttcttcctctcccctggtccccggtaccttggaagaggtgcccgctgccgagagcgctggacctcctcagagcccccagggggcatccgccctgccgactacaatatccttcacttgttggagacagccaaacgaaggctcctcctcccaagaggaagaaggaccctcgacctcaccagacgccgagagtttatttcgagaggcgctgagtaacaaggtggatgagttagcccatttcctgctgcgcaagtaccgcgcaaaagagctagtgactaaggccgaaatgctggagcgagtgattaagaactataaaagatgtttcccagtgatttttggaaaggcttcagagagcctgaagatgattttcggtatagatgttaaagaggtggacccggctagcaacacttatacgcttgtgacatgcctgggactcagctacgacgggctcctgggtaataatcaaatcttcccgaagacaggactcttaattattgtactggggacaatcgcaatggaaggagattcggctagcgaagaagaaatttgggaagagctcggagtgatgggcgtgtatgacggacgagagcacaccgtgtacggtgaacctcgtaaactcctaacccaggattgggtgcaagaaaactatctggagtaccgacaggtgcccggatccaaccccgctcgatacgaattcctgtggggtcctcgcgcattggcagaaacaagttatgtcaaagttctggagcacgtggtgcgcgtgaacgctagagtgaggatagcctacccttcattgagagaggccgctcttctggaggaggaggagggcgtatag

SEQ ID NO: 230041 - DNA, 954 bp, synthetic construct
  misc_feature 1..954: note = Description of Artificial Sequence: Synthetic coding sequence
  source 1..954: mol_type = other DNA
atgtcttcagagcagaagtcacagcactgtaaacctgaagagggagtcgaggcccaggaggaggctctggggttagtaggggcacaagccccaacaaccgaggaacaggaggcagctgtctcatcaagttccccgctggtcccgggaacactggaagaggtcccagcggctgaaagtgctggtccacctcagtctcctcagggtgccagtgctttgcccaccactatttcctttacttgctggcgccagcctaacgagggatccagttcacaggaagaggaaggtccttcaacaagccctgacgcagagtcgctgttcagagaggctctcagtaacaaagtcgacgagctggcccattttttattgcgcaagtaccgggctaaagaacttgtcacaaaggccgagatgttagagagagtcattaagaactacaaaagatgtttccctgtgatctttgggaaagcttctgaatccctgaaaatgattttcgggatcgatgtcaaggaggtggaccctgcctctaatacttacacgctggtcacatgtctcggcttatcttacgacggccttctgggaaataatcagatcttcccaaaaacaggcctgttgattatagttctggggacgatcgccatggagggggactccgcaagcgaggaggagatttgggaggagctgggtgtcatgggggtatacgatggacgggaacacacagtgtatggcgagccacgcaagctgctcacacaggattgggtgcaggagaactatctagagtaccggcaagtacctgggtccaatcccgcaaggtacgagttcctgtggggccctcgcgctttggcagagacctcttacgttaaagttctagaacacgtcgtcagggtgaacgcccgagtgaggatagcttacccgagtttgcgagaggctgccctcctggaagaagaggagggcgtatag

SEQ ID NO: 230042 - DNA, 693 bp, synthetic construct
  misc_feature 1..693: note = Description of Artificial Sequence: Synthetic coding sequence
  source 1..693: mol_type = other DNA
atgtcaagcgagcagaaaagccaacactgtaaaccggaggaaggagtagaggcacaggaggaggccctgggccttgtgggcgctcaggctcctacaaccgaggagcaagaggccgctgtatcatcctctagtcccctggtaccgggaacactggaggaggtgccagccgctgaatcagcagggccaccacagtcccctcagggggcatcggcgttacctacaactatttcctttacttgttggaggcaacctaatgaagggagcagttcacaagaagaggagggcccatctacatcgcccgatgctgagtccttattccgggaagctctgtctaacaaggtagatgaactggcccattttttgcttcggaagtacagggcgaaagagcttgtaacaaaggccgagatgctggaacgcgtgatcaagaactataagcgatgctttccggtcatttttggtaaggccagtgagtcactgaaaatgatctttgggattgatgtgaaggaggtggacccagcttctaacacatacacactggtgacttgccttggcctcagttacgacggcctcttgggtaacaatcaaattttccccaagacagggcttcttattatcgtgctcggcacaatcgcaatggagggggactctgcgtccgaagaggagatttgggaggaactgggagtcatgggttag

SEQ ID NO: 230043 - DNA, 654 bp, synthetic construct
  misc_feature 1..654: note = Description of Artificial Sequence: Synthetic coding sequence
  source 1..654: mol_type = other DNA
atgagcagcgaacagaaatcacagcactgcaaacccgaagaaggcgtggaggctcaggaagaagctcttgggcttgtcggagcgcaggcgcctacaacggaagaacaggaggccgctgtaagttccagttccccccttgtcccgggtacgctcgaggaagtaccagctgcagagagtgccggtcctccccagtcgccgcagggcgcatcggcccttcccacaaccatttctttcacgtgttggaggcagcccaatgaagggtcatcctctcaggaagaggagggacccagtaccagcccggatgccgagtcccttttccgcgaggccttgagcaacaaagtggatgaactggcccatttcctgctgcgaaaatacagagcgaaggaactcgtcaccaaagctgagatgctggaaagagtgataaagaactataagcgatgctttcctgttattttcggtaaggccagcgaaagtctgaaaatgatcttcggaattgacgtcaaggaagtggatcctgcctcgaatacgtacaccctcgttacttgtttgggcctgtcctacgacgggcttctgggcaataatcagatctttcctaagactggcctgttaatcattgtgctcgggactattgccatggagggcgattcagcctag

SEQ ID NO: 230044 - DNA, 726 bp, synthetic construct
  misc_feature 1..726: note = Description of Artificial Sequence: Synthetic coding sequence
  source 1..726: mol_type = other DNA
atgtcttctgaacagaagagtcagcactgcaaaccagaggaaggagtggaagcacaggaagaggcactgggactggtgggtgctcaggcgccaaccactgaggagcaggaagccgcagtctcctccagctccccacttgtgccaggcacactcgaggaggtccccgctgcagagtctgcaggaccaccacagagcccacagggggcatcagctctcccgacaaccatcagtttcacgtgttggaggcaacctaacgagggatccagcagccaggaagaggagggcccttccacgagccctgacgctgagtctttgtttcgcgaggccctttctaacaaggttgatgagctcgcacacttcctgttgaggaagtatagggccaaagaactggtgactaaggccgaaatgctcgaaagggtcattaaaaactacaagaggtgttttcccgtaatcttcggtaaggcatcagaatctctgaagatgattttcggcattgatgtgaaggaggtcgacccagccagcaatacctacaccctcgtcacttgtctaggtctctcttacgacgggctcctcggcaataaccagatattcccaaagaccggattattgattatcgtgctgggaacgattgcaatggaaggggacagcgctagcgaggaggagatctgggaagagctgggagtgatgggtgtgtatgatggcagggagcacactgtttatggctag

SEQ ID NO: 230045 - DNA, 519 bp, synthetic construct
  misc_feature 1..519: note = Description of Artificial Sequence: Synthetic coding sequence
  source 1..519: mol_type = other DNA
atgtcttccgagcagaagtctcagcactgcaagccagaagaaggggtggaagcccaagaggaagctctgggactcgtaggcgcacaagccccaaccacagaagagcaggaggcagctgtttcctcatcgagccccctggtcccaggaactctcgaggaagtacccgctgcggaatctgcaggtcctccacagtcacctcagggcgcttcagccctaccgactaccatttcttttacttgttggagacagccaaatgagggcagttcttcccaggaggaagaaggtcctagtactagtcctgatgccgagtcactgtttagggaagcgctctccaacaaggttgacgaactcgcccatttcctgctgaggaagtaccgcgctaaggagttggtcaccaaggccgagatgcttgagcgggttatcaagaattacaaacggtgcttccccgtaatttttggtaaagccagtgagtccttaaaaatgattttcggaatcgacgtcaaagaggttgatccgtag

SEQ ID NO: 230046 - DNA, 726 bp, synthetic construct
  misc_feature 1..726: note = Description of Artificial Sequence: Synthetic coding sequence
  source 1..726: mol_type = other DNA
atgagttccgagcagaagagccagcactgtaaacctgaagaaggtgtcgaggcgcaggaggaagccctcgggctggtgggcgcacaggctccaaccacagaggaacaggaagccgctgtctcgtctagttcaccactggttcccggaacgctggaagaggttccagcagccgagagtgctggtccaccacagtccccccagggggcatccgctttacctaccacaatttcattcacttgttggagacagccgaacgaagggtctagcagccaggaggaggagggaccatcaacgtccccagatgccgaaagcttgtttagggaagcgctctccaataaggtggacgagctagcccactttctgctccgaaagtaccgggctaaggagctggttaccaaagccgaaatgctcgagcgggtgattaaaaattataagcgttgcttccctgtgattttcgggaaggcctctgaaagtctcaagatgattttcggtatcgacgtcaaggaggttgaccccgctagtaatacctatacgctcgttacctgcctggggctctcctacgacggcctcttgggcaataaccaaatcttcccaaagacaggcttgcttatcattgttctggggacaatcgcgatggaaggtgactcggcctccgaggaggagatctgggaagagttaggtgtcatgggcgtttatgatgggcgagaacacaccgtgtacggatag

SEQ ID NO: 230047 - DNA, 726 bp, synthetic construct
  misc_feature 1..726: note = Description of Artificial Sequence: Synthetic coding sequence
  source 1..726: mol_type = other DNA
atgtctagtgagcagaaatcccagcattgcaagcccgaggagggtgtcgaagcgcaggaggaggccctgggcctggtcggggctcaagccccaactaccgaggaacaggaggctgcagtgagttcctcctctccacttgtacctggtacactggaagaggtgcctgcagccgagtcagcgggaccccctcagagcccacagggcgcatctgccctgcctacgaccattagctttacttgctggaggcagcccaatgaagggagttcgagccaggaggaggagggacccagtacctcccctgatgcagagtctttgttccgcgaagctttgagtaacaaagtggacgagctcgcccattttttactgcggaagtacagagccaaggaactcgtgacgaaggccgagatgctggagcgggtgattaagaactacaagaggtgtttccctgttatctttgggaaagcatctgagtcactcaagatgatctttggtattgacgtcaaggaggtggatcctgcctcaaacacttacaccttagttacctgtctgggcttgagctacgatggactcttaggtaataatcaaatttttcctaaaacaggccttcttattatcgtactcggcaccattgccatggagggcgatagtgcctctgaggaggagatctgggaggagctgggcgtcatgggggtctacgacggcagagaacacacagtgtacggttag

SEQ ID NO: 230048 - DNA, 654 bp, synthetic construct
  misc_feature 1..654: note = Description of Artificial Sequence: Synthetic coding sequence
  source 1..654: mol_type = other DNA
atgagttcagagcaaaagagccaacactgtaaacctgaggagggagtcgaggcccaggaggaggctttgggccttgttggagcacaggccccaaccaccgaagagcaggaagctgctgtgagtagctcatcgccgctagttccagggaccctagaggaggtacccgctgctgaaagcgccggtcctccacagtctcctcagggcgcaagcgctcttccaactacgataagcttcacatgctggaggcagcccaacgagggctcctctagtcaggaagaagaagggccatcaacatccccagatgcggaaagcctattccgtgaggccctcagcaataaggtagatgaattggctcacttcctgttaaggaagtaccgcgcaaaggagctggtgacaaaggctgaaatgttggagagggttatcaagaattacaaacgatgtttcccagtgatcttcggaaaggcatcagagtcgttaaagatgattttcggcatcgacgttaaagaggtggaccccgctagcaacacgtacactctagtgacctgcctgggcttgtcttacgacggcttactgggcaacaatcagatctttcctaaaacgggactgcttatcattgttctcggaaccatagccatggaaggggactctgcgtag

SEQ ID NO: 230049 - DNA, 726 bp, synthetic construct
  misc_feature 1..726: note = Description of Artificial Sequence: Synthetic coding sequence
  source 1..726: mol_type = other DNA
atgagcagtgagcagaagagtcagcattgcaaaccggaagagggcgtggaagcgcaggaggaggctctgggcttagttggcgcacaggctccgacaacagaggagcaggaggcagctgttagttcatctagtccacttgtgcccggtacgttggaggaagtgcctgccgctgagtcggctggaccaccacagtctccgcagggagcttccgcattacctaccacgatttcattcacatgctggagacagccaaatgagggttctagttcgcaagaagaggagggtccttcgacgagtccagacgccgagtcactgtttcgcgaggctctttcaaacaaagtcgatgaactcgcgcattttcttttgcgaaaataccgggctaaggaactcgtaacgaaagcagagatgttagagcgcgttattaagaactataaaagatgttttccagtaatctttggaaaggcttcagagtctcttaaaatgatttttgggattgacgtgaaggaggtggatccagcttcaaacacatacacccttgtcacctgcctgggcctgtcctacgatggactgctggggaataatcagatttttccaaagactggtttgcttattatcgttctcggaacaattgctatggagggggatagcgccagtgaggaagaaatttgggaggaactgggggttatgggggtgtatgatgggagggagcacacggtttatggatag

SEQ ID NO: 230050 - DNA, 945 bp, synthetic construct
  misc_feature 1..945: note = Description of Artificial Sequence: Synthetic coding sequence
  source 1..945: mol_type = other DNA
atgcctctggagcagcgatctcagcactgcaagccggaggaggggctcgaagcacgcggtgaagctctgggactcgttggagcccaggccccagctaccgaggagcaggaggctgcctccagctcttccacgctggttgaagtcacactcggcgaagtgccagctgctgaatcgccagacccccctcagtctccacagggggcaagctctctgccgaccacaatgaactaccctctgtggagccagtcgtacgaagacagttccaatcaggaggaagaggggccaagtacctttcccgatctggaaagcgaatttcaggccgcactaagcaggaaggtggctaaattggtgcatttcttacttctgaagtacagagcaagagaacctgtcaccaaagccgagatgcttgggtctgtggtggggaattggcagtacttttttcccgtgatcttcagtaaggcctctgatagcctgcaattggtgttcggcattgaactcatggaagttgaccccatcggtcatgtctacatcttcgctacatgcctggggttgagttacgacggactgcttggggacaaccagatcatgcctaagacaggattcctcatcattatcctagctataattgctaaagagggtgactgcgcccctgaagaaaaaatctgggaagaattgtctgtgctagaggtgttcgagggcagagaggattctatctttggtgatccgaagaagttactaacccagtacttcgtacaggagaactatctcgagtatagacaggtcccaggttccgacccggcatgttatgagttcctctggggccctcgcgctttgatagagacctcgtacgtgaaagtcctacaccatatggtgaagatcagtggaggacccaggataagttatcccctgttacacgaatgggcactcagagagggtgaggagtag

SEQ ID NO: 230051 - DNA, 606 bp, synthetic construct
  misc_feature 1..606: note = Description of Artificial Sequence: Synthetic coding sequence
  source 1..606: mol_type = other DNA
atgccgttggaacagaggagtcagcactgcaagcctgaggagggcctggaggccagaggagaggcactgggcctcgtgggcgctcaggcacccgcaacagaagagcaggaggctgcctcatcttcttctacgttggttgaggtcaccttgggggaggtccccgcagcggagagtcccgatcctccacaaagtccccaaggggcttcctctcttcctaccacgatgaactatcccctctggtctcagagctacgaagactcttccaatcaagaagaagaaggccctagcacattcccagatttagagagtgaattccaggctgcactgagtagaaaggtggccaagctcgtgcattttttacttttaaaatatcgggcaagggaacccgtcacaaaagctgagatgttgggcagcgtggtagggaactggcagtacttttttcccgtcatcttttctaaagcctctgatagcctccagctggtgtttggaatcgagctgatggaggtggaccctatagggcacgtgtacattttcgccacatgtctgggactgagctacgacggcctgctgggcgacaatcaaattatgccgaagactggcttctag

SEQ ID NO: 230052 - DNA, 708 bp, synthetic construct
  misc_feature 1..708: note = Description of Artificial Sequence: Synthetic coding sequence
  source 1..708: mol_type = other DNA
atgcccctagagcagaggagccagcattgtaagcctgaagaaggccttgaggctaggggcgaggcattaggcctggtcggcgcacaggccccagcgacagaagagcaagaggcagcctcttctagctcaacattagtagaagtgaccctcggcgaggtccctgctgcagagagtcccgatcctccccaatccccgcagggcgcatcctcactacctactaccatgaattatcctctctggtcccagtcctatgaggatagctctaaccaggaggaggaaggaccatctactttccccgatctcgagagcgaattccaggcggctctgtcccgcaaggtagctaaactggttcatttcctgctcctgaagtaccgcgcacgggagccagtcacaaaagcagagatgctcggctcagtggtgggtaactggcaatactttttccctgtcattttctcaaaggcatctgatagcctccagctggttttcggaatcgaactaatggaggtggatccaatcggtcatgtgtacattttcgcaacttgcttgggcctgtcttacgatggcctgctcggagacaatcagatcatgcctaagaccgggttcctgattatcatcctggcaattattgcgaaagagggcgattgtgctccggaggagaagatttgggaggagctttcggtgctggaggtgttcgagggaagggagtag

SEQ ID NO: 230053 - DNA, 957 bp, synthetic construct
  misc_feature 1..957: note = Description of Artificial Sequence: Synthetic coding sequence
  source 1..957: mol_type = other DNA
atgcttttaggtcagaagtcccaacgctacaaggccgaggaagggctgcaagcacagggtgaggcccctggccttatggacgtgcagatcccgactgccgaagagcagaaagccgctagtagctcctccacactgatcatgggtaccttggaggaggtaaccgactccggcagcccaagcccaccacagtcgcccgaaggtgcttcttcatccttgacagtcactgactccacactgtggagccagagcgacgaaggatccagcagcaacgaagaagagggcccttccacgagcccagaccctgcccatctcgagagcctgttccgcgaggcacttgatgaaaaggtagccgagctggtccgttttctgcttcgcaagtaccagatcaaagagccagttactaaagccgagatgttagaatcggtgatcaaaaattacaaaaatcatttccccgatatcttctccaaggcatcagagtgcatgcaggtcatattcggtatcgatgtcaaggaggttgaccccgcagggcacagttatatcctcgtgacttgcctgggactttcgtatgacggtctgttaggcgacgatcagagcaccccaaaaacaggcctgctgatcattgtgttgggaatgattctgatggagggttcaagggccccagaagaggccatttgggaagcactgagcgtcatgggactttacgacgggagagaacactctgtgtactggaaactgcggaaactgctcacgcaggagtgggttcaggaaaactacctggagtaccggcaagccccaggtagcgatcctgtgaggtatgagtttctgtggggtccaagagctttggccgaaaccagctacgttaaagtactcgagcacgtggtccgggtgaatgccagagtgcgcatttcatacccaagcctgcacgaggaggcactgggagaggagaaaggggtgtag

SEQ ID NO: 230054 - DNA, 957 bp, synthetic construct
  misc_feature 1..957: note = Description of Artificial Sequence: Synthetic coding sequence
  source 1..957: mol_type = other DNA
atgctgttgggccagaaaagccagcgctacaaggcagaagagggactgcaggcgcagggagaagccccaggcctgatggacgtccagatcccaacagctgaagaacagaaagcggcatcctcctcttccaccttgatcatgggcaccctcgaggaggtgactgacagtggcagccccagcccaccacagagcccagagggggctagtagtagcctcacagtgactgactcaactctgtggtctcagtccgacgagggtagcagcagcaacgaggaggaaggtccctcaacttcgcctgaccccgcacacctggagtccctgttcagagaagcactagatgagaaagtcgcagagctcgtgcgcttcttgctgaggaagtatcagattaaggagcccgtaaccaaggcagagatgctggagagcgtgatcaagaattataaaaatcatttcccagacatattctctaaggcctccgagtgtatgcaagtcatttttgggatcgatgttaaagaggtcgacccggctggtcactcttacattctggtaacctgcctgggcctgagctatgatggactcttaggggacgatcagtctactccgaaaaccggactgctcatcatcgtcctgggcatgattttaatggaaggctcgagagccccagaagaggctatatgggaagctctctccgttatggggttgtatgacggtcgcgagcacagcgtatactggaagctgcgcaaactgttgacccaggaatgggtccaggagaattatctggagtaccgccaggcacccggatctgaccccgtgcgctatgaattcctgtggggccctcgagccttagccgagacttcttatgtgaaagtgctcgaacacgtggtaagggtgaatgctcgggtaagaattagctacccctccttacatgaagaagccctcggggaagagaaaggagtgtag

SEQ ID NO: 230055 - DNA, 957 bp, synthetic construct
  misc_feature 1..957: note = Description of Artificial Sequence: Synthetic coding sequence
  source 1..957: mol_type = other DNA
atgcttcttggccaaaaaagtcagcggtacaaagccgaggagggcttgcaagcccagggggaggccccaggactaatggacgtgcaaatcccgactgcagaggagcagaaggcagcttcctcaagttccaccttgatcatgggaacgctggaggaggttaccgactcgggcagcccatccccccctcagtcccccgagggagcatcctctagccttaccgtcacggacagtacactgtggtcgcaatctgacgaaggtagttcctccaatgaagaggagggcccaagcacgtctccagaccctgcccatctcgaatctctgttcagggaggcccttgatgaaaaggtggccgaattagtgcgctttctactcagaaaatatcagatcaaagaaccagtaacaaaagctgaaatgcttgagtctgtgattaaaaattataaaaaccatttccccgacatcttttctaaagcttctgagtgcatgcaggttatcttcggcatcgatgttaaagaggttgatcccgctggccatagctatatcctcgtgacatgtctcggattgagctatgacgggcttctgggcgacgaccagtcaaccccgaaaaccgggcttctcattattgtcctggggatgatcctaatggagggaagccgggcaccagaggaagctatttgggaagccttgtctgttatgggcctttacgacggaagagagcactccgtttactggaaattacggaagttgctgactcaggagtgggtgcaggaaaactaccttgaatataggcaggccccaggaagtgaccctgttcgctacgagtttctgtggggtcccagggccctggctgaaacgtcatacgtgaaggtgcttgagcatgtggtgcgggtcaacgcaagagtgagaatcagttatccttcactgcatgaggaagcccttggagaagaaaagggcgtgtag

SEQ ID NO: 230056 - DNA, 948 bp, synthetic construct
  misc_feature 1..948: note = Description of Artificial Sequence: Synthetic coding sequence
  source 1..948: mol_type = other DNA
atgtccctcgaacagagatccccacattgcaagcccgatgaagaccttgaagcccaaggtgaggaccttgggttaatgggcgcacaggagcccaccggcgaggaggaagaaacaactagctccagtgactccaaggaagaagaggtttccgcagccggttctagcagccctcctcagtcaccacaggggggtgcatcatcatcaataagtgtgtactacaccctctggtcccagtttgatgaaggttccagctctcaagaggaagaagaaccaagcagcagcgtggaccctgcgcagctggagttcatgtttcaggaggctcttaaactaaaagtcgctgagttggtacactttctactgcataaataccgggtgaaagagccagtgacaaaggccgagatgcttgagtcagttatcaaaaactataaacgctatttcccggtgatttttgggaaagccagcgagtttatgcaagtgattttcggtacggacgttaaagaggtagatcctgccggacacagctacattctggtgaccgctcttggcttgagctgtgacagtatgcttggcgacggtcactcaatgccgaaagcagcccttctgattatagtcctgggcgtcatcctgactaaggataactgtgccccagaggaagtcatctgggaggctctgtctgttatgggggtgtacgttgggaaagaacacatgttctatggtgagcctaggaaattgctgacacaggattgggtgcaggagaattacctggagtaccgccaggttccagggtctgatccagcacattacgagttcctgtggggatcaaaggctcatgccgagacatcctacgagaaagtcattaactacctcgtaatgctcaacgcaagagaaccaatatgctacccatcactgtacgaggaggttctgggtgaggaacaggagggggtgtag

SEQ ID NO: 230057 - DNA, 345 bp, synthetic construct
  misc_feature 1..345: note = Description of Artificial Sequence: Synthetic coding sequence
  source 1..345: mol_type = other DNA
atgagcctagagcaacgctctccgcattgtaagcctgacgaggacctcgaggctcaaggggaggacctggggctcatgggagcgcaggagccaacgggggaggaggaagaaacaacatcaagttcggactcaaaggaagaagaagtctctgcagctggatcaagttcaccaccccagtcccctcagggaggggcatcctctagtataagcgtatactacacactctggtcgcagttcgacgagggatcatctagccaagaggaagaagaaccgagttcatccgtcgaccctgctcaactcgaatttatgtttcaggaggctctcaaactgaaggtagccgaatag

SEQ ID NO: 230058 - DNA, 930 bp, synthetic construct
  misc_feature 1..930: note = Description of Artificial Sequence: Synthetic coding sequence
  source 1..930: mol_type = other DNA
atgagtctcgaacaaaggtccccacactgtaaaccggacgaagatcttgaagcacagggagaggatctgggactcatgggcgctcaggaaccaactggtgaggaggaggaaacaacctcaagctctgacagcaaagaggaggaagtgtcagctgcaggttcaagcagtcccccacagtctccacaaggaggggcttcatcctcaattagcgtctattatactctgtggtcccagtttgatgaggggtcttcatctcaggaagaggaggaacccagcagcagcgtggatccagcccagctggaattcatgttccaggaggccctgaagctgaaagttgccgagctcgttcactttctgctgcataagtatcgagtaaaggagcctgtgacgaaagccgaaatgcttgaaagcgtaattaagaactacaagcgctatttcccagtcatatttggaaaagctagcgagtttatgcaggttatcttcgggacagatgtcaaggaggtggacccagctggccattcatacattttagtgactgccctgggtttgtcatgtgactccatgttgggcgacgggcactccatgccgaaggccgctctgttgatcatcgtgctcggtgtcatcctgacaaaggacaactgcgctccagaagaggtgatatgggaggctctctccgtcatgggcgtgtacgtgggcaaagagcacatgttttacggtgagcctcggaaactcttaactcaagactgggtccaggagaactatctcgagtacagacaggtacctgggtccgatccagcccactatgagtttctctggggaagcaaggcccacgctgagacgtcctatgaaaaagttatcaactaccttgttatgcttaacgcaagggaacccatttgttatccgtctctctatgaagaagtcctcggatag

SEQ ID NO: 230059 - DNA, 591 bp, synthetic construct
  misc_feature 1..591: note = Description of Artificial Sequence: Synthetic coding sequence
  source 1..591: mol_type = other DNA
atgtccttggagcagagaagtccacactgtaagcccgatgaggacctggaagctcagggagaggacctgggtttaatgggagcacaagaacctacaggtgaggaagaagagacgacctcgtcctcggacagtaaggaggaggaagtctctgcagccggatccagcagccctccccagtccccacagggtggcgcaagctcatccatatctgtgtattatacactctggtcacagtttgacgaaggcagctcgagccaggaggaggaggaacccagtagttcagtggatcccgctcaactcgagttcatgtttcaggaggccttaaaattaaaagtggctgagctcgttcacttcctcctacacaaatatagggtcaaggaacctgtcacaaaggccgagatgctggagtcagtgattaaaaactataagcgatattttcctgtgatcttcggcaaagccagcgaatttatgcaagtgattttcgggaccgacgtgaaagaggttgaccctgcagggcactcctatatcctagtcacggcactagggctgagctgcgatagcatgctgggcgacggtcattcaatgccttag

SEQ ID NO: 230060 - DNA, 294 bp, synthetic construct
  misc_feature 1..294: note = Description of Artificial Sequence: Synthetic coding sequence
  source 1..294: mol_type = other DNA
atgagcctcgagcaacggtctccccactgcaagccggatgaggacctcgaagctcaaggagaggacctgggactgatgggcgctcaagagcctaccggggaggaagaggagacaacgtcttcttcggatagcaaggaagaagaggtaagcgccgctggaagctcctctccccctcagtccccacagggcggagcttcttcgtccatatccgtctactacacactgtggtcgcaatttgatgagggatccagcagtcaggaggaagaggagccctcgagctccgtcgacccgtag

SEQ ID NO: 230061 - DNA, 948 bp, synthetic construct
  misc_feature 1..948: note = Description of Artificial Sequence: Synthetic coding sequence
  source 1..948: mol_type = other DNA
atgagccttgagcagagatctcctcactgtaagcccgacgaagacttagaggctcagggcgaggacttgggactcatgggcgcacaagagcctaccggggaggaagaggaaaccacttcctcgagtgacagtaaagaagaagaggttagtgccgcaggcagttctagtccccctcagtcgccacaggggggagccagctcctccatttcagtgtattatactctgtggagccagtttgacgagggttcaagtagccaggaagaggaagagccatctagcagtgtggaccctgcccagctcgagttcatgtttcaggaggccctcaaactcaaggtggcagaactggtgcactttttgctacacaagtaccgtgtcaaagagccagtgacaaaggctgaaatgctggaatcagtaataaagaactataagaggtattttccagtcatttttggcaaggcctccgagttcatgcaagttatcttcggcacagacgtgaaagaggttgaccccgcagggcatagctatatactcgtgacagccttgggactgagctgcgatagcatgctgggagacggacatagcatgcccaaggcagctctgctgattatcgtcctgggcgtcattctgactaaagacaactgtgcaccagaggaggtgatttgggaagcattgagtgttatgggcgtgtatgtaggcaaggagcatatgttctatggagagcctcgcaagctcctaacacaggattgggtgcaggagaactacctcgagtaccgtcaagtcccaggcagcgacccagcccactatgagttcctgtgggggtccaaggcacacgcagagactagttatgagaaagttatcaattatttggtgatgcttaacgccagggagccaatttgctaccccagtttgtacgaggaggttcttggggaggaacaagagggtgtctag

SEQ ID NO: 230062 - DNA, 1044 bp, synthetic construct
  misc_feature 1..1044: note = Description of Artificial Sequence: Synthetic coding sequence
  source 1..1044: mol_type = other DNA
atgccccgtggccagaagagcaagctccgagctagagagaaaagaagaaaagcaagagaagagacgcagggcctgaaagtcgcccatgctacagcagccgaaaaagaggaatgcccatcgtcctctccggtgctaggcgacactcccaccagttcgccagcggcaggaattccccagaaaccgcagggcgcaccacccactactaccgcggctgccgctgtaagctgtacagagagcgatgaaggtgctaagtgccagggggaggagaacgcctccttcagccaagcaacaacctcaaccgagtcctctgtgaaggatcccgtggcatgggaggcaggcatgctcatgcactttatcctgagaaagtataaaatgcgggagccaattatgaaagccgatatgcttaaggtggttgatgagaaatacaaagatcactttaccgagattctgaacggcgcaagtcggcgtctggagttggtgttcggcctcgacctgaaggaggataatccctctggtcacacatacacactggtgtccaaactgaatcttaccaacgacggcaatctgtccaatgattgggattttccgcgtaatggacttttgatgcccttgctgggtgtcattttcctgaaaggtaattctgccactgaggaagaaatctggaagttcatgaacgtgctgggcgcttatgacggagaggagcatttaatttatggtgagccacgtaaatttatcacacaagacctggtgcaggagaagtatctgaagtatgaacaagtcccaaactctgatcctccaagataccaattcctttgggggccacgcgcttacgctgagacaactaagatgaaggtcctcgagtttctggccaaaatgaacggcgctacacctagagacttcccaagccattacgaagaggctctgcgagatgaggaggagcgagcacaagtcagatcttcggtgcgggcacgacgcagaacaacagcgactacttttcgcgcacgcagtcgcgcaccattctctcgctcctcccatcctatgtag

SEQ ID NO: 230063 - DNA, 1044 bp, synthetic construct
  misc_feature 1..1044: note = Description of Artificial Sequence: Synthetic coding sequence
  source 1..1044: mol_type = other DNA
atgccacggggtcagaaaagcaagctgcgagccagggagaagagacgcaaagctagggaagaaacccaaggcctcaaagtcgcccacgctaccgccgcagaaaaggaagagtgcccaagctcgagtccagttctgggagacacccctaccagtagcccagccgcaggaattcctcaaaaacctcagggcgctccaccaaccaccaccgccgctgccgctgtgagctgtacggagagcgacgaaggcgcaaagtgccaaggtgaagagaacgcgtccttctcccaggccactacgagcaccgaaagtagcgtgaaagatccagtcgcctgggaagctggaatgctgatgcatttcatcctacggaagtacaagatgcgtgaacctatcatgaaggctgacatgctcaaggttgtcgatgaaaaatacaaagatcattttacagaaatcctgaatggagccagtaggcggctggagttggttttcgggctggatctgaaggaggataatccttcaggacatacctataccctggtatccaaactgaacttgacgaatgatgggaacctgtctaatgattgggattttcctagaaatggtctgctcatgccactcctcggtgttatcttcctgaaggggaactcggctactgaggaagaaatatggaaattcatgaacgtactgggcgcttacgatggcgaggagcaccttatatatggggagccaagaaaatttatcacacaagacctggtgcaggaaaaatacttgaagtacgaacaggtgcctaactctgatccaccccgatatcagtttctgtggggaccacgggcttacgcggagacaaccaagatgaaggtgctggaattcctggccaaaatgaacggcgcaacgcctcgggacttcccctcccattacgaggaagctctccgagacgaggaggagcgggctcaggtgcggtcctcagtgcgcgcaaggaggcgtaccacagccaccactttcagagctaggagccgggctccattttcaaggtcatcccacccaatgtag

SEQ ID NO: 230064 - DNA, 1044 bp, synthetic construct
  misc_feature 1..1044: note = Description of Artificial Sequence: Synthetic coding sequence
  source 1..1044: mol_type = other DNA
atgccacgaggacagaagagcaaattgagagcaagggagaaaaggagaaaagcgagggaggaaacccagggtctgaaagtggctcatgctaccgccgctgagaaagaagagtgcccgagctcttcccccgtccttggagatacacccacaagctcgccagccgcaggcattccacagaaaccccaaggcgcacctcccaccaccacagcagctgcagcggtctcttgcacggagtcggatgagggcgctaagtgtcagggcgaagaaaatgcctctttcagtcaggccacaacctcgacagaaagctcggtgaaagaccctgtggcttgggaagccggaatgctcatgcactttattcttagaaagtacaaaatgagggagcctatcatgaaggcagatatgttaaaggtcgtagacgagaagtacaaggatcactttactgaaatcctgaacggagccagtcggaggctcgagctcgtcttcggcctggacctgaaagaagacaacccctccggacatacctacacgctggtgtctaagctaaatctcactaacgacgggaatctgagtaatgactgggacttccctcggaatggccttctcatgcccctgctgggggtgatttttctcaagggtaactcagcaaccgaagaggaaatttggaagttcatgaacgtcctcggagcctacgatggagaggaacatctgatttatggggagccaagaaagtttatcactcaagacttggtgcaggaaaagtatctgaagtacgaacaggtgccaaactcagaccctcccagataccagtttttgtggggccctcgcgcatacgccgagactacaaagatgaaggtgttggagtttctagccaaaatgaacggcgctaccccgagggattttccaagtcactatgaagaagctctacgtgacgaggaggaaagggctcaggtcaggagttcagtgagggcaagacgccgaaccaccgcaaccacttttagagccagatcccgggctccatttagccggtcttcacaccctatgtag

SEQ ID NO: 230065 - DNA, 1044 bp, synthetic construct
  misc_feature 1..1044: note = Description of Artificial Sequence: Synthetic coding sequence
  source 1..1044: mol_type = other DNA
atgcctaggggacagaagtccaagttgcgcgctcgggagaaacggaggcaggcccgaggaggcctagaggacttaatcgacgccttggacatattagaggaggaagaagaaagtcccccatccgcatctgcatgtctgaaagacgtgtttcaatccagccttgatggtgcctcaaacaatccccacggactgagagaggcacagtcgacctccacaagtgccacagctgccagccacactcggcaccccgagggcgtgaacgatcaaatggaagagaggccaatatgtacacaagatctcgaggcaacagattcatttccaagaggcccagttgatgaaaaggtgatcatcctggtgcattacctgctgtacaaataccagatgaaggaacctatcactaaggctgacatgctgaggaacgtaactcagatgagtaagtctcagttccctgtgattcttagcagggcatccgaacacctggagctgatttttgggctggatttgaaagaggtggaacctaataagcacatctacgttcttgtaaataagctggacctgggttgtgatgccaaactttctgacgagactggtgtgcccaaaactggcctacttatgacagtccttggcattatcttcacgaatggaaactgtgtggccgaggaggaggtgtggaaggtgttcaacacgatgggtctctacgacgggatagagcatttcatgtttggggagccgagaaaactcctgacaaaggacttggtgaaagaaaactatctggaataccagcaggttcccaatagtgatcctccgcgatatcagttcttgtgggggcctcgggcacatgcagagaccagcaagatgaaagtcctggaattcctggcgaaagtcaatgatactgccccatctgaattttccaattggtatacggaggctctgcaggacgaggaagaacgggctagggctcgagtggcagccaaagccagggtgtcagccaccgccggagctagatccaaggtgaaaagctccaaaagctcccaactccagtag

SEQ ID NO: 230066 - DNA, 975 bp, synthetic construct
  misc_feature 1..975: note = Description of Artificial Sequence: Synthetic coding sequence
  source 1..975: mol_type = other DNA
atgtcccaggaccaggagtccccaagatgcacgcatgaccagcacctgcagactttctctgaaacgcagtctctggaggttgcccaagtgagcaaggccctggaaaagacactactgagctcgtctcatcctcttgttcccggtaaactaaaggaagcacccgctgccaaggccgagtcaccattagaagtaccacagtccttttgttcctcctccatagctgtgaccaccaccagcagtagcgaaagcgacgaggcctcatcaaatcaggaggaggaggatagtccgtcaagcagtgaagacacatccgatccaagaaacgtccccgcagatgcccttgaccaaaaagtcgcatttttggtaaattttatgctgcataaatgccagatgaagaaacccatcaccaaggccgacatgttgaagatcattatcaaggacgatgaatcccatttctcagagattctgttgcgggctagcgagcaccttgaaatgatttttggcctagacgtcgtcgaagtggaccctaccacacattgttatggcctcttcattaagctgggcctaacttacgacggcatgctcagcggagagaaaggtgttcctaaaacaggacttttgattatagttctcggcgttatattcatgaaaggaaacagagctacggaggaagaagtttgggaggtgttgaacctgacaggagtgtatagcggaaagaaacactttattttcggtgagcccaggatgctgatcacgaaggacttcgttaaagaaaaatacctggagtaccagcaggtagccaacagcgatcccgctcggtacgaattcctctgggggccaagggctaaggctgaaacaagcaaaatgaaagtgttggagttcgtggccaaggtgcatggcagctacccccattccttccccagtcagtacgccgaagccctgaaagaggaggaagagagagcacgcgcacgaatttag

SEQ ID NO: 230067 - DNA, 975 bp, synthetic construct
  misc_feature 1..975: note = Description of Artificial Sequence: Synthetic coding sequence
  source 1..975: mol_type = other DNA
atgagccaagatcaagagtcacccagatgtacccatgaccagcacctacagaccttcagtgaaacccagtccttggaagtggctcaggtcagcaaagcactggaaaaaactctgttgagctcttctcatccacttgtgcccggaaagctgaaggaggcacccgcagcaaaagcggaatcgccactcgaggttcctcagagcttctgctcctcatccatagctgtgaccaccacttccagctccgagtcagatgaagcctcctcaaatcaggaagaggaagatagtccatcgagtagcgaagatacttccgacccgcgaaatgtccctgccgatgcactagaccaaaaggtcgcatttctggtcaactttatgctgcacaaatgccaaatgaaaaagcccatcacaaaggccgacatgctcaaaataatcatcaaggacgatgagtctcatttctctgagatcctcttaagggcatcagagcaccttgagatgatatttggcttggatgtcgtggaagtggaccccaccactcattgttatggcttattcatcaagctcggtctgacgtatgacggtatgctgagcggagaaaagggggtgcctaaaactgggctgctcataattgtgctgggtgtcatcttcatgaaggggaatcgggctaccgaggaggaagtatgggaggtgcttaatttgacaggagtatattcagggaagaagcattttatctttggtgagcctagaatgctgatcacaaaggactttgtaaaggagaaatatctggagtatcagcaggtagcaaatagcgatcccgctagatacgaattcttgtggggaccaagggccaaggccgagacctccaagatgaaagtcctggaatttgtcgccaaggtgcacgggagttacccgcactcctttcccagccaatacgccgaggcattgaaagaagaggaagaaagggctagggctcgcatatag

SEQ ID NO: 230068 - DNA, 975 bp, synthetic construct
  misc_feature 1..975: note = Description of Artificial Sequence: Synthetic coding sequence
  source 1..975: mol_type = other DNA
atgtcccaggaccaagagtctcccagatgtacccacgaccagcatcttcagacgtttagcgaaacgcaaagtcttgaggtcgctcaagtctctaaggccctggagaaaaccctgctgtctagctcccatccactggttccgggtaaactgaaagaggcaccagccgcaaaggccgagtctcctctggaagtgccacagtcattctgcagttccagtattgctgtcacaaccacgtcaagcagcgaatctgacgaggcttcttctaaccaggaggaagaagatagcccctcctcctctgaggacactagcgatccacggaacgtccccgcagacgccctggaccagaaggtagcttttcttgtgaactttatgctacacaagtgtcagatgaaaaagcctatcacaaaggctgacatgttaaagatcattataaaggatgacgaaagtcacttctccgagatcctgctccgagccagtgaacaccttgaaatgatattcgggctggatgtggttgaggtggacccaacaacccactgttacggtctgtttattaagcttgggctcacctatgacggaatgttgagcggcgagaagggcgtaccaaagacaggcctgcttatcatcgttttgggagttatcttcatgaagggtaacagagcaactgaggaggaggtgtgggaagtattgaacctaactggtgtgtactcaggcaaaaaacacttcatatttggggaaccccgtatgttaatcacgaaagactttgtgaaagagaaatatctagaatatcagcaagtcgctaattccgacccagcccgttacgaatttctgtgggggccacgcgcaaaggctgagacttccaaaatgaaggtgctggagtttgtggcgaaggtgcacggaagctacccacattcttttcccagccagtacgccgaagcactcaaagaagaggaagaacgtgcacgtgcaaggatctag

SEQ ID NO: 230069 - DNA, 975 bp, synthetic construct
  misc_feature 1..975: note = Description of Artificial Sequence: Synthetic coding sequence
  source 1..975: mol_type = other DNA
atgtctcaagatcaggagtctccacgttgtacccatgaccagcatctccaaacattctctgaaacccagtctttggaggtagcccaggtttcaaaggccctagagaagaccctgctgtctagctcccaccccttggtcccgggaaagctgaaagaggcacctgccgcaaaagcagagagccccctagaggtgccccaatcattctgcagtagcagtattgccgtgacgactacgagcagttccgaaagcgacgaagcttccagcaatcaggaggaagaagactctcccagctcaagtgaagacacaagtgatccaaggaacgtgcccgcagacgccttggaccagaaagtcgcatttctagtgaactttatgctccacaagtgccagatgaagaaacctatcactaaagcagacatgctgaaaatcataataaaggatgacgagtcccatttctcagagattttactgcgcgcttccgagcatctggagatgattttcgggctggacgtggtggaggttgacccaactacccattgctatggcctgtttatcaaactcggccttacctacgacggaatgttgtcaggcgaaaaaggcgtcccaaagactggcctgctgattatcgttctgggggttatcttcatgaaaggaaaccgcgctacggaggaggaggtgtgggaagttcttaatctgacaggagtttacagtgggaagaagcacttcatcttcggggagcccagaatgctgataacgaaagattttgtgaaagaaaagtatttggagtatcaacaggtggcaaattctgatccagcacggtacgagttcctgtggggcccacgcgctaaggccgagacgtcaaagatgaaggtcctcgagttcgtggccaaggtgcacggcagctacccacattcatttcccagtcagtatgcagaggccctgaaagaggaggaggaaagggcacgcgctagaatctag

SEQ ID NO: 230070 - DNA, 1071 bp, synthetic construct
  misc_feature 1..1071: note = Description of Artificial Sequence: Synthetic coding sequence
  source 1..1071: mol_type = other DNA
atggggactgaggcacagcccgtagttaaggccgtgatcttacattgcctcccatcttgccctcactcctgcctgttgccgcctacccgcgtgatcatgtctcaggatcaggagagtcctcggtgtactcatgatcagcatttgcagacattcagcgagacacagagccttgaagtggctcaggtgagtaaggcattagagaagaccttactcagctcatcacaccccctggtccccggaaagctgaaggaggctccagcagccaaggccgagtctcctctggaggttccgcagagcttttgttcttccagtattgctgttactacaacatcctcttcagagtctgatgaggcttcgagcaatcaggaagaggaggattcaccatccagctccgaggacacctccgatcctcgaaacgtccctgctgacgccctggatcagaaagtggcatttctggttaattttatgctgcacaagtgccagatgaagaagccaatcaccaaggcggatatgctaaagattatcattaaagacgacgagtctcactttagcgaaatactcctcagagcgagcgagcatctggagatgatctttggcctcgacgtggttgaagtggaccctacgacacattgttatggattatttataaaactcggcctcacttatgatggcatgctttctggcgaaaaaggggtccccaagactggccttctcattatcgttctgggcgtgatatttatgaagggcaaccgtgcaactgaggaggaagtttgggaggtgctgaatctgacaggggtttatagtggcaagaaacactttatattcggagagccccgtatgctgattaccaaagattttgtcaaggaaaaatacctggaatatcagcaagtggctaattcggaccccgcacggtacgaattcttatgggggccaagagctaaggctgagaccagcaaaatgaaggttttagagtttgtggccaaggtgcacggcagctacccgcacagttttccaagtcagtatgcggaggccctgaaggaagaagaggagagggctcgcgctcggatttag

SEQ ID NO: 230071 - DNA, 996 bp, synthetic construct
  misc_feature 1..996: note = Description of Artificial Sequence: Synthetic coding sequence
  source 1..996: mol_type = other DNA
atgcccagaggtcaagcttccaagagacgggctcgcgaaaagagacgtcaagcgcgtggggaggaccaatgtcttggcggtgcacaagccactgctgccgaaaaggagaaattgccctctagctcctccccagcttgtcagtcccctcctcaatcatttcccaatgccggaatcccacaggagagtcagagagcgtcatacccatcttcccccgcaagcgcagtgtccttaacctccagtgatgaaggcgctaagggccaaaaaggagaatctccaaacagcttccacggcccttcatcatccgagagcactggcagagatcttctgaataccaaaacaggggagctcgttcagtttcttctcaataaatacattaggaaagaaccaatcaccagggaagccatgctcaaggtgattaaccggaagtacaagcagcacttccccgagatcctccggaggtccaccgaaaatgtcgaggtagtgttcggcctgtatctgaaagagatggatccatcccgccagtcctacgtgctggtgggtaagctcgactttcctaatcaaggctccctgtctgatggcggtggtttccccctgagcggcctcctgatggtgctcctgagtacaatcttcatgcacggaaatcgggctactgaggaggagatgtgggaatgcctgaacgcacttggcatgtacaaggggaggaaacacttcatatacggtgagccacaggaattagtgaccaaggatctggtcagggagggctacctggaataccaacaggttccctctagcgaccccccacggtatgagttcctgtggggcccacgcgctcgagctgaaacaagtaagatgaaggttctcgagttcgtggctaagcttaatgacactgtggctagtacttataaatcacgttatgaggaagccctgagggaagaagaggagcaagccagagcacgagctgttgcaagggacagcgccagggcacgggcatcttag

SEQ ID NO: 230072 - DNA, 1011 bp, synthetic construct
  misc_feature 1..1011: note = Description of Artificial Sequence: Synthetic coding sequence
  source 1..1011: mol_type = other DNA
atgccaaggggacaggcgtccaagagacgcgcacgggaaaagcgccgtcaggctcgcggagaagatcagtgcctgggcggtgctcaagcgaccgccgcagaaaaagaaaaactgccttccagctcctcccccgcttgtcaatcccccccacaatccttcccaaacgcagggattcctcaagagagtcagagagccagctatccctcctctcctgctagcgccgtcagcctgacttcatcagacgagggagctaagggccaaaagggcgagtcacccaactccttccacgggccttcttcatcagaaagtacaggaagagacctcctcaatacaaagacgggtgagttggtacagttcctgctgaataagtacatccgcaaagagcccattacccgagaagctatgctgaaggtcattaaccggaagtacaagcagcatttcccagagattcttaggagaagtactgagaacgtggaagtggtgtttggcctatatctcaaagagatggatccaagtcggcagagctatgtgctggtggggaagctggatttccctaaccagggctcactgtctgacggcggagggttccctctgagcggattgctgatggtgctgctatctactatctttatgcatggaaacagggccacagaagaggaaatgtgggaatgcctcaatgcattgggaatgtacaagggccgaaaacatttcatatacggggagccgcaggagctggtgaccaaagatctggtcagagaaggctacttagagtatcaacaggttccaagctcggacccgccacgctacgaattcctgtggggccctagggcgagagctgagacatccaagatgaaggtcctcgagttcgttgcgaaactgaacgacacagtggcttccacatataaatctcgctacgaagaagctctaagagaagaggaggagcaggctcgggctagagccgttgcccgagacagcgctcgtgctcgtgcttctcggtccttccagccgtag

SEQ ID NO: 230073 - DNA, 1011 bp, synthetic construct
  misc_feature 1..1011: note = Description of Artificial Sequence: Synthetic coding sequence
  source 1..1011: mol_type = other DNA
atgcctcgaggccaggcctctaaacgcagagccagggagaaaaggagacaagcccgaggagaagaccagtgtcttggtggcgctcaggcaacagctgctgaaaaagagaagctgcctagttcctccagtccagcatgccagtcccctcctcagagcttccccaatgctgggatcccacaggaatctcagcgcgcatcttacccaagctcgcctgcgagtgctgtgtcacttacctctagcgatgaaggcgcaaaggggcagaaaggcgagtcccccaatagcttccacgggccttcctcatctgagtccacaggcagggatcttttaaacacaaagacaggcgagctggtgcagttcctgctcaacaagtatattcggaaggagcccataaccagggaggctatgcttaaggtgatcaatcgtaaatataaacagcatttccctgagattctccgtcgttctactgaaaacgtcgaggtggtatttggactgtacctgaaagagatggaccctagtcggcagtcttatgttttagtggggaaactggatttcccaaatcaaggttctttgtccgacggcggtgggtttcctctttctggactgctgatggttttgttaagtactatctttatgcatgggaatcgcgctaccgaggaggagatgtgggagtgcctcaacgcacttggaatgtataaggggagaaaacacttcatttacggagaaccccaggaactagttaccaaggatttagtgagagaggggtatctggagtatcagcaggtgccaagttccgaccctccgagatatgagtttctgtgggggccaagagcaagagccgaaacctctaagatgaaagtcttggaattcgtggccaagctgaacgacaccgtagcgtcaacctacaaatctaggtatgaggaggccttgagggaggaggaagagcaggcacgggcacgagcagtggcaagggacagtgcgcgagcacgggcttccagaagcttccagccatag

SEQ ID NO: 230074 - DNA, 960 bp, synthetic construct
  misc_feature 1..960: note = Description of Artificial Sequence: Synthetic coding sequence
  source 1..960: mol_type = other DNA
atgcccagaggacagaaatctaagctccgtgccagagagaagcgccgaaaagcacgagatgagacgcgtggattgaacgtccctcaggttaccgaagccgaggaggaggaagcaccgtgctgttcatcgagcgtgtctgggggagcagcttcctcatctccagccgctggaattccccaggaaccccaaagagccccaaccacagcagccgcagcagccgctggagtgagcagcaccaaatccaagaagggcgctaaaagccaccaaggagaaaaaaatgcaagcagcagccaagcctccactagcacgaagtccccctctgaggacccgttgacaaggaaaagcggaagcctagtacaatttttgctgtataagtacaaaatcaaaaagtccgtgaccaagggagaaatgttaaagattgttgggaaacgcttccgggaacatttccctgagatcctgaagaaagcctcagagggcctgagcgttgttttcggtttggaattgaacaaagtgaatcctaatgggcacacgtatacatttatcgacaaagtagatctgacagatgaagaaagtctcctgtcgtcttgggactttccacggagaaagctgctcatgccattattgggcgtgatatttcttaatgggaattctgcgactgaggaggaaatttgggagttcttgaacatgctgggcgtgtacgacggcgaagaacattcggtgttcggcgaaccctggaagttgattactaaggacctggttcaggagaaatacctggaatacaagcaggtgccctcttcggacccgccacggttccagtttttatgggggccacgtgcctacgccgagaccagcaaaatgaaggtactggaatttcttgctaaggtgaatggcactaccccatgcgcatttccaacacactatgaggaggctctcaaagatgaggagaaggccggtgtgtag

SEQ ID NO: 230075 - DNA, 1041 bp, synthetic construct
  misc_feature 1..1041: note = Description of Artificial Sequence: Synthetic coding sequence
  source 1..1041: mol_type = other DNA
atgccgaggggtcagaagtctacactgcacgcacgcgagaagcggcagcagactcgcggacagactcaggatcaccagggagcccaaatcaccgcaacaaacaaaaagaaggtaagcttctcctctcctctgatccttggcgctaccatccaaaagaagagtgctggacggagtcggtcggcgttaaagaagccccaaagagccctttctactactacctcagtggatgtgagttacaaaaaatcctacaaaggagccaattccaagatcgagaagaagcagtccttctcccaaggcttgagcagcactgtccaatcacgcacggatccactgatcatgaagacaaatatgttagtgcaatttttgatggagatgtacaagatgaaaaaaccaataatgaaggcagatatgctgaaaatagtccaaaagtcacacaagaattgcttccccgaaattttaaagaaagcctcttttaatatggaagtagtgtttggcgttgacctcaagaaagtagactctaccaaagactcttacgtcctggtgtctaagatggatttaccaaacaatgggaccgtcacacgcggacgaggcttccccaagaccggcctgctactcaacctgcttggggttatatttatgaaaggaaactgtgcgaccgaggagaagatctgggaattcctaaataaaatgcgcatttacgacgggaagaagcacttcatcttcggagagcccagaaaacttatcacacaggacctcgtgaaacttaagtatttggagtacaggcaggtgcccaactccaatccagctcggtacgagtttctatggggtcccagggcacacgccgagacttcaaaaatgaaggtactggaattctgggctaaagttaataagacagtgccctctgcattccagttctggtatgaggaggccttacgggatgaagaggagagggtgcaggcagccgctatgttaaacgatgggagttctgctatggggagaaaatgtagcaaggcaaaagcgagtagtagttctcacgcctag

SEQ ID NO: 230076 - DNA, 1041 bp, synthetic construct
  misc_feature 1..1041: note = Description of Artificial Sequence: Synthetic coding sequence
  source 1..1041: mol_type = other DNA
atgcccaggggccagaagtcaaccctccatgcacgggaaaagagacagcaaacccgtgggcagacccaggatcatcagggcgcacagattaccgcgaccaacaagaaaaaggtgtccttctccagccccctcatcttgggcgcaactattcagaagaaatcagctggcaggtcaagaagtgcactcaaaaagccgcaaagggccctctctactacaacttctgtggatgtctcctacaaaaagagttacaaaggcgctaactctaaaattgaaaaaaaacaatctttctctcagggcctgtcttctacagtgcaaagcaggacggatcctctgattatgaagactaatatgctggtacaatttcttatggagatgtacaaaatgaagaaacccataatgaaagccgacatgctgaagattgtccagaagtcccataaaaattgtttccccgagatccttaaaaaggccagttttaatatggaggtagtttttggtgtagaccttaaaaaggtggactcgaccaaggatagttatgtactggtgtcaaaaatggacttgcccaacaacggcaccgtaaccaggggacgcggatttcccaagaccggcctcctgctgaatttgctaggggtgatcttcatgaaaggaaattgcgcgacagaggagaagatttgggaattcctgaacaagatgcgtatttacgacggaaaaaagcattttatcttcggggaaccacgaaaattgataactcaggacctggtgaaattaaagtaccttgaatacaggcaggtgcctaattccaatccagccaggtatgagttcctgtgggggccaagggctcacgccgaaacatccaagatgaaggtgcttgagttctgggccaaagttaacaaaaccgtaccaagtgccttccagttttggtacgaggaagctttaagagatgaagaggagcgggtgcaggctgctgcaatgctgaatgacggaagctcagcaatgggcagaaaatgtagcaaggctaaggcctcttcttccagccatgcgtag

SEQ ID NO: 230077 - DNA, 1041 bp, synthetic construct
  misc_feature 1..1041: note = Description of Artificial Sequence: Synthetic coding sequence
  source 1..1041: mol_type = other DNA
atgcccagagggcagaagtccaagctgcgcgctcgcgagaagagacagcgtactagaggccagacccaagatcttaaagtcggccagcccacagccgctgaaaaagaggagtctcctagcagtagctcctcagtgctccgggacaccgctagctcgtcactggcctttgggatcccccaggaaccacagagagagcctccgacaacctccgccgcagctgcaatgagctgcactggttctgacaagggtgatgagagccaggatgaagagaacgcttcctcctctcaggccagtacatctaccgaacgctcgctgaaggatagcctgacccggaagacaaagatgctcgtgcagttccttctgtacaagtataaaatgaaggagcccaccacaaaagctgaaatgctgaagattatcagtaagaagtacaaagaacacttccctgagatcttcagaaaagttagccagcgcacagagcttgtatttgggctcgccctgaaggaggttaatccaacaacacacagttatattttagtatccatgctggggccaaatgacgggaatcagtcttctgcctggactctcccaagaaatggcctcctcatgcccctgttatcagtcatcttcctgaatggtaattgcgcaagagaagaagagatctgggaattccttaatatgctgggcatttacgatggtaagagacaccttattttcggcgagccgcgaaaacttatcacccaggatctggtgcaagaaaagtaccttgagtatcagcaagttccgaactcggacccacctcggtaccagttcctgtggggcccacgggctcacgcagagaccagcaagatgaaggtattggagttccttgctaaagtaaacgacaccacccctaataacttcccgctgctctatgaggaggccctccgggatgaggaggaaagagccggagccagaccgagagtggctgctcgcagggggacaacggctatgacctcagcatactcccgagctactagcagtagttcgagccagccaatgtag

SEQ ID NO: 230078 - DNA, 828 bp, synthetic construct
  misc_feature 1..828: note = Description of Artificial Sequence: Synthetic coding sequence
  source 1..828: mol_type = other DNA
atgacttcagctggtgtgttcaacgcgggtagcgatgagagggcaaactccagggatgaggagtatccctgttcatcagaggtgtccccgtccacagagtcgtcttgcagcaattttatcaacataaaggttggtctccttgagcagtttctgctgtataagtttaagatgaagcagcgcattctgaaggaggacatgctgaagatcgtcaatcctcggtaccagaatcaattcgccgaaattcataggagagcaagtgagcatattgaagtcgtcttcgccgtggacttgaaggaagtcaatcccacttgccatctttatgacttggttagcaaactaaagcttccgaacaacggcagaatccacgtcggcaaggtgctgccaaaaacagggctcctcatgacctttctggttgtcattttcctgaaaggaaactgcgctaataaagaggatacatggaaatttctggatatgatgcagatttatgatggaaaaaaatattacatttacggtgagccaagaaaactgatcactcaggatttcgtgagactcacgtacttagaatatcatcaggtcccgtgttcctaccctgcacactatcaatttctgtggggcccacgggcttacaccgagacctctaagatgaaggtccttgaatacctagcaaaggtcaacgacattgctccgggagctttttcaagccagtacgaagaagctctgcaggacgaagaggaatccccaagccagcgctgctctaggaactggcattactgctccggacaggactgtctccgcgctaagttctcttcattctcgcagccatactag

SEQ ID NO: 230079 - DNA, 1224 bp, synthetic construct
  misc_feature 1..1224: note = Description of Artificial Sequence: Synthetic coding sequence
  source 1..1224: mol_type = other DNA
atgccccgaggacacaagtctaaactcagaacctgtgagaagagacaagagacaaatgggcagccccaaggacttacagggcctcaggcgactgcagagaaacaggaggaatcccacagctctagcagtagttctcgagcctgcttgggcgactgtaggcgcagctcagacgcttctataccccaggagtcccagggagtctccccaaccgggagccctgacgccgtcgtgtcatactctaagtctgatgtcgccgctaatggacaggatgagaaatcgccgtctacatccagagatgcttccgtgccacaggagagccagggcgcttcgcctaccggcagtccagacgccggtgtgagtgggtccaagtatgatgtagctgcaaacgggcaggacgagaagagcccgtccactagccacgacgtctcagtcccccaggagagccaaggggcaagcccaactggctccccggacgctggcgtgtccggtagcaagtacgacgtggcggcagaaggcgaagatgaagaaagtgtgagcgcctcacaaaaagcaatcatctttaagagactttctaaggacgctgtcaagaaaaaggcttgtaccttagcccagtttttgcagaagaagtttgagaaaaaggagtctatccttaaggcagacatgctgaagtgcgttcgcagagagtataagccctactttccccagatcctcaacagaacttcccagcatctggtggtggccttcggagtggagttgaaggagatggactctagtggagagtcttatactctcgtctctaagctggggcttccatccgaggggatcctgagtggcgacaatgctctgccaaagagtgggctgctgatgagcttacttgtcgtgattttcatgaatggaaattgcgctacagaggaagaggtctgggagtttctgggcttgttgggcatttacgatggaatcctgcactctatttacggtgatgcgaggaagataatcaccgaggatctggtgcaagacaaatatgtggtctatcggcaggtgtgcaactccgatcctccctgctacgaattcctgtggggtccacgggcttatgcggagactacaaaaatgcgtgttttgagagttctggctgattcatccaatacttctcccggtctgtatccacatctgtatgaggacgctttaattgacgaggtcgagagagccctccgtctccgtgcttag

SEQ ID NO: 230080 - DNA, 3429 bp, synthetic construct
  misc_feature 1..3429: note = Description of Artificial Sequence: Synthetic coding sequence
  source 1..3429: mol_type = other DNA
atgggcgacaaagatatgccaacagcagggatgccctccctgctccagagctcctctgaatctcctcagtcctgtcctgagggagaagactcacagtctcccctgcaaataccccagagttccccagaaagcgacgacacattatatcctctccaatccccacagtcgagatccgagggagaggactccagtgaccctcttcagcgcccaccagaagggaaggactctcagtccccactccaaatccctcagagctctcctgagggagatgatacacagagccccctccagaactcacagtcttcgcccgagggcaaggactccctctcccctctggaaatttcccaaagccctccagagggcgaggacgtgcaatctcctctccagaaccccgcatcctctttcttttcttccgccctgttgagcatttttcagagttcccctgagtccacccagtccccgtttgaggggtttcctcagagcgtcctgcagattccagtttcggccgctagcagttcaactctcgtatccatctttcagtcttctccagaatccacacaatcaccctttgagggcttcccccagagtcccttacagatccccgtttccagatcttttagctccacccttctgagcatcttccagtcttccccggaacgcacccagtctacgtttgaaggattcgcccaatcacccctccagatccccgtgtctccaagtagcagctccactctactgtctctttttcaatccttcagtgagcggacgcaatccacttttgagggatttgcacagtcatccctccagattcctgtgagtccttcgtttagctcaaccctagtgtcattattccagtccagcccagagagaacacaaagtacattcgagggcttcccccagtccccattgcagataccagtcagctcttcaagcagctccactcttcttagcttatttcaatccagtccagagcgtacccacagtaccttcgagggattcccccagtcgttgttgcagattcccatgacgagctctttttctagtaccttactcagcatattccagtcttctccagaaagcgcccagtctacattcgaaggtttccctcagtccccgttgcagatacctgggtcccctagtttctctagtaccctgctgtcgttattccagtcgagcccagaacggacccacagcactttcgagggcttccctcagagccctttgcagatacctatgacttccagtttctccagcaccttacttagcattctccaatcttctcccgagagtgcccagtctgcctttgaaggctttcctcagagtcccctgcagatcccagtgagcagttcattttcctacacattgttgtcgctgttccagtcgagccctgaacgcacacacagcacctttgaaggctttccgcagtctcccctgcagattcccgtctctagcagcagctcttcctcaaccctcctgagcctcttccagtcaagtcccgagtgcacgcagtccacgtttgagggcttcccccaaagtccactgcagatccctcagtctccacctgaaggtgagaacacgcacagtcctctgcagatcgtgccttcgttaccagagtgggaggacagcctgtcaccacactattttccacagtcccctccccagggcgaggattccctcagccctcattactttccccagtccccaccccagggcgaggactcgctgtctccccattatttccctcaaagtcctcaaggcgaggactctctttccccacattacttcccacagtctccaccacagggcgaagattcaatgtctcccttatactttccacaatccccattgcaaggtgaggagttccagagctcactacagtcccctgtgtcaatttgctcctcaagcaccccctcaagcctcccacaaagtttccctgagagctcccagtccccgcctgagggcccagtgcaatcaccacttcatagtccacagagtcctcccgaaggtatgcacagccaaagccccttgcagtctcccgagagcgcacccgagggtgaggactcattaagtcctctccagattccacagtctccccttgaaggcgaagatagcctgagtagcctgcacttccctcagagtcctcctgaatgggaagacagcttatccccacttcattttccccagtttcccccacagggagaggactttcagtccagtctgcagtcccctgtctccatttgctctagttcaactagcctgtcactacctcagagttttcccgagtctcctcagagcccccctgagggccctgctcagagcccgctgcagcggccagtctcctcctttttttcttatacgcttgcctcgcttctccagtcttcacatgagagcccgcagtctccgcctgaagggcctgcacagtcccccttgcagtcccccgtgtctagctttcctagcagtacatcttcgtcgctttcacagtctagccccgtgtcttcattcccgtcatctaccagcagctctctgtcaaaaagctcaccagagagcccacttcagtcacccgtaatctcattcagctccagcacttccctgagtccattttctgaggaaagctcctctccggttgatgagtacacttccagctccgacacgctgctggagagtgactccctcaccgacagtgagtcactcattgaaagcgaacccctctttacctatactcttgacgagaaggtcgatgagctcgcccgatttcttctcctcaagtaccaggtcaagcagcctattacaaaagctgagatgttaacgaacgtgatctcccggtacaccgggtattttccagtgatcttcaggaaagctcgcgaatttattgagattctcttcggcatttccctgcgggaggtggacccagatgattcatacgtgttcgtcaacaccctcgacctgacctccgagggctgcctgagcgacgagcagggcatgtcccagaatcgactgctcattctcattcttagcatcatcttcattaaaggtacttacgcctcagaagaggtcatttgggatgtgttatccggcatcggggtccgagctggaagagagcattttgctttcggggagccacgagagctgcttacaaaagtgtgggtgcaggagcactatcttgaatatagggaagtgcccaactcctcccctcctagatacgagtttctctgggggccacgagcccacagcgaggtgattaaaaggaaagttgtcgaattcctggctatgttgaagaacaccgtgcctataacattcccttcatcctataaggatgctctgaaggatgtcgaagagcgggctcaggccattattgacactacggacgactccacagcaacagagtcagccagttcaagtgtgatgtcccctagttttagcagcgagtag

SEQ ID NO: 230081 - DNA, 354 bp, synthetic construct
  misc_feature 1..354: note = Description of Artificial Sequence: Synthetic coding sequence
  source 1..354: mol_type = other DNA
ggcgacaaagacatgcccacagctgggatgccctctcttctccagtctagcagcgagagtccacaatcgtgtcccgaaggtgaagacagccagtctccccttcaaattccagtaagtccctcaagcagctcgacactgctcagcctttttcaaagcttctccgaacgaacccagtcaacatttgaaggcttcgcacaatcttcgttgcaaattccggtgtctcccagtttctcaagtactcttgtgagtctgttccagtcttcccccgagaggacacagagcaccttcgaggggttcccacagtctcccctgcagattcccgtcagcagtagctcgagctcaacactgctttag

SEQ ID NO: 230082 - DNA, 357 bp, synthetic construct
  misc_feature 1..357: note = Description of Artificial Sequence: Synthetic coding sequence
  source 1..357: mol_type = other DNA
atgggcgataaggacatgcctactgccggtatgccgtcattactgcagagttcttctgaatccccccagtcctgccccgagggggaagattcccagtcacctctgcagatccccgtcagtccttcgagttcatctaccctgctgagcttgtttcagagctttagcgaacgtacccagagtacttttgaaggcttcgcccagtcatcactgcaaatcccagtctccccatcattctccagcactctggtgagcctgttccagagttcccctgaacggacgcagtccactttcgaagggtttccacaatctcccttgcagatccctgtgtccagctcaagttcctctactctgctgtag

SEQ ID NO: 230083 - DNA, 630 bp, synthetic construct
  misc_feature 1..630: note = Description of Artificial Sequence: Synthetic coding sequence
  source 1..630: mol_type = other DNA
atgttaactaacgtgattagtagatataccggttacttccctgttattttccggaaagcacgcgaattcatcgaaatccttttcggaatatccctccgcgaggtcgatcccgacgattcctacgtattcgtgaatacactggacttaaccagcgaaggttgtctctccgacgagcagggaatgtctcaaaacaggctgctaattctaatcctcagcatcatcttcatcaaaggcacctatgcatcagaggaggtcatatgggatgttctgtctggcatcggcgtcagagcgggacgggagcactttgctttcggtgaacccagagaactgctcactaaagtttgggttcaggagcactatcttgagtacagggaagtgcctaactctagtcctcccagatacgaattcctgtggggccctcgagcccactcagaggtgatcaaacgtaaagttgtcgaatttttagccatgctcaagaacacagttccgattaccttcccgtcttcttacaaggacgccctcaaggacgtggaagagcgggcacaggcgatcatagatacaacggacgacagcactgcaaccgaaagtgcctcctcctcggtgatgtcacccagcttctcttctgaatag

SEQ ID NO: 230084 - DNA, 1122 bp, synthetic construct
  misc_feature 1..1122: note = Description of Artificial Sequence: Synthetic coding sequence
  source 1..1122: mol_type = other DNA
atgccccctgtccctggtgttcccttccgaaatgtggataatgactctcccaccagcgtggagctcgaggattgggtggatgcccagcaccccaccgacgaagaggaggaggaagccagctctgccagctccaccttgtaccttgtgttctcaccctctagtttctcaacaagcagctccctgatcctggggggtccagaggaggaggaagtgcctagcggggttatccctaacctcaccgagtccattcctagctctcctcctcagggcccaccgcagggaccctcccagagtcctcttagttcttgctgctctagcttctcatggtcctctttttctgaggaatcgtcctctcagaagggagaggacactggtacttgtcaggggcttcccgatagcgaatcctcctttacatataccctcgatgagaaggtggccgaactcgtggagttcctgctcctgaagtacgaagccgaggaaccagtgacagaagctgagatgcttatgattgtgatcaagtataaggattatttcccggtgatcctgaaacgggctcgagagtttatggaactcctctttggtcttgctttgatcgaggtgggccctgatcatttctgcgtgtttgccaacaccgtgggcctaacagatgagggatctgacgacgaggggatgccagaaaactccctacttatcatcatattgtctgtaatcttcatcaaaggaaactgcgcctctgaggaagtgatttgggaagtcctgaatgcggtgggggtgtatgcaggtcgcgagcactttgtgtatggtgaaccgagagagctattgacaaaagtgtgggtgcagggccactatcttgaatatagagaggtccctcactcatctccaccctattacgagtttctgtggggtcccagagctcactccgagagcatcaagaagaaagtcctcgagttcttagcgaagctcaataatactgtgccatcatccttcccaagctggtataaggacgccctgaaggatgtcgaagagagagttcaggcaaccattgacacagctgacgatgccactgtgatggccagcgagtctcttagtgttatgtcttcaaacgttagcttttccgagtag

SEQ ID NO: 230085 - DNA, 1932 bp, synthetic construct
  misc_feature 1..1932: note = Description of Artificial Sequence: Synthetic coding sequence
  source 1..1932: mol_type = other DNA
atgctgttaccttgccattgggtgctggacgccaccttttccgacggcagtctcggtcagtgggttaaaaatacatgtgcgacatacgccctgtcaccggtggtgctgcctccccaaccgcagccccgtaagaaggctacagataaggactacagtgccttccacctcggccatctcagagaagtgagacttttcctgcgaggaggaacaagcgatcagcgcatggacagcctcgtcttgtgccctacctattttaagctgtggcgaaccttgtcaggcagtcccggacttcagttatccgaccttcatttcggatctcagcctgaggggaagttctccctgcgcagggcggtctcagttaagcagagagaggagcctcaagactggccgctcaacgagaagcgtaccttgtggaaagacagcgatctgcctacttggcggagaggcacaggatacacattatcgctcccagctgtctctccaggcaagagactctggggcgagaaggccggaagcctgccagaatccgagccactatttacttataccctggacgagaaagtcgacaaactggtccagttcctgctcctgaaataccaagcaaaagagcctctgacccgcgcagagatgcagatgaacgtcataaacacttacaccggatacttcccaatgatattcagaaaagccagggagtttatcgaaatactctttgggataagcctcacggaggtggatcccgaccatttctacgtctttgttaacaccctggacctcacttgtgaggggtctttatccgatgagcaaggtatgccgcagaataggttactaatcctgatcctgtccgtgatctttatcaaaggaaattgcgccagtgaagaggtgatctgggaggtcctcaacgcgataggaccctggtcagccctcgctggctttgctgacgtgttgtctcggcttgcattgtgggagtcggagggtcccgaggcattctgtgaagaaagcggactcagatccgctgagggcagcgtgctcgatcttgcgaatcctcagggccttgccggacaccggcaggaagacgggagaaggggcctaacagaagcttcgccccaacagaaaaaaggaggcgaggacgaggatatgcctgcagccggtatgccacctctgcctcagtcacctcctgagataccaccacagggaccacccaagattagtcctcaggggccaccccagtcaccgccacaatcccctttagactcttgctcttcaccactcttgtggacccggctggacgaggaatcgtcttctgaagaagaggatacagccacttggcacgctctgcccgaaagcgagagccttcctcgctacgcattggatgagaaggtagccgagctggtccagttcttacttctgaagtaccagaccaaggagcctgtaacaaaagctgagatgcttaccaccgtgataaaaaaatataaagactactttccaatgatctttggaaaggcgcacgaatttatcgaactgatttttggtatagctctgaccgatatggaccccgataaccactcttatttctttgaagatacactggacctcacctacgagggctccttgattgacgatcagggcatgcccaaaaattgcctgctgatcctgatcttatcaatgatattcatcaagggtagttgtgtccccgaagaggtgatatgggaagtactctccgccatcggcccaatccagagacccgctcgagaagtcctggagttcctgagcaaattgtccagcatcatcccatcagcatttccgtcttggtacatggatgcactcaaggacatggaggatcgggctcaggcaatcattgacacaaccgatgatgcgaccgccatggcctctgccagcccttccgtcatgtcgacaaacttctgcccagaatag

SEQ ID NO: 230086 - DNA, 801 bp, synthetic construct
  misc_feature 1..801: note = Description of Artificial Sequence: Synthetic coding sequence
  source 1..801: mol_type = other DNA
atgccagccgctggcatgccgcctctcccccagtcccctcctgagattccaccacagggtcctcctaaaatctctccgcagggccctcctcagtccccaccacaatctcccctcgattcctgcagcagccctctcctctggaccaggctggatgaggaatcgtcctccgaagaagaagatactgccacctggcacgcgctgcctgagtcagagtccttgccacgctatgctcttgatgaaaaggtggctgaactggtacagtttctgcttctgaaataccagacaaaggagccagtgactaaggctgaaatgctaactaccgtgatcaaaaagtataaagattattttccaatgatatttgggaaagcacacgagtttattgagctgatatttggaattgcactcacagacatggacccagataatcatagctattttttcgaagataccttggacctgacgtacgagggaagtcttattgacgatcaaggaatgcctaaaaattgtctactcatcttaatcctgagcatgatcttcataaaagggtcttgcgtaccagaggaagtcatctgggaagtactgtcggcaatcggcgtttgcgccggaagagagcacttcatctatggagaccccagaaagttactgaccatccactgggttcagagaaagtaccttgagtatcgggaggtgcctaacagtgcacctcctagatatgaattcctctggggcccacgggcacacagcgaggcgagcaagagaagtcttcgggtgttcattcaggctatacaatatcatccttag

SEQ ID NO: 230087 - DNA, 381 bp, synthetic construct
  misc_feature 1..381: note = Description of Artificial Sequence: Synthetic coding sequence
  source 1..381: mol_type = other DNA
atggacaccgggcagctacagctaagcagagaacgctcacccggagctggccaacaggccagacgggaactatgtgggagaatcgccattagccagcacgggggaaaggcacaagcctctccctctcatagcttattgagccctctggacaaaactgatggggaaccctggtccgcactagccggttttgccgacgtattgagccgacttgctctgtgggagtcagaaggtcccgaggcattttgcgaggagtctgggctgagatcagctgagggctccgtgctcgacctggctaaccctcaaggtaaagggcctaaaggcgagctgcgggatttcgccccacgtacggaggaagccccagtgtgccctgcactgccatag

SEQ ID NO: 230088 - DNA, 1041 bp, synthetic construct
  misc_feature 1..1041: note = Description of Artificial Sequence: Synthetic coding sequence
  source 1..1041: mol_type = other DNA
atgcctctctttcctaatttacctcggctatctttcgaggaggattttcagaacccgtccgttaccgaagacttggttgatgcccaagattccatcgatgaggaggaggaagatgcatcaagtacttctagcagcagcttccacttcctatttccaagctcttctagcctcagctctagctcacctttgtccagcccactgccctctactctgatcctcggagtgcccgaggacgaagacatgcctgctgcaggcatgccgcctcttccccagtccccaccagaaatcccaccacaaggcccacccaagatctctccacaaggcccaccccagtcaccacctcagtccccactggattcctgtagcagtcctttgctctggacacgcttggatgaagagtccagctccgaagaggaggatactgccacctggcacgcgctgcccgagtccgagtcactgcccaggtacgccttggatgaaaaagttgccgaactggtccagttcctcctgttgaagtaccagacaaaggaaccagtgacaaaagccgagatgctgaccaccgtgattaagaagtataaagattattttccaatgatctttggtaaggcccatgaattcatcgagctgatctttgggattgccctgaccgacatggatcccgacaatcactcttacttcttcgaagataccctggatctcacgtacgagggcagtctcatcgacgaccagggaatgccaaagaattgcctactgatcctgatcctctccatgatttttattaaggggtcctgtgttcccgaggaagtaatctgggaggtgttgtccgccatcggggtatgcgccggacgagaacatttcatttacggcgaccctaggaagcttctgacgatacactgggtccagaggaagtatctggaatatcgagaagtgcctaattcagctcctcccagatatgagttcctttggggaccgagagcgcactccgaagcaagcaaacgaagcctaagggtgttcatccaggctattcagtatcatccatag

SEQ ID NO: 230089 - DNA, 1041 bp, synthetic construct
  misc_feature 1..1041: note = Description of Artificial Sequence: Synthetic coding sequence
  source 1..1041: mol_type = other DNA
atgcccctgttccccaatctcccccgtttgtcttttgaggaagactttcaaaacccctctgtcacagaagacctagtggacgcacaggactcgattgacgaggaggaagaggacgcctcctcaacttcctctagcagcttccacttcctcttccccagcagtagttcccttagcagctcatcacctttgtccagccccctgcctagcactctgatattgggcgtgcccgaagacgaggatatgccagccgcaggcatgcctcccctccctcagtccccacccgagattcctccacagggccctcctaaaataagtccgcagggaccacctcaatcgcccccacaatcaccgctggacagttgctcctctcctctgttatggactcgtttagatgaagagagctcaagcgaagaggaggacaccgccacctggcacgccctccccgaatctgagtctctcccccgttacgcgctcgacgagaaagtcgccgagctggtccagtttctcttgctgaagtatcagactaaggagcccgtaactaaggccgaaatgttgacgacggtgattaagaaatacaaggattactttcctatgattttcggcaaagctcatgagttcatagagctaatctttggcatcgctctcacagatatggatccggataaccattcctacttttttgaggacactctggatctgacctacgagggaagcctgatagatgatcaggggatgccgaagaattgcctcctaattctgatcctgtcgatgatcttcatcaaaggatcatgtgttcccgaggaagtgatctgggaagtcttaagcgccattggggtgtgtgcgggaagggaacacttcatttatggcgatcccagaaagttgctgactatacactgggtccagcggaaatacctagagtacagagaggtgccaaactccgcaccacctcgatatgagttcctatggggaccaagagcccactccgaagcctcaaagcggtccctgagagtgttcatccaggccatccagtatcacccctag

SEQ ID NO: 230090 - DNA, 2337 bp, synthetic construct
  misc_feature 1..2337: note = Description of Artificial Sequence: Synthetic coding sequence
  source 1..2337: mol_type = other DNA
atggcgcagaaaatggactgtggtgcaggcctcctggggttccaagccgaggccagtgtcgaggatagcgctctgctgatgcagaccctgatggaagcaatacagattagcgaagctcccccaacgaaccaggccaccgccgctgcatcaccccagtcaagtcaaccaccaactgcgaatgagatggccgatattcaggtctctgcagcagctgcccgaccaaagagcgcctttaaagtacagaatgctacgacaaaagggcctaatggcgtgtacgatttcagccaagcccataacgctaaagatgtaccaaatactcagccaaaggccgcattcaaaagccagaacgcaacaccgaaaggtccaaatgcggcttatgacttttctcaagccgctacaacaggcgagttagcggcaaataagtccgagatggctttcaaagctcagaacgctaccaccaaagtgggtccaaatgccacgtacaacttctcccaatcacttaatgccaacgatctggccaacagtcgcccaaagacgccctttaaggcatggaacgacacgaccaaagcacctactgcagacacccagacacaaaatgtcaaccaagcaaaaatggctacatctcaggcagacatcgagacagaccctggcatctccgaacctgacggggctaccgcacagaccagtgccgatggcagccaggcacaaaatctagaatctcgcactattattcgtggaaaaagaactcggaagattaataatctgaacgtcgaggaaaacagctcaggtgaccagagacgggcacctttagcggctgggacttggcgctctgccccagtacctgttactacacagaacccacctggggcacccccaaacgtgctgtggcaaaccccattagcatggcagaatccttccggctggcaaaaccagacagctcggcagaccccaccagctagacaatcacccccagcaaggcagacccctccagcctggcagaaccccgtcgcatggcaaaacccagtgatatggcccaatccggtaatctggcagaaccctgtgatttggccgaacccaattgtgtggcctggccctgtggtctggcctaaccctctagcatggcaaaacccacccggatggcagacaccgcctggatggcagacgccccctggatggcagggcccacccgattggcaaggacccccagactggccactccccccagattggcccttgcctccagattggcctttgcccacagactggccgctgccacccgactggattccggcagattggcccatcccccctgattggcagaacctgcggccatcacctaatctgaggccaagtcccaattctcgagccagccaaaaccctggggctgcccagcctcgtgatgtagccttgctgcaggagagggccaacaaattggtcaagtacttgatgctcaaggattatacgaaggtaccaatcaagcgctctgagatgctccgagatattatacgggaatacactgatgtgtatcctgaaataattgagagggcctgttttgtcctcgagaaaaagttcggtatccaacttaaggagattgataaagaagagcatctgtacatactgatcagcacacccgagtcgctggcaggaatacttgggactaccaaggacacccccaaactgggcttgctcctggtaatcttgggggtgatcttcatgaatggaaatcgggctagcgaagccgtgctctgggaggcactccgaaagatggggctccgacctggcgtgcggcacccactgctaggtgacttgagaaagctgctgacttatgagttcgtaaagcagaagtacttagactaccggagggtcccaaatagcaatccacctgagtatgagttcttatggggcctgagatcataccatgagacatccaagatgaaggttcttcgctttatcgctgaggtccagaaaagagacccaagagactggacagcccagttcatggaagcagctgacgaggcactggatgccctcgatgccgcagccgctgaggcagaagctcgcgctgaggcccgaacacgtatggggattggagatgaggccgtatccggaccttggtcctgggacgacattgaattcgaactgcttacctgggacgaggaaggcgattttggggacccatggtccagaatcccattcacattctgggcgaggtaccaccagaacgcgcgttctcggttcccacagacattcgcgggaccaattattggtccaggaggaactgccagcgccaactttgctgctaattttggtgcgataggattcttttgggtggagtag

SEQ ID NO: 230091 - DNA, 2505 bp, synthetic construct
  misc_feature 1..2505: note = Description of Artificial Sequence: Synthetic coding sequence
  source 1..2505: mol_type = other DNA
atggctcagaaaatggattgcggtgctggattactgggcttccagaatcccgacgcctgccgggctgtctgtcacccattgccacagcctcctgccagcacccttccgctttctgctttcccgacgctctgcgacccaccctattcacagctgcgcgatccccctgccgtcctcagttgttactgtacccctttaggcgcatcccctgcacctgccgaagcttcagtggaagatagtgccctgctgatgcagaccctgatggaagctatccagatcagtgaagcacctcctacgaatcaggctacagccgctgcctctccacagtccagccagccccctaccgccaacgagatggccgatatacaggtcagcgcggctgctgctagacccaaaagtgccttcaaagtgcagaatgcaactaccaagggacctaacggggtctacgacttctctcaggcccacaatgctaaagacgtgccaaatactcagcccaaggctgccttcaagtcccagaatgcaacccccaagggtcctaacgctgcatacgacttcagtcaagcagcaaccactggggagctggccgctaacaagtccgagatggcctttaaagctcagaacgccaccaccaaagtgggtcccaatgccacctacaactttagtcagtcattaaacgcaaatgacctagcaaattctcggcctaagacgcccttcaaagcctggaatgataccaccaaggcaccaaccgcagacacacaaacccagaacgttaatcaggctaagatggccaccagccaagctgacatcgaaacagaccccggaatctctgagcctgatggcgctaccgcgcagacaagtgcagacggttctcaggcacagaatctagagtccaggacaataatcaggggcaagcgcaccagaaagatcaataaccttaatgtggaggaaaacagtagcggcgatcagaggagggcaccgctggccgcaggcacctggaggtccgcaccagtccccgtgacgacccagaaccccccaggagcgccacccaacgtgctgtggcagacacctttggcctggcagaatccgagcggctggcagaatcagaccgctcgtcagacccctcccgcacgccagagtcctcctgccagacagacccccccagcctggcagaaccccgtcgcctggcagaaccctgtaatctggcctaacccggtcatctggcaaaacccggtgatttggcccaaccccatcgtctggccgggtcccgtcgtttggcccaacccacttgcctggcagaatccccctggctggcagactcccccaggatggcagacccctccaggctggcaaggcccacccgattggcagggcccaccggactggcctctgcccccagattggccactaccgccagactggcctctgcctacagattggccactcccacctgattggatacccgctgattggccaatcccaccagactggcagaatctgcgcccatctccaaatctgagaccctcgcctaatagccgcgcttcacagaatcccggtgcagctcagcccagagacgtggcccttcttcaagagagagccaataagctggtgaaatacttgatgctgaaggactacacgaaggtgccaatcaagcggagtgagatgttgcgcgacatcatccgggagtacactgatgtctacccagagatcattgagcgagcttgtttcgtcctggagaagaagttcggaatacagttgaaggagatcgacaaagaggaacatctttacattcttatttcaactcctgagagcttagctggaatcttgggcactaccaaggatacccctaaactcggactattgttagtgatcttgggcgtgatctttatgaatggtaaccgcgcttccgaagcagtgctgtgggaagcacttcgcaagatgggcctgagacccggagtgagacacccccttctgggcgaccttcggaagcttctcacatacgagttcgtgaagcagaaatatctcgactatcggagggtgccgaacagtaaccctcccgagtatgagttcctctgggggctgaggagctaccacgagacatctaagatgaaggtgctacgcttcatcgctgaagtgcaaaaacgagacccgagggattggaccgcccagtttatggaagccgcagatgaggcgctggatgctctggacgctgcagcagctgaagctgaagcgcgagctgaagcacggacaagaatgggaatcggcgatgaagctgtcagcgggccatggtcctgggatgatatcgaattcgagctcctgacctgggacgaggagggggacttcggcgatccctggtcccgaatcccttttaccttttgggcacgttaccaccagaacgctcggagtcggtttccgcagacatttgcagggcctattatcggacctggaggcactgcttctgcaaattttgcggcaaattttggtgccatcggatttttttgggtggagtag

SEQ ID NO: 230092 - DNA, 2337 bp, synthetic construct
  misc_feature 1..2337: note = Description of Artificial Sequence: Synthetic coding sequence
  source 1..2337: mol_type = other DNA
atggcacaaaaaatggactgtggagctggactccttggctttcaagcggaggcatccgtggaggatagtgcactcctgatgcaaaccttgatggaggcgattcaaatctccgaggctccccctaccaaccaggccaccgccgctgctagtcctcagtcgtcccagccacccaccgctaacgagatggctgacattcaggtatctgctgcagcggctagacctaaatcagcctttaaggttcagaatgctaccaccaaggggccaaatggggtgtatgacttttcgcaagcacacaacgctaaggacgtacctaatacgcaacccaaggccgcttttaagagccagaatgccactccaaagggccctaacgcggcttacgatttctcacaggccgctaccaccggcgaacttgctgccaacaagagtgagatggcgtttaaggcccagaacgctactactaaggtgggccctaatgcaacttataattttagccagtccttaaatgcgaacgatctagcaaacagccgccctaaaacgccctttaaggcatggaatgatacaactaaggcgcctacagccgacacacagacacaaaacgtgaatcaggccaaaatggccaccagccaggccgacattgagaccgaccctggtatcagcgagcctgatggagccaccgctcagactagtgccgacggctctcaagctcaaaacctggagtctcgcacaataattcgaggaaaacggaccagaaagattaacaatctcaacgtcgaggagaatagttctggcgaccagcgaagagcccctctggcagccggaacgtggcgctctgcgccagtgccggtcaccacccagaacccacccggagctccgcctaacgtattgtggcagactcccctcgcctggcaaaatccctctggttggcaaaaccagaccgccagacagaccccacctgcccgacaaagtccgccagcgcgacaaaccccgcctgcttggcagaaccctgtcgcttggcagaatcccgtgatttggcccaacccggtgatctggcagaatcccgtcatttggcctaacccgattgtatggccaggacccgtggtgtggcccaaccccttagcttggcaaaaccctcccggatggcagacccctccaggctggcaaactcctcctggttggcagggaccccctgactggcagggacctccagactggcctctgccccctgattggcctttgcctcctgattggcctctgcctacagactggcctctgccacccgactggatcccagctgactggccaattccaccggactggcaaaacctacggcctagccccaatctgcgaccctcgcccaacagcagagcaagccagaatccaggcgctgcacagccaagggacgtggccctgctgcaggagcgggcaaataaacttgttaagtaccttatgttaaaggattacactaaggttcccatcaaaaggtctgaaatgctcagggacataatccgagagtacacagatgtctaccctgaaattatcgaacgtgcctgctttgtgctggagaaaaaattcggcatccaacttaaagagattgacaaagaagagcacctatacatcctcatttccacccccgaatccctggcaggaatactgggaaccactaaggacacacccaagttgggactgctgcttgtgatactgggtgtgattttcatgaatggtaatcgggctagcgaagccgtgctctgggaggctctgcgcaaaatggggctccgcccaggggtcagacaccccctgctcggcgaccttcggaagctgctgacatacgagttcgtaaagcagaaatacctggactatcgtagggttcctaattcaaatcccccagagtatgagtttttgtggggcctccggtcctaccatgagacgagcaaaatgaaagtcctgcgctttatcgccgaagtgcaaaagcgggaccccagagactggacggctcaatttatggaagcggcagatgaggcccttgacgcactcgacgctgctgccgctgaggccgaggctagggctgaggccaggacacgaatgggtataggggacgaagctgtgagtgggccttggtcatgggatgacatagagtttgaactgctgacatgggacgaggaaggggattttggcgacccatggtcacgcatcccattcactttctgggctaggtatcatcaaaatgcacggtcacggttcccccagacatttgctggccctatcatcgggcctgggggtaccgcatccgctaactttgccgctaatttcggggctatcggctttttctgggtggagtag

SEQ ID NO: 230093 - DNA, 2337 bp, synthetic construct
  misc_feature 1..2337: note = Description of Artificial Sequence: Synthetic coding sequence
  source 1..2337: mol_type = other DNA
atggcacaaaagatggactgcggtgctgggctgctgggctttcaggccgaggcttccgttgaggattccgcgctactaatgcaaacgctaatggaggccattcaaatctccgaggcacccccaacaaaccaagctacagccgctgccagtccccagtcaagccagccacccacagcaaacgaaatggcagacattcaggtctccgcggcagctgcacggccaaaatccgcttttaaagttcaaaacgccacaactaaggggcctaacggggtttacgatttctctcaggcgcacaatgccaaggatgtacccaacactcagccaaaggctgcattcaaatctcagaacgccaccccaaagggaccaaacgcagcctacgatttttcacaggctgctacaacaggagagctggctgccaacaagtcagaaatggcattcaaggcccagaacgccacgaccaaggtgggcccaaatgccacctacaatttcagccagtccctgaacgccaacgacctagccaactcccgcccaaagaccccctttaaggcctggaacgacaccactaaagctccaactgcagacactcagacccagaatgtgaaccaggccaaaatggccacatcccaggcagatatagaaacggacccgggaatcagcgaaccagacggagccactgcacagacatcggctgacggatcgcaggcacagaacctggagtctcgcaccatcattaggggcaaacgcacaagaaaaatcaataatctgaatgtggaggaaaatagtagtggcgatcagcggcgagcaccactggccgcagggacttggcgttccgcacctgtaccagtcactacccagaaccctccaggggctccacccaatgtgttatggcagactccactggcctggcagaacccgagtggatggcagaaccagactgcgcgtcagacgcccccagccagacagtcccctcccgcaagacaaacgccccctgcgtggcagaatccagtggcgtggcaaaatcccgtgatctggccaaaccctgtgatatggcagaaccccgtcatctggcctaacccaatcgtctggcccggacctgtcgtctggcccaatcccctggcttggcagaaccctcccggatggcaaaccccacctggctggcagaccccccctggttggcaggggccaccggattggcagggcccacctgactggccattgcctcccgactggccgttgcctccggactggcccttaccaactgactggccattgcctcctgattggattccggcagactggcccataccaccggactggcagaacctccgtccctctcctaacttaagaccgtccccaaactctcgcgcttcacaaaatcccggagccgctcagcccagagatgtggcattactgcaggaaagggcaaataagctcgtcaaatacctgatgctgaaagactacacaaaagtgccgataaagaggagtgaaatgctcagagacattatccgtgagtatacggatgtgtatccagagattatcgagagagcttgctttgtgctggaaaagaagttcggaattcagctgaaagaaatcgataaagaggagcacctctatattctcatcagcacccccgagagtctcgccggaattctcggaaccaccaaagatacaccgaagctggggctcctgctcgttatcttgggagtaattttcatgaacggaaatagggcttcagaggctgtcctgtgggaggccctcaggaagatgggcctgcggccaggcgttcgccatccgttgctgggagatctgaggaaactcctgacttatgagttcgtgaagcaaaagtacttagattaccggagagtgcccaatagcaaccccccagagtacgaatttctgtggggcttgagatcttaccatgaaacaagcaagatgaaggttctgcgattcatcgcagaagtccagaaacgtgatccaagagactggactgcccagttcatggaagctgccgacgaggctttagatgcattggatgcagccgctgccgaagcggaggctcgagccgaagctaggactcgtatgggcatcggtgacgaagccgtctcggggccatggagctgggatgatatcgagttcgaacttctcacctgggacgaagagggcgactttggcgacccttggtccaggatcccttttaccttctgggctaggtaccatcagaacgctcggagtcggttcccgcagacattcgccggtcccattattggtcctgggggaacagcgtctgctaactttgctgctaattttggggctattggattcttttgggtcgaatag

SEQ ID NO: 230094 - DNA, 414 bp, synthetic construct
  misc_feature 1..414: note = Description of Artificial Sequence: Synthetic coding sequence
  source 1..414: mol_type = other DNA
atggcgcaaaaaatggattgcggcgcaggcctgctgggcttccaggctgaggcctctgtggaagatagtgcactgttgatgcagacacttatggaggcaatccaaatcagtgaggcgcctcctacgaatcaggctacagctgcagcgagccctcagtcctcacaacccccaacagctaacgaaatggctgatatccaagtgagtgcagcagctgccagaccaaaatctgccttcaaagtgcagaacgctacaacaaagggcccaaatggagtatatgatttttcccaaagtctgaacgctaacgaccttgcaaacagccgccctaagactcaggtatcactgaacctgacagtgcagctccaccgccatcaacagatggtaccaagacttaggatctggtccccgggtcaatag

SEQ ID NO: 230095 - DNA, 3942 bp, synthetic construct
  misc_feature 1..3942: note = Description of Artificial Sequence: Synthetic coding sequence
  source 1..3942: mol_type = other DNA
atgagcggctggcgctatctaatctgtgtcagcttccttctgacaattctgctcgaactgacttaccaggggcctccagtgccagccagctcatccactaagctgctgatgacctcctattcaatgaggagtaccgtcgtctcccgttacgcccatactttagtgacatccgtcctgttcaatcctcatgctgaggctcatgaagcgatcttcgacctggacctgcctcacctggctttcatctccaatttcactatgactatcaacaacaaggtatacatcgccgaggtgaaagagaaacaccaggccaaaaagatctacgaggaggcgcaccagcaggggaagaccgcagcccacgtaggaattagagaccgcgaatcagagaagtttcgcatcagcaccagtctagctgctgggacggaagtgacctttagtctggcgtatgaagagctgctgcagcgtcaccagggacagtaccagttggtcgtgtcactgcggccaggccaactggttaaacgactgtccatagaagttactgtgtctgagagaacgggcatatcctacgtgcacatccccccattgcgcacaggccgtttgagaaccaacgcccacgcctcagaagtcgattccccaccctcaacacggatcgagcgcggagaaacctgtgtcaggatcacatattgtccgaccctgcaagaccagagttcaatctctggctcaggaatcatggctgactttctggtccagtacgacgtggtcatggaggacatcattggagatgtccagatctatgatgactactttattcattattttgcccctcggggtttgccaccaatggaaaaaaatgttgtctttgttattgacgtcagcagttccatgttcggtaccaagatggaacagacaaaaacggcaatgaatgtgatattgtcagaccttcaggcaaacgactatttcaatatcatttcgttctctgataccgtaaacgtatggaaggccggaggatcgatccaagctactatccaaaacgtgcattctgcaaaggactatctgcattgtatggaggctgatgggtggactgacgtcaacagcgccctcctggccgcagcatcagttctgaatcattctaatcaggaacccggaagggggcctagtgtcgggaggattccactcatcatctttctcacagatggtgaaccaacagctggggtcacaacgccaagtgtgatactgagtaatgttcgccaggctctagggcacagagtgtccctgttcagcttagcattcggcgacgacgcagacttcactctgctcaggaggctatcattagagaaccgaggtatcgctaggcggatctacgaggacactgacgcagctctgcagctgaagggcctctacgaagaaattagtatgcctctgctcgccgatgttcggctcaactacctggggggattggtaggcgcttccccatgggccgtttttcccaattacttcgggggttcagagctggtggtggccggacaggttcaacctggcaagcaagaactgggaattcaccttgctgctaggggacctaaggaccagctgctggtcgctcatcatagtgagggtgccacaaataactctcaaaaagcctttggttgcccaggcgagccagcacccaatgtggctcactttatccgcaggctctgggcgtatgtaaccattggagagctgctagacgcacacttccaagctagggatactaccacgagacaccttctagccgctaaggtactgaacctgagtctggagtacaatttcgtcacacccctgactagtctcgtcatggtacagcctaagcaggcctctgaagaaactagacgccaaacttccacgagcgcaggcccagacactatcatgccttcaagctccagccgtcatggactcggagtgagcaccgctcagcccgcactcgttcccaaggtgatcagccctaagagccgcccagtcaagccgaaattctacctttccagtactacgaccgcctccacgaagaaaatgctttcctccaaggaactcgagccccttggggagagcccccacacattgtccatgccaacctatcctaaagccaagatccctgctcagcaggactcaggaactcttgcccagccgacattgcggaccaagcccacgatcctggtaccatctaattccggtacactgctgcctcttaaacctggcagcctgtcccaccaaaaccctgacatcctccccactaactcccgtactcaggtccctccggtaaaaccgggtatcccggcttccccaaaggccgataccgttaaatgcgtcacgcctctgcacagcaaacccggtgctccatcacacccgcagctgggagcgctcacctctcaagcaccaaaggggctaccccagtcacgacccggtgtctcgaccctgcaggtcccaaaataccccctccacacaagaccccgagtgccagctcctaaaaccagaaataacatgccacatctgggacctggtatcttactgtccaagacacctaaaattttgttgagcctgaaaccgagcgcaccaccacaccagatcagtaccagcatcagcctgtccaagccagaaaccccgaacccccacatgccccagacacccctgccgcctcgacccgatcgtccccgacccccactccctgagtctctgtccacattcccgaatactataagtagtagtactggtcccagcagtaccacaacgacctcagtcttgggcgagccactccctatgcccttcactcctacactgcctcctggcagattctggcaccaatacgatctgctgcctgggccacaacgcaccagacaggttcttggcccttcccgaccaggcgtgcctaccatgagtctgctgaattcatcgagacccaccccagaggggtctcctcctaatcttccgatcttgctgcctagctctatcctgccggaggccatctctcttctcctgctgcccgaggagctcgagctgttatccgaatcgatggtggaatctaaatttgtcgaatcgttgaatcctcccgctttctacacattcctgacacctgatgaagacgggagtcccaactgggatggcaattccgaggaaatcttgggcggagctggaggctcaatggaatcccagggttccagcgttgggctcgccaaaggcaccctgccctccatcttcaccttctcaagcagcgtcgatggcgacccccatttcgtgatccagatcccccacagcgaagaaaagatctgctttacactgaatggccatccgggagatcttctacaattgattgaggatcccaaggcagggctgcacgtgtcaggaaaactactgggggctccgcctcgtcccggacataaagatcagacacgcacatatttccaaatcattactgtcacaacggacaagcccagggcttatacaattacaatcagtcgctcgtctatatctttgaggggcgaggggacgctacgccttagttgggaccagcccgctctcctgaaacgaccacaactggaactgtacgtcgcggctgccgcaagacttacacttcggcttgggccttacctggagtttttggtcctccgccacagatatcgccacccttctaccttgcaacttccccatctaggattctatgtggccaatgggagtggcctaagtccttctgccagggggttaatcggtcagtttcaacacgccgacatccggcttgtaactggtcctatgggtccctgtctccgtcggcatcacgggccagatgtacccgtgattctgggaaagcgcttgctgaaagactctccacggctgctccctcgctgggcctcttgttggttggttaagagatctcacgttgagctgctgttaggtcacccgtacctgtcttatgttctgtag

SEQ ID NO: 230096 - DNA, 1767 bp, synthetic construct
  misc_feature 1..1767: note = Description of Artificial Sequence: Synthetic coding sequence
  source 1..1767: mol_type = other DNA
atgtctgatacctccgagtctggggctgggctcacccgctttcaggctgaagcatcagagaaggattcctcctcaatgatgcagacactcctcaccgtcacccagaacgttgaagttcctgaaactcccaaagcaagtaaagcgactgaggtatccaagacacctgaagcacgcgaggcccctgccacacaggcaagtagtaccactcagctcaccgacactcaggtgcttgcagccgagaataagtctcttgctgcagacaccaaaaagcagaacgcagaccctcaggctgtaaccatgcccgcaactgaaacaaaaaaagtcagccacgtggcggatactaaggttaacaccaaagctcaagagaccgaggcggcaccctcccaagccccagcagatgagcctgaaccggaatccgctgccgctcagtctcaggaaaaccaggatactcggccaaaagtcaaagctaaaaaagcccgtaaggtaaagcacctagacggggaggaggacgggtccagtgaccagtcccaggcttccggcacgactggtggtagacgcgtctcaaaagcactgatggcatccatggcgagacgtgcctcacgaggtccaatcgctttttgggcacgacgagcatctcgcaccaggttggccgcttgggcgagaagggctttactttccctcaggtcccctaaagctcgaagaggcaaggccagaagaagagcggctaaactgcagtcatctcaggaaccggaagcccctcccccaagagacgttgcactcctgcaagggcgagctaacgatctagttaaatacctgctggcaaaggatcaaacaaaaatccctattaagcgttctgacatgctgaaggacatcattaaagagtacacagatgtgtaccctgagatcatcgagcgtgctggctactcactggagaaggtgttcggcatccagcttaaggagatagacaaaaacgatcatctgtacattctgctctctaccttggagcccaccgatgccggaattctaggaacaaccaaagacagccctaaactgggcctgctgatggtgctactgtctataattttcatgaatggaaatcggagcagtgaggctgtgatttgggaggtgctccgaaagctagggttaagacccggtatccaccactctctgtttggggacgtcaaaaagcttattacagatgagttcgtgaagcagaaatatctcgattacgcaagagtccctaacagcaatccccctgagtacgagtttttttgggggcttcggtcatactatgagacctctaaaatgaaggtcttgaagttcgcatgtaaggtccagaagaaggaccctaaagagtgggccgctcagtatagggaagccatggaggctgatttaaaagccgcagctgaggcagctgcggaggctaaggctcgcgctgaaatccgcgctcgcatggggatcggtctcggatctgaaaacgcggctggcccttgcaactgggatgaggctgacattggcccttgggctaaagctcgtatccaggctggcgcagaagccaaagccaaggctcaggagagtggatcagcatccaccggagcaagtactagtactaataattcggcttccgccagcgctagcacatctggcggattttcagccggagccagtctaactgccactctcaccttcgggctgttcgccggtctgggcggtgccggtgcaagcacgtctggatcctctggcgcttgtggcttcagttataagtag

SEQ ID NO: 230097 - DNA, 1653 bp, synthetic construct
  misc_feature 1..1653: note = Description of Artificial Sequence: Synthetic coding sequence
  source 1..1653: mol_type = other DNA
atgtggcgcagccagaggcaccgacggccacaacgggtctccaaaacaccagaagccagagaagctccggcaacccaggctagtagtacaacacagctgacggatacccaagtgttagcagcagagaacaaaagtctcgcagctgacacaaagaagcagaacgccgatccacaggctgtcaccatgcctgccactgagactaagaaagtgtctcatgtggctgataccaaggttaataccaaggcccaggaaactgaggcagccccttctcaggccccagcagacgagcctgagccagaaagcgctgcagcacagagccaggagaatcaagatactcggcctaaagtcaaggctaaaaaagctaggaaagtgaagcacctagacggggaagaggatgggtcctcagatcagtctcaagcctctggcactacagggggtagaagggtctccaaggccctgatggcatctatggcacgtcgcgcaagcagagggccaatcgccttttgggcacgtcgggctagtcgaaccagactcgctgcctgggctaggcgagcactactgtccctccggtctcccaaagctcgacgaggaaaggcccgacgaagagcggcaaagcttcagtcttctcaggaacccgaggccccaccaccacgtgatgtggcgctcctgcagggaagagctaatgatctagtgaagtatttgctggcaaaggatcagactaaaatacccataaagagaagtgatatgctgaaggatattattaaggagtacactgacgtatatccagaaatcattgaaagagccggttactctctggaaaaggtgttcggtatacagctgaaagagatcgacaagaatgaccacctatacattctgctgtctaccctggaacccaccgatgctggtattctcggcaccaccaaggatagtccaaaactgggtttattaatggttttgctcagcatcatattcatgaatggtaatcggtcttctgaggcagtgatctgggaagtgctgcgtaagctggggctgcgcccagggatccaccattcacttttcggtgacgtcaagaaattaatcactgatgagtttgtcaaacaaaaatacctggattacgccagagtgccgaattcaaaccccccagaatatgaattcttttggggtttaaggagttattatgaaactagtaagatgaaagttttgaagttcgcatgtaaggtgcagaagaaggaccccaaggaatgggccgctcagtacagggaagccatggaagccgacctgaaggcggcagccgaagcggcagctgaagcgaaagccagggccgagattagggctaggatgggtatcgggctgggatccgagaacgctgctgggccatgtaattgggatgaggccgatatagggccttgggcaaaagcacggattcaagccggagccgaggctaaggcaaaagcccaagagagtggctcagcctcaaccggcgcaagcacatctacgaacaattccgcatccgcctccgcatccacatcgggcggtttctccgctggagcaagtctgacagccacacttaccttcggcctgttcgctgggctaggaggagctggagcctccaccagcggcagcagtggggcttgcgggtttagctataaatag

SEQ ID NO: 230098 - DNA, 1821 bp, synthetic construct
  misc_feature 1..1821: note = Description of Artificial Sequence: Synthetic coding sequence
  source 1..1821: mol_type = other DNA
atgtcggatactagcgagtcaggagccggtctcacccgatttcaagccgaggcaagtgaaaaagactccagctcaatgatgcaaacactcctcaccgtaacccagaacgtcgaggtaccagaaacccccaaggcgtccaaggccctggaggtgtctgaggatgtgaaggtcagcaaggcaagcggtgttagcaaggccaccgaggtgtctaaaactccagaagctagggaagcccctgctacgcaggctagctcaaccacacaactgactgatacccaggtgttggcagccgagaacaagtcactcgccgctgacacgaagaaacaaaacgccgatcctcaagcggtaaccatgccagccactgaaaccaagaaagtctcccatgttgccgatacaaaggtcaacaccaaagcacaggagaccgaggccgctccatctcaggctcctgccgatgaacctgagcccgagtcagctgccgctcaaagccaggagaatcaggacacacgtcctaaggtgaaggccaagaaagctcgcaaggtcaaacacctggacggtgaagaagacggctcttcggatcagagccaagccagtggtaccaccggtggccgacgagtgtccaaggctctgatggcctcgatggcacgtcgtgcttcccgagggcctatcgcattttgggctcggagagctagccgcaccaggctcgccgcatgggctcggagggccctcctgtctttgcggtctcctaaggcacggaggggaaaagctcgaaggagagcagccaaattacagagttcccaggagccagaagctccccctccccgagatgtggccctgctgcaaggcagagcaaacgacctcgtcaagtaccttttggccaaggaccagaccaagatccccatcaaacggagtgacatgctgaaagatatcataaaggaatacactgacgtttatcctgagataatagagcgggctgggtatagcctggagaaggttttcggtattcagctcaaagagatcgataaaaacgaccacctttacatcctgctgtccaccctggaaccgacggacgccggtatcttaggaaccacaaaagacagtcccaagttggggttgcttatggtgcttctgagtattatcttcatgaatggcaataggtcaagcgaggcggtcatttgggaggtgttgcggaagctggggctgcggccaggaatccaccacagtctgttcggagacgtaaaaaaattgattacagacgagtttgtgaagcagaaatacctggattacgcaagggtaccaaactcaaatccccctgagtatgagtttttctggggcctcagaagctactacgagacgtcaaaaatgaaagtcttgaagttcgcttgtaaggtgcagaaaaaggacccaaaggagtgggctgcacagtaccgggaggcaatggaggcagatttaaaagccgctgcagaggctgctgctgaagccaaagccagagcagagatacgcgcacgcatgggaatcgggttgggcagtgaaaatgccgctggaccctgcaattgggacgaggcagacatcgggccatgggccaaggcccgtatacaagccggtgcagaagcgaaggccaaagcccaagagagtggcagtgctagcacaggcgcaagtacctccaccaataatagtgcatctgctagcgcgtccacgagcggcggattcagtgccggtgcttccctaacagccacactgacctttggcctcttcgctggattgggaggagccggtgcatctacgtcaggcagctcaggcgcttgtggattcagttacaagtag

SEQ ID NO: 230099 - DNA, 1821 bp, synthetic construct
  misc_feature 1..1821: note = Description of Artificial Sequence: Synthetic coding sequence
  source 1..1821: mol_type = other DNA
atgtctgatacttcagaatctggcgcaggtctgactaggtttcaggccgaagcctcagaaaaagattctagctccatgatgcaaacccttctcacggtgacccaaaatgtggaagtgcctgagacaccaaaggcatccaaggccctggaagtgtcagaggatgttaaagtgagcaaggccagtggggtcagcaaggctacagaggtgtctaaaactccagaggctagagaagccccagcaacccaggcgagctctacgactcaacttacagacacgcaggtgctcgcggcagaaaataaatctttggcagccgacactaagaaacagaatgccgacccacaggcagtgaccatgcccgctaccgagacaaagaaggtgtcccatgtggcggacacaaaggtgaacaccaaagctcaggagacagaggccgcaccgtctcaagcaccagccgatgaacccgagcctgaatcggccgcagcccagtcccaggagaaccaggacacacggccaaaggtcaaggctaagaaggccagaaaggtgaagcaccttgatggggaggaggacggtagttctgaccagagccaggcaagcggtacaacggggggtcggagagtgagcaaagctcttatggcgtcaatggctagacgcgcttctcgcggtccaattgcgttctgggcacgcagagcatcccgcactcgcttggctgcttgggcgaggagggcactcctgagcctccgatccccaaaggccaggcgcggaaaagcgaggcgtcgagcggcaaagttacaatcgtctcaggagcctgaggcgcctccacctcgcgatgttgcactcctgcaggggagggccaacgacctggtcaaatatctcttggcaaaagatcagaccaagattccaattaaaaggtcagacatgttgaaagacataataaaggagtacacagacgtgtatcccgaaattatcgaacgagcgggatacagtctcgaaaaggtgtttgggatacagctgaaggaaatcgacaagaatgatcacctgtatatcctgctttcgaccctggaacctactgacgcgggaattctggggactacaaaggattcaccaaaactggggttacttatggtattactgagcattatttttatgaacggaaacagatcctctgaagctgttatatgggaggtgctgcgcaaactcggcttacgtcctggaatacaccacagtcttttcggcgacgtgaaaaaactgatcacagacgagttcgtgaagcagaaataccttgattacgccagagtccctaatagtaaccccccagaatatgaatttttctggggcctgcgaagctactatgagactagcaagatgaaggtactcaagtttgcctgcaaggtgcaaaagaaggaccctaaggaatgggccgcacagtacagggaggcgatggaggcggaccttaaggccgctgccgaagcagccgctgaggctaaggccagggccgagatccgcgctcgtatggggatcgggttggggtccgagaacgccgcaggaccttgtaattgggacgaggctgacattggcccttgggccaaagctagaatccaggccggagccgaggccaaggctaaagcgcaggagtccggctctgcctctacgggggcatccacaagcacgaacaacagcgcaagcgcctccgcctctacaagtggcggattttctgctggcgcatctctaacagcaacgctgaccttcggtctcttcgctgggctcggtggggctggagctagcacctctggatcctctggagcatgcgggttttcctacaaatag

SEQ ID NO: 230100 - DNA, 1566 bp, synthetic construct
  misc_feature 1..1566: note = Description of Artificial Sequence: Synthetic coding sequence
  source 1..1566: mol_type = other DNA
atgtctgatacctccgagtcaggagcaggcctaacccggtttcaagcagaggcgtccgaaaaggactcttcgtctatgatgcaaacgctgctcaccgtgactcagaatgtcgaggtcccagagacccctaaggcttcatccactactcagctaactgacacacaggtgctggcagccgagaataagagcctggccgctgatacaaaaaaacagaatgccgacccacaggcagtgactatgcccgctaccgaaacgaagaaggtgtctcacgtagccgacaccaaagtcaacactaaggctcaggaaaccgaagccgcacctagtcaggctccagctgacgagcctgagcccgaatccgctgctgctcagagtcaagaaaaccaagatactcgacccaaggtaaaagccaaaaaggctaggaaggtgaagcacctggacggcgaggaagatggcagtagcgaccaatcccaggcctcaggaacgaccgggggtagaagggtgagtaaggccagacggagggctgcgaaactgcaatccagccaggagcccgaggcaccacctcctcgagatgtcgctcttctgcaggggagagcaaacgatctggtaaaatatttgctcgctaaagatcagacaaaaataccaataaagcgctctgacatgttaaaggatattattaaggaatatactgatgtgtacccagagattatcgaacgcgcagggtactccctggagaaggtttttggcatacagctaaaagagatcgacaagaatgatcacctctatatcctcttgagcacactggaacctaccgatgccggaatcctaggaacaacaaaggacagtcctaaacttggtttactcatggtgctgctgtctatcatttttatgaacggcaaccgcagttccgaggccgtaatatgggaagtgctgaggaagctgggactccggccaggaatccatcattcactgtttggagatgtaaagaaactcattactgatgaatttgtgaagcagaaatacctggattacgcacgggtcccgaatagtaatccaccagagtacgagtttttctggggactgagaagttactacgaaacatctaagatgaaagtcctgaagttcgcctgcaaagtgcagaaaaaagatccaaaagagtgggcggcacaatatagggaggcgatggaggccgatctgaaagccgctgccgaggctgctgctgaggccaaggccagggccgagattagagcccgtatgggtatcggactcggcagtgaaaacgcagctggcccatgtaattgggatgaggccgacattggcccatgggccaaggcaaggatacaggctggtgccgaagccaaagctaaggcgcaggagagcggtagcgcaagcacgggcgcatctacaagtacgaataattctgcttccgctagcgcgagtaccagcggagggttctcagcaggcgcaagtttgaccgccacactgacattcggcctcttcgctggtcttggaggagccggagcctcaacaagcggcagctctggcgcatgtggatttagttacaagtag

SEQ ID NO: 230101 - DNA, 1566 bp, synthetic construct
  misc_feature 1..1566: note = Description of Artificial Sequence: Synthetic coding sequence
  source 1..1566: mol_type = other DNA
atgagcgataccagtgaatccggcgctggtcttactagattccaggccgaggctagtgagaaggattcatcgagcatgatgcaaacattgcttacagtaacccagaacgtggaggtcccagagacgcctaaggccagctcaacaacacagctaacagatactcaggttttggccgctgagaacaaatcactcgcggctgacacaaaaaaacagaacgctgaccctcaagcagtgactatgccagcgacggagacaaagaaagtgtcacacgtggccgatacaaaggttaacacaaaagcccaggagaccgaagcagctcctagccaggcaccagctgatgagcccgagcccgagagtgccgctgcacaaagccaggaaaaccaggatacccgacctaaagtgaaggctaagaaggcaaggaaagtcaagcatctggacggggaggaggatggctctagcgaccaaagtcaggctagtgggacaactggcggacggcgtgtctccaaagctagacgacgcgctgccaagttacagtcctctcaggagcccgaggcacccccaccgagagatgtggctcttctccaggggagggccaacgatttggtgaaatacctcttggctaaggaccagacgaagatcccaataaaaaggtccgacatgctaaaggacatcataaaagaatacaccgatgtttaccccgaaattatcgagagagccggatacagcctcgaaaaagttttcggaatccagctgaaagaaatcgataaaaacgatcacctgtacatcctgctctctacgttagaacctacggacgccggaattctggggacgacaaaagattctcccaagctgggactcctcatggttttgctgtccataatctttatgaatgggaatagaagcagcgaggcagtgatctgggaagttctgaggaagctcggcctcagacccggtattcatcactccctctttggagacgtgaaaaaattaataacggacgaattcgtcaaacagaaatatctggattatgcaagagttcctaattcaaacccccctgagtacgagtttttttgggggctccgctcctattacgagactagcaaaatgaaggtgcttaaatttgcttgtaaggtgcagaagaaagatcctaaggaatgggctgctcaataccgcgaggctatggaggccgaccttaaagcggctgccgaggccgcagccgaggctaaagccagagcggaaattcgcgctcggatgggcatcggtctgggctctgaaaacgccgctgggccttgtaattgggacgaggctgatatcggtccttgggcaaaggccaggatccaggctggcgctgaggccaaggcaaaagcacaggagagcggctcagcatcaaccggggctagtacgtctaccaacaactctgcctctgcgtcggcctccacatcaggaggcttttctgccggagcgtctcttaccgctactctcacctttggcctgtttgcagggctcggtggagcaggagccagtacaagcggaagtagtggagcctgtggtttctcctacaagtag

SEQ ID NO: 230102 - DNA, 1821 bp, synthetic construct
  misc_feature 1..1821: note = Description of Artificial Sequence: Synthetic coding sequence
  source 1..1821: mol_type = other DNA
atgtctgacacctccgaatctggggctggactgacgaggtttcaggcggaagcttccgagaaggacagcagcagtatgatgcaaacacttcttacagtgacccagaacgtggaggttcctgagacacccaaagcttcaaaggctctagaagtaagtgaggacgtcaaagtaagcaaggcctctggagtgagtaaggctacagaggtgagtaagacccccgaggcaagagaagcgcctgcaacacaggcctccagcacaactcaactcacggacacacaggtgctagctgcggagaataagtctcttgctgctgacactaagaagcagaacgctgatccgcaggccgtgacaatgccagcaacagagaccaagaaagtcagtcatgttgctgatactaaagtgaataccaaggcccaggaaactgaagctgcaccctcccaggctcctgccgacgagcctgagcccgaatccgccgctgctcaaagccaggaaaaccaggacacacggcctaaagtaaaagcgaagaaagctcgcaaggtaaaacacctggacggggaggaggatgggagttctgatcagtctcaggcctctggcacgacgggcggtcggcgagtttctaaggcactcatggctagcatggctcgtcgagcttcgcgcggtccgatagccttttgggcgagaagagcctctagaaccaggctcgccgcatgggctagaagagcactgctaagcctccggtccccgaaggccagacgcggtaaagccagaaggcgggctgccaaacttcagagctctcaagaacccgaagcccctccccctagagatgtcgcgctcttgcaggggcgtgctaatgatctggtgaagtatttattggccaaagaccaaaccaagatccccataaagcgttctgatatgctcaaggacataataaaggagtacacagacgtgtacccggagatcatcgagagggccggatattccttagagaaagttttcggaatacagctgaaggagatagataagaatgatcatctgtacattctgttgtctacactggaaccgactgacgcaggaattttgggaaccaccaaagattccccaaaactgggcctgctcatggttctcctgtctatcatattcatgaacggaaacagaagttccgaggccgtgatctgggaggtactgcgcaagctcggcctacgtcctggaatccaccatagcctgtttggtgacgttaagaagcttataacagacgagttcgtgaagcagaaatatctggactatgcacgtgttcccaactctaatccccctgagtatgagtttttttgggggctgcgatcttactatgaaacttctaagatgaaagttctcaaatttgcatgcaaggtgcagaagaaagatcctaaagagtgggctgctcagtatcgcgaggccatggaggccgacttgaaggcggctgccgaagcagctgccgaggccaaagctcgcgctgaaatacgagctaggatgggtattggcctcggtagtgagaacgcagcagggccttgtaattgggatgaggccgatataggaccttgggctaaagctagaatccaggcaggagctgaggcgaaggcaaaggcgcaggagtccgggtcagcatcgactggcgcaagcacctccacgaacaatagcgctagcgcatctgcaagtacatccggcggattcagcgccggagcgtcgttgactgctaccctcactttcgggctatttgccggtctaggaggggcaggggcttccacatctggctcctcaggtgcatgcggattctcctacaagtag

SEQ ID NO: 230103 - DNA, 1821 bp, synthetic construct
  misc_feature 1..1821: note = Description of Artificial Sequence: Synthetic coding sequence
  source 1..1821: mol_type = other DNA
atgagcgatacttcagaatccggagcaggcctcacccgctttcaggcggaagcgagcgaaaaggactcatctagtatgatgcagacattgctgacagtaactcagaacgtggaggtgcccgaaacgcctaaagcgtccaaggccctggaagtttccgaagacgtcaaggtctccaaagccagcggagtttccaaagcaactgaggtgagtaagacacctgaggccagagaagccccagccacccaggcctcgtcaacaacccagcttacagacacacaggtcctggctgccgaaaataagtccctcgctgctgatacaaagaaacagaacgctgatccacaggctgtaactatgccagccacagaaacaaaaaaggtgagtcatgtggcagacactaaagtcaataccaaggctcaggagacggaggccgcaccaagccaggccccagccgatgaacccgagcccgagagtgcggcagctcagagccaggagaaccaggacactcgacccaaagtgaaggctaaaaaagctagaaaggttaagcacctggacggggaggaagacggaagctcagatcagtcacaggcatcaggtacgacggggggtagacgggtgagtaaggccctcatggcctcaatggccaggcgagcatccagagggccaatagcattttgggctcgacgggcttctcgcactcgactcgccgcatgggcgaggcgtgccctactgtccctgagaagcccaaaagccaggaggggaaaggccaggagacgcgcagctaagctccagtcgtcacaagagccagaggcaccacctccaagggacgtagcactgttgcagggtcgcgcaaatgacctcgttaagtacctgctcgccaaggaccagacgaagatccccattaaacgcagcgatatgctcaaggacataattaaggagtacacagacgtgtatcccgagattatcgaacgtgccggatattctcttgaaaaggttttcggcatccagctcaaagaaatcgataagaacgatcatctatacatcctgctgagtactctggaacctactgatgccggaatattggggaccacaaaggacagcccgaagctgggactgttaatggtgctgctgagtattatttttatgaacggtaatcgaagctctgaagcagttatctgggaagtgctccgcaaactgggtctacgccctggtattcaccacagtctgttcggcgatgtcaagaagctgataactgacgaatttgtgaagcagaagtatctggactacgcacgagtgccaaatagcaatccgccagagtacgaatttttctgggggctgagatcgtattacgagacgtccaagatgaaggtgctgaaatttgcttgcaaggttcagaagaaagaccctaaggaatgggctgctcagtatcgtgaagcaatggaagctgatctgaaagcagccgctgaggctgcagccgaagccaaggcccgagccgaaatcagggccaggatggggattggacttgggagcgagaacgccgcaggcccatgtaactgggatgaagctgatatcggcccttgggcaaaagccaggatccaggccggagcggaggcgaaagccaaagcacaggaatccggaagcgcctctaccggcgcttcaacatcaacgaataactccgctagcgcttccgcctctacgagtggcggttttagtgccggagcaagcttaacggccaccctgacctttggtctattcgctggacttggaggggctggcgctagtactagcggctcttccggcgcttgcggattctcgtacaagtag

SEQ ID NO: 230104 - DNA, 2220 bp, synthetic construct
  misc_feature 1..2220: note = Description of Artificial Sequence: Synthetic coding sequence
  source 1..2220: mol_type = other DNA
atggctgaggggagtttctctgtacagagcgagtcatactcagtggaagatatggatgagggatccgacgaggtcggggaagaagaaatggttgagggcaacgattacgaggaatttggcgcattcgggggttatgggactctcacatctttcgacattcacattttgcgagcgttcgggtccctcggcccaggcctcaggattttgtccaacgaaccttgggagctcgagaatccggtgcttgctcaaaccctggtcgaagccctgcagctcgaccccgagacgcttgcgaacgagacagcggcaagggctgccaacgtcgcaagagctgcagcatcaaacagggctgctcgagctgccgctgcagctgcaagaaccgcgttttctcaagttgtggcgtcgcaccgcgtggccactccgcaggtatctggagaggatacccaaccaactacatacgccgcagaagcacagggcccaacacccgagcctcccctggcttccccccagacctcccagatgctggtaacatcaaagatggcagctcccgaagctcctgcaactagcgcacagtctcaaactggctctccagcccaggaagcagcgacagagggcccatcctcagcctgtgcctttagccaggccccatgtgccagggaagtggatgctaacagaccgagtaccgcattcctcggacagaacgatgtgttcgacttcactcagcctgcaggcgtatcaggcatggcctttcccagacccaagcgaccagccccagctcaggaggccgcaacagaagggccttccgccgcttcaggagtgccgcagactggcccagggagagaagttgctgccactcggcctaaaactaccaaatccggaaaggcgctggctaagacgcgctgggtggaaccacaaaacgtggtggctgccgcagctgcgaaggctaagatggctacaagtatccctgagcctgagggggcagcagccgctaccgcgcagcactccgctgagccctgggcgcgtatgggtggcaaaaggacaaaaaagtccaagcacctcgacgatgaatatgaatcctctgaggaagagagagagacacccgctgtacccccaacttggcgggcatcgcagccctcactcaccgtacgagcccagctggcccctaggcctccgatggctcccaggtcgcagattccgagtagacatgtgctgtgtctgcccccaagaaacgtgacattgcttcaagaacgggctaacaagttagttaagtacctgatgatcaaagattataagaagatccctattaaacgggcagatatgctgaaggacgtgattagggagtatgacgagcattttcccgaaatcatcgagagggccacatatactctcgagaaaaaattcggcatccatttgaaagaaatagacaaggaagagcacctgtatatcctggtgtgcactcgggatagttccgctagactcctgggcaaaacaaaggacaccccacgactgtcacttttgctggtaatcctgggcgtcatattcatgaatggtaatcgtgccagtgaagcagttctgtgggaggcactgagaaaaatgggactccggccaggagtgagacatccctttttgggcgacctgaggaagctcatcacagacgactttgtgaagcagaagtacctcgaatacaaaaaaattccaaactctaacccacctgagtatgaattcttatgggggctaagagccaggcacgagaccagcaaaatgagggtgctgcgctttatcgctcaaaaccagaatcgggacccccgagagtggaaggcccacttcctggaggctgtggatgatgccttcaaaaccatggatgtggatatggccgaggaacatgccagggctcagatgagagctcagatgaacataggagacgaggccctaatcggacgttggagctgggatgacatacaggtcgaactgttaacttgggatgaagatggggatttcggagatgcatgggcccgtatcccgtttgccttttgggcacggtaccatcagtatattctgaactcgaatagggccaaccgcagagcgacctggagagcgggtgtctcaagtggcactaacggaggtgcctccacatctgtgctcgacggaccgtctacttcctccaccatacgaactcggaacgctgctcgcgctggtgcaagctttttcagctggatacagtag

SEQ ID NO: 230105 - DNA, 2274 bp, synthetic construct
  misc_feature 1..2274: note = Description of Artificial Sequence: Synthetic coding sequence
  source 1..2274: mol_type = other DNA
atggctgagggatcctttagcgtccagtccgagagctactctgtcgaagatatggatgaggggagcgacgaggtgggggaggaggaaatggtcgagggcaatgactacgaggagttcggagcatttggtggctacggaactctgacgagtttcgacatacatattctccgggctttcggcagcctcggtccgggtctgcgtatactctcaaatgaaccttgggaacttgaaaatcctgtgctggcccaaaccctcgtggaggccttgcagctggatcccgagacattagctaatgagaccgccgctagggcggcaaacgttgcccgtgctgctgcaagcaatcgagctgcgagggcggctgctgcggctgccaggacggcattttctcaagttgtcgccagccacagggtggctactccccaggtaagcggagaggatactcagcccaccacttacgctgccgaggcacagggcccaactcccgaacctccactagcctccccccagacatcccagatgctggttacatctaagatggctgctccagaagctcctgctacttctgctcaatcacaaacaggctcacccgctcaggaagcagcaacagagggcccatcttccgcgtgtgccttttcccaggcaccgtgcgcaagagaggtcgatgctaacaggccctcgacagcattcctcgggcaaaacgacgtcttcgactttacccaacccgcaggtgtgagtggcatggcgtttccacgaccaaaaaggccagcaccggctcaggaagctgcaaccgagggaccctctgccgcaagcggtgtccctcaaaccggtcccggacgggaagttgctgctaccagacccaagactaccaaatcagggaaagcactggcaaaaacccgctgggtggagccccagaacgtggtcgcagccgcagccgctaaggccaaaatggcgacaagcattcctgaacctgagggcgcagccgctgctacagctcaacattccgctgagccttgggcaagaatgggaggaaaacggacgaagaaatcaaagcacctcgacgatgagtacgagtcaagcgaagaagagcgcgaaactcctgcagtgccgcctacgtggagagcatcccaaccttcccttaccgtgcgagctcagcttgcacctaggcctcccatggctcccagatctcagatcccttcccggcatgtgctgtgcctgccccctcgcaacgtcaccctccttcaggagagagccaacaagttagtgaagtatttaatgatcaaggattacaaaaagattcctatcaagcgggctgatatgctgaaggacgttatccgtgagtacgatgagcactttcccgaaattattgaaagagcaacttacaccctggagaaaaagttcggaattcatctcaaagagattgataaggaagagcacctttacatcctcgtatgtactcgggattctagtgcacggctacttggcaagacaaaggataccccccgtctgtctttgctcctggtcattctgggagtcatcttcatgaatgggaaccgggcttcggaggccgtgctttgggaggccctgcgtaagatggggttgagacccggtgtgcgccaccccttcctgggcgacttgcgtaagctaatcaccgacgactttgtgaagcagaagaatcccgagctgcgggaggagacccccctctccatggcgccaagttggtacttggagtacaagaagatcccaaattcaaacccacccgaatatgagtttttatggggcctccgggcaagacacgagacttcgaagatgagagttttgcgttttattgcccaaaatcagaatagagaccccagggagtggaaggcccattttctagaagctgtggacgacgcgttcaagacaatggatgttgatatggccgaagaacacgcaagggcccagatgcgcgctcagatgaacattggcgatgaggctctgatcggtcgctggtcttgggacgacatccaggtcgagctcctcacctgggatgaagacggcgactttggcgacgcgtgggctagaatccccttcgccttctgggccagatatcaccaatatatcctgaactctaatcgggcaaaccgccgagctacttggagagccggagtgtcatccggcactaacgggggagcatccacaagcgtgctcgatggccctagtacctccagcaccattaggacaaggaacgccgctcgcgctggagctagttttttttcatggatccagcatcgctag

SEQ ID NO: 230106 - DNA, 2226 bp, synthetic construct
  misc_feature 1..2226: note = Description of Artificial Sequence: Synthetic coding sequence
  source 1..2226: mol_type = other DNA
atggccgagggtagcttctcagtgcaatccgagagctatagcgtggaggacatggacgaaggctcagatgaagttggcgaggaggaaatggttgagggaaatgactatgaagagtttggcgctttcggagggtatggcacgctgacctcattcgatatccacattctgcgcgcttttggcagccttggaccagggctccgcatactaagcaacgaaccctgggagcttgagaatcccgtgcttgcccagaccctggtggaagccctgcagctggaccccgagactctcgcgaacgagacagccgctagggctgccaacgtcgccagagccgctgcatccaaccgggctgcccgtgcagcagctgccgcagcccgtactgcgttttcccaagtggtggcctctcaccgcgtagccacgcctcaggtgtctggggaagatacccagcctaccacttatgctgcggaggcccagggacccacaccagagcctccactggcctccccacagacctcccaaatgctggtcacaagcaaaatggccgcacctgaagccccagccacatctgcgcagtcccaaaccggttcaccagctcaggaagctgctacagagggccctagctccgcatgtgccttcagtcaggccccatgtgcaagagaggttgacgcaaataggccctctactgctttcttaggccagaacgacgtgttcgatttcactcagcctgccggagtgagcggaatggctttccctaggcctaaacgccctgccccagcgcaggaggctgctaccgagggacctagcgccgctagtggagtcccccagaccggtcctgggcgtgaggtcgccgctactcgcccaaagactacaaagagtgggaaagctctcgccaaaacaagatgggtcgagccccagaacgtggtggctgctgcagctgctaaggctaaaatggctacttctatcccagagccagaaggcgcagccgctgccactgcccaacatagcgcggaaccttgggccaggatgggaggtaaaagaactaagaagagcaaacatctggatgacgaatacgagagctccgaagaggagagagaaacaccggctgtgcccccaacctggcgcgcttcgcaacctagcctgacagtgcgtgcgcagttagcccctaggcctccaatggctcccaggtcacagatcccaagtaggcatgtcctgtgccttccgccacgcaacgtaacactcctgcaagagcgagcgaacaagttagttaagtacctcatgataaaggattacaaaaagatcccgatcaagagagctgacatgttaaaggatgtcatacgtgagtatgacgaacacttcccggagatcattgagcgcgctacctatactctcgagaagaaatttggaatccacttaaaggagattgacaaagaggagcacctgtacatcttggtatgcaccagagattcaagcgccaggttactgggaaaaacaaaagataccccaaggctgtcattattgctggtcatcctaggggtcatatttatgaacgggaaccgtgccagcgaggctgtcctgtgggaagcccttcggaaaatgggtttaaggcccggagtcagacatccttttcttggggatctgcgaaaactcataaccgacgatttcgtgaagcagaagtacctcgaatacaagaaaatcccaaacagcaacccacccgaatatgagttcctgtggggattgcgtgcaaggcacgagacgtctaaaatgcgagtactgcggttcatagctcagaatcagaaccgggaccccagagagtggaaagcccacttcctggaagctgtggatgatgcattcaaaaccatggacgtggatatggccgaggagcatgccagggctcagatgcgcgcacaaatgaatattggtgacgaggcactcattgggcgttggagttgggacgatatccaggtggagctcctcacttgggatgaggacggcgattttggggacgcatgggcgcgaatcccatttgctttttgggcaagataccatcagtatattctcaacagcaaccgcgcaaacagaagagcaacatggcgcgcaggcgttagcagcggtaccaatggtggtgctagcactagcgtgctggacggtcccagcacctcgtctacaatcagaacgcggaatgcagctcgggctggagctagctttttttcatggatccagcacaggtag

SEQ ID NO: 230107 - DNA, 2220 bp, synthetic construct
  misc_feature 1..2220: note = Description of Artificial Sequence: Synthetic coding sequence
  source 1..2220: mol_type = other DNA
atggctgagggaagtttcagtgttcagagcgagtcgtactcggtcgaggatatggacgagggcagcgacgaggtcggggaagaggaaatggtcgaaggtaatgattacgaggagtttggagcctttggagggtatggtactcttacttctttcgatatacatatcctaagagcgttcgggagcctaggtcccggactgcgcatcttgtcaaatgaaccctgggaacttgagaatcccgtgctcgcacagactctcgtagaggccctacaattggatcctgagactctggctaacgagacagccgctagggctgctaacgtggcgcgagccgcagcctctaatcgggctgcaagagccgcagccgctgccgcacggacagccttttcacaggtcgtcgcttctcaccgcgtggcgaccccccaagtatctggggaagacacccagcccaccacctacgcagcagaggctcagggccctacaccagaacccccactcgctagcccccaaactagccagatgctggtgacatctaagatggccgcacctgaggctcccgcaaccagcgctcagagccagacagggtctcctgctcaagaagctgctaccgagggtccttcttccgcctgtgctttctcacaggccccatgtgcacgggaggtggacgccaatagaccctcaacagccttcctgggacagaacgatgtgtttgactttacccaacccgctggagtgtctggcatggcttttccccgtccaaaaaggccggcaccggcacaggaggctgctacagaagggccatcggccgcaagcggagtgccccagacaggacctggaagagaggtggcagccaccagaccgaagaccacaaaaagcggtaaagctctggcaaagacccgttgggttgaaccccagaatgtggtggctgctgctgcggctaaggctaagatggccacttctattcctgagccagagggagctgccgcagccacagcgcagcactccgccgaaccctgggccaggatgggaggaaaaagaaccaaaaagagcaaacacctcgacgacgaatacgaatcttccgaggaagagagagagacacctgctgtaccccctacctggagggcatcacaaccctccctgactgtgagggcacagctcgcacccagaccgcctatggcccctcgctctcagattcctagccgccacgtgctgtgcctgccccctagaaacgtaacactcctccaggaaagggccaataaattggtcaaatatctgatgatcaaggattataagaaaattcccatcaagcgggctgacatgctgaaagatgtgattcgtgaatacgatgaacactttccagaaatcattgaacgggctacttacactctggagaagaagttcggaatccacctgaaagagatcgataaggaggaacacctgtatattctggtttgcacccgcgatagttccgccagactgttaggtaaaaccaaagatacacccagattgtccctgctgctcgttatactcggggtgatctttatgaatgggaaccgagcgtctgaggctgtgctatgggaagctctgcgcaagatggggttgcgccctggggtgaggcacccgttcctaggagacctgaggaagttgatcaccgacgatttcgtgaagcagaaatacctagaatacaagaagatccccaactccaacccgccagaatatgaattcttgtggggcctccgggctcggcacgaaacttcaaagatgcgggttctacgtttcattgcccaaaatcagaacagggaccccagggagtggaaagcccactttttggaggcagtggatgacgccttcaagactatggacgtggatatggcagaagagcatgcgagagctcagatgcgggctcagatgaatatcggggatgaagccctcataggtagatggagctgggacgatattcaagtggaactactgacatgggacgaagatggagattttggcgacgcatgggccaggattcctttcgccttctgggcaaggtatcaccagtacatcttgaatagtaacagggcgaaccggagagctacatggcgcgctggtgtgtcatctggaacaaacggcggtgcctctacctccgtgctcgacggaccttcaacctcttcaaccattcgcacaagaaatgctgcgcgagctggggctagcttcttcagctggattcagtag

SEQ ID NO: 230108 - DNA, 2274 bp, synthetic construct
  misc_feature 1..2274: note = Description of Artificial Sequence: Synthetic coding sequence
  source 1..2274: mol_type = other DNA
atggccgaagggtcatttagcgttcagtccgagtcttatagtgtggaggacatggatgagggttcagacgaggttggcgaagaggaaatggtcgagggtaacgattacgaagagttcggcgcttttggtgggtatggtacccttacttcattcgacatacatatattgcgtgcttttggcagtctcggtccaggcctcagaatccttagtaacgaaccatgggaattagaaaatcctgtacttgcccaaactctcgttgaagccctgcagctggatccggagactttggcaaatgagactgctgctcgcgctgctaacgtggctcgggctgccgcatcgaatcgcgcagctcgggctgctgctgccgctgctaggactgcattttcccaggtggtggcaagccatcgcgtcgcaacgccacaggtctcaggagaggatacacagccaactacatacgccgctgaggcacaagggccaactcctgagccccctctggcaagcccccagacctcccaaatgctcgtgacttcgaaaatggctgctccggaagctcccgctactagtgcgcagagccaaaccggctctcccgctcaggaggccgctaccgaaggcccatctagcgcctgcgcttttagccaagctccctgcgcaagagaggtggacgctaataggcccagtactgcgttcttgggccagaacgacgtcttcgatttcacccagccggctggggtttcagggatggcattccccaggcccaaacgccctgcaccagctcaggaggctgcaacagagggtccttccgccgcatctggtgtgcctcagactgggcctggcagggaggtagctgctacacggcctaaaactaccaaaagcggtaaagctctcgcaaagacgcggtgggttgagccacagaatgttgtggctgccgcagcagcgaaggccaaaatggccacgtctattccagaaccagagggtgctgccgcagcaaccgcgcagcactcagctgagccgtgggcccgtatgggcggaaaacggactaaaaagagcaagcatctggacgacgagtacgaaagttccgaagaagaacgggaaacaccagctgttccacccacctggcgggcatctcagccgtctctgactgtgcgggctcaactggcccctagaccacctatggctcccaggtctcagatacccagccgtcatgtgctgtgtctgcctccacgaaacgttactctcctccaggagcgggctaataaacttgtcaagtacctgatgatcaaggactacaaaaagattccaatcaagcgcgctgatatgctcaaggacgtgatccgtgagtacgacgagcactttccagagattatcgagagagcaacgtataccctggaaaagaagtttggcatccatctcaaagagatagataaggaggagcacctttacattctcgtgtgcacacgagactcgtctgctcggttactaggaaaaacaaaggacacacctagattgtctttactccttgtgatcctaggtgtgatctttatgaacggcaatcgagcatcagaggccgtgctgtgggaagctttacggaagatgggcctgaggccgggagtacgccacccattcctgggggacctgcgcaagttgattacggacgacttcgtgaagcagaaaaatccagaactgagagaggagactccactctctatggcaccgtcatggtacctggagtacaagaagattcctaactcaaatccaccggaatacgagttcctgtggggcttacgcgctcggcacgagacgtcaaaaatgagggttttacgttttatcgcacagaaccaaaatcgtgatccaagggagtggaaggcccacttcctggaggccgtcgatgacgcgtttaagacgatggatgttgatatggccgaggaacacgcacgtgctcaaatgagagctcagatgaatatcggagacgaagccctgatcggcaggtggagttgggacgatatccaggttgagctcctcacatgggatgaggacggggatttcggtgacgcctgggctcgtattcctttcgctttctgggcaagatatcatcaatacatactcaacagcaatcgcgctaacagacgagcgacatggcgggcaggagtcagctctggaacaaacggaggggctagcaccagtgtactggatggcccttcgacaagtagcactattcggacaagaaacgctgccagggccggagcgagtttcttttcctggatacaacatagatag

SEQ ID NO: 230109 - DNA, 2226 bp, synthetic construct
  misc_feature 1..2226: note = Description of Artificial Sequence: Synthetic coding sequence
  source 1..2226: mol_type = other DNA
atggcagaggggtcattttccgtccagagtgagagttacagcgtggaggacatggacgaggggagcgacgaggttggggaggaggagatggtggaagggaacgattatgaggagttcggcgcattcgggggttatggtactctcacatccttcgatattcatattctgagagccttcgggagtctgggcccaggcctgagaatactctctaatgaaccatgggaattggagaaccctgtgttagcacagacactggtggaggcattgcagctggaccctgagacacttgccaatgagaccgcggcaagggcagcaaacgtggcccgtgcggctgcatctaacagagccgcacgagcagcagccgctgcagcgaggacagcattttcacaagtcgtggctagccatagggtcgcgacaccacaggtgtcaggggaagacacgcagccaactacctacgccgctgaagcgcagggcccaacaccagagccacccttagcaagcccacagacaagtcagatgcttgtaacctctaagatggccgcaccagaggcaccagccactagtgctcaatcgcaaacagggagcccagcacaggaagccgctacggaaggaccatcttcagcctgtgctttttcccaagccccatgtgctcgcgaagtggacgcaaatcgacccagcacagcctttcttggccaaaacgacgtttttgactttacccagccagctggagtgtcgggcatggctttccctcgacccaagcggccagcaccggctcaggaggcggcaaccgagggtccttctgccgctagcggcgtaccacagacaggcccaggtagggaagtagccgcaaccaggcctaaaacaacaaaaagcggaaaggctttagccaagacacggtgggtcgagccccagaatgtagtggcggctgctgctgctaaagctaagatggctacatcaattcccgaacctgaaggtgccgctgctgccactgcccagcactcagcggagccgtgggcaagaatgggcggtaaaaggaccaagaaatcaaagcacctcgatgatgaatacgagtcatctgaggaggagcgagaaaccccggctgtgcccccaacatggagggcatcccaaccgtccctcaccgtccgggcacaactggcgcctcgtccccctatggcaccacgatcccagataccttctaggcacgttctgtgcctgcctcctcgcaacgtaactttgctccaggaacgagcgaacaaactcgtcaagtaccttatgattaaggactataagaagatccccattaagcgcgctgatatgctgaaagacgtgatccgcgagtacgacgagcactttcccgagattatcgagcgtgctacatataccctcgaaaagaagtttggtattcatctcaaagagatcgacaaggaagaacacctatatatcctggtgtgcacgagagactcatcagctaggctgttgggcaaaaccaaagatacgccccgactgtccctcctgctagtgattctcggagtgatttttatgaatggtaatagggcgtccgaggctgtgctgtgggaagccctcagaaagatgggcctgagacctggggttcggcaccctttcttaggcgatctacggaagttgataacagatgacttcgtgaagcaaaagtatttagaatacaagaagattcctaacagcaaccccccagagtacgaattcctctgggggcttcgagccaggcacgagacctccaaaatgagagtgttacgcttcattgcacagaaccagaacagagatcctcgggaatggaaagcgcatttcctcgaggccgttgacgacgcctttaaaacaatggatgtggatatggccgaggagcacgctcgcgctcagatgcgggcacagatgaacatcggtgatgaggccctgattggcaggtggtcttgggacgacatccaggtggagctccttacctgggatgaggatggcgactttggcgatgcctgggcacggatccccttcgccttctgggccagataccatcagtacatcctcaactccaacagggcaaaccggagagccacttggcgagccggtgtgtcaagcggcacgaatggaggtgccagcacctctgtgctcgatgggcctagcacatcctccacaatccgtacccggaacgccgcaagagcaggtgcatctttcttcagttggatccagcatcggtag

SEQ ID NO: 230110 - DNA, 2874 bp, synthetic construct
  misc_feature 1..2874: note = Description of Artificial Sequence: Synthetic coding sequence
  source 1..2874: mol_type = other DNA
atgtccctggtgtctcaaaactcgagacgtagaagacgcagggtcgctaaggccactgctcacaatagctcctggggggagatgcaggcgccaaacgcccctggtcttccagccgacgtgcctggttcagacgtgccacagggacctagtgactcgcagattctccaggggttatgcgcatccgaggggccaagtacttcagtgttaccaacgtccgccgaaggaccttctacttttgtaccaccaactatctcagaggcttcttcggctagtgggcaaccgacaatcagcgaaggcccagggacgtcagtcctgccaacaccctctgaaggactctcaacgtctgggccacccacaataagcaaaggcttgtgtactagtgttacactagcagcttccgaaggaaggaacacaagtcgcccacccacgtcatctgaggagccctccacttcagttcctcctacggcctcagaggtgcctagcacgagtctcccccctactcccggtgaaggcacaagtacatcagtgcctcccacggcatatgaaggtccttccactagcgtggtgcctaccccagacgaaggccctagtactagtgtcctgccaactccaggcgagggtcccggaacaagtgtgccccttgccgctacagagggactctctacatctgtccaggccacacctgacgagggcccatcaactagcgtgccccctaccgccacggaaggtctaagtacacccgtcccacctacacgggatgagggaccctccacttccgtccctgcaaccccgggagagggaccaagcaccagcgtcttaccagccgcatctgatggtcagtccatcagcttggtgcctacccgaggaaaaggctcttctacatccgtgccaccgaccgccacagagggtctcagtacctcggtacagcccaccgcaggggagggcagtagtaccagtgtgccaccaacccctgggggaggcctgtccaccagcgtgccacccactgccacagaggagttgagcacgagtgtaccgcctacgccaggggaaggcccttctaccagtgtgcttcccatcccaggggaagggttatctaccagcgtgccaccaaccgcctctgacggatctgacacttccgtgccacctacaccaggtgagggcgctagcacactcgtacagcccaccgcacccgatgggcctggatcctcagttctgcctaacccaggagaggggcctagcactcttttctctagcagtgcatccgtggacagaaacccgagcaagtgttctctggttctaccgtctcctcgcgtgaccaaagcttccgtggacagcgatagtgagggacccaagggcgcagagggacccatagaattcgaggtgctcagagactgtgaatcacctaactcaatctccataatgggcctcaatacaagccgagtggcgattaccctcaaaccccaagacccaatggagcagaatgtcgcggagcttctgcagtttctgctggtgaaagaccaaagcaagtatccaattcgtgaatccgagatgcgcgagtatatagtgaaagaatacaggaaccagtttcctgagatacttcgcagggctgccgcacatctcgagtgtatattcaggttcgaacttcgggaattggatcccgaggcacatacttatattctactcaacaagctgggtccggtgccattcgaagggctcgaggagtcccccaatgggccaaaaatgggccttctaatgatgattctcggccagatctttcttaacggcaatcaggcaaaagaagcagaaatatgggagatgttatggcgtatgggagtgcagcgtgaacggcgactcagcatctttggcaatccaaaaagattgttaagtgtggagtttgtgtggcagcgatatctcgattacaggccagtgaccgattgcaagccagttgagtacgagttcttttggggaccacggtcccatctcgaaactaccaaaatgaagattctgaagttcatggccaagatttacaataaagacccaatggactggcccgaaaaatataatgaggctctcgaggaagatgccgctagagcctttgccgaaggatggcaggctttgccccattttcgccgtccttttttcgaagaggcagctgccgaggtgcccagtcccgacagcgaagtttcttcctactccagcaagtatgctccacactcctggcctgagtcacggctagaaagcaaagcacgcaaactggttcaattgtttctgcttatggactccaccaagcttccaatccctaagaaggggatactttactacattgggcgagaatgcagcaaagtatttcctgatcttcttaacagggcggctcgtacactcaatcacgtctatggaacggagttagtggtcctcgatcctagaaaccacagttatacgctgtacaaccgcagagaaatggaggagactgaggagatcgtggattctcccaaccggcctggaaataatttcctaatgcaggttttatcttttatcttcatcatggggaatcatgcccgagaaagtgctgtgtgggcattcttgaggggcctcggcgtacaggccggtcggaaacacgtgatcacctgcaggtatttgtcccagcggtatattgattctctgcgggtgcccgacagtgacccagtgcaatacgaatttgtctggggtccacgcgctcgactagaaacctccaaaatgaaagcgctcagatacgttgcccgaattcatagaaaggagccacaggattggccccagcagtatcgggaggccatggaagacgaggctaacagggcagatgtgggacatcgccagatcttcgttcacaacttcaggtag

SEQ ID NO: 230111 - DNA, 1572 bp, synthetic construct
  misc_feature 1..1572: note = Description of Artificial Sequence: Synthetic coding sequence
  source 1..1572: mol_type = other DNA
atgtcattagttagtcagaacgccagacactgcagcgccgaaattacggcagattacggggacggcaggggggagatccaagccaccaacgcaagcggctctcccacatccatgctcgtggtggatgcaccccagtgcccccaggctccgataaattcacaatgtgtcaatacgtcccaggcggtccaggacccaaacgacctggaagttctgatcgacgagcagtccaggcgcctaggagcactgcgtgttcacgatccattggaggaccgatccatcgcgttggtaaactttatgcgaatgaagagtcagactgagggtagcattcagcagtccgaaatgctggaattcctgcgagaatacagcgaccagtttccggagatcctcagaagggcatcagcccacttagaccaggtgttcggcttaaatttgcgagttatcgatccccaggccgacacatataatctggtgtccaagcgaggcttccaaatcacagaccgcatcgcagagtctctggatatgccaaaggccagcctccttgctctcgtactgggacatatcctattgaacggaaacagagcgagagaggcaagtatttgggatctactgctgaaggtagatatgtgggacaaaccccaaaggattaacaacctgtttgggaatactcgcaacctcctgacaaccgattttgtctgcatgcgttttctggagtattggcccgtctacggtacaaaccctctagagtttgagttcctttgggggtcccgcgcacatcgcgagattacaaaaatggaagcactaaagtttgtttccgacgctcatgatgaggagccttggtcctggcctgaagagtataacaaggccctcgaaggagataaaaccaaggagcggagtctcacggcaggtctcgagttctggtctgaggacacaatgaacgacaaagccaacgacctggtgcagttagccatcagcgtgactgaagagatgcttcccatccaccaggatgagctgctggctcacaccggaaaagaatttgaagatgtcttcccgaacatcctgaacagggctacgctgattctggatatgttctatggcctctcgctgatcgaggttgatacctccgagcacatctacctcttggtgcagcagcctgagtctgaggaagagcaggtgatgttagagtcactcggccgtcccacccaggagtacgtgatgcctatcttgggcctgatattcctgatggggaaccgggtaaaagaggctaatgtttggaacctgttgcggaggttttcagtagacgtggggaggaagcacagtattaccagaaagctcatgcggcaacgctacctggagtgccggcctctgagttacagcaaccccgtcgagtacgaacttttatggggcccacgtgctcaccacgaaactataaaaatgaaggtcctggaatatatggctaggctgtatcggaaaagaccccagaactggcctgagcagtacagagaagccgtcgaggacgaggaagcaagagcaaaatctgaggccacaattatgttttttctggatccaacgtag

SEQ ID NO: 230112 - DNA, 924 bp, synthetic construct
  misc_feature 1..924: note = Description of Artificial Sequence: Synthetic coding sequence
  source 1..924: mol_type = other DNA
atgctgcaaacccccgagagtcgcggtctccccgtgcctcaagctgagggtgagaaggatggaggtcacgacggcgagaccagggctcccactgccagtcaggagcgccctaaagaggagctgggcgctggcagagaagagggggcagcagaaccagccctcacacgtaaaggcgcaagagctctggctgctaaagccttggccagacggagggcataccggaggctaaatcgaactgtagctgagctggtgcagtttctgttggtcaaggacaaaaagaagagccctattactaggtcagagatggtgaagtatgtcatcggagacctgaagatcttattcccagatatcatcgccagggccgctgaacacttgcggtacgttttcggttttgaactaaaacagtttgacagaaaacaccatacctacatacttatcaacaaactgaaacccctcgaggaggaggaagaagaggatttagggggtgatggacctagactgggactgttgatgatgatcctgggactgatatacatgagggggaatagcgccagggaagcccaggtttgggaaatgttgagacggctaggcgtgcagccttccaagtaccattttttgttcggctacccaaagcgtctgatcatggaggactttgttcagcagcggtacctgtcgtatcggcgagtcccgcataccaaccccccagaatacgaatttagttggggtcctagatccaatctagaaatatctaagatggaggttctggggtttgtggctaaactgcataaaaaggagccacagcattggcctgtgcagtaccgcgaggctttggcggacgaggctgatcgcgcacgggctaaggctagagcggaggccagcatgagagccagggcttccgccagagcaggcatccacttgtggtag

SEQ ID NO: 230113 - DNA, 396 bp, synthetic construct
  misc_feature 1..396: note = Description of Artificial Sequence: Synthetic coding sequence
  source 1..396: mol_type = other DNA
atggcaaggagccttgtttgccttggagtcatcatccttttgagcgcctttagtggcccaggcgtgcgcggtggccctatgcctaagcttgctgatagaaaactgtgcgccgaccaagaatgttctcaccctatcagcatggctgtggccctgcaggactatatggcccctgattgcagatttctgaccatacaccggggacaggtggtgtatgtcttctcaaagctcaagggtcggggacggttgttctggggaggatctgtgcagggtgactactacggcgacctggccgctagactcgggtacttcccaagctctatcgtcagagaggaccagaccttgaaacctggtaaggtggacgtcaaaacagataagtgggatttttactgccagtag

SEQ ID NO: 230114 - DNA, 642 bp, synthetic construct
  misc_feature 1..642: note = Description of Artificial Sequence: Synthetic coding sequence
  source 1..642: mol_type = other DNA
atggcagaaacttacgactttctgttcaagttcctcgttataggttcagctggcacggggaagagctgcctcttacaccagtttattgaaaataaattcaaacaggattctaatcacacgatcggggtggagttcggatcaagagttgttaacgtagggggtaaaactgtgaagctgcagatctgggacaccgctggccaagaacgatttcgctctgtgacgcgatcctactataggggggctgctggggctttgttggtatatgatatcactagccgcgagacttacaattcgctggcagcctggctcacggacgctaggactctcgcctcaccaaacattgtggtaattctttgtggaaacaaaaaggaccttgaccccgagcgagaagtcacgtttctcgaagcaagccggtttgctcaggaaaatgagctcatgtttttggagacatcagctttaactggagagaacgtggaggaagcttttctgaaatgtgccaggaccatcctcaacaagatcgactcgggggaactagaccctgagcgcatgggttcaggcatccagtacggagacgcaagtctgagacaactgagacaacccagaagcgcacaggcagtcgcccctcagccatgcggctgttag

SEQ ID NO: 230115 - DNA, 366 bp, synthetic construct
  misc_feature 1..366: note = Description of Artificial Sequence: Synthetic coding sequence
  source 1..366: mol_type = other DNA
atggcagagacgtacgactttctattcaaattccttgtgatagggagtgcaggcacaggcaaaagttgcttactgcaccagtttatagagaacaaattcaagcaagatagtaaccatacaataggcgtcgagttcggcagccgggtggtgaacgtagggggtaagactgtgaagctgcagatctgggatacagcgggtcaggagaggttcaggtctgttaccaggtcctactatcggggagccgctggagccttactggtgtacgacatcacacgggctgacgtgcctggggaccagcgaagtcatcggagggaacgcggagggggtgtgccccaggtctgcccgcattatccacaacaagattag

SEQ ID NO: 230116 - DNA, 396 bp, synthetic construct
  misc_feature 1..396: note = Description of Artificial Sequence: Synthetic coding sequence
  source 1..396: mol_type = other DNA
atggccaggtcattggtctgcttaggagtgatcatccttctcagtgccttctcaggccctggagtgcggggagggcctatgccaaaacttgctgataggaagctttgcgccgaccaggagtgctcacacccgatttccatggccgtcgctctgcaggactatatggccccagactgccgattcctgacaatacatcggggacaagttgtgtacgtgttctcaaagctgaaagggcgaggtcgtctgttctggggcggatccgtgcaaggtgactattacggagatctagccgcacgattgggctattttcccagctctatcgtgagagaagaccagaccctgaagccagggaaagtcgatgtgaaaacagatacctcttcgtccaattcgtggtag

SEQ ID NO: 230117 - DNA, 2358 bp, synthetic construct
  misc_feature 1..2358: note = Description of Artificial Sequence: Synthetic coding sequence
  source 1..2358: mol_type = other DNA
atggactccgtgccagctactgtgcctagcatagcagccacaccaggagatcccgagctcgttggcccacttagtgtgctgtacgctgccttcatcgctaagttactggagttggtggcaacactccccgacgatgtgcaaccgggtcctgatttctacggtctgccatggaagcccgtgttcataactgcattcctcggcattgcgtcctttgctatattcctctggcgcacagtcctcgtggtgactgacacactggtatctgtaacagaacagcagatctcagagaaattgaaaacgattatgaaagagaatacagagctggtgcagaagctatctaattatgagcaaaaaataaaggaaagcaaaaagcacgtccaggaaaccagaaagcagaacatgatcctcagtgacgaggcaatcaaatataaagataagatcaagaccctggagaaaaatcaggaaattctggacgacactgctaaaaacctgagggtgatgctggaaagcgaaagggagcagaatgtaaaaaatcaggacctgatctcagagaataagaagtcgattgaaaagctgaaagatgtgatctccatgaatgccagtgagttttcggaggtccagatagcactcaacgaggctaagctatccgaggagaaagttaagagtgagtgccaccgggtgcaagaagaaaacgctcgactgaagaaaaagaaggagcagctgcagcaggagatcgaagattggtcgaaactgcacgccgaactgagcgagcagatcaaaagctttgagaaatcccagaaggacctggaggttgcattgacacacaaagacgacaacatcaatgcgttgacgaactgtatcactcaattaaacctgctggaatgtgaatccgagagcgaggggcagaataagggcggtaatgattctgatgagctcgccaatggggaagtggggggagaccgcaacgagaaaatgaagaatcaaataaagcaaatgatggacgtatcacgtacccagacagccattagcgtggtcgaggaggatctgaagctgctgcagctgaagctcagggcctcggtcagtacaaagtgcaacctcgaagaccaggtaaagaagctcgaagatgatcgtaactctttacaggccgcaaaggccggactggaagatgaatgcaaaacgctgaggcagaaggtggagatcttaaacgaactgtatcagcagaaagagatggccctccagaaaaagctgtcacaggaagaatatgagcgacaggagagggaacatcgcctgtctgcagcagacgaaaaggcagtgagcgctgctgaggaggtaaagacctataagcgtcgtatcgaggaaatggaggatgagcttcagaagaccgaaagaagtttcaaaaatcagattgcaacccacgagaaaaaggcccatgagaattggttgaaggctagagccgcagagagggccattgctgaagagaaaagagaagctgccaatctgagacacaagctcctggagctcacacagaagatggccatgttgcaggaggaaccggttatagttaagcctatgccgggtaaacctaatactcagaatccccctagacggggacctcttagccagaatgggtctttcgggccatctcctgtgagcggcggagaatgctctcctccattgactgtcgaacccccagtgcggccactgagcgctaccttgaataggagggatatgccaagaagtgagttcggcagcgtcgatggacccctacctcatccacgctggagcgccgaggcgagcggcaagccatcaccatcggaccctggaagtggtaccgctacaatgatgaatagttcctccaggggcagttccccaacaagagttctcgatgagggcaaagtcaacatggccccaaaagggccaccacctttccccggagtgccgctcatgagcacaccaatggggggtcccgtacctcctcccattaggtatgggcctcccccacagttatgtggaccctttggacccaggcccctcccacctcccttcggacctggtatgaggcctcccctcgggctcagggagtttgctcctggcgtgccgcctggtcgacgagacctacctcttcatcctcgcggattcttgcctggtcacgccccattcaggccgctgggttcactcggaccacgagagtattttatcccgggaactcgacttccacccccaacgcacgggcctcaggaatatccccctccccctgcggtacgagatttattgcctagcggaagtcgggacgagccccctccggcatcccaatccaccagccaagattgttctcaggcgctgaagcagtcgccttag

SEQ ID NO: 230118 - DNA, 5546 bp, synthetic construct
  misc_feature 1..5546: note = Description of Artificial Sequence: Synthetic coding sequence
  source 1..5546: mol_type = other DNA
atggctgcggcacctggcctgctcgtatggctgctggttttgcgactaccctggcgcgtgcctgggcagctggatcctagcacaggcaggcggtttagcgagcacaagttgtgcgccgatgacgaatgcagtatgttgatgtacaggggagaagcattggaggacttcactggacccgattgtaggttcgtgaactttaaaaagggcgatcctgtgtacgtgtactacaaacttgccagagggtggccagaggtgtgggcgggttccgtgggacggactttcggatactttccaaaggaccttatccaggtcgttcacgagtatactaaagaggagctgcaggtgcccacggacgaaaccgattttgtgtgcttcgatggcggtagagacgactttcacaattataatgtggaggaattgctgggctttctggagctctacaactccgccgctaccgattcagaaaaggctgtggaaaaaaccttgcaagatatggaaaaaaaccctgagctttccaaagaacgggagcccgaacccgagcccgtggaagcgaacagtgaagagagcgattcagtgttctcggaaaacacagaggacctgcaggagcagttcaccacacagaagcaccactcacacgctaattcccaagccaaccacgctcagggtgagcaggcttcttttgagtctttcgaggagatgttgcaggataagctgaaagtccctgagtcagaaaacaataagacctcaaactctagtcaggtatctaacgaacaggataaaattgatgcttacaaattactgaaaaaggaaatgactttggatctgaaaacgaagttcggcagcaccgccgatgcgctggtgtcagatgatgagaccacacgcctggtaacctccctggaagatgactttgacgaggagctggataccgagtactatgccgttgggaaagaggacgaagaaaaccaagaggatttcgatgaattaccattgttgacatttacagacggggaggacatgaaaacacctgctaagtctggggtagaaaagtatcccacagacaaagaacagaattcgaatgaagaagacaaggtacaattgaccgtcccccctggcattaagaacgatgacaagaacattctgaccacgtggggcgacactattttttcaatcgtgaccggcggtgaagaaactagagacactatggatttggagtcttcttcctccgaggaggagaaagaggatgacgatgacgcgctggtacctgacagcaagcaaggcaaaccacagtccgccacagactactccgaccctgataacgtcgacgatggcctttttatcgtagatatccctaagaccaataatgacaaggaggtgaacgcggagcatcatatcaaggggaaaggtcggggtgttcaagagtcaaaacgcggactggttcaagataagaccgaactggaagatgaaaaccaggagggaatgactgtgcatagttcagtccactctaataacctcaactctatgccagcagcagaaaaaggaaaagacaccctcaaaagcgcttatgatgatactgagaacgatctcaaaggcgctgccatacatatctcaaaggggatgctgcacgaagaaaaaccgggagagcagatcttggaaggcggatccgagtcggaaagtgcacagaaggcggcaggtaatcagatgaacgatcgaaaaatccagcaggaaagccttggcagcgcacctctcatgggcgatgatcatccaaatgcctcgagagattctgttgagggtgacgctctagtgaatggagcgaaacttcacacattatctgtcgagcaccagcgtgaggaattgaaggaagagctcgtactgaaaacacagaaccagcccagatttagctcacccgatgagatcgatctgccccgtgagttggaggatgaggtcccaatcttgggcagaaatttaccctggcagcaggaaagggatgtggcagcaacggctagcaagcagatgagcgaaaaaatccgactttcagagggagaagcaaaggaggactcccttgatgaagaattctttcaccacaaagccatgcaggggacagaggtgggtcagaccgaccagactgatagcacgggaggccctgcattcctatcgaaggtggaagaggacgactatccttccgaggaactcctggaggacgaaaacgctataaatgctaagcggtcaaaagaaaagaatcctgggaaccagggcaggcaatttgacgtcaaccttcaggtccctgatagagcggtgctaggaacgatccacccagaccctgaaatcgaagagtctaagcaagagaccagtatgatactggactccgagaagacatctgaaaccgcagcgaagggagtgaatacaggcggaagggaacccaacaccatggttgagaaggaaaggccccttgcagacaagaaagctcagcgcccattcgagcgcagcgatttttctgatagtatcaagatacagacccctgagttaggggaggttttccaaaataaagattcggactacctcaaaaatgacaatccagaggagcacctcaagacctctgggctagctggtgaaccggagggggaactgagcaaggaggatcacgaaaacaccgagaagtacatggggacagaaagtcaggggagtgctgcagctgagcctgaagacgattctttccactggaccccccacaccagcgtggagcctggtcattcagacaaaagggaggaccttcttataatatctagtttcttcaaagagcagcagagcctgcagcgctttcagaagtacttcaatgtgcacgaattggaggcactacttcaggagatgtctagcaaactcaaatcggcccaacaagaatccttgccatataacatggaaaaagtgctggacaaagtgttccgggcttctgagtcccagatattgagcatcgccgagaagatgctggatactcgggtcgcagagaaccgggacctcggcatgaacgaaaacaatatatttgaggaggcagcagtactggacgacatccaggatctgatctattttgtccgatacaaacactccaccgccgaagagacagctactctggttatggcaccaccactcgaagagggccttggcggagccatggaggaaatgcagcccttgcatgaggataatttctctcgcgaaaaaactgccgagctgaatgtccaggttcccgaggagccaacccatctggaccagcgggtgatcggtgatactcatgcttcagaggttagccagaaacctaacacagagaaggacctggaccccggacccgtaaccacagaggatacacccatggatgctatcgatgcaaacaaacagcctgaaaccgccgctgaggaacctgcctccgtgacccctctagagaatgctattttgttaatctacagctttatgttctacctaacgaagtctctcgtggcaactctccctgatgatgtacagccagggcctgatttttatggactcccttggaagcccgtttttattactgccttcctcggtatagcaagttttgccatttttctgtggcggaccgtcctcgtggtgagcaatacagtgtactacgtaacagaacagcagatttcagaaaagctcaaaaccatcatgaaagagaatacagaactcgttcaaaaactgtcaaactacgaacaaaaaatcaaagagtctaagaaacatgtacaagagaccagaaaacagaacatgatccttagcgacgaagcaatcaagtataaggacaagattaaaaccctggagaagaatcaggagatcctcgacgatacagcaaaaaacctgcgggtgatgttggagagcgaacgcgaacagaatgtgaagaaccaggatttgctgcaacaagagatcgaagattggtccaaactgcacgcagagctgtctgagcagataaagagctttgagaagagtcagaaggacctggaagtcgctctgacacataaagatgataatattaacgccttgaccaattgcatcactcagctaaacctgctggagtgcgagtccgaatccgaaggccagaataaggggggtaacgactccgacgagcttgcaaacggagaagtcggcggagatagaaatgaaaaaatgaaaaatcagatcaagcagatgatggatgtttctcgtacccagacagcaataagtgtcgttgaggaagacctgaagctgctgcaattgaaactgcgtgccagcgtttcaacgaagtgtaacctggaggatcaggtcaaaaaattagaggacgatcgcaattctctccaggcagcgaaagccggtctggaggatgaatgtaagactcttaggcagaaggtggaaatcctcaacgaactgtaccaacaaaaggagatggcattgcagaaaaagctgtcgcaggaagagtatgagcggcaggaaagggagcaccgtctcagtgccgctgatgagaaagctgtttccgccgcagaggaagtcaagacctacaaaagaaggatcgaggagatggaggacgaactgcaaaaaacagagaggtctttcaagaatcaaattgctacccatgaaaaaaaagctcacgaaaactggctgaaagccagggccgctgagcgcgctatcgctgaggagaaacgggaggcggctaacctgagacataagctgttggaactcacccagaagatggccatgttacaagaagagccagtgatcgtcaagcccatgccagggaagccgaacacccagaacccacctcgtcgaggaccactctcgcagaacggctcttttggcccttcccctgtgtcaggcggtgaatgcagtcctccgctcacagtcgaaccacctgtgcgtcccctcagcgctactcttaatcgccgtgacatgcccaggagtgagttcggcagtgtggatggtcccctcccacacccacgttggtctgccgaggcttctggcaagccctccccttctgatccaggcagcggaacagccacaatgatgaattcgtcttcacgcggtagtagccctacacgcgttttggatgaggggaaggtgaatatggcaccaaaagggcctcctcccttccccggagttcctctgatgtctactcctatgggtggacctgtgcccccaccaatccggtacgggccaccaccccaactgtgcggacccttcggacccagacctctaccacccccttttggcccaggtatgcgccctccactggggctgagagagtttgcaccgggagtgcctcccggtcggcgagacctccccttgcatcccagaggttttctgccaggccatgcgcctttcagaccactggggagcttaggccctagggaatatttcatacctggcacacgcctgccaccaccaacccacggaccccaggagtaccccccaccacctgcagtacgagatctgctccccagcgggagtcgggatgagccaccccctgcctcccagagcactagtcaggactgctctcaggcccttaagcagtctcctta

SEQ ID NO: 230119 - DNA, 2358 bp, synthetic construct
  misc_feature 1..2358: note = Description of Artificial Sequence: Synthetic coding sequence
  source 1..2358: mol_type = other DNA
atggactccgttcctgccactgtccccagtattgccgctacaccaggggatcctgagctggtgggtcctttgtcggtactgtacgccgctttcattgctaaactgcttgagctcgttgctaccttaccagacgatgtccaacccggaccagatttttacggtttgccctggaagcctgtgtttatcaccgccttcttagggatagcttcatttgcgattttcttatggcgcactgtcctcgtggtaaaggaccgcgtgtaccaagtgacggagcagcagatctctgaaaaactgaaaacaattatgaaagagaacactgagctcgttcagaaactttcgaattatgagcagaagattaaagagtccaagaaacacgtgcaggagactagaaaacaaaatatgatcctgtccgacgaggccatcaagtataaagacaagatcaagactctcgaaaagaaccaggaaattctggacgataccgctaagaacctgcgcgtgatgctggagagcgaacgggagcaaaacgtcaaaaatcaagatttaatttccgagaataaaaaatcaatcgagaaactcaaagacgtcatttctatgaatgcatccgagttctccgaagtacaaattgcactcaacgaagcaaaattgtcggaagaaaaagttaaaagcgagtgccaccgtgtgcaggaagaaaacgccagactaaaaaagaagaaagaacagctgcaacaggagatcgaggattggagcaaactgcatgccgaactaagcgagcaaattaaatcctttgaaaagtcccagaaggacctcgaggttgctttgacgcacaaagatgacaatattaatgctctgacgaactgcataactcagctgaaccttctagagtgcgaatctgaatctgagggacagaataagggagggaacgactctgacgaattggcaaatggagaagtgggaggagacagaaatgagaagatgaagaaccagataaagcagatgatggatgtgtcaagaactcagactgccatctctgtagtggaagaagatctcaagttgttgcagctcaagctcagggcatcggtgagtactaagtgtaaccttgaggatcaggttaaaaaactggaggacgaccgcaattctctgcaggcagccaaggccggtctcgaagacgagtgcaaaaccttgcgacaaaaggttgaaattctgaacgagctctaccagcagaaggaaatggctctacagaaaaagttatcacaggaggagtacgagaggcaagagcgcgagcatcgactctctgccgctgacgagaaggccgtctcagccgcagaagaggtgaaaacctacaaacggagaattgaggaaatggaggatgagctccagaagaccgagagatcattcaagaaccagatcgcaactcatgaaaaaaaagcacatgagaactggcttaaggctagagccgcagaacgagctatcgcagaagaaaaacgggaggccgctaatttacgtcataaactcctcgaactgactcaaaagatggccatgctgcaagaggagccagtgatcgtgaagcctatgccaggaaagcccaacactcagaatccaccccgaagggggccactgagccagaatgggtcattcggcccaagccctgtgtccggaggcgagtgctcccccccactgacagtggaaccacccgtccggcctctctcagccactctgaatcgcagagacatgccacgcagtgagttcgggagcgtagatgggcctttgcctcacccaaggtggtccgcagaggcgagcggaaagccttccccatcagatccaggaagtgggaccgctaccatgatgaactcatctagcagaggaagcagccctacccgtgtcctcgacgaaggaaaggtcaacatggccccaaaaggaccccctccttttccaggggttccactcatgtcaactcccatgggtggacctgtgcctcccccaatccgctacggccctcccccacagctatgcggaccatttggaccacggccactcccacctcccttcgggccaggaatgagaccccctctcggccttcgagaattcgcccctggagtcccgccaggaagacgtgacctaccattgcatcctagggggtttctaccaggccatgctcctttccgccctttgggatcacttggtccccgagagtactttattccaggaaccaggctgccaccccctacgcatggacctcaggaataccctccgccacctgcggtgcgggatctgctcccttcgggatcaagggacgagccgccacctgcctcccaaagtacatctcaggactgttcccaagcccttaaacagtccccatag

SEQ ID NO: 230120 - DNA, 5723 bp, synthetic construct
  misc_feature 1..5723: note = Description of Artificial Sequence: Synthetic coding sequence
  source 1..5723: mol_type = other DNA
atggcagccgctcccggactgctggtatggctgctggtcctgcggttaccatggagagtacctgggcaactggacccttctaccggtcgacgcttctccgaacacaagctgtgcgccgacgatgagtgttctatgctgatgtatcgcggagaggcactagaggactttactggacctgattgccgctttgtgaattttaagaagggagaccccgtttacgtatattataaactcgctaggggctggccggaggtctgggctgggtcagtcggccgaacctttggctacttcccaaaagatcttatacaggtcgtgcacgaatataccaaagaggaattgcaggttccgacagacgagactgactttgtgtgttttgatggtgggagggacgactttcataactataacgtggaggagctcctgggatttcttgaattgtataactccgccgctaccgacagtgagaaggctgtggaaaaaaccctgcaggatatggagaaaaaccctgagctttccaaagagcgggagccagagcccgagcccgtcgaggccaactccgaggagtcagactctgtcttcagcgagaacaccgaggacctgcaggaacagtttacaactcaaaaacatcattcccatgcgaacagccaggcgaatcacgctcagggggagcaggccagcttcgagagcttcgaagagatgctgcaagacaagttgaaagtccccgaatctgagaacaataagacgtcaaatagttctcaagtttccaatgagcaggacaaaatcgatgcatacaaactgctgaagaaagaaatgacgctcgatttgaagactaagttcgggagcaccgcagatgctttagtttcagatgatgagacgacgagactcgttacaagcctggaggatgattttgatgaggaactggatacggagtattacgctgtggggaaggaggacgaagagaatcaggaggattttgatgaactgccactactgacctttaccgatggagaagacatgaagacccccgcaaaaagcggagtggaaaaataccctactgacaaggagcagaactccaatgaagaggacaaggtgcagctcaccgtccccccaggaatcaagaatgatgataaaaacatccttaccacatggggagatacaatcttctccatcgtgacgggtggtgaggaaacccgggatactatggaccttgagtcttctagtagcgaggaagaaaaagaggacgacgacgacgctctagttccggacagcaaacaaggcaagccacagagcgcaacggactacagtgatcctgataatgtggacgacggtctgtttatagtggatatccctaagacaaacaacgataaagaagtcaatgccgaacaccacataaagggaaaggggagaggtgtgcaagaaagcaagcgcggtttggtccaggacaagacggaactagaggatgagaatcaagaaggcatgacagtccactcctcagtccactcaaacaacctcaactcaatgcccgctgcggagaaagggaaggatacccttaaatccgcttatgacgacaccgagaatgacctgaagggtgccgctatccatatttcaaaaggaatgctgcatgaggagaaacctggggagcagattctcgagggcggaagtgagtccgagtcagcccagaaggccgcaggcaaccagatgaacgatcggaagatccagcaagaaagtctgggttctgctccactgatgggggatgatcacccaaacgcaagccgcgattctgtggaaggcgacgccctggtcaatggagccaagctgcatacactgagcgtagagcaccagagggaggaactgaaggaggagctggtgttgaagacccagaaccagcctcggttctcttcccctgacgagatcgatctgcccagagagctggaggacgaggttcctatcctcggtcggaacttgccctggcagcaggagcgagatgtggctgccactgcatccaagcagatgtctgagaagatacgcttgagcgagggtgaagccaaagaggattctttggatgaggaattcttccaccacaaggctatgcaaggaaccgaggtggggcaaacagatcagacagactcgactggagggcctgcattcctttctaaagtcgaagaggacgactatccctcagaggagctgctggaagacgagaacgccatcaatgccaaacgatcaaaagagaagaatcctggcaaccagggacggcagtttgacgtgaacttacaagtgcccgacagggcagtgctgggcactattcaccccgacccggagattgaggaaagcaaacaggagacaagcatgattttagattctgagaaaacaagcgaaaccgctgccaagggagtgaatacgggtgggcgagaacccaacaccatggtggaaaaggagagacctcttgctgacaagaaggctcagagacctttcgaaaggtccgactttagtgactccataaaaatacagactcccgagctgggtgaagtgttccagaataaggacagcgattacttgaaaaacgacaaccccgaggagcacttgaaaacatcggggctggcaggagagcccgagggtgaactctccaaggaagatcatgaaaatacagaaaagtacatgggcaccgagagccagggaagtgcagcagccgaacccgaggacgacagttttcactggaccccacatactagtgtggaaccagggcactctgataaaagagaagacctgttgataatttcgtcattttttaaggagcaacaaagcctccagcggtttcagaagtactttaacgtccacgaactggaggcgctacttcaggaaatgtcctcgaagttgaagtccgctcagcaggagagtcttccctataatatggagaaggttttggacaaggtatttagggcatctgagagccagattctcagtatcgctgagaaaatgctcgacacgcgagtggccgaaaaccgcgacctgggtatgaatgagaacaatatcttcgaggaggccgctgttcttgacgatatacaagatctaatctattttgtgcgatacaaacactcaaccgcagaagagaccgctactctggtgatggcaccacccctcgaggagggcctcgggggagccatggaggaaatgcaacccttacatgaggataacttctccagggagaaaacagctgaactgaacgtccaggtgcctgaggaaccgacgcatttggaccagcgcgtgatcggtgacacacacgcctcagaggtgtctcaaaaaccaaatacggaaaaagatcttgaccccggacctgtaactaccgaggatacccccatggatgccattgatgccaacaagcagccagaaacggccgctgaggagcccgcttcagtgaccccactagaaaatgcaattctattgatttatagttttatgttttacttaactaaatcattagtagccactctacctgacgatgttcaacctgggccagatttctatggcttgccttggaagccagtattcataacagcgttcctgggcattgcaagcttcgctattttcttgtggagaacagttctagtggtgagcaacactgtctattacgtgacggagcagcaaataagcgagaaactgaagacaattatgaaagagaatacagaattggtacaaaagctcagcaattacgagcagaaaattaaggaatccaaaaagcatgtccaggaaacaagaaagcaaaacatgattctgtctgacgaggcaataaagtacaaggataagatcaaaaccctcgagaagaaccaggagatcctcgacgataccgcaaaaaatttacgagtgatgctggaatctgagcgagaacagaatgtcaagaaccaggatttgatatctgagaataaaaagtccatagaaaaactgaaggacgttatcagcatgaacgcttctgagttctccgaggtccagattgcactcaacgaggcaaagttgtctgaagaaaaggtgaagagcgagtgtcatagagtgcaggaagagaacgcgagactgaaaaagaaaaaggagcagctgcagcaagagattgaagattggagcaagctgcatgcagagctttcagaacagataaaatccttcgagaaaagccagaaagatcttgaggtggcgctgactcataaggacgataatataaacgccctgacgaactgtataacccagcttaatttactcgagtgtgaaagcgagagcgagggccagaataaaggtgggaacgatagcgacgagctggcaaacggagaggtgggtggcgacagaaacgagaagatgaaaaatcagattaagcaaatgatggacgtaagccgcactcagacggcaatcagtgttgtggaagaggatctgaagcttctccagctgaaactccgggcaagcgtttccacgaaatgcaatctggaggaccaggtgaagaaacttgaggatgacagaaatagtctccaggcagccaaggcaggactggaagatgaatgcaaaacattgcgccaaaaggtggaaatactcaatgagttgtatcagcagaaagagatggcactccagaagaagcttagtcaggaggagtatgaaagacaggagcgggagcatcggctgtcggcggctgacgaaaaggctgtgtccgctgctgaggaagtcaagacatataagagaagaattgaagagatggaggatgagctgcagaagaccgaacggtcttttaagaaccaaattgctacacatgagaaaaaggctcacgaaaattggcttaaggctagggccgctgagcgggcaattgccgaagagaaacgagaggctgcaaatctgagacataagcttctggagctgactcagaagatggccatgcttcaggaagaacctgtgatcgtcaaaccaatgcctggcaaacctaacactcagaacccaccccgtcgtggccctctgagtcagaacgggtcctttggaccatcccctgtgtccgggggagagtgctcccccccattgactgtagaaccaccggtgagacctttaagtgccacactgaatagaagagacatgcctcggagcgaattcggatcagtggacgggcctctgccacatcctcgctggtctgcggaagcctcaggtaagccaagccccagcgatcctgggagcggcaccgcaacaatgatgaattcaagttctcgcggttctagccctactcgagtgttggacgaaggtaaggtgaacatggcaccaaaggggccacccccattccctggagtcccattgatgtcaacacctatgggaggtccagtgcctcctcccatccgatacgggcctccgcctcaactttgtgggccattcggccctaggccgttacctcccccattcgggcctgggatgcgacctcctctcggcttgagagaattcgccccaggcgtacccccagggcgacgtgatctacctttacacccgcgaggctttctgcctggacacgctccatttaggcctcttgggtcacttgggccaagggagtatttcatacccggaacaagattacctcccccaacacacggaccgcaagagtaccctcctcctcctgcagtgagggatctcctgccaagcggatccagggacgaacctccacccgcttctcagagcacaagccaagactgtagccaggctctgaagcagtcccccta

SEQ ID NO: 230121 - DNA, 1503 bp, synthetic construct
  misc_feature 1..1503: note = Description of Artificial Sequence: Synthetic coding sequence
  source 1..1503: mol_type = other DNA
atggccgcagcccctggattgctcgtctggctgctggtgcttaggctgccatggcgggtgcccggacagctggacccctccacagggcgtcgatttagcgaacacaaactctgcgccgacgatgagtgctccatgctaatgtaccggggtgaagctctggaagattttactggcccagattgtcgattcgtcaactttaagaagggcgaccccgtgtacgtatattacaagttagcccgtggatggcctgaagtgtgggccggaagcgtgggcagaacatttggttacttcccaaaggacctgatacaggttgtgcacgaatatacaaaggaagagctgcaggtgccaacagatgagactgactttgtttgttttgacgggggtcgcgatgatttccacaactacaatgtagaggagctccttgggtttctggagctttataactctgccgcaaccgactcagaaaaggcagtggaaaagacccttcaggacatggagaagaaccccgaactaagcaaagagcgggaaccagaacccgaacccgttgaagcaaacagcgaggaatcagactccgtgtttagcgagaacacggaggatctgcaagaacagttcacaacacaaaagcatcactcccatgccaattctcaggcaaaccacgcgcaaggcgaacaggcctctttcgagagttttgaagagatgctgcaggacaagttgaaagtcccagagagcgaaaacaacaaaacctcgaattcaagtcaagtctctaatgaacaagataaaatcgacgcgtataagttgctgaaaaaagaaatgactctcgacctgaagacaaagtttgggtccaccgccgacgctctggtgtctgatgacgagaccacccggttggtcaccagcctcgaggacgattttgacgaggaacttgatacagagtactatgccgtcgggaaggaggatgaagagaatcaagaggattttgatgagttgcccctgttgacattcaccgacggggaggatatgaaaacccctgccaagtccggcgtcgaaaaatatccaaccgacaaggagcagaacagcaatgaagaggataaggtccagcttacggtgccacctggaatcaaaaacgatgacaagaacattcttacaacatggggcgataccatattcagcattgtgacaggcggagaagagaccagggatactatggatttggaaagcagctcctcagaggaagagaaagaagacgatgatgatgcactggtgcctgacagtaagcagggaaagccacagtccgcaaccgattacagtgaccccgataacgttgatgatggtctctttattgtagatatacccaagaccaataacgacaaggaggttaacgccgaacatcacataaaaggaaaggggaggggtgtgcaagagtctaagcgcggtttggtgcaggacaagactgaattggaagatgaaaatcaggaagggttcaaaacagaacccatcaagctgtag

SEQ ID NO: 230122 - DNA, 5723 bp, synthetic construct
  misc_feature 1..5723: note = Description of Artificial Sequence: Synthetic coding sequence
  source 1..5723: mol_type = other DNA
atggctgccgctcccggtttacttgtctggctgctcgtgctgcggttgccatggagagttccaggtcagctggatccaagcactgggaggaggtttagtgaacataagctgtgtgctgacgatgagtgctccatgctaatgtatcgcggtgaggccttagaggatttcaccgggcctgactgtagattcgtgaacttcaaaaagggcgacccggtctacgtgtattacaagctggcacggggttggccggaagtgtgggcaggttcagtaggtagaaccttcggctacttccctaaagatctgatacaggtagtccacgaatatacgaaggaagagctgcaggtccccacagatgaaacagacttcgtctgttttgatgggggacgtgacgattttcacaactacaatgtggaggagctactaggctttttagagctgtataattcagctgctacggacagcgaaaaagccgtggagaaaacgctgcaggatatggagaagaaccccgagttgtcaaaagagcgcgagccagaacccgaacccgtggaagcaaatagtgaagaatcggatagtgtgttcagtgagaacaccgaggacctacaagagcagttcaccacacagaagcaccactcacacgctaatagccaagccaatcatgctcagggagagcaggcaagcttcgagtcttttgaggaaatgctgcaagacaaactcaaagtgcccgagtccgaaaataacaagacttccaattcttcacaggtgagcaatgagcaggataagatcgacgcatacaaactactaaagaaagaaatgactcttgatctcaagaccaaattcggatccactgctgatgcactggtgtccgacgatgagacaacgaggcttgtaaccagtctagaggatgacttcgatgaagagctggacacagagtattatgccgtgggaaaagaggatgaggagaaccaagaggactttgacgaactgcccctgctcactttcactgacggggaggacatgaagactccggctaagtctggcgtcgaaaaatatcccacagacaaggaacagaattctaacgaggaggataaagtgcagctgaccgtgcctccagggattaaaaatgatgacaaaaacatccttaccacttggggcgacactattttctcgattgtgaccggtggcgaagagactagggacaccatggatctggagagctctagctctgaagaggagaaggaggatgacgacgatgctttagttccggattctaaacagggaaaacctcagtcggcgacagattattcagaccctgacaatgtcgatgatggacttttcatcgtagatattcctaaaacgaacaacgacaaggaggtcaacgccgagcaccacatcaaaggcaagggcagaggagtgcaagagtctaaaaggggactggtccaggacaagacagagttggaggacgaaaatcaggaagggatgaccgtccactctagtgtgcattctaacaaccttaacagtatgccggcagctgaaaagggcaaggatactctgaaatctgcctacgatgatactgagaatgacctgaaaggagcagccatacacatcagcaagggcatgctacacgaggagaagcctggggaacagatcctcgaaggcggatccgagagcgagagcgctcaaaaggcggctggaaaccagatgaacgaccggaagattcaacaagaatcactggggagcgcacctctgatgggggacgaccacccgaatgcctcacgcgactccgtggagggcgatgccctagtgaacggagccaaacttcataccctgagcgtggagcatcaacgagaggagctcaaggaagagttagtgctgaaaacacaaaatcagcctcggtttagcagtcccgacgaaattgacctgccaagggaactggaggatgaagtgcctattctggggagaaatttaccttggcagcaggagcgcgatgtggcagcaactgcatcaaaacagatgtctgagaagattagactatccgaaggcgaagctaaggaagatagcctagacgaggaattcttccaccataaggcaatgcaaggaactgaggtgggtcagacagatcaaactgacagtacggggggtcccgctttcctctcaaaggtggaagaggacgattaccctagcgaggagctgctggaggacgaaaatgccattaatgccaaacgaagcaaagaaaaaaatcctggaaaccaggggaggcaattcgacgtgaatctgcaagtgcctgatcgggctgttctggggactattcaccccgatccggagatcgaggagtcaaagcaggaaacttccatgatcctggattcggagaaaaccagcgaaacagccgcaaagggagtaaatacgggagggagagagccaaacaccatggttgaaaaagagagaccgttggccgataagaaggcccagaggccctttgaaaggagcgatttttccgatagcataaagatccagacccccgaactgggtgaggtttttcagaataaagattccgactatcttaaaaacgataaccctgaggaacaccttaaaaccagtgggctagctggggaaccggaaggagaactaagtaaggaggatcacgaaaataccgaaaagtacatgggcacagaatctcaggggtcagcggctgcggagccagaagatgatagctttcactggactcctcacaccagcgtagaacctgggcacagcgacaaacgtgaggatctcctcattatctcatctttctttaaagagcagcagtccctgcagcgcttccagaaatactttaacgtccacgaacttgaggcactgctgcaggaaatgtcctccaagctgaaatcagcccagcaggagtcccttccatacaacatggagaaggtcctggataaagtattcagggcaagcgagagccagattctctctattgctgagaagatgctggacactcgtgtagcagagaatagggacctgggaatgaacgaaaataacatcttcgaagaggccgctgttctggacgatattcaggacttgatttacttcgtacgctataagcatagtacggcagaggaaaccgccactttagtgatggctccccctcttgaggagggactcggaggagctatggaggagatgcagccactgcatgaggataacttttcgcgggagaagactgcagaactaaacgttcaagtgccagaagagccaacccatctcgaccaacgcgtgatcggcgacactcacgctagtgaagttagccagaagccgaacacagaaaaagacctggacccaggaccagtcactactgaagatactcctatggacgctattgatgctaacaaacaacccgagactgctgcggaggaaccggctagtgtgactccccttgagaacgccattttgctgatctatagcttcatgttttatctcacgaaaagccttgtggccacactgcccgatgacgtgcaaccaggccctgatttctacggtctcccttggaaaccagtcttcattaccgcatttctgggtatcgctagctttgctatcttcctgtggcgaactgtgctggtggtgaaggaccgcgtctaccaggtcacagagcagcaaatcagcgaaaagcttaaaacaattatgaaagagaacacagagcttgttcagaagctgtccaactatgaacaaaagattaaggagtcaaagaagcacgtccaggagacacggaagcagaatatgatcctgtcagatgaagctattaaatacaaagataagataaaaacactcgagaagaaccaagagatactagacgataccgcaaaaaatctcagggtaatgttggaatctgagagggagcagaacgtgaaaaatcaggacctaatttcagagaacaagaaatctatagaaaagttgaaggacgtcatttctatgaacgcatcagaattctcagaggttcagattgcgctcaacgaagctaaactttctgaagaaaaggtcaagagcgaatgtcatcgggtgcaggaagagaacgcacggctcaaaaagaaaaaggaacagcttcagcaagaaatcgaagattggtcaaagctccacgccgagctctccgagcagatcaaatcattcgaaaaatcccagaaggatctggaggtggccttaacccataaggacgataacattaatgccctcaccaattgtattactcagctgaatctgctggagtgcgagagtgagagcgagggacaaaataaaggaggcaacgacagcgatgagctggctaatggagaagttggaggagacaggaacgaaaaaatgaaaaatcagatcaaacaaatgatggatgtgtccaggacacagactgctattagcgtcgttgaggaagaccttaaactgttgcaactgaagctccgagcctccgtatctaccaagtgcaatcttgaagatcaggtgaagaaattggaagatgacagaaactccttgcaggcagccaaggcaggactagaggatgagtgtaagacgttgagacagaaagtggagatcctgaacgaactctatcagcagaaggagatggccctacagaagaaactgtctcaggaggaatacgaacgccaggagcgtgagcacaggctgagcgccgctgatgagaaagcggtgtctgcagccgaagaagtgaagacatataagagacgaatagaagaaatggaggatgagttgcagaaaacagaacgaagctttaagaaccagatcgcaacccacgagaaaaaggctcatgaaaactggctgaaggcgagggctgcagagcgagcaatcgcggaagagaagcgtgaagctgcgaacctgcgccacaagctccttgaattgacccagaagatggcaatgctgcaggaggagcccgtgattgtgaagcctatgcctggaaagcccaatacacagaaccctccaagacgcggacccctcagtcaaaatggcagcttcgggccttccccagtttcaggaggggagtgtagccctccgctgacagtggagccacctgtccggccactttccgccaccctgaatagaagagacatgcctcgctctgagtttggcagtgtagatggccctctgcctcaccctagatggagcgctgaggcttctggcaaaccatccccgagtgacccaggcagcggcactgctaccatgatgaactctagtagccgaggctctagtcctactcgcgtactggacgaagggaaggtaaatatggccccaaagggccctcctccattccccggtgttcctttgatgagcacacccatgggcggacccgttccccctcctatccgctatggcccaccccctcagctgtgcggcccattcgggcctaggccactaccccctccatttgggccaggcatgaggcctcccttaggattacgggagttcgctccaggagttcctccagggaggcgggatctgcctctgcaccccagggggtttctgccagggcacgccccatttcggcctctcggcagcttgggacctagagagtacttcatacctgggactcgtctgcctcccccaactcatggaccccaggagtaccccccaccaccagccgttcgagatctgctcccaagtgggtcgagggatgagccccctccggcttctcagtccaccagccaggactgttcacaggctctcaagcagtcacctta

SEQ ID NO: 230123 - DNA, 3051 bp, synthetic construct
  misc_feature 1..3051: note = Description of Artificial Sequence: Synthetic coding sequence
  source 1..3051: mol_type = other DNA
tgactggtcccagatagcaagcaagggaaacctcagtccgctactgattattccgaccctgacaatgtagacgacggcctgtttatcgttgatatccccaaaaccaataacgacaaggaggtgaacgctgaacaccacatcaagggtaagggacgcggtgtgcaggagagcaagcgaggcctggtgcaggataagaccgagctggaggatgagaaccaggaaggcatgaccgtgcattctagtgttcactcaaataacttgaactcgatgccagctgccgaaaagggtaaagatacccttaaatcagcctacgatgacaccgaaaacgatcttaagggagccgctatccatattagcaagggaatgctccacgaagaaaaacccggtgagcagatactggaaggcggaagtgaatccgagagcgcacagaaagcggctgggaatcagatgaatgatagaaaaatccaacaggagtctctggggagcgctcccttgatgggggatgaccatcccaacgctagtagggactccgtcgaaggcgacgcgttggtgaatggcgcaaagctgcataccttatccgtggaacaccagcgcgaggagcttaaggaggagctcgtcctgaaaacccagaatcagccaaggttcagtagccctgatgagatcgatctgcccagagaacttgaagacgaagtacccatcttgggacgcaatctcccttggcaacaggagagggacgtcgcagccactgccagcaagcagatgagcgagaaaatacgtctgtctgagggggaggccaaagaagacagcttggatgaggagttctttcaccacaaagccatgcagggtacagaggtagggcagacagaccagactgacagcactggcggacccgcattcctatccaaggtggaagaagacgactacccttctgaagaactcctcgaggacgaaaacgcaatcaatgccaagaggagcaaggagaagaatcccggaaaccagggcagacaattcgatgtgaacttgcaggttcctgatcgagccgttttgggaacaatacaccctgatcctgaaattgaggaatccaaacaggagaccagcatgatacttgatagcgaaaaaacctcagagacggcggctaaaggggtcaacaccggtggcagggagccaaacactatggttgagaaggaacgtccgcttgcagacaaaaaagctcagcgccctttcgagcggtcagatttttccgactccattaagatccagacacccgagctgggagaggtgtttcagaataaggactcagactacctgaagaacgacaacccagaggaacacctgaagacctctggacttgctggagaaccggagggggaactgtcaaaggaagaccatgagaatactgagaaatacatggggaccgagtcacagggttcggcagccgctgaaccagaggatgattctttccactggacgccgcacacctctgtcgagcccggacactcagataagcgggaagatttgctgatcatctcttccttctttaaggaacaacaaagcttgcaaaggttccagaaatactttaatgtgcatgaactagaagcacttctacaggaaatgtcctccaagctgaagtccgcccagcaggagagcttaccttacaacatggaaaaagttttagataaagttttccgggcttcagagtcccaaattctaagcatagctgagaagatgctggacacacgggttgccgagaatcgggaccttggcatgaatgagaataatatcttcgaggaggcagccgtgctcgatgacatccaggacctgatttacttcgttaggtacaaacatagcacagccgaggagactgctactctggtaatggcccctccgctcgaggagggactgggtggggcaatggaagaaatgcagccacttcacgaagataacttcagcagggagaagacggccgaattaaatgtgcaggtgcctgaggaacctacacacctggaccagagagtaatcggagacacgcatgcttcagaagtgtctcagaagccaaacacagagaaggatctggaccctgggcctgtgaccacggaggacacacctatggacgccatcgacgccaacaagcagccagagaccgccgctgaggagcccgcaagcgttactccactggaaaacgccatccttctgatctacagcttcatgttctacctcaccaagtcactggttgctacactgccagatgacgtgcagccaggtccagacttctatggactcccctggaagccggtgttcattacggcctttctcggaattgcctcctttgctatcttcctttggcgcacagtactagtggtgaaagatagagtctatcaggtgactgaacagcagatttcagaaaaactgaagacaattatgaaagagaatacggaattagtccagaaactgagtaactatgaacagaagattaaggagtccaagaagcatgtgcaagaaactagaaagcagaacatgatactaagcgatgaggccatcaaatacaaggacaagatcaaaactctggaaaagaatcaggagattttggacgataccgctaagaatctccgggtaatgctcgaatccgaaagggaacaaaacgtgaaaaatcaggatctgctacagcaagaaattgaagactggtccaaattgcacgcagagttgtcagaacagatcaaaagttttgagaagtcccagaaagaccttgaggtggcactgacccataaggacgacaatatcaacgccctgaccaattgcattacccagttaaacttactggaatgtgagagcgaaagcgagggacagaataagggagggaacgactcggacgagctagccaatggagaagtcggtggggataggaatgagaagatgaagaaccagataaaacagatgatggatgtgtctcgcactcaaacggccatctcggtcgtggaagaagatctcaagcttttgcagctgaagctccgagcttcagtgtccacaaagtgtaatttagaagaccaagtttag

SEQ ID NO: 230124 - DNA, 324 bp, synthetic construct
  misc_feature 1..324: note = Description of Artificial Sequence: Synthetic coding sequence
  source 1..324: mol_type = other DNA
tagtcggcggaagcttctggtaaaccaagtccaagcgacccgggttccggcactgccaccatgatgaattccagcagtcgcggttcttcacccacaagggttctggacgagggcaaagttaacatggctcctaaaggcccaccccctttccccggtgttccactgatgtctaccccaatgggagggcctgtgccaccccctattcgctatgggccacctccccagctatgcggccctttcggacctaggcctctcccaccgccatttgacaaagatggcagaccaggcactgtcgcacacgcttgtaaccccagtacattgtag

SEQ ID NO: 230125 - DNA, 1803 bp, synthetic construct
  misc_feature 1..1803: note = Description of Artificial Sequence: Synthetic coding sequence
  source 1..1803: mol_type = other DNA
atgggtaagaagctggatctgagcaaattaacagatgaggaggctcaacacgtactggaggtggtgcagcgcgacttcgatctgcgcagaaaggaagaggagcgcctggaagcacttaagggcaagatcaaaaaggaatctagcaaaagggagctgcttagcgataccgcacacctcaatgagactcactgtgcaaggtgcctccagccgtatcagttgcttgtgaacagcaaaagacagtgtcttgaatgcgggctatttacatgtaagtcttgcggacgggtgcatccagaagagcaaggctggatatgcgatccttgtcacttggctagggtggtgaagattggatcactcgagtggtactatgagcatgtcaaagcgcgatttaagcgctttggtagcgctaaggtgatccgttccttgcatggcaggctgcaagggggagccggtccagaacttatttctgaggagaggtccggcgacagcgatcaaaccgacgaagatggagaacctggcagtgaggctcaagcgcaggctcagccttttgggagcaaaaagaagaggctgttgagcgtgcacgattttgactttgaaggggattccgacgatagcacccagccacagggtcactctctgcatctctcctccgtgcctgaagcccgagactccccacagtccctgactgacgagagttgtagtgaaaaggctgctcctcataaggctgaaggtctggaggaagcggataccggagcttccggttgccattcccatcctgaggagcagcctacgagcattagcccctctcggcatggggcactggccgaactgtgccctcccggagggtcccaccggatggctctgggaacggcggcagcccttggatccaatgtaattaggaacgagcagttgcctttacagtatttagcagacgtggacacaagtgatgaggagtccatcagagctcacgtcatggcctcccaccattctaagaggcgaggtcgcgcttcatcagaatcacaaatatttgaattgaacaaacatatttcagccgtggagtgcctgctgacctacctggagaacactgtggtgccacccctggctaaaggtctcggcgcaggcgtcagaacggaggcagacgttgaggaggaggcccttagacgtaagttggaagagttgaccagcaatgtatccgaccaggagacctcatccgaggaagaggaagccaaagacgagaaagcggagcctaatagggacaaatctgtcggtccacttccgcaggccgaccctgaggtgggcaccgccgctcaccagacaaaccgacaggagaagtctcctcaggacccaggcgatcccgtccaatataatcggacgacagacgaagagctctccgagttggaagacagagtggccgtcacagcatcggaggtgcagcaggctgagtcagaagtgtccgacattgagtcccgcatagctgcactgcgtgccgctggactgacagtgaaaccttctgggaagcctaggagaaaaagtaacctgcctatctttttacccagggtcgctggtaagcttggtaagcgacccgaggaccctaatgctgacccctctagcgaagctaaggctatggccgtcccctatctgctgcgcaggaaattctccaactctttgaagtcccaggggaaggatgatgattcgttcgatcgtaagagtgtgtataggggctccctcactcaacggaacccgaacgctagaaagggcatggctagccataccttcgctaaacctgtggtggctcatcaatcttag

SEQ ID NO: 230126 - DNA, 1719 bp, synthetic construct
  misc_feature 1..1719: note = Description of Artificial Sequence: Synthetic coding sequence
  source 1..1719: mol_type = other DNA
atgggaaagaagctggacttgtcaaaactgacggatgaagaggcccagcacgtgctggaagtcgtacaaagggattttgatttaagaagaaaggaggaggaaaggctggaagcccttaagggaaaaatcaaaaaggagagctccaagagggagctgctgagcgacacggcgcacctgaatgagacacattgcgcgagatgtctccaaccatatcagctcctggtcaattcaaaacgtcagtgcctggagtgcgggctgtttacctgtaaaagctgtggtcgggttcatccagaggagcagggctggatttgcgatccatgccatctggcgcgagtggtcaaaattggatcactggaatggtattatgagcatgtgaaagcacgctttaagagatttggcagcgccaaagtaatcaggtcacttcatgggagactgcagggcggagcagggcctgagttgatcagtgaagagagatccggcgactcagaccaaactgatgaggatggagaaccgggtagcgaagcacaggcccaagcccaaccatttgggtccaagaagaaaaggctactgagcgtacatgactttgacttcgaaggggacagtgacgactctacccaaccgcagggacacagtctgcatctgtctagtgttcctgaggccagagacagcccccagagcctgactgatgagagttgtagcgagaaggctgccccacataaggccgagggtctggaggaagccgataccggggctagtggctgtcactcccacccagaggagcagccgacaagcataagcccaagccgacatggggcattggccgagctgtgcccgcctgggggtagccaccgcatggctctgggcactgcggctgcgctcggaagtaacgttatccggaacgagcagctgcccctccagtaccttgccgacgtggatacttccgatgaggaatcaattcgcgctcacgtcatggccagtcatcacagtaagaggcggggtagagcatcctctgagagtcagggcttaggggctggtgtccgtaccgaggcagacgtcgaggaggaagcgcttagacgtaaattggaagagctcaccagcaatgtgagtgatcaggaaacgagctctgaggaggaagaggccaaagacgagaaagctgagcctaacagggacaagtctgtcggcccattaccccaggcagatccggaggttggtaccgccgctcatcaaactaatcgccaggagaagtccccacaagatcccggagatccagtgcaatacaacagaaccactgatgaggagttgtctgaactggaagatcgagtggccgtgactgcctcagaagtacagcaggcagagtccgaggtctcagatatcgagtcccggatcgcagcattgcgggcagccggactcacagtgaaaccgtcagggaagcccaggcgtaaatccaaccttcccatcttcttgccacgggtcgccggtaaattgggcaagagacccgaagatcccaacgcagacccttccagcgaggctaaggcgatggcggtgccatacctgctgaggagaaagttctctaacagtcttaagtctcagggaaaagacgatgactccttcgataggaaatcagtgtaccggggaagtctgactcagcggaaccctaacgctcggaaagggatggcctcccacacttttgcgaaaccagtggtggcacatcaatcctag

SEQ ID NO: 230127 - DNA, 396 bp, synthetic construct
  misc_feature 1..396: note = Description of Artificial Sequence: Synthetic coding sequence
  source 1..396: mol_type = other DNA
atggggaagaaactggacctgtctaaactgacagacgaagaagcccaacatgttttggaagtggttcagcgtgatttcgatcttagaagaaaggaggaggagcggctagaggccctcaagggaaaaatcaaaaaagaatccagcaagcgggaactgctgtccgatacagcccatcttaacgaaacccactgtgccaggtgtctccagccctatcaactgctggtcaattccaaacggcagtgcctcgagtgtggacttttcacttgcaaatcctgtggcagggttcaccctgaggagcagggctggatctgcgatccttgtcacctggccagggtggtgaaaattggatccttggaatggtattacgagcatgttaaagccaggtttaagaggtag

SEQ ID NO: 230128 - DNA, 213 bp, synthetic construct
  misc_feature 1..213: note = Description of Artificial Sequence: Synthetic coding sequence
  source 1..213: mol_type = other DNA
atgggcaaaaaactcgatcttagtaaactgacagacgaggaggcccagcatgttctcgaggtggttcagagagatttcgacttgcggagaaaagaagaagagcggcttgaggccctgaagggtaagatcaaaaaagagtcctccaaacgcgagcttttatccgacacggcccatcttaacgaaactcactgtgccagatgcttacaaccctag

SEQ ID NO: 230129 - DNA, 1656 bp, synthetic construct
  misc_feature 1..1656: note = Description of Artificial Sequence: Synthetic coding sequence
  source 1..1656: mol_type = other DNA
atgggaaagaaattggatctgtccaaactgacagatgaggaggctcagcacgtgctggaggtcgtacagagggattttgacctaaggagaaaggaagaggagaggctggaggcactgaaaggaaagattaagaaggaatcatctaaacgggagctcttaagcgacacagcccaccttaatgagacccattgtgctcgctgcttgcagccctatcaactgctcgttaactctaaacgccagtgcctggaatgcggtctgtttacttgcaagagctgtggtcgcgttcacccagaggaacaggggtggatctgcgacccctgtcatcttgctagggtagtgaaaatcggatcactcgagtggtattatgagcacgtcaaagccagatttaaaagattcggttcagcaaaggtaatacgtagcctgcacggacggctgcaaggcggtgccggaccggagctgatctctgaagagagatcaggggatagcgatcagaccgatgaagacggcgagcctggaagcgaggcccaggcccaggcccaaccctttggctctaagaagaagaggctcttgtctgttcacgactttgactttgagggcgacagtgatgattctacacaacctcagggacacagccttcatctctccagtgtgccggaggctagggactcgcctcagagcctgacggacgaaagctgctctgaaaaggctgcccctcataaggctgaagggttagaggaggcagataccggcgctagtggttgccatagccatcctgaggagcagcccacttctatctcacctagtaggcacggtgccctcgcagaactgtgccctcccggaggcagccacagaatggcgcttggcacagcagctgccctggggagtaatgtgataaggaatgagcaactgcccttgcagtatttggccgacgtggacacgagtgatgaggagtcaattcgagcacacgtcatggcaagccatcattcaaagcggaggggcagagccagcagcgagtctcagatcttcgagctcaacaaacacatttcagccgtggaatgtctgcttacctatctagaaaacacagtggtaccacccctcgccaaagggctgggagcaggcgttagaacggaagcggatgtggaagaggaagccttaaggcgaaagctcgaggagctgacttccaacgtgtcagaccaggaaacgtctagtgaggaggaggaggcgaaggatgagaaagctgaacctaatcgggataagtctgtgggtcctctcccacaggcggatccagaagtcggaactgccgcacaccagaccaatagacaagagaagagtccccaggaccctggagaccccgtacagtataaccgcactaccgacgaagaactcagcgaattggaggatcgcgtggctgtaacagcatccgaggtgcagcaggccgaatccgaagtgtccgatattgagagtaggatagctgcattgagagctgcaggattgacagtcaaaccctcgggcaagcctaggagaaaaagcaatttgccggcattgtatgaggggacgttaagtctctgttccgaagacctgaagcacacacaccctgactctgtgaagtccaagagatctagattgaaccatgttgcatcctgtgggaatccctag

SEQ ID NO: 230130 - DNA, 675 bp, synthetic construct
  misc_feature 1..675: note = Description of Artificial Sequence: Synthetic coding sequence
  source 1..675: mol_type = other DNA
atgggtctgagggactggttaagaacagtgtgttgttgctgcgggtgcgaatgcctggaggagcgagctctccccgagaaggagcctttggtgagcgacaacaatccttacagttcctttggggctaccctggtcagggatgacgagaaaaatctgtggtccatgccacacgacgtgtcacacacagaggccgacgacgacaggacgctctacaatctgattgttatcagaaaccaacaagcgaaggattccgaagagtggcagaaactgaattacgatattcacacactccgtcaggttcggcgagaagttagaaaccgctggaagtgtattctggaagatctcggattccaaaaggaggccgacagtctgctgtcggttacaaaactttcaactatctccgattcaaagaacaccaggaaggcaagagaaatgctgctcaagctggctgaagaaaccaatatctttcctacgtcctgggagctttccgagaggtacctattcgtagtggaccgactgatcgccttagacgcagctgaggagtttttcaagctagcaagaaggacttatcctaagaagcccggagtcccatgcttggcggatggtcaaaaagaactgcacttgtggggagacctgtcctgccgtctggcacacatgcagggggtactgcattag

SEQ ID NO: 230131 - DNA, 645 bp, synthetic construct
  misc_feature 1..645: note = Description of Artificial Sequence: Synthetic coding sequence
  source 1..645: mol_type = other DNA
atggggctgcgcgactggttacgtaccgtctgttgctgttgtggatgtgagtgcctcgaagagcgcgctctaccagagaaagaaccactggtaagcgataacaatccctacagttccttcggcgctactcttgttcgggacgatgaaaagaacctctggtctatgcctcatgatgtgtcccacacagaagccgacgatgataggaccttatataacctgatcgttataagaaaccaacaggctaaggactctgaggagtggcagaagctgaattacgatattcatacacttcgccaagttaggcgtgaggtaaggaaccggtggaaatgtatcttagaagacttaggctttcaaaaggaagcggattctctgctgagcgtgactaagctgtctaccattagtgacagtaaaaacacccgtaaggcacgggagatgctgctcaaattagctgaagaaaccaatatcttccccaccagttgggaattgagcgagagatatttattcgtggtagatcgtctgatcgccctcgatgccgctgaggaattcttcaagctggctcgtaggacataccccaagaaaccgggtgtcccttgccttgcagatgggcagaaagagctgcactatctgcctttcccctctccgtag

SEQ ID NO: 230132 - DNA, 645 bp, synthetic construct
  misc_feature 1..645: note = Description of Artificial Sequence: Synthetic coding sequence
  source 1..645: mol_type = other DNA
atgggtctgcgcgattggctgagaactgtttgctgctgttgtggctgtgaatgcctggaggaaagggctctgccagagaaagagccgcttgtctccgacaataacccatattccagcttcggggctacgctagtgcgcgatgacgagaagaatctctggtccatgccacatgatgtctcccataccgaagctgatgacgatcggacactgtataatctgatcgttattcgtaaccagcaggcaaaagactccgaagagtggcagaagctgaactatgacattcatactctccggcaggtaagacgagaggttagaaaccgatggaaatgtatcctggaagacttggggtttcagaaggaagctgacagcctgcttagtgtaaccaagttaagcaccattagtgattcaaaaaatacgcgcaaggcccgagagatgctgctcaagttggctgaggagaccaatattttccctacttcctgggaactgagtgagaggtatcttttcgtggtggaccggctgatagctctcgacgccgcagaggaattcttcaaactcgccagaagaacctaccctaagaaaccgggagtcccatgtcttgctgacggccagaaagagttacactaccttccctttccatcgccctag

SEQ ID NO: 230133 - DNA, 1053 bp, synthetic construct
  misc_feature 1..1053: note = Description of Artificial Sequence: Synthetic coding sequence
  source 1..1053: mol_type = other DNA
atgcaaggcaatggatctgcactgccaaacgcctcgcagccggtcctgcggggtgatggcgctcggccttcgtggctggccagcgccctggcttgcgtgttgatttttaccattgtggtggatattctgggcaatttgctggttatcctctctgtctaccgcaacaagaagcttcgaaatgcaggtaacatcttcgttgtgtcattagctgtggcagatttggtggtagccatatatccataccctttggtcctcatgtcaattttcaataacggttggaatttaggctacctccattgccaggtgtccggctttctcatgggactgtctgtaatcggatcaatcttcaacataactggaatcgccataaataggtactgttatatctgccacagccttaagtatgataagttatattcatctaagaattccctgtgctacgttttacttatctggctgctgacgctggcagccgtgctcccaaacctacgggctgggacactgcagtatgatcccagaatttactcatgtaccttcgctcagtctgtgtctagcgcgtacacaatagccgtggtggttttccacttcctggtgcccatgatcattgtgatattctgttacctgcgcatctggatactagtgctccaagtaaggcaaagagttaaaccagaccggaagcccaaattgaagcctcaggattttagaaacttcgtgaccatgtttgtggtgtttgtgctgtttgcgatatgctgggcccctcttaactttatcgggctggcagtcgcgtctgatccagcctccatggtgccacgcataccggagtggctatttgtggcaagctattatatggcgtatttcaattcttgcctgaacgctatcatttacgggttgctaaaccagaatttccgaaaagagtacaggcgaataattgtctccctgtgcacggctcgcgtgttcttcgtggatagttcaaacgacgtggccgaccgggtcaaatggaagcccagccctctgatgacaaacaacaacgtggtgaaggtggattctgtatag

SEQ ID NO: 230134 - DNA, 1089 bp, synthetic construct
  misc_feature 1..1089: note = Description of Artificial Sequence: Synthetic coding sequence
  source 1..1089: mol_type = other DNA
atgtcggagaacggatcattcgccaattgctgtgaagcgggtgggtgggcggtaaggccaggttggagtggagccggaagcgcccgaccatcaagaactcccaggccaccctgggtggcccctgcactcagcgcagttctcatcgtgacaaccgcagtagacgtggtgggcaacctgctggtcatcctctctgtcctccgcaatcgaaaactgcgcaacgcaggaaatctgttcctcgtgtctctggccttggccgatcttgttgttgccttttatccctatccgcttatcttagtggccatattttacgatggctgggccctaggagaggaacactgtaaggcctcagcctttgttatgggtttaagtgttattggcagcgtgttcaatatcaccgctatcgctatcaatagatattgctatatctgtcatagcatggcttaccaccggatttaccgccgatggcatacgccgctgcatatctgccttatatggctcctgactgtggtcgcccttctgcccaattttttcgtcggcagtttagaatacgaccctcggatttattcatgcacttttattcagacagcgagtacacagtataccgcggctgtcgtggtgatccattttctactccctatcgccgtcgtctccttctgctatctgaggatttgggtcctggtgctgcaagcccgacgaaaggccaagccagagagcaggctgtgcctgaagccatctgacctgcggagcttcttaacaatgtttgtcgtctttgtgatctttgcaatttgttgggccccactgaattgtataggtctggcggtggcgatcaacccacaagaaatggccccacagattccggagggactctttgtgacttcatacttacttgcatacttcaactcctgtttgaacgctattgtttacggcttgctcaatcaaaatttcagacgggaatataaacgtattctgctagctttatggaatcccagacactgtatacaggacgcctccaaggggtcccacgctgaaggactccaatctcccgcaccccctatcatcggggtccagcaccaggcagacgccttatag

SEQ ID NO: 230135 - DNA, 3864 bp, synthetic construct
  misc_feature 1..3864: note = Description of Artificial Sequence: Synthetic coding sequence
  source 1..3864: mol_type = other DNA
atgagtaaggtgatccagaagaaaaaccactggacgtcacgtgtccacgaatgcacagtgaaaaggggacctcagggagagcttggcgtgactgtccttggaggcgctgagcacggggaattcccctatgtgggggctgtggcggctgtggaggccgcaggtctccctggcggtggcgaaggaccaaggttaggggagggtgagctgttactggaggtacagggtgtgcgggtttctggcttgcccagatatgacgtgctcggcgtgatcgattcctgtaaggaagccgtaacctttaaggccgttagacagggtggacggctgaacaaggacctgagacactttctgaatcagcggtttcagaaaggctcccctgatcatgagctgcagcagaccatccgggataatctctaccggcatgccgttccatgcactacccgttcccccagagagggagaggtccctggagttgattataatttccttactgtgaaggagttcctcgatctggagcaaagtggcaccctgctcgaggtggggacctatgagggcaactactatgggacaccaaagcccccttctcagccggtttcaggtaaagtcattactactgacgccctgcattcactgcagtctgggagcaaacagtctactccaaaacgcactaagagctacaatgacatgcaaaacgctggaattgtgcacgctgaaaacgaagaggaggacgacgtgcccgagatgaactcaagcttcaccgccgattcaggtgagcaggaggagcatactctgcaagaaaccgctctccctcctgttaattcatccatcatcgcggcaccgataactgatccttcccaaaaattcccacaatatctaccgttgtccgcagaggacaatctgggccctctaccagagaattgggagatggcgtacactgagaacggagaggtgtacttcatcgatcataacacaaaaaccacaagctggttggacccaaggtgcctgaacaaacaacagaagccccttgaagagtgtgaagatgatgagggagtacataccgaagagctggacagcgagttggagctgcccgctggctgggagaaaattgaggaccccgtgtacggcatctactacgtggatcatattaacaggaagacccagtacgagaaccctgttcttgaagctaagcgcaaaaaacagctagaacaacagcaacagcagcagcagcagcaacagcagcagcaacagcaacagcagcaacagcagaccgaggagtggactgaggatcattccgctttagtccctccggttattcctaatcacccccctagcaaccctgagccagccagggaggtgcccctccagggcaagccattcttcaccaggaacccctccgagctcaagggtaaatttatccacaccaaattgcgaaagtcatcccgagggtttggatttacagttgtcggtggggatgagcctgacgaatttctgcaaataaagagtctcgttcttgacggaccagccgcactggatgggaagatggagacgggggatgtaatcgtgagtgttaacgacacctgtgtgctcggccacacacacgcccaggtcgtcaagatcttccagtctatcccaatcggggcatcagtggatctcgaactctgtcgcggatatcccttgcccttcgatcccgacgatcccaacacctcccttgttacatccgttgctattctggataaagaaccaatcattgtcaacggccaggagacatatgacagccccgctagtcattcctccaaaacgggcaaggtgaatggtatgaaggatgccaggccctcatcacctgccgacgttgcaagcaactcttcccacgggtacccaaatgatacggtctcattggcctcctccattgccactcagccggagctgatcaccgttcacattgtaaagggtcccatggggttcgggttcaccatcgcagactctcccggtggaggaggacagcgcgtcaaacagattgttgactcgccgaggtgcagaggtctgaaggagggggacttaatcgtggaagtgaataagaagaatgtgcaggctctaacacacaaccaggtcgtggacatgctggtcgagtgccccaagggatcagaggtgacgttgttagtccaaagagggggattaccagtgcctaaaaagtcgcccaagtcgcagcctcttgaaagaaaagatagccagaacagctcccagcattccgtaagcagtcatcgaagcctgcataccgcctcgcctagccactccacccaagttctgccagagtttccccctgctgaagctcaagcacccgatcagaccgacagcagtggacagaagaagccagatccgtttaaaatctgggcccaaagcagaagcatgtacgagaacaggcccatgtccccctcgccagcatccggactatctaagggcgagagagagcgtgaaatcaacagtacgaacttcggcgagtgccccatccccgattaccaggagcaggatatcttcttatggaggaaggagaccggtttcgggttcagaattttaggcggaaacgagccgggagagccaatatatataggacatatcgtccccctcggggctgcggataccgatggtcggctgcgctctggagatgaactgatatgcgtggacggtactcccgtgattgggaagtcccaccagctggttgtgcagctgatgcagcaggccgctaaacaaggccatgtcaaccttaccgtccggagaaaggttgtgtttgctgttccaaagacggagaacgaggtgcccagccccgcttcgtcccatcattcttccaatcagcctgccagcctcacagaagagaaacggacaccccagggatctcagaattccctcaacacggtgtcatcaggctctgggtcgactagcggcatagggtcagggggtgggggaggttctggcgtcgtatctacagtagtccagccgtacgacgtcgagattagacgaggcgaaaacgaggggttcggctttgttatcgtgtcttccgtgtcccgcccagaagcgggaacaacatttggaaatgcttgtgtggcaatgccacacaagatcggacggatcatcgagggtagccccgctgaccggtgtgggaaacttaaagttggggataggatcttggccgtaaatgggtgtagcattactaacaaatctcattccgacatcgtgaacctgataaaggaggcagggaatactgtgaccctgcgcatcattcccggagacgagtcaagcaatgctacactgttgaccaatgctgaaaagatcgctacaattaccaccacccacaccccatcccagcaaggcacgcaggagacaagaaacacaactaaacctaagcaggaatctcagttcgagttcaaagctccacaggcaacccaggaacaggatttctataccgtggagctcgaacggggtgctaaagggttcggcttttcccttcggggaggcagggaatacaacatggatttatatgtgctcagactcgccgaagacggccctgctgagcgctgcggaaagatgcgaattggagatgagatcctggaaatcaacggagaaacaacaaaaaacatgaaacactcccgcgcaatcgagctgatcaagaacggaggtcgcagggttagactcttcctgaaacgcggtgatggatcggttccagagtatgccatgattcccccaaacatagcagcctgtatgaggaacgagaagctcggagaggcctgtttctatctgatgggccacaaccagacaactacaccagccgctaccgctacggccccaccgcctgtgcacaaggtttttagaaagtag

SEQ ID NO: 230136 - DNA, 4389 bp, synthetic construct
  misc_feature 1..4389: note = Description of Artificial Sequence: Synthetic coding sequence
  source 1..4389: mol_type = other DNA
atgtcgaaggtaatccagaaaaagaaccactggacctcccgggttcacgagtgtacagtaaaacggggaccccaaggagagctcggggtgaccgtcctaggcggagccgaacatggagagtttccttacgttggcgcagtggctgctgtagaagctgctggcctccctggtggaggggagggcccaaggctgggagaaggagagctgctgctagaagtccaaggagtccgcgtgtctggactccccagatacgatgtgcttggtgtgattgattcgtgtaaggaagctgttaccttcaaggcagtccggcagggaggcagacttaataaagacctgcgacactttctgaaccagcggttccaaaaaggatcccctgaccacgagcttcagcagaccattcgggataacctgtaccgacacgccgtgccgtgcaccacacggagcccgagagagggagaagttccaggcgttgattacaacttcctgacggtgaaagagttcctggacttggagcaaagcggtacccttttggaagtgggaacatatgaaggcaactactatggcacccctaagcctccgagtcaacctgtatcaggcaaggtcatcaccactgacgcccttcacagcttgcaatctgggagtaaacagtctactccaaagcgtactaagagctacaatgatatgcagaatgcaggaatagtccacgccgaaaacgaagaagaggacgatgttccggagatgaactcctcttttacggctgactcaggtgagcaagaggaacatactctgcaggaaactgccttgccccctgtgaactcaagcatcatcgccgctccaattaccgatccttcacaaaaattcccccagtacttgccactgtctgccgaggataacctcggaccattgccagagaactgggagatggcatacacggagaatggagaggtttactttatcgatcataataccaaaaccaccagctggctcgatcctcggtgtcttaataagcagcagaagccattggaagagtgtgaagacgatgagggcgtccacacagaggagctggatagcgaattagagctgcctgcaggatgggaaaaaatcgaggatccagtctacggaatatattatgtcgatcatattaataggaaaacacagtacgagaatccggttctggaagctaaaagaaaaaaacaattggagcagcaacagcagcagcagcagcagcaacagcagcaacagcagcaacagcagcagcagcagacagaggagtggaccgaagatcattccgctctggtcccacccgtaattccaaatcatcctcctagcaaccccgagcctgcgagggaggtgccgctccagggcaaaccgttcttcactaggaaccctagtgaactgaaaggcaagttcatacacacgaagcttaggaagtcctcgagaggctttggcttcacagtcgtgggtggcgacgagccggatgaattcctgcagattaaatcactggtactggatggcccagccgcactagacgggaaaatggagaccggtgacgtgatcgtttcggtgaacgacacatgcgttctgggccatacccacgctcaggtcgtcaagatttttcaatctatcccaatcggagctagcgttgatttagaactgtgtcgaggatacccactcccctttgatccggacgaccccaatacaagcctggtaacctcggtagcgatcctagataaggagccgatcatcgttaacggccaagagacttacgatagcccggcatcgcacagtagtaaaaccgggaaggttaatggaatgaaggatgctcggccaagcagcccggctgatgtggcgagcaactccagccacggttatcctaatgacactgtatctttagcctccagtattgccacccagcccgaactgattacggttcacattgtgaaggggcctatggggtttgggttcactatagctgacagtcccggtggaggaggacagcgagtaaagcaaatagtggactccccccgttgtcgcggattgaaggagggggacctgatcgtcgaggtgaacaaaaagaatgtgcaggcccttacacacaatcaggtggtggacatgttagtggagtgtcctaagggctctgaggtgacgcttctggtacagagaggaggattgcccgtccctaaaaaaagtccaaagtcccaacccctcgagcgtaaggattcacaaaactcttctcaacattcagtttccagtcacaggtcactacacacggcttccccaagccatagtacccaggtgctaccggaattccccccagccgaggcccaagcccctgaccaaaccgattcaagcggtcagaaaaagccagatccatttaaaatctgggctcagtcaaggtccatgtacgagaataggcttccagattatcaggaacaggacatcttcctttggcggaaagaaacaggctttggatttcggatactcggcggaaacgagcccggagaaccgatttacattggccacatcgtccccctgggggctgccgacacagatgggagactgcgatcgggtgacgagctgatatgcgtcgacggtacccctgtgatcggtaagagccaccaactggttgtccaactgatgcagcaagctgccaaacagggccacgtgaatctgaccgtgcgtcgcaaggttgttttcgccgtgccaaaaactgagaacgaagttccaagccccgcttcttctcaccacagttcaaatcagcctgcctccctgacggaggagaagcggacaccgcagggcagtcagaattcccttaatactgttagctcaggcagtggctcaacaagcggcatcggttcggggggtggcggaggctccggtgttgtgtccacagttgtgcagccgtatgacgtcgaaattagacgaggagagaatgagggctttggtttcgtgattgtgagttctgtcagccggcctgaagcaggtacaactttcggcaacgcgtgcgttgccatgcctcacaagatcggcagaatcatcgagggttcccctgccgataggtgcggcaagcttaaggtcggcgataggatactggccgtgaatgggtgttccatcactaataagtcacactctgatatagtaaacctgattaaggaagcaggtaacactgttaccctgaggataattccgggagatgagtcctccaatgcaacgctccttaccaacgccgagaaaattgccacaattactactacccatacaccctcccagcagggaacccaggagacccgaaataccaccaaacctaaacaggaatcccagtttgagttcaaggcccctcaggccacgcaggaacaagacttctacactgtggaattggaaaggggcgctaagggctttggctttagcctgcggggaggtagagagtataacatggacctttacgtgctgaggctggctgaggacgggccagccgaacggtgtggaaagatgcggataggggatgaaattctcgaaatcaatggcgagaccactaaaaacatgaagcacagtagggctattgaactcataaagaacggcggaagaagagtcaggttattcctgaagcgtggagatggctccgtccctgagtacgacccgtctagcgaccgccacgggcctgctaccggtcctcagggagtgcctgaagtccgggcaggcccagatcggagacagcatcctagcttagaatctagttaccccccagatttacacaagagctctcctcatggagagaagcgggctcatgctagagaccctaagggtagtagagagtacagccggcagccaaatgagcatcacacatggaatggcacaagtaggaaaccagactccggggcttgccgcccaaaggacagggcccctgagggacgccgagatgcccaggccgagcgggcagctgctgccaacggccctaaacggaggtctccagagaagcggagagaagggacccgctctgccgacaatacgcttgagagacgcgagaaacatgaaaaaagacgggacgtatcacctgaaaggagaagagagaggtcccctactaggcgtcgggacggcagcccatcacgaagacgacgcagtttagagagactcttagaacagagacgtagccctgagcggcgacgcggtggctcgcccgagcgaagagcaaaaagcaccgacaggagaagggcacgcagtccagaaaggagaagagaaaggtctcttgataaacgaaatcgagaggacagagcttctcacagagaaagggaggaggcaaacctgaagcaggacgccggtcgatctagcagacaccctcctgaacagcgcagacgaccatacaaggaatgttctactgatttgagcatatag

SEQ ID NO: 230137 - DNA, 3552 bp, synthetic construct
  misc_feature 1..3552: note = Description of Artificial Sequence: Synthetic coding sequence
  source 1..3552: mol_type = other DNA
ggtgggagactgaataaggacctgaggcacttcctgaatcaaagattccagaaaggatcgccggaccacgaattgcagcagacaattcgggacaacctgtacaggcatgccgtgccatgtaccacgagaagccccagggagggcgaagtgcccggtgttgactataacttcctaacagtaaaagagtttctggatctggagcaaagtggtacgttactggaggttggcacttacgaggggaactactacggcacacctaagcccccaagccagcctgtctctggaaaagtgattaccaccgacgctctccacagccttcagtctggaagcaaacagtccacacctaagcgaaccaaatcttataacgatatgcaaaacgccggaatcgtgcatgccgagaatgaggaggaagacgatgtgccagagatgaatagcagtttcactgccgactccggcgagcaggaggagcatacactgcaggagactgccttgcccccagttaacagcagtatcatcgccgcacctatcacagatcctagccagaaattccctcagtaccttcctttaagcgctgaagacaacctggggcctttgcccgagaattgggagatggcatacaccgagaacggtgaagtgtacttcattgaccataacaccaagaccacgagctggctggaccctcgatgccttaataagcagcagaaacccctggaggagtgcgaggacgacgagggagtccacacagaggaactcgacagcgaattggaactccccgctggctgggaaaaaatagaagacccagtctatggcatctactatgtagatcacatcaaccgaaagacacaatatgagaacccagttctggaggcgaaaagaaaaaagcagcttgagcagcagcagcaacagcagcaacaacagcagcaacaacagcagcaacagcagcagcagcaaaccgaagaatggaccgaggaccattctgctctggtgcctccagtgatcccgaatcaccctcccagcaatccggagccagccagggaagtaccactgcagggtaaacctttctttacacgtaatcccagcgaacttaagggcaagttcatacacacaaaactgcgaaagagttctcggggattcgggttcaccgtggtgggaggggacgagccagacgagttcctccagatcaaaagcctggtgctggacggtcctgccgcacttgatgggaaaatggagacaggcgacgtcatagtgagcgtgaatgatacatgcgtgctgggccacacacacgcgcaggtcgtgaagattttccagtccattcccattggtgcatcagtggacctggagctgtgcagaggataccctctcccttttgatcccgatgaccctaatacttctctggttaccagtgtggccatactggacaaggaacctattatagttaatggacaggagacatacgattctcccgcatctcattctagcaaaacgggcaaagtcaatggcatgaaagacgccagacctagctccccagctgatgttgcgagtaatagcagccacggctaccctaacgacacagtcagtctggcctcctcaatcgcaacgcagcctgagctgatcacagtccacatagtgaaggggccaatggggttcggcttcacaattgctgattcccccggaggaggaggccagagggtgaagcagatcgtcgatagcccaagatgtcggggactgaaagagggtgatctaatcgtggaagttaacaaaaagaacgtgcaggcgctcacccacaatcaggttgtggatatgctcgtggagtgtcctaaaggcagcgaagtgaccctgctcgtgcagagggggggtctccccgtacctaagaagagtccaaagagtcaaccgctggaacggaaagactcacagaactcttcacagcactcagtttctagtcaccggagcctgcacactgccagcccatctcattccacccaagtactcccggagtttccgccagccgaggcacaggccccagaccaaactgatagctccggccagaagaaacctgacccatttaaaatatgggcccagagcagatctatgtatgagaataggcctatgtcgccttcacctgcttccggattgagtaaaggcgagagggagcgagagattaactccactaacttcggcgagtgccccatccccgactatcaggagcaggacatcttcctgtggaggaaggaaaccggctttggatttcgaatattaggaggtaacgaacctggcgaaccaatctatattggacacatagttccactaggcgctgcagacacggatggtagactgcgaagcggggatgagttgatttgcgtcgatgggactcctgtgatcggcaagtcccaccagctggtagtacagttaatgcagcaagctgccaagcagggccacgtgaatttgactgtaagacggaaggtggtgtttgctgtgcctaagaccgagaacgaggtaccctctccggcaagctcccatcactccagtaaccagcccgctagccttactgaggagaagcggacccctcaggggagtcagaattctctgaacacagtgagctccggcagcggcagcacttcgggcatcggcagcgggggaggcggagggtccggggtggtctcaaccgtcgtccagccctacgacgtcgagatccgtcgtggcgagaatgagggtttcggctttgtcatcgtttcctccgtgagccgaccggaggctggtactacctttggaaacgcctgtgttgccatgccgcataaaattgggagaatcatcgagggatctcccgctgataggtgtggtaagctcaaggtgggagacaggatcctagccgtcaacggctgcagcatcaccaacaaatcgcactctgacattgtgaatctcataaaagaggcagggaacaccgtgacacttaggattattcccggagacgagagtagcaatgcaacacttctgactaacgccgaaaagatcgcaactatcactacaactcatactccatctcagcagggcactcaagagactcgtaataccaccaagccaaagcaggagagccagttcgaattcaaggcccctcaggcaacacaggagcaggatttctacaccgtggagttagagcgcggtgcaaagggatttggattcagtttgaggggcggaagagagtacaacatggatctgtatgtcctgcgcctggccgaggatgggcctgccgagcggtgcgggaagatgagaattggggatgagatcctggaaatcaacggcgaaaccacaaaaaatatgaaacattctcgcgctatagaactcatcaagaacggcggtaggagggtgaggctgttcctgaagcgcggagatggctcagtgcctgaatatgccatgatcccccctaatattgccgcatgtatgcgcaatgagaagcttggtgaagcctgtttctacctcatgggtcacaaccaaaccaccactccagcggctaccgctacagcgccaccaccagtacacaaggtgtttaggaagtag

SEQ ID NO: 230138 - DNA, 3771 bp, synthetic construct
  misc_feature 1..3771: note = Description of Artificial Sequence: Synthetic coding sequence
  source 1..3771: mol_type = other DNA
atgagcaaagtgattcaaaagaaaaatcactggacttctcgggttcacgagtgtaccgtaaagcgcggtccacagggtgaattaggtgtaactgtcctcgggggtgctgagcatggagagttcccctacgttggcgcagtggccgctgtggaagcagctgggctcccagggggaggtgaaggacctcgcctgggcgagggtgagttgttgctggaggtacagggggtacgggtgtccgggctcccaaggtatgacgtgctcggcgtgatagactcctgcaaggaagcagtgacattcaaggccgtgcgtcaggggggacgcctgaataaggacctccggcacttcctgaaccagaggttccagaagggcagccccgaccacgagcttcaacagactatacgggataacctgtacaggcatgccgttccctgtacaactcggtcacccagggaaggcgaagtgcctggtgtggattacaacttcctgacagtcaaggaattccttgacctggagcaatctggtacattactggaagtcgggacttacgaagggaactattatggaacgccaaagcctccaagccagcctgtttcggggaaagtgatcactaccgatgccctgcattctcttcagtcggggagtaagcagagcactccaaaaagaacaaagtcgtataacgatatgcaaaatgctgggatcgttcacgctgaaaatgaggaggaggacgacgtacccgaaatgaatagtagcttcactgcagacagcggtgagcaggaggagcacaccttgcaggagacagcacttccccctgtcaattcatctatcatagctgctcccatcaccgatcccagccaaaaatttccacagtatctcccactgagcgctgaggataacctgggtcctctgccggagaactgggaaatggcatatacagaaaacggtgaggtttattttattgaccataacacaaaaacaacatcttggctggaccctcggtgtctgaataagcagcaaaaaccacttgaggagtgcgaggatgacgagggggtgcacactgaggagctggactccgaactcgagctaccagccggttgggagaagattgaagaccccgtctatgggatatactacgtagaccacataaatcgcaagactcagtacgagaacccagtgctggaagcaaagaggaagaagcaattggagcagcagcagcagcagcagcaacagcaacagcaacagcagcagcagcaacaacagcagcagacagaagaatggactgaggatcattctgcactcgtgcccccagtaattccaaatcaccctcccagcaacccagaaccggctagggaggttcctctgcagggcaaaccttttttcactcgcaatccaagtgaactcaaagggaaattcatacacactaagctaaggaaatctagcaggggcttcggcttcacggtggtcggtggggacgaacccgacgagttcttgcagatcaagtctctcgtactggatgggccagcagccctagacggtaagatggagactggggacgttatcgtatcagtcaacgatacttgcgtgctgggccatacccacgctcaagttgtgaagatattccagagtattcccattggggcatcagtcgatctggagttgtgccgcggttaccctctccccttcgaccctgatgacccaaacacctcactcgtaacttcggtggcaatattggacaaagagcctatcatcgtgaacgggcaagagacctacgattcccccgcatcgcactcctctaagactggaaaggtcaacggtatgaaagatgccagaccctcgtcacccgctgacgttgctagcaattcatctcatgggtatcctaatgacaccgtctcactagcctccagcatcgcaactcagcccgagctcattacggtgcacatcgtgaaggggccaatgggctttgggtttacaattgccgacagtccgggaggcggtggccaaagggttaagcagatagtcgactcgcccaggtgtaggggccttaaagagggtgacctgattgtagaggtgaataagaaaaatgtccaggcactcacgcacaatcaggtggtggatatgctcgttgaatgcccaaagggatctgaggtcaccctgttggtgcagcggggtgggctgcccgttcctaaaaaaagtcccaagtcccagccattggagcgcaaggattcccaaaactctagccagcattccgttagctcacatcgcagcctgcataccgcctcaccatctcactccacccaagtgctgcccgaattcccaccagcagaggctcaggcaccagaccagactgattctagtggccagaaaaaacctgacccattcaagatttgggcacagagtcgtagtatgtacgagaaccgcccaatgagtccaagccccgcttccggactttccaagggagaacgggagcgggagattaacagtaccaacttcggggagtgccccattcccgactaccaagaacaggacatttttctttggcggaaagagactgggttcgggttccgcattctggggggaaacgaacctggagaacctatctatatcggacatatcgtacccctaggcgctgccgacactgatggacgcctgcggtccggagatgagctgatctgtgtggacggcacaccagtcatcggcaagagtcaccagctggttgtgcagctcatgcaacaggccgcaaagcagggtcatgtcaatctgacagtcagacgcaaggttgtctttgcggtgccaaagaccgagaatgaggtcccatctccagcaagctcccatcacagcagcaaccagccagctagcttaaccgaggaaaagcggacacctcaagggtctcagaacagtcttaacactgtgtcctcggggtccggtagtacgtctggaattggctctggcggtggcggtgggtccggggtagtcagcaccgtggtacagccgtacgacgtggaaatacggaggggtgaaaacgaggggtttggctttgtgatcgtgagttccgtgtctagacccgaagccggaactaccttcgccggaaacgcttgcgtggctatgccacacaagatcggcagaattatagagggtagtcctgccgatagatgtgggaagctcaaagtcggcgaccggatccttgctgtgaatggctgttctataactaacaaatcccactcagacatcgtgaatctgatcaaagaagctggcaacactgtgactctgcgcatcatccccggtgatgaaagcagcaacgccaccctgctcaccaatgccgagaagatagcaaccatcactacaacccacaccccctctcaacagggtacccaggagacccgtaatactactaagccaaaacaggaatcacagtttgagtttaaggcccctcaggccacccaggagcaggatttttacaccgtcgaactcgaacgcggtgccaagggatttggtttttcactccggggtggtcgagaatataacatggatctgtatgttctgagactggctgaagacggccctgcagaaagatgtgggaaaatgaggattggggatgaaattttggagatcaatggcgaaaccactaaaaatatgaagcatagtcgagcaattgagttaattaagaacggtggccgtcgagttagattgttcctgaaaaggggagacggttcagtgcccgagtacggagggtcaaactatgaaaacattccctccttccccggaatgacaccctag

SEQ ID NO: 230139 - DNA, 1488 bp, synthetic construct
  misc_feature 1..1488: note = Description of Artificial Sequence: Synthetic coding sequence
  source 1..1488: mol_type = other DNA
atggcagctgagccccagccaagctccctttcctaccggaccaccgggtccacttatttgcatcccctgtctgagctgcttggcattccgcttgaccaggtgaatttcgtcgtgtgccagttggtggcactgtttgctgccttctggttccgaatttatctgagaccgggaacgacatcatctgacgtacggcacgctgtggcgacaatctttgggatatatttcgttattttctgtttcggctggtattccgtgcatctcttcgtcttggtactgatgtgctacgctattatggttaccgctagcgtcagcaacattcaccggtattctttcttcgtggcaatgggctatctgacgatttgccacataagtaggatttatatcttccactatggaatcctgacaactgatttctcagggccactgatgatcgtgactcagaaaatcaccaccttggcgtttcaggtgcatgatgggctgggtaggagggcggaagatttgagcgcagagcagcatcgattagctatcaaggtcaagccttccttcttggaatatttatcctacctgctgaactttatgagcgttattgccggaccttgcaataattttaaagattatattgccttcatcgaggggaaacatatccatatgaaattgcttgaggttaattggaagagaaagggatttcattccctccctgagccttctcccaccggcgctgtgatccataagttgggtattactttagtaagccttctcctgttcctgaccctgaccaagacttttcccgtgacctgcctagtggatgattggtttgttcacaaagcttcttttccagccagattatgttatctttacgtcgtgatgcaggctagtaaacctaaatactatttcgcatggactctggcagacgccgttaataacgctgccggattcggtttctctggcgtagataaaaacggcaacttttgttgggatctattgtcgaatctaaacatctggaaaatagagaccgctactagttttaaaatgtatttagagaactggaatattcagactgctacctggctcaagtgtgtatgctaccagcgagtgccgtggtaccctacagtgttaacctttatcctgagcgccctgtggcatggggtgtatccaggatattacttcaccttccttactgggatccttgtgaccctggcagccagagccgtgaggaacaactatagacattacttcctgagctccagggctctgaaggcagtctatgacgccggtacttgggcagtgactcaactggcagtgtcctacacagttgccccttttgtgatgttagcagtagagcccaccatctccctgtacaagtctatgtatttctacttacacatcatttcgttactgataattctgtttctccctatgaagccgcaagcgcacacgcaacgccgtccgcagaccctgaattctattaataagcggaagaccgattag

SEQ ID NO: 230140 - DNA, 726 bp, synthetic construct
  misc_feature 1..726: note = Description of Artificial Sequence: Synthetic coding sequence
  source 1..726: mol_type = other DNA
atggcagcagaacctcagccctcttcactgtcttacagaacaacagggtcaacttatctgcaccccttaagtgagttgctcggaattccccttgaccaggtgaattttgtagtgtgtcagttggtggccctttttgcagcgttttggtttcgcatttatctcagacctggaactacaagttctgacgttcggcatgccgtcgcgacaatattcggaatttattttgtgatattttgcttcggttggtacagtgtccacttatttgtgctcgtcttaatgtgctatgccattatggtgaccgcctccgtgtctaatatccacaggtactcattttttgtggctatggggtatctgactatttgtcatatcagcaggatctacatatttcattatggaattctgactaccgacttttcaggccctctgatgattgtaacccaaaagattaccacccttgcctttcaagtgcacgacgggttgggccgaagagccgaggacctctcagcagagcagcacaggctcgcaattaaagtcaagccctcgttcctcgagtaccttagttacctgctgaactttatgtccgtgatagccggaccatgcaataacttcaaggactatatagcctttattgagggcaagcatatacacatgaaactgctggaggtgaactggaagcggaaggggttccactccctgcccgagccctcacccactggtcacctgtag

SEQ ID NO: 230141 - DNA, 1041 bp, synthetic construct
  misc_feature 1..1041: note = Description of Artificial Sequence: Synthetic coding sequence
  source 1..1041: mol_type = other DNA
atggagttttctctgaggatcttcttgggactcgggcgtagggcagaggatctgtccgccgagcaacatagattagccatcaaggtcaagccaagcttcttagagtatctatcatacttgttgaattttatgtctgtcattgctggtccttgtaataattttaaagactacatagcattcattgaaggcaaacacattcacatgaaactgttagaggtgaattggaaacgcaaagggttccatagccttccagagccgtctcctaccggagctgtaatacataagctgggaatcacacttgtcagccttctgctgtttctgaccctgactaagacattccctgtgacctgtctggtcgacgattggtttgtacataaggcttccttcccggcacggctctgttatctgtacgttgtaatgcaggctagcaagccaaaatattatttcgcctggacacttgctgatgctgtaaacaacgctgccggatttggtttctctggcgttgacaaaaacgggaatttctgttgggatctactgagcaatttaaatatctggaaaattgagaccgccaccagcttcaaaatgtacctggaaaactggaatatccagacagccacttggctgaaatgtgtgtgctatcagcgggtcccttggtacccaaccgtgcttacattcatcttatcagccctgtggcacggggtatacccaggatactacttcacattcctgactggcattctagtcacactcgctgcgcgagctgtcagaaacaactaccgtcactactttctcagctcgagggctctgaaggccgtgtacgatgctggaacctgggcggtcacccaactcgctgtgagttacaccgtcgcacctttcgttatgttggcagtggagccgacaatctccctgtacaaatccatgtatttttatctgcatattatatctctcctgatcatcctgttcttacccatgaagccccaggcccacacccaacgcagaccccaaactcttaactccatcaacaagcggaaaacagactag

SEQ ID NO: 230142 - DNA, 1563 bp, synthetic construct
  misc_feature 1..1563: note = Description of Artificial Sequence: Synthetic coding sequence
  source 1..1563: mol_type = other DNA
atggcgaccacttctactaccgggtccactctgttacaaccgctctctaacgcagtgcaattgcccatagaccaggttaattttgtcgtttgccagctcttcgcactcctggctgccatctggtttaggacctatttgcattccagcaaaacatcttcatttattagacacgtggtagccactcttctgggactgtacctggctctcttctgcttcgggtggtacgctctacacttcttagtccagtcaggcatctcttattgtataatgattattatcggcgtggagaacatgcacaactactgcttcgtgtttgccctgggctacctgacggtatgtcaagtcaccagggtctacatcttcgactacggacagtattctgccgattttagtggaccaatgatgataataacacagaagatcacatccctggcctgtgagattcatgatggaatgttccggaaagatgaggaactcactagtagtcagagagatctggctgtgcggcgaatgccttccctgcttgagtatttaagctacaactgtaattttatgggtatcctggcgggacctctgtgctcctacaaagactatatcactttcatcgaaggacgctcttatcacataacccaatcgggagaaaatggaaaggaggaaacacagtatgagaggaccgaaccatctcccaataccgccgttgtgcagaagttactcgtttgtgggttatcactgctattccaccttacaatttgtaccactcttccagttgagtacaacatcgacgagcactttcaggccactgcatcatggccaacaaagattatttatttgtatattagcctgcttgcagctcggcctaagtactactttgcatggactctggcagacgcaatcaataatgcagcgggatttggctttcggggttacgacgagaatggagctgctcgctgggacctgatatccaacctgcgcattcagcagatcgagatgtccacgagctttaaaatgttcctagacaactggaatattcagacagcactctggttgaagcgcgtgtgttacgaacggacctctttctccccaactatccaaacctttatactgagtgccatctggcacggtgtttacccgggttactacctcaccttcttaaccggcgtacttatgaccctagcggctcgtgctatgagaaacaattttagacactacttcattgagccaagtcagctgaagttgttctacgatgtgattacgtggattgtcacccaggtcgccatctcatatacagtggtcccgtttgttctcctcagcattaagcccagtctgactttttactcctcctggtattattgtctgcacatcctgggcatccttgtgctcttgctgttacctgtgaaaaaaacacagaggcggaaaaacacccacgagaatatccagctgtctcagtcaaagaagttcgatgaaggcgagaactcactgggccagaactccttttctactactaacaatgtctgcaatcaaaatcaagaaatcgcttctcgacacagcagcctgaagcagtag

SEQ ID NO: 230143 - DNA, 1308 bp, synthetic construct
  misc_feature 1..1308: note = Description of Artificial Sequence: Synthetic coding sequence
  source 1..1308: mol_type = other DNA
atggagtggctgtggctgttttttttgcacccaatatccttctaccagggagctgctttcccttttgcactgttatttaattacctgtgtatcatggactctttcagcacccgagctaggtatttgttcctgctcaccggcggaggcgctcttgcggtcgcggcaatgggttcctacgctgtcttggtatttaccccagcagtctgcgctgtggcactcctgtgctctcttgcaccgcagcaggttcataggtggacattctgcttccagatgagctggcaaacactgtgtcacctgggtctgcactacaccgagtattatcttcatgaaccaccttctgtgcggttctgcattacactgagctccctgatgctgctgacacaaagggttacaagtctgtcactggatatctgcgaaggaaaagtcaaggcagcatccggaggttttcgttctcgttcgagcctgagcgagcatgtctgcaaagccttgccatatttttcctacctgctgttcttccctgcacttttgggagggtctctatgttcctttcagcggttccaagcacgcgttcaagggagctctgccttacaccctcgacatagtttctgggctctgtcctggaggggccttcagatactcggactggagtgcctcaatgtcgcggttagcagagttgttgatgctggcgcaggactcactgactgtcaacagtttgagtgtatttacgtggtctggactacagcaggccttttcaaattgacctactatagtcactggattctggatgattcccttcttcacgccgctggctttggcccagaactgggacagagcccaggcgaagaaggctatgtgccagacgccgacatctggaccttagagcgcacccacagaatcagtgtgttttcgcgcaaatggaaccaaagcaccgccagatggttgaggcggttggtgttccagcacagccgcgcatggccactgctgcaaacctttgccttttcagcatggtggcatggtctgcatcccggtcaagtattcggattcgtgtgctgggccgtgatggtggaggctgactacttgatccactccttcgcaaacgagttcattcggtcctggcctatgcggctgttctatcggacgctgacatgggcgcacacacagttaataatcgcctacatcatgctcgccgtcgaggtgcgctcactgtcatccttgtggcttctgtgcaactcatataactccgtcttcccaatggtctattgtattctcctgttgctgctggctaagcggaaacacaagtgcaactag

SEQ ID NO: 230144 - DNA, 1341 bp, synthetic construct
  misc_feature 1..1341: note = Description of Artificial Sequence: Synthetic coding sequence
  source 1..1341: mol_type = other DNA
atgacactcaaggcctctgagggggaatcaggcggatcaatgcacacagctctgtctgatctgtatctggagcatttactgcagaagaggagtcggccagaggccgtgtctcaccctcttaatactgtcactgaggatatgtacaccaacggatcaccagcccctggaagccccgcacaggtaaaggggcaagaggtccggaaggtgagactgatacagtttgagaaagtgactgaggagcccatgggtatcacactgaagctgaatgagaaacagtcctgcaccgtcgcaagaatccttcatgggggtatgatccaccggcagggctctctgcatgtcggggatgaaattttggaaatcaatggaacgaacgtgaccaaccacagtgtggatcagctacaaaaggctatgaaggagacaaagggcatgatcagtctgaaggtcatacccaaccagcagtctagactaccggctctccaggaggcaggtttgaagttcgccacgggcgatatcattcagataataaataaggatgacagtaattggtggcagggccgagtggagggatctagtaaagagagtgctggtctaatacccagcccggagttgcaggaatggagagtggcctcaatggcacagagcgcccctagcgaagcaccatcctgctcaccttttggaaaaaagaaaaagtacaaagacaagtatctggccaaacactccagtatctttgaccagcttgatgtagtgagctacgaggaagttgtccgattacccgctttcaaacgtaagacgttggtactcatcggagcgtccggagtgggcagatctcatattaagaacgctctgctgtcccaaaaccccgaaaagtttgtctaccccgtcccatacaccactagacccccaagaaagtctgaagaggacggcaaagagtatcactttatctccaccgaggagatgacaagaaacatctccgccaatgagttcctggagttcgggagttatcagggtaatatgtttggcaccaaattcgaaacagttcatcagattcacaaacagaacaagatcgccatactcgacatagaaccccagacactgaaaattgtgcgtacggctgaattatctcccttcattgtgttcattgccccaaccgatcagggcacacagacggaggctctgcaacagctacagaaggactccgaggcaatcagaagccagtatgctcattatttcgacctgtcactcgtaaataacggcgtggatgaaaccctcaagaagctccaagaagctttcgaccaggcatgtagcagtccacagtgggtgcctgtctcctgggtatactag

SEQ ID NO: 230145 - DNA, 1401 bp, synthetic construct
  misc_feature 1..1401: note = Description of Artificial Sequence: Synthetic coding sequence
  source 1..1401: mol_type = other DNA
atgaccctgaaggcctctgagggggaaagcggaggctcgatgcatacggctttaagcgacttgtatctcgagcacctgctccagaagaggagtcggcctgaggccgtctctcatcctttgaacacggtcaccgaggatatgtacactaacggaagccccgcacctgggtcccccgctcaggtgaagggacaggaagttcgcaaagtccgtctgatacagtttgaaaaggtgaccgaagaacctatgggcatcaccttgaaattgaacgaaaagcaaagctgtacagtggcgagaattcttcatggcggtatgatccaccgtcagggctccctgcacgtgggagatgagattctggagattaatggaactaatgtgactaatcattcggtggaccagctgcagaaagccatgaaagagactaagggtatgatatccttgaaagtgattcctaaccagcaaagcagactccccgcactgcaaatgttcatgcgagcccagttcgattacgatccaaaaaaggataacctcatcccttgcaaagaagccggactgaaatttgcaaccggagatatcatccagatcataaataaagatgattcaaattggtggcagggtcgggttgagggctcttctaaggagtctgccggactcattccatcacctgaacttcaagaatggcgagttgcctctatggcccagagcgcccctagcgaggctccgagctgctcccccttcggcaaaaaaaagaaatacaaggacaaatatcttgctaagcattccagcatcttcgatcagctcgatgtggtcagctatgaggaggtcgtgagacttcctgcgttcaagaggaagaccctagtgctgatcggagcctcaggcgtgggcaggagccacatcaaaaacgccctactctcacaaaaccctgaaaagtttgtgtatccagtcccttacactacacggcctcccagaaaatccgaggaggacgggaaggaataccatttcatatctacagaagagatgacccgtaacatctctgccaatgaatttctggagttcggttcatatcagggcaacatgtttggaaccaagtttgagactgtccaccagattcacaagcagaacaaaatcgctatcctggacatcgaaccgcagacgttgaagatagtgcgaactgccgaattgagcccctttatcgtctttatcgccccaactgatcagggcacacagaccgaagctttacaacagctccagaaggactccgaagcgatccggagccagtatgcccattattttgaccttagtctggtcaataatggggtcgacgagaccctcaagaaacttcaagaggcctttgatcaagcctgtagttccccccaatgggtccctgtttcatgggtgtattag

SEQ ID NO: 230146 - DNA, 1311 bp, synthetic construct
  misc_feature 1..1311: note = Description of Artificial Sequence: Synthetic coding sequence
  source 1..1311: mol_type = other DNA
atggaatcatgggctgtgagtcaccctctgaataccgtgactgaggacatgtataccaatgggagtcccgcaccaggttcacctgcccaggtgaagggccaggaggtgagaaaggttcgactgattcagtttgagaaggtgaccgaggagcctatgggtataactctgaaattgaacgagaagcagagttgtacagtcgcccgaatactgcacggcggaatgatccatcggcaggggtcgctgcacgtgggagacgagatactggagattaatggtaccaacgtcacaaaccacagcgtggatcaacttcagaaagccatgaaggagactaaggggatgattagcctgaaggtaattccaaatcagcaatctagactgccagccctgcagatgttcatgagagcgcaatttgactacgatcctaagaaggataacctgatcccctgcaaagaggctgggctgaaattcgctaccggggatatcattcagatcataaacaaggatgactccaactggtggcagggaagagtggaaggcagttccaaagaatccgcagggttgatcccttcacctgaattacaggaatggagggtggcatctatggcccagtcagcccctagtgaggccccatcttgttccccattcgggaagaagaaaaagtataaagacaagtacctggccaagcacagctctattttcgaccaactagatgtcgtgtcctatgaggaggtggtccgcctgccggcatttaagcgcaaaacccttgtgctgataggggcttcgggcgtgggcagatcccatattaaaaacgctcttctgagtcaaaatcctgaaaagttcgtgtatcccgtgccctacaccacaagacccccacgcaaatctgaagaggatgggaaggagtaccactttataagcaccgaggagatgactagaaatatttccgccaacgaattcttggagtttggctcatatcaggggaatatgtttggcactaagttcgaaactgttcaccagatccacaagcagaataaaatcgctattctggacattgaaccccagacactcaaaatcgtaaggacagccgaattgtcaccctttatcgtatttatcgcaccaacagaccagggcacccaaactgaagccttgcagcagcttcagaaggattcggaagcaattagaagtcagtatgctcattatttcgacttgtcgcttgtcaacaatggtgtagatgagactttgaaaaagcttcaagaggcctttgaccaggcttgctcttcccctcaatgggtgccagtaagctgggtgtactag

SEQ ID NO: 230147 - DNA, 1659 bp, synthetic construct
  misc_feature 1..1659: note = Description of Artificial Sequence: Synthetic coding sequence
  source 1..1659: mol_type = other DNA
atgcccgtagccgcaaccaacagcgagacggcaatgcagcaagtcctcgacaatctgggctcactgcctagtgcaactggggcagccgagttggatctgatctttctccgcggtattatggaaagccccattgttcgatctcttgccaaggcccatgaacgcttagaagagaccaagcttgaggccgtacgggataataatctggagttggtacaagaaatccttcgggatctcgcccacgtggctgagcaatcgagcactgcagccgagctggcacacatcctgcaggagccacattttcagtccctgctggagacacacgactcggttgcttctaagacctatgagaccccccctccatcccccggtctggaccctaccttctcaaaccaacctgtcccacctgatgcagtgagaatggtcgggattcgtaaaacagcaggtgagcacctcggagttactttcagggtcgaaggcggagagctggtgatagcacgaatcctgcacgggggtatggtagcacagcaagggctgcttcatgtgggggacataatcaaagaggttaacgggcaaccagtgggcagcgatccgcgagccttgcaagagctccttcggaacgctagtgggtccgtgatcctaaagatactgccttcatatcaggagcctcaccttcctagacaggtgtttgtcaaatgccactttgactatgaccctgcacgagactctttgattccttgcaaggaagcaggacttcgcttcaacgctggggacctcttacagatcgtcaaccaggatgacgctaactggtggcaggcgtgccacgtggaggggggtagtgctggactcatcccaagccagttgctcgaggagaagcggaaagcttttgttaaacgggacctggaactaacacccaacagtggcaccctctgtggaagcctgtccggcaagaagaagaaacgaatgatgtacctgaccaccaagaacgcagagtttgataggcacgaactgctcatttatgaggaagtcgccagaatgcctccttttaggcggaagacacttgtgcttattggggctcagggggtgggcagacgcagccttaagaataaactgataatgtgggatccagaccgatacgggacaacagttccctacacatctaggcgcccaaaagacagcgaacgcgagggccaggggtactctttcgtctctaggggagaaatggaagcagacgtgagggctggtagatacctggaacatggcgaatacgaaggaaacctgtacggaacacggatcgactcaataaggggggtggtagctgcaggaaaggtgtgcgtgctcgatgtgaatccccaggccgtcaaggtgttaagaaccgctgaatttgttccctatgtagtatttattgaggccccagactttgagacattgagagcaatgaatagggccgctttggagtccggcatctccacgaaacagctgacagaggctgacctgcgacgcaccgtcgaggaaagttctcggatccagagaggatatgggcactattttgacttatgcttggttaacagcaatctggaacgcactttcagagagctgcagaccgccatggaaaaactcagaactgagccccagtgggtgcctgtgtcgtgggtgtattag

SEQ ID NO: 230148 - DNA, 1731 bp, synthetic construct
  misc_feature 1..1731: note = Description of Artificial Sequence: Synthetic coding sequence
  source 1..1731: mol_type = other DNA
atgcccgtggctgccacaaactctgagacggcaatgcagcaggtgttggataatcttgggagcctgccgtctgcaactggcgcagcagagctggatttgatttttctgcggggaattatggaatcgcccatcgtaaggtcccttgctaaagtgatcatggtgttgtggttcatgcagcagaatgttttcgttccaatgaaatacatgctcaagtatttcggtgcacacgagcggctggaggaaacgaaactcgaggccgtgcgcgacaacaacctggagctggtgcaggagatcttgagggatctcgctcacgttgctgagcagtcatccacggccgcagaattggcgcatatcctgcaagagccacactttcagagtctgctcgagacacacgactccgtggcaagtaagacttacgagactccgccaccatctcccggactagacccaacttttagtaatcagccggtgccacccgatgccgtgcgaatggttggcattcgtaagactgctggtgaacatctcggagtgactttcagggtcgagggcggtgagctggtgatagccaggatcctgcacggaggtatggtggcccagcagggactgctgcatgtaggcgacatcattaaggaggtgaatggtcagcctgtcggaagtgaccctcgagccttgcaggagcttcttagaaatgcatccgggagtgttattctgaaaatcctgcctagctatcaggaacctcacttaccacgacaggtgttcgtcaaatgtcattttgattatgaccctgcaagagattccctgattccgtgtaaggaggctggcctgcgcttcaacgcgggtgatctgctgcagatagtgaaccaggatgacgccaactggtggcaggcctgtcacgtagagggaggcagcgcgggactgatcccgtcccagctgttagaagagaagagaaaagcctttgtcaagagggatctggaactgaccccgaatagcgggacgctctgtggatccctgtcggggaagaagaaaaaacggatgatgtatttgaccacaaagaatgcggagttcgaccggcatgaactccttatatacgaagaggtcgctcgaatgccaccatttagaagaaaaaccttggtcttgatcggtgcccagggcgtcggtaggaggagcttaaagaataagctcattatgtgggaccccgaccggtacggtaccactgttccatatacaagtaggagaccaaaggactccgagagagaaggccagggttacagttttgtctccagaggagagatggaggctgacgtgagagccggacggtacctggaacacggcgagtacgaaggaaatctttatggcaccagaattgatagcataaggggggtcgtagctgcaggaaaggtgtgcgtgctggacgtgaatccccaggcagtgaaagtgttaaggaccgcggaattcgtcccatacgtggtattcatcgaagcgcctgattttgagacactaagagccatgaatcgggcagccctggaatccggcatcagtaccaagcagctcacagaagctgacctgcgcagaacggtggaggaatctagtcgcatccagagaggctacgggcattatttcgatctgtgccttgtgaacagcaatctggagaggacctttagggaattacaaacagcgatggaaaaattgcggacggagccacagtgggtgcctgtgtcatgggtgtattag

SEQ ID NO: 230149 - DNA, 96 bp, synthetic construct
  misc_feature 1..96: note = Description of Artificial Sequence: Synthetic coding sequence
  source 1..96: mol_type = other DNA
atgccggtcgcggcaactaactccgagacagctatgcagcaggtgctggacaatctgggatcactcccgagtgccacgggggcagcagaactgtag

SEQ ID NO: 230150 - DNA, 456 bp, synthetic construct
  misc_feature 1..456: note = Description of Artificial Sequence: Synthetic coding sequence
  source 1..456: mol_type = other DNA
atgcccgtggcagccaccaactctgagaccgctatgcaacaagtcctcgataatctgggaagcctccccagcgccaccggcgcagcagagttggatctgattttcctccgcggtatcatggaaagcccgatcgtgcgaagtctggcaaaagctcatgagcggctggaagagaccaaactggaggccgtgcgggacaacaatctggagcttgtgcaagagatcctgcgcgacctggcccatgttgctgagcagagttccactgcagcagaactcgcccacatactgcaggaaccacactttcagtcacttctggagactcacgacagtgtggcctcgaaaacttatgagacgccgccaccgtctccaggactcgatcccacgttctctaaccagcctgtgccaccagatgctgtgaggatggtgggtatacgcaaaaccgctggcgaacacctgtag

SEQ ID NO: 230151 - DNA, 381 bp, synthetic construct
  misc_feature 1..381: note = Description of Artificial Sequence: Synthetic coding sequence
  source 1..381: mol_type = other DNA
atgcctgtcgccgcaactaatagcgaaacagccatgcagcaagtactggacaatctggggtccctcccatccgctaccggcgctgccgagctcgacctgatcttcctgcgcggaataatggaatcaccaattgtccgcagtctggcaaaagcacatgaaaggctcgaggagaccaagcttgaggctgtccgcgacaacaatctggaattagtccaagagatcttgcgggacttggcccacgttgccgaacagtcttctaccgccgcagaattggcccacattctgcaggaaccccattttcagtccctcctggaaactcacgacagcgtggcaagtaagacctacgagacccctccgccatccccgggactggatccgtag

SEQ ID NO: 230152 - DNA, 222 bp, synthetic construct
  misc_feature 1..222: note = Description of Artificial Sequence: Synthetic coding sequence
  source 1..222: mol_type = other DNA
atgcctgtcgcggctaccaacagcgaaaccgccatgcagcaggtattggataaccttggtagcctacctagtgctacaggggctgcagaactggatttaatttttcttaggggcatcatggagtctcctatcgttcggtcactcgcgaaggcccatgaaagactcgaagaaaccaagctggaggctgtgagggataacaatctggaactagtgcaagagtag

SEQ ID NO: 230153 - DNA, 447 bp, synthetic construct
  misc_feature 1..447: note = Description of Artificial Sequence: Synthetic coding sequence
  source 1..447: mol_type = other DNA
atgccagtggctgctaccaattctgaaacggcgatgcagcaggtgctggataatctgggcagtctgcctagtgctacaggtgcggcagaactggatctgatcttcctcagggggatcatggaatcccccatcgttaggtctctagctaaagctcacgaaaggttggaggaaaccaagcttgaggctgtgagagataacaacctggaacttgtccaggagatcctcagagatctggcccacgtcgccgagcagagctccaccgcggctgaactcgcccatatcctgcaggagccgcattttcagtcccttctggaaacacacgattctgtggcctccaagacgtacgagactccccctccctcgcccggactagaccccactttctcgaaccaaccagtgcctcccgatgcagtccgaatggtcggtattcgtaaaaccgcaggttag

SEQ ID NO: 230154 - DNA, 1626 bp, synthetic construct
  misc_feature 1..1626: note = Description of Artificial Sequence: Synthetic coding sequence
  source 1..1626: mol_type = other DNA
atgcagcaggtgctcgacaatctcggatccctgccctccgcgactggtgccgcagaacttgaccttatcttcttgaggggtatcatggagtctcccatcgtgcgttctctggcaaaggcccacgagcggctggaagagaccaaattggaggctgtccgcgacaacaatctagagctggtccaggaaattctccgcgatttggctcacgtggcagaacagtcttcaaccgctgctgagctggcacacatccttcaggagcctcattttcaaagtctgctcgaaacccatgactccgtggcttcaaaaacctacgaaacacccccaccatcccccggactggatccgactttcagcaaccagcccgtgccgcctgacgcagtgaggatggtcggaatcaggaagacagccggagaacacttaggggtgacttttcgtgttgaggggggagagttggttatagctaggatactacatggtggtatggtggcccagcagggactgctgcatgtgggtgacattatcaaggaggtgaatggccaacctgtggggagcgaccctagagctttgcaggaactgttgcgcaacgcatccggatcagtaatcctgaaaattcttccctcttatcaagaaccccatctgccccgtcaggtgtttgtgaaatgtcacttcgactacgatccagctagagacagcctgatcccgtgcaaggaggcaggcctcaggttcaacgctggagatctgttgcaaattgtgaaccaggacgatgcaaactggtggcaagcctgccacgtggagggagggagcgcagggctgatccccagccagttgctcgaggagaagcggaaggcattcgtcaaaagggatttggaactcacccctaatagcggcaccctgtgtggcagtctctctggcaagaagaagaagaggatgatgtatttgaccaccaaaaatgctgaattcgatcggcatgagttgcttatttatgaagaggtggccaggatgcctccctttcgccgtaaaactttggtgctgattggtgcccaaggcgtaggtcggcgaagcctcaaaaacaaactgataatgtgggaccccgacagatatggaaccaccgtaccctacaccagcagaaggcccaaagattcagagcgagaaggccaagggtactccttcgtgtctaggggtgagatggaggccgatgtccgggctggccgatacctggaacatggggaatacgagggcaacctgtatgggacgagaatagatagcattagaggcgtcgtcgctgcagggaaggtctgtgtcctcgacgtgaacccccaggccgtgaaggtgttacggaccgctgaattcgttccatatgtcgtattcatagaggcccctgatttcgagacactgagggcgatgaatcgggctgctttagagagtggcatctccacaaagcagttaacggaagccgatcttcgtcgcaccgtcgaggaatcatcccggatacagaggggatatggacattattttgatctctgccttgtgaattcgaatctcgaacgaacctttagagaactgcagactgcaatggagaagctacgtacagaacctcagtgggttcccgtctcctgggtgtattag

SEQ ID NO: 230155 - DNA, 1167 bp, synthetic construct
  misc_feature 1..1167: note = Description of Artificial Sequence: Synthetic coding sequence
  source 1..1167: mol_type = other DNA
atggagctgcagtaccctccacccccaccttcccctaggatttgtagagaacggagtgggggagacaatgcatctatgcctgtcctttctgaggacagtggacttcatgagaccctagccctgctgacgagtcaattgagacctgactcaaatcataaggaagagatgggctttctgcgagatgtcttcagcgagaaatccctgtcatacctaatgaagatccacgagaagctaaggtactacgagagacagagtccaactcctgtcctgcattcagctgtcgccctggcagaggacgtgatggaggagctccaggctgcctcagtccactccgatgaacgagagttgcttcaactcttgagcacccctcacttacgagcggtcctgatggttcacgacacggtggctcagaaaaatttcgacccagtcctgcctcccctgcctgacaacattgatgaggattttgacgaggagagcgttaagatcgtgcggctggtgaagaacaaagagcctttgggtgcgacaattcggagggatgaacacagtggggcagtggtcgtggcccgaatcatgaggggcggagcggctgatagatccggattggtacacgtcggggacgaactgagagaggtcaacggaatcgccgtattgcacaagaggcccgacgagatctctcagatcctggcccagtcacaaggctccatcactcttaagatcattcccgctacacaagaagaagataggctcaaggagagcaaagtgttcatgcgcgctctgtttcactataaccccagggaggacagagccatcccatgccaggaggccggacttccattccaacgccgtcaagttttggaagtagtgtcccaggacgaccccacgtggtggcaggctaagcgcgtgggagacacaaaccttagagctggcctgatcccaagcaagggtttccaggagaggcgcttgtcctaccgcagagcatatggcacacctatctcccctcagttttctcaacccaaacaggaactttccctcccgaggcactgggctcccactcaactgctgccatcatgcggcgcacactgccccggaggaaaggggacgcacacacccacgctcattcccattctactgtcgccatcactgcaactggagttcatacagtattag

SEQ ID NO: 230156 - DNA, 1758 bp, synthetic construct
  misc_feature 1..1758: note = Description of Artificial Sequence: Synthetic coding sequence
  source 1..1758: mol_type = other DNA
atgcccgtcctgagcgaagacagtggcttacacgagacattagccctgctaacgtcacaattaagaccggacagtaatcataaggaggagatgggattcctccgtgacgtgttctccgaaaaatctttgtcctaccttatgaaaatacacgagaagctgcgctattatgaaagacagagtcccactccagtgctacattccgcagtggccctagcagaggacgtaatggaggaactgcaggctgccagcgtgcattctgacgagcgcgagttgcttcagctcctctctacacctcacttgagggcagtgctgatggttcacgacaccgttgcccaaaagaactttgacccggtcctcccacccttgcccgacaatattgacgaagacttcgacgaagaatctgtgaagattgtacgtctggtgaaaaacaaggaaccactgggggctactatcaggcgggatgagcactcaggagccgtcgtggttgccaggattatgagagggggagccgcagacaggtcaggcctggtccatgtgggcgacgagctgagagaagttaatggtatcgcagtgcttcataagagacccgacgagatcagccagatcttagcccagagccagggcagcattacactgaagatcatacccgcaacccaagaggaggatcggctaaaagagtctaaggtattcatgcgagcccttttccattataatccaagggaggacagggctattccctgtcaggaagcgggacttcccttccagcgtagacaggtcttagaggtggtgagtcaggacgaccccacatggtggcaggccaaaagggttggggatactaatttgcgggctggcctgatcccgtcaaagggttttcaggagcgtcgcctgtcatatagaagagccgctggtacactgccatctcctcagagcctgcgtaagccgccttatgaccaaccctgcgacaaggagacttgtgactgcgaaggatacttgaagggacactatgtcgctgggctgaggcgcagtttcaggttgggttgcagagaaagactgggaggaagccaagagggtaagatgtcctctggagcagagagccctgaactgctcacctatgaagaggtggcgaggtatcagcaccagcccggtgaaaggcctaggctggttgtgcttattggatccttaggcgcacggctccacgagttaaaacagaaagtcgtagccgagaatccacaacactttggtgtagccgttccccacacaacacggcctcggaagagtcacgagaaggagggagtggaataccacttcgtaagtaagcaagcattcgaggctgacctgcaccacaacaaattcctggaacacggcgagtacaaggaaaacctatacgggaccagcttagaggctattcaagccgtgatggccaaaaataaagtttgccttgtagatgtcgaaccggaggccctcaagcaactgagaacatctgagtttaaaccatacatcatcttcgtgaagcctgccattcaagagaaacgaaaaactccccctatgtctcccgcatgtgaagacaccgccgctccttttgacgaacaacagcaggaaatggctgcatccgccgcttttatcgatcgacattacggtcatttggtggatgccgtgttggtgaaggaagacctgcagggcgcttactctcagttgaaagtggttctggaaaagttatccaaggatacgcactgggtacctgtgtcttgggtccggtag

SEQ ID NO: 230157 - DNA, 1833 bp, synthetic construct
  misc_feature 1..1833: note = Description of Artificial Sequence: Synthetic coding sequence
  source 1..1833: mol_type = other DNA
atggagctgcagtatcccccaccaccaccctcaccgcgaatttgtagagagagatcaggcggtgacaacgcttctatgcctgtgctaagcgaggacagcggtctacacgaaactctcgccttattgaccagccagctccgaccggattcgaaccataaggaagaaatgggctttctgcgagacgtctttagtgaaaagtcgttatcgtacttgatgaagatccatgagaaactgagatactacgaacgccagagcccaacacctgttttacactccgcggtagccctggcagaagacgtgatggaggaactacaggcagcctcagttcattccgacgaaagggagcttctacaactgttgagtactccacacctcagagcggtgctcatggtgcacgacactgtggcgcagaagaattttgatccagtactgccccctctgcccgacaacatcgacgaagattttgatgaggaatcggtgaaaattgtgcggcttgtaaagaataaggaacccctcggcgctaccattcgccgagatgaacacagcggagcagtagtggtggcacggatcatgcgaggcggtgctgctgatcgttccggcttagtccacgtgggagacgagctacgcgaagtcaatggtattgctgttcttcacaaacgccctgatgaaatctctcaaatcctggcacagtcccaaggctcaataacgctgaagattatccccgctacacaggaggaagaccgcctcaaggagtctaaagtgtttatgagggccttgtttcattataacccccgtgaggaccgcgctataccatgtcaggaagctggcctcccttttcagcgccgtcaggtgctggaagttgtaagtcaggacgacccgacatggtggcaggctaaaagggtcggggacaccaatctccgtgcaggactgatcccttccaaaggttttcaggagagacggctctcatacagaagggcagcgggtacgctgccgtcacctcaatctcttaggaagcctccttatgaccagccctgtgacaaggagacgtgcgattgcgaaggctaccttaagggtcactacgttgccggactccgcaggagtttccgtcttggttgcagagaacgcctaggtgggagccaagaaggaaaaatgtcaagcggagcagagagcccagaacttctgacatatgaggaggtggctcgataccagcaccaaccaggagagaggcccagactcgtggtgcttatcggtagcttaggcgcacgccttcatgaattgaaacagaaagtagtcgccgagaacccgcagcactttggggtggcagtgccacacactacacgcccaaggaagtcccacgagaaagaaggagtggagtatcattttgtcagcaagcaggccttcgaggcagacctccatcataacaagtttctggagcacggagagtacaaggagaatttgtatggcactagtctggaggctattcaggctgtgatggctaagaacaaagtgtgtctcgtagatgtggaaccagaagctttaaagcaacttcgcacttctgaattcaagccgtacattatatttgttaagccagcgatacaggagaaacgcaagactccaccaatgtcaccggcttgtgaagataccgccgcaccattcgacgaacagcaacaagaaatggccgctagtgcagctttcatcgatagacattatggccatctggtggacgcagtcctggttaaggaagatctgcagggggcttactcacaacttaaagtcgtcctcgagaagttgagtaaggatacacactgggtgcccgtgtcttgggtgcggtag

SEQ ID NO: 230158 - DNA, 1782 bp, synthetic construct
  misc_feature 1..1782: note = Description of Artificial Sequence: Synthetic coding sequence
  source 1..1782: mol_type = other DNA
atgattcagagcgacaagggcgctgacccaccagacaagaaagacatgaagttatctacggccactaacccccagaacggcctgtcacagattttgcggcttgttcttcaagaactatctctcttctacggcagggatgtgaatggagtctgcctgttatatgacctgctccattccccttggctgcaggctctcctcaaaatttacgactgcctgcaggaattcaaggaaaagaaactggtcccagccaccccacacgctcaggtgctgtcgtatgaggttgtcgaactgcttagggagacacctactagtccagagattcaagagctccgccaaatgctgcaggctccacacttcaaagctctgctgagcgcccacgacaccatagcacagaaggactttgaacccctcctccccccactcccagacaatattccagaatccgaggaagctatgaggatagtgtgccttgtcaagaaccaacagcctctcggagctaccatcaagaggcatgaaatgaccggcgacatcctggtcgcacgcataatacatgggggtctggccgagcggagtgggttgctttatgcaggagataagctagtggaagtgaacggcgttagcgtagaaggattggacccagaacaggtaatacatatcctggcaatgagtcgcggaaccattatgttcaaggtggtgcccgtctcagatcctccagtcaactctcagcagatggatcccgacattccctgtatggatgcgggactgccctttcaaaagggagatatcctgcagatcgtggaccagaacgatgctctgtggtggcaggctcgcaaaataagcgatcctgcaacatgtgctgggctggtcccctctaatcatttgctcaagaggaaacaacgagagttctggtggagccagccataccagccccacacatgtttgaagtcgacgttgtataaggaggagtttgtcggttacggacagaaattctttatcgctggctttagacggtcgatgcggttatgtcgccgaaaatcccacctctccccgctccacgcctcagtgtgctgtacaggctcatgctatagtgccgtgggtgccccttacgaggaggtggtgaggtaccagaggagacctagcgataaatatagattaatcgtgctgatgggcccatcaggagttggagtgaacgaactgcgccgacagctgattgaatttaacccctcgcattttcagtctgctgttccccataccacccgaaccaagaagtcctatgagatgaatggtcgagaataccactatgttagcaaggagacatttgaaaatctgatatactcacaccgaatgctggagtatggggagtacaagggacatctgtacggtaccagtgtcgacgccgtgcaaaccgttctcgttgaaggtaagatctgtgtgatggacttggagccgcaagatatccagggggtacgcacccacgagctcaaaccttacgtgatcttcataaaaccttcgaacatgcgttgtatgaagcagtcaaggaaaaatgccaaggtgataacggactactacgtggacatgaagtttaaggacgaggatctgcaggagatggagaatctggcccaaaggatggaaacccagttcggccagttttttgaccacgtaattgtaaacgatagtctccatgatgcttgtgcgcagttactttcagccattcagaaagcacaggaggagcctcagtgggtcccagcgacctggattagctccgatacagaatcacagtag

SEQ ID NO: 230159 - DNA, 1809 bp, synthetic construct
  misc_feature 1..1809: note = Description of Artificial Sequence: Synthetic coding sequence
  source 1..1809: mol_type = other DNA
atgatccagtccgacaaaggcgctgacccgcctgacaagaaagacatgaagcttagtaccgccacaaatcctcagaacggtctgagccagatcctccgcctggttctgcaggaactgtctctgttctacggcagagacgtgaacggcgtgtgcttgctctacgacctcctgcactcgccatggctccaggcactgctaaaaatatacgactgtctccaagagttcaaagagaagaaactcgtgccagccacaccccacgcacaggttctgagctacgaagtggtggagctcctgcgagaaaccccaacatcaccggagatccaggagctccggcaaatgctccaagctccacacttcaagggagccactatcaagagacatgagatgacaggtgatatcctcgttgctaggatcatccatggtggactcgccgaacggtccggccttttatacgcaggagataaattagtcgaagttaatggcgtatcagtggagggcctcgatcccgaacaggtgatccacatcctggctatgtcaagggggactatcatgtttaaggtggttccagtctctgatccaccagttaattcccaacagatggtatatgtgcgggcaatgacagagtactggccccaggaagaccccgatatcccttgcatggatgccggactgccctttcaaaagggagacatccttcagatcgtggatcaaaacgacgctctgtggtggcaggcacgcaagatatctgaccctgccacatgtgccggtctagtcccctccaatcatttgctcaagcgctggtctttcgcattggtcgcccaggcaggggtccagtggcactatcttgattctctgcaacccctgccccctgggttcaaacggttctcttgtctatcgttgcctagatcatgggactacattgaagatgacatgaagattgacgaaaaatgcgtggaagcagaaaaggagtctatagagaccgacaaggaggagttcgttggatacggacagaaatttttcatcgctggcttcagacgttcaatgcgtttgtgtagaaggaagtcgcatttaagtcccctgcacgcaagcgtgtgctgcacgggcagctgttattccgcggtgggagcaccttacgaagaggtggtcagataccaacggagaccctccgacaaataccgactgattgtgttaatgggaccttcgggagtaggtgtgaacgagcttcggaggcagctgatcgaattcaacccttcgcacttccagtccgcagttccacatacaactcgcactaagaaaagttacgagatgaatgggagagagtaccattacgtgtccaaggaaaccttcgaaaaccttatctacagccatagaatgctggagtacggagagtacaagggtcacttgtacggtacatcggttgatgcagtgcaaacagtcctagtagaagggaaaatttgcgtaatggatctggaaccacaagatattcaaggtgtgcggacccatgaactgaagccatatgtgatctttattaagcctagtaatatgcgctgtatgaagcagagcagaaagaatgctaaagtgattactgactactatgtcgatatgaagtttaaagacgaggatctgcaggaaatggagaacctggcccaacgcatggagacccagtttggccagttttttgaccatgtgattgtgaatgatagtctgcacgacgcttgcgcccagctcttaagcgcgattcagaaagcccaagaggagcctcagtgggtccccgcaacttggataagctcggacaccgagtcccaatag

SEQ ID NO: 230160 - DNA, 1914 bp, synthetic construct
  misc_feature 1..1914: note = Description of Artificial Sequence: Synthetic coding sequence
  source 1..1914: mol_type = other DNA
atgatccagagcgacaaaggcgctgacccccctgataaaaaggatatgaaactctccacagccacaaaccctcaaaacgggctcagccaaatcctaaggctggtcctgcaggagctgtctttgttctatggcagggacgtcaatggagtctgtctcctctacgaccttctgcacagtccttggttacaggctttgctcaaaatttatgattgtttacaggagttcaaggagaagaaactagtccccgctacaccacacgcacaggttctcagctacgaagtggtcgagctgctgagagagacccccacctctcccgagatccaagagctcagacagatgttgcaggcccctcactttaaggccctgctttctgcacatgatactatagctcagaaggactttgaaccgctcttgccccctctaccagacaatatccccgaatccgaagaggcaatgcgcatcgtttgtctcgtaaaaaatcaacaacccctcggagccaccattaagcggcatgagatgacgggcgatatcctggtggccagaatcatacatgggggactggccgagcggtcaggtctgctttacgctggcgataaattggttgaggtcaacggcgtctccgtggagggcctggaccccgagcaggttatccacatactggccatgagccgcggaactatcatgttcaaggtcgtccccgtgagcgatccacctgtcaatagccagcagatggtgtacgtgcgagctatgaccgagtattggccccaagaggaccccgacattccatgtatggatgccggtctaccgtttcaaaaaggagatatcctacaaattgtcgatcaaaacgacgccctctggtggcaggctagaaagatcagtgaccctgctacatgtgctggtttagtgcccagtaatcaccttctcaaacgcaagcagcgggaattctggtggagtcaaccttaccaacctcacacttgcctgaaatccaccttgtccatcagcctgaagggggaggacgacatgaagatagacgagaagtgcgttgaggctgagaactctactgccgaatctgaggaactcaattccgacaaggaagaatttgtcggctacggccagaagttcttcatcgctggctttcggaggtccatgagactgtgtagacgtaagtcccacttatcaccactccatgccagcgtgtgctgtaccggctcttgctactctgctgtcggagccccatatgaggaagtcgtgaggtatcagcggagaccaagtgataagtacaggctgattgtgttaatgggtccaagcggagtgggggtaaacgagctcaggcgccagctcatcgaatttaaccctagccactttcagtctgctgtaccacacacgaccagaacaaagaaatcttacgagatgaacggccgagagtatcactacgtgtctaaggagaccttcgaaaacctgatttattcacacaggatgctggaatatggcgagtataaggggcatctctatggaacgtctgtagacgccgtacagacagtcctggttgagggtaagatttgcgtgatggacctcgagccccaggacatccagggtgtgaggactcatgaattgaagccttacgtgatattcataaaaccctcgaatatgagatgtatgaagcaatcacggaaaaatgcaaaggttatcacagactactacgtcgatatgaaatttaaagacgaagacctccaggaaatggagaacctagcccagagaatggaaacccaattcgggcagttctttgatcatgtgatcgtcaacgacagtctgcatgacgcttgtgcacagttgctttctgcaatccagaaggctcaagaggagccacaatgggtgcctgccacgtggatcagcagcgacactgaaagccagtag

SEQ ID NO: 230161 - DNA, 1701 bp, synthetic construct
  misc_feature 1..1701: note = Description of Artificial Sequence: Synthetic coding sequence
  source 1..1701: mol_type = other DNA
atgatacagagcgacaagggcgcagatccacccgataaaaaggatatgaagctctccacagcaacaaacccccagaacggcctgtcgcagatactgaggctcgtgcttcaggagctatccctattctacggaagggacgttaatggcgtttgcttactgtacgacctgctccactccccttggttgcaggcattattgaaaatttacgattgtctacaggagtttaaggagaagaaattggtgccagctacaccccatgcacaggtgctcagttacgagggtgctacaattaaacgtcacgagatgactggagacatactggtggcccgaattattcacggtgggcttgcggagaggtcagggcttctgtatgcaggcgacaagctcgttgaggtcaacggcgtctcagtggaaggcctcgatcccgagcaggtcatccacattctcgcaatgtctagaggcaccatcatgtttaaggttgtgcctgtgagtgatcctccagtcaacagtcagcaaatggtgtatgtacgggctatgaccgaatattggccacaggaggatcccgacatcccttgtatggacgccggactcccctttcagaaaggagatatcttgcagatagtggaccaaaatgacgccttatggtggcaggctcgtaaaattagtgatcctgccacctgtgctggcctcgtgccatccaatcacctgctcaagcggaaacagagagaattttggtggagccagccatatcagccccatacgtgtcttaaaagcaccctgtctatctctctgaagggtgaggatgacatgaagatagacgagaaatgcgttgaagccgagaattcaacggcagagagcgaggagctgaactctgacaaggaggaattcgttgggtacggccagaagttttttatcgctggtttccggaggtctatgagactgtgtcgcaggaaaagtcatctgtcacctctgcatgcaagtgtgtgttgtacagggagctgttacagcgccgtgggggcaccatatgaggaagtggtgcgctatcagaggcggccatccgataagtaccgcttaattgtcctgatggggccaagcggagtcggcgtaaacgaactgaggaggcagctgattgagttcaacccatcccacttccagagcgccgtgcctcacacgacgagaaccaagaaaagctacgaaatgaacggacgggaatatcactatgtgagcaaagagactttcgagaaccttatttactcccatcgcatgctagaatatggagagtacaaaggtcacctgtacggaacctccgtggatgcagtccagacggttctggtggaagggaagatatgtgtaatggacctagagcctcaggacattcagggtgtacggacccacgagctcaagccctacgtgatttttattaaaccatctaacatgcggtgtatgaaacaatccaggaagaatgcaaaagtaatcactgattattatgttgacatgaaattcaaagacgaggacttgcaggagatggaaaacctggcccagagaatggaaactcaatttggccaatttttcgatcacgtcatagttaatgactcattacatgatgcatgtgctcaacttctttctgccatacaaaaggcccaggaggaaccacaatgggttcccgctacatggatttcaagcgataccgagagtcagtag

SEQ ID NO: 230162 - DNA, 1914 bp, synthetic construct
  misc_feature 1..1914: note = Description of Artificial Sequence: Synthetic coding sequence
  source 1..1914: mol_type = other DNA
atgatacagtctgacaagggggcagaccctcctgacaaaaaagatatgaaactgagtacggccacaaacccgcaaaatggactatcccaaatcttgaggctggtactccaagagctaagtctgttctatggacgagatgtgaacggagtgtgccttctatacgatctcttgcatagcccctggctgcaggccttacttaagatatatgactgtctgcaggaattcaaggaaaaaaagttagtaccagctacaccacacgcacaggtgctgagctacgaggttgtagaactgctccgggagaccccaacgagtccggaaatccaagagctacgccagatgctccaggccccacatttcaaggcactgttatcagcacacgacactattgctcagaaggactttgagcccctgctccctccactccccgacaacatcccagagtccgaagaggccatgagaatagtctgtttagtgaaaaaccagcagccattaggagccaccataaagaggcacgagatgactggcgacatcttggtggccaggatcatccatggtggactagcagaacgctctgggctcctctacgccggtgacaaactggtcgaggtcaacggtgtgagcgtcgagggtctggaccccgaacaagttatccacatcctcgctatgagtagaggaactatcatgttcaaagtcgtgccagttagtgacccccctgtcaattcccagcagatggtgtacgttcgcgcaatgacagagtattggcctcaggaggacccagacattccctgtatggacgccggactgccttttcagaagggggatattctccaaattgtggaccagaacgacgctctctggtggcaggcaaggaagatctcagaccctgccacctgtgccggtctggtaccctctaatcatctgttgaagagaaaacagcgcgaattttggtggtcgcagccctaccaaccacacacgtgccttaaatcaactctgtccatatctatggaagaagaggatgatatgaaaatcgatgagaaatgtgtggaggccgatgaggagacatttgaatccgaagagctcagcgaagataaggaggaatttgtgggctatggccaaaaattcttcattgctgggtttagaaggagcatgagactctgtagaagaaaaagtcatctatcacctctccatgcttctgtgtgctgcacaggttcttgttacagcgccgtcggagcaccatacgaggaggtagtcagataccaaagaaggcctagcgataaatacaggcttatcgtcctgatgggcccatctggagtgggtgtcaatgagctaagaaggcagttgatcgagttcaacccaagccactttcaatcagccgtgccacacactacccgcaccaaaaaatcatatgaaatgaatggtcgggagtatcactatgtaagcaaagagacattcgagaatctgatttattcacaccgcatgctagagtatggcgagtataaggggcacctgtacggcacaagtgtggatgcggtgcaaactgtgttggtggagggaaagatctgtgtgatggacctggagccccaagacattcaaggagtgcgaacgcacgagctgaagccttatgttattttcattaaaccatcaaacatgcggtgcatgaaacagtcccgtaagaatgcaaaggtgataacagactattatgtggacatgaaatttaaggatgaggacctgcaggagatggaaaacctggcgcagaggatggagactcaattcggacagtttttcgaccatgtgattgtgaatgatagcttgcacgacgcgtgcgcgcaactgctttcagctattcagaaagctcaagaagaaccacagtgggtgcccgcaacctggattagttcagacactgagtctcagtag

SEQ ID NO: 230163 - DNA, 2028 bp, synthetic construct
  misc_feature 1..2028: note = Description of Artificial Sequence: Synthetic coding sequence
  source 1..2028: mol_type = other DNA
atgactacgagccatatgaacgggcacgttaccgaagaaagtgactctgaagtgaaaaatgttgatttggcctcgccggaggagcatcagaagcaccgagaaatggcggtcgactgtcccggtgatcttggaacacgaatgatgccgatccggagatcagcccagctggagcgcatccggcagcaacaggaagacatgagacgtaggagagaggaggaaggaaaaaaacaggagctcgacttgaattcctctatgcgtctgaaaaagctggcccagattccccctaagacaggtatcgataatcccatgtttgacaccgaggagggcatcgtgttggagtcaccccactacgccgtcaagatactggagatcgaagatctgttctcctcactcaagcacattcaacataccctggtggactcacaaagccaggaggacatttctctactcctccagctagtgcagaataaggactttcagaacgctttcaaaattcacaatgctattacagtacatatgaacaaggcatccccgccttttccactcatctcaaacgctcaagaccttgcccaggaagtacaaaccgttctgaagcccgtgcatcataaagaagggcaagagctaactgccttgctcaacacaccccacatccaggccctgctgctggctcatgacaaggtggccgaacaggagatgcagctcgaacctattactgatgagagggtgtacgaaagtattggacaatacgggggagagactgtcaaaatagtgcgtatcgagaaggccagggacatacccctgggggctacagtgcgcaacgaaatggatagcgtaatcatctcccggatagtgaagggaggcgcagcggaaaagtccggattgctgcacgaaggagacgaagtgctggagattaatggcattgaaattcggggtaaagatgtgaacgaagtgtttgatctgctgtctgatatgcatggtacactgacatttgttctgattccctcccaacagatcaagccccctcctgcaaaggagaccgtgattcacgtgaaagcccacttcgactacgatccttcagacgatccatacgttccttgtcgcgagcttggactcagcttccagaagggtgatattttgcacgtgatcagtcaggaagaccctaactggtggcaggcctacagagaaggggatgaagataaccagccgctagcaggactggtgcctggaaaaagctttcagcagcagagggaagctatgaaacagaccatcgaagaggataaagagcctgagaagtccggtaagctctggtgtgctaaaaaaaataaaaaaaagcggaaaaaggtactgtacaatgctaataaaaatgatgattacgataacgaggagatcttgacatacgaagaaatgtctctgtaccatcaaccagctaatcgaaagcgccctatcatcctgattggtcctcagaattgtgggcagaacgagctccgccagagacttatgaacaaggaaaaggaccggttcgcttctgctgttccccataccactaggagccgccgtgaccaggaggtggcaggcagagattatcatttcgtgtcacgtcaggccttcgaagccgacatcgctgcagggaagttcatcgaacacggtgagttcgagaaaaatctgtatggcacctccatcgattctgtacggcaggtcattaatagtgggaagatctgcctcctcagcttgcgaacccaaagcctgaagactcttcgcaattcggatctgaagccctacattattttcatcgccccaccaagtcaggaacggctgcgcgcactactcgccaaggaaggcaagaaccccaagcctgaagagttaagagaaattattgaaaagacaagagagatggagcaaaataacgggcactacttcgatacggctattgtcaattcggacttagacaaggcttaccaggaactgctccgcctgatcaataagttagacactgagccacagtgggtcccttccacatggttgcggtag

SEQ ID NO: 230164 - DNA, 1926 bp, synthetic construct
  misc_feature 1..1926: note = Description of Artificial Sequence: Synthetic coding sequence
  source 1..1926: mol_type = other DNA
atggctgttgactgtcctggggatctcggaaccaggatgatgcccattagacggagtgcacaattggagcgtatcaggcagcagcaggaagacatgcggagaagacgcgaagaggagggaaagaagcaggagctggacttgaattcttctatgcgcttaaaaaaattggcacagattccccctaaaactgggatcgacaatcctatgttcgatactgaggagggtattgtgttggaaagtccacactatgccgttaaaatccttgagattgaagatttgttctcgagccttaagcacattcagcacaccctggttgattcacaaagccaagaggacatctccttgttgctccagctggtccaaaacaaggactttcagaacgcatttaagatccacaacgctatcaccgtgcacatgaataaagccagtccgcctttcccactgatttccaatgctcaagatctggcccaagaagtgcagactgtactcaagcccgtgcaccacaaggagggccaggaactgacagcacttctgaatacgcctcatatccaggcattattacttgcccacgacaaggtggccgagcaggaaatgcagctcgaacccatcacggacgagagagtgtatgagagcataggccagtatggtggtgaaactgtaaagatcgtcaggattgaaaaggccagggacatcccactgggcgctaccgtaaggaacgagatggattcagtcattatatctagaatcgttaaaggaggtgctgccgaaaagagcggtctgctgcacgaaggagacgaggttctggaaattaacgggatcgagattcgcggtaaggacgtcaacgaggtttttgatctcctctcagacatgcatgggacactcacatttgttctgatcccctctcagcagatcaagccccctcccgcaaaagaaacagtgatccacgttaaagcgcatttcgattatgacccatctgacgatccttacgtcccctgtagagaacttggcctgtcctttcaaaagggcgacatccttcatgtcatctcacaggaggatcccaactggtggcaggcctatcgtgagggggacgaagacaatcaacctcttgccggattggtgccagggaaatcattccagcagcagcgagaagcaatgaagcagactattgaagaagataaggaacctgaaaagtctggtaaactgtggtgtgccaagaaaaacaaaaaaaaaaggaaaaaggtcctctacaacgctaacaaaaacgacgattacgacaatgaggagatcctcacctacgaggaaatgtctctgtaccaccagcctgccaatcggaaacggcctatcattctgataggtccccagaactgcggacaaaatgagcttaggcaacgacttatgaacaaggaaaaggacagatttgcctccgcagtgccccacactactaggagcagacgtgatcaagaagtggccggaagggactaccacttcgtgtcccgacaggccttcgaagctgacatcgccgctggcaaatttatcgaacatggagaatttgaaaaaaacttgtacgggacttctatagactccgtgcgccaggttattaactcaggaaagatctgtctgctgagtctcagaacgcagtcacttaaaaccttgcgcaactccgacctgaagccttacataatctttatcgcccctccttcacaggaaaggctgcgtgcgctcctcgccaaggagggcaaaaatccgaaacctgaggaacttcgtgaaattatcgaaaaaactagagagatggagcagaataatggccattactttgatacagcaatcgttaattctgacctggacaaggcttaccaagaactccttagattgattaataagctggataccgagccacagtgggtaccaagcacctggctgcggtag

SEQ ID NO: 230165 - DNA, 15 bp, synthetic construct
  misc_feature 1..15: note = Description of Artificial Sequence: Synthetic coding sequence
  source 1..15: mol_type = other DNA
atggctgtcgactag

SEQ ID NO: 230166 - DNA, 450 bp, synthetic construct
  misc_feature 1..450: note = Description of Artificial Sequence: Synthetic coding sequence
  source 1..450: mol_type = other DNA
atggccgtggactgtccaggagatctggggacgcggatgatgcccatcagacgtagcgcccagctggagcgtatacgtcagcagcaagaggacatgagaaggcggcgagaagaggaggggaaaaagcaagaacttgatctcaattcctcaatgagacttaaaaaactagcacaaattccacctaagactggcatcgacaaccctatgtttgacaccgaggaaggaatcgtgctggagagtccacactacgccgtgaaaatcctggagattgaggacctgtttagttccctcaaacatatccagcatactctggtggacagccagtcccaggaagacatctccctgctgttgcagctggtgcaaaacaaagactttcaaaatgcatttaagatccataatgcgattactgtacacatgaacaaagcgtcaccaccattcccactgatttag

SEQ ID NO: 230167 - DNA, 870 bp, synthetic construct
  misc_feature 1..870: note = Description of Artificial Sequence: Synthetic coding sequence
  source 1..870: mol_type = other DNA
atgactggagtgtttgaccgcagggtcccaagtatccggtcgggagacttccaggctccattccagacctccgcggcaatgcaccacccttcacaggagtctcccacactgcccgaatcgtcggcgacagattcagactactactcacccaccggaggggcaccccacggctattgctccccaaccagtgctagttacgggaaagccctaaatccttatcaataccagtaccacggcgtcaacggctcagcagggagttaccccgctaaagcatacgctgactatagttacgcctctagctatcaccaatatggcggagcttacaatagagtccctagcgccacaaatcaaccagaaaaagaggttactgaaccagaagtgaggatggtgaacggtaagcccaaaaaggttcgcaaacccagaaccatttattcctccttccagttggccgcacttcagagacgattccagaagactcaatatttagcacttccggaacgggctgaactggcagctagtctaggacttacacagacccaagttaagatttggttccaaaacaaacgtagcaagataaaaaagattatgaagaacggagaaatgcccccagagcacagtccgagctcctccgatccaatggcatgcaactcccctcagtcacctgccgtatgggaacctcagggatccagccggagcctttctcaccacccacacgcgcatccacccaccagtaatcagagcccagcgagctcttatctggaaaatagtgcctcttggtacacctctgccgcatctagcatcaactcccatttgccaccaccaggctccctgcaacaccctctggccctggcatccgggactttatattag

SEQ ID NO: 230168 - DNA, 1623 bp, synthetic construct
  misc_feature 1..1623: note = Description of Artificial Sequence: Synthetic coding sequence
  source 1..1623: mol_type = other DNA
atgcagcaagtactcgaaaatttgactgagctgccctctagcactggggctgaagagatcgatttgatcttcctgaagggaattatggagaatccaatcgttaagagtttggccaaggctcatgagcgcctggaagatagtaagctcgaagctgtttctgacaacaatttggaactggttaatgaaatactggaggatatcacaccactgatcaatgtggatgagaatgttgccgagctcgtgggcattctgaaggaaccccactttcagtctctgctagaagctcacgacatcgtggcctcaaagtgttatgactcacctccctctagtcccgagatgaataactccagtattaacaaccagcttctgcctgttgatgccatccggatcttaggcatacacaagcgcgctggagagcctcttggcgtgacatttcgcgtggagaataacgacttggtgatcgctagaattctgcacggaggcatgatcgatcggcagggcttgctccatgtcggggatattattaaagaggtgaacggccatgaagtgggaaataacccgaaggagcttcaggagctcttaaaaaatatttccggttcagtgactttgaaaatcttgccaagttatagggacaccataacgccacaacaggtgttcgtgaaatgccatttcgattataacccctataatgacaacttaattccatgtaaagaggcgggacttaagttttctaaaggggaaattttgcaaattgtgaatcgagaggacccaaattggtggcaagcttctcatgtaaaggaagggggaagtgcgggacttatcccatctcaatttcttgaagaaaaaagaaaggccttcgtgagacgagattgggataactccggtcccttttgtggaaccatcagctctaagaagaagaagaagatgatgtatctgacaacgcggaacgccgagttcgaccgccatgagatacaaatttacgaggaggtcgctaagatgccccctttccagcggaaaaccctcgttctgatcggtgctcagggagtgggaagaaggtccctcaaaaatcggtttatagtgctcaacccaacaaggttcggcactacagtaccttttacatctaggaaacctcgggaggacgaaaaggatggtcaggcgtataaatttgtgtcccgatcagagatggaagcagatatcaaagcagggaagtacttggaacacggagagtacgagggcaacttatatggcacgaagatcgattctatcctggaggtcgtgcagactggcagaacttgcattctcgacgtgaaccctcaagcgttgaaagtgttgcggaccagcgaattcatgccatatgttgtgttcatcgccgctccagagctcgagacactcagagccatgcacaaagcagtcgtggacgccggaataaccactaaacttctgactgacagtgatctgaagaaaaccgttgatgagagcgcaaggatacagcgggcatataaccactactttgatctgattatcattaacgataacttggataaagccttcgagaagcttcagacagccatcgagaaacttaggatggaacctcagtgggtgcctattagctgggtatactag

SEQ ID NO: 230169 - DNA, 1287 bp, synthetic construct
  misc_feature 1..1287: note = Description of Artificial Sequence: Synthetic coding sequence
  source 1..1287: mol_type = other DNA
atgaataacagtagtattaataaccaattgttgcctgtggacgcgattcggatcctcggcatccacaaaagagccggtgagcctctgggtgtgaccttcagagtagagaacaacgatctggtaattgccaggatattacacggaggcatgatcgatagacagggactgcttcacgttggcgatatcataaaggaggtcaacgggcatgaagtgggtaacaacccgaaagagttacaggagctgctgaaaaacatatccgggagcgtgacattgaagatcctgccaagctacagagatacgatcacccctcagcaggtttttgttaagtgtcacttcgattataacccatataacgataatctgatcccctgcaaagaagccggtctaaagttctctaagggcgagattctgcagatcgtgaacagggaggacccgaattggtggcaggcgtcccacgtgaaggaaggtggcagtgccggactgattccatcccagttccttgaggagaaaaggaaagctttcgttcggagggactgggacaacagcggacctttctgcggtacaatcagctcaaaaaaaaagaagaaaatgatgtatctcactactcgcaatgcagaattcgaccgccatgaaatccaaatttatgaagaagtcgccaaaatgcctcccttccaaaggaagaccctggtgcttattggagcccagggggtgggccgacgcagtctgaaaaaccggttcatcgttctgaatccaactagattcggcaccaccgttccttttactagccgcaagcctagagaggacgagaaagacggtcaggcttacaaattcgtgtctcggtctgaaatggaagctgacatcaaggctggcaaatacttggagcatggggaatacgaaggcaacctttatggaacgaaaatagactctatactggaagttgtgcagactgggcgaacatgtatcctggatgtgaatccacaggcacttaaagtcctgaggacaagtgagttcatgccctacgtggtgtttattgcggcacccgaattggaaaccctcagggcaatgcataaggccgtcgttgacgccggaattacgaccaagctgttgacggacagcgaccttaagaaaacagtggatgagagcgcgcgaattcaacgagcttataaccattacttcgacctaatcatcataaatgacaatctggataaggcttttgaaaagttacaaactgcaattgagaaattaagaatggagccacagtgggtccccatttcatgggtctactag

SEQ ID NO: 230170 - DNA, 924 bp, synthetic construct
  misc_feature 1..924: note = Description of Artificial Sequence: Synthetic coding sequence
  source 1..924: mol_type = other DNA
atgcagcaggtgttagagaatcttacagagctgccttcgtccaccggcgcagaagagatagatcttatcttcttgaaaggcatcatggagaacccaattgtgaaaagtctggccaaagcccacgagcgccttgaagattcaaagttggaggctgtctccgacaataatctcgaactggttaacgagattctggaagatattacacccctgatcaatgtagacgaaaacgtggccgagctggtaggaatcctgaaagaaccccatttccagagcctcctggaagcccatgatatcgttgccagtaaatgctacgattcccccccatcatcacccgagatgaacaattccagtatcaacaatcaactgttgcctgtggacgcaatccgcattctgggtatccacaaacgcgctggtgaacctttaggagtcaccttccgagttgagaacaatgacttggtcatcgcccgaattctgcatgggggaatgattgaccgccagggcttgctgcatgtgggtgacatcataaaggaggttaatggccatgaggtgggtaacaaccctaaagaacttcaggagctgcttaagaacatttccggttctgtgacattaaagattctgccttcgtacagagacaccataactcctcagcaggtgtttgtgaaatgccactttgactacaatccgtacaatgataatctgataccttgcaaagaggccggactgaagttcagtaagggcgaaatactacagatcgttaacagggaggatccaaactggtggcaggcaagtcacgttaaggaggggggatccgctggcctgatcccttctcagtttttggaagagaagcggaaagcattcgtaaggagggactgggacaattccggcccattttgcggaacaataagctcgaagaagaagaagtag

SEQ ID NO: 230171 - DNA, 654 bp, synthetic construct
  misc_feature 1..654: note = Description of Artificial Sequence: Synthetic coding sequence
  source 1..654: mol_type = other DNA
atgcaacaggtcttggagaacctcaccgagctgccgagttcaaccggggcagaggaaattgatttgatattcctgaaaggcattatggaaaatccaatcgtgaagagtcttgcaaaggcccatgaacgactggaggattctaaactggaggccgtgtccgacaataacctggaattagtcaacgagatcctggaggatattacgcctctgattaacgtggatgaaaatgtagctgagctggtgggtattctgaaagagccacattttcagagcttacttgaggcacatgatatcgtggcctccaagtgctacgatagtcctccttcctcccccgaaatgaataactcctctatcaacaaccaactgctgcctgtagacgctatcaggattcttggaattcataaaagggctggcgagccgcttggcgtgacttttagagtggaaaacaacgatctggttatagctagaatcctgcatgggggtatgatcgatagacagggccttctacacgtaggcgacattattaaagaagtcaacggtcatgaggtgggaaacaacccaaaagaactgcaggagctcctcaaaaacatctctggcagtgtgaccctgaagatcctcccctcttatagggacacaatcactccccagcagtag

SEQ ID NO: 230172 - DNA, 1731 bp, synthetic construct
  misc_feature 1..1731: note = Description of Artificial Sequence: Synthetic coding sequence
  source 1..1731: mol_type = other DNA
atgccagcgcttagcaccggcagcggatcagacacaggcctttacgagctgctggccgcactccccgctcagctccagccacatgtcgactctcaggaggacctcacatttctgtgggacatgtttggtgagaaaagcctccacagcttggtcaagattcacgaaaaattacactattacgaaaaacagtcacctgtgccaattctccacggcgcagcagcgttggccgatgatctggctgaggagctgcagaacaaacctctgaactcagaaatcagagagctgctaaagttgcttagcaagcctaacgtgaaagcgctgttgtccgtgcacgacactgtggctcagaagaactatgatcctgtgcttcccccaatgcctgaggacatcgacgatgaggaggatagtgtaaagatcatccgcctggttaaaaaccgggaaccgctgggcgctaccatcaagaaagacgaacagacaggcgcaatcatcgttgctaggattatgagaggcggagcagccgacagatccggtttgattcacgtgggggacgagctgagggaagtcaacggaattcccgtcgaggacaagagaccagaagagattatccagatacttgctcagtcgcaaggggcaattacctttaaaatcatcccagggagtaaggaggaaaccccctcaaaggagggaaagatgtttataaaggccctctttgactataatcccaatgaggacaaagccattccgtgcaaggaagcgggactgagcttcaagaagggcgatatcctccagatcatgagtcaggacgacgcaacttggtggcaggcaaagcatgaagccgatgctaatcctagagcaggcctcatcccgtccaagcatttccaggaacggaggctggctctgaggcgtccagagatccttgtgcaacctctgaaggttagcaacagaaagtccagtgggttccgtaagtcgtttcgtctgagccggaaggacaagaaaaccaacaagtctatgtatgagtgcaaaaagtcggatcaatacgatacagccgacgtgcccacatacgaggaagtgactccatacagaaggcagactaatgagaagtacagattggtggtgctggtggggccagtgggagtgggtctgaatgaactgaaaagaaaactgctgatcagcgacacccagcactacggcgtgaccgtgccgcacacaacacgagctagacgctcccaggaatcagatggcgtcgaatacatttttatcagcaaacacttgttcgaaaccgacgtgcagaataacaagtttatcgagtatggagagtacaaaaacaactactatggcacctcgatagattccgtccgcagtgttcttgctaaaaacaaggtgtgtctcttggatgttcaaccacatacggtgaaacacctgcgcacactggagttcaagccatatgtcattttcataaagccgccatcaattgagagactgcgggaaacccgaaagaacgcaaaaatcatatcttccagggacgaccaaggggctgccaagccttttaccgaagaagatttccaagaaatgattaaaagcgcccagatcatggaaagtcagtacggacacctgttcgataaaatcatcattaacgatgacttgacggttgctttcaatgagctgaaaactactttcgacaagctggaaacggagactcactgggtgccagtctcatggcttcattcatag

SEQ ID NO: 230173 - DNA, 1731 bp, synthetic construct
  misc_feature 1..1731: note = Description of Artificial Sequence: Synthetic coding sequence
  source 1..1731: mol_type = other DNA
atgccagccttgagtacgggatcaggcagcgatactggcttgtatgagctgttggctgccttgcccgcacaactccaaccacacgtggactcacaggaagacctcacattcctgtgggacatgttcggcgaaaagtccctgcacagcttagtgaaaatccacgaaaagcttcactactacgagaagcagtcccccgtccctatcctgcacggcgctgcagccctggcagacgacctggccgaagaattacagaataaaccccttaactctgaaattagagagcttctgaaattactctctaagcctaacgttaaggcattgctgagtgtccatgataccgtggctcaaaagaactacgacccagtactcccgccaatgcccgaggatattgatgatgaagaagactctgtcaaaattatcaggctcgttaaaaacagagaacctctgggggcaacaatcaagaaggatgagcaaacaggggctatcattgtggcccgtatcatgcggggtggagccgcagacagatctggtctgattcacgtgggggacgagctgcgtgaggtcaatggcatcccagtagaggacaaaagacccgaggaaatcatccaaatcctggcgcagagccagggagccattaccttcaaaataatcccagggagcaaagaagaaacaccatctaaggaggggaaaatgttcatcaaggcgttgtttgattacaatccaaacgaggacaaggccataccttgtaaggaggctggattgagttttaagaagggcgatattctgcagatcatgagccaggatgacgctacttggtggcaagccaaacatgaagccgatgccaatcctagggctggactgatcccatccaagcactttcaagaaagacgcctggccttgagacgacccgagattctagtccagccgttgaaggtgtcaaatagaaaaagctcagggttccgcaagtcgtttcgacttagtaggaaggacaagaagacgaataagtcaatgtatgaatgtaagaaaagtgatcagtatgataccgcagatgtccccacatacgaagaggttacaccttatcgccgacagactaacgagaagtaccgcctagtggtgctcgtgggcccagtgggagtggggctgaacgaattaaaacggaaacttctaatcagcgacactcaacactacggggtgacagtgcctcacacaacacgtgcaagaagatcccaggaatccgacggggtggagtacatcttcattagcaaacacctatttgagacggacgtgcaaaataataagttcattgagtacggcgagtataagaataattattacggtacctcaatagatagtgtacgatctgtcctggcaaaaaacaaggtgtgcctattggacgtccaaccacataccgtgaaacatttgcgcactttggagttcaaaccttacgtaatatttattaaacccccttctattgaaaggctgagagagacacggaaaaatgctaaaataatctcctctcgcgatgatcaaggcgctgctaagcctttcaccgaggaggactttcaggagatgatcaagagtgctcagattatggagtcccagtacgggcacctgtttgacaaaattatcatcaatgacgaccttacagtggcctttaacgagctcaagacaacgtttgataaactcgagactgagactcactgggtgcctgtgtcctggctgcacagctag

SEQ ID NO: 230174 - DNA, 1731 bp, synthetic construct
  misc_feature 1..1731: note = Description of Artificial Sequence: Synthetic coding sequence
  source 1..1731: mol_type = other DNA
atgccagcattgtcgaccggaagcggatcagataccggcttatatgaactgctcgcagccctccctgcacagctgcagccacacgtagattctcaggaagacctaaccttcctgtgggatatgtttggcgaaaagagcctacatagcctcgtaaagattcacgaaaagctccactattacgagaagcagtcccctgttcccattctgcatggggcagccgcactagctgatgatctggcagaagagttacaaaacaagcccttaaattcagagattcgcgagcttttgaagctgttgtctaaaccaaatgtcaaggcactgctgtccgtgcacgacaccgtagcccagaagaactatgaccccgttctccccccaatgcccgaggatatcgacgatgaggaggattcggtgaagattattcggctggtgaaaaacagggaaccactgggcgcaaccatcaaaaaggacgagcagacaggagcaattattgtggcgaggatcatgcggggtggtgcagctgaccgcagcggccttatccacgttggagatgaattacgcgaagttaacggaatccccgtcgaggacaagaggcccgaagagatcatccagattcttgcccaatctcaaggtgctataacctttaaaatcataccaggttctaaggaggaaaccccgagtaaagagggcaaaatgttcatcaaggcgctttttgactacaacccaaacgaagacaaggctatcccctgtaaagaagccggtctctcttttaaaaagggcgatatattacagattatgtcacaggatgatgccacttggtggcaggccaaacacgaggccgacgctaatcctcgagctggattaatcccctcaaagcattttcaggagcgcagacttgcactgcgcaggccagaaatattggtgcagcctcttaaggtgagtaaccggaagtctagcggcttcagaaagtcatttcgcctgagcagaaaagataaaaagacaaataaatccatgtacgaatgtaaaaagagtgaccaatatgataccgctgacgttcccacttatgaagaggtgacaccatatcgtagacaaacaaatgaaaagtaccggcttgtcgtgcttgtcggccctgtgggtgttggtctgaatgagctgaaaagaaagctgttaatctctgacacccagcattatggtgtgaccgttccgcacacaacacgggcaaggaggagtcaggagtctgatggagtggagtacatttttatttccaaacacctcttcgaaacagacgtgcagaacaacaaattcatagaatatggagaatataagaacaattactacggcacttccatcgactccgtccggtcggtattggcgaagaataaggtttgcctccttgatgtccaacctcatactgtgaaacacttaagaacattagagtttaagccttacgttatttttattaagccaccttctattgagagactgagggagacacgaaagaatgctaagataatctcctctagagatgaccagggagccgcaaagccctttaccgaagaagactttcaggagatgataaaatcagctcagattatggagtcacagtacggccacttgtttgataagatcatcatcaacgatgacctgaccgtggcttttaatgagcttaagacaaccttcgacaaactggaaacagagacccattgggtgcccgtgagctggctacactcctag

SEQ ID NO: 230175 - DNA, 939 bp, synthetic construct
  misc_feature 1..939: note = Description of Artificial Sequence: Synthetic coding sequence
  source 1..939: mol_type = other DNA
atgcctgccttgtcaaccggctcagggtcagacacgggactgtacgagctgctggctgctcttcccgcacaattgcagcctcatgtggatagccaagaggacctcacattcctgtgggatatgtttggtgaaaagagcttgcatagcctggtcaaacatttccaagaacgccgtctggcgttacggcgacctgaaatcctggtacaaccgctaaaagtctcaaacagaaaatccagcggcttccggaagagttttagacttagccggaaggataagaagacaaacaagtccatgtatgagtgcaagaagagcgaccaatacgacactgcagatgtgcctacctacgaagaggtaacaccttaccgacgccaaacaaatgagaagtataggttggtggtcctggtgggtcccgttggcgtcggtctgaacgaattaaaaaggaaacttctgatttcagatacacagcactacggcgttaccgtcccgcataccactcgcgcaaggcggagccaggagtcagacggagtagagtacatttttatttccaaacatctctttgaaacagacgtgcagaacaataagtttatcgagtatggtgagtacaagaacaactactacggaaccagcatcgactccgtccgctccgtgctggcaaagaacaaggtgtgccttctcgatgtacagccgcacactgttaagcacctgcggactttagagtttaaaccttacgtaatcttcataaaacctccctctattgaaagactgagagaaactcggaagaacgctaagatcatctcaagcagagacgaccaaggcgctgccaagccattcacagaggaagatttccaggagatgataaaatctgcacaaatcatggagtctcaatacggccacttatttgacaagatcattataaatgacgatcttaccgtcgcctag

SEQ ID NO: 230176 - DNA, 1125 bp, synthetic construct
  misc_feature 1..1125: note = Description of Artificial Sequence: Synthetic coding sequence
  source 1..1125: mol_type = other DNA
atgccagaagacatcgacgatgaggaagactccgtcaagatcatacggctggttaagaacagggaaccgttgggggctaccatcaaaaaggatgagcagacaggcgctatcatcgtcgccagaattatgcggggtggcgctgcagataggtcaggtctgatacatgtcggcgatgaattgcgagaggttaacgggatcccggtggaggacaagaggcctgaggaaattattcagattttagctcagtcccaaggagcaattacctttaagattattcctggctcaaaggaagaaacacccagtaaggagggtaagatgttcatcaaagctctgtttgattataatcctaatgaagacaaagccatcccttgtaaagaggcaggtctgagtttcaaaaagggtgacattctgcagataatgagtcaggacgatgccacctggtggcaggcaaagcacgaagctgacgccaatcctcgcgctggtttgattccaagcaagcactttcaggagaggcggcttgctctgcggagacctgaaatccttgtgcagccacttaaagtgagtaaccgaaagtctagcggcttcagaaagagtttccgtctcagtaggaaggataagaagacgaacaagtccatgtacgagtgcaaaaaaagcgatcagtacgataccgcagacgttccaacttatgaggaggtgacgccctatcgaaggcaaacaaatgagaagtacagattggtagttctggtcggtccagtgggagtcggattgaacgaattgaagcggaaactcctcatctctgatacccagcactacggagtgaccgtaccccatacgactagagcacggagaagccaggaaagtgatggggtggagtacatttttatctcaaagcatctcttcgagaccgatgttcagaacaataagttcatcgagtacggcgagtacaagaacaactactatgggacgagcattgactccgtgagatccgtcctcgctaaaaataaagtatgtctgttggatgtccagcctcacggcccatggtttctcctgcctttaatggcagtgccctggggcgcaaaacccccaaatgcacggatgacatgtgggagtccacttgacttgtag

SEQ ID NO: 230177 - DNA, 1731 bp, synthetic construct
  misc_feature 1..1731: note = Description of Artificial Sequence: Synthetic coding sequence
  source 1..1731: mol_type = other DNA
atgcccgcactaagcacgggctcgggatcagacactggactctacgagctcctggccgcactccctgcgcagctacagccccatgtcgacagtcaggaggacctgactttcttgtgggacatgttcggtgagaagtccctccactctctcgttaagatacacgaaaagctccattactacgagaagcagagtcctgtgccgattcttcatggcgctgccgctttggcggacgacctggccgaggagttgcaaaataaacctctgaactccgaaatcagggaactgctgaagcttttaagcaaaccaaatgtgaaggcactgctgtccgtgcacgacacagtggctcaaaagaattacgaccctgtgttacctcccatgcccgaggacatcgacgacgaggaggattctgttaagatcattcgcctggtgaaaaaccgggaaccccttggcgctaccataaagaaagacgagcagaccggggcaattatcgtcgcccgtattatgagagggggtgcagccgaccggtcaggtctgatccatgtgggggacgagctgcgcgaagtgaacgggatcccagtggaggataaacgaccggaggaaattattcagatcctggcgcaatcacaaggggcaataacatttaagataattccgggttccaaggaggaaacgccttcaaaggaagggaagatgtttatcaaggccctgttcgattacaatcccaacgaggataaggcaatcccatgtaaggaggcaggactatcattcaagaagggagatatattgcagattatgtcacaggacgatgcaacatggtggcaggctaagcatgaggccgatgcaaatcctcgagccggtctgattccatcaaaacactttcaggaacgtcgcctcgcgctcaggagaccggagattttggtccagccactgaaggtgagcaaccggaaatcaagcggttttcgcaagagctttaggctctcccgaaaggacaaaaagacaaataagtcaatgtacgaatgcaaaaagtccgatcagtatgatacggcggatgtaccaacatatgaggaggtcaccccctaccggagacagaccaacgagaaataccggttggtggtactggtgggtccagtgggggttggtctcaatgagcttaagcggaagttgctcatctccgacacgcagcactacggggtgactgttccccatactactcgcgcacgaagaagccaggagagtgacggcgtggagtacatttttatcagcaagcatcttttcgaaaccgacgtgcaaaacaacaagtttattgagtatggagagtataaaaataactattatggaacatccattgattctgtcagatcagtgctcgcaaaaaacaaagtttgtctgttggacgtgcagcctcacacagtcaaacatctaagaacactcgagttcaaaccctatgtaatattcatcaagcccccttccatagagagactccgggagacacgcaagaatgcgaagatcatttccagtcgggacgaccaaggggcagccaaaccctttacggaagaagactttcaggaaatgattaagtctgctcagatcatggagtctcagtacggacatctatttgataagatcataattaatgacgacctgacggtggcttttaatgagctgaagacgaccttcgataaactcgagacagagacccactgggtccccgtctcttggttacactcctag

SEQ ID NO: 230178 - DNA, 870 bp, synthetic construct
  misc_feature 1..870: note = Description of Artificial Sequence: Synthetic coding sequence
  source 1..870: mol_type = other DNA
atgctcgggtggtgcgaggccattgcaaggaatccccacagaatacccaacaacactcggaccccagagatatccggagatctggccgacgcttcccagacaagtactcttaacgaaaagtcaccgggaagaagcgctagtcggagctccaacatttctaaggcctctagcccgactacagggaccgcacctagaagtcagagccgcttatctgtgtgcccctccacccaggacatttgtcgcatttgtcattgtgagggtgatgaagagagtcccctcattacaccctgccgatgtaccggcacactgaggttcgtgcaccagtcctgcctgcatcaatggatcaaaagctcagacactcgatgctgcgagttatgtaagtatgatttcattatggaaacaaagctcaaaccgcttcgcaagtgggaaaaactgcagatgactactagcgaacggaggaagatcttctgctctgtgactttccacgtcattgccataacctgcgttgtttggagtctgtacgtgttgatcgatcgcacagctgaagaaattaaacagggtaatgacaatggggtgctggaatggcccttctggacgaagctggtcgtcgtggcaatcggatttactgggggacttgtgttcatgtacgtgcagtgcaaagtttatgtgcagttgtggcggcgattgaaggcctacaaccgcgtgattttcgtccaaaactgtcccgacaccgctaaaaaactcgaaaagaactttagttgtaacgtcaacacggatattaaggatgccgtggtggtaccagtaccccagacaggagctaattccctcccatccgctgagggaggacccccagaggtagttagtgtgtag

SEQ ID NO: 230179 - DNA, 819 bp, synthetic construct
  misc_feature 1..819: note = Description of Artificial Sequence: Synthetic coding sequence
  source 1..819: mol_type = other DNA
atgaccagctcccatgtgtgctgtaatttcctcaacatgtggaaaaagtccaagatttccaccatgtactatcttaatcaggatgcaaaactgagcaacctgtttttacaggctagcagtccgactacaggcaccgccccacggtcacagtcgaggctgagtgtgtgcccaagcacccaggacatttgcaggatctgtcattgtgagggtgatgaagagtccccgctgattactccatgccgctgcacaggcacccttagattcgtgcaccagagctgcctccaccagtggataaagtctagcgacacacgctgctgcgaactgtgcaagtatgacttcatcatggagacaaaacttaaacccttaagaaaatgggagaaactgcaaatgacaaccagcgagcgacgaaagatcttttgctcagtcacattccacgtcattgccataacatgcgtggtctggagcctgtatgtgctaattgacagaactgcagaggagatcaagcaaggcaacgataatggggtgctggagtggcctttttggacaaagttggtggtagtagccatagggttcaccggaggccttgtcttcatgtatgtccagtgcaaggtctacgtccaactctggcggcgactcaaggcatacaatcgcgtcattttcgtacaaaattgccccgacacggctaagaagttagaaaaaaacttttcctgcaacgtgaacaccgatatcaaggacgccgtcgtcgtgccagtgcctcagacaggggcaaacagtctcccatcagccgaaggtgggcctccggaagtcgtgtcagtgtag

SEQ ID NO: 230180 - DNA, 870 bp, synthetic construct
  misc_feature 1..870: note = Description of Artificial Sequence: Synthetic coding sequence
  source 1..870: mol_type = other DNA
atgctgggttggtgcgaagccattgccagaaaccctcacagaatacctaataacaccaggactccagagataagcggtgatttagctgacgcgtcccagacaagtaccctcaatgagaaatctcctgggaggagcgcgtcacgaagctcaaacattagcaaggcctcctcacccactaccggaaccgcccctagatcccagtctcgcttgagcgtgtgtcccagcacccaggatatatgtaggatttgccactgtgagggtgatgaagaaagccccttgatcactccctgcaggtgcactggcaccctgaggtttgtacatcagtcttgcttacaccaatggattaaatcttctgatacccgctgttgcgagttatgcaagtacgatttcattatggagactaaacttaagccgctgagaaagtgggaaaaactacaaatgaccacttctgaacggaggaaaatcttctgttctgtaacgttccatgtcattgccatcacctgcgtagtgtggtcgctatacgtactaatagacaggacggctgaagagatcaagcagggcaatgacaacggtgttctcgagtggccattttggactaagctggtagtggtggccatcggattcacaggtggcctcgtcttcatgtacgtgcagtgtaaggtgtacgtgcagctgtggagaagactgaaggcgtataatcgtgtgatatttgttcagaactgtccagatacagcaaaaaaactagaaaaaaacttctcgtgcaatgtgaacacagacatcaaagacgcggttgtggttcccgtaccacagacgggcgctaattccttgccgagcgctgagggcggtcctcccgaggtggtcagcgtgtag

SEQ ID NO: 230181 - DNA, 426 bp, synthetic construct
  misc_feature 1..426: note = Description of Artificial Sequence: Synthetic coding sequence
  source 1..426: mol_type = other DNA
atgctggggtggtgcgaagctatcgccaggaacccgcacaggatcccaaataacactcgtacacctgaaatcagtggcgaccttgccgacgcctcacaaactagcactttgaacgagaaatccccaggccgatcggcgtccaggagcagcaatatttccaaggcatcctcccccacaactggcaccgcgccacgcagccagagccggctgtcagtatgcccgtctacccaggacatctgcagaatctgccactgtgaaggcgacgaagagtcacccctgataacaccctgtcggtgcaccgggaccttgagatttgtgcaccagagctgcctccaccagtggatcaaatcttcggacaccagatgttgcgagctgtgcaagtacgacttcattatggaaacgaaacttaagccgttgcgcaaatag

SEQ ID NO: 230182 - DNA, 2427 bp, synthetic construct
  misc_feature 1..2427: note = Description of Artificial Sequence: Synthetic coding sequence
  source 1..2427: mol_type = other DNA
atgctacacgacgctagagatcgtcaaaagtttttcagcgacgtgcaatacttaagagatatgcagcacaaggtggactcggaatatcaggcatgcctgcgaagacaagaatacagaagggaccccaacgagaaaaagcgggatcaattttggggccaggaaacgagttttgagagatctcgcttcagctcaaggagctcttctaagcagtcctcctctgaggaagatgctctgaccgagcccagatccagcatcaaaatctccgcgttcaagtgcgatagcaagttgccggctatcgaccagacttcagtgaagcaaaagcataaatcaacaatgaccgtaaggaaggcagaaaaggtagaccccagtgagccgagtcctgcggatcaggcaccaatggtgttgctgcggaaacggaagccgaacctccgacggttcacagtttccccagaatcccactcacctcgcgcaagcggggataggagccgtcagaagcagcagtggccagccaaggtgccagtccccaggggcgcagatcaagtagtccagcaggaaggcctcatgtgcaataccaagcttaaacggcctaaccaggagagaagaaacttggtgcctagttcacagcctatgacagagaacgcaccagatcgggctaagaaaggggacccctcagcaccgtctcaatcggagctccacccagccctctcgcaagccttccaaggcaaaaattctcctcaagtgctatctgaattcagcgggcctcctctcacccctacaacagttgggggacccaggaaagcttcattccgtttccgggatgaggatttctattctattctatccctgaactcgcgtagggagagtgatgataccgaagaagaaacacagtccgaggaatgtttatgggtgggggtgcgctcaccatgcagcccttcccatcacaagagatcaaggttcgggggaacatccacccctcaggccaaaaataagaatttcgaggagaatgccgaaaactgcaggggacactcgagccgcagaagcgaaccaagtcatgggagcttgaggatctccaacgcaatggagccagccactgagcgaccaagtgccggacagcgactgtcccaggacccaggattgccggatagggagtcggcaaccgagaaggatcgcggtgggagcgagaatgccaagaaaagccccctctcctgggatactaaaagcgagcccaggcaggaagtcggcgtgaatgccgagaatgtatggagcgattgtataagcgtggagcacagacccggaacccacgactctgagggctattggaaggactacttgaactccagccagaatagcctggactactttatctccggtagaccgatctccccccgatcaagtgttaatagctcttacaatccccctgcctcttttatgcactcggcgctccgggatgacattcccgtggatttgtccatgtcttcaacatcagtccatagctccgattccgagggcaattccgggttccatgtctgtcaacccttgtctcccattaggaaccgcaccccttttgcgtcagctgagaatcataattactttcctgtgaattcagcacatgagttcgccgtgcgcgaagccgaagacaccactctgacttcccagcctcaaggcgctcctctgtataccgacctcctcctcaacccccaagggaacctatccctcgtggactctagtagtagctccccgtccagaatgaattctgagggccatctgcatgtctcaggttcgctacaggagaacacccccttcacattctttgccgtgagtcacttccccaaccagaacgacaatggaagcagaatggccgctagtgggtttactgacgaaaaggagacatccaaaattaaggccgacccagagaagttaaagaaactccaagagagtctgctggaagaggacagtgaagaggagggagacctgtgtcggatttgccaaatcgcgggtggatccccatccaatcctctcctggaaccctgcgggtgcgtaggcagcctgcagttcgtgcatcaggagtgcttaaagaagtggctcaaagtgaagatcacttccggagccgaccttggagcagtgaaaacatgtgagatgtgtaagcaaggccttctggtggatctgggagacttcaacatgatcgagttctatcagaaacaccagcagagccaagcccaaaacgagctgatgaacagtggcctataccttgtcctcctgttgcacttgtatgagcaacgattcgcagaattgatgaggctgaatcataaccaagtcgaaagggagaggctctccaggaactatcctcaaccaaggaccgaagaaaacgagaatagtgaacttggtgacggcaatgaagggtctatttcccagtctcaggttgtctag

SEQ ID NO: 230183 - DNA, 2427 bp, synthetic construct
  misc_feature 1..2427: note = Description of Artificial Sequence: Synthetic coding sequence
  source 1..2427: mol_type = other DNA
atgcttcatgacgctagagaccggcagaagtttttcagcgacgtgcagtatctgagagatatgcaacacaaagtcgacagcgaataccaggcctgtctgcgcaggcaggaatacagacgtgaccccaatgaaaaaaagagagatcagttctggggacaggagacatcctttgagcgctccaggttcagctcccgctcatcctccaaacagtcgagctctgaagaagacgccttaacagaacccaggagctcgattaagataagcgccttcaaatgcgacagcaagctgccagctatcgaccagacttcagtgaaacagaagcataagagcactatgacagtaagaaaagcggagaaggttgacccttcagaaccatcacccgctgaccaggccccaatggtgttgctgcgtaagcgcaagcctaatctccgccgatttacagtttctcctgaatcacactcccctagggctagcggagatagaagccggcagaagcagcagtggccagcaaaggtgccggttcctagaggcgcagaccaagtcgtgcagcaggagggtctaatgtgcaacacaaaactgaagcgtccgaatcaggaacgtaggaacctggtgccctcttctcagcccatgacagaaaacgctcctgatcgggctaagaagggcgatccgagcgccccatctcagtctgagcttcaccccgctctttctcaggctttccagggtaaaaacagcccacaggtcctgtcggaatttagcggccctcctctcacaccaaccaccgtggggggtcctcggaaggccagttttcggttccgtgatgaggatttctatagtatcctctcccttaattccaggagagagtccgacgacactgaagaggagactcaaagtgaagagtgtctctgggtaggggttcgctcaccttgctcaccaagccaccacaagcgaagtcgatttggcggaacctcgaccccacaggcaaaaaacaagaatttcgaagaaaacgcagagaactgtagaggccacagctcaagaaggagcgagcccagccatggctccctccgtatctccaacgccatggaacctgctaccgagagaccttcagcgggtcaacgattgtcacaggatccaggactgcctgacagagaatcggccacagaaaaagacagaggaggtagcgaaaatgccaagaagagcccgctgtcctgggacacaaagtcggaaccccgacaggaggtgggcgtaaacgctgagaacgtgtggtctgattgtataagcgtggagcacagacccggaacccacgactcagaagggtactggaaagattatcttaattcctctcaaaatagcttggactacttcatttccgggaggccaatttcaccccgatcctcagtaaacagttcctacaacccgcctgcctctttcatgcactccgcactacgcgacgacatcccagtagacctgtcgatgtcatcaacctccgtccattcctccgattccgagggcaacagtggatttcacgtatgccaaccgctgtcgccaatcaggaacagaactccctttgctagcgccgagaatcataattattttcctgtgaactctgcgcacgagtttgctgtaagggaggcagaagacacaactctgactagccagccacagggtgctcccttatataccgatttactgttaaatccgcagggaaacttatcactggttgattcgagctcttcatccccttccaggatgaactccgaaggtcacctgcatgtgagtgggagtctgcaggagaacacaccattcaccttctttgccgtcagtcactttcctaaccagaacgataatggctctcggatggctgccagcgggttcaccgacgaaaaagaaacgagcaaaatcaaagctgatcctgagaagctcaaaaagctgcaggaaagcctccttgaggaggattccgaggaggaaggcgatctgtgccggatttgccaaattgccggaggatctccaagtaatcctctactggagccttgtggctgcgtgggctccctacaatttgtgcatcaggagtgtctgaagaaatggctgaaagtcaagattacatctggcgctgacctcggggctgtgaaaacttgcgagatgtgcaagcaagggctcttagtggacctcggggattttaacatgatcgagttttaccagaagcaccaacaatcccaggcacagaacgaactgatgaacagcgggttgtatctggtgctgctgctccacttgtatgaacagcggttcgctgagctcatgcgtctcaatcacaaccaggttgagagagagcggctttctaggaattatccacagccacggacagaggaaaacgaaaactcagaattgggagatggtaacgagggtagtatttctcaaagccaggtggtctag

SEQ ID NO: 230184 - DNA, 2400 bp, synthetic construct
  misc_feature 1..2400: note = Description of Artificial Sequence: Synthetic coding sequence
  source 1..2400: mol_type = other DNA
atgctgcacgacgcccgagacaggcagaagtttttttccgatgtgcagtacctccgcgacatgcagcacaaggtggactccgagtatcaggcatgtctcaggcgtcaggagtaccggagagaccccaacgagaagaagagggaccagttttgggggcaggaaacatcttttgagcgttctaggttctcgtcacggtcttcttcaaagcagagctctagtgaggaggatgcgttgacagaaccaagatcttcaattaagatttccgccttcaaatgcgacagcaaactccccgctatcgaccagactagcgttaaacaaaaacacaagtctactatgactgtgaggaaagctgagaaggtagaccctagcgagccaagcccagatcaagcacccatggtacttttgagaaagagaaaaccgaatttgagacggttcactgtgtctccagaatcccacagtccgagggcatccggggaccggtcccggcagaaacagcagtggccggctaaagttccagtgccacgcggtgcggatcaggtggtccaacaggagggattgatgtgtaatacaaagctcaaaagaccaaaccaggagcgccgtaatcttgtccctagcagtcagcctatgacggaaaatgcccctgaccgagccaagaaaggagatccctctgcgccaagccagagtgaactgcatccggctcttagtcaggcattccaggggaaaaattccccacaagtgttgagcgaattcagcggccctcctttgacccctaccactgtgggaggccctcgaaaggccagttttcggttcagagatgaggatttctattctatcctgtcactgaacagtaggagagagtcggacgatactgaagaggagacacagtccgaggagtgtttgtgggttggtgtgcggtcaccctgtagtccctcccatcacaagagaagccggttcggagggacatctacgccgcaggctaaaaataagaattttgaggaaaatgctgagaattgcagaggccattccagccgtaggtccgaaccatcacatggctcgctgcggatttcgaacgcgatggaacctgcaaccgaacgtccctctgccggacagagactaagtcaggatcccggattgcccgaccgggaatcggccacagagaaggatagaggcggatccgagaatgcaaaaaaatcaccactctcatgggacaccaagtcagaacctcgtcaggaagtgggagtgaatgcagagaacgtttggtctgattgcatcagcgttgagcaccgccctggaacccacgactcagaagggtactggaaagactatctcaattcctcgcagaattcccttgattactttatcagtgggaggccaatttcgccacgctcttcagtgaacagcagttacaacccacccgcatctttcatgcatagcgcgctaagagacgatatcccagtggatctgtctatgtcaagtaccagcgtccacagctcagattccgagggtaactcaggtttccacgtctgtcagcctctcagccccatacggaataggacacctttcgcctcagccgagaaccacaattactttcctgtgaattccgcgcacgagttcgccgtcagggaagctgaggatacaaccctgacgagccagcctcagggcgcacccctgtatacagatctgttgctgaatccacaggggaatctgtccctggttgattcatcttccagttcccccagtcgcatgaacagcgaagggcatctacacgttagcggttctctacaggagaacacaccatttaccttctttgctgtctctcacttccctaaccaaaacgataatggcagccggatggcagcaagcggcttcactgacgaaaaggaaacaagcaaaattaaagccgatcctgaaaagctgaagaagctccaggagtcgctgctggaggaggacagcgaagaagagggcgacctctgtcggatttgtcaaatcgctgggggaagcccctctaaccccttgctggagccatgtggatgtgtaggatcgctgcaatttgtccatcaagagtgtctgaaaaaatggctgaaggtgaaaatcacgagcggtgccgatctgggggcagtgaagacgtgcgaaatgtgcaaacagggcttgctcgtagatctcggcgacttcaatatgatagagttttaccagaagcatcaacagagccaggcccagaacgaactgatgaatagcggcttgtatttagtgctgctgctgcacctctacgagcagaggttcgcagaattgatgcgcctgaatcacaaccaggtcgaaagggaacggctgagtcgtaactacccccagcccagaacagaggagaatgagagtagattctggggaccagttctaccattctag

SEQ ID NO: 230185 - DNA, 1209 bp, synthetic construct
  misc_feature 1..1209: note = Description of Artificial Sequence: Synthetic coding sequence
  source 1..1209: mol_type = other DNA
atgagcttcgaagggggacatggagggagcagatgtcgtggcgcagaatctggagacgcagaaccgcctccccagcccccaccccctccaccgccaacgccaccacccggagagcctgcacccgtccccgcagcccctagatatctgcctccattgccggcaagcccggagacaccggaaagagcagccggtccttccgagcccttaggcgaggtggccccacggtgccgcggagccgacgagctaccccctcccccacttccgttgcaaccagccggtcaggaagttgcagccgcaggcgacagtggtgaggggcctagaagactgccggaagccgctgccgcaaagggtggtcccggtgaatcagaggctggcgctggcggagaaagagaaaggcggggagcgggtgaccaaccagagactcgctcagtctgttcttccagatccagtagctcaggcggtggggatcagcgagccggtcaccagcatcagcatcatcagcccatctgcaaaatttgttttcagggcgcagagcagggtgaattgttgaatccctgtcgttgtgatggcagtgtgcggtacacacaccagctgtgtctattgaagtggatctctgagaggggcagctggacttgtgaactgtgttgctacagatatcacgtaattgccattaagatgaagcaaccttgtcagtggcagagcatatctatcacccttgttgagaaggttcagatgatagccgtcatcctcggaagcctctttcttattgcttcagtgacttggctcctgtggagtgcattcagcccgtatgccgtgtggcagcgcaaagatatcctgttccaaatttgttacggcatgtacggctttatggacttggtttgcataggtctgatcgtacacgagggcgctgccgtctaccgtgtctttaagaggtggcgagctgtgaaccttcattgggacgtacttaattatgacaaggccaccgacatagaggagtcctccagaggggaatcctcaacctctcgaaccctgtggctgcctctgacagctttaagaaatagaaatttggtgcaccccactcagctgacctcccccaggtttcagtgtgggtacgtcctgttacatctttttaatcgaatgagaccgcacgaggatttgtccgaggacaactctagcggtgaggtggtcatgcgggtgaccagtgtgtag

SEQ ID NO: 230186 - DNA, 1818 bp, synthetic construct
  misc_feature 1..1818: note = Description of Artificial Sequence: Synthetic coding sequence
  source 1..1818: mol_type = other DNA
atggccctgagaaaaggcggactcgccttagctctgttattattaagctgggtcgccctaggcccacggtcattagagggagctgatcccggaacacctggtgaggccgaggggccagcctgtccggctgcgtgtgtatgcagctacgacgacgacgctgatgaactgagcgttttttgtagtagtagaaacttaaccagactgcctgacggtgtccctggtggtacacaagccctgtggctggatggcaataatctcagttctgtcccacccgctgcctttcagaacctcagcagccttggatttctgaaccttcagggtggacagctaggatctttagaaccgcaggccctcctcgggctggagaatctctgccacctgcatctggagaggaatcaactgcggagcctcgctttaggcacctttgctcacacgcccgctcttgcatcgcttggcctgtccaacaaccggttgtccaggctcgaagatggcctgttcgagggcctcggttcactgtgggatttgaacttggggtggaattcgctggccgttctccccgacgcagcttttcgagggttgggaagtctgagagagctggtgctagccggtaaccgcctcgcgtatttacaacccgctcttttcagcggcctcgccgaactcagagagctggacctatccaggaacgcattaagggcaattaaggcgaacgtgtttgttcagctgcccagactccagaagctgtatctcgataggaacctgattgctgccgtcgcccctggagctttcctgggcctgaaagcgttgcgctggctggatctcagccataatcgggtcgcaggattgctcgaggacacttttcccggtttgctgggtctccgggtcctgcgtctgtcccacaatgccatcgcatcgctgaggcctcggaccttcaaagatctgcatttcctagaagaactacagctggggcataaccggatccgtcagctggccgaacggagcttcgagggcttagggcagctggaggttttgaccttggaccacaatcagctgcaggaagtgaaagcaggcgcatttctaggtcttaccaatgtggctgtgatgaacctgtctggaaattgtctgcgtaatctgcccgagcaggtgtttaggggtctgggtaagctgcacagtctgcacctagagggctcttgcctcggacgcatcagaccacacactttcaccggtctgagcggtctcaggcgcctcttcctaaaggataatgggctcgtgggcatcgaagaacagagcttgtgggggctggcagagttacttgagctggatttgacatcaaatcagctaacacatctccctcatcgtttatttcaggggttgggcaaattagagtacttgctcttgagcaggaacagactggctgaattaccagcggacgcactgggccctctgcagagggccttctggttggatgtttctcataacagactcgaagctctccctaacagcctgctcgcacccctgggacgactgcgatatctgtcactgagaaacaattcattaagaacctttacacctcagccacctggtttggaaaggctctggctggaaggaaacccctgggattgtggatgtcctctcaaagcccttcgagacttcgccctccagaatcctagcgcagtgccacgcttcgtgcaggctatctgtgagggcgatgattgccagcctcccgcatacacctataataatatcacatgcgcttcaccacccgaagtagtcggtctcgacctgagagacctttccgaagctcatttcgcaccatgttag

SEQ ID NO: 230187 - DNA, 531 bp, synthetic construct
  misc_feature 1..531: note = Description of Artificial Sequence: Synthetic coding sequence
  source 1..531: mol_type = other DNA
atgacgactggcgactgctgccatcttcccggaagcctgtgcgactgctcgggaagcccggcattctctaaggtcgtggaagctaccggtctcggccctccacagtatgtggcccaggtaacctcacgggacggccgactactgtctactgttatccgagctctcgacaccccatcggacggccctttctgtcggatttgtcacgaaggtgccaatggggaatgcctgctcagtccgtgcggctgcaccggaactctgggcgcagtgcacaagagctgtctggaaaagtggctcagtagtagcaacacgtcttactgcgagctgtgtcacacagagttcgcggtggagaagaggcctcgccctctaactgaagtaagctttcgataccattgccagttatatagcgagtggagaaagacaaatcagaaggtaaggttaaaaatccgagaggctgattcacccgaggggcctcagcacagcccgttggcggctggtctgctcaagaaagttgctgaggaaacgcccgtctag

SEQ ID NO: 230188 - DNA, 741 bp, synthetic construct
  misc_feature 1..741: note = Description of Artificial Sequence: Synthetic coding sequence
  source 1..741: mol_type = other DNA
atgactactggggattgttgtcatctccccggtagcctgtgcgattgttctggaagtcccgctttctctaaagtggtcgaagctaccggcctcgggccaccacaatacgtggctcaggtgaccagtcgcgacgggagactgttatctacagtgattagagccctggataccccatcagatggccctttctgcaggatatgtcatgaaggtgccaatggagaatgcttgttgtccccatgcggctgtacagggaccctcggcgcagtgcacaagtcctgtctcgagaagtggctttccagctctaacacaagctactgcgagctgtgtcacacagagtttgctgtggagaagcgtcctcgccctctgaccgaatggctgaaggatccagggccaaggacagaaaaacgcacgctctgttgcgatatggtgtgttttctgtttataaccccacttgctgccatctctggctggttatgtcttaggggagctcaggatcacttgcgtctgcattcccagctagaagccgtgggtctgatcgccctcacaatcgcactatttaccatttatgtgctatggactctggtctcatttcggtaccattgtcagctgtattcggagtggcggaagaccaatcagaaggtgcgactgaaaatacgggaggctgatagccccgagggccctcaacattcaccactcgctgctggactcctcaaaaaagtggctgaggaaactcccgtctag

SEQ ID NO: 230189 - DNA, 762 bp, synthetic construct
  misc_feature 1..762: note = Description of Artificial Sequence: Synthetic coding sequence
  source 1..762: mol_type = other DNA
atgactactagccggtgtagccacctgcccgaagttctaccggattgcacaagtagcgccgctccagtggttaagaccgttgaggattgcggatccctagtcaacgggcaaccacagtacgtgatgcaagtgtccgctaaggacggccagctgttgtctacggtcgtgcggaccctcgccactcagagtcctttcaacgataggcccatgtgcaggatatgtcacgagggctcatctcaggaagacctacttagcccgtgtgagtgcacagggacattgggaacaatccatcggagttgtctcgaacattggcttagctcctccaacacaagctattgcgagctttgccatttcaggttcgcggtagagagaaaaccaaggcctctcgtagaatggttgagaaatccgggacctcagcatgagaagagaaccttattcggcgatatggtctgttttctcttcatcactcccctcgctaccatcagcgggtggttatgtttgagaggggctgtggaccatctccatttcagtagccggctggaggcggttgggctgatcgccctcacggtagccttgttcacaatatacctgttttggacgctggtctccttcagatatcactgtcgtctttacaacgagtggcggaggactaaccaacgggtgatcctcctcattccaaagagtgttaatgtgcctagcaatcagccctcattgctcgggctccattctgtgaagaggaattctaaggagacagtagtttag

SEQ ID NO: 230190 - DNA, 1233 bp, synthetic construct
  misc_feature 1..1233: note = Description of Artificial Sequence: Synthetic coding sequence
  source 1..1233: mol_type = other DNA
atgctcatgcccctgtgcggactgctatggtggtggtggtgctgctgtagtggctggtattgttacggcctgtgtgcaccggctccccagatgctcagacatcagggtctgctgaagtgtcgatgccgtatgctgttcaacgacctgaaagtcttcctacttcggaggccgcctcaggcacccttgccgatgcatggcgacccacagccacctggcctggcagccaataacactttacctgccctgggggctgggggatgggccggatggcgcggacccagagaagtggtgggccgtgagcctccacctgtccccccacccccacctctgccaccgtcttccgtcgaagacgattggggaggcccagccactgaaccacctgctagcctgttgagctctgctagctcagatgacttctgcaaggaaaaaaccgaggaccggtactccctagggagcagcctggactcaggcatgaggactcccctgtgcaggatctgtttccagggacccgaacaaggggagctgctctccccatgccggtgcgatgggtctgtgaaatgtactcaccagccctgcctcatcaaatggatctcggagaggggttgctggagttgtgaactttgctactacaagtatcacgtgattgccatctcaacaaagaatccactgcagtggcaggccatctccttaacggtcatcgagaaagtgcaagttgccgctgctatcctgggatctctcttcttgatcgcttctatcagctggctaatatggagcacgttttccccaagtgcccgatggcagcggcaggatcttctcttccagatttgctacgggatgtatggctttatggacgtggtctgtatcggactcatcatccacgagggtccgagcgtttaccgtatctttaagcgttggcaggctgtcaaccaacaatggaaagtgctgaattatgataaaacaaaggatttagaagaccaaaaggctggaggtaggaccaacccaagaaccagcagctctacccaggccaatatcccatcatctgaggaggaaactgctgggacccccgcacctgaacagggacctgcgcaggcagcagggcatccctcaggacccctgtctcaccatcactgcgcatacacgattctccacatcctgtcacacctgcggcctcacgagcaacggagccccccaggatccagtagggaacttgtcatgagggtgactacagtgtag

SEQ ID NO: 230191 - DNA, 837 bp, synthetic construct
  misc_feature 1..837: note = Description of Artificial Sequence: Synthetic coding sequence
  source 1..837: mol_type = other DNA
atgcctgatcaggctcttcagcagatgctggatcgatcctgttgggtgtgctttgcgacagacgaggacgataggactgctgaatgggtccgcccttgcagatgtcgagggtctaccaagtgggtccaccaggcatgcctgcagagatgggtcgacgaaaagcagagagggaattccacggcacgtgtcgcttgcccacaatgtaacgccgagtatctcattgtcttcccaaagctcggaccggtggtttacgtgctggatctagccgacaggctaatatcaaaggcgtgtcccttcgccgcagcaggtatcatggtgggcagcatttactggacagcagtgacctatggggctgtgacagtcatgcaagtagtgggccacaaagaaggcttggatgtgatggagcgcgcagatcccctgttcttactgatcgggttacctacaattcctgtgatgctcattctgggtaaaatgatacgctgggaggactatgtcctaaggctttggagaaaatattctaacaagctgcagatccttaactcaatatttcctggaatcggttgtccagtgccaagaatccccgctgaggcaaacccgctcgcagaccatgtcagcgcaaccaggattttatgtggagcactagtgttccccacgattgctaccatcgtgggaaaattaatgttttcaagtgtgaactccaatctacagcggaccatccttgggggtattgctttcgttgcaattaaaggcgctttcaaagtctactttaaacaacagcaatacctccgacaagcgcatcggaagattctaaactaccctgaacaggaggaagcatag

SEQ ID NO: 230192 - DNA, 2733 bp, synthetic construct
  misc_feature 1..2733: note = Description of Artificial Sequence: Synthetic coding sequence
  source 1..2733: mol_type = other DNA
atggataccgccgaagaggacatctgtagggtgtgtcgctccgaaggaactcctgagaagcccctgtatcacccatgcgtgtgtactggctcgatcaagtttatccaccaggaatgcttggtacagtggctgaaacacagccggaaagaatactgtgaactgtgcaagcaccgatttgcatttacacccatttacagccctgacatgccttctagattgccgattcaggatatatttgccggactggtgacttccatcgggacagccataaggtactggttccattatacattggtggcttttgcctggctgggggtggtacccctaaccgcatgccgaatctacaagtgcctgtttactggttctgtttcatcgctgctgacgctgcccctggatatgctcagcacggaaaacctgcttgccgattgcctccaaggatgcttcgttgtcacatgtaccctttgtgcttttatatctctcgtctggttgcgggagcagatagtgcacggcggagcccctatttggctggagcacgctgctccgccatttaacgccgctggccaccaccagaacgaagctcccgcaggaggtaacggggctgagaatgtcgccgcagaccagccagcaaatccgccagcagagaatgcagtcgtgggcgagaatccagacgctcaagacgatcaagcagaggaagaggaggaagataacgaggaggaagacgacgccggagtggaagatgccgcagacgcaaacaacggggctcaggatgacatgaattggaatgcattggagtgggaccgggcagcagaggagctgacttgggagagaatgttaggcttagacggttccctggtgtttctggagcacgtattttgggtagtgagcctcaatactctgttcatcctggtgttcgcgttctgtccataccatataggacatttctctttggtggggttgggctttgaagagcatgtgcaggcctcccatttcgaaggtctgatcacaaccattgtgggttacatcttactggcgatcacgcttatcatctgtcacgggttagctaccctggtaaagtttcacagatccagacggctactgggggtgtgttacatcgtggtgaaggtgagcctgttggtcgtggttgagatcggagtattcccattgatctgcggttggtggttggacatttgcagtctggaaatgttcgatgcaacattgaaggaccgcgagctttcatttcagagcgcgccagggacaactatgttcctccattggctggtcggtatggtctatgtattttatttcgcgtcatttatcctactccttcgggaggtcctcaggcccggagtgttgtggtttctgcgaaacctcaacgatccggacttcaatcccgtacaagagatgattcatttgccaatttaccgccacctgcgcagattcatcttgtcagtgatagtcttcggcagcattgttttgctcatgctgtggctccctattagaatcattaagtctgtgcttccgaacttcctgccatataacgtcatgctgtactctgacgctcccgtgtcagaactctcgctagaattgcttctcctgcaggtcgtgctgccggcattgttggaacagggtcacactagacagtggttgaaaggactggtgcgcgcatggactgtgacggcaggctaccttctggatctccactcttacctcctcggagaccaagaagaaaatgagaattctgccaatcagcaggtgaataataaccagcacgcgagaaataacaatgccattcctgtggtcggagaagggcttcacgccgcacatcaagcaatccttcagcagggcggacccgtagggtttcagccctaccggcgaccactcaatttccccctgaggatcttcctgctgattgtgtttatgtgcatcactttgctcatcgcatccctcatctgcctgaccctgccggtgtttgctggcaggtggctcatgagcttctggacaggcaccgccaagattcatgaattatacactgcggcttgtggtctctacgtgtgctggctcaccatcagggcggtcaccgtcatggttgcgtggatgcctcagggccgacgggtgatcttccagaaggtcaaggaatggtcgctaatgataatgaaaactctgatcgtagccgtgttactggccggagtggtccctctcctcctgggattgctttttgagcttgtgatagttgcaccactccgggtgcccctagaccagacacccctgttctacccatggcaagattgggccctgggcgtcctgcatgcgaaaatcattgcggctatcactttgatgggcccacagtggtggctgaagacggtgatagaacaggtttacgccaacggtattcgtaacatagatttacactacatagtacgaaagctcgccgcaccagttatttctgtcctcctcctcagtctttgtgttccatacgttattgcgtccggcgtcgtgcccctgttgggagtcactgccgaaatgcagaatctggtacatcggaggatttatccttttctccttatggtcgtcgtacttatggctattctgtcatttcaggtcagacagtttaaaagactgtatgaacatatcaagaacgacaagtacctcgtaggtcagagattggttaactacgagcgcaagagcgggaagcaggggagttctcctcctccaccacagagcagtcaagagtag

SEQ ID NO: 230193 - DNA, 2115 bp, synthetic construct
  misc_feature 1..2115: note = Description of Artificial Sequence: Synthetic coding sequence
  source 1..2115: mol_type = other DNA
atggaaagcaagccatcccggattccaagaaggatctccgtgcagccctcctctagcctgtctgccaggatgatgtccgggtcccgaggctcatctcttaatgatacataccactcaagagattctagcttccggctcgacagcgaataccaaagtacgagtgctagtgcatcagcctcaccgtttcagtctgcctggtacagtgagagtgagataacccagggcgcacgttcgcggagtcagaaccagcagcgagaccacgattcgaaacgccctaagctctcctgcacaaattgtaccacctcggctggacgcaacgtaggtaatggcctcaataccctgtccgatagctcatggagacattctcaagtgcctcggtccagctctatggtcctgggctcttttgggactgacctgatgagagagcgtagggacctggaaagacgcacggactcctccatctctaatcttatggactactcacatcgcagtggcgactttaccacctctagttatgtgcaagatcgggtgcctagctattcccagggtgcacgcccaaaagagaacagtatgagtacacttcagcttaatacatcctctaccaaccaccagctgccttctgaacaccagacaatcctatccagtagggacagccgaaatagcctccggtccaatttctcaagcagagagagtgaaagtagtaggtccaacacccagcctggcttttcctactcaagctcccgagacgaggctcccattatttctaattctgaaagggtggtgtcttctcagagacctttccaggagagctccgacaacgaaggcagacgcaccactcggcgattactgtctagaattgcctccagcatgagttccacattcttttcccgccgtagcagccaagactccctcaacactcggtcactgaacagcgagaactcctatgtaagtccgaggatcctgaccgcctcccaaagcaggagcaacgttcccagtgcatctgaagtgccagataaccgggcatctgaagccagccaagggtttcggttcttaaggcggaggtggggactgtcatcactgagtcataaccactcctccgagtcagactcagagaattttaatcaagaaagcgaagggcgtaacacgggtccctggctgtcctcttcactccgcaaccggtgtacaccacttttttctagacgtaggcgggaaggcagagacgaatcatctcgtattcccacatctgatacttctagtagatctcatatctttaggcgagagtctaacgaggtggtgcatctggaggctcagaacgaccccctgggagccgcagcaaaccgaccacaagcctcagcggcttccagtagtgccacaacggggggtagtactagcgactcagcacagggcggacgaaacaccgggatttctggtatcctgcctggtagcctgttccggttcgctgttcctccagcattgggctctaacctcacggataatgtgatgattacagtggatattattccttccggctggaactctgccgacggtaagtccgacaagactaagagcgctccctcacgtgatcccgaacgattacagaaaattaaggaatctctgctcctggaggattctgaggaggaagagggtgatctctgtcgcatctgccagatggcagcggcaagttcaagtaatctgctgatcgagccctgcaaatgcactggttccctgcagtacgttcaccaggactgtatgaagaaatggctgcaagccaagatcaactcaggaagctccctggaggcagtaaccacgtgtgagttgtgcaaggagaagcttgagcttaacctggaagacttcgacatccatgagcttcatcgcgcacacgcaaacgagcaggccgagtatgaattcatcagcagcggactatatctcgtggtgttgctgcacctttgcgagcagagcttttccgacatgatgggtaataccaatgagccctccacccgagttaggttcattaacctggccagaaccctgcaagcacacatggaggatcttgaaacctccgaggacgactctgaggaagacggagaccacaatagaaccttcgatatcgcatag

SEQ ID NO: 230194 - DNA, 2115 bp, synthetic construct
  misc_feature 1..2115: note = Description of Artificial Sequence: Synthetic coding sequence
  source 1..2115: mol_type = other DNA
atggagagcaaacccagtcggatccccagacgcatctccgtgcaaccctcttcaagtctgagcgcaaggatgatgtccgggagtcgcggttcgagcctgaatgacacctaccattcgagggatagttcttttagactggactccgaataccagagtacctcagccagcgcatccgcctcaccttttcagagtgcctggtattccgagtcagagataactcagggggcacgcagtcgctcccagaatcagcaacgcgatcatgactcaaagcggccaaaactgagttgtaccaactgcactacatccgccggtaggaacgtgggcaatgggttgaatacactatccgacagcagctggcgacactcccaggtgcctagatcttctagcatggtcctaggcagctttggcacagacttgatgagagaacgcagggatttggagcgccgtaccgattcaagcatcagtaatcttatggattattcccaccggtctggggattttacaactagttcgtacgtccaagaccgggtcccctcctactcgcagggtgctaggccaaaggagaattccatgtcaacattacagctgaacaccagcagtacaaaccatcagctgccttcagagcaccagactatcctgagctcgcgcgactctcggaattctcttaggtccaatttcagttcccgggaatcagagagctctagaagtaatactcaaccaggcttttcgtactcaagctctcgggacgaggccccaattatctctaatagcgagagggttgtatcctctcagcggccattccaggagtccagcgataatgaggggagacgaacgacaagacggttgctcagtcggattgccagtagcatgagcagcaccttcttcagtcgcaggagtagtcaggactcactgaacacccgctccttaaatagcgagaatagctatgtgtcccctcgcattctcacggcctctcaatctcgctccaatgtcccaagtgctagtgaggtgcccgataatagagcttcagaggcctcgcagggttttcgattccttagacgcaggtggggcctctcaagcctgagccacaatcactcatcagagtccgactccgaaaacttcaaccaggaaagtgagggccgaaacacaggcccatggctgagctcaagcttgcggaaccgctgtacgcctctattctccaggagacgaagagaggggagggatgagtcttcccgaatacccacttccgatacgagctctagatcccacatttttcggcgagaaagtaatgaagtagtccacctggaggctcagaatgatccactaggcgctgcagctaaccgacctcaggcctcagctgccagctcctcagccaccactggaggatcaactagtgattccgcccagggtggcaggaataccggtatctccggcatattgccaggctccctttttagatttgcagtaccccctgccctgggtagcaatctcacagacaacgtgatgatcaccgtggacatcatcccctcgggatggaattcagctgacggcaagagcgacaaaactaagtccgccccttcaagagaccctgaaagactccagaagatcaaagagagccttctacttgaagatagcgaggaagaggaaggcgacctgtgtagaatttgccaaatggctgctgccagcagcagtaacctccttattgaaccatgcaaatgtactgggagcttacagtatgtgcaccaggactgcatgaaaaagtggcttcaggctaaaatcaactctggctcatccctcgaggccgtgacaacctgtgagctgtgtaaagaaaagctagaattgaatctcgaggacttcgatattcacgagttgcaccgggctcacgcaaacgaacaggctgaatatgaattcatctctagcgggctgtacctagtggttctgctgcacttgtgcgagcagagcttttctgacatgatgggcaacactaacgagccgagtacccgggtccgatttattaatctggccaggacccttcaggctcacatggaggacctggagacttcggaagacgactccgaagaggacggggaccataaccgtacctttgatatcgcctag

SEQ ID NO: 230195 - DNA, 306 bp, synthetic construct
  misc_feature 1..306: note = Description of Artificial Sequence: Synthetic coding sequence
  source 1..306: mol_type = other DNA
atggagagcaagccttcaaggattccccgtcggatctcagtgcagccaagtagcagcctgtctgcaagaatgatgtccggctcccggggaagttcattaaatgatacctatcactcacgcgatagttcatttcggctggacagtgaatatcagtctacatctgcctcggcttccgcaagtcccttccaaagtgcctggtattctgagtcagaaattacacaaggggcacggagtcggtcccaaaatcagcagcgcgaccacgactcgaagcggccaaaactctcatgcaccaactgcactacgtag

SEQ ID NO: 230196 - DNA, 1908 bp, synthetic construct
  misc_feature 1..1908: note = Description of Artificial Sequence: Synthetic coding sequence
  source 1..1908: mol_type = other DNA
atggagagtaagccttctagaataccacgcaggatcagcgtccagccgtcctcaagccttagcgcccgaatgatgagcggctcccgcggttcatccctgaacgatacctaccattctagggatagctcatttcggctagactcagagtatcaatccacaagcgcttccgcatctgccagtccatttcagtctgcctggtactcggaatcagagattacacagggcgctaggtcacggtcccaaaaccaacagcgagatcatgatagtaagagaccaaagctctcttgcacgaattgtactacctctgcaggcaggaatgtggggaatggcctcaatacgctgtctgatgtacaggaccgcgtgccgagctacagtcagggagctcgcccaaaggaaaacagcatgagtactttgcagttgaataccagctccacaaatcatcagctcccttccgagcatcaaaccatactctcaagccgggacagccggaactcactccgcagtaatttttcctcccgtgaaagcgagtccagtagaagcaacactcaacccggatttagttacagtagcagccgagacgaggcccctatcatttctaactctgaacgagtagtgtcctcccagcgcccatttcaagagtccagcgacaacgaagggaggcggactaccagaagactcctgtctcgaatagcttccagtatgtctagcaccttctttagtcgaagatctagccaggatagcttgaataccagatcacttaatagtgagaattcttacgtttctcccaggatcctgactgccagccagagcaggtctaatgttccaagcgcgagcgaggtgcccgacaatcgcgcttccgaagctagccaggggttcagatttctgagacgccgatggggcctatcctcactttcacacaaccactctagtgagtccgattcagagaattttaaccaggaatccgaaggcagaaacactggaccctggctgtcctctagtctacgcaatagatgtacaccactctttagccgccgaagacgcgagggtagggacgagtcctcgagaatccccacctctgacacctcaagtcgatctcacatttttcgcagagaatcgaacgaagtcgtgcatctggaagctcagaatgatcctctgggggctgcggctaacagaccccaggcatccgcagcctcctcgtcggctaccacagggggaagcacatccgacagtgcacagggcggacgaaacaccgggatttcaggcatcctgcctggtagcctgtttagattcgccgttcctccagcactaggaagtaacctaaccgacaatgtgatgataaccgtagacattattccttctggctggaacagtgccgatggcaagagcgacaaaactaagagtgccccatcccgcgaccccgaacgattacagaaaataaaagagtcgctgttgcttgaggactctgaagaagaagagggcgacttgtgcagaatctgccagatggccgcagccagttccagcaaccttcttattgagccttgcaagtgcacagggagcctccagtatgttcatcaggattgtatgaaaaagtggctgcaggcaaagataaacagtgggagctctctagaggctgtcaccacatgcgaactgtgtaaggaaaaactcgaattaaacctcgaagactttgacatccatgaattgcacagggcccatgcaaacgaacaagccgagtacgagttcatctcctctggcctgtacctcgtcgtactgctccacctatgcgagcagtcctttagcgatatgatgggtaataccaatgagccctcgaccagggtgagactacagcggatgattcccaagaaaaccgagaccatcacagggcaccttattctgcccaacttcatctag

SEQ ID NO: 230197 - DNA, 876 bp, synthetic construct
  misc_feature 1..876: note = Description of Artificial Sequence: Synthetic coding sequence
  source 1..876: mol_type = other DNA
atgtccatgcccttgcatcaaatctctgccatcccaagtcaggacgcaatttctgccagagtttaccgtagtaagactaaagagaaggaaagagaggaacagaatgagaagactctcggacactttatgagccatagctccaacatatcaaaggccggaagtcctccctccgcgtcagctccagcgcctgtgtcttctttcagcaggacttcgattacccctagttcacaggacatttgccgtatttgtcactgcgagggagacgatgagtccccacttataacaccatgtcactgcaccggctctctgcatttcgttcatcaagcatgtttacagcaatggataaagagctccgacaccaggtgttgcgagctctgtaagtacgagtttattatggagacgaagctaaagccactgcggaagtgggagaagctgcagatgacttcttccgaacgcaggaaaataatgtgttccgtcaccttccacgtgattgctattacatgcgtggtctggagcttgtacgtcttaatcgaccgaacggccgaggagatcaaacagggacaagcgacgggaatcttggaatggcccttctggacaaaactggttgtagtggcaatcggtttcaccggtggtctgctgttcatgtatgtgcagtgtaaggtgtacgtccagctgtggaagcgactgaaagcttacaatagagtgatttatgtgcagaattgtccagagacctcaaaaaaaaacatattcgagaaaagcccgttaactgaaccaaatttcgaaaataagcacggctacggcatctgtcacagcgatacaaactcaagctgctgtaccgaaccggaggacaccggggctgaaatcattcacgtgtag

SEQ ID NO: 230198 - DNA, 876 bp, synthetic construct
  misc_feature 1..876: note = Description of Artificial Sequence: Synthetic coding sequence
  source 1..876: mol_type = other DNA
atgagcatgcccctacatcagatcagcgcaattcctagccaggacgccatcagcgccagagtctaccgaagtaagactaaagagaaggagagggaagagcagaacgagaagactcttggccacttcatgagtcattcttctaacatctccaaagctggaagccctccctccgcttccgctccagcacctgtttcttcttttagtaggacgagtataaccccatcttcccaggatatctgcaggatatgtcactgcgagggtgacgatgagtctccgcttataaccccttgccactgcaccggatcactgcatttcgtacaccaggcatgcctgcaacagtggataaaatcatctgacacccgatgctgcgagctttgtaaatatgaattcattatggagacgaaacttaagcccctgcgtaagtgggagaagctgcaaatgacaagttcggaacgcagaaagataatgtgtagcgtgacgttccacgtgatcgccattacctgcgtggtctggtcattgtatgtgctgatcgaccgaactgccgaagagattaagcaaggccaggcgactggaattcttgaatggcccttttggaccaaactggtggtcgttgcaataggtttcaccgggggactgctgttcatgtacgtacagtgcaaggtatacgtgcagctttggaagagacttaaagcatacaatagggtgatttacgtgcagaactgccccgagacatccaaaaagaatatctttgagaagagtccactgacagaaccaaattttgagaacaagcacggctacgggatctgtcactctgatacaaatagtagttgctgtactgagcctgaagataccggggcagagattattcatgtatag

SEQ ID NO: 230199 - DNA, 876 bp, synthetic construct
  misc_feature 1..876: note = Description of Artificial Sequence: Synthetic coding sequence
  source 1..876: mol_type = other DNA
atgtctatgccactccaccaaatatcggccattccatcacaggacgctataagcgcgcgtgtctatcgatccaagacaaaagagaaggaacgtgaggaacaaaatgagaagacactgggtcactttatgtcccactcaagtaacatctcaaaagctgggtcgcccccttccgcatctgctccggctcctgtctctagcttctcaaggactagtataaccccatcgtcccaggacatatgtagaatctgccactgtgaaggagatgatgagtccccacttatcaccccctgtcactgtaccggatccctacactttgtccaccaggcgtgcctacagcagtggatcaagagcagcgacaccaggtgttgcgaactgtgtaaatacgagttcatcatggagacaaaattgaagcccctgaggaagtgggagaagcttcagatgaccagttccgaacggcgtaaaattatgtgtagtgtgacatttcatgtcatcgcaatcacatgtgtggtgtggtccttgtacgtgctcatcgatcggacggcagaagaaattaagcagggtcaggcaaccggtatcctggaatggcctttctggacaaagctcgtcgtggtggccatcggtttcaccgggggactcttgttcatgtacgtgcagtgtaaggtgtacgtgcagttgtggaagcgattgaaagcctacaaccgggtgatatacgtacaaaactgcccggagacgtccaaaaaaaatatcttcgaaaaatctccacttacggagccgaatttcgaaaacaagcacggatatggaatctgtcactccgacacaaatagtagctgctgtacagaaccggaggacaccggcgctgaaattatacacgtgtag

SEQ ID NO: 230200 - DNA, 1371 bp, synthetic construct
  misc_feature 1..1371: note = Description of Artificial Sequence: Synthetic coding sequence
  source 1..1371: mol_type = other DNA
taaatctgtaaggacacattgcaggcaagtaagaggaactcctttggaagcgagtgggcccaggcgctcaagcccgcaaaaaacaccaaagcccgacgaacactaaaatttagcaggtcactaaatgatgttggcgaaaaggctcaggacactagcgagtcttttgcttatgtcgagagaacctgctctgagggcaagctgattctgccacaggacacctgcctccgaactaaccggttccaccacaaagagaagcggaccctgaaccacaagcctctgggcaactctaagcattcgtgtgtgagctgcctgagcgctgggagaagcaccgctagcgaggtggaggcaggaaaaggcggaaggcctggactgttattggaggagaaggctgatggggaggccacctccagatcacgacagctgctccagtacttgttcagcctgagccacggcctttcagctagcagccttcaccggtttcacgaactggagagctgcgctgcacgattgcataccgcgaagagctcgtcagggctagcaggctcgatgggcttctgctctgatgaaatgggagatgacgacgttttcgaggacagcacctcggcgaagctgaagtcaagggttctgagggctccactctgctcaaccgagaaggattcagatcttgactgcccttctcccttttcagagaagttgccaccaatcagtcctgtaagcacatcaggcgacgtatgtcggatttgccactgtgaaggtgacgatgagagtccactcatcactccatgtcattgtaccgggtctctgcactttgtccatcaggcctgcctacagcagtggattaagtcttctgatacgcggtgctgtgaactttgcaagtatgagttcataatggagactaaactcaaaccactgcggaagtgggaaaaacttcagatgaccagttcggaaaggcggaagattatgtgcagcgtgacatttcacgtcattgctatcacctgtgtagtgtggtccctatatgtgttgatcgatcggacagcagaggagatcaagcagggacaagctacaggcatcctggagtggccgttctggaccaagcttgtagtggtggccatcggatttactggcggactcctttttatgtacgtgcagtgcaaggtgtacgtgcagctctggaagagactcaaagcatataaccgcgtcatctacgtacaaaactgcccagaaacatcgaaaaagaacatctttgagaagagccccctgacagaaccgaactttgagaacaaacatggctatggtatctgccactccgatacaaacagttcctgctgtacggagcccgaggacacaggagctgagatcatccatgtgtag

SEQ ID NO: 230201 - DNA, 270 bp, synthetic construct
  misc_feature 1..270: note = Description of Artificial Sequence: Synthetic coding sequence
  source 1..270: mol_type = other DNA
atgtctatgcccctgcaccaaatttccgcgatcccatctcaagatgccatcagcgcccgagtgtacaggtctaaaactaaggagaaggaacgggaggagcagaacgaaaagacgctgggacacttcatgtcacactctagtaacatttcaaaagccggatctcctccctcagctagtgcgcctgctcctgtgtcgagttttagccggacctctatcactccgtcttcacaggacatctgtcgtatttgtcattgcgaaggggacgattag

SEQ ID NO: 230202 - DNA, 1041 bp, synthetic construct
  misc_feature 1..1041: note = Description of Artificial Sequence: Synthetic coding sequence
  source 1..1041: mol_type = other DNA
atgctaaagtctcggctccgcatgtttctcaacgagttaaagttattagtccttaccggtgggggaaggcccagagccgagccccaaccacggggtgggcgtggtgggggttgcggctgggcccctttcgccggatgcagtacaagagacggcgacggcgatgaggaggagtattatggaagcgagccccgtgcccgaggtttggccggagataaggagcctagggccggacctttgcctcccccagcaccgccactccccccacctggcgcactggacgccctgtcactgtcaagctcgctggactctggcctgagaaccccccagtgtcgcatctgcttccaggggcctgagcagggcgagttactgtcaccctgccggtgcgacggctccgtgcggtgtacacaccaaccatgtctgattagatggatcagcgagcgtggaagttggtcatgtgaactttgttatttcaaatatcaggtgctggcaatcagcacaaagaacccgcttcagtggcaggccatatccttaaccgtcattgagaaagtgcaaatagccgcaattgtgctcggcagtttatttttggtcgcatcaatctcctggctgatttggagcagtctgtcaccctcagccaagtggcagaggcaggatttactcttccaaatctgttacggcatgtatggctttatggatgtcgtatgcattggtcttattattcacgaggggagctccgtgtacagaattttcaagcgctggcaagccgtcaaccagcagtggaaggttctgaactatgacaagacgaaggatatcggaggcgacgctggcggaggaaccgccggaaaaagcggccctcggaacagccggaccggacctacctctggtgctacgagtcggcctcctgcagcccagcgtatgcgaaccctcctgccccagaggtgtggctacaccatattgcacctcctgggccagctacgcccacccgacgcccgttctagttctcacagcggtagggaagtggtgatgcgggtgaccaccgtgtag

SEQ ID NO: 230203 - DNA, 702 bp, synthetic construct
  misc_feature 1..702: note = Description of Artificial Sequence: Synthetic coding sequence
  source 1..702: mol_type = other DNA
atggtatcggacaagtgccatatcctggatctcatcaaagcccagcgtaggcaaatgcttatcctaccggagggcttcagggaaggttcctggagcactctgcttttcagggccacacatcacttggccctacacccatttttaggactgtttggcgcactgtccccaacccagtggcaggctatttctctgactgtcatcgagaaagtgcagattgccgcaatcgtgctgggaagcctgtttctggtggctagcatttcttggctgatttggagctccctcagcccctctgcaaaatggcagcgacaagatctgttattccagatctgctacggcatgtacggttttatggacgttgtatgcataggactgatcatccatgagggctcttccgtatatagaatctttaagcggtggcaggcagtcaaccagcaatggaaggtactgaactatgacaagactaaggatattggaggagacgccggaggaggtactgctggcaagagtggacctagaaactcaagaactggccctactagcggcgcaaccagcaggccgcctgcggcacagaggatgagaacactcctccctcagcggtgtggatatacaattctccatctcctgggtcagctcagacctccagatgccaggagctccagccatagcgggagagaagtcgtgatgagggttaccacagtctag

SEQ ID NO: 230204 - DNA, 3159 bp, synthetic construct
  misc_feature 1..3159: note = Description of Artificial Sequence: Synthetic coding sequence
  source 1..3159: mol_type = other DNA
atgaagctagtgaacatctggctactgcttttggtggtcctcctttgcggcaaaaaacacctgggggataggcttgagaagaagtcatttgaaaaggctccttgtccgggatgctcacacctcactctgaaggtggagtttagcagcactgttgtggaatacgaatacattgtcgcttttaatggatatttcacggctaaggccagaaactcctttatctcttcggctctcaagtcctcggaggtggacaattggagaattattccaagaaataacccctcttcagactaccccagtgatttcgaagttatccagattaaagagaagcagaaggctgggctcttgacactggaggaccatcccaacataaagagagttactccacagaggaaggttttccgcagtttaaagtacgcagagagtgaccccacagtcccctgtaatgagactcggtggagccaaaagtggcagagttcccgacctttgagaagagccagtctgagcttggggtctggcttttggcacgccacgggccgacacagcagccgacgccttctgagggcaatcccccgacaggtggcccagactttgcaagccgacgttctgtggcaaatgggttatacgggcgcaaatgtccgagtggctgtgttcgacaccggtctgtccgaaaagcaccctcattttaaaaacgttaaggagaggaccaattggaccaatgagagaactctggacgatggtctaggacatgggaccttcgtggctggtgtgatcgcttccatgagggagtgtcagggcttcgctcctgatgctgaacttcacatcttccgcgtgttcacaaacaatcaggtatcatacaccagctggtttctggatgcttttaactatgctattctaaaaaagatcgacgtactgaatctctccattggcggtcctgactttatggaccatcccttcgtcgacaaagtttgggaactgacagccaacaatgtgatcatggtgtccgctatcggcaatgatggaccattgtacggcactctcaacaaccctgcggaccaaatggatgtgatcggtgtaggcggaattgattttgaagacaacattgcacggttttcctccagaggcatgacaacatgggagctgccgggtggctatggcaggatgaaacccgatatagtgacatatggggcaggggtccgcggaagcggggttaaaggtgggtgccgcgcactgtcaggcacttcagtcgcctcaccagttgtcgccggtgccgttacgttgctggtctccactgtgcaaaagcgtgaactagttaatcctgccagcatgaaacaggcactgatcgccagcgccagaagactgcccggagtcaatatgtttgaacagggacatgggaagctggatttactgcgggcttaccagatattgaacagttacaagcctcaggcttccctcagcccctcatatattgacctcactgagtgtccctatatgtggccttactgctcccagcctatctactatggtggaatgcctacagtagtgaacgtgactattcttaacgggatgggggtgaccggaaggattgtcgacaagccagactggcagccgtacctcccccagaatggcgacaacatagaagtggcattctcttattcatctgtcctttggccatggtcggggtacctggccatttccatctctgtaactaaaaaagccgcaagttgggaaggtattgcgcaggggcacgtcatgataacggtggctagcccagctgaaaccgagtcaaaaaacggagccgagcagacttcgacggtcaagctcccgatcaaagttaagatcataccaactccacccaggagtaagagggttctgtgggaccaataccataatctgcggtatccgcctgggtatttcccgcgagacaacctacgcatgaagaatgatcccttggattggaatggcgatcacatacacaccaactttcgggacatgtaccagcatctcaggagcatgggctacttcgtggaagttctgggagccccattcacttgcttcgatgcgtcacagtacgggacactcctgatggtcgattctgaagaagagtatttccccgaagagatcgcaaagctcagacgggatgtagacaacggcctctcactagtcattttcagtgactggtacaacacgtcggtcatgcggaaagttaagttttacgacgagaacaccaggcagtggtggatgccagacaccggaggtgccaacattcccgctttaaatgagcttctgtctgtgtggaacatgggattctccgacggtctctacgagggggagtttaccttggccaaccacgatatgtattatgcctctggctgctcaatcgcgaaatttcctgaggatggtgtggtaatcactcagacgtttaaagatcaaggtttggaagtgctaaaacaggaaacagccgttgttgagaatgtccccatattggggctgtaccagatacctgctgaagggggtggcaggattgtactgtatggagatagcaattgcctggatgatagccataggcagaaggactgcttctggctcttggatgccctgctgcagtacacgtcttacggtgtcacccccccaagcctctcgcactctggcaatcgtcagcggcctccctccggtgcagggagtgttacacctgaacgcatggagggcaatcacctgcacagatatagcaaggtgctggaagcacacttgggcgatcctaaaccacgccctcttcccgcatgtcctcggctgtcttgggccaaaccacagcctcttaacgagacagctccgtctaatctatggaaacaccaaaaattattgtccatcgatctcgataaggtggtgcttcctaactttcggagtaaccgcccacaggtgcgtcccctgagtccaggcgaatcgggagcatgggatatacctggaggaattatgccaggaagatataatcaagaggtggggcagacgataccagtattcgcattcctgggcgcaatggtcgttcttgctttcttcgtcgtgcagattaacaaagccaaatccaggcccaagcgccgaaagcctcgagtcaagagaccccaactcatgcagcaggtccatcctcccaaaacaccttccgtgtag

SEQ ID NO: 230205 - DNA, 1494 bp, synthetic construct
  misc_feature 1..1494: note = Description of Artificial Sequence: Synthetic coding sequence
  source 1..1494: mol_type = other DNA
atggctcttgttggcttgcccggacacttacacttctgtgaccaggagtccggcttcctcggcagacattgttccggtccatgccatgaccactgtggctttcctagccgggacagagtgaaaaaatggtgcagaaccgatttcaacagcaaacttcctattaaagtgaagataattcctacccctcccaggtcgaagagagtactgtgggatcagtatcacaacttgcgctacccgccaggatatttcccgcgagacaatctcagaatgaagaacgatcccctggactggaacggggaccacattcacacaaatttcagagatatgtaccagcatctccgttctatgggctacttcgtggaagtgctcggagcaccatttacctgttttgatgcttctcagtatggcaccttgcttatggtggactctgaagaggagtattttccggaggaaattgctaagctaaggcgagatgtggataatggcctatccctggttatattttccgactggtacaacacttcagtgatgagaaaagttaaattttacgatgaaaatactagacaatggtggatgcctgacactgggggtgccaatatcccggctctcaacgaacttctctcagtgtggaacatggggttctcagacggcttgtacgagggggaattcacactggcaaatcatgacatgtattatgcttctggttgctctatcgccaaatttcctgaagacggcgtggtcatcactcagacatttaaggaccaaggccttgaggtcctgaagcaggagaccgctgtggtggaaaacgttccaatcctcggtttatatcagatcccagctgagggaggagggaggattgtcctgtacggcgactccaactgtctggacgattcacaccgccagaaggattgcttctggctgctggatgcactcctgcagtacacctcttatggggtgacaccaccgtctctgtcacatagcggcaatcggcagaggcctccgtccggcgcaggcagcgtaactcctgaacgcatggaaggcaaccacctacatagatactcaaaggtgctggaggctcacctgggagaccctaagcctaggcctcttccagcctgtcccagactaagttgggccaaaccacagccactaaacgaaactgcaccctcaaacctgtggaaacatcagaagctgctgagcatagatctcgacaaggtggtgctccccaattttagaagcaaccgccctcaagttcgcccactgtcaccaggcgaatccggagcttgggatatccccggtggcatcatgcccggacgctataaccaggaagtgggccagaccatccctgtgttcgccttcctgggtgccatggtcgtcttagccttcttcgtggtgcagattaacaaggccaagagtcgcccaaagagacgaaagccacgcgttaaaaggccccagcttatgcaacaggttcatccccctaagacacccagcgtgtag

SEQ ID NO: 230206 - DNA, 993 bp, synthetic construct
  misc_feature 1..993: note = Description of Artificial Sequence: Synthetic coding sequence
  source 1..993: mol_type = other DNA
atgattccggtctccctggtggtggtggtggtgggagggtggactgtggtgtatctgactgacctcgttctgaaaagctctgtgtatttcaagcactcatacgaggactggttggaaaataacgggctgtcaatctccccttttcatatcaggtggcagactgccgtgtttaaccgcgctttctactcgtggggcaggcgtaaagctagaatgctgtaccagtggttcaattttggaatggtttttggtgtgatcgccatgttcagtagcttctttttgttggggaagaccctgatgcagacacttgctcaaatgatggccgatagcccatcttcgtactcctctagctctagcagctcaagctcctcctcttcctcatcttccagttcatctagttctagcagcagtttgcacaatgagcaagtgctgcaggtggttgtccccggtataaatctccccgtgaatcagcttacctatttcttcaccgcagttctcatatcgggagtggtgcacgagattgggcacggcatcgccgctattagagaacaggtccggtttaacggctttgggatattcctgttcataatttaccctggagctttcgtggatttgtttacgacacaccttcaactgataagccctgtacaacagctccgcattttttgtgctgggatatggcataattttgtcctcgccctgttgggaattctggctctagtgcttctgccagtcatccttttgcctttttattacaccggtgttggtgtgctgataactgaagttgcggaagactcacccgcaatcgggccaagaggactctttgttggcgaccttgtgacacacctccaggattgtccagtgaccaatgtgcaggactggaatgagtgcttggacaccattgcatacgaacctcaaattggatattgtattagcgcctccacccttcagcagctgtccttccctgtgagaggggtgtatatttcttctatctag

SEQ ID NO: 230207 - DNA, 1560 bp, synthetic construct
  misc_feature 1..1560: note = Description of Artificial Sequence: Synthetic coding sequence
  source 1..1560: mol_type = other DNA
atgattcccgtttccctggtcgtggttgtcgtgggcggatggactgttgtctatctcaccgacttagtgctgaagtcatccgtctacttcaaacactcatatgaagactggttggagaacaacggtttgagtatttccccctttcacatcagatggcaaactgcagtcttcaatagagccttttatagctggggtagaaggaaagctaggatgctgtaccaatggttcaacttcggcatggtgtttggggtcattgccatgttctccagcttcttcctactcgggaaaacccttatgcaaaccttggcgcagatgatggccgactctccttcctcttatagcagcagctcaagctcttcatcatcaagctcttcatctagcagttcttcctcaagttccagcagctcattgcacaatgagcaagtcctgcaggtcgtagtccctggcattaacctgcccgtgaatcagctgacctacttcttcaccgccgtcctgatctctggggtggtccacgagattggtcacgggattgctgccatccgcgagcaggttcgcttcaacgggtttggcatctttctattcattatctatccaggggcttttgtagatctcttcacgacccaccttcaactaatctcacccgtgcagcagctcaggattttctgcgccggaatatggcacaacttcgtcctcgcactgctagggatactagctttggtgctcctgcccgtgatactgttgcctttttattacaccggcgtgggtgttctgattaccgaagtggctgaggactcgccagcgatagggcctagaggtcttttcgtcggcgacctcgtgacacacctccaggattgtccagtcaccaatgtccaggactggaacgagtgtctcgatacaattgcttatgaacctcaaattggatattgtatttctgcatccacccttcagcaactgtcatttcctgttagagcttacaagagattggacggcagcacagaatgctgtaacaatcattcattgactgacgtttgtttttcctacagaaataactttaacaagagactgcatacgtgtctgcctgccaggaaggccgttgaagcaacacaagtgtgccgaacaaataaggactgtaaaaaaagttcgtcttctagcttctgcatcattccatctctggagacacatacacggttgataaaggtcaaacacccacctcagattgacatgctctacgtcgggcaccccctgcacctgcactacaccgtgagtatcacgtccttcattccgaggttcaactttctgtcaatagacctgcccgtggttgtcgagacttttgtgaagtacttgatcagcctgtccggagcattggctattgtgaacgccgtgccatgtttcgctcttgacggccagtggatcctcaattcattccttgacgccaccctcacttccgtcattggcgataacgacgtgaaggacctcataggctttttcatcctgctgggagggtctgtccttctggctgctaacgtcactctggggctctggatggtaacggctagatag

SEQ ID NO: 230208 - DNA, 207 bp, synthetic construct
  misc_feature 1..207: note = Description of Artificial Sequence: Synthetic coding sequence
  source 1..207: mol_type = other DNA
atgcaccaaacgtactccagacattgccgtcctgaagaaaggtggagccaggaggggtggaacataccagccaatggtttcaacatctgccgctgcctcaacattggtatgaaactgagactctggaataacctgaacaagtcgaacatcttaggggctcttaaaattaaaaggagagagatacgtgccccattcctcctgccgtag

SEQ ID NO: 230209 - DNA, 762 bp, synthetic construct
  misc_feature 1..762: note = Description of Artificial Sequence: Synthetic coding sequence
  source 1..762: mol_type = other DNA
atggtgcttttaaaactgctggaagtttacagaaaggggagcgcgggaacttttcataagagcaccatttttggcaacactatcatgaccagccagcccgtgccaaatgagacgatcatcgtcctgccttcgaacgttataaacttcagccaggccgagaaaccagagcctactaatcaaggacaggactcattaaagaagcacctccacgctgaaattaaggtgatcgggaccatccaaatcttatgtggaatgatggttctctcgcttggaattattctcgcttcagcatcctttagccccaacttcacccaggttacttccaccctgctcaattcagcatacccattcatagggcctttttttttcatcataagcggcagtctgagtattgctaccgagaagcggttaactaaactgctggttcatagtagtctggttggatccatcctgtcagcactgtctgcactcgtaggcttcatcatccttagtgttaagcaggctaccctgaatcctgccagcctacagtgcgagctggacaaaaacaacattcccactcggagttacgtgagttatttctaccatgactccctgtacacaaccgactgttatacggccaaggcgagtctggctggcacactgtcattaatgctgatttgtacactgttagagttctgtcttgccgtgctaactgcagtactgaggtggaagcaggcctatagcgactttcccggagtgtccgtcttagctggctttacttag

SEQ ID NO: 230210 - DNA, 804 bp, synthetic construct
  misc_feature 1..804: note = Description of Artificial Sequence: Synthetic coding sequence
  source 1..804: mol_type = other DNA
atgaaggctgaggccaccgtgataccaagtagatgtgccagagggttaccatcatggcaggtcctgagccctgtacagccctggcagaccagcgcccctcaaaacaccacccagcctaagctcctcgcccctcatcagcacgaaaagtcccagaaaaaaagctccttgctgaaggagctcggcgcatttcacatcactatcgctctgctccatctggtattcggcggttatctggcgtcaatcgtgaagaatctccatttagtggtgctgaagtcttggtaccccttctggggtgctgcatcattcctgatttctgggatccttgctatcactatgaaaaccttcagcaagacttacctgaagatgctttgtctcatgacaaatttgatatccctgttttgcgtgttgtccgggctgtttgttatctctaaggatctatttctggaatcccccttcgagtcacccatttggcgcatgtatcctaactctaccgtacacattcagcggttagaactcgctctattatgtttcaccgttctggagctgtttctgcccgtgcctaccgctgtcaccgcctggagaggcgattgcccatctgccaagaatgacgacgcctgcctagttccgaatacccccctccatctgaagggcctcccggtagagccacctcctagttatcagagtgtgattcagggcgatgcgcaacataagcagcaccagagattgcgggaagtgaaacaagtggctccagacacctggatcgtgaccgacggagcggctatctggacacagaccgccaactag

SEQ ID NO: 230211 - DNA, 804 bp, synthetic construct
  misc_feature 1..804: note = Description of Artificial Sequence: Synthetic coding sequence
  source 1..804: mol_type = other DNA
atgatgtcatctaagcctacgagccacgccgaggtcaatgaaacaatccccaatccttaccctccaagcagctttatggctcctggtttccagcagccactgggcagtatcaaccttgagaaccaggcgcagggggctcaacgggcacaaccttatgggatcacatcacccggaatttttgcctcttcccagccgggacagggcaacatacaaatgatcaacccaagtgtgggcaccgccgtgatgaattttaaggaggaagccaaggccctgggagtcatccagatcatggtgggcctgatgcacattgggttcggcatcgtgctttgcttgattagcttttcttttcgcgaggtactggggtttgcttcaaccgccgtgatcggtggttacccgttttgggggggactgtctttcatcatcagcggaagcctgtccgtatccgcaagtaaagagctcagccggtgcctcgtcaaggggtcactgggcatgaatatagtctccagcatcctggcttttatcggtgtgatattattgctcgtggacatgtgtatcaacggtgtcgccggtcaggactactgggcagtcctgtctggaaaaggcattagcgccactctcatgatctttagcctgctcgagttcttcgttgcatgtgcgactgcccatttcgcaaaccaggctaatactacaaccaacatgtccgtgctggtgatacccaacatgtacgaatcaaaccccgtcacacccgcttcatcctctgctccgccacggtgcaacaactacagcgccaacgcgcctaagtag

SEQ ID NO: 230212 - DNA, 345 bp, synthetic construct
  misc_feature 1..345: note = Description of Artificial Sequence: Synthetic coding sequence
  source 1..345: mol_type = other DNA
atgatgtctagcaaacctacatctcatgccgaagtgaacgagactatccccaatccataccccccatccagcttcatggcccctggattccagcagcccttgggaagcatcaacctcgaaaatcaagcccaaggcgcacagcgggctcagccctacgggattacgtcccctgggatttttgctagctcccagccgggtcagggaaacatccagatgatcaacccatcagttggaacggccgtgatgaattttaaagaagaggctaaagctctgggggtaattcaaatcatggtgggattaatgcacatcgggtttggcatcgttctgtgtctcattagcttttag

SEQ ID NO: 230213 - DNA, 666 bp, synthetic construct
  misc_feature 1..666: note = Description of Artificial Sequence: Synthetic coding sequence
  source 1..666: mol_type = other DNA
atgatgtcttccaaacctactagccatgctgaggttaatgaaacgataccaaatccttacccaccatcctcgttcatggctccgggattccagcagccgctgggctcaataaatctggagaatcaggcgcagggggcacagcgggctcagccctatggtattactagccctgggatttttgcctcttcccagcctggccagggtaacattcagatgattaacccctcggtcggaacagccgtgatgaatttcaaggaggaagctaaggcccttggcttcatcatctcagggtccctcagtgtgtctgctagcaaagagctgtctagatgcctggtgaagggctcgttgggaatgaacatcgttagttctatcttagcgtttatcggggtgattctactgctggtcgacatgtgtattaacggtgtggcgggacaggactattgggctgtgctgagtgggaaggggattagcgcgaccctaatgatcttctctctcctggagttcttcgtcgcctgcgccacagcgcattttgctaatcaagcaaacactacaacaaacatgtcagtattggtgatcccgaatatgtacgaatccaaccctgtgaccccagcctcatcctctgcgccaccccgttgcaacaattactcagccaatgcacccaagtag

SEQ ID NO: 230214 - DNA, 972 bp, synthetic construct
  misc_feature 1..972: note = Description of Artificial Sequence: Synthetic coding sequence
  source 1..972: mol_type = other DNA
atgaccgaacaagtgatcggcgcaaattctgttccaggaattattgccccagacaatgtgcacgtgatccagcctagcaacccagtggcctcaggtaaccatctgcaaccctctgaagtcaccacgtacccaatctcacccaaagtcatccattgcgacacaggtcgagcgaatcttcagaacctgctggtagtaaaccagaacagcgccgcaggggtgcagtcacagcccatcgggtaccagcgccagtaccccgtgggcacagcaagccttcagactgtgccaggggttatacagtacactcaggggacaacgaacttacagacatggcctggagacctgcaaaatcccctgaacgccaatcctggactaacacacacatcaaatagtagtcagtggaatacctcttttgcctcttttacttcttttaacccaaagaagttcatcaatgaggaggtgcgaacgcttggcgctattcagatcctaatcggccttacacatatttttagcgccatcaatcccgtactttactactacccttttgtgacatggctttctggctatcctctctggggtgggctctcctatatcgtgagcggctccctctctgtgtgggcagccaaagatcccagcccctgcgtcgtcaacagtagtatctcctttaacattatatcagccctcttcgccttcgctggcattttcatcatcatcactgatctgagtctttattacgttacaacttattctaaagcggtcagtggaggtctgctgccctttgctttacttgagttcattctcacatgtgttgtgtcccacttcggatgccaggcaacatgttgtaggcagttcgaaaatgtggccgtgatccccaccgtcttttctttcaaccccgcaaacactaccaccagtcccgttaacgcgaccaccggacctgtaaatgccgctacagggcctgtttctgcaacgaactag

SEQ ID NO: 230215 - DNA, 735 bp, synthetic construct
  misc_feature 1..735: note = Description of Artificial Sequence: Synthetic coding sequence
  source 1..735: mol_type = other DNA
atggatacggagagtaatcggcgtgctaacttagccttgcctcaagaaccttcatcagtccctgcttttgaagtgctggagattagtcctcaggaagtgtcttctggtcgcctgttaaaatctgcctcctccccacctcttcacacctggctgacggtgctgaagaaagagcaggaatttcttggagtaacacagattcttacagcaatgatctgtctctgttttggtaccgtggtttgcagcgtcctggatataagtcacatcgagggcgacatttttagctctttcaaggctggatatcccttttggggcgctatcttcttttctatctcaggcatgctgtcgatcatcagtgagagacgaaatgcaacatacctggttcgtggcagcttaggggctaacactgcttccagtatagcaggcggtaccgggatcaccatactgattattaacctgaagaaatccttagcttatatccacatccacagttgccagaagttcttcgagaccaagtgctttatggccagcttcagcaccgagatcgtcgtgatgatgctcttccttacaattctaggactcggttccgccgtcagcctgacaatttgtggtgccggtgaggaacttaagggcaataaggtgcccgaagatagagtgtatgaagagctgaacatatatagcgccacgtacagcgagctggaggaccccggagaaatgtcaccccctattgatctctag

SEQ ID NO: 230216 - DNA, 126 bp, synthetic construct
  misc_feature 1..126: note = Description of Artificial Sequence: Synthetic coding sequence
  source 1..126: mol_type = other DNA
atggatactgagagcaatcggagagctaatcttgcattgcctcaggagccttcatcggtccccgcatttgaagttcttgaaatctctcctcaggaggtcagctccgggagactgcttaaatcctag

SEQ ID NO: 230217 - DNA, 645 bp, synthetic construct
  misc_feature 1..645: note = Description of Artificial Sequence: Synthetic coding sequence
  source 1..645: mol_type = other DNA
atggcatctcacgaggttgataacgccgaactgggtagcgctagcgctcacggtactccgggttcagaggctggcccagaggaactcaatacatcagtttaccagcctatcgacgggagtccagattatcaaaaggccaaactgcaggtgttaggagctattcagattctcaacgcagctatgatcctcgccctgggcgtattcttgggatctctgcaatacccctaccacttccagaagcatttcttcttttttaccttttacacaggataccctatttggggagcggtgtttttttgcagctcagggaccttaagcgttgtggctggaataaagcctactcgcacctggattcagaatagcttcggcatgaacatcgcgtcagctacgatagctttggtgggcaccgcctttctgtcactgaacattgcagtcaatattcagagtcttaggtcatgccactcgtcctcagagagccctgacttgtgtaactacatgggctcaatttccaatggcatggtatccctgctgttaattcttacgcttttggaactatgcgtgacaatctcgacgatagcaatgtggtgcaatgccaactgttgtaattctcgggaagagatctcaagtcctccaaattcagtttag

SEQ ID NO: 230218 - DNA, 507 bp, synthetic construct
  misc_feature 1..507: note = Description of Artificial Sequence: Synthetic coding sequence
  source 1..507: mol_type = other DNA
atggcatcacacgaggtcgataacgccgagctgggctcagcctcagctcatggaacccctggttctgaggccggaccagaggaattgaacacgtctgtgtatcaacctattgacggatccccagattatcaaaaggctaagttgcaggtgctgggattttgtagtagcggaaccttaagcgtggtcgcgggtatcaaaccaacaaggacctggattcagaattcctttgggatgaatatcgcttccgccaccatcgccctggtgggcacagcctttctcagcctgaacattgccgtgaatatccagtctctcaggagttgccacagttctagtgaatctcctgatctctgcaattatatggggagcatctccaatggcatggtatctctattgctgattctaaccctgctggaactttgcgtaactatcagtaccatagccatgtggtgcaacgcaaattgctgcaacagccgggaggaaatttccagcccaccgaacagcgtctag

SEQ ID NO: 230219 - DNA, 276 bp, synthetic construct
  misc_feature 1..276: note = Description of Artificial Sequence: Synthetic coding sequence
  source 1..276: mol_type = other DNA
atgaatatcgctagtgccacaatagctctggtgggaaccgcatttctatcactgaacattgccgtcaatatacaatcactgaggtcgtgccatagtagctccgagagcccggacttgtgtaattatatggggagtatcagcaatgggatggtgagcttgcttctaattctgaccctgctggagctatgcgttacaatcagtacgatcgccatgtggtgcaatgccaattgctgtaatagtcgcgaagaaatcagcagcccacccaactcagtttag

SEQ ID NO: 230220 - DNA, 507 bp, synthetic construct
  misc_feature 1..507: note = Description of Artificial Sequence: Synthetic coding sequence
  source 1..507: mol_type = other DNA
atggcaagtcacgaggtggataacgccgaattgggctctgcttcagctcacggaactcccggatcggaggcaggccctgaggagctcaacacctctgtgtaccagcctatagacgggtcaccggactatcagaaggcaaagcttcaggtgctgggcttttgctcctccggaaccctgtcagtggtggcagggataaaacctaccaggacctggattcaaaacagttttggtatgaatatcgcatccgctacaattgctctcgttgggaccgcgttcctttccttgaacatcgctgtcaacattcaaagtctgaggagctgccacagctcgagtgaaagtccagatctatgcaactacatgggctcgatctccaatggcatggtctcgctcctgctgatcttgaccttgttggaactgtgcgttacaattagcactatcgctatgtggtgcaacgctaactgctgcaacagccgagaagaaatttcatcacctccaaattctgtgtag

SEQ ID NO: 230221 - DNA, 720 bp, synthetic construct
  misc_feature 1..720: note = Description of Artificial Sequence: Synthetic coding sequence
  source 1..720: mol_type = other DNA
atgcaccaaacatatagtcggcattgtaggcctgaggaatctactttctcagcagccatgactactatgcaaggaatggagcaagcgatgccgggagctggaccaggtgtgccacagctgggaaacatggcagtcatccactcgcatttgtggaaagggctgcaggagaaatttctcaagggcgagccaaaggtgctgggggtcgtacaaatcctcacagccttaatgagcttatcaatgggaatcactatgatgtgcatggcgtctaatacatacgggtccaacccaatttcagtgtatatcggctatacaatctggggctctgtgatgttcatcatttctggatccttgtcaatcgcagccggtatccggactaccaagggactcgtacgcggatcacttggcatgaacatcacttcttccgtgcttgctgctagcggcatcctcattaatacgttcagcctcgccttctacagttttcaccatccttactgcaattactacggaaactccaataactgccatggaacaatgtcaatcctaatgggacttgatggaatggtgctgctgttgagcgtcttggaattctgcatcgctgtaagtctctctgcgttcggctgcaaggtgctgtgctgtacacctggtggcgtggtgcttatactgccgagccattcacacatggcagagacagcctcacccacccctctgaacgaggtctag

SEQ ID NO: 230222 - DNA, 663 bp, synthetic construct
  misc_feature 1..663: note = Description of Artificial Sequence: Synthetic coding sequence
  source 1..663: mol_type = other DNA
atgaccacaatgcaggggatggagcaagcgatgcctggggctggtcccggagttcctcagctggggaacatggccgtcatccatagccatctgtggaaaggcctgcaagaaaaattcctcaagggggaaccaaaggtactgggggttgtccagatcctgacagctctgatgtctctgagtatgggtattaccatgatgtgtatggcttcaaatacttacggctccaatcccattagtgtgtacatcggatacacaatttggggatcggtcatgttcataatcagtggctctctatcgatcgccgcaggaatccggactaccaaaggcctggttcgtgggagcctaggcatgaacatcacaagctccgtgcttgccgcttccgggatcctgatcaatacattcagcctcgctttttattcctttcaccacccatattgcaactattacgggaattccaataactgccatggaacgatgtcgattctcatgggtctggacggcatggtacttctgctctccgtccttgagttctgcatcgctgtgtctctttccgcttttggctgcaaggttttgtgttgcacacccggaggtgtggtgctgattctgcctagtcacagtcatatggcggaaacggctagcccaacacctctgaacgaagtgtag

SEQ ID NO: 230223 - DNA, 663 bp, synthetic construct
  misc_feature 1..663: note = Description of Artificial Sequence: Synthetic coding sequence
  source 1..663: mol_type = other DNA
atgaccaccatgcagggcatggagcaagccatgcctggcgcagggcctggtgttcctcaactaggaaatatggccgtaattcactcgcatctgtggaaaggcctgcaggaaaaattccttaaaggcgaacccaaagtcctcggagttgttcaaattttgactgccttgatgagtttatccatgggcattacaatgatgtgtatggcaagtaatacgtatggctccaacccaatctctgtgtatatagggtacacaatctggggcagcgtgatgtttataatttcagggagtctgtccattgccgctggtatcagaacaacaaaagggctggtgcgtggctcactcggaatgaacattacttctagcgtgctggccgctagcggcatcctcatcaacacctttagcttagcattctattcttttcatcatccttactgtaattattacggaaattccaataattgccacggaaccatgagcatcctgatgggactggacgggatggtgctgctgctgagcgtgcttgagttctgcattgctgtgtcactgtctgctttcggctgtaaggtcttgtgctgcacccccggtggcgtggtcctaattttaccctctcacagtcatatggctgagactgcctcccccacccccttgaacgaggtctag

SEQ ID NO: 230224 - DNA, 561 bp, synthetic construct
  misc_feature 1..561: note = Description of Artificial Sequence: Synthetic coding sequence
  source 1..561: mol_type = other DNA
atgcaccagacatactcgcgacactgtagaccagaagaatccacgttctcggcagccatgaccaccatgcaagggatggagcaggccatgcccggtgccggtccgggagtgccacagctgggcaacatggcggtcatccacagccacctgtggaagggattgcaggagaaatttcttaaaggcgaacctaaagtcctgggggttgtgcaaattctgactgcactgatgagcctgagtatggggattacaatgatgtgtatggcgtccaacacctacggaagcaaccccatctcggtgtacattgggtatacaatctggggctcagttatgtttataatctctggaagtctgagcatcgccgctggcatacgaacaactaaggggttggggctggatggtatggtgcttctgttgtccgtcctggaattttgtattgctgtctccctgagcgcatttgggtgcaaggtcttgtgttgcacacccggaggggtcgtgctgattctcccaagtcattcccacatggcggagactgcctccccaacacccctgaatgaagtgtag

SEQ ID NO: 230225 - DNA, 399 bp, synthetic construct
  misc_feature 1..399: note = Description of Artificial Sequence: Synthetic coding sequence
  source 1..399: mol_type = other DNA
atgaccacgatgcaggggatggagcagacaacccccggagctggcccagacgtcccacagctgggtaacattgacgtgatccacagttacctttgcaagggcctgcaggagaagttttttaaacggaagccaaaagtcctaggggtggtccggattctgatagccctgatgagtttatccatggggattataatgatgtgcgtcgccttttcctcgtacgaagagcatcccatattcgtctacgtagcctatacaatatggggatcggtaatgtacccctaccagctccagcaagaactggaacagcagaaggtgtggaattacctcaagaacctatcatggcgcatcatgggctcttatctgtgctttggcgaacggagtgagttgaagccactttag

SEQ ID NO: 230226 - DNA, 333 bp, synthetic construct
  misc_feature 1..333: note = Description of Artificial Sequence: Synthetic coding sequence
  source 1..333: mol_type = other DNA
atgacgaccatgcagggtatggaacaaaccacaccaggcgcagggcctgatgtgccacaactcggcaacattgatgtgattcattcttatctgtgtaaggggctgcaggagaaatttttcaaacgaaagccaaaagttctgggtgttctatgcggtcacaagttctcgacccacagtgtgtccctgtcagtggctgcaggtattagaaccacaaaggggctggagctcagcgaggagtttaaactggagaataacggcattatcttcgtgttctggcgagaaatcagagtcgagactaccattcggaggcaagtccggcgattgcttaagtag

SEQ ID NO: 230227 - DNA, 615 bp, synthetic construct
  misc_feature 1..615: note = Description of Artificial Sequence: Synthetic coding sequence
  source 1..615: mol_type = other DNA
atgtcgtacattcacatctgcgttaaggactgtaaacgatctagttcgcggggtaatccaaaatctctggggttttgtgtcgacatcagctttcaacttattcgggtggtgaggatcctgatcgccctgatgtctctgagtatgggcataatcatgatgtgtgtggccttttcatcctatgaggagcatcccatctttgtatatgtggcatatacaatctgggggtcagtgatgtatccttaccagctgcagcaggagctcgaacagcaaaaagtctgcatttatagagtcctgaatggcgctcaagctggagtgcaatggagggacctgggaagcctacagccacctccccctagcaggttgccctggccccctaaggtccctcgagttcagccactcccagggcgacacccagtgtgggaggtgagatcagtctccgcttggccccctattgtctgggacgttagatcaccttcggcatggctcccttcactggaatcagaggaaaggctctgccccgcagctatcccatctaggaaatggggagcacctttaccgggtcaccaccccatctgggaggtgagatctgttagcgcgcgtccaccgattttttag

SEQ ID NO: 230228 - DNA, 399 bp, synthetic construct
  misc_feature 1..399: note = Description of Artificial Sequence: Synthetic coding sequence
  source 1..399: mol_type = other DNA
atgaccaccatgcagggcatggagcaaaccacacctggagctggtccggatgttccgcagctgggcaatatcgatgtcattcacagctatctctgcaaaggccttcaggagaaattcttcaagcggaagccaaaagtgctcggtgtcgttcgaattctcatcgctcttatgagcttaagcatgggcattataatgatgtgtgttgcctttagcagctacgaagagcaccccattttcgtatatgtcgcttacactatctggggcagtgtgatgtacccttatcaactgcagcaggaactcgagcaacagaaagtatggaactatctgaaaaaccttagctggcgcattatgggctcatatttgtgctttggcgagaggagcgaactgaagccactgtag

SEQ ID NO: 230229 - DNA, 603 bp, synthetic construct
  misc_feature 1..603: note = Description of Artificial Sequence: Synthetic coding sequence
  source 1..603: mol_type = other DNA
atggatagcagcacagcgcacagtcccgtcttcctggtgtttcctcccgagatcacagcatccgaatatgaatctaccgaactctcggccacaacattctccacacagtcacctcttcagaagctctttgcacggaaaatgaagattctcggaactatccaaatactattcggaatcatgacattcagctttggcgtgatcttcttatttacactgttaaaaccatatccccgatttccattcatcttcctcagtggctatcctttctggggcagcgtgctgtttatcaactcaggcgcatttttgattgccgtgaaaagaaagaccactgagactttaatcattctctctcgcataatgaattttctatcagctcttggggcaatcgcgggtataatcctactgacattcgggttcatcctagaccagaactacatctgtgggtactcccaccaaaactctcaatgtaaggctgtgacagttctctttttgggaattctcattacattaatgacgttttctataatcgaactttttatatctcttcccttttccatccttggttgtcacagtgaggattgcgattgtgaacagtgttgctag

SEQ ID NO: 230230 - DNA, 747 bp, synthetic construct
  misc_feature 1..747: note = Description of Artificial Sequence: Synthetic coding sequence
  source 1..747: mol_type = other DNA
atgacaagccaaccagtgcccaacgagactataattgttctgccatctaacgtcattaacttttcacaggcagaaaaaccagaaccaaccaaccagggacaagattctctgaaaaagcatttgcacgccgagatcaaggtgattgggacaattcaaatcctgtgcggcatgatggtgctgtcactcgggataattctggcctcagcttcatttagcccaaactttacacaagttacatcgacactgctgaacagcgcttatcccttcattggccctttctttttcatcatttctgggtccttgtctatcgcaaccgaaaaacgcctgaccaaattactggtgcattcctcactggtgggcagcatactcagcgcgctgtctgccttagtcggtttcataatactgagcgtaaaacaggctaccttgaatcctgccagcctgcagtgcgaattagacaaaaacaatatccctacccggtcgtacgtgtcctacttttaccacgattcactttatacaactgactgctacacagctaaagcctccctcgccggaacactttcactaatgcttatatgcactctactggaattttgtctcgctgtgctgactgctgtcttgcgctggaagcaggcctattctgatttccccggaagcgtgcttttccttccacatagctacataggcaactccggcatgtcatctaaaatgacccatgattgtggatacgaggaactgttaacctcgtag

SEQ ID NO: 230231 - DNA, 537 bp, synthetic construct
  misc_feature 1..537: note = Description of Artificial Sequence: Synthetic coding sequence
  source 1..537: mol_type = other DNA
atgaccagccagcctgttcctaacgaaacaatcatcgtcctgcccagtaatgtgatcaacttcagtcaggcagagaaaccagaaccaaccaatcagggtcaagactccctgaaaaaacatttacacgccgagattaaagtcattgggaccatccaaattctgtgcggaatgatggtgctaagcctggggattatcctggccagcgcatcttttagccctaacttcacccaggtcacctcaaccttactgaactcagcataccctttcataggcccattcttcttcatcatcagcgggtcactgtccattgctactgaaaaacggctcaccaagcttttagtgcacagctccctcgtcgggtctattctctctgctttgtccgctctcgttgggttcatcatcctgtcagtcaaacaagcgacactcaatccagcatcactgcagtggaacagcttgagcgatgctgacctgcactctgcaggaattcttccctcttgtgctcactgctgcgcagccgtggaaacgggactgttgtag

SEQ ID NO: 230232 - DNA, 543 bp, synthetic construct
  misc_feature 1..543: note = Description of Artificial Sequence: Synthetic coding sequence
  source 1..543: mol_type = other DNA
atgacatcccagcctgtccccaacgagacaatcatcgtccttccttcaaacgttatcaacttctcccaggctgagaaacctgaaccgaccaatcaggggcaagattcactgaaaaagcatctacacgctgagattaaggtgatcgggtttataatctcgggctccttatccatagcaaccgagaaaagactgactaagctactagtacactcgagcctcgttgggtcaatattatccgccctttccgcactggtgggcttcatcatcctttccgtgaagcaggccaccctgaatccagccagcctccagtgtgagctggataagaacaacattcctacaaggagctatgtttcctacttttaccacgattctttatacacaactgactgctataccgccaaggcaagcttagccggaactctaagcttgatgctgatatgcacccttcttgaattctgcctggctgtgctgaccgccgtcctacgctggaaacaggcttattccgactttcccggtgtttcagtgctggcgggtttcacctag

SEQ ID NO: 230233 - DNA, 678 bp, synthetic construct
  misc_feature 1..678: note = Description of Artificial Sequence: Synthetic coding sequence
  source 1..678: mol_type = other DNA
atgacgtcgcagccggttcctaacgaaacaatcatcgtactaccttccaacgtaataaacttttctcaagccgaaaagccggaaccgacaaatcagggccaagactccctaaaaaaacacctgcatgcagagattaaggtgatcggtacgatccagatattgtgtggcatgatggttttaagtctcgggattatcttggctagtgcctccttttcacccaattttacccaggtgacctccacgctgctgaatagcgcatacccatttattggacccttttttttcataatctctggatccctctctattgccacagagaaaaggttgacaaaactgctagtgcattcttctctggtgggtagcatcttatccgcactgtcagctttagtgggctttatcattctgagcgttaaacaagcaacactgaatcctgccagcctgcagtgcgaactggacaagaacaacatcccgacacgtagttacgtatcctacttttatcacgacagcctgtatactacagactgctataccgccaaagccagcctggcgggtactctctcactgatgctgatatgcacactattagagttttgcctcgcggtccttactgcagtcctgcggtggaagcaggcctattcagacttccccggagtgagtgtgttagctgggttcacatag

SEQ ID NO: 230234 - DNA, 831 bp, synthetic construct
  misc_feature 1..831: note = Description of Artificial Sequence: Synthetic coding sequence
  source 1..831: mol_type = other DNA
atggtgctgctgaagttgctcgaggtgtaccgaaaaggctctgccggaacatttcacaagtctaccatattcggaaacaccattatgaccagccagccagtccctaatgagactatcatcgttctcccctctaatgtgatcaatttcagtcaggcagaaaagcccgaaccaaccaaccagggacaagatagcctgaaaaaacacttacatgctgaaattaaagtcatcggcaccatacagatcctgtgcggaatgatggtcctgtctcttggcattatcttggcaagtgccagcttctcccctaacttcacgcaagtgactagcacactgttaaatagtgcttatcctttcattgggcctttctttttcattattagtggctcactcagcatcgctaccgaaaagagattgaccaagctgctagtgcactcgtcactggtggggtccattctttcagccctgtcagccctggtgggctttatcatactgtccgtgaagcaggcgaccttgaatcccgctagcctgcaatgcgagctggacaagaataacattcccactaggtcatacgtgtcttacttctatcacgatagtctctacactactgattgttacacagcaaaagcatctctagccggtacactgtcacttatgcttatttgcactctgctggagttttgcttagccgtactcactgctgtgctccgatggaaacaggcctattccgactttcctgggtcagtactgtttttgccacactcatacattggaaactctggcatgtcctccaagatgacccatgattgtggctacgaggagctgctcacgtcctag

SEQ ID NO: 230235 - DNA, 747 bp, synthetic construct
  misc_feature 1..747: note = Description of Artificial Sequence: Synthetic coding sequence
  source 1..747: mol_type = other DNA
atgacctcccaaccagttcctaacgagactattatcgtcctgccttccaacgtgataaacttcagccaggcagaaaaaccagaacctactaatcagggtcaagattctctgaagaagcacctgcacgccgagataaaagtgatcgggacaattcagatcctttgtggcatgatggtcctcagcctagggatcattctggctagcgcctctttctccccaaactttacacaggtaactagtactttactgaactccgcatatcccttcatcggaccatttttttttatcatctctgggagcctgtctattgcaaccgaaaaaagactgaccaaactgctggtgcactcttcactggtaggctctatattatccgccctttctgctctcgtgggtttcattatactttctgtcaaacaggcaacactgaaccctgcgtcgctacaatgtgagctggacaaaaacaatatccctacacgaagctacgtgtcgtatttctaccacgacagcttatacaccactgactgctacacagcgaaggcaagcctggccggtacccttagcctgatgctgatctgcactcttctggagttctgcctcgcggtcctcacagctgttctgcgatggaagcaggcctactcagactttcctggcagtgtgctgttccttccccactcatacatcggaaactcaggaatgtccagcaagatgacgcacgattgcgggtacgaagagttgctgactagttag

SEQ ID NO: 230236 - DNA, 72 bp, synthetic construct
  misc_feature 1..72: note = Description of Artificial Sequence: Synthetic coding sequence
  source 1..72: mol_type = other DNA
atgacctctcagccggtccccaacgagacgatcatagtacttccctcaaacgtgatcaatttctctcagtag

SEQ ID NO: 230237 - DNA, 444 bp, synthetic construct
  misc_feature 1..444: note = Description of Artificial Sequence: Synthetic coding sequence
  source 1..444: mol_type = other DNA
atgacttcgcaaccgatttcaaatgaaactatcatcatgttgccgagcaatgtaattaacttcagtcaagcagagaaacccgaacctactaatcaggggcaggattcactgaaaaaaagactgcaggccaaggtaaaggtgataggcgtccattcctcgctggcaggatcgatattgagtgcacttagtgccctcgtggggtttatactgctgagcgtgaatcccgcagctctcaatcccgcaagtctgcagtgcaagctggacgaaaaagacatccccacacggctgctactgtcgtatgactaccactccccttacactatggactgtcatagagcgaaggcatctcttgctggcactttgtcgttgatgttggtgtctacagttctggaattttgtttggcggtcctgacggccgtgttgcagtggaaacagactgtatag

SEQ ID NO: 230238 - DNA, 723 bp, synthetic construct
  misc_feature 1..723: note = Description of Artificial Sequence: Synthetic coding sequence
  source 1..723: mol_type = other DNA
atgctactgcaatcacagacaatgggagtatcacattctttcaccccgaagggcattaccatcccacagcgggagaagcccggacacatgtaccagaacgaggactatttgcagaacggtttgcctacagagaccaccgtgctcggaacagtgcagatcttgtgctgtttacttatttcctccctcggcgcaatccttgtgttcgcaccctacccttcccatttcaatccggctatctccacaaccttgatgtcaggctatcccttccttggtgccctctgtttcggcattacaggttccctgtccattataagtgggaagcagtctacgaagcccttcgatctatcctcactgactagtaacgcagtctcttctgtaacagcaggcgctggtctcttcctgctggccgattctatggtggcattgcggaccgcttcacagcactgcggcagcgaaatggattatctctcctctctgccttactcggagtattattaccccatctatgagataaaggattgtctcctgacatccgtcagtctgaccggcgttttggtggtcatgctaatttttactgtgttggagcttcttctcgcagcttactcttccgtcttttggtggaaacagctgtactctaacaatccaggttcttcattctctagtacccagtcccaagaccatatccaacaggtgaagaaatcatccagtagatcttggatctag

SEQ ID NO: 230239 - DNA, 588 bp, synthetic construct
  misc_feature 1..588: note = Description of Artificial Sequence: Synthetic coding sequence
  source 1..588: mol_type = other DNA
atgctcctgcagtcccaaacgatgggcgtctctcacagcttcactcccaagggcataaccattccccaacgggaaaaacccggtcacatgtatcaaaacgaggattatctgcagaacgggctgccaacagagaccactgtgctggggtttggcataaccggttctttgagcattataagtggcaagcagagtacaaagccgtttgatctgagttcattaacctccaacgccgtcagtagtgtgaccgctggcgctggcctgttcctcctggccgactctatggttgccctgcggactgcctcccagcactgtggaagtgaaatggactatttgtcctcactcccatatagcgagtactattaccctatatatgaaatcaaagactgtctgttgacctcagtgagtcttaccggtgtgctagtggttatgctcatttttaccgtgttggagctgctcctggccgcatattcttcggtcttttggtggaaacagctgtacagcaataaccccggaagctccttctcttctactcagtcacaggatcacattcagcaagtgaaaaagagctccagtcgctcttggatctag

SEQ ID NO: 230240 - DNA, 510 bp, synthetic construct
  misc_feature 1..510: note = Description of Artificial Sequence: Synthetic coding sequence
  source 1..510: mol_type = other DNA
atgctgctgcagagccagactatgggcgtttcccattccttcacacccaagggaattacgattccacagcgtgagaagccgggtcatatgtaccaaaacgaagattatctgcaaaatggcctgccaaccgaaacgaccgtgctgggatttggcatcaccggatcattgtcgattatctcaggtaaacagtctacaaaaccttttgatctaagctcccttacctctaacgcggtatccagcgtgacagcaggtgcaggactgttcctgctggctgattctatggtggcgctgcggactgcctcacagcattgcggtagcgagatggattacttatcctcgttgccctacagtgagtactactatcctatttatgaaattaaggattgtctcctgacaagcgtgtctctgacaggggtgctggtcgtaatgctgatattcaccgtcctggaactcctgttggccgcttatagttctgtgttctggtggaagcagttgtacagcaacaattag

SEQ ID NO: 230241 - DNA, 588 bp, synthetic construct
  misc_feature 1..588: note = Description of Artificial Sequence: Synthetic coding sequence
  source 1..588: mol_type = other DNA
atgttattacaatcgcaaactatgggggtgtcacattctttcaccccaaaaggaataacaatcccccaacgtgagaagccaggtcatatgtaccagaatgaagattatcttcagaacggactgcccactgagacaacggtgctggggtttggcatcactgggtctctctccatcattagtggtaagcagagtactaagccattcgacctttcatccttgacaagcaatgcggttagttctgtcaccgctggcgcagggctgtttctactcgctgacagcatggtggccctgcggaccgcgtcacagcattgtggtagcgaaatggattatttgtctagtctcccatatagtgagtattactaccctatttacgaaattaaagattgcctgttgaccagcgtgtccctcactggtgtgctcgtggttatgctgatattcaccgtgctggaactgctcctagctgcatattcatccgtattctggtggaaacaactttacagcaataatcccggaagcagcttctcttccacacaaagccaggaccacatccagcaagtcaaaaaatctagctcacggtcctggatttag

SEQ ID NO: 230242 - DNA, 753 bp, synthetic construct
  misc_feature 1..753: note = Description of Artificial Sequence: Synthetic coding sequence
  source 1..753: mol_type = other DNA
atgaactctatgacttcagcagtacctgttgctaattccgtcctggtcgttgcccctcacaacgggtatcctgtcactcctggcatcatgtctcatgtaccactgtaccctaattcccaaccccaggtgcatcttgtccctggaaatccaccatccctggtgtcaaatgtgaacgggcagcccgtccagaaagccctgaaagagggcaaaacccttggcgcaattcagattattattggcttggctcacatcgggttgggctccattatggccacagtgctggtcggggagtacttgtccatatctttttacgggggattccctttctgggggggactgtggtttatcatctccggctctttgagtgtggccgctgagaatcagccatacagctactgcctgctgtccggaagcctcgggctcaatatcgtttccgccatctgctctgctgtgggagtgatcctgttcattacagatttgtcgatcccacacccctatgcttaccctgactactacccctacgcttggggtgtcaatcccggaatggcaatcagcggggtgcttctcgtcttctgcctcctggaattcggcatcgcgtgcgcaagctcgcactttggatgccagctcgtgtgctgtcagagcagcaacgtgtcagtgatttacccaaatatctacgctgccaatcccgtgattactccagaaccagtgacaagtccccctagctatagcagtgagatccaggctaacaaatag

SEQ ID NO: 230243 - DNA, 2550 bp, synthetic construct
  misc_feature 1..2550: note = Description of Artificial Sequence: Synthetic coding sequence
  source 1..2550: mol_type = other DNA
atggtccagaaggaaagtcaggccacccttgaggagagagaatccgagctatctagtaatcctgccgcttccgccggagcctctctggaaccccctgccgcacccgctcccggtgaagataaccccgcaggagcaggcggtgccgcagtcgcaggcgcagcaggcggagctcgtaggtttctttgtggggtggtggagggattctatggcagaccatgggtcatggaacaacgaaaggagctgttccgtagattgcagaaatgggagttgaacacttacctgtatgctcccaaggatgactacaagcatcgcatgttttggcgcgaaatgtactcggttgaggaggccgagcaacttatgacactcatctctgccgctcgggaatacgagatagaatttatctacgccatctcgcctgggttggacattacctttagcaatccaaaagaggtttccacactgaaacgaaagctcgatcaggtttctcagtttgggtgtagaagtttcgcacttttgtttgacgatattgaccataatatgtgcgctgccgacaaagaagtgtttagcagtttcgcccacgcccaggtatctataaccaacgaaatctatcagtacctgggagaaccagaaactttcttattttgtcccaccgagtattgcggcacattctgttaccctaacgtgtcacagtcaccctatttgcgtaccgttggggaaaagctcctgcccggaattgaggttctctggacaggccctaaggttgtatccaaagaaatccctgtggaatcaatcgaggaggtgtcaaagattatcaaacgcgcacccgtaatctgggataatattcacgccaacgattacgaccagaaaaggctattcctgggaccctacaagggcaggtccaccgagctgatcccccgattgaaaggcgtgctgaccaatcccaactgcgaattcgaggcaaactatgtcgcaatccatactctggctacctggtacaagagtaacatgaacggagtcaggaaggatgtggttatgagccgacaagttgcccattccggggcaaaagcctctgtcgttgatggtactcctttagtcgctgctccaagcttgaatgctaccacagtggtgacaacggtataccaggagcccataatgtcacaaggcgcagcattatctggggagcctactaccctcactaaggaagaggaaaagaagcaacctgatgaagagcctatggatatggtggttgagaagcaagaggaaacagatcataaaaacgacaaccagattttgtccgagatcgtagaggccaaaatggccgaggagcttaaaccgatggatacagataaagagtctatcgccgagtctaaaagcccagagatgtcaatgcaggaggattgcatttctgacatcgccccaatgcagacagacgaacagacaaacaaagaacaatttgttccaggacccaacgaaaagccactgtacaccgcagaacctgtgactctggaggacctgcagctcttagccgatcttttctacctaccttacgagcatggaccgaagggcgctcaaatgctgcgagaatttcagtggctacgcgcaaactcatccgtggtttctgtcaactgtaaaggaaaggattctgagaagatcgaagagtggaggtcaagggccgcaaaattcgaagaaatgtgtggcctggtgatgggaatgtttactaggctgagcaactgcgctaatagaacaatcctgtatgacatgtattcttacgtctgggacatcaaatcaattatgtcaatggtgaaaagcttcgtgcagtggcttggatgtaggagccactccagcgcccagttcctaattggcgaccaagaaccttgggccttccgcggaggactagctggagaattccagcctccgccactaactccaacttctaaagtatataccattcgcccatacttccccaaagatgaggctagcgtttataagatttgccgggaaatgtatgacgatggcgtaggactcccctttcagtcgcagcccgatctgatcggcgataaactggtgggtggacttttgagcctcagcctggattactgtttcgtattagaagacgaagacggtatttgcggatacgcactgggaacggttgatgtgacaccatttataaagaagtgtaaaatcagttggatcccttttatgcaggaaaaatataccaagccaaacggagacaaagagttgtccgaggctgaaaaaataatgctgtcatttcatgaagagcaggaagtgttgccagaaacttttctggccaattttcctagcctgatcaaaatggatatccacaaaaaagtgacagacccatccgtcgctaagagcatgatggcatgtttgctctcctcacttaaagctaacggatcccggggagcattttgcgaagttcgcccagatgataagcgaatactcgagttctattcgaagctgggttgtttcgagatagccaaaatggaaggctttcccaaagatgtggtgatcctgggccgttccctttag

SEQ ID NO: 230244 - DNA, 2751 bp, synthetic construct
  misc_feature 1..2751: note = Description of Artificial Sequence: Synthetic coding sequence
  source 1..2751: mol_type = other DNA
atggttcagaaggaatcccaagccacattggaagagagagagagcgagctcagttccaaccctgctgcatccgcaggtgctagcctagaaccccctgccgcacctgccccaggagaggataacccggctggggcaggtggcgctgccgtcgctggggcagcaggcggagcacggagattcctatgcggagtcgtggaagggttttacggtagaccatgggtgatggagcagcgcaaggaactcttccgcagactgcagaagtgggagctgaacacatacttatacgctcccaaggacgattataagcaccgcatgttttggagagaaatgtatagtgtcgaagaggccgaacaactcatgacgttaataagtgccgctcgagagtacgagattgaatttatctatgccattagccccggactggacattaccttcagtaatcccaaagaagtgtccacactgaaaagaaagttggaccaggtgtctcaattcggttgtaggtcctttgccttgctttttgatgacatcgaccataatatgtgcgctgctgataaagaggtgttttccagttttgctcacgcacaggtttctatcactaatgagatataccaataccttggcgaacctgagacctttctgttctgccccactgaatattgtggaacattttgctaccccaatgtctctcaatctccttacctccgtacagtgggtgagaaactattgcctggcattgaggtcttatggacggggccaaaggttgtatccaaagaaatccctgtggagtcaatcgaggaggtgtcaaagatcattaaaagggccccagttatttgggacaatatccacgcaaatgattatgatcagaagagactgttccttggaccatacaaaggacgctccactgagcttatcccccgtcttaaaggagtgcttaccaatcccaactgcgagtttgaggccaactacgtggccattcacaccctcgccacttggtataagtcaaacatgaacggggtgcggaaagacgtggtgatgaccgactccgaagacagcacggtgtcaatacaaatcaagttggaaaatgaaggatctgacgaagacatcgagacggacgtcctttattcaccccaaatggcacttaagttggccctgactgagtggctacaggagttcggtgtgccccaccagtatagtagtcgccaagttgcccacagcggcgctaaagcttccgtggtggatgggacacctctggtggccgctcccagcctcaatgccaccactgttgtcacaaccgtgtaccaagaacccatcatgagccagggtgcagccctgtccggggaaccaactacactgactaaagaggaagagaagaagcagcccgatgaagagccaatggacatggtagtggaaaagcaggaagaaacagatcataagaacgacaaccagatactgtcggaaattgtcgaggccaagatggctgaggagctgaaacctatggacaccgataaggagagtattgccgagtccaaaagtcccgagatgtcaatgcaagaggactgcatctccgacattgcacccatgcagaccgacgagcaaaccaataaggaacagttcgtaccgggaccaaacgaaaagcctttgtacacggccgaaccggtcacactggaagatctgcagctgcttgcggacctgttctacttgccatatgagcatggtcccaagggcgctcagatgttaagggagttccagtggctgagggccaatagctctgtggtatccgtgaattgcaaggggaaagattcagagaaaatcgaagagtggcggtccagagctgcaaagtttgaagaaatgtgtggattggtaatgggtatgttcacacggctgagtaattgtgccaatcggacgatactctatgacatgtactcatatgtgtgggatatcaaatctattatgagcatggttaagagctttgtgcagtggcttggctgtagaagccactcttctgcacagttcttgattggtgaccaggaaccatgggccttcagaggcggactggccggtgagtttcagagactgctgccaatcgacggggcaaacgatctttttttccaacctcccccattaacgcctactagtaaagtttataccatccgtccctacttcccaaaggacgaggcgtctgtttacaaaatatgccgcgagatgtacgacgatggggtgggactgcccttccagagccaacctgacctgatcggcgacaaattagtaggcggactcctctcactgagcctagactactgtttcgtgctggaagatgaagacggaatctgcggttacgcgttgggtacagtagacgtcactccgttcattaagaaatgtaagatatcctggattccgtttatgcaggagaaatacactaagcctaatggcgacaaagagctcagcgaagctgagaaaatcatgctgtctttccatgaagagcaggaagttctgcctgagaccttcctcgccaattttcctagcttgattaaaatggacatccacaaaaaggttactgacccgagtgttgccaagtctatgatggcctgtctcctgtcctcgttgaaggcgaacggtagtaggggcgcattttgtgaggtccgacctgatgataaaagaattcttgagttttatagcaagttgggctgctttgagatcgccaaaatggagggctttccgaaggatgtggttatccttggcagaagtctgtag

SEQ ID NO: 230245 - DNA, 2034 bp, synthetic construct
  misc_feature 1..2034: note = Description of Artificial Sequence: Synthetic coding sequence
  source 1..2034: mol_type = other DNA
atggtgcagaaagaatcccaggccaccctcgaagaacgcgagagcgaactttccagcaacccggcagcctcggcaggagcctcactcgagccacccgctgcccctgcaccaggtgaagataacccagcaggggctggcggtgccgcagtagcgggtgccgcaggcggagctcgaaggtttctatgtggcgtggtggagggattctacggccgaccctgggtcatggagcaaaggaaggagttatttagaagactccagaaatgggagcttaacacatatctgtatgccccaaaggatgactacaaacacaggatgttctggagggaaatgtactctgttgaagaagccgagcaactgatgactcttataagtgctgctagagaatatgagatcgagttcatctacgccatatcacctgggctggacataactttttcaaatcccaaggaggtgtctaccctgaaaaggaagttagatcaggtgtcacagttcgggtgcagatcattcgccctgctgtttgatgacattgatcacaatatgtgtgccgcagataaagaggtcttcagcagttttgcccacgcccaggtgtccattacgaatgaaatatatcagtatctgggagagccagagacatttcttttttgcccgacagagtactgcggaactttttgttatccaaacgtcagccagtcaccttaccttcgcacggttggtgaaaagcttcttcctggcattgaggtcctctggaccggtcctaaagtagtgtccaaagagattccagtggagagtatagaggaggtgtcgaagataatcaagcgtgcgccagtgatctgggacaatattcatgcaaacgattatgaccagaagcgactgttcttgggcccatacaaaggcaggagcaccgagttaatccccaggctaaaaggcgtgctaacgaaccctaattgcgagttcgaggctaactatgttgccattcataccctggcaacttggtataaatccaatatgaatggggtgcgaaaagacgttgtgatgacagacagtgaggattcaaccgtctctatccagatcaagttagaaaacgaagggtcagatgaagatatcgagacagatgtcctctatagcccgcaaatggcactaaaattggccctgacagagtggctccaggagtttggggtgcctcaccagtatagcagcaggcaagtcgcccacagtggggcaaaggcatctgtggtcgatggcactccactagttgcagcgcctagcttaaatgcaacaaccgttgtgacgacagtgtatcaggaaccaatcatgagtcagggcgcagctttgtccggcgaacctaccacattaaccaaggaagaggagaagaagcagccggacgaggagcctatggacatggtggtggagaagcaggaggaaaccgatcacaaaaatgataaccagatactgtccgaaattgtggaggctaagatggcggaggaattgaaacccatggatactgacaaggagtcaattgctgaatccaaaagcccggagatgagcatgcaggaggactgcatttcagacattgcaccaatgcagaccgatgaacaaactaacaaagaacaattcgtacctggcccaaatgaaaagccactgtacacagcagagccagtgaccctggaggaccttcagcttttagccgatctgttctacctcccttacgagcatggacccaagggggctcaaatgctccgggagttccagtggctgcgtgccaattcatcagtggtgtcggtaaactgcaaaggtaaagatagcgagaaaattgaggaatggcggagcagagcagccaagttcgaggagatgtgtgggctcgtgatgggtatgttcacccggctgagcaactgtgccaacaggacgattctctatgacatgtacagttatgtgtgggacatcaaaagcatcatgagtatggtaaagagctttgtccagtggttgggcaggtgcaccagaaacaatctcttctcttctaacattctttctttgtag

SEQ ID NO: 230246 - DNA, 456 bp, synthetic construct
  misc_feature 1..456: note = Description of Artificial Sequence: Synthetic coding sequence
  source 1..456: mol_type = other DNA
atggtccaaaaggagtcccaggcgaccctggaggagagggaaagtgagttatcttcaaacccagcggcatccgccggtgcttccctcgaacctcctgcagctcctgcaccaggcgaagataatcctgcaggcgcaggtggggctgccgtggccggagctgctgggggagccagacgctttctttgtggcgtggtggaaggattttacggacggccatgggtgatggagcaacgaaaggaacttttccgacgcttacagaagtgggagctgaacacatacctgtacgcacctaaggacgactacaaacaccgcatgttttggagagagatgtattccgtcgaggaggccggttcatttctgttcttttacctcgttaccatccagctcgcggaaattgaacgagtcctgtgtgcctccaaggttatgacgatttgcgtgattagctgggcctgctag

SEQ ID NO: 230247 - DNA, 771 bp, synthetic construct
  misc_feature 1..771: note = Description of Artificial Sequence: Synthetic coding sequence
  source 1..771: mol_type = other DNA
gccgctggtggagccaggcgcttcttgtgtggcgtggtggagggattctacgggagaccatgggtgatggaacagcgtaaagagttatttcgcagacttcagaagtgggagcttaacacctacctttacgcccctaaggacgattataagcacaggatgttttggcgagaaatgtattctgtcgaggaggcagagcaactaatgacactgatctccgccgcaagagagtacgagatcgaattcatttatgctattagcccgggactcgacatcaccttttcgaaccccaaagaagtgtccaccctaaaacgcaaattggaccaagtgagccagtttggctgcagaagctttgcgctgctttttgacgatatcgatcacaatatgtgcgccgctgataaggaggtgttttcttcgttcgcccacgcacaggtttcaataacaaatgaaatttatcagtacttgggcgagccagagaccttcttattttgtccaaccggtcccaaggtcgtcagcaaagagattcctgtggagagtatcgaggaagtctctaagataataaagagagcacccgtgatctgggacaacatccatgcaaacgattacgaccagaaaagattgtttcttggaccttacaaaggtcgaagcaccgagctcatccctaggttgaagggcgtacttacaaatccgaactgtgagtttgaggctaattacgttgcaattcacacacttgccacatggtacaagtcaaacatgaatggtgtccggaagtag

SEQ ID NO: 230248 - DNA, 2592 bp, synthetic construct
  misc_feature 1..2592: note = Description of Artificial Sequence: Synthetic coding sequence
  source 1..2592: mol_type = other DNA
atggtgcagaaggagtcccaggccacactggaggaacgcgaaagtgaactaagctctaatcccgctgcatccgccggagccagcctggagccacccgctgcccctgcacctggagaggataaccccgcaggggctggcggagcagccgtcgctggagctgccggaggggcacggcgattcttgtgtggagttgttgagggattctacggcagaccatgggtgatggaacagcgcaaggagctgtttaggagactccagaaatgggaactgaatacctatctttatgcacctaaagatgactacaagcaccggatgttctggcgggagatgtattctgtggaggaagctgagcaactgatgactcttatcagcgcagcacgcgagtatgagatcgagttcatctatgctatctccccaggtttagacatcaccttcagcaatcctaaggaggtctcaacactaaagagaaagttagatcaggtgtcccagtttggctgtcggtccttcgcactgctcttcgacgacatcgatcataatatgtgtgcagcagacaaggaagtgttttctagctttgcacatgctcaagtcagcataaccaatgagatttaccaatacctcggggagcccgaaactttcctgttctgcccaacagaatattgcggaacattctgctaccctaatgtgtcacaatccccttatctgcggactgtgggggaaaagctcctgccaggaatcgaggtactgtggacagggccaaaagtggtcagtaaggagatccccgtcgaaagcattgaagaagtgtcaaaaatcattaaacgcgctccggtgatatgggataatatccatgccaacgactatgaccagaaaaggctcttcttgggaccttataaaggaagaagcaccgagctgatccctagattgaagggcgtcttaaccaatcccaattgtgagtttgaagcgaactacgtggccatacacacgttggccacctggtacaagtccaatatgaacggagtacggaaagatgtagtgatgtctcgccaagtagcccactccggtgctaaggcttccgtagtggatggcacccctctcgtggccgctccctcattgaatgccacgaccgtggtgacgaccgtatatcaagaacccatcatgtcccagggggctgctctctctggggaaccaacaacgctaacgaaggaagaagaaaaaaagcaacccgacgaagaaccaatggacatggtcgtcgagaagcaggaagaaactgatcacaaaaacgataatcaaatccttagcgagatcgttgaagcaaaaatggcggaggagctaaaaccgatggataccgacaaggagagtatagcggagtcgaagagtcctgaaatgtccatgcaagaagactgtatctccgacatagccccaatgcagaccgacgaacagaccaacaaagagcaattcgtgcccggtcccaacgagaaaccactctacacagctgagcccgtcactctggaggaccttcagctcctcgccgaccttttttacctcccatatgagcatgggccaaagggcgcacagatgttacgtgaattccaatggctccgggctaattcatctgtcgtatcagtaaactgcaaaggcaaggacagcgaaaaaatcgaagagtggcgttcacgcgcagccaaattcgaggagatgtgcggacttgttatgggcatgtttacacgcctctcgaactgcgccaatcgaaccattctgtacgacatgtacagttatgtatgggatataaaaagcatcatgtcaatggtcaagtcattcgtgcagtggttagggtgccggagccactcctctgcgcagtttttaataggcgaccaagagccatgggccttcagaggaggactggcgggtgaatttcagcgtctgctgccaattgatggggcaaatgacctgttctttcagcccccacctctcaccccaacctccaaagtctacaccatcagaccctactttcctaaggatgaggcttccgtgtataagatttgcagagagatgtacgacgacggagtggggctgccctttcaatcgcaacccgacctgatcggcgataaactggtgggaggtctgctgtccctgtcactagactattgttttgtgctcgaggacgaagacggtatttgcggctacgccttaggcaccgttgatgtcactcccttcattaagaaatgcaagataagttggattccctttatgcaggagaaatatactaaaccaaacggtgacaaggagttaagcgaagctgagaagataatgctgagcttccatgaagaacaggaggttctcccagagaccttcctggctaactttccttctttaatcaagatggacatccacaaaaaagttaccgacccctctgtcgcaaaaagtatgatggcgtgcttgttgtcatctctgaaagcgaatggatccaggggtgcattttgtgaggtgagacctgatgacaaacggatactggagttttattcaaagctcggatgcttcgagattgccaaaatggagggattccccaaggacgtcgtgatactgggtagaagcctttag

SEQ ID NO: 230249 - DNA, 1545 bp, synthetic construct
  misc_feature 1..1545: note = Description of Artificial Sequence: Synthetic coding sequence
  source 1..1545: mol_type = other DNA
atggccgtctggcttgcccagtggctgggacccctcttgctggtgtctctgtggggcttgctagctccagcatcattactgagacgcctcggagaacacatacaacagttccaggaatcatctgcccaggggttagggctgagcctggggccaggcgcagctgcactgcctaaggtgggatggctggaacaactgctggacccttttaatgtttcagaccggagaagctttctccagcgctactgggtaaacgaccagcattgggtgggacaggatggccctatttttctgcacctgggcggagagggctcactgggcccaggctccgtaatgagggggcaccccgcagcattagccccagcatggggggcacttgtcatctcactcgaacaccgcttctacggcctgagcatccctgccggagggttggaaatggcacaactgcgtttcctgtcgtctcggctcgccttggcagatgtggtatcagctcggctggctctatctagactgttcaatatttcttccagctcgccttggatttgtttcggtggttcctatgccggaagcctggcagcgtgggccagactgaagttccctcacctaattttcgctagtgtggcaagttcagctccagtgcgcgcagtgcttgacttttcagaatataatgacgtcgtgtcgcgaagcttaatgagcactgcgatcgggggatcgctggagtgcagagctgctgtctccgttgctttcgcagaagtcgagcggcgtttaaggtctgggggtgctgcccaggccgctctgcgaaccgaactgagcgcctgcggacctcttggcagggctgaaaaccaggcggaactgctcggtgcccttcaggcactcgttggcggagtggtccagtacgatggccagactggagcacctttatccgttagacagctctgtgggctgctgctcggcggagggggaaacaggtctcattctacaccctattgcggtctgagaagggcggtccaaatcgtactgcatagtctgggccagaagtgtctcagtttttcaagagccgaaactgtggcccagctccgtagtacagaaccccagctctcaggagttggcgacagacagtggctctatcagacgtgtaccgagtttgggttctatgtcacctgtgaaaaccccagatgcccttttagtcagcttcccgcacttccgtctcaattagatctgtgtgagcaggtgttcgggctcagcgccctctcagtagctcaagccgtggctcagacaaatagctactatggtggtcagactcccggtgccaacaaggtgctattcgtcaacggcgacaccgatccttggcacgtgctgtcggtgacccaggctcttgggagctcagagtcaaccctgcttattcgtactggcagccactgtcttgatatggcgcctgagcgtccttcagatagtcccagcctccgactgggcagacagaacatttttcagcagctgcagacttggctgaaactcgcaaaggagtcacagataaagggggaagtgtag

SEQ ID NO: 230250 - DNA, 2106 bp, synthetic construct
  misc_feature 1..2106: note = Description of Artificial Sequence: Synthetic coding sequence
  source 1..2106: mol_type = other DNA
atggacttatggaacctctcctggtttctttttttggacgctttgctggtgatctccggcctggccactcctgaaaattttgatgtggacgggggtatggatcaggacatattcgacataaacgagggactgggcctggatctcttcgagggggatatcagactggaccgggcacaaatcagaaatagtattatcggcgaaaagtatagatggccccacaccatcccctacgtgcttgaagactccttggagatgaacgctaagggggtcattctgaatgcttttgagcgctatcgcctgaagacttgtattgactttaaaccctgggccggtgaaacaaattatatctctgtctttaaggggtccggctgctggagctctgtgggcaatagacgcgtagggaagcaggagctgtcaattggcgcaaactgtgaccgcatagcaactgtacagcacgagtttttgcacgcactcggcttctggcacgagcagtctaggtctgatagagacgactacgttaggattatgtgggaccgcattctgtctggtcgtgaacacaacttcaatacgtatagtgacgacatctctgattcgctcaacgtaccatatgattatacctcagtaatgcattacagcaagaccgcttttcagaatggcacagagcccaccatcgtgacacgcattagtgacttcgaagatgtcatcggacaaaggatggatttttctgactctgacttactgaagttaaaccagctctacaattgctcatctagcctgtctttcatggacagctgctcatttgagttggagaatgtatgcggcatgatccagtcttctggggataacgccgattggcagagagtttcgcaggtccctcgagggccagagagtgaccattccaacatgggccaatgccaaggctcagggttcttcatgcacttcgacagctccagcgtgaacgtcggcgcaacagcagtactggagtccagaacattataccccaaacgaggattccaatgcttacaattttacctgtataattctgggtcagagagcgaccagctcaacatttacatccgggaatattctgctgacaacgtggatggaaatctgactctggtagaggaaataaaagaaatccccacagggagctggcaattgtatcatgttacactcaaggtaacaaagaagtttagagtcgtgtttgagggtcggaagggatctggtgcttcattggggggattaagcatagacgatataaacctatctgagacacgctgccctcaccacatctggcacattcgcaattttacccagtttataggatctccaaatggaacactctatagtcctcccttctattcgtcaaagggctatgctttccagatctacctgaacctggcgcacgttaccaacgcgggaatttattttcacttaatatcgggggctaatgacgatcaactgcagtggccttgcccatggcagcaggctactatgactctgctcgatcaaaaccccgatatccgacagcgcatgtccaatcaacgatctatcacaacagacccttttatgaccacggataacggaaattatttttgggacagaccctccaaggtgggaaccgttgctcttttctccaatggaacccagtttcgacgtggaggcggatatggcacttctgctttcatcactcatgaacggttgaaatctagagatttcatcaaaggggatgatgtgtacattctcctgaccgtggaagacattagtcaccttaactccacacaaattcagttgactcctgccccttccgtccaggatctttgttcaaagaccacatgtaagaatgatggtgtatgcacggtccgcgatggcaaagctgagtgccggtgccagtccggggaagactggtggtacatgggcgagagatgtgagaagcgaggctctacgagagacacaatcgtgatcgccgtgtcctccacagtcgcagtctttgcattgatgctgataattacgctcgtgtcagtgtactgtacgcggaagaaatatcgcgaacgcatgagctccaatagaccgaatctcaccccccagaaccagcacgctttttag

SEQ ID NO: 230251 - DNA, 894 bp, synthetic construct
  misc_feature 1..894: note = Description of Artificial Sequence: Synthetic coding sequence
  source 1..894: mol_type = other DNA
atggcttccccccaactgtgtagggctttagtgtctgcacaatgggttgcagaagcccttagggctccacgggctggtcagccgttacagctgctggacgcttcttggtatctgcctaaactgggccgtgatgcgagaagggaatttgaggaacgccacattccgggagccgcattttttgatattgaccagtgttcggatcgcaccagcccgtatgatcatatgctgcccggagctgagcatttcgcagaatacgcgggacggctcggtgttggggctgcaacgcacgttgtgatttatgacgcatccgaccaaggattgtattctgctcctcgagtctggtggatgtttcgtgcctttggccatcatgctgttagcttgctggatggcggactgaggcactggttacggcaaaaccttcctctgtcaagcggcaaatcccagccagccccagcagaatttcgggcacagctcgacccggctttcattaagacctatgaagacattaaggaaaacctagaaagtcgtcgtttccaagtggtggatagccgagctacaggcagattccgtgggacagaacccgaacctcgcgatggtattgagcctggccatattcccggaactgtgaatatccccttcacagactttctgtctcaggaagggctagagaagagccctgaggaaatcaggcacttattccaggaaaagaaggtggatctatccaagcccctcgtcgccacgtgcggctctggcgtgaccgcctgtcatgtggctctgggcgcatatttatgcggcaagccagacgtcccgatctacgacggatcatgggtggagtggtacatgcgagcgagacctgaggacgtcattagcgaaggtaggggcaaaacccactag

SEQ ID NO: 230252 - DNA, 954 bp, synthetic construct
  misc_feature 1..954: note = Description of Artificial Sequence: Synthetic coding sequence
  source 1..954: mol_type = other DNA
atggctgaacccggttctagagagagcgagaccagagcccgttctccctcggtggccgctatggcctctccgcagttgtgtagggccctcgtcagtgcacaatgggtggctgaggctttgagggcgccaagggccggtcaaccactgcaactcctagatgccagctggtacctgccgaagcttgggagagacgcacggcgagagttcgaagagagacatatacctggggcagcttttttcgatattgatcagtgctcagacaggacttcaccctatgatcatatgttacctggagctgaacacttcgctgaatatgccggaaggctgggcgtgggggcagctacacacgttgtgatctatgatgcgagtgatcaggggctctattctgcccctcgcgtgtggtggatgttcagagccttcggacatcatgccgtgtctctactcgacggcggtctaaggcattggttgcgccagaacctgccactgagtagtggaaagagtcagccagcccctgcagagtttagagcccaactggaccctgcattcataaagacctatgaggacatcaaagagaatttggagtcaaggcgatttcaagtagtggactctagagccaccggacggttccggggaaccgagcctgagcccagagatgggatcgagccaggccacatccccggaaccgtcaatatacctttcacagactttctatcccaggaaggtctcgaaaaatctcccgaggaaattagacatctgttccaagaaaagaaagtggatttgtccaaacctttagtggcaacttgtggctcaggagtgaccgcctgccacgttgctctgggggcttatctgtgtggaaagcctgatgtgcctatctacgatggatcctgggtcgaatggtacatgcgcgcacgtccagaggacgtaatcagtgagggacgtggcaaaacgcactag

SEQ ID NO: 230253 - DNA, 894 bp, synthetic construct
  misc_feature 1..894: note = Description of Artificial Sequence: Synthetic coding sequence
  source 1..894: mol_type = other DNA
atggccagtccacaactttgtcgcgctttggtgtcagcccagtgggttgccgaagctctgcgggctccacgagccggtcagccattgcaactgcttgatgcaagttggtacctccccaaactgggtcgagacgctaggcgggagtttgaagagcgccatattcccggtgctgcttttttcgatatcgaccaatgtagcgatcgtactagtccgtatgaccatatgctacctggcgctgagcacttcgccgaatacgctggcaggctaggcgttggagccgctacccacgtcgtcatatatgacgcctcagaccagggcttgtacagcgcccctcgagtctggtggatgttccgtgcgtttggacatcatgcagtcagcctcctggacggtggacttcggcattggcttaggcagaatctcccactgagttcagggaaatcgcaacccgcaccagcagagtttcgggctcagctggacccagcctttattaagacttacgaagatattaaggaaaatctggaatccagaagattccaagtggtggactctagggcaaccggcagatttaggggtactgagccagagccaagagatggaattgagcccggtcacatcccagggactgtgaatatcccctttaccgattttcttagccaggaaggactcgagaaatcaccagaggagatacggcacttgttccaagagaaaaaagttgacttgtccaaacctctggtagccacctgcgggagcggagtgactgcttgccatgtggctctcggggcttacctctgcggtaaaccagatgtgcccatctatgacggctcctgggtggaatggtatatgagagccaggccagaggacgtgataagcgagggtagaggcaagactcactag

SEQ ID NO: 230254 - DNA, 894 bp, synthetic construct
  misc_feature 1..894: note = Description of Artificial Sequence: Synthetic coding sequence
  source 1..894: mol_type = other DNA
atggcttcaccccagctctgccgggctttggtgtcggcccagtgggtggccgaggccctgagagccccaagggctgggcagccactgcagcttttagacgccagctggtaccttccaaagctgggtagagatgctagaagagaatttgaggagcggcacattcctggtgctgcattcttcgatatagatcagtgttccgacaggacttccccatatgaccacatgctgcccggtgctgaacacttcgctgaatacgctggaaggctgggtgtgggggctgcaacccacgtggtgatttacgatgcatcagatcaaggcctgtatagcgctcctagggtgtggtggatgttcagagctttcggacatcacgcggtgagccttttggatggaggcttgagacactggctacgccagaatttgcccctctcctccggcaagtcccagcctgctcccgctgaattccgggcacaactcgaccctgcgttcatcaaaacgtatgaggatatcaaagagaatttggaatcgaggaggttccaggtcgtcgattcccgtgccactggccgatttcggggaaccgaacctgagccaagggatggaattgaaccaggacatattcccggaacggttaatattcctttcactgactttctgagccaggaagggctagagaagtcaccggaggaaattaggcatcttttccaggaaaaaaaagtcgatctctctaagcccttggttgcgacgtgtggcagcggcgtaacagcttgccacgttgcattgggtgcatatctttgcgggaaacccgatgtcccaatctacgatggctcgtgggtcgagtggtatatgagggctagaccagaagacgtgatttctgagggccgaggtaaaacacactag

SEQ ID NO: 230255 - DNA, 894 bp, synthetic construct
  misc_feature 1..894: note = Description of Artificial Sequence: Synthetic coding sequence
  source 1..894: mol_type = other DNA
atggcttctcctcagctgtgtagggccctcgtcagcgctcagtgggtggctgaagcacttcgcgcacccagagccggacagcctctacagttactggatgcctcatggtatctgcctaaactggggagagacgctagacgggaatttgaagagcggcatatacccggtgccgcattttttgatatagaccagtgctccgacaggacttcaccctacgatcacatgctgcctggtgctgaacatttcgcggagtacgcagggcgtctgggagtgggcgctgctactcatgtggtgatctatgatgcaagcgaccagggactctactcggcacctagagtttggtggatgtttcgcgctttcgggcaccacgccgtgtcccttttggatggcggactcagacattggcttcggcagaatctcccgctctcctccggcaaaagtcagccagcacccgcagagttccgcgctcagcttgatccagctttcatcaagacgtacgaggatattaaggagaatctggagtcccggcgttttcaggtagtggactcgagggccacgggccgattccgcggtactgagcctgaaccacgcgacggcatagaacctgggcacattcccggaaccgtaaacatcccctttactgatttcttgagtcaggaaggtctggaaaagagccccgaggagataagacatctctttcaagagaaaaaagtagacttgagcaaacctctggttgctacatgtggctctggcgttaccgcttgccatgttgccttgggggcttacctgtgtgggaagcccgacgtgcccatctatgacggatcctgggtggagtggtacatgagagcgcgacccgaggacgtgatctccgagggaagggggaagacccattag

SEQ ID NO: 230256 - DNA, 894 bp, synthetic construct
  misc_feature 1..894: note = Description of Artificial Sequence: Synthetic coding sequence
  source 1..894: mol_type = other DNA
atggctagcccgcagctgtgcagagccctcgtctcggctcagtgggtggcagaagcgcttagggccccacgggcaggacaaccactgcagctgctggatgccagctggtaccttcccaagctgggtagggacgcacgcagggaatttgaggagagacacattccaggtgccgctttttttgatatcgatcaatgctcagacagaacttccccctacgatcatatgctccctggagctgaacacttcgctgagtatgctgggagattgggcgtgggcgcagcgacccatgtcgttatctatgatgcttctgaccaagggttgtactcagctcccagagtgtggtggatgtttcgagccttcgggcaccatgccgtcagcctcctagatggcggactgagacactggctgcggcagaacttgccactttccagtggaaagagtcagcctgccccagccgaattccgcgctcagctcgatccagcttttattaaaacctatgaggacattaaagaaaacctggagtcaaggcgcttccaagtggtcgactcgcgagccacaggacgattcagggggacagagcccgagcccagagatggaattgaacccggtcatattcctgggacggtgaatattccctttacagacttcctatctcaggaaggcctggagaaaagtcctgaagaaatcaggcacttattccaggaaaagaaggtcgatttgagcaaaccgttagtcgctacctgcggcagcggtgttactgcttgccatgtagctctaggcgcatatctctgcgggaaacccgacgtgcccatttacgacggtagctgggtggagtggtatatgcgcgctcgtcccgaggacgtgatctctgaggggcgtggcaagacccactag

SEQ ID NO: 230257 - DNA, 738 bp, synthetic construct
  misc_feature 1..738: note = Description of Artificial Sequence: Synthetic coding sequence
  source 1..738: mol_type = other DNA
atggcttcaccgcagctctgccgcgcactggtcagtgcccagtgggtcgctgaagcactacgcgctcctcgcgctggacagcccctgcagttattagacgcttcctggtacctacccaaactaggaagagatgccaggcgcgagtttgaggaacgccacattccgggtgccgcttttttcgacatcgaccagtgctcggatcggacatctccttatgatcacatgttgcccggagccgaacatttcgccgagtacgccggtcgcttgggagtcggcgctgctacgcatgtcgtgatatatgatgcttccgatcagggactgtattctgctccgcgagtgtggtggatgttcagagccttcggacatcacgccgtatccctgctggatggcggtctgcggcactggctcaggcagaatctccccctttcttcaggaaagtctcaacctgctcctgccgaatttcgggctcaactagacccagcattcattaaaacttacgaagatatcaaggaaaacctcgaatcaaggcgcttccaagtcgttgactcccgcgctaccggaaggttcagaggcaccgagcctgagccccctgcagttgggatagagcccggacacatccccggaaccgtcaatataccattcactgatttcctgtctcaggatgggtcgtgggtggagtggtatatgcgcgctagaccggaggatgtgatttccgaaggtaggggtaaaactcactag

SEQ ID NO: 230258 - DNA, 765 bp, synthetic construct
  misc_feature 1..765: note = Description of Artificial Sequence: Synthetic coding sequence
  source 1..765: mol_type = other DNA
atggaccctgctgcatcgtcttgtatgcgctcgttgcaacctcctgcacccgtttgggggtgtttgaggaatccccatagcgaagggaacggagcctctggactaccccactatccacccacccctttttccttccatcaaaagccagacttcttagcaacggcaacggctgcgtatcccgacttctctgcgagctgtctggcggctactccccacagcctgccccaagaggagcatatctttaccgagcagcacccagcatttccccaatcaccgaattggcattttcccgtgtccgacgctcgaagaaggcccaactcaggccctgctgggggatctaaggagatgggcacgtcctccctcggtttagtggatacaaccggtgggccaggagatgactacggcgttctggggtctacagctaacgagaccgagaaaaaatcttcccgtagaaggaaagaaagctctgacaatcaggaaaatagggggaagcctgaggggagctccaaagctcggaaggaacgcacagcgtttaccaaggagcagctgagggagctggaagccgagtttgctcatcataactacctcaccaggctccgcagatacgagattgccgtcaatctagacttaagcgagagacaggtgaaggtctggttccagaatcggagaatgaagtggaagagagttaagggcggacagccaatctcgccgaacgggcaggaccccgaagacggcgacagcacagctagcccctctagcgaatag

SEQ ID NO: 230259 - DNA, 555 bp, synthetic construct
  misc_feature 1..555: note = Description of Artificial Sequence: Synthetic coding sequence
  source 1..555: mol_type = other DNA
atggatccggcagcaagttcatgtatgaggagcctgcagccacctgctcccgtctggggatgcctccgcaacccgcactcagaaggtaacggcgcatccggcctccctcattacccacccactccttttagcttccatcaaaagccagattttttggccactgcgacggccgcttacccagacttttccgcgtcctgccttgccgcaactccccactcattgcctcaagaggagcacatttttactgagcaacacccagcttttcctcaaagccctaactggcacttccctgtgagcgatgcacgacgtaggcccaacagcggacccgcaggcggttcgaaagagatgggcacctcctctttgggcctagtggacaccacaggaggcccaggagatgactatggagtcctcggaagcactgctaatgaaactgaaaaaaagagcagccgcagaagaaaggagagttccggccagtctgttgtgcccgaacctaaggacgaggtcgaggcatgtgaggggagaagcgcccatctcccacaatgggccggaccatag

SEQ ID NO: 230260 - DNA, 420 bp, synthetic construct
  misc_feature 1..420: note = Description of Artificial Sequence: Synthetic coding sequence
  source 1..420: mol_type = other DNA
atgggaacgtcttcactggggctggtcgatactacagggggtcccggagatgattatggggtgctcggtagcaccgccaacgagaccgaaaaaaaatcgagccgaaggcgaaaagaaagttctgacaatcaagagaatcggggaaagccggagggatcatctaaggctcggaaagaacgcaccgcatttacaaaggagcagcttagggagctcgaggctgagtttgcccatcataattatctgacaagactgaggagatacgagatagccgtgaatctggacttgtccgaacggcaggttaaggtttggttccagaacaggcggatgaaatggaagagggtaaaggggggtcaaccaatctcacctaatggccaggaccccgaggacggcgacagtactgcttccccctcatctgaatag

SEQ ID NO: 230261 - DNA, 915 bp, synthetic construct
  misc_feature 1..915: note = Description of Artificial Sequence: Synthetic coding sequence
  source 1..915: mol_type = other DNA
atggaacaccccctcttcggatgcctccgcagccctcatgcaactgcccagggccttcatcctttttcccagagttcccttgccctgcacggaaggtcggaccatatgagttatcccgagctctctactagttcctcctcatgcataatcgcaggctatcctaacgaagagggcatgtttgcctcccagcatcatagagggcaccatcaccaccaccaccaccaccaccatcaccaccaccagcaacagcagcatcaggccctgcagacgaactggcatctacctcagatgagctcgccccctagcgccgcacggcatagcctatgtttacagcctgattcagggggacccccagaattgggtagctcacctcctgttctctgctcaaattcttcatctttgggttctagcacccccactggtgcggcatgcgcgcctggtgactacggacggcaggctctgtcccccgcagaagcagagaaaagatctggcggtaagcgcaagtcagattcgtccgactcacaggaagggaactacaagtccgaagtaaactccaaacctcgtaaggaaaggacagcgttcacaaaagagcaaataagagagttagaggccgagtttgctcaccacaattatttaactcgcctgcgtaggtacgagatcgccgtgaatcttgacctgaccgaaagacaggtcaaggtttggtttcagaatcggagaatgaagtggaaacgtgtgaaagggggacaacagggcgcagctgccagagaaaaggagctcgtgaacgtgaaaaaagggacactgctgccttctgaactgtccggcatcggcgcagccacgttgcaacagactggcgacagtatcgctaacgaagattcccacgattctgatcacagctccgagcatgcacacctgtag

SEQ ID NO: 230262 - DNA, 705 bp, synthetic construct
  misc_feature 1..705: note = Description of Artificial Sequence: Synthetic coding sequence
  source 1..705: mol_type = other DNA
atggccgcatcaagatgggccaggaaagcggttgtcctgctatgtgcatccgacctactgctgctgttactgttactccctccacccggttcatgtgctgcagaagggtcacccggaacaccagatgaaagcacacctccacccagaaagaagaagaaagatataagggattacaatgacgccgacatggctcgtctcttagagcagtgggagaaagacgacgacatcgaggagggtgacctgccagagcacaagcgtccatctgccccagtcgatttctcaaagatcgacccaagcaaacccgaaagcatacttaagatgaccaagaagggcaagaccctcatgatgttcgttaccgtgagcggcagcccaaccgagaaagagacggaggaaatcacctccctctggcaaggcagcttattcaatgctaattatgacgtacagcgtttcatcgtgggctcggatagggccatcttcatgctgcgggatggaagctacgcatgggaaattaaggacttcctggttggccaagataggtgtgcagatgtgacactcgagggacaggtgtatccaggaaagggaggtggttctaaggagaaaaacaagaccaaacaggacaagggcaagaagaaaaaggagggagacctgaagagtagaagctctaaggaggagaacagagctggaaataagcgggaggacctgtag

SEQ ID NO: 230263 - DNA, 705 bp, synthetic construct
  misc_feature 1..705: note = Description of Artificial Sequence: Synthetic coding sequence
  source 1..705: mol_type = other DNA
atggcggcttctaggtgggcgaggaaggccgtggttttgctgtgtgccagtgacctgcttctccttctgctcttgctgcccccacccggaagctgcgccgctgagggttccccgggaactcccgacgagagtacacctcccccacggaaaaagaagaaggacattagggactacaacgacgctgatatggccagactgctggaacagtgggagaaggacgacgatattgaagagggagatctcccagaacataagcgcccatccgcccctgtggacttcagcaagatcgacccctctaagcctgagtcaatactcaagatgacaaagaaagggaaaaccctgatgatgttcgtgaccgtgtctggaagcccgacagagaaggagaccgaggagataacatctctgtggcagggttccttattcaacgcaaactatgatgtccaacgttttatagtagggagtgaccgggctatatttatgctccgggacggctcttacgcatgggagataaaggattttctcgtagggcaggacagatgcgccgatgtgaccctggaagggcaggtgtatcctgggaaagggggaggttctaaggagaaaaacaaaaccaagcaggataaagggaagaagaagaaggagggagatctgaagtcccggagcagtaaagaggagaaccgtgctggcaataagcgagaggatctctag

SEQ ID NO: 230264 - DNA, 1194 bp, synthetic construct
  misc_feature 1..1194: note = Description of Artificial Sequence: Synthetic coding sequence
  source 1..1194: mol_type = other DNA
atggcacaatctccgcctccccagtccctcctggggcacgaccactggatttttgcgcagggatgggggtgggcgggacattgggacagtacctctccagcatccagtagcgattccagcggtagttgtccatgcgacggggctaggggtttgccccagcctcagccaccgagctgtagtagccgggcagccgaagccgcagctaccacaccacgaagggctcgcactggacccgctggagggcagcgccaatcggcctctgagagagagaaactgcggatgaggaccttagccagggctctacacgaactacggcgatttctcccgccttctttggcacctgctggccaatcactaacaaaaatcgagacccttcgccttgcaatccggtatattggtcatttatccgccgtcctcgggttaagtgaggagtccctgcagtgtcggagaaggcaaaggggggatgccggatccccttggggatgtcccttatgccccgacaggggcccagcagaagctcagacccaggcggagggccaaggccaaggacaaggccaggggcagggacagggtcagggccaaggccagggtcagggccaggggcagggccagggccgtcggcctggcctggtgagtgctgtcctggcagaagcctcctggggctcaccaagcgcttgtcccggagcccaggctgccccagagcggctcggacgcggtgtgcatgatacagacccctgggctacccctccctactgcccaaagatacagtcaccgccttactcttcccagggcaccactagcgacgctagcctttggaccccccctcagggatgtccatggacccagtcttctcccgagcctcggaatcccccagtaccctggactgccgcacctgccaccttggagctagccgctgtctaccagggtctgtccgtgtcccccgagccctgtctaagcctgggagctccctccctattgccacatccatcttgccagagactccagcctcagacccccggtcggtgctggtctcatagtgctgaggtagtcccaaatagcgaggaccagggtcccggtgccgctttccagctctctgaggctagtcctccacaatcctcgggactccggttttccggttgccctgagctgtggcaggaggacctggaaggggctcgcttgggaattttctactag

SEQ ID NO: 230265 - DNA, 3510 bp, synthetic construct
  misc_feature 1..3510: note = Description of Artificial Sequence: Synthetic coding sequence
  source 1..3510: mol_type = other DNA
atggagcctcgggagagtggcaaggctcccgtgacatttgatgacatcactgtatacctgttgcaggaggaatgggtgctgctgagccaacagcagaaggagttatgcggcagcaacaaacttgtggctcctcttggacctaccgtcgcaaacccagagctgtttaggaagttcggcaggggccctgaaccatggctgggatcggttcaggggcaaagaagtttgctagaacaccatccgggtaagaagcagatgggttacatgggcgagatggaggtccaaggtccaacccgggagtcaggtcaatccttgcccccacagaaaaaagcataccttagtcatttatccaccgggtccgggcatatagaaggcgactgggcaggtcgaaaccggaagctgctcaaaccgagaagcattcagaagtcttggttcgttcaattcccatggttgattatgaacgaagaacagacggcgctgttctgttccgcctgccgggagtacccatcaatccgagataagcgctccaggttgattgagggctatacaggacctttcaaagtagagaccctgaagtaccatgctaaatccaaggcccatatgttctgcgttaacgcgctggctgcacgagaccccatttgggccgcacgattcagaagcatccgcgacccaccaggcgacgtgctcgccagtcccgagccgctgtttaccgctgattgtccaattttttacccgcctggcccactcggaggattcgactctatggccgaattgcttccttcttctcgcgctgagctggaagatcctggtggagacggcgcaatccccgctatgtacctcgattgtatttccgatctgagacagaaggaaatcactgatgggatccactcaagtagcgatatcaacatactttataatgacgcagtcgaatcctgtatccaggatcctagcgccgaggggctctctgaagaagtcccagtggtgtttgaagaattaccagtcgtctttgaagacgtggccgtgtactttacccgtgaagagtggggaatgcttgataagagacagaaggagctttatcgagatgtgatgcgcatgaactacgaactgctggctagtctgggccctgcggcagccaaaccggacctgatatcaaaattggaacgacgagccgctccatggattaaagatcccaacggccctaaatggggaaaaggccgacccccaggaaacaaaaagatggtggccgttagggaggcagatactcaggctagcgccgctgattctgcgctgcttccaggctcacccgtggaggcacgggcatcctgctgctcaagcagcatctgtgaggaaggagacggtccaagacgcatcaagcgcacttacaggccccgatccatacagcggtcgtggttcggccagtttccttggctcgttattgaccctaaggagaccaagcttttttgtagtgcctgtattgagcgccctaatttgcacgacaaatcttcccggctggtgcggggatataccgggccatttaaggtagagacactcaagtaccatgaagtgtcaaaagcccatagactctgcgtcaacaccgtcgaaataaaagaggatacacctcacacagcgctggtgcccgagatatcttcagatttgatggcgaatatggagcacttcttcaacgcggcttactcaattgcctaccatagccgccctctcaatgattttgaaaagatactgcagctcctgcagtccactggcaccgtgatcctgggcaaataccgtaaccgaactgcctgcacacaatttatcaaatatatttcagagacactcaagagggaaatcctagaggatgtgcgaaattcaccttgtgtgtccgtacttcttgattcgagcactgatgcaagtgaacaggcctgcgtgggcatttatatcagatatttcaagcagatggaagtaaaagagagttacatcaccctcgcccctctgtattccgagacagcagacgggtacttcgagacaatcgtgtcggctcttgatgagctagacataccattcagaaaacctggctgggtcgttggactcggtactgacggctccgcaatgttgtcttgtaggggaggtctggttgagaagtttcaggaggtgatccctcaattactgcctgtccactgtgtagcccaccgtctgcatcttgccgtggtggatgcttgtggatcaattgacctggttaagaagtgtgacagacacataaggaccgtgtttaagttttaccaatctagcaataaacggctgaatgagctgcaggagggcgcagcccctctggaacaggaaataatccgactgaaagatctgaatgcagttcgttgggtcgccagccgaagacggaccctgcacgcattgctggtttcatggcctgccttggccagacatctgcagcgtgttgccgaggccggtggccagatcggacacagggccaaagggatgctcaaattgatgcgaggttttcatttcgtgaagttttgtcacttcctcttagattttctcagcatttatagaccactcagtgaggtgtgtcagaaggagatcgttctgatcacggaagtgaacgcaaccctaggaagggcgtacgtggccctggagtcccttagacatcaggcaggcccaaaagaagaggagtttaatgccagcttcaaggacggccgattacacggaatctgtcttgacaaactggaggtggctgagcagcgattccaggcagaccgagagcgtactgtgttaacaggtattgagtatctacaacagcggttcgacgctgaccgacctcctcagctcaagaacatggaagtgttcgacactatggcatggccttccggcatcgaactcgcctctttcggtaacgatgacattctgaacctggcaaggtactttgagtgtagcttacctactggctattctgaggaggccctgctagaagagtggttgggtctgaagacaatcgcgcaacatctccccttttcaatgttgtgcaagaatgccctggctcaacactgtagattcccccttttaagcaaattgatggctgtggtggtttgtgttcctattagcacctcttgttgtgaaagagggttcaaggcgatgaacaggattcgtaccgatgagcgcaccaagctgagcaacgaggtgttaaatatgctcatgatgacggccgtaaatggggtcgccgttacggagtacgacccccaacccgctatccagcattggtacttaacatcctctggacgtagattttcacatgtgtatacttgcgctcaggttcctgccaggagccctgcatccgccagactgaggaaggaggaaatgggcgctctctacgtggaagaacctagaactcaaaagccacccattttaccgtctcgggaagcggctgaagtattgaaggactgcatcatggagccgccagaacggctcctctatcctcacacaagccaggaggcccctggaatgtcttag

SEQ ID NO: 230266 - DNA, 981 bp, synthetic construct
  misc_feature 1..981: note = Description of Artificial Sequence: Synthetic coding sequence
  source 1..981: mol_type = other DNA
atgagagaatggtgggtgcaggttgggttactggcagtgccactgctggctgcctatcttcatatccctcccccacagttgtcccccgctctgcactcatggaaatctagcggaaagttttttacatataagggtttacgaatattttaccaggacagcgttggggttgtgggtagtcccgagatcgtggtcctccttcacggctttccaacctctagctacgactggtacaagatctgggagggtctcactttaaggtttcaccgcgtgatcgccttggacttcctgggctttggtttctccgacaagcccagaccccaccactactccatcttcgagcaagccagcatcgtcgaagccctgctcaggcaccttggactccagaaccgacggatcaatctgcttagccacgactatggtgatatagtggctcaagagctcctatacaggtacaagcagaatagaagcgggagactgacaatcaaaagcttgtgcctttcaaatggaggaatcttccccgagacccaccgtcctttgcttctgcagaaactgctcaaggatggcggtgtcttaagtcctatcctcacccggctgatgaacttttttgtgttctcaagggggctgacccctgtatttggtccatacactcgcccttcagagagtgagctgtgggatatgtgggcagggataaggaacaacgacggaaatctagttatagacagtctactgcagtatatcaaccagagaaagaaatttcggcgtagatgggtcggcgctcttgcatcagttaccattcctatacactttatctacggaccacttgatcccgttaacccataccctgagtttctggagctctatagaaagacgctcccacggtctacagtgagcatattggatgaccacatttcccactatcctcagctggaagaccctatgggcttcttaaacgcatacatggggttcattaactccttctag

SEQ ID NO: 230267 - DNA, 981 bp, synthetic construct
  misc_feature 1..981: note = Description of Artificial Sequence: Synthetic coding sequence
  source 1..981: mol_type = other DNA
atgcgcgaatggtgggtccaggttggccttcttgctgtgcctctgctggccgcttatctccacatccctcctccccagctgtctcccgctttacactcatggaagtcttcaggcaagtttttcacctacaaaggattgagaatcttttaccaagactccgtaggggtcgtcgggtctcctgagatagttgtccttctgcatggctttcccacctcgagctacgattggtacaagatatgggagggattgactcttaggttccacagagtcatcgcactcgacttcctcgggtttggcttttctgacaagcctcgaccccaccattatagcatattcgaacaagcctcaatcgttgaagccctcctacgccacctcggcctccagaaccggagaataaaccttttatcacacgattacggagatatagtagcccaagaactgctctacagatacaagcagaatcgaagcggacgactcaccatcaaaagcctctgcctttctaacggaggtattttcccggagacccacagacccctgttgttacagaagctgctaaaagacggcggagttctgtcccctattttaacccgcctcatgaatttttttgtcttctcacggggattgacgccggtctttggtccatacacaaggcccagcgagtctgaactttgggacatgtgggccggaattcggaacaatgacgggaatcttgtgattgactctcttctacagtatatcaatcagagaaaaaagttcagaaggcggtgggtgggggcattggcctcggtcacaatccctatccatttcatctacggaccactggatccagtgaacccctatcccgagttcctggaactttatcgaaagacgctccctagatctaccgtatcaattctggatgatcacatctcacactatcctcaactggaggaccccatgggcttccttaacgcatacatgggattcataaactctttttag

SEQ ID NO: 230268 - DNA, 357 bp, synthetic construct
  misc_feature 1..357: note = Description of Artificial Sequence: Synthetic coding sequence
  source 1..357: mol_type = other DNA
atgagggagtggtgggtgcaggtgggactgttagctgtgccgctgttggctgcctacttacacattccccctcctcagctgtcaccggcacttcactcatggaaaagctccggcaaattttttacatacaaggggttacgcatcttttaccaagattctgtcggggtggttggctcacctgagatagtcgtgctcctgcatgggttccccacttcctcatatgactggtacaaaatctgggagggcctgaccttgcgatttcaccgggtgatagctctcgattttctcggttttgggtttagtgataaaccacgaccacaccactattcgatcttcgagcaagcatccatcgtgtag

SEQ ID NO: 230269 - DNA, 624 bp, synthetic construct
  misc_feature 1..624: note = Description of Artificial Sequence: Synthetic coding sequence
  source 1..624: mol_type = other DNA
atgcgggaatggtgggtgcaggtgggcctcttggctgttcccctgcttgccgcttatctccacatcccaccccctcagttatccccagctctccatagctggaaatcttcaggcaaatttttcacctacaaggggctccgcattttctatcaagatagtgtgggcgtcgttggatctcctgaaattgttgtgctgctacatggctttcctacttcctcctatgactggtacaagatatgggagggtctgacgctgagattccacagggtgatagcactggacttcctggggttcggcttcagtgataagcctaggcctcaccactacagcatcttcgaacaagcttctattgttgaggccttgctacgacacctgggtctccaaaacaggcgcataaaccttctttcccacgattacggtgatatcgtagcccaagagttgctctataggtataaacagaacagaagcggcagactgacgattaaaagtttatgtctcagtaacgggggtatattcccagagactcacaggcctcttctcctccagaagcttcttaaagatgggggtgtactttcacccattttgaccaggctaatgaatttcttcgtgttctcccggggatag

SEQ ID NO: 230270 - DNA, 483 bp, synthetic construct
  misc_feature 1..483: note = Description of Artificial Sequence: Synthetic coding sequence
  source 1..483: mol_type = other DNA
atgcgggaatggtgggtgcaagtagggttactggccgtccctctgttggccgcttatctccacatccctcccccacagctgtctcctgctctccactcctggaaatcctcggggaagttctttacatacaaaggactgcggatcttctatcaggattccgtcggggtagtgggatcccctgagatcgtggtgctattgcacggttttccgacctcctcgtacgattggtacaagatctgggaggggcttacgctgagatttcatcgtgtgattgctctggactttctgggcttcggattcagcgacaagccacgtccccaccactatagcattttcgaacaggcaagcatagtagaggcgctgctgcgacacctgggactccagaatagaagaattaacctcctgagccacgattatggcgacatcgtcgctcaagaactgttgtacaggtacaagcagaatcgctccggacgattgacctag

SEQ ID NO: 230271 - DNA, 384 bp, synthetic construct
  misc_feature 1..384: note = Description of Artificial Sequence: Synthetic coding sequence
  source 1..384: mol_type = other DNA
atgcgagagtggtgggtccaggtaggccttctggctgtgcccttactggccgcatatctgcatattcctcccccacaactgtcgcctgcgctacactcctggaagagctctggaaagttcttcacatacaagggcctccggattttttaccaggattctgtgggggttgtcggctcccccgagatcgtggtactgctccacgggttccccacaagttcatacgattggtacaagatttgggagggactgacgctgagattccatcgggtcattgccctggattttctgggctttggcttcagcgataagcctcgaccacatcactacagcatcttcgaacaggcaagtattgtagaggcccttcttcggcatctgggcctctag

SEQ ID NO: 230272 - DNA, 522 bp, synthetic construct
  misc_feature 1..522: note = Description of Artificial Sequence: Synthetic coding sequence
  source 1..522: mol_type = other DNA
atgcgggaatggtgggtacaggtaggcctgctggcagttcccctgcttgccgcttacctccacattccaccccctcaacttagcccggcacttcactcatggaaaagcagcgggaagttctttacttacaagggccttcgcattttctaccaagatagcgtcggggtcgtcggatctccagagatcgtggtcctcctgcacggatttcccacctcttcatacgactggtacaaaatctgggagggactgaccctcagattccacagagtcatagccctggacttcctcggctttggcttcagtgacaaacccaggccacatcattattccatttttgagcaggcctcaatagtggaggctctcctgcgacatctaggactccagaaccgcaggatcaatttactgtctcacgattatggagacattgtggcccaggaattgctgtaccgctacaagcagaataggtcaggaaggctcacaatcaagagcctctgcttaagcaacggtggaaattgcctatag

SEQ ID NO: 230273 - DNA, 879 bp, synthetic construct
  misc_feature 1..879: note = Description of Artificial Sequence: Synthetic coding sequence
  source 1..879: mol_type = other DNA
atgcgcgagtggtgggtccaggtgggcctattagctgtgcccctgttagcagcctacttgcacattccacccccacagctttctccggctttgcacagttggaaaagtagtgggaaattctttacatataaagggctccggatcttctatcaggacagtgtgggagtggttgggagccccgagatagttgtacttctgcacggatttcctacttcctcctatgactggtacaagatctgggaagggctcaccttacggttccatagggtcattgctcttgatttcctcggctttggcttttctgataaacctcggccacatcattactctatctttgagcaggcatccattgtcgaagctcttcttaggcatttgggtttacagaatagacgtataaaccttctgagtcacgactatggagacatcgttgcccaagagttattatataggtataagcagaatcggagcggcaggctgacgatcaagtcactgtgtctgagtaacggcggaatcttccctgaaactcatcggccactgctgctccagaaactcctgaaggacggcggagttctgtccccgattctgacccgcctgatgaactttttcgttttctctcgcggtctgctgcagtacattaaccagaggaagaagttcagacggaggtgggtcggcgcactggccagtgtcaccatacctatccacttcatttatggcccattggaccccgtcaatccttacccggaatttctagaactgtaccggaaaaccttacccagatcgactgtgtctattctcgacgatcatatctcccattatccacagttagaggatcctatgggttttcttaacgcatatatgggattcatcaactctttctag

SEQ ID NO: 230274 - DNA, 879 bp, synthetic construct
  misc_feature 1..879: note = Description of Artificial Sequence: Synthetic coding sequence
  source 1..879: mol_type = other DNA
atgagagagtggtgggtgcaggtcgggttactagctgttcctctgcttgccgcttatctacacattccaccccctcagctaagccccgcattgcattcatggaagagtagcgggaaattcttcacgtataaagggctgcggatcttctaccaggatagcgtgggagtggtaggctccccggagattgtcgtattgcttcatggcttcccaacgtcctcttacgattggtataagatttgggaaggcctgactcttaggtttcacagagtaatcgctctggactttctgggcttcgggttttctgataaacctagaccacatcactacagtattttcgaacaagcttcgattgtagaggctctcctcagacacctgggcctgcagaaccgcagaattaatctcctatcacacgattacggggacatcgtggcccaggagcttctgtatcggtataaacagaacaggagcgggaggctgacgattaagagcctctgccttagcaacggaggcatcttcccagaaacccatcgcccactgctcctacagaaactgctgaaggatggcggagttctgtcgcctattctgacacgactcatgaactttttcgtcttcagccgaggacttctgcagtacataaatcagagaaagaagtttcgcaggagatgggtgggcgctctggcctccgtgaccatccccattcactttatctatggaccactcgacccggtcaatccataccctgagtttctggagctgtaccgtaagaccctccccaggagcacagtctctattctggacgaccacatatctcactatccccaactcgaggaccctatgggtttcctgaatgcttacatgggcttcatcaactctttttag

SEQ ID NO: 230275 - DNA, 582 bp, synthetic construct
  misc_feature 1..582: note = Description of Artificial Sequence: Synthetic coding sequence
  source 1..582: mol_type = other DNA
atggacaatctacgagaaactttcttatctttggaagatggactcgggtcttccgattcgccaggattgctgtcctcttgggactggaaagatcgtgcaggtccgttcgaactgaatcaagcctcgccatcccaatctctttcccctgcaccatctttggaatcttactcctcttccccctgcccagccgttgctggcctgccctgcgaacacggcggagcctcaagcggtgggtccgagggttgcagtgtgggcggagccagtgggctcgtcgaagtggattacaacatgttggccttccagccaacccatttgcagggcggtggcggaccaaaggctcagaaaggaaccaaagtgcggatgtctgttcagagacggagaaaggcctcagagcgagagaagttgaggatgaggactctggccgacgctctccacacattgcgcaactatcttccacccgtctactcccaacgaggccagccactgaccaagattcagaccctgaagtatacaattaaatacattggcgagcttacagacctcctgaatcgcggaagggaaccgagagctcagagcgcttag

SEQ ID NO: 230276 - DNA, 1893 bp, synthetic construct
  misc_feature 1..1893: note = Description of Artificial Sequence: Synthetic coding sequence
  source 1..1893: mol_type = other DNA
atggctttaccgaccgctaggcccctcctgggtagctgtggtacgccagccctcgggtccctcttattcctcctgttcagcctgggttgggtccaaccctcccggacactcgcaggcgagaccggccaggaagccgctcccctggatggcgttctggcaaatccacccaatatctccagcctgagcccacggcagctgctgggttttccctgtgcagaggtgtctggcttaagtacagaaagagtccgcgaacttgctgtggctctcgctcaaaaaaatgttaaactctccacagagcagctacgatgcttggcgcatcgcctcagtgagcccccagaagatttggatgcgctaccccttgacctactgttattcttgaaccccgacgctttctccggtccccaagcctgcacgagattcttttccaggataaccaaagctaatgtggatctcctgcccagaggtgccccagaacggcagagactgctgcctgccgctttggcgtgttggggggtgcggggatccttgctcagcgaggcagacgttcgtgcacttggcggtcttgcttgtgaccttcccggtagatttgtggccgagtccgctgaggttctgttgccaagattggtgagctgcccaggacctcttgatcaggatcagcaagaggctgctcgcgcagctctccagggcggtggacccccatacggacctccttcaacttggagcgtgagcacaatggatgctcttcgtgggctcctgcccgtgctgggacagccaattatccgtagtatcccacaaggaatcgtcgctgcctggcgccaacgctctagtcgtgaccctagctggagacagcctgagcggacaatactgaggccgaggttccgcagggaggtagaaaagacagcctgtccctccgggaagaaagccagagaaatcgacgagtccctcatattctataaaaaatgggagttggaggcttgtgtggatgctgctttgttggccacccagatggatagagtcaacgcaatcccgttcacatatgagcagctggacgtgctgaaacacaagctagacgaattatatccacaggggtaccccgagtctgtaatccaacaccttgggtacctttttcttaaaatgtcccctgaagatatccggaagtggaacgttacgtcactggagacgctaaaagcgctcctggaggtgaataagggccacgagatgtccccccaggcccctcgacggcctttacctcaggttgcgacactgatcgaccggtttgtcaagggacggggacagttggataaagatacacttgataccctcacggccttttacccgggttacctctgctcccttagcccagaagagctgagttccgtccctcctagctccatctgggccgtaagaccccaggatttggacacatgtgatcccagacagctggacgtgctgtaccctaaggcacgactagccttccagaacatgaacggttctgagtacttcgtgaaaatacagtcattcctgggcggagcccctactgaggacttaaaagccctgtcacaacagaacgtctcaatggacctggcaacttttatgaaactgcgaacagacgcagtgcttcctctgactgtagctgaggtacagaaactccttggccctcatgtcgagggcctgaaggccgaagaaaggcatcgacccgtcagggactggatcctccggcagcgccaagacgaccttgacaccctcggcctcggattacagggcggtattcctaacggttatctcgtgctcgacttgtcaatgcaggaggccttatcaggcaccccgtgtttactgggacccggacctgttttgaccgttttggccttactgctggcaagcactctggcctag

SEQ ID NO: 230277 - DNA, 1869 bp, synthetic construct
  misc_feature 1..1869: note = Description of Artificial Sequence: Synthetic coding sequence
  source 1..1869: mol_type = other DNA
atggccctccccaccgccaggccactgctcggatcgtgcggaactccagcccttggtagcttgttattcctgttattttccctcggttgggttcaaccaagtcggacgttggccggagagacaggccaggaggcagctccactggacggcgtgctggctaatccacccaatatcagttctttgtcccccagacaacttcttggtttcccctgcgcagaagtttcaggcctatctaccgaacgagtacgcgaattggcagtggcactggctcaaaagaacgttaagctgagcacggaacagctaagatgtctggcacaccggttgtctgaacctccggaggacctggacgcgctgccgctggacctgcttctgtttctgaatcctgacgcattctccggcccacaggcatgcacaagattttttagtaggatcacgaaagctaacgtggatctgttgccgaggggcgctcccgagaggcagagactacttcctgcagcccttgcctgttggggagtcaggggatccctcctttctgaggccgatgttcgcgctctcgggggtttggcctgcgacttgcctgggcgtttcgtggctgagagtgcggaagttttgctaccccgacttgtatcctgcccaggacctcttgatcaagaccagcaggaggcagcccgtgccgctctgcaagggggtggaccgccttacggccctccatccacctggtctgtaagtaccatggatgctctgcgcggattgctgcccgttctgggccagcccattatccggtcgatcccacagggcatcgttgccgcttggagacagcgctctagtcgtgatccttcttggcgccagccagaaagaacaatcctaagaccgcgttttcgaagggaagtagagaagaccgcatgcccatccggcaagaaagcccgagaaatcgatgagtcgttgatattttacaagaagtgggagctggaggcctgtgtggacgctgcactcctcgctactcagatggacagagttaacgctattcctttcacctacgagcagctggatgtactgaagcataagctagatgagctgtatccacagggatacccagagagcgttattcagcatctgggatacttgttcctaaagatgtctcctgaggacattagaaaatggaacgtcacatcccttgagacgcttaaagcgctcctggaagttaacaaagggcacgagatgtctccacaggttgctacactgatcgatcgattcgttaaaggcagggggcaacttgacaaagacaccctagacaccctcaccgctttttaccccggatatctgtgtagtctatctcctgaagagttatcctctgtcccaccatcatccatctgggcggtccggcctcaagacctggatacctgcgaccctaggcagctcgatgtgctgtacccaaaggccagactagcattccagaacatgaacgggagtgaatatttcgtgaaaatccagtcttttctaggcggagctccaacagaagatctgaaggctctcagccagcagaacgtgtccatggatttggccacttttatgaaactcagaacagatgcggttctgcctttgaccgtagcggaagttcagaagctcctggggcctcacgtggagggcttgaaggccgaggagcgccaccgcccagtgcgcgattggattcttaggcagcgccaagacgacttagacactctgggattaggactccagggcggaattcctaacggatatctagtgttagatcttagtatgcaagaagctctcagcggcacaccatgccttctgggccctggaccagtgttaaccgtgctcgctctgcttcttgcctctactttagcgtag

SEQ ID NO: 230278 - DNA, 1893 bp, synthetic construct
  misc_feature 1..1893: note = Description of Artificial Sequence: Synthetic coding sequence
  source 1..1893: mol_type = other DNA
atggctttacctacagcccgacctctgcttgggtcctgcggaaccccggctctggggagcctcctctttcttctgttttccctgggctgggtacagccttcaaggacccttgcaggagagaccggacaggaagctgcaccgctggatggcgtgctagccaatcctcccaatatttcatccctgtcacctcggcaacttttaggatttccgtgtgccgaagtctctggcctgagcacagaaagagtcagggagctcgcagtcgctctcgcccagaagaacgtaaaattatccacagagcagttgcgctgtttagcacatcggctttcagagcctccagaggacctcgatgcacttccactggatctgttactgtttttaaatccagacgctttttccggtccccaggcgtgcactagatttttctcaagaatcactaaggccaatgtcgatctgctaccaagaggagctcccgagaggcagagactgcttcctgcagctttggcctgctggggagtgcggggatctctgctaagcgaagctgacgtgcgtgccctggggggtttggcctgcgatctcccaggaaggtttgtggcagaaagcgccgaagtgctgttacccaggcttgtgtcctgcccaggtccccttgaccaggaccagcaggaggcagcgagggccgctttgcagggaggcggtcctccctatggaccaccctcaacttggtccgtctcaacgatggacgctttgagaggcctgcttcctgtcctcgggcagcctattattcgttccatccctcagggaatcgtcgccgcatggcgacagagaagcagtagggatccaagttggcgacagcctgagcgcactattctgagacctcggttccggagagaggtggagaagacagcctgtccttctggtaagaaggcaagagagattgacgaatccctcatcttttacaaaaaatgggaactcgaggcatgtgttgatgcagcgctcctcgccacccagatggatcgtgtcaacgccattcccttcacctatgaacagcttgacgtcctcaagcataagcttgatgaactgtatccccagggctacccggaaagcgtgatacagcaccttggatacctattcctcaagatgtcaccagaggacattcgtaaatggaatgtgacctccttggaaactctaaaggccctgctggaagtaaacaaaggtcacgagatgtccccgcaggcacctcgtcggccactgccccaggtggccactctgatagaccgattcgttaagggcagagggcagctggacaaagataccctcgacacacttaccgcattttaccccggttacttgtgcagcctgtcgcctgaggagctgtcaagtgtccccccaagctcaatttgggcagtaaggccccaggacttggatacctgtgatcccaggcagctcgatgtgctgtacccaaaagctcgcctcgccttccaaaacatgaacggatctgaatatttcgtgaaaatacagagcttccttggaggcgctcccacagaggatctgaaagcactgtcacagcagaatgtctccatggatttagccacctttatgaagttgcgaaccgatgccgtattacctctgaccgtggcagaggtacaaaaattgctgggtcctcacgtggaagggcttaaagctgaagaaaggcaccggcctgtgcgggactggatccttaggcagcgacaagacgatttggatacactcggactcggtttacagggcggaatccccaatggttatctggttttagacctgagtatgcaagaggccctgtccggtactccatgcctgctcggccctgggcctgtactgaccgtcctggccctgctgctggcgtccactctcgcatag

SEQ ID NO: 230279 - DNA, 1869 bp, synthetic construct
  misc_feature 1..1869: note = Description of Artificial Sequence: Synthetic coding sequence
  source 1..1869: mol_type = other DNA
atggccctgccgacggccaggcccctgctgggatcttgcggcacacctgcccttggcagtttgctgttcctattgttcagtctcgggtgggtccagccgtcccgcaccctcgcgggtgaaacagggcaggaggccgcacccctcgacggggtcttggccaatcctccgaatatctcatccctaagtccccgtcagctgttgggctttccatgcgcggaagtaagcggcctgagcacagagagagtgagggagctagccgtggccctggcacagaaaaatgtgaaactttccacagaacagcttcgctgtctggcacatcgcctctctgagccccctgaggatctcgacgcattgcctctcgatctgttattgttcttaaatcccgacgcgttctctggacctcaggcttgtacgcgttttttttcaaggatcaccaaagctaacgtcgacctactccccagaggggcacctgagaggcagagactcttacctgcagccctcgcatgctggggcgtgaggggctccctgctatccgaagcagacgtgcgcgcactcggtggtttggcttgtgacctgcccggacgattcgtcgctgagagcgcggaggtgctgctgccgaggttggtgtcatgtcctgggcctctggatcaggatcagcaagaagctgctcgagcggcactgcagggcggaggccctccgtacggccctcccagcacatggtctgtgtcgacaatggatgccctgaggggcctgttgccggtgttgggccaacccattattcgtagcatcccccaagggattgttgcggcttggagacaacggagcagcagggacccatcttggcggcagccagaacgcacgatcttgaggcccagatttagaagagaggtggaaaagaccgcttgtcctagcggtaaaaaagcaagggaaattgatgagagtctgatattttacaagaaatgggaattagaggcctgcgtcgacgccgctttgcttgcaacacagatggatcgtgtgaacgccattccattcacatacgagcaactggatgtcctgaaacacaaattggacgagttatatccccaggggtatccagagtcagttatccagcatttaggctacctgtttcttaagatgtcgccagaagacatccggaagtggaacgttacgagcctggaaaccctgaaggccctccttgaggtcaataaagggcacgaaatgagcccgcaggttgcaaccctgatcgatcgtttcgtaaagggcagaggccagttggacaaggatactcttgatactcttactgcattctatcctgggtacttgtgcagcttgagtcccgaggaactgagttccgttcccccaagctcgatctgggctgtgaggccacaggatctggatacttgtgacccacgccagctggacgtgctctatcccaaagcaaggctggcattccagaacatgaacggtagcgagtattttgtgaagatccagtcgtttctgggtggcgctccaactgaggacctgaaggcgctgagccagcagaacgtctccatggatctggctaccttcatgaagctccgtactgacgctgtgcttccacttaccgttgccgaagtgcaaaagcttctagggcctcacgttgaaggactaaaggcagaggaacgtcatcggccagtgcgggattggatcctgaggcagcggcaggacgatctggacacactggggcttggactccaaggtggaatccccaacgggtatctggtgttagacctgtctatgcaggaggcattgtccggaaccccttgcctcttgggccctggacccgtgctgaccgtcttggcactcctcctggcttctactttggcctag

SEQ ID NO: 230280 - DNA, 1869 bp, synthetic construct
  misc_feature 1..1869: note = Description of Artificial Sequence: Synthetic coding sequence
  source 1..1869: mol_type = other DNA
atggcccttccaacagcgaggccactgttagggagctgcggtactcctgcccttggaagtctcctgttcctgctgtttagcctcggatgggtgcaaccgagtagaactctggccggagaaacgggacaggaggcagccccactggacggagtccttgctaacccacccaacatcagcagcctgtcacctcgccaactgctggggtttccttgcgccgaggtgagtgggttaagcaccgagcgcgttagagagctggcagtcgctcttgcccaaaagaacgtcaaattatctaccgagcagctgcggtgcttggcccaccggctctcggagcctcctgaagatctggatgctttacctctggatttgttgttgttccttaaccccgacgccttctctgggcctcaagcttgcacacgtttcttctcacgcataaccaaggctaacgtggacttgctgccacggggagctcccgagaggcagcggctgttgccagcagcattagcctgctggggagtgcgaggctctcttttaagcgaggcagatgtgcgagctctgggcggtctggcttgcgatcttcctggccgttttgttgccgagtccgctgaagtgcttcttcctcggctcgtgagctgcccgggtccactcgaccaagaccagcaagaagccgctcgcgctgccctccagggcggaggtcccccttatggacctccgtctacgtggtctgtctccaccatggatgctttacgcggactgctgcctgttctgggacagccaattatacggtcaatccctcaaggaatagtggccgcatggaggcagcggtctagccgcgacccatcgtggcggcagcccgaacgcaccatattgcgccctcggttcaggagggaagtcgagaaaactgcctgtcccagtggaaagaaagcacgcgaaattgacgagagtctgattttctataagaagtgggaattggaggcatgtgtagatgcagccctgctggccacccagatggatcgtgtgaacgccatcccatttacatacgaacagctggacgtactcaagcacaaactcgacgaactctacccacagggctacccagagtcggtgatccagcatttgggatatctgttcttaaaaatgtcacccgaggatatcagaaagtggaatgttacatccttggaaaccctcaaagctctcctggaggtcaataaagggcatgagatgtccccccaggtggccactctcatagaccgattcgtgaaagggagagggcaactcgataaggacaccctggatactttaacagccttctaccccggttatctgtgttctttatctccagaggagctttcctccgtgcccccttcctccatttgggctgtgcgcccacaggatctcgacacctgtgacccacgccaactggatgtcctgtaccccaaggcaagattagcttttcagaatatgaatgggtccgagtactttgttaagatccagtccttcctggggggagcccctacagaagatctaaaggccctttctcagcaaaacgtgtctatggatctcgctaccttcatgaaacttcggaccgacgccgtgctgccactcacggtggctgaagtgcagaaactcctaggcccacacgtggaggggcttaaagccgaggaacgccatagaccggttcgcgactggattctccggcagcgccaggatgatctggacacgctcgggctgggcctccagggtggtatccccaacgggtacctggtgctggacctctctatgcaagaagctctctcgggaactccatgcttgctcggcccaggtccagtgctcactgtacttgcccttctactggcgtccacactggcatag

SEQ ID NO: 230281 - DNA, 1782 bp, synthetic construct
  misc_feature 1..1782: note = Description of Artificial Sequence: Synthetic coding sequence
  source 1..1782: mol_type = other DNA
atgagagattccaccggcgctggtaatagtctcgtacacaagagatcccccttgagaagaaaccagaagacacccacaagcctgactaaactgtccctgcaggatggtcataaggcgaaaaaacctgcctgtaagtttgaggaaggtcaagacgtcctagcccgatggtctgacggacttttttatttgggaaccataaaaaaaattaacatacttaaacaaagttgcttcattattttcgaagactcatctaaaagctgggtcctttggaaagatattcaaactggtgcgactggatctggggagatggtgtgtacaatttgccaagaggaatatagcgaggcaccgaacgagatggtaatttgtgacaagtgcggccagggctaccaccaattatgccataccccccacattgactgttctgtaatcgatagcgatgagaaatggctctgcagacagtgtgtatttgctaccacaacaaaacgaggaggcgctcttaagaaaggtcccaacgcgaaggctctgcaggtaatgaagcaaacgttaccctacagtgtggccgatttagaatgggatgcgggacacaagacaaatgtgcagcagtgttactgttactgtgggggtcccggagattggtacttgaaaatgcttcaatgctgcaagtgcaagcagtggtttcacgaagcctgcgtgcaatgtctacagaaacccatgctttttggagacaggttctacaccttcatttgctccgtctgctcctccggacccgaatacctaaagagactcccactgcagtgggttgatatagcccacttgtgcctgtataacctgtcagtcattcacaagaagaagtattttgatagcgagttagagctcatgacttacataaacgagaactgggatagattacacccaggggaactggccgacacacccaaatcggagaggtacgaacacgtgttagaagccctaaacgattacaaaacaatgttcatgtcagggaaggagataaagaaaaagaaacatctgttcgggcttaggatacgggtccccccagtgcccccaaatgtagcatttaaagccgaaaaagagcccgaaggaacttcccatgagttcaaaatcaaggggaggaaggctagtaaaccgattagtgactcccgcgaggtgtcaaacgggattgagaaaaaagggaagaagaagagtgtgggcagacctccgggtccatatacccgaaaaatgattcagaaaaccgccgagcctctcctggacaaggagagcatttccgagaacccaacgctggatctcccttgtagcatcggtcgcacagaaggcaccgcacatagcagcaacacttctgatgtggacttcacgggcgcaagctctgctaaagaaactacaagcagttcgatatctcgccactacggactctccgattctcgaaaaagaacaaggacaggacgctcttggcccgctgctattcctcatctgcgtagaagacggggaagactgccccgtcgtgctctgcaaacccagaacagtgagatagtgaaggacgatgaggggaaggaggactaccaattcgatgagcttaatacggaaatactcaacaatctggcagaccaggaactccaactgaaccacctcaaaaactctatcacctcatatttcggggcagctggccgaatcgcctgtggggaaaagtatagggtgttggcgcgacgggtcacgctcgacggaaaggtgcaatatctggtggaatgggagggcgcaaccgcttcatag

SEQ ID NO: 230282 - DNA, 1611 bp, synthetic construct
  misc_feature 1..1611: note = Description of Artificial Sequence: Synthetic coding sequence
  source 1..1611: mol_type = other DNA
atgcgtgactcaacaggggcaggcaatagtctggtgcataagcgctcaccacttcgcaggaaccagaaaactcccacgtccctgactaaactaagcctgcaagatgggcacaaagccaaaaaaccggcatgcaaattcgaagaagggcaggacgtcttggccagatggagcgatgggcttttttacctcggcacgataaaaaagattaacatcctgaaacagtcgtgcttcattatctttgaggattcctctaaatcatgggtgttatggaaggacattcagacaggagcaacgggtagtggcgaaatggtttgcactatttgccaagaggagtattccgaggccccaaatgagatggtaatttgcgataaatgtgggcagggctaccaccagctgtgccatacccctcatattgactgttccgtgattgatagcgacgagaagtggttgtgccggcagtgcgtcttcgctaccactaccaagcgcggaggagccctcaagaaggggcctaatgctaaagcgctccaggttatgaaacaaactcttccctactcagtggcagatctcgagtgggatgcagggcataagactaatgtgcagcaatgttattgttattgcggcggaccaggagattggtacctaaagatgctacaatgttgcaagtgcaagcagtggttccacgaggcgtgcgtacagtgccttcagaagccgatgttattcggcgatagattttacacgttcatctgctccgtttgctcaagtggcccagaatatcttaagcgactccctttacagtgggttgacatagctcacctgtgcctctataatctgagtgtcatccacaaaaagaaatactttgactccgagctagagctgatgacgtacattaatgagaactgggaccggctccaccctggtgaacttgcggacacccccaaatctgagagatacgaacatgttctggaggccctgaacgactataaaacaatggaggtcagcaatggtattgaaaagaaaggtaaaaaaaaatcagttggcaggcctccgggtccctacacacgtaaaatgattcagaaaactgccgagcccctgctggataaagaatcaatctcagaaaaccctacacttgacctgccttgttcaatcgggaggacggaaggaactgctcactcctcgaacacaagcgacgtggatttcactggagcatctagtgcaaaggagactacttccagttccatttctagacactatgggctctcagactcccgcaaacgaactaggacaggtcggtcgtggcctgctgccataccacacttgcggcgacgaagggggaggcttccccgaagggcgttgcagactcagaacagtgagattgtaaaggacgacgagggaaaggaggattatcagtttgacgagcttaatactgagatcctgaacaatttagctgaccaggaactccagctcaatcacttaaagaactctatcacctcctacttcggcgctgcaggacggatcgcctgcggagagaagtatagggtgctggcgagaagagtgactctcgacgggaaggtacagtacctcgtcgagtgggaaggggctactgcatcatag

SEQ ID NO: 230283 - DNA, 861 bp, synthetic construct
  misc_feature 1..861: note = Description of Artificial Sequence: Synthetic coding sequence
  source 1..861: mol_type = other DNA
atggtctgtacgatctgccaggaggagtatagtgaggcccctaatgagatggttatttgtgacaaatgtggccaggggtatcaccagctgtgtcacacacctcatatcgactgctctgttattgactcagatgaaaaatggttgtgccggcaatgcgtgttcgctacaaccaccaagcgcggaggtgccctcaagaaaggtccaaatgcaaaggcacttcaggtcatgaagcagaccctcccatactcggtggccgatctggaatgggacgcgggtcataaaaccaatgtgcagcagtgctactgctattgcgggggtcctggggattggtatctaaaaatgctgcagtgctgcaaatgcaagcagtggttccatgaagcttgcgtccagtgtttgcagaagcctatgctgtttggcgataggttttacacattcatctgttccgtgtgctcttctggtcccgagtacctgaagcggctgccactgcagtgggtggacatcgctcatctgtgtctatacaacctcagtgtcattcacaagaagaaatatttcgatagcgagctggaattaatgacttacattaacgagaattgggatcgcctacaccccggagaactggccgacaccccaaagtctgagcggtacgagcatgtactggaggccctgaacgactataaaacaatgttcatgtctggcaaggagattaaaaagaagaagcacctgttcggtctgcgaatcagagttccgccagtgccacctaacgtggccttcaaagcggaaaaggaacccgaggggacctcccatgaatttaagttaaaagctgagaggcaccccaatttgtatctgatacaggggaaatag

SEQ ID NO: 230284 - DNA, 1476 bp, synthetic construct
  misc_feature 1..1476: note = Description of Artificial Sequence: Synthetic coding sequence
  source 1..1476: mol_type = other DNA
atggtgtgcacaatctgtcaggaggaatactctgaggccccaaacgaaatggttatctgcgataaatgtggtcagggctatcaccaactgtgtcacaccccccacatcgactgctctgtcatagactcagacgaaaaatggttatgcaggcagtgcgtgtttgccaccacaactaagcgagggggagcactcaaaaagggtccaaatgcaaaagctttacaagtaatgaaacagacattgccttactctgttgcagacctcgagtgggatgcagggcacaagacaaatgtccagcagtgctattgttactgcgggggtcccggagactggtatctgaaaatgctgcagtgttgcaaatgcaagcagtggttccatgaggcttgtgtgcagtgcctgcagaagcctatgttgtttggcgacaggttttatacctttatctgtagtgtgtgttccagtggaccggaatacttgaagcggctgcctttacagtgggtggatatagctcacctctgcctatacaatctgagtgttatccacaaaaaaaaatacttcgactccgagttagaactgatgacctatattaatgagaattgggacagactacaccccggtgagctagctgatactccgaagtcagagaggtatgagcacgtgctcgaggcactgaatgactacaaaactatgtttatgagtggtaaggagattaaaaagaagaagcacttgtttgggctccggattcgggtaccccctgttcccccaaatgtcgctttcaaggctgagaaggaacctgaaggcacgtcacacgagttcaagatcaagggaaggaaggccagcaagccaatcagcgactcaagggaagtctccaatgggatcgagaaaaagggcaaaaaaaagtccgtcggacgaccccctggcccttacaccaggaaaatgatccagaagactgcagagcccctgcttgataaggaatctatatcggagaatcctacacttgacctaccgtgttccattggcagaaccgagggtaccgctcatagcagcaatacttccgacgtcgactttacaggagcttcctctgcgaaagagaccactagctcatcgattagtcgtcactacggtctttcagacagtcggaaaagaacgaggacgggacgctcctggccggctgcgatcccccacctccgcagaagacgagggagattacccaggagagctctccagacccagaactctgaaatcgtgaaagatgacgagggcaaggaggattaccagtttgatgagctaaatactgaaattctgaacaatctggctgatcaagaactgcagctgaaccatctcaaaaactccatcacatcttatttcggggctgctgggcgtattgcttgtggcgaaaagtaccgcgtactggccaggagggtgacactcgatggaaaggtgcagtacttagttgagtgggagggcgctacagcatcctag

SEQ ID NO: 230285 - DNA, 1476 bp, synthetic construct
  misc_feature 1..1476: note = Description of Artificial Sequence: Synthetic coding sequence
  source 1..1476: mol_type = other DNA
atggtttgtaccatttgtcaggaagagtatagcgaagcccctaatgagatggttatctgcgacaagtgcggccaaggctaccaccagctgtgccataccccccatattgactgttccgtcattgattcagacgagaagtggctgtgccgccagtgcgttttcgccacaactaccaagcggggaggtgccctaaagaaggggccaaacgcaaaggctcttcaggtgatgaaacagaccctaccatattccgtggctgatctcgagtgggacgcaggacataagacaaacgtccaacaatgttattgctactgtggagggccaggagactggtatcttaaaatgctccagtgctgcaagtgtaagcagtggtttcatgaggcgtgtgtacagtgcctccagaagcctatgttatttggagaccgcttttatacatttatctgctctgtatgttcatccgggcctgaatatttgaaacggctgcctcttcagtgggtcgacatcgcccatctctgtctttacaatctatcagtgatccataagaagaagtattttgacagcgagctggaacttatgacttatattaatgaaaattgggacagacttcaccccggtgaactcgctgatacccccaaatccgaaagatatgaacacgtgttggaggctcttaatgactacaagaccatgtttatgtcaggaaaagaaataaagaaaaaaaaacatctctttggtctgagaatcagagtgcctccagtcccaccgaatgttgcctttaaggccgaaaaggaacccgaggggacttcccacgagttcaagattaagggccgaaaggcttctaaacctattagcgattccagggaggtgagcaatggcatagagaaaaagggcaagaagaagagtgtgggccgtcctcccggaccctatacccggaagatgatccagaaaacagccgaacccctccttgacaaagaaagtataagcgagaaccctaccctggatctcccctgcagtatcggccgaactgaaggcactgcccatagttccaatacaagtgacgtggattttacgggagcgtcctcagcaaaagagaccacaagctcatctatctcacggcactacggactctcagactccagaaagagaactcggaccggcagatcttggcctgccgctatcccccacctgcgcaggaggagaggcagattgccaagaagggccctccaaactcagaactctgaaatagtgaaggacgatgagggtaaagaagactatcaatttgacgagcttaatactgagatactgaacaacctggctgaccaagaattgcaactgaaccaccttaaaaatagtatcacgagttactttggcgctgccggtagaatcgcctgtggagaaaagtacagggttctcgctaggcgggtcacccttgatggcaaagtgcagtacctagtggagtgggagggtgctacagcttcttag

SEQ ID NO: 230286 - DNA, 1191 bp, synthetic construct
  misc_feature 1..1191: note = Description of Artificial Sequence: Synthetic coding sequence
  source 1..1191: mol_type = other DNA
atggccatgatagagctaggctttggtcgccaaaactttcaccccctgaagagaaaatccagcttgctgctgaagctcattgcagtcgtgtttgccgttctgcttttttgcgaatttctgatctactacttggccatctttcaatgcaactggccggaggtgaaaacgactgcctcagacggcgagcagacaacccgtgagccggtgctgaaggccatgtttttagcggatacacatttgctgggggagttcctgggccactggctcgacaaactgcggagagaatggcaaatggagcgagccttccagaccgccctgtggctgctgcagcctgaagtggtgttcattctgggtgacatttttgacgagggcaaatggagcacccccgaggcctgggcagatgatgtggaacgctttcagaaaatgttcagacacccttcgcacgtgcagctgaaagtcgtcgccggtaaccatgatattgggtttcactacgaaatgaatacttataaagtcgaacggttcgaaaaagtattttcttctgaaagactcttctcctggaaaggaatcaacttcgtcatggttaatagcgtcgccctcaacggggacggctgcggcatttgtagcgagacagaagcagagttaatcgaggttagtcatcgcctcaattgcagccgagaggcgaggggcagttctcggtgcggtcctggacctctgttgcccaccagcgccccagtgttgctgcagcactaccctctgtatcgcaggagcgacgccaactgctctggcgaagatgccgctccagccgaggagagagatatcccattcaaggagaattacgacgtcctgagcagagaagcttcccagaagctgctgtggtggctgcagcccagactggtactttctggccacacgcatagtgcatgcgaagtccatcatggaggtagggttcccgaactgtctgtgcctagtttctcatggcggaataggaataacccgtcatttattatgggcagtatcacccccacagactataccctgtcaaaatgttatttacctagggaggacgttgtccttatcatctactgcggtgtggtggggttcctggtcgttctgacactgacccatttcggactattggccagcccattcctgagcgggttaaatctacttgggaagcgaaaaacacggtag

SEQ ID NO: 230287 - DNA, 1002 bp, synthetic construct
  misc_feature 1..1002: note = Description of Artificial Sequence: Synthetic coding sequence
  source 1..1002: mol_type = other DNA
atggcaatgatcgagctgggatttggtcggcaaaacttccatcccttaaaaagaaagagttccctcttgctcaagctcatagctgtggtgtttgccgtgctgctgttctgcgagtttctgatttactatcttgcgattttccaatgtaattggccagaggtgaagaccacagcttcagacggtgagcagactacaagggagcccgtgctgaaagccatgtttctagccgacacacaccttctgggcgagtttctcggtcattggcttgacaaactgcgccgagagtggcaaatggagcgggcattccagactgccttgtggctcctgcaacccgaggtcgtatttattctgggcgatatcttcgatgaaggtaagtggagcacccccgaagcttgggccgacgacgtggagcggttccagaagatgttcagacatccatcccacgtgcagctcaaggttgtggccggaaaccacgatattggcttccattatgagatgaacacttacaaggtcgaaagatttgagaaagtatttagttcagaaagactgttctcttggaaaggcatcaacttcgtaatggtaaatagcgtcgctctgaatggtgatggctgcggcatttgctcggaaaccgaggccgaactcatcgaagtgagtcacagactcaactgtagtagagagcttctgtggtggctccagccgaggctggtcttgagtggacacacccattcagcgtgcgaagtccaccatggtgggagagtcccagaactatcagtgccctcatttagttggagaaatagaaataatcccagcttcatcatgggtagtattacccctaccgattacactctgagcaaatgttatttgccgagggaagacgtggtgctgattatttactgcggagtagtggggtttcttgtcgtactgacgctgactcactttgggttgctggcttctcccttcctgtccggtttgaacctgctgggcaagcggaaaacccggtag

SEQ ID NO: 230288 - DNA, 732 bp, synthetic construct
  misc_feature 1..732: note = Description of Artificial Sequence: Synthetic coding sequence
  source 1..732: mol_type = other DNA
atggagcgggcttttcagacagcactgtggctcctgcagcccgaagtggtgttcatccttggcgacattttcgacgagggtaagtggtctacaccagaggcttgggcagacgatgtggagaggtttcaaaaaatgttccgtcatcccagtcacgtccagctgaaggtggtggccggaaaccatgatataggctttcattacgagatgaatacttacaaggtggagagattcgaaaaggtcttcagttccgagagattgttttcttggaagggcattaatttcgtgatggttaactcagtagcattgaatggagacgggtgtggcatctgctcagagactgaagccgaactaattgaggtgtcccatcggcttaactgcagccgcgaggctcgaggcagcagccgttgcggccctggccctctgctgcctacgtcagctcctgtgctccttcagcattatccactgtatcggcgatcagatgcgaattgctctggggaggacgctgcgccagccgaggagagagacattccatttaaagaaaattacgacgtgctctccagagaggcatcacagaaactcctgtggtggctgcaacccagattagtcctgagtgggcacacacattccgcctgtgaagtgcaccacggaggccgtgtgccggagctttcagtgccgtccttcagttggcgcaacagaaataatccaagcttcattatgggtactgatgcttag

SEQ ID NO: 230289 - DNA, 1194 bp, synthetic construct
  misc_feature 1..1194: note = Description of Artificial Sequence: Synthetic coding sequence
  source 1..1194: mol_type = other DNA
atggccatgatcgaactcggctttggacgccagaacttccacccactgaaacgtaagtcatctctgctgttgaaactaattgccgtggtgttcgccgtcttgctcttctgcgagttcctcatctactatctcgccatcttccagtgcaactggcctgaagtgaaaacaacagcctctgacggtgaacagactactagagagcctgtgttaaaggccatgtttcttgcggacacccatctgctgggtgagtttttgggacactggctggacaagctgaggcgtgagtggcagatggaacgcgcttttcaaaccgccttgtggctgctgcaacctgaggttgtgttcattctcggcgacatatttgacgaagggaagtggtccactcctgaggcgtgggcggacgatgtggagagattccagaagatgtttagacacccaagccacgttcagttgaaggtcgtggccggtaatcacgacatcgggtttcattatgagatgaacacctacaaagtggagcgtttcgaaaaggtgttcagctcagaacgcttgttttcctggaagggaataaacttcgtcatggtcaattctgtggctttgaatggggatggatgcggcatatgcagtgagactgaggccgagctgatcgaggtctcacacagactgaattgtagccgggagcaggctagaggaagctctcggtgtggccctggcccactgttgccgacttcagcccctgtactcttgcagcactatcctctgtaccgcagaagcgatgccaattgttctggagaggacgctgcccctgccgaagagcgagatatcccatttaaagagaattatgacgtcctttcccgtgaggcaagccagaagctgctatggtggttacaacccagattggtcttgtcgggccatactcattccgcttgcgaagttcaccatggcggacgggtaccggagctttctgtgcccagcttctcctggcggaatcgaaacaatccttcgtttattatgggctcgatcacacccaccgactatactctgagcaagtgttacctgcctagggaggatgtggtgctcattatctactgcggggtcgtcgggtttttagttgttctcacgctgacccacttcgggctactcgcgagccccttccttagcggcctgaatctgttaggcaaacgcaagactaggtag

SEQ ID NO: 230290 - DNA, 1026 bp, synthetic construct
  misc_feature 1..1026: note = Description of Artificial Sequence: Synthetic coding sequence
  source 1..1026: mol_type = other DNA
atggccatgatcgagctgggctttggacgccaaaacttccacccccttaaacgcaagtcttctctgttgctgaagctgattgctgtagtgtttgctgtcttgctcttctgtgagtttctcatctactacctggcgatcttccagtgcaactggccggaggtgaaaaccactgcttcagacggagaacagaccacaagagaacccgttctgaaggccatgtttcttgcagacactcacctcctgggggaatttttaggtcattggttagataagctgcggagagagtggcagatggaaagagcctttcagactgcattgtggctcctccaaccggaagtcgtatttatacttggcgacatcttcgatgagggcaagtggtccacaccggaagcctgggctgacgatgttgagcgattccaaaaaatgtttcggcacccctcgcacgtgcaattaaaggtggtggccggtaatcacgacatcggcttccactatgagatgaacacttataaggtagaacgctttgaaaaggtcttctcgtccgagcgcttgttctcatggaaagggatcaacttcgtgatggttaactcagtggccttaaatggcgacggttgcggaatctgctctgagaccgaagccgagctgatagaggtgagccaccgtttaaattgttccagggaacaggctagagggtcctctcgctgcggacctggtcctctgctgccaacgagtgccccagtgctgcttcagcattaccccctatatcgccgatccgatgcaaattgcagcggggaagatgcagcccctgcagaagagcgcgatatcccatttaaggaaaattacgacgtcctgagtcgcgaagcaagtcaaaagctgctttggtggctgcagccacggctagtgttgagcggtcatacccattccgcttgcgaagtccatcatggcggacgagtgccagaactctcggttcccagcttttcatggcgcaacagaaacaatccatctttcatcatgggcaccgacgcttag

SEQ ID NO: 230291 - DNA, 1191 bp, synthetic construct
  misc_feature 1..1191: note = Description of Artificial Sequence: Synthetic coding sequence
  source 1..1191: mol_type = other DNA
atggccatgatcgagctcggtttcgggcgtcagaatttccacccactgaaaagaaagagcagtctactgctgaagctgattgctgtcgttttcgcggtgctgcttttttgtgagttccttatttattatttggctatatttcagtgtaattggcctgaagtgaagacaaccgcaagcgacggtgagcagacgacccgagagccagtcctgaaggccatgttcttggcggacacacacttactgggcgaattcttaggccactggctcgataagctgagaagagagtggcaaatggaacgagctttccagacagctctctggctgctacaaccggaggtagtgtttattctgggagatatatttgacgagggaaagtggagtacccccgaagcctgggccgatgacgttgaacggttccagaaaatgttcagacacccatcacacgtccaactcaaagtcgtggccggtaaccatgacattggcttccactatgagatgaatacctacaaagttgaacgattcgaaaaggtcttctcttctgagagactgttctcatggaaaggtataaattttgttatggtaaactcagtcgccttgaacggggatggctgcggtatatgttccgagacagaagccgagctgattgaagtctctcatagactgaattgcagccgggaggccagggggtcaagccgatgcggcccaggcccactcctacccacatctgccccagtgttgttgcaacactatcccctgtatagaagatccgacgctaattgtagcggtgaggacgcagcacctgccgaggaacgggatatccccttcaaggagaactatgacgtcttatccagggaagcaagccaaaagctgctctggtggttgcaaccgagactcgtgctgtcaggccacacccatagcgcgtgcgaggtgcaccatggtggcagagtgcccgaactatcagtgccatcctttagctggcgcaacaggaacaacccttccttcattatggggtccattacaccgacggactatacactgtctaaatgctatctgccacgcgaggacgtggtattgatcatctactgcggcgtcgttggtttccttgtcgtcctgacccttacccatttcgggttacttgcctccccctttctgtcaggccttaatcttctgggaaaacgaaaaacgcggtag

SEQ ID NO: 230292 - DNA, 360 bp, synthetic construct
  misc_feature 1..360: note = Description of Artificial Sequence: Synthetic coding sequence
  source 1..360: mol_type = other DNA
atgtggcgctctagatgggatgcgagcgtgcttaaggccgaggcccttgcgcttctgccctgtggactaggcatggccttctcacagtctcacgtgatggcagctcggagacaccagcattccagacttattatcgaggtggacgaatattcctcaaaccctactcaagctttcacgttctacaacattaaccagggcaggttccagcccccacatgtgcagatggtagacccagtgccccacgacgccccaaaaccaccagggtacacacgcttcgtgtgcgtctcggatacacattctcgaacagaccctattcagatgccttacggcgacgtactgatccacgcgggtgacttttag

SEQ ID NO: 230293 - DNA, 663 bp, synthetic construct
  misc_feature 1..663: note = Description of Artificial Sequence: Synthetic coding sequence
  source 1..663: mol_type = other DNA
atgccttacggcgacgttctcattcatgctggggacttcacagagctcggactgccgtccgaggtcaaaaagttcaacgaatggctgggttcactgccctatgagtataaaatagtcattgcgggaaaccatgagttgactttcgaccaggaatttatggcggatctcatcaagcaggacttttactactttcccagcgtttccaaactcaaacccgagaactatgagaatgtgcagtctttacttaccaattgcatctacctacaagatagcgaggtgactgtgagggggttccggatatacgggtctccatggcagccctggttctacggctggggattcaacctgcctcgtggacaggccctattagaaaaatggaacctgattcccgaaggagtcgatattcttataacacatggccctcccttagggttcctggactgggtgcctaagaaaatgcaacgagttgggtgtgtggagcttctcaacaccgtgcaaaggcgcgtccaacctaggctgcacgtttttggccatattcacgaaggctacggggttatggctgacggcacaaccacatatgttaatgcatcagtgtgcactgttaattaccagcctgtgaacccccctatcgtgatcgacctgcctacccctagaaactcctag

SEQ ID NO: 230294 - DNA, 981 bp, synthetic construct
  misc_feature 1..981: note = Description of Artificial Sequence: Synthetic coding sequence
  source 1..981: mol_type = other DNA
atgtggaggtctcgctgggatgcaagcgtcctgaaggccgaagccctcgctctccttccatgcgggttaggcatggctttcagccagtctcacgtgatggctgcgaggcgccaccagcatagtcggctgatcatagaggtcgacgagtactcttccaaccccacccaggcattcaccttctacaatattaaccagggcagattccagcctccccacgtgcaaatggttgacccggtgccccacgacgcaccgaagccacctggctacacgcgctttgtgtgcgtctctgatacacattctcggactgatccaatacagatgccctatggggatgtgctcatccacgctggggatttcacagagctggggctcccctcagaagtgaagaaatttaatgaatggcttgggtctctcccttacgagtataaaatcgtgatcgccggtaaccacgagctgacatttgatcaggagttcatggccgacctgattaagcaagacttctattattttccctccgtttccaagttgaagcccgagaactatgaaaacgtgcagagccttctgaccaattgcatttaccttcaggattcagaggttacagttcggggatttagaatttatggttctccctggcaaccctggttctacgggtggggctttaacctgccacggggacaagcgctgctcgagaaatggaacttgatccccgagggagttgacattctaataacccacggccctccccttggcttcctggactgggtacccaagaagatgcagagagtcggatgcgtggagctcctgaataccgttcagagaagagtgcaaccacgactacatgtattcggtcacatccacgaggggtatggagttatggctgacggtacgacaacctatgtcaacgctagcgtttgcactgtgaactatcaacctgtcaaccctccaatcgtgattgatctcccaaccccacgcaatagctag

SEQ ID NO: 230295 - DNA, 507 bp, synthetic construct
  misc_feature 1..507: note = Description of Artificial Sequence: Synthetic coding sequence
  source 1..507: mol_type = other DNA
atggctgatctgattaagcaagatttttactactttcctagtgtgtcgaaactgaaaccagagaattacgaaaatgtacaatccctccttacgaattgtatttacctccaggatagcgaggtcactgtccggggtttccgcatatacggatccccgtggcagccttggttttacggctggggcttcaatttgcccagaggacaagctctcctggagaagtggaacctgatccctgaaggcgtcgacatcctgataacacacggcccacccctgggatttctggactgggtccccaaaaagatgcagagggtcggatgcgtggaactcctaaacacagttcaaaggcgggtccagccccgacttcatgtctttggtcatatacatgaaggatatggcgtgatggcggatggcaccacaacctacgtgaatgccagcgtatgtacggtgaactaccagccagtgaatccccctatagtcattgatctccctacacctagaaacagctag

SEQ ID NO: 230296 - DNA, 981 bp, synthetic construct
  misc_feature 1..981: note = Description of Artificial Sequence: Synthetic coding sequence
  source 1..981: mol_type = other DNA
atgtggcgctcccggtgggatgcctctgttctaaaagccgaggcacttgccttgcttccatgtggcttgggaatggccttcagccaatcccatgtgatggccgctcggaggcatcagcactcacgactgatcattgaggtggatgaatacagttcaaaccctacccaggcgtttaccttttacaacatcaatcaaggacggttccagccaccacacgtgcagatggtggatcctgtgccacacgacgctccaaagcccccagggtacaccagatttgtttgtgtttcagacactcacagccgaactgatccaattcagatgccgtatggcgacgtactaatccatgctggggactttacagaactgggcctgccctccgaggtcaagaagttcaatgagtggctcggcagtctgccatacgagtacaagatcgttatcgctggcaatcatgagctcacctttgatcaagaatttatggccgacctcatcaaacaagacttttactattttccttcagtatccaagttgaaacctgaaaattacgagaacgtccagagtttgctgaccaactgcatatacctgcaagactcggaggttacagttagaggttttaggatttacggatccccatggcagccatggttctacggctggggttttaatcttcctcgcggacaagcactcttggaaaaatggaacttaattcccgagggcgtggatattctgatcacacatggccctccactgggcttccttgactgggtcccgaaaaagatgcaacgcgtggggtgcgtggaattgctcaacaccgtacagaggcgagtgcaacccaggctgcacgtgttcggtcatatccacgagggatacggtgtcatggcggatgggactactacctatgtgaacgcaagcgtttgtactgtgaattatcagccagttaacccaccaatcgtcatagacctcccaactccaaggaatagctag

SEQ ID NO: 230297 - DNA, 225 bp, synthetic construct
  misc_feature 1..225: note = Description of Artificial Sequence: Synthetic coding sequence
  source 1..225: mol_type = other DNA
atgtggaggagcagatgggatgccagtgtgttgaaagccgaagcactggcacttcttccgtgcggattgggaatggcgttttctcagagccacgtcatggccgcaaggcgccaccagcattctcgcctgataattgaggttgacgagtactcctcgaaccctacccaggccttcaccttttacaatattaaccagggacgtttccagcctcctcacgtacaatag

SEQ ID NO: 230298 - DNA, 1080 bp, synthetic construct
  misc_feature 1..1080: note = Description of Artificial Sequence: Synthetic coding sequence
  source 1..1080: mol_type = other DNA
atgaatgggagggagacccaaagcgtgtcgcgaagcgggggaggccctgggtgtggtgggggttctggagggaggtgtcgcggaggacgccgacgaagtatgtggagaagcaggtgggatgcgtccgtcctgaaagccgaggctctagccctactgccgtgcggtcttgggatggcattctctcagtcgcatgtgatggcggctagacgacatcaacactcccggctcatcattgaggtcgacgagtactctagcaaccctacacaagctttcactttttacaacatcaaccaggggcgtttccagccgcctcatgtgcagatggtcgatcctgtgcctcacgacgctccgaaacctccaggctacactcggtttgtctgcgtgtccgacacccactctcgaactgatccgattcagatgccttacggagatgtgctgattcacgctggcgatttcaccgagctaggcttacctagtgaagtgaaaaagttcaatgagtggcttgggtccctgccttatgagtataaaatcgtcatcgccggtaaccacgaactaacctttgaccaggagtttatggcagacctgattaagcaggacttttattacttcccatctgtgtccaaacttaagcctgaaaactacgagaatgtgcagtctctattaactaactgcatttacctccaagatagcgaggtcacagtgcgaggcttccgaatctacggaagcccctggcagccatggttctatgggtggggattcaatctacccaggggccaggctctcctggagaaatggaatctgatcccagagggcgtcgacattctcattactcatggacctccgttgggcttcttagactgggtgcccaagaagatgcaaagggtcgggtgcgtggagctgctcaatactgtgcagcgcagagtccaacctaggcttcatgtgttcggccatattcatgagggatacggagttatggcagacgggactaccacctacgtgaacgccagcgtatgcaccgtcaactaccagcctgtgaacccgccaatagttatcgatctgcctaccccaaggaattcttag

SEQ ID NO: 230299 - DNA, 981 bp, synthetic construct
  misc_feature 1..981: note = Description of Artificial Sequence: Synthetic coding sequence
  source 1..981: mol_type = other DNA
atgtggcggtcccgctgggatgccagcgtattaaaggccgaagccttagcactcctgccgtgcggcctcggaatggcgttttctcagtcgcatgtgatggccgcaaggcggcatcagcatagcaggctgatcattgaggtggacgaatattctagcaacccaacgcaagcctttactttctacaacattaaccagggcagatttcaacctccccatgtccaaatggtggacccggtgcctcacgacgccccaaaacctcctggctatacacggttcgtgtgcgtgtcagatactcactcgagaactgaccccatccagatgccatacggggatgtgctgatccatgctggtgacttcacagagcttgggctgcccagtgaggtgaagaaattcaatgaatggctcggctcactgccatatgagtacaaaattgtgattgcagggaaccacgaactcacttttgaccaagagttcatggcggatctcatcaagcaggatttctactacttcccgagtgttagcaaactgaagccagagaattacgagaacgtgcagagcctgttgactaactgcatttatctgcaggactcagaggttactgtgagaggctttcggatttacggatcgccatggcagccctggttctacggctggggctttaacttaccacgaggtcaggccctgctggagaaatggaatttgatcccagagggcgtcgacattcttattactcacgggccacccttgggctttctggattgggtaccgaagaagatgcagcgggttgggtgcgttgagttactgaacacagtccaaaggcgagtgcaaccacgcttacatgtatttggccacatccacgagggatacggtgttatggctgacggaaccacgacatatgtgaacgcctccgtttgcaccgtcaactaccagcctgtgaaccccccaatcgtaattgaccttccaacccccagaaactcatag

SEQ ID NO: 230300 - DNA, 915 bp, synthetic construct
  misc_feature 1..915: note = Description of Artificial Sequence: Synthetic coding sequence
  source 1..915: mol_type = other DNA
atgtggcgaagcttctctcagagtcacgttatggcagccagaaggcatcagcactccaggctgattattgaagtggatgaatatagcagtaacccaacccaggccttcaccttttataatattaaccagggccgttttcagccacctcacgttcagatggtggatcccgttccccatgatgcgccaaagcccccagggtatacgcgttttgtgtgcgtgagcgacacgcattctcggacagaccctatacagatgccttacggcgacgttctgatccatgccggagactttacagaacttggtctgccatcagaagtgaagaaatttaatgagtggttgggttctctgccgtacgagtataaaatcgtcatagcaggcaaccatgaacttactttcgaccaagagttcatggcagacttgatcaaacaggatttctattactttccgtcagtaagcaagctcaaaccagagaactatgagaacgtgcagtccctcttgaccaactgcatctatttacaggacagcgaggttaccgtgaggggatttcgcatctatggctctccctggcagccctggttctatggctgggggttcaacctgcctagaggacaggcactactcgaaaaatggaatctcatcccagagggagtagatatcctcatcacccacggtccaccacttggctttttagactgggtgcctaagaaaatgcagcgcgtgggctgtgtcgagctgctaaacactgttcaacggagagtacaacctcgcctccacgtttttggccatattcacgagggctatggggtgatggccgacggaacgactacttatgtgaatgcctccgtgtgcaccgtgaactaccagcccgtaaaccccccaatagtgatcgatctgcccacgcccagaaatagctag

SEQ ID NO: 230301 - DNA, 885 bp, synthetic construct
  misc_feature 1..885: note = Description of Artificial Sequence: Synthetic coding sequence
  source 1..885: mol_type = other DNA
atggctcacgggatccccagccagggtaaagtaacaataaccgttgacgaatatagctctaacccaacacaggccttcacccactataacatcaaccagagccggttccaaccacctcatgtgcacatggtggacccgattccttatgacaccccaaagcccgcaggtcacactcggttcgtgtgcatcagtgacactcactcccggaccgatgggatccagatgccatacggggatattcttcttcacaccggagactttactgagttaggtttgccttccgaagtgaaaaaattcaatgactggctgggaaacctcccttacgagtataagattgtcatcgccggaaaccatgagctgacattcgataaggagtttatggctgacctcgttaagcaggactattacaggtttcctagcgtgtcgaaactgaaaccagaggattttgataatgtgcagagtctgcttacaaattcaatttacctgcaggattccgaagttaccgtgaaaggcttccggatttatggcgcaccttggacgccatggttcaacggctggggtttcaatcttccgagagggcagtcactgctggataagtggaacttaataccagagggaatcgacattctcatgacacatggtccccctttggggttccgagattgggtgcctaaggagctacaacgggtcgggtgtgtggagttgttgaacaccgtgcagcgcagagtgcgacctaaacttcatgtgttcggtgggatccacgaaggatacgggattatgactgacggctacaccacatacattaacgcttccacttgcacggtctcgttccagcccactaatcctccaataatattcgaccttcccaacccgcaaggatcctag

SEQ ID NO: 230302 - DNA, 834 bp, synthetic construct
  misc_feature 1..834: note = Description of Artificial Sequence: Synthetic coding sequence
  source 1..834: mol_type = other DNA
atggctcacggtatcccaagtcagggtaaggtcacaatcacagttgacgaatatagtagcaatccaacacaagcatttactcactacaatatcaatcaaagccgcttccaaccaccacatgtgcatatggtggacccaattccctacgatacacccaagccagcaggacacactcggttcgtgtgcatctcagacacccattcacgaactgatggaatccagatgccttacggagacattttgctgcatacaggcgattttaccgagctcggccttccaagtgaggtgaagaagtttaatgattggctgggtaacctcccctatgaatacaaaatcgtgatagctgggaatcacgagttgacattcgacaaggaattcatggcggatctcgtgaaacaggattattaccgcttcccaagtgttagcaaattgaagccagaggactttgacaacgttcagtctttgctgacaaactcgatttacctgcaggatagtgaagtcacagtgaagggttttcggatttatggggctccatggacgccctggttcaacggctggggattcaacttaccacgcggtcagtctttgctagataagtggaatctgattccagaggggatcgacattttgatgactcacggccctccgcttggttttagagattgggtgcccaaggaacttcaaagagtcggctgtgtggagctcctcaacactgttcagagaagggtccgacctaagttacacgtgttcggcggtattcatgaggttaatccagtatcaatctctaaggctttgcgtacaaaaatttgtagcttaccttcaaagactagttag

SEQ ID NO: 230303 - DNA, 132 bp, synthetic construct
  misc_feature 1..132: note = Description of Artificial Sequence: Synthetic coding sequence
  source 1..132: mol_type = other DNA
atggcccacgggatcccaagccagggcaaggttactatcaccgttgatgaatattcatccaatccaactcaggcgttcacccactataatataaatcagtctaggttccagcctccacacgtgcacatgtag

SEQ ID NO: 230304 - DNA, 186 bp, synthetic construct
  misc_feature 1..186: note = Description of Artificial Sequence: Synthetic coding sequence
  source 1..186: mol_type = other DNA
atggaccctaattgcagttgcgccaccggcggaagttgcacttgcaccggctcttgcaagtgtaaagaatgtaagtgtacatcctgcaaaaagtcttgctgcagctgttgccccatgtcatgcgcaaagtgtgcacagggctgcatatgtaagggcgcatctgagaaatgctcctgttgcgcatag

SEQ ID NO: 230305 - DNA, 186 bp, synthetic construct
  misc_feature 1..186: note = Description of Artificial Sequence: Synthetic coding sequence
  source 1..186: mol_type = other DNA
atggaccctaactgcagttgtaccaccgggggaagctgtgcctgcgcaggctcctgtaagtgtaaagaatgcaagtgtactagctgcaagaaatgttgctgttcatgctgtcccgtggggtgtgccaagtgcgcgcagggatgtgtgtgcaaaggcagttctgaaaagtgccggtgctgcgcctag

SEQ ID NO: 230306 - DNA, 186 bp, synthetic construct
  misc_feature 1..186: note = Description of Artificial Sequence: Synthetic coding sequence
  source 1..186: mol_type = other DNA
atggacccaaattgtagctgcgcaacgggagggtcttgtacatgtgcgggttcatgtaagtgcaaggagtgcaagtgcacatcttgcaaaaaaagctgttgttcctgctgtccagtcggttgtgccaagtgcgctcaaggctgtgtttgtaagggtgccagtgagaagtgttcctgttgcgcctag

SEQ ID NO: 230307 - DNA, 384 bp, synthetic construct
  misc_feature 1..384: note = Description of Artificial Sequence: Synthetic coding sequence
  source 1..384: mol_type = other DNA
atggatcccaactgctcctgtgctaccgggggatcgtgcacctgcgcaggttcttgcaaatgcaaggaatgcaagtgtacatcttgtaagaagtctgagtgcggtgccatcagcagaaacctgggattgtggctcagattggggggaaactcacgtttagccctctcagcctctttttggggaacaggcttgagtctccctagtctgcccgtgagcttccccctgcaggccttctgccccaagtttaggtggggtaggacagcctttttttcgtgggataccaatcccaactgcacgccatacggctttcgtactgagttatgtcaaaccaaaaagagcattctctgggtctgggtgctttccagttcgcaagcatgttactag

SEQ ID NO: 230308 - DNA, 186 bp, synthetic construct
  misc_feature 1..186: note = Description of Artificial Sequence: Synthetic coding sequence
  source 1..186: mol_type = other DNA
atggatccaaactgcagctgcgctgccggtgtgagttgtacatgtgcagggagctgcaaatgcaaagaatgcaagtgtacttcttgtaaaaaatcttgttgcagttgttgcccagttggctgtagcaaatgtgctcagggttgcgtttgcaaaggcgctagcgagaaatgctcttgttgcgactag

SEQ ID NO: 230309 - DNA, 189 bp, synthetic construct
  misc_feature 1..189: note = Description of Artificial Sequence: Synthetic coding sequence
  source 1..189: mol_type = other DNA
atggacccaaattgtagttgcgccgcagccggtgttagttgtacttgcgcgggatcctgcaaatgcaaggaatgtaagtgcaccagctgtaagaaaagctgctgctcctgctgtcccgttggctgtagcaagtgcgctcaaggctgcgtgtgcaaaggggcaagtgagaaatgctcttgctgcgattag

SEQ ID NO: 230310 - DNA, 189 bp, synthetic construct
  misc_feature 1..189: note = Description of Artificial Sequence: Synthetic coding sequence
  source 1..189: mol_type = other DNA
atggatcctaactgcagctgcgctgcagctggcgtgtcatgtacatgcgccagttcttgcaaatgcaaagaatgtaaatgtacatcctgtaagaagtcttgctgtagttgctgtcccgtgggatgtgccaagtgcgcgcaggggtgcatttgcaagggcgcttccgaaaaatgcagctgctgcgcttag

SEQ ID NO: 230311 - DNA, 186 bp, synthetic construct
  misc_feature 1..186: note = Description of Artificial Sequence: Synthetic coding sequence
  source 1..186: mol_type = other DNA
atggaccctaactgtagttgcgccgctggcgtgagctgcacttgcgcctccagttgcaaatgtaaggagtgcaaatgcactagttgcaagaagtcctgctgttcatgttgcccagtgggctgcgccaaatgcgcgcagggctgcatatgcaagggcgctagtgaaaaatgcagctgttgcgcctag

SEQ ID NO: 230312 - DNA, 186 bp, synthetic construct
  misc_feature 1..186: note = Description of Artificial Sequence: Synthetic coding sequence
  source 1..186: mol_type = other DNA
atggatccaaattgcagttgcgaggctgggggatcctgtgcatgcgcaggtagctgcaagtgcaaaaaatgtaagtgcacatcctgtaaaaagagctgctgcagctgctgtccacttgggtgtgccaaatgcgctcaaggctgcatttgcaaaggagcctccgagaagtgttcatgctgcgcctag

SEQ ID NO: 230313 - DNA, 186 bp, synthetic construct
  misc_feature 1..186: note = Description of Artificial Sequence: Synthetic coding sequence
  source 1..186: mol_type = other DNA
atggatccgaactgttcatgcagtcccgtgggttcttgcgcttgcgcgggatcttgtaagtgcaaagagtgcaagtgtactagttgtaagaaaagctgctgcagttgctgccctgtcggatgcgccaaatgcgcccaaggatgtatttgtaaaggaacatccgacaaatgttcatgctgcgcatag

SEQ ID NO: 230314 - DNA, 186 bp, synthetic construct
  misc_feature 1..186: note = Description of Artificial Sequence: Synthetic coding sequence
  source 1..186: mol_type = other DNA
atggaccccaattgcagctgcgcagctggagacagttgcacgtgcgctgggtcttgcaagtgtaaggaatgcaagtgtacatcttgtaagaaatcttgttgtagctgctgtcctgtgggatgtgctaagtgcgcccagggatgcatctgcaagggcgcttccgataaatgttcatgttgcgcttag

SEQ ID NO: 230315 - DNA, 207 bp, synthetic construct
  misc_feature 1..207: note = Description of Artificial Sequence: Synthetic coding sequence
  source 1..207: mol_type = other DNA
atggaccccgaaacatgtccttgcccatccggaggtagctgcacctgtgctgacagctgtaagtgcgagggatgtaagtgcacttcatgcaaaaaatcctgctgttcatgctgtccagctgaatgtgagaaatgtgccaaagattgcgtctgcaagggcggtgaggccgcagaagctgaggccgaaaaatgtagttgctgccagtag

SEQ ID NO: 230316 - DNA, 687 bp, synthetic construct
  misc_feature 1..687: note = Description of Artificial Sequence: Synthetic coding sequence
  source 1..687: mol_type = other DNA
atgaaaatcaagccagggtttatgggcaaggcgacccccccttacgatgttcagttccacatggaggcatctgttgagaattgtatcatagtaagtatgaatactgccgatccgggatcccaaggcattactcatagtctgctgctgcaagtcattgatgacaaaggatccattctccctcccaacacagaaggaaatatcggcattcggattaagcccgttcggccagtgtccctgttcatgtgctatgagggcgacccggaaaaaacagcaaaagtggaatgcggggatttctacaatacaggagatcgtggaaagatggacgaggaaggctatatatgctttctgggaagatccgacgacatcatcaatgctagtggataccgaatcggtccagccgaagtcgaatctgcactggtagagcatcccgctgttgctgaaagcgctgtagtggggtcccccgacccaattcgaggagaggtcgtgaaggcttttatcgtgctgactcctcaattcctgtcacacgataaagaccagttaacgaaggagttgcagcagcatgttaaatccgtcacggcgccttacaagtaccctagaaaagtggaattcgtctcggaactgccaaaaacaataactggcaaaattgagaggaaggagctgcggaagaaggaaactgggcagatgtag

SEQ ID NO: 230317 - DNA, 1527 bp, synthetic construct
  misc_feature 1..1527: note = Description of Artificial Sequence: Synthetic coding sequence
  source 1..1527: mol_type = other DNA
atggaagagggacccctgcccggaggcctcccgtctccagaggacgctatggtcaccgagttactgtcacctgaaggcccttttgcctcggaaaacattggacttaaagcccctgtgaaatatgaggaggatgagtttcacgtcttcaaggaggcttatcttggaccagcagaccccaaggagcccgtgctgcacgcttttaaccctgcattaggagctgattgcaaagggcaggtgaaggcaaaactggccggaggcgactcagacggaggagaactgctaggcgagtacccaggtatacccgagctgtctgctctggaggacgtagcgttacttcaggcccctcagcctccagcctgcaacgttcacttcctctcatcactgcttccggctcaccgtagcccagccgtgctgccactgggtgcctgggtgctcgaaggtgcaagccaccccggtgtcaggatgatccccgtggaaatcaaagaggctggcggaaccaccacctctaacaaccccgaagaggccacactgcaaaacttactggcccaagagtcatgctgtaagttccccagctcccaggagctggaggatgcctcttgctgcagcctgaagaaagatagcaatcctatggtaatctgtcagctgaagggcggaacccaaatgctgtgtatcgacaatagtaggacaagggaactcaaggccttgcacctcgtcccgcaatatcaagaccaaaacaattaccttcaaagtgacgtacccaagcctatgacagccttggttgggaggttcttaccagcctcaactaagcttaatctcatcacacaacagcttgagggcgctctgccttccgtagtgaatggctcagctttcccatcaggctcaaccctgcctggccctccaaagataaccttggctggatattgcgattgtttcgcctccggggacttttgtaataactgcaactgcaataattgctgcaacaatctacaccacgacatcgagaggttcaaggctataaaggcctgtctggggcgaaatccagaggcatttcagcccaaaattggtaaaggacagttgggaaacgttaaaccacagcataacaaagggtgtaactgccggcgatccggatgcttgaagaattactgtgagtgttacgaagcccagatcatgtgctcatcaatctgcaagtgtattggctgtaagaactacgaggagagccccgagcgtaaaaccttgatgagcatgcccaattacatgcagacaggagggcttgaaggctcacattacctgcctccaactaagttctccgggctgcccagattttcgcatgaccgtaggccatcctcttgtattagctgggaggtggtggaggcaacctgcgcatgcctcctcgcccaaggagaggaggctgagaaggaacactgttctaaatgtctagcagagcagatgattctcgaggagttcggacggtgtcttagccaaatcctgcacacagagttcaagtccaaggggctaaagatggagtag

SEQ ID NO: 230318 - DNA, 756 bp, synthetic construct
  misc_feature 1..756: note = Description of Artificial Sequence: Synthetic coding sequence
  source 1..756: mol_type = other DNA
atggaagaggggcctctgccaggtgggctaccctcgcccgaggacgcaatggtgacagagctgctgagtccagaggggccttttgcgagtgaaaatatcgggctaaaggccccagtaaagtacgaggaggacgagttccatgttttcaaagaggcctatttggggccagctgaccctaaggaacctgtcttacacgcattcaatccagcgctcggagcagactgcaaaggccaggtcaaggccaaactcgcgggaggggacagtgatggtggcgaattgctgggcgaatatccaggcattcctgaactgtcagcccttgaggatgtcgcattgctccaggcccctcagccacccgcttgcaacgtgcatttcttatcctcactcctccctgctcataggtctccagctgtgctgccactgggtgcttgggttctggaaggtgcatctcaccctggcgtccggatgattcccgtagagataaaggaggcgggaggcaccactaccagcaacaaccccgaggaggccaccctgcagaacctgttagcccaggagtcctgctgcaagttcccctcaagccaggagctggaggacgcctcttgctgctccctgaaaaaggactccaaccctatggtcatttgccagctcaaaggtgggactcagatgctctgcatcgataacagcagaacacgcgagctgaaagcactacatctggtgcctcagtatcaagaccagaacaactacctgcaaagcgcctag

SEQ ID NO: 230319 - DNA, 921 bp, synthetic construct
  misc_feature 1..921: note = Description of Artificial Sequence: Synthetic coding sequence
  source 1..921: mol_type = other DNA
atggaagaggggcctttaccaggtggactgcctagccccgaggatgccatggtgacagagctgctatccccggagggaccattcgcttccgaaaatatcggattaaaggccccagtgaaatacgaagaagatgagtttcacgtgttcaaagaggcatatttaggccctgcagaccctaaagagccggtgttgcatgcctttaatcctgctctgggcgcagactgcaaaggccaggtgaaggctaaactggcaggaggagactctgacggcggagagcttctgggagaataccccggtattcccgagctttcagccttggaagacgttgcgctgctccaagccccacagccaccggcatgtaatgtacacttcctgtccagtcttttacccgctcaccgtagtccagcggttctacccttaggcgcatgggtgctagagggtgcatctcatcccggagtgcggatgattcccgtagagatcaaagaagccggtgggaccacaaccagcaataatccagaagaggctacactgcagaacctgttagcccaagagtcatgttgtaaattccccagttcacaggaactggaggacgcgagctgctgctcactgaaaaaagattccaatcccatggtcatctgtcaactgaagggtggcactcagatgctctgcatcgacaattcacgcactagggagctgaaggctctacacttagtcccccaatatcaggaccagaataattacctgcagtctgatgttcccaaacccatgaccgctctggtcggcaggttcctgcctgcgtctacaaagttaaacctgatcacccagcagttagagggcgctctgcctagcgtcgtgaacggcagcgccttccctagcgggtctaccctgccgggacccccaaagattacactggccggatag

SEQ ID NO: 230320 - DNA, 2262 bp, synthetic construct
  misc_feature 1..2262: note = Description of Artificial Sequence: Synthetic coding sequence
  source 1..2262: mol_type = other DNA
atgggcgagcactctcccgacaacaacatcatctattttgaagctgaagaggacgaactgaccccagatgacaagatgcttcgatttgtcgataaaaacggactcgtgccctcttctagcggtacagtatatgatagaacaactgtactaatcgaacaagatcccggaacactagaggatgaggacgacgacggccagtgtggggagcacctcccatttctcgtcggcggagaggagggcttccacctcatcgatcacgaggctatgtctcaagggtacgtgcagcatattatatctcccgaccaaattcacctcacaataaatcccggaagcactcccatgccacgtaacatagaaggagccacgctaactctccagtccgagtgtccagagactaaacgtaaggaggttaagagataccagtgcacctttgaaggctgtccgcgaacctactctaccgccggaaacctcaggacccaccaaaaaacacatcgcggtgagtacacctttgtttgcaaccaggaggggtgtggtaaagcttttctcacatcatatagcctgcggatccatgtgagagtgcacactaaggagaagccatttgagtgcgatgtccaaggttgcgaaaaggcgttcaatactctttaccgcctgaaagctcaccagcgactgcacacaggaaaaacatttaattgcgagtccgaaggttgcagcaaatacttcaccacactgagcgatctacgtaaacacatccgcacccataccggagaaaagccatttaggtgcgaccatgatggctgtggaaaggcttttgcagcgtcgcaccaccttaaaacacacgtgaggacccacactggtgaaaggccgttcttttgccccagtaatggttgtgagaaaacattctctacccagtattctctaaagtcacatatgaagggccacgataacaagggccattcgtacaacgctctgccccagcataacgggtcagaggacaccaatcactccctgtgcctgtctgacttgagccttctcagcactgactcagagctgcgtgagaatagcagcacaacgcagggccaggacttgtctacaatctcacctgcaatcatattcgagagcatgttccagaattctgacgacaccgctatacaagaggatccgcagcaaactgccagcctgacagagtcatttaatggcgatgccgagtccgtctccgatgtcccaccatccacaggcaactcagcttctttatcgctgccccttgttctccagccgggactctccgagcctccgcagccgttactacctgccagcgccccttcagccccaccccctgccccatccctcggacctggcagccagcaggccgctttcggaaatccacctgccctcctgcagcccccagaggtccctgtcccccattccacgcagttcgccgctaatcaccaggagttcctgccccatcctcaagcaccgcagccaatagtcccgggtctgagcgtggtggcaggggcatctgctagcgccgctgctgttgcatccgcagtggccgcaccagcaccaccccagtccaccactgagcccttacccgctatggtgcaaaccctgccacttggcgctaatagtgtgctgactaataatcctaccatcacaatcacaccaacaccaaacaccgcaatcctccagagttccctcgttatgggggagcagaatcttcagtggatactgaacggtgctacttcttcccctcagaaccaggagcaaattcagcaggccagcaaagtggagaaagtgttttttactaccgctgtgccagtcgcttctagcccaggttccagcgtacagcagatcggattgtctgtcccggtgatcatcattaagcaggaggaagcttgtcaatgccagtgcgcgtgtcgggacagcgcgaaggaacgcgctagctcacgccgtaaaggctgcagttccccccctcccccagagccttcccctcaagctcccgatggcccttcacttcagctgcccgcacagactttttccagcgctccggtgcccggatcctcctctagtactcttcccagcagctgcgaacagagtcgccaggccgaaacaccaagtgacccacagactgagacactgtcagccatggatgtgtctgagtttctgtctctgcaatcactggatacacccagcaacctcatccctattgaggcattactgcagggggaagaagagatggggcttacttcaagtttctctaagtag

SEQ ID NO: 230321 - DNA, 603 bp, synthetic construct
  misc_feature 1..603: note = Description of Artificial Sequence: Synthetic coding sequence
  source 1..603: mol_type = other DNA
aagcagtcccaggtgaagagataccagtgtacgttcgaggggtgcccccgaacgtacagcacagccggaaatctccgaactcaccagaagactcatcggggtgaatacacctttgtctgcaaccaggaaggttgtgggaaggcctttctgacctcctacagtctccggatccacgtgagggtccacacgaaggaaaagccctttgaatgcgacgtgcagggttgcgagaaagcatttaataccttataccgcctcaaggcccaccaacgcctccataccggtaaaacctttaactgcgagagcgaggggtgcagcaaatattttactacgctctcggatctgaggaagcatattagaacacatacaggcgaaaagccgtttcggtgcgaccacgacgggtgcggcaaggcctttgccgcatctcaccacctcaaaacccatgtccgtacccacacgggagagcgtccgttcttttgtccttccaatggttgcgaaaaaacgttcagtacacagtacagcctgaagagtcatatgaaaggccacgataacaaaggtcactcctataatgctctgccccagcacaacggtagcgaatctacatag

SEQ ID NO: 230322 - DNA, 2559 bp, synthetic construct
  misc_feature 1..2559: note = Description of Artificial Sequence: Synthetic coding sequence
  source 1..2559: mol_type = other DNA
atgctgatcactgagaggaagcactttcggtcggggaggatcgcacagagtatgtctgaagccaacctaatagacatggaggcaggcaagctgagtaagagctgtaacattaccgagtgccaggaccctgacctcctgcataattggcccgacgcatttaccctccgcggaaacaatgcatctaaggtggccaacccgttttggaatcagttaagcgcgtcaaacccatttctggatgacattacgcaattacgcaacaatcggaagcgcaacaatatttcgatcctgaaagaagacccttttctgttctgccgggaaattgaaaatggaaatagcttcgatagttcaggtgacgagctcgacgtgcaccagctgttgcgccagacctccagtaggaattccggcagaagcaagagtgtttctgaactgctcgatattcttgacgacaccgcccacgcacatcaatccattcacaacagtgaccaaatcctgctgcacgatctagagtggttaaaaaatgaccgcgaggcctacaaaatggcctggttaagccaacgtcagcttgctaggtcctgcctggatttgaatacaatctcacagtctccaggatgggcccagacacagctggccgaagtgacaatcgcgtgcaaggtaaaccaccaaggcggaagcgtgcaactaccagagagcgatattactgtgcacgtgccacagggacacgttgccgtcggcgagtttcaggaagtcagcctccgggctttcctggacccgccacacatgctcaatcatgatctgagctgtactgtgtccccgctgttagagattatgctaggcaacctaaacaccatggaagccctgctactggagatgaaaattggcgcagaggtcagaaaggaccccttctcgcaggtgatgactgagatggtgtgtctccacagcctgggcaaggaggggcctttcaaagtcctgtccaactgctatatatataaggatacgatccaggttaaactgatcgacctttctcaggtcatgtacttagttgtggcagcccaagcgaaagcgttgccaagcccggctgctacgatttgggattatatacacaagaccacatcgattggaatttacgggcctaagtacatccacccctctttcacggtcgtcctgactgtctgtgggcacaactacatgccagggcaactgactatttccgacattaagaagggcggtaaaaatattagtcccgtggtatttcagctgtggggtaaacaaagttttcttctcgacaagccacaggacctgtctatttccatcttttcctgtgaccctgattttgaagttaaaaccgagggtgaaagaaaggaaatcaagcagaaacaactcgaggccggtgaagtcgttcaccagcagtttctgttctcactagtggaacaccgtgagatgcatttattcgatttttgcgtgcaggtggagccacccaatggggagcccgtggcacagttcagcattactacccccgacccgactccgaatctgaagcgtctgagcaacctccctggatacctacagaagaaagaagagattaaatctgcaccactcagtcctaagatcctggttaagtaccccactttccaggataagacacttaatttctcaaattatggcgttacccttaaagcagtccttagacagtctaaaatcgactatttcctcgagtatttcaaaggagacacaatcgccttgctgggcgagggcaaagtgaaggcgatcggacagtcaaaagtgaaggagtggtacgtcggggtcctgagggggaaaattggactggtccactgcaagaacgttaaggtgatttctaaagagcaggttatgtttatgtcagattccgttttcacaaccaggaatctactggagcagatcgtgttacctctcaaaaagctgacttatatatatagcgtggtactaacgctcgtgagtgagaaggtctacgattggaaggttttagccgatgtgctggggtattcccacctgagcctggaggactttgatcagatccaggcagacaaggagagcgagaaggtttcctacgtcatcaaaaagttgaaagaggactgccatactgagagaaatacccgcaagttcctctacgaacttattgtagcactcttaaagatggattgccaggagctggtggccagacttatccaggaggccgctgtgttaacctccgcagttaaactgggaaaaggctggcgagagttggccgagaaactggtccgcctgaccaagcaacagatggaagcgtatgagattccacacaggggcaacacgggagacgtggccgtggaaatgatgtggaagcctgcatacgacttcctgtatacctggtccgctcattacggcaataattacagggacgtgctccaagacctgcagagcgctctcgacagaatgaagaaccctgtgactaagcattggcgtgagttaaccggcgtccttattctagtgaactctctcgaagtgcttcgtgtcactgctttctctacttccgaggaagtctag

SEQ ID NO: 230323 - DNA, 2559 bp, synthetic construct
  misc_feature 1..2559: note = Description of Artificial Sequence: Synthetic coding sequence
  source 1..2559: mol_type = other DNA
atgctgatcacagaacggaaacattttcggtccggccgtatcgcacagtccatgtccgaggcgaatttgatcgatatggaggccggaaagttgagcaagtcctgtaacataaccgaatgccaagatccagacttgttgcacaattggcccgacgcgttcactctcagggggaacaacgccagcaaagtagctaatcccttttggaaccagctctccgcaagcaaccccttcttagacgatatcactcagctaagaaacaacagaaagcgcaataacatctcaatcctcaaggaggaccccttcctgttttgtagagagatcgagaacgggaactctttcgactccagtggcgatgaactcgatgtccaccagctcctaaggcagacatcgtccagaaattcaggcaggagcaagtctgtgtctgagctactagatatcctggacgacacggcccatgcacaccagtccatacataattccgaccagatcctgcttcacgatctggagtggctgaagaatgatcgagaggcatataaaatggcctggcttagtcagcggcaacttgccagatcatgcctggatctgaataccatctcccaatcaccaggttgggcccagactcaactcgccgaggtgacaatagcctgcaaggtcaatcaccagggagggtctgtgcagctaccagaaagtgatattaccgtgcacgtgcctcagggccacgtggcggttggtgagttccaggaggtgtccttacgagccttcctggaccctcctcatatgctgaatcacgacctgagctgtaccgtgtctccactgctggagatcatgctggggaacctgaataccatggaggccctgttattggagatgaagattggagccgaggttcgtaaggaccccttttcccaagtgatgacagaaatggtttgcctgcactctctcgggaaggagggacctttcaaagttctgtccaattgctacatttacaaagacactatccaagtgaagcttatagatctttcacaagtgatgtaccttgtggtcgcagcgcaggccaaagcgctgccttcaccagccgctacaatttgggactacattcacaagaccacctctatcggtatttacgggcctaagtacatccacccttcatttaccgtggtactgactgtgtgcggccacaattacatgcccggtcagctaaccataagtgatattaagaaaggaggaaagaacatctcacctgttgtgtttcagctctggggcaaacaaagctttttgctcgataaaccccaggatctgagcatttcaattttctcctgcgatccagactttgaggtcaagactgagggtgaaagaaaggagattaaacagaagcagctggaggctggggaggttgtgcatcaacaatttctttttagcctggtggagcacagagagatgcatttgtttgatttctgtgtgcaggtcgagccacctaatggcgaaccggttgctcagttttcgattaccaccccagatcccacccccaacctcaagcgcctgagcaatctccctggctacctgcagaaaaaagaagagatcaagtcagccccactgagcccaaaaattctcgtgaagtaccccacctttcaagataaaacattgaacttttcaaactacggggtgacattgaaagcagtgttgcggcagagcaaaatcgactacttccttgaatatttcaagggagatactatcgccctgttgggtgagggaaaggtgaaggccattggacagagtaaggtgaaggagtggtatgtcggcgtgctcaggggcaaaatcggactggtccattgtaagaacgtcaaggtgatctctaaagaacaggttatgtttatgtctgacagtgtcttcacaactcgcaatctcttagagcagatagttctgccactgaaaaagttaacctacatttatagtgtggtccttaccctggtaagtgaaaaggtttacgactggaaagtcctcgccgacgttttgggttattcccatctgtccttagaagatttcgatcagattcaggccgacaaagaatcagaaaaagtctcctatgtcataaagaagctcaaggaagattgtcacacagagcgcaacacccggaagttcttgtacgagttgattgtggctctgctgaaaatggattgccaggagctcgtcgcccgactcatccaagaggcagccgtgttaaccagcgctgtaaagttaggaaaaggctggagagaacttgcggagaaactagtccggctaacaaaacaacagatggaagcctacgaaatcccccatcgtggcaatacaggagacgtcgcggttgagatgatgtggaaacccgcttacgatttcttgtatacatggtcagctcattacggcaataactaccgggatgttttacaggacctccagtctgctctggacagaatgaagaaccctgttacaaaacattggcgcgaactgacaggagtgttgatcctcgtcaatagcctggaagtgctgcgcgtgacggcattctccacaagcgaggaggtctag

SEQ ID NO: 230324 - DNA, 1308 bp, synthetic construct
  misc_feature 1..1308: note = Description of Artificial Sequence: Synthetic coding sequence
  source 1..1308: mol_type = other DNA
atgctgctcggcggacctccacggtctcccagatctggcacctcccccaagggtccctggagtagcacgggccatgtccagtttggtaaatcacctcagacctggcccagaagaactcgccctaggagtcccgagcccgctgcccctagcggcgtacggggaagcacatggacccgcaggcgggatacaccacgacgtgcgggaccgactgctctgtcccggtacgtcggtcacctgtggatgggccgaaggcctccgagtcctgaagccagaggacccgtgcccaggtcaagtgccgcttcacgggcaagaagaagcctggctagccccggtatctcgcccggaccactgacagcaaccatcggcggagccgtggcgggagggggtccgagacaaggtcgagccgaggcacacaaagaagtgtttccgggtcagagagtggggaaaatggccgctcccatggaactcttctgctggtctggtggttggggtttaccctctgtcgacctggacagcctggccgtcctcacatatgcaagatttaccggagcaccacttaaagtacataaaatctcaaatccgtggcagtcaccatccgggacactcccggctctcagaacctctcacggagaagttatctctgtgcctcacaaaatcattacccatctcaggaaggaagtacacaccttttggatagatactaaaaattacgttgaagtgacacgtaaatggtacgctgaggcgatgccctttccacttaacttctttctcccaggacgcatgcaacgccagtacatggagcgtttgcaactgttgaccggcgaacacagaccagaagacgaggaggaactcgaaaaagagttatatcgggaggcgagagagtgtttgacccttctttcccagagactggggtcacagaaattcttcttcggggacgcaccggcatctctggacgcattcgtgtttagctatcttgcactgctgctgcaggccaagctcccttctggcaaactacaggtgcacctccgcggtctgcataacctctgtgcctattgcactcacattctcagcctttacttcccttgggatggcgcagaggtgccaccccagagacaaacaccagccggacctgagaccgaggaggagccctaccgcagaaggaatcagattctgagcgtgctggcaggcctcgccgctatggtgggatacgcgttgttgagcggaatcgtgtctattcaacgagctacaccggctcgggctccaggtaccaggactttagggatggcggaggaggatgaggaggaatag

SEQ ID NO: 230325 - DNA, 1401 bp, synthetic construct
  misc_feature 1..1401: note = Description of Artificial Sequence: Synthetic coding sequence
  source 1..1401: mol_type = other DNA
atgctgttgggtgggccacctcgatcacctagaagcgggactagccccaaaggaccctggtcctcaaccggccacgtccagtttggcaaaagtccgcagacatggcctaggcgaacgaggcccaggagccccgagcccgcagcaccctccggagttcggggttccacctggacccgacgacgcgacaccccccgtagagccggtcccactgcacttagcaggtacgtcggccacctttggatgggcaggcgtccacctagccccgaggcccgagggcctgttcccaggtccagtgctgctagccgcgcaaggcggagcctggcgagtcccggtatttccccaggaccactgacagcaactattggtggtgcggtagcaggaggtgggcctagacagggtcgggctgaggctcacaaggaggtgttccccggtcaacgcgtggggaagatggccgctccaatggaattattctgttggagcggcggatggggactccccagcgtggatctggacagtctggctgtgctcacttacgcaagatttaccggagctcctctgaaagttcataagatttcgaatccgtggcaatccccaagtggcactttgcccgcactacggacctcacacggtgaagtgatctccgtacctcataagataatcacgcacctacgcaaggagaaatacaacgccgattacgaccttagtgccagacagggagctgatacattagcttttatgtcacttctggaagagaaactgctgcccgtgcttgtgcatactttttggattgatacgaagaattacgtggaagttactaggaagtggtacgccgaagctatgccgtttccactaaacttcttcttgcctgggcgaatgcagcgacagtatatggaacgtctgcagctgcttacaggtgaacacaggcccgaagatgaggaagagctagaaaaagaactgtacagagaagcaagagagtgcctgacgctgctcagccagcgcctcggatcccaaaaattttttttcggcgacgctccggcatcccttgacgccttcgtgttcagttacctggcgctgttgctgcaagcgaaattgccctctgggaagcttcaggtacacctgcgcggactccataatctctgtgcctattgtactcacatcctgagcctgtacttcccctgggacggcgctgaggtaccacctcaacggcagacccccgcaggcccagagacggaggaggagccgtatcgacgacgcaaccagatactgagcgtccttgccggacttgcagccatggtcggatatgcccttctttcgggtattgtgagcattcaacgtgctacacccgctcgtgctcccggaaccaggactttaggaatggctgaagaagatgaggaggagtag

SEQ ID NO: 230326 - DNA, 951 bp, synthetic construct
  misc_feature 1..951: note = Description of Artificial Sequence: Synthetic coding sequence
  source 1..951: mol_type = other DNA
tgagagggaggtcaagatggcggtgcacacggcgctgtcttgctggtcaggggtcttggcgcagctgtgagcggaccagggcaacctggaagagcggacctttgtcaaatttattggtgctctaccgagggaacacaagaccagcagccgttagctgagccattccgctatccggtgagcctgggcggaacactgccggcactccggactagccacggagaagttatctccgtgccccacaagatcataacccacttaaggaaggagaagtacaacgcagattacgacctatccgccagacagggggcagacacactcgcctttatgtcactcctggaagaaaaactgctccccgtactcgttcacaccttctggatcgataccaagaactatgtcgaggtcactcgtaagtggtatgccgaagccatgccttttccattgaatttctttctgccgggtaggatgcagcgccagtacatggaaaggcttcagctcttaaccggagaacacagacctgaagatgaggaggagctggagaaagagctctacagggaggcaagggaatgcctgactctgctatctcaacggctgggcagccagaaattctttttcggggacgccccagctagtctcgatgccttcgttttctcctacttagctctcctgctgcaggccaagttaccgtctggcaaattacaggtgcatctgagaggcctgcataatctctgcgcgtactgtacccatattctgtccctgtacttcccctgggacggggctgaggtgccccctcagcggcaaacccccgcaggcccagagaccgaggaggagccctacagacgcaggaatcaaatcctgagcgttctggcgggattggccgcaatggtcggttacgccctcctgagtggtatagtgtctattcagagggcaacaccagcccgagccccaggatag

SEQ ID NO: 230327 - DNA, 1188 bp, synthetic construct
  misc_feature 1..1188: note = Description of Artificial Sequence: Synthetic coding sequence
  source 1..1188: mol_type = other DNA
atgaatgggccagtggacgggctctgcgatcacagcttatccgagggcgttttcatgttcaccagcgagtccgtaggcgagggtcaccctgataagatatgtgatcagatttccgacgcagttttagatgctcacctgaagcaagatccaaacgcgaaagtcgcgtgcgagacagtgtgtaagacagggatggtcttactgtgtggggagattactagtatggccatggttgactaccagagggttgtgagagacacgatcaagcatattggctacgacgactccgcaaagggctttgatttcaagacctgcaacgttcttgttgccctggagcagcaatctccggacattgcccaatgtgtgcatttggatcgaaacgaggaggatgtgggggcaggggatcagggcctaatgttcggttatgcgactgacgagacagaagagtgcatgccgctgaccataatcctcgcacacaaactaaacgcacgcatggccgatcttaggcggtccggccttcttccttggctgagacccgatagcaagactcaggttaccgttcaatacatgcaagataatggagctgtgatccccgtgcggatccatactatcgtcatatcagtgcagcataacgaagacatcacactggaagaaatgcgccgagctttgaaggagcaggtgattcgcgctgtggtgccggctaagtatttggacgaggatactgtctatcacctccagccttccggccgttttgtcattggcggacctcagggcgacgccggtgtcaccgggagaaaaatcattgtggatacctatgggggatggggcgcacacggaggtggggctttttccggaaaagactacacgaaggtcgaccggtcagcagcgtacgcagctagatgggttgccaaaagcttggtgaaggctgggctgtgcaggagggtgcttgtgcaagtttcctacgccattggtgtggccgagcctctaagtatctcaatcttcacctacggcacatcccaaaagaccgaacgggagctgcttgacgtggttcataagaattttgacttaaggcctggagtgatcgtaagggatttggatctaaaaaaacccatttatcaaaaaactgcgtgctacgggcacttcgggcgatcagagtttccctgggaggtgcctcgcaaacttgtattttag

SEQ ID NO: 230328 - DNA, 1188 bp, synthetic construct
  misc_feature 1..1188: note = Description of Artificial Sequence: Synthetic coding sequence
  source 1..1188: mol_type = other DNA
atgaatggacccgttgacggactgtgtgatcattccctgtccgagggcgtctttatgtttacttctgagagcgtcggtgaagggcatcctgataagatctgcgaccaaatatccgatgccgtgctggacgcacatcttaagcaggaccccaatgcaaaagtggcctgtgagacagtgtgcaagacaggtatggtattgctttgcggagagataacctcaatggccatggtggattatcaacgggtagtgagagatacaataaagcatattggttacgacgactctgccaagggattcgacttcaaaacctgtaacgttctggtcgctctagagcaacagtcccctgacatcgcacagtgtgtacatctggatagaaacgaggaagacgttggtgctggggaccaagggttgatgttcggatatgccaccgatgagaccgaggagtgcatgcctctgacgatcatcctggcacacaaactcaacgccaggatggcagacctgagacgtagcgggcttttaccatggctccgccctgattccaagacacaggtaacggtgcaatacatgcaggataacggagccgtgatacctgtccgaatccacactatagtcatcagcgtacagcacaatgaagatatcacccttgaggagatgcgtagggcactaaaagagcaggtgattcgggctgttgtcccagccaaatatctggacgaggacactgtgtatcacctccagcccagtggacgatttgtaattggcggaccacagggcgacgctggagtgaccggacggaaaatcatcgtggatacttacgggggatggggggcacatggcggtggtgctttttccggaaaggactatacgaaggtggataggagcgccgcatacgcagcacgctgggtggctaaatctttggtgaaggccggactctgcaggcgcgtgctagttcaagtttcatacgctattggagtcgcagaacctctctccatcagcatcttcacttacggcacctcccagaaaaccgagcgcgagttactagatgtagtccacaagaatttcgacctgcggccaggcgttatcgtgagagatcttgatttaaaaaagcccatatatcagaagacagcctgttacggtcattttgggcgatctgagttcccttgggaggtgcccagaaagctggttttttag

SEQ ID NO: 230329 - DNA, 438 bp, synthetic construct
  misc_feature 1..438: note = Description of Artificial Sequence: Synthetic coding sequence
  source 1..438: mol_type = other DNA
gagagcgtcggcgaaggtcaccccgataagatttgcgaccagatcagcgacgcagtgctggatgcccaccttaagcaggatccgaacgccaaggtggcttgtggcttcgatttcaaaacttgtaatgtgctcgtggctttggagcagcaatctcccgatattgctcagtgtgtgcatctggaccggaacgaagaggacgtgggtgccggagaccagggactcatgttcggatacgcaacagatgagactgaggagtgtatgcccttaaccataatactggcacacaagctcaacgctaggatggccgacttgaggcggtcagggctgctaccgtggcttagacctgatagtaaaacacaagttactgtccagtatatgcaggataatggggctgtgattccggtaaggattcatacgatcgtaatcagtgttcagtag

SEQ ID NO: 230330 - DNA, 1188 bp, synthetic construct
  misc_feature 1..1188: note = Description of Artificial Sequence: Synthetic coding sequence
  source 1..1188: mol_type = other DNA
atgaacggccagttgaacgggtttcacgaagcattcatagaggagggaactttcctctttacctccgaatccgtgggcgagggacaccctgacaaaatttgtgaccaaatcagcgatgcagtactggacgcgcatttacagcaagatcccgatgctaaggttgcctgtgagactgtcgcgaaaaccgggatgatattgctcgccggagagatcacgagtcgtgctgctgtggactaccagaaagtggtgagggaggcagtgaagcatattggctatgacgacagttccaagggtttcgactataaaacttgtaacgttcttgtagcactagagcaacagtcccccgatatagcccaaggagtgcatttagatagaaacgaggaggacatcggagccggagatcaggggcttatgtttggttatgccacagacgaaactgaagagtgtatgccattaacgatcgtactagctcacaagctgaatgccaagctagctgagctgcggagaaacggaacccttccttggttacggcctgactccaaaacacaggtgaccgtccagtacatgcaggatagaggagccgtgcttccaattcgtgtgcacacaattgtcatctccgtccagcatgatgaggaggtgtgcctcgacgaaatgcgcgacgcactgaaggagaaagttattaaagcggtggtcccagcaaaatacttggacgaggacacaatctaccacctgcagcccagcggcagatttgtgatcgggggaccgcagggtgacgcaggcctgacagggagaaagattatcgtggacacatatggaggatggggagcccatggtgggggagcattcagtggaaaagactacacaaaggtggaccgctcggctgcgtacgcagcccgatgggtcgccaagagcctggtgaaaggaggactatgtagacgggtgcttgtacaagttagctatgcgattggcgtgtctcaccctctgtccatatcgattttccactacggaacctcacagaagagcgaacgggagctgctagagattgtgaaaaaaaatttcgacttgcgtcccggagtgattgtgagggaccttgacctgaaaaagcccatataccagaggaccgccgcatatgggcattttggcagggattcgttcccctgggaagtgcccaagaaattgaaatactag

SEQ ID NO: 230331 - DNA, 531 bp, synthetic construct
  misc_feature 1..531: note = Description of Artificial Sequence: Synthetic coding sequence
  source 1..531: mol_type = other DNA
atgaacggacagttaaacggcttccatgaggcttttatcgaggaaggcacattcttgttcacatccgaatccgtgggcgagggccacccagataaaatctgcgatcaaataggggatgctggcctgactggaaggaagattattgtcgacacctacggcggatggggcgctcatggcggaggtgcctttagtggaaaggattacactaaagttgatcgaagcgcagcctacgctgccaggtgggtggctaaaagtctggtcaaggggggattgtgtcgtagggttctcgtgcaggtgtcttacgccatcggcgtcagccatcctttgtccatcagcatttttcactatgggactagccagaagtccgaaagggagctgttagagatagtgaaaaagaactttgatctgcggccaggagttatcgtcagggaccttgacctgaagaagcccatctaccaaagaactgctgcttatggacacttcggaagggacagctttccttgggaagtaccaaaaaaactgaaatattag

SEQ ID NO: 230332 - DNA, 549 bp, synthetic construct
  misc_feature 1..549: note = Description of Artificial Sequence: Synthetic coding sequence
  source 1..549: mol_type = other DNA
atggcacgcttgctatggttgctccgcggtctgaccctcggcacagctcccaggcgcgctgtgaggggccaagcaggcggtggcggaccaggaaccggacctggactgggagaggctggcagcctggcaacatgtgaactccctctggccaaatcggaatggcagaagaagctcacccctgagcagttttatgtcacccgggagaaaggtaccgagccgcctttctccggaatctacttgaataacaaggaggcaggaatgtatcactgtgtttgttgcgacagtccactgttctcctctgaaaagaagtactgttctggaaccggctggccttccttcagcgaagcacatggcacttcaggatcggatgagagtcataccggtatcctccggagacttgacacaagtctaggctccgcgagaactgaggtcgtctgtaaacagtgcgaggctcacttgggtcacgtgttccctgacggtcccggtcctaatggacagcgattctgtataaacagcgtggccctcaaatttaaaccaagaaagcactag

SEQ ID NO: 230333 - DNA, 558 bp, synthetic construct
  misc_feature 1..558: note = Description of Artificial Sequence: Synthetic coding sequence
  source 1..558: mol_type = other DNA
atgtctgccttcaatctgttacacctcgtgactaagagccagccagtggcgcttcgtgcgtgtggtctgccatcgggcagctgccgggataagaaaaattgtaaggtggtcttctcccagcaagagttaagaaagcggctgaccccactacagtatcatgtgacccaggaaaaggggactgagtctgcctttgaaggcgaatatacccaccacaaggaccctggcatctacaaatgtgtggtatgtggcactcctctcttcaagtccgagactaagttcgattcaggatcaggctggccctctttccacgacgttattaacagcgaggctataactttcactgatgatttcagctatggcatgcaccgggttgaaacttcttgtagtcaatgcggcgcacatctagggcatatcttcgacgacgggccacggccaacgggaaagcggtattgtatcaactccgccgcactcagtttcacccccgctgatagctccggcaccgcagagggaggtagcggtgtggcctccccagcacaggccgataaggccgaactctag

SEQ ID NO: 230334 - DNA, 579 bp, synthetic construct
  misc_feature 1..579: note = Description of Artificial Sequence: Synthetic coding sequence
  source 1..579: mol_type = other DNA
atgagccccagacggaccctgccacgccctctgtccctttgtttatctctttgtctgtgtctgtgcttagccgcagccctgggctcggctcagtccggaagttgccgtgacaagaaaaactgcaaggtggttttctcgcagcaagaactacgcaagagactgactcccttgcagtatcacgttacacaggagaagggtaccgagtccgcatttgagggggagtatacccaccacaaagaccctgggatctacaagtgcgtcgtctgcgggacgcccctctttaaatccgagactaagtttgattccgggtccggctggccctccttccatgacgtgatcaacagcgaagccattactttcaccgatgacttcagctatggcatgcaccgtgtcgaaactagttgttcacagtgtggggctcatcttgggcatatatttgacgacggacccaggccgactgggaaaaggtattgcatcaacagtgcagcattgtctttcacccccgcagatagctccggcacggcagaaggaggaagcggggtcgcaagtcctgcccaggctgacaaggctgaactttag

SEQ ID NO: 230335 - DNA, 495 bp, synthetic construct
  misc_feature 1..495: note = Description of Artificial Sequence: Synthetic coding sequence
  source 1..495: mol_type = other DNA
atgagcgcctttaacttgctgcaccttgtaaccaagagccagccggtggctctaagagcctgtggtcttccatccggatcctgccgcgacaagaaaaactgcaaggtggtgttttcacagcaggaactgcggaaacgtctcacccccctgcaataccacgttacacaggagaagggcaccgagagtgcatttgaaggcgagtacacccaccataaagaccctggtatctacaagtgcgtggtatgtgggacccccctttttaagtctgaaacaaagttcgatagcggatctgggtggccaagtttccatgatgtcatcaatagcgaagccatcacctttactgatgacttctcttacgggatgcacagggtagaaacatcttgctcacaatgtggcgctcatctgggacacatttttgatgatggacctcgcccaaccgggaaacgctattgcattaattcagctgctctgagcttcacacccgcagactcttag

SEQ ID NO: 230336 - DNA, 558 bp, synthetic construct
  misc_feature 1..558: note = Description of Artificial Sequence: Synthetic coding sequence
  source 1..558: mol_type = other DNA
atgtcagccttcaatctgctccatctggtcaccaagtcccagccggtggcgctccgggcttgtggcctccccagcggtagctgccgtgataagaagaattgcaaagttgttttttctcagcaagaattgagaaagcgcctgaccccacttcagtatcatgttacgcaggagaagggaacggaatctgccttcgagggcgagtatacccatcataaggatcccggtatctataagtgcgtggtttgcgggacccccttgtttaagagcgagacaaagttcgactcaggctccggatggcctagtttccacgacgtcatcaactctgaagctataactttcaccgacgacttcagctacggcatgcacagggttgagacaagttgcagccaatgtggggctcacctgggacacatctttgatgacggtccccgacctactgggaagagatactgcattaattccgcagctctgtccttcaccccagcagacagttctgggactgccgaggggggatccggcgtggctagcccagcccaggcagacaaagcagaactctag

SEQ ID NO: 230337 - DNA, 354 bp, synthetic construct
  misc_feature 1..354: note = Description of Artificial Sequence: Synthetic coding sequence
  source 1..354: mol_type = other DNA
atgagcgcttttaacctgctacacctcgtgactaaatcgcaacccgttgcactgagagcttgcggtttaccttccggtagttgcagggataagaaaaattgtaaggtggttttctcccaacaggagctgcgtaagcggctgacccccctgcagtatcatgttactcaggagaaggggactgaaagtgccttcgagggggaatacactcaccacaaggacccgggaatctacaaatgtgtcgtgtgcggcactcccctgtttaagagcgagacaaagttcgatagcggatcaggttggcccagtttccacgatgtgataaactcagaagcaataacctttacagacgatttctag

SEQ ID NO: 230338 - DNA, 2703 bp, synthetic construct
  misc_feature 1..2703: note = Description of Artificial Sequence: Synthetic coding sequence
  source 1..2703: mol_type = other DNA
atgcgcctgttcgtgtcagatggcgtccctggctgcctgcccgtccttgctgcagctggcagagctcgcggtagggccgaagtgctgatctcaacagtggggccagaggactgcgtggtcccctttctcactagaccaaaagtgcccgtcttacagctcgacagcggcaactacctattctctacctccgctatctgtcgatattttttcctgttgagcggatgggagcaggatgatctgacaaatcagtggctcgagtgggaggcaactgagctgcagcctgcactttccgctgcactgtattacctcgttgtccaaggaaaaaaaggcgaggatgtgctaggttcagtgagacgcgctcttacacatattgatcattccctttcgaggcagaactgtccctttttggccggagaaacggaatccctggctgatatcgttttgtggggagcactctatcctctgctgcaagatcccgcatatctccctgaggaactcagcgcactccactcctggtttcagacattatcgacccaggagccgtgtcagagagcagcggaaaccgtgctcaagcagcagggtgtgttagcactaaggccctacctgcagaagcagccacagccctcccccgcagaaggacgcgctgtcaccaatgaacctgaggaggaagagctggccacactgtccgaggaggaaatcgccatggcagttacagcctgggagaagggcttggagagtttacctcccctacgcccacagcagaaccccgtccttcccgttgccggagagaggaacgtgctgatcaccagtgccctgccttatgtcaacaacgtgcctcacttgggaaacattattggttgtgtcctgtctgctgatgtgttcgctagatactctcggctcagacagtggaatactctctacctctgcggtaccgatgagtacggaaccgctaccgaaactaaggccctcgaagagggattaacacctcaggagatttgcgacaaataccacattatccatgctgacatatatcgttggtttaatatttcctttgacatttttggtcggactaccaccccacagcagactaaaatcacccaggacatatttcagcagctgctcaagagaggattcgttcttcaggatactgtggaacagttgcgttgtgaacactgtgccagatttcttgctgatcgctttgtggagggcgtgtgcccattttgcgggtacgaagaggccagaggtgaccaatgtgacaaatgcggaaaacttatcaacgcggtcgagttaaagaagccccaatgcaaggtgtgtcggtcttgccccgtggttcagtcctcacagcacctcttcctcgaccttccaaaactcgagaagcgtctcgaagagtggctgggccgtacattaccagggtctgactggactcctaacgcgcagttcattacacgatcctggttgcgggatggcttgaagccaagatgcatcacccgtgacttaaagtggggaaccccagtccccctggagggatttgaagacaaagtgttctatgtgtggtttgacgccaccatcggctatctttccatcaccgccaactataccgatcagtgggagcggtggtggaagaaccctgagcaagtggatctgtaccagtttatggcaaaggacaacgtcccttttcattccctcgtctttccgtgtagcgctcttggcgctgaggataactatactctggtctcccatctgatcgctaccgagtacctgaattatgaggatggcaaattttccaaatcacgtggcgtaggcgtgttcggcgacatggctcaggacactggaatccccgctgacatttggaggttttatctgctgtacatacggccagaaggacaggacagcgccttcagctggactgatttattgctgaaaaacaattctgagctgttgaacaacttgggtaacttcataaatcgagcaggaatgtttgtcagtaagttttttggcggttacgtgccggaaatggttcttacccccgatgaccagcggttgctcgcgcacgttacactcgagctgcagcattaccaccaattactggagaaagtaagaattcgcgacgccctccgctcaatattaaccatatcaagacacggaaaccagtacatccaggtgaacgaaccatggaagaggataaaaggctctgaggctgataggcagagagccggaacagtgacaggactagctgtcaatattgccgcactgctctctgtcatgctgcagccctacatgcctaccgtcagtgcaactatacaggcccagctgcaactgccccctcctgcatgctccatactgctgacaaacttcctgtgcacgctccccgcaggccaccagatcggaacagtttcaccactgtttcagaaactggagaatgatcagatcgagtcccttcgtcaaaggttcggcggtggccaggccaagacaagcccaaaacctgccgtagtagagactgttacgaccgccaagcctcaacagatccaggccctgatggatgaagtgaccaaacaaggtaatatcgtgcgggaactgaaagctcagaaagcagacaagaacgaggtggccgctgaggtcgctaagttgttggacctcaaaaaacagcttgccgtggcagaggggaagccacccgaagcccctaaaggtaagaaaaaaaagtag

SEQ ID NO: 230339 - DNA, 1908 bp, synthetic construct
  misc_feature 1..1908: note = Description of Artificial Sequence: Synthetic coding sequence
  source 1..1908: mol_type = other DNA
atggccgtcaccgcgtgggaaaaaggactcgaatcgttgccacctctaagaccccagcagaaccccgttttacccgtcgctggagaaagaaacgtactgataacttctgccctgccatatgtcaacaatgtcccccatctggggaacatcatcgggtgtgtgttatctgccgatgtctttgctagatacagccgcctgagacaatggaacaccctgtacttgtgtggcacagatgaatatggcaccgcaaccgaaactaaggcactcgaggaagggctcactcctcaggaaatatgtgacaagtatcacatcatccatgcagacatataccgctggtttaacatctccttcgatatctttggacgcaccaccaccccacaacagaccaagatcacccaggatatcttccagcagctactcaaaagaggcttcgtactgcaggataccgttgaacagcttaggtgcgagcactgcgccagattcctagccgaccgcttcgtggagggcgtctgccccttctgtggatacgaagaggctagaggagaccagtgcgataaatgcggaaagctgatcaatgccgtcgaactgaagaagccacagtgcaaagtgtgtaggtcctgtccggtcgtacagagtagtcaacacctctttctggacctccctaagctcgaaaaaagacttgaggaatggcttggacgcactctgcctggcagcgattggactccaaatgctcagttcatcactcgcagctggctcagagatggcctcaagcccaggtgcatcacgcgcgacctgaaatgggggacaccagtgcccttggagggatttgaggataaggtattctatgtgtggttcgatgcgactatcgggtatttgagcatcaccgcaaattatactgatcagtgggaacgctggtggaaaaatccagagcaagtggatctgtatcagtttatggcaaaagataacgttcccttccattccctggttttcccttgctcggctctgggtgctgaagataattacacgctggtaagtcatttgattgccacagaatatcttaactatgaggacggcaagttttcaaagagcaggggggtcggggtgttcggcgacatggctcaagacacggggatccccgcagacatttggcgcttttatctgttgtacatacggcctgaaggccaagatagcgctttcagctggacagacctgctgttgaaaaacaacagcgaactactgaataacctgggaaacttcattaacagggccggaatgtttgtctcaaagtttttcggaggctacgtgcccgaaatggtgcttactccagacgatcagagactgctggcccatgtcacactagaattgcagcactatcatcagctcctcgagaaggttcgcattagggacgccctaaggagcatcctgactataagcaggcatggcaatcagtacatccaggtgaacgagccatggaaaaggataaagggtagcgaggctgacaggcagcgcgctgggaccgttacaggcttagccgtgaatatcgccgcactcctctctgtgatgctgcagccatatatgccgaccgtttccgcaaccatccaggcccagctgcagttgccgccacccgcatgctccatcctgcttaccaacttcctttgtaccctcccagcaggccaccagatagggacagtctcccctctgtttcagaagttggaaaacgatcaaatcgagtcactgcggcaaaggtttggaggtgggcaggtgcgtaagcttaaagcggtccccagtttgcacaatagtcactctattacatccctgatctccttgagtagtccacatcctagtctcttccccagcttcgggcctgcagcatcatctctaactgtgtttctgtcttgtctgaactag

SEQ ID NO: 230340 - DNA, 1641 bp, synthetic construct
  misc_feature 1..1641: note = Description of Artificial Sequence: Synthetic coding sequence
  source 1..1641: mol_type = other DNA
atgagactgttcgtctctgatggagtgcccggatgcctgccggtgcttgcagccgctggtagagccagggggcgtgccgaggttcttatcagtaccgtcggtcccgaagattgcgtcgtgccattcctcacccgccctaaagtacctgtgctgcagttggattcaggtaactatcttttctccaccagcgcaatctgcagatatttctttctcctgtcaggctgggaacaagacgacttgactaatcaatggctggagtgggaagcaaccgaactgcagccggcattgagcgccgctctgtattacttggtggttcagggaaagaagggggaggacgttcttgggtcggttagacgcgcactgacgcacatagaccactccctatctcgtcagaattgccctttcctggcaggagagactgagtcacttgccgacatcgtcttgtggggcgcactgtacccactgctgcaggacccagcatacttgcccgaggaactttctgctctgcacagctggttccaaacactctcaacacaagaaccatgccagcgagccgcagagactgtgctgaagcagcagggtgtgctggccctgagaccgtacttacaaaaacagcctcagccaagccccgctgaggggcgagcagtcacaaatgagcctgaggaggaggaactggccaccctctctgaagaagagatcgcgatggccgtgactgcctgggagaaagggctggaaagcttgcctcccttgcgaccccagcagaaccctgtacttccagtggccggagaacgaaacgtgctgattacttctgcccttccttacgtgaataacgttccccatctcggaaatatcatcggttgcgtactgagcgctgacgtgtttgcacgctacagcagactgcggcaatggaatacactatatctgtgcgggactgacgaatatggcaccgcaactgaaactaaggccttggaggagggactgacaccgcaagagatatgcgataagtaccacatcatccatgccgacatctacagatggttcaatatctctttcgacatcttcgggagaactaccacccctcagcaaaccaaaatcactcaggatatctttcaacagctcctgaagaggggattcgttctgcaggatacggtggaacagcttcgctgtgagcactgtgccaggttcctcgctgaccgctttgttgagggtgtttgtcctttttgtggatatgaggaggcccgaggcgaccagtgtgataagtgcggcaaattaattaacgcagtcgaactgaaaaagcctcagtgcaaagtctgcaggagttgccctgtagttcagtcgtcccagcacctcttcctcgacttgccaaaacttgagaagcgcttggaagaatggcttgggcgtacactcccagggtcagactggacacctaacgcccagttcattacccggtcatggttgcgggatggcctcaaaccgagatgtattacacgtgacctgaagtggggaacccctgtgcctttggaagggttcgaggataaggtgttttacgtgtggttcgacgccacaataggatacctgagtattacagctaactacactgaccagtgggaacgatggtggaagaaccccgaacagccctag

SEQ ID NO: 230341 - DNA, 1782 bp, synthetic construct
  misc_feature 1..1782: note = Description of Artificial Sequence: Synthetic coding sequence
  source 1..1782: mol_type = other DNA
atgttgaggaccagcgtgctccggctgctgggcagaactggtgcgagtagactatctctgcttgaagacttcggcccacggtattactccagtgggtcactgagcgcaggcgatgacgcctgcgacgtaagagcgtactttaccacgccaatcttctatgtgaatgcagcaccccatatcggtcatctttactcagcccttctggccgatgcactctgtcggcatcggagattgcgaggacccagtacggctgccaccaggtttagcactggcaccgacgagcatggtctaaaaatccagcaggcagccgctactgccggtctcgcaccgacggaactttgcgaccgtgtctcagaacagtttcaacaactgttccaagaggccggtatcagctgcaccgactttataaggacaacggaagctcgccatcgggttgccgtgcagcatttctggggggtgttaaaatcccgagggctcctgtataagggggtctatgagggctggtactgtgcgagcgacgagtgctttctccccgaggccaaggtgacgcagcagccaggcccaagcggagattccttcccagtcagtctggagtctggccatccagtgtcgtggactaaggaagagaactatatatttaggcttagtcagttccgtaaaccattgcagcgatggctccggggaaaccctcaggcaatcactcctgaaccttttcaccacgtggtgttacagtggcttgacgaggaacttcccgacctatcggtaagccggcgtagctcccacctccactgggggatccctgtgcctggcgatgatagtcagacaatctacgtgtggctggatgctctcgtgaattatcttaccgtaatcggctatccgaatgccgagttcaagagttggtggccagctacatcgcacatcattggaaaggacatcctcaagttccacgctatttactggcccgcattcctcctgggggctggaatgtcaccccctcaaaggatttgtgtccattctcactggactgtttgtggccagaaaatgtctaaatcacttggcaacgtcgtggaccctagaacatgtcttaacaggtacaccgtggatgggtttcggtacttcctactcagacagggtgtacccaactgggattgcgactattatgatgaaaaggtggttaaattactgaactcggagcttgcagacgccctgggcggtttattgaaccgatgcactgctaagcgcataaatccttctgaaacttatcccgctttctgcaccacctgcttcccatcagagccgggactcgtgggcccaagcgtaagggcacaggctgaggactatgcactggtgtccgccgtggctacgttgccaaagcaggtggcggatcactacgataactttaggatttacaaggccttagaagccgtgagcagctgtgttcggcagacaaacggctttgtgcaaaggcatgccccttggaagctgaactgggaatctcccgtggatgccccatggttagggactgtgctccacgttgccctggagtgtctcagagtgtttggcactctgctccagcctgttacgccaagcctagccgataagctgctgtcaagacttggcgtctccgcaagcgagcgcagcctgggcgaactgtatttcttaccacgcttttacgggcacccgtgtcccttcgaaggcagaaggctgggacctgagactggactgttgttccctagattagaccagtctagaacttggcttgttaaggctcacagaacctag

SEQ ID NO: 230342 - DNA, 1563 bp, synthetic construct
  misc_feature 1..1563: note = Description of Artificial Sequence: Synthetic coding sequence
  source 1..1563: mol_type = other DNA
atgcttcgaactagtgtcctgaggttattgggcaggaccggggctagccgtctctcccttttagaagacttcggaccaagatactacagcagtggttctctatccgcaggcgatgacgcttgtgacgtgcgggcttattttaccacccccatcttttatgtgaatgccgctccacatattggtcacctctattcggctctgctggcagatgccctgtgtcgacaccgccgactcagaggaccttccacagcggcaacccgcttcagcacagggaccgatgagcacggcctgaaaattcagcaggcagcggcaactgccggattggccccaacagagctgtgcgatagagttagtgaacaatttcaacagctgtttcaggaggctggcatttcctggaccaaggaggagaactacattttcaggttgtcacaattcaggaaaccacttcagcggtggctgcgtgggaatccccaagctatcactccagaacccttccatcatgtcgttctgcagtggctggacgaggagctccccgacctaagcgtttcccggaggagttcccatctgcactggggaatccctgtgcccggtgatgactcccaaaccatctacgtctggctggacgcgttggtcaactatctgaccgttataggctaccctaatgccgaattcaaaagctggtggcccgctacaagtcatattatcggtaaggatatccttaaatttcacgccatttattggccagcctttttattaggtgctggcatgagccctccacagcgaatctgtgtgcattcccattggactgtatgtggacaaaagatgtctaagtcactgggcaatgtcgtggatccgagaacatgccttaatcggtacactgtcgatggtttcaggtatttcctcctgagacagggggtcccaaattgggattgcgactattacgatgaaaaagtggtcaaactcctgaacagcgagctggccgacgcactgggaggcctgctgaataggtgcaccgccaagagaatcaacccatcagaaacctatcctgctttttgtactacgtgttttcccagtgaaccaggccttgtggggcctagcgtgcgcgctcaggccgaggattacgctcttgtgagcgcagttgcgacgctgcccaaacaggtggctgaccattacgacaatttccgcatttataaagcccttgaagcagtgagttcttgtgtgcggcaaactaatgggttcgtccagcggcatgcaccatggaagctgaactgggagtcgcccgtggacgcgccatggctgggcaccgtcctgcatgtagccctagaatgcctgagggtgtttgggacattgctccagccagtgaccccctcgttggcggacaaactgctcagtagacttggagtgtctgcctccgagaggagtcttggggagctctacttcttacctcggttctatgggcacccttgccctttcgagggccgtcgactggggcctgaaacaggtctgcttttcccgagactcgaccagagccgcacttggctagttaaggcgcatagaacttag

SEQ ID NO: 230343 - DNA, 1461 bp, synthetic construct
  misc_feature 1..1461: note = Description of Artificial Sequence: Synthetic coding sequence
  source 1..1461: mol_type = other DNA
atggtggccggaatgttaggcttacgggaggagaaatcagaggaccaggacctgcagggcctgaaggacaagcctcttaaattcaagaaggtcaagaaggataaaaaggaggagaaagagggcaaacacgagcctgtgcagccttccgcgcaccactccgccgaacccgctgaagctggcaaggcagaaaccagcgaaggatcgggatctgccccagccgtccctgaagctagcgcatcaccaaaacagcgaaggtctataatccgagaccgtggccctatgtatgacgatcccaccctgcctgaaggctggactaggaaacttaagcagcggaaaagcggcaggagcgccggaaaatatgacgtgtacctcatcaatccccagggaaaagccttcaggtcaaaggtagaactcattgcttattttgaaaaggtgggagacaccagccttgacccaaatgacttcgattttaccgtcacaggaaggggctccccctctaggagagaacagaaaccaccaaaaaagccaaaaagtccgaaggcccctggcaccgggagagggcgtggtcggccaaaaggctccggcactacgagacctaaggctgccacctccgaaggcgtgcaggtgaagagggttttggagaaaagtcctggcaaacttctggttaaaatgccctttcagacctcccccggaggaaaggctgagggaggaggggcaaccaccagtacccaggtcatggttattaagagacccggacgcaaacggaaagcagaggcagatccacaggctatccccaaaaaacgcggtaggaagccaggaagcgttgtggccgctgccgcagctgaggctaaaaaaaaagctgttaaggaaagctcaataaggtcagtacaggagacggtgttgcctatcaagaagagaaagactagggaaaccgtgtcaatcgaagtgaaagaggtggtgaagcctcttcttgtgtccacgctgggggaaaaatcaggtaaaggcttgaaaacatgcaaaagcccaggcagaaagagcaaagagtcctccccgaaaggacgaagctcttcagccagctcccccccaaaaaaggagcatcatcaccatcatcatcacagtgagagcccaaaagctccggtgccgttgctgcccccacttccacccccaccgcctgagccagagagctctgaagacccgactagtccgccagaaccccaggatctgagttccagtgtttgcaaggaggagaaaatgccgcgaggtggcagcctggagtcagacggatgtccaaaagagcccgcaaagacacaaccagctgtggcgaccgcggcaaccgctgccgaaaaatacaaacatagaggagagggagagcggaaggacattgtctcatcctccatgccgaggccaaacagggaggagccagttgatagccggacccctgtcaccgaaagggtatcatag

SEQ ID NO: 230344 - DNA, 816 bp, synthetic construct
  misc_feature 1..816: note = Description of Artificial Sequence: Synthetic coding sequence
  source 1..816: mol_type = other DNA
atggtggccggaatgctagggctgagggaggagaagtctgaggaccaggacctacagggactaaaggacaaaccgctgaagtttaagaaggtaaagaaggataaaaaggaagagaaagaaggtaaacacgagcctgtccagcccagcgctcaccacagcgccgaacctgctgaagcaggcaaagcggagactagtgaaggctcgggttctgctcctgccgtccctgaggcaagcgctagcccaaagcagaggcgaagcatcattagagatcgagggcctatgtacgacgaccctacgctccctgagggatggaccagaaagctcaagcaacggaagagcggcaggagtgctggaaagtacgatgtttatctaattaacccgcaggggaaggccttcaggtccaaagtagaactcatcgcttatttcgaaaaagtgggagataccagcctcgatccgaacgacttcgatttcactgtgacaggaagagggagcccaagcaggcgagagcagaaaccacctaagaaacccaagtcacccaaagccccaggcaccggcaggggtcgcggaagaccaaagggctcaggaactacacggcctaaggcggctacatctgagggagtgcaggtgaaacgcgtacttgaaaaaagccccggtaaactgctggtcaagatgccattccagacatccccaggtgggaaagccgagggtgggggtgcgactaccagtacccaggtgatggtgatcaaaagaccagggagaaagcgaagtcccagggcccctagaacccctcctgctccacttagcccgaggacttag

SEQ ID NO: 230345 - DNA, 153 bp, synthetic construct
  misc_feature 1..153: note = Description of Artificial Sequence: Synthetic coding sequence
  source 1..153: mol_type = other DNA
atggtagccggaatgttaggcttacgggaggaaaagagcgaggatcaggatctacaggggctgaaggacaagcccctgaaatttaagaaagtgaagaaagacaagaaggaagagaaagaaggaaagcacgagccggtgcagccttcagcgtag

SEQ ID NO: 230346 - DNA, 1497 bp, synthetic construct
  misc_feature 1..1497: note = Description of Artificial Sequence: Synthetic coding sequence
  source 1..1497: mol_type = other DNA
atggccgctgctgccgctgctgcaccttcaggaggaggcggaggtggggaagaagaaaggctcgaagagaaatctgaagaccaggacttgcagggcctgaaagacaagccgctgaaattcaagaaggtgaagaaggacaaaaaggaggaaaaagaaggcaagcatgagccggtccagccaagcgcacatcactcagccgagccggctgaagctggcaaggcggagacctccgaggggtccgggagcgccccagcggtgccggaggcctccgcctcgcccaaacagagacggagcataattagagataggggcccaatgtacgatgatcctaccctgcccgaagggtggactaggaagctcaagcagagaaagtctggcagatcagcgggaaagtatgacgtttaccttatcaaccctcagggaaaggcatttcggagcaaagttgaattgattgcttatttcgagaaggttggcgacaccagccttgatccaaatgatttcgactttacggtgactgggcgaggaagccctagcaggcgcgaacaaaaacctcctaaaaaaccaaagtctcctaaggcacctggtacaggtagggggagaggtcgcccaaagggatcgggcaccacccggccaaaggctgctaccagtgaaggagtgcaggtgaaacgcgtgcttgaaaaaagccctggcaagctgctagtaaagatgcctttccagaccagcccgggagggaaggcggaaggcggtggagcaaccacctcaacacaggtgatggtcataaaacggccaggacgtaagcggaaggccgaggccgacccccaggccatcccaaagaagaggggacgcaagccaggctccgtcgtggcagcggcagccgcagaggcaaaaaaaaaggccgtcaaggagtctagtattaggagtgttcaagaaacggttcttcctataaagaaaagaaaaaccagggagacggtgtcaattgaagtcaaagaagttgttaaacccctgcttgtcagtacacttggggagaaatcaggcaaggggctcaagacctgcaaaagtcctggacgcaaaagcaaggaatcctcaccaaaaggcaggtcgtcctccgcatcctcccctcctaagaaggagcatcatcatcaccatcaccactccgaatccccgaaagccccagttcctttactgccgccattgcctccaccacccccagagcccgagtcatcagaagatcccacgagccccccagagccgcaggatctttcctcctctgtttgcaaagaggaaaaaatgccacgcggtggctctttggagtctgatggttgtcccaaagagcccgcaaaaacacaaccagccgtggccacagccgcaacggcagccgaaaaatataagcatcgcggagagggtgaaagaaaggacatcgtctcctcatcaatgcccaggccaaatcgggaagaacctgtagacagccgcacgcccgtcaccgagcgggtgtcatag

SEQ ID NO: 230347 - DNA, 1185 bp, synthetic construct
  misc_feature 1..1185: note = Description of Artificial Sequence: Synthetic coding sequence
  source 1..1185: mol_type = other DNA
atggttgcaggcatgctgggcctgcgggaggaaaagtctgaggaccaggacctgcaaggtttgaaagataaacccttaaaattcaaaaaagttaaaaaagataaaaaagaagagaaggaagggaagcacgaacctgtgcagcctagcgcacaccattcagcagagcccgcagaggctggcaaagctgagacatctgaaggatctgggagcgcccctgctgtgccagaggctagcgcctcacctaagcagcgaagatctatcatacgagacagaggacctatgtatgatgaccccactctccctgagggatggacacgtaagctgaagcagcggaaatcggggcgaagcgccggaaagtacgacgtatatctgatcaatccccaaggaaaagccttccgctctaaggtggagctaattgcttacttcgagaaagtcggcgacacctccctggatcccaacgatttcgatttcaccgttacagggaggggtagtcccagtagacgcgagcagaagccacctaagaagccaaaaagcccaaaggccccagggactggcaggggccgaggcagacctaagggttcggggacaacacgtcctaaggcagcaactagcgaaggagttcaggtgaagagagttcttgagaaaagccctggaaaattgctcgtgaaaatgccatttcagacgagccccggaggtaaggcagagggaggcggtgctacgacaagtacacaggtgatggtaatcaagcgcccagggcgtaaacgaaaagccgaggccgacccacaggccattcctaaaaaaagagggaggaaaccaggctcggtagtggcagctgctgccgcagaggcgaagaagaaagcagtcaaggagtccagcattcgtagcgtccaggaaacagtcttaccaattaagaaacgcaaaacaagggagactgtctccattgaggtgaaagaggtggtcaaacctttgctcgttagtacgctgggagagaaatcagggaaggggttaaaaacttgcaaaagcccagggaggaagagcaaggagagttcacctaagggccgttcttcttccgccagttctccacctaagaaggagcaccatcatcaccaccaccactcagaatcccctaaagccccagtacctacccgaattaaagcagccgtggtgtcgtccccctatggctag

SEQ ID NO: 230348 - DNA, 1818 bp, synthetic construct
  misc_feature 1..1818: note = Description of Artificial Sequence: Synthetic coding sequence
  source 1..1818: mol_type = other DNA
atggcagaggattggctggactgccctgctctcgggccaggttggaagagaagggaggtgtttcgaaagtcgggggctacatgcggccgttctgatacatactaccagtccccaaccggagataggatccgctccaaggtagagcttacccgatacctcggccctgcatgcgatctgaccttgtttgactttaagcagggcatcctgtgctacccggctccaaaggcccatccagtcgcagtggcctccaaaaagcgcaaaaaaccgtcccggcctgcaaagactaggaagcgccaggtcgggcctcagtcaggcgaagtccgcaaagaagctcccagagacgagacaaaagcagataccgacacggctcctgccagttttcccgcaccaggatgctgcgaaaattgtggcatttctttcagcggcgatggcacccagagacagaggctaaaaacgttatgcaaagattgccgagcacagagaatagcattcaatcgggaacagagaatgttcaagagagtcggatgtggcgaatgtgctgcttgccaggttaccgaagactgtggggcttgcagcacatgtctgctccaactgccgcatgatgtcgcctctggcttgttctgcaaatgtgagcgacgcaggtgtcttcggatagtagagcggtctcgcggatgcggggtttgccgaggctgtcagacacaagaagattgcggccactgtcccatctgcttaagacctcctaggccagggttgagaagacagtggaagtgtgttcagcgcaggtgtctgaggggcaagcatgctcgcagaaagggagggtgcgactccaagatggctgcccgtcgaaggcccggagcccagcccctgccacctcccccaccaagtcagagccccgaaccaacggaacctcaccctagagccttagccccttcccccccagctgaatttatctactattgcgttgacgaggacgagcttcagccctataccaatcgtaggcagaataggaaatgcggtgcgtgcgccgcatgccttcgacgaatggattgtggacggtgtgacttttgctgcgacaagcccaaatttggcggatctaaccagaaacgccaaaagtgtcggtggaggcagtgcttgcagttcgcaatgaaaagacttttgccatctgtctggagcgaaagcgaggatggggcaggaagccctcctccatataggcgacgaaagcggcctagctctgccaggcggcatcacctcggacctaccctgaagccaaccctggccacccggacagcccagcccgaccacacacaggctccaactaaacaggaagcgggtggaggcttcgtcctgcccccacctggaaccgacttggtgttcctgcgtgagggcgcatctagtcccgttcaggtcccagggcctgtggccgcaagtactgaggcgctactgcaggaggcgcagtgctccggtctgtcatgggtggtggccctccctcaggtcaaacaggaaaaggctgacacccaggatgaatggacaccagggactgccgtcctgactagtcccgtgctggtgccaggatgtcccagcaaggccgtggacccagggttgccctctgtaaagcaagaaccacctgatccagaggaggataaggaggagaataaggatgactcggcatccaaactggcccctgaagaggaagctggaggggctgggacgcccgtgatcactgagatcttctctctcggcggaacaagattcagagataccgctgtgtggctcccccgttcaaaggacctcaaaaagccgggtgcacggaagcagtag

SEQ ID NO: 230349 - DNA, 1761 bp, synthetic construct
  misc_feature 1..1761: note = Description of Artificial Sequence: Synthetic coding sequence
  source 1..1761: mol_type = other DNA
atggctgaggattggttggattgtccagcacttgggccaggttggaaaaggcgagaagtgtttcgcaaatccggagcaacatgcggacgctcagacacctattaccagtcccccaccggagatcgcattcgctctaaggtggaacttacaagatacctgggcccagcctgcgacctcacgttgttcgatttcaaacaggggatcctgtgctatcccgcaccgaaagcccaccccgtggcggtggccagtaaaaagcggaagaagccatccagacctgccaaaactcgaaaaaggcaagtgggtcctcaaagcggggaagtgaggaaagaagccccaagggacgagacaaaggctgacacagacaccgcccctgctagtttcccagctccgggttgctgcgaaaactgcggtatcagctttagtggggatggaacgcaaagacaaaggctcaagacactgtgcaaagactgcagggcgcagcggatcgcctttaacagagaacagcggatgttcaagcgtgttgggtgtggagagtgtgcggcttgccaagtgacagaggactgcggtgcttgcagcacttgtctgctgcaactgccacacgacgtggcctctggtctcttctgcaagtgtgagcggaggaggtgtttgaggatcgttgaaaggtctagaggatgcggcgtgtgtcgaggatgccagacccaggaggattgcggtcattgccccatctgcctgcgcccacccaggccagggctgagacgccagtggaagtgcgttcagcgcagatgtttgcgaggaaaacacgcaagacggaagggaggctgtgactcaaaaatggcagcgcgtcgcaggcctggggcacagcctctgcccccaccacccccaagtcagtccccagaacctaccgaacctcagccctatactaatcgacgccagaaccggaaatgcggggcttgtgcggcatgtctgcggagaatggactgtggcagatgtgacttctgctgtgacaagccgaagtttggtggatccaaccaaaagaggcagaaatgcaggtggaggcagtgccttcaattcgccatgaagcgccttcttcctagcgtatggtcagagtctgaggatggcgctggaagtccacccccttaccgcaggaggaagcgaccatcgagtgctcgtagacatcacctgggtcctacgcttaagcctacccttgctacacggactgcccagcctgatcatacgcaggccccaacaaagcaggaagctggcggaggttttgtcttgccaccgccaggcacagacctggtctttctcagggaaggggcttcatccccggtgcaagtcccaggcccagtggctgcttctactgaagcactgctccaggcagtggacccagggctgccatctgtgaagcaagagccaccagacccagaagaggataaagaggagaataaggatgattcagcctctaagctcgcacctgaggaggaagcgggaggcgctggaactcctgtgataaccgaaatcttttctctgggcggaacccggttcagggacaccgccgtatggcttccctcactgcaggggagacactccggaagggaggatggatgtaaggtgtgggagacagaggacaccgtagagcctacatcaactagttggaatccacgaggttggcccggaacccatgtttcactatcacctccgcctgcctcaatgatgtgggtgtcttgcaggagaagctggtgtcccagttctcagtcctag

SEQ ID NO: 230350 - DNA, 1653 bp, synthetic construct
  misc_feature 1..1653: note = Description of Artificial Sequence: Synthetic coding sequence
  source 1..1653: mol_type = other DNA
atggcggaagattggctggactgcccagccctcggacccggttggaagcggcgagaggtgtttaggaaaagcggtgccacctgcggccgatccgatacatactaccagtccccgacgggcgaccgcattcggagtaaggtcgaactcacacggtaccttggacctgcttgcgacctcaccctgttcgatttcaagcagggtattctgtgttacccggcaccaaaagcccatcccgtggccgtggccagtaagaagcggaagaaaccttcccgtccagcgaagactcggaaacgccaggttgggccacagagcggtgaggtgaggaaagaagcgcctcgtgacgagaccaaggcagacacggacactgcccctgcttccttccccgctcctgggtgttgcgaaaattgcggcattagcttctcaggagacggtacccaacgccagcgattgaagacattatgtaaggactgccgcgcacagagaattgcattcaatcgagagcagcgtatgtttaagcgagttggttgcggtgagtgcgccgcatgtcaggtgaccgaggattgtggggcttgcagcacctgccttctgcaactcccgcatgatgtcgccagcggattgttctgtaaatgtgaacgcagacgttgcttgagaatcgttgaaagatccagaggatgcggggtttgtcggggatgtcagactcaggaagattgcggccactgtcccatttgtttgagaccacctcgccctggactccgacgccaatggaagtgcgtccagaggaggtgcctccgcggaaagcatgcccgtagaaagggcggttgtgattcgaaaatggcagccagaagacgcccaggcgctcagccactcccaccacctcctcctagtcagtctcccgaacccaccgaaccacacccacgtgcgctcgcaccgtccccaccagccgaattcatctattactgcgtcgatgaggacgagctgcagccatatacgaataggagacagaatcgcaagtgcggagcttgcgccgcttgcttaaggaggatggactgtgggagatgcgacttctgctgcgacaagcccaagttcggcggaagcaaccagaaacgtcagaaatgcagatggaggcaatgtctgcaattcgccatgaagcgactgctgccttctgtgtggtccgagtcagaagacggggctggctctcctccaccatatcgcagaaggaagcgtccatccagcgcacggcgacatcacctcggacccaccctgaagccaacccttgccacccgcacagctcaaccggaccacacacaggcccctacaaagcaggaagcgggagggggattcgtactccctccccctgggactgatctcgtcttcctgcgggagggtgccagctcccccgtccaggttccaggccctgttgccgctagtaccgaggctttgctgcaggcagtggaccccggactgccatctgtgaaacaggagccacctgaccccgaggaagacaaagaagaaaacaaagacgacagcgcaagcaagctggcacccgaagaagaggccggtggagccggaaccccagttgagcctactacacaacctcagtatagtggtaacttcgataacgacctgtacgagatttacctgatcgatatctag

SEQ ID NO: 230351 - DNA, 1650 bp, synthetic construct
  misc_feature 1..1650: note = Description of Artificial Sequence: Synthetic coding sequence
  source 1..1650: mol_type = other DNA
atggctgaagactggctggattgtccagcgcttgggcctggctggaagcgaagggaggtgttccgaaaaagcggcgcaacatgtggacggtctgatacatattaccaatcacccacaggggaccgaatcagaagtaaagtggagctcaccagatatctgggccctgcctgtgatcttacgttattcgacttcaagcagggaatactctgctatcctgcccctaaggcccacccagttgccgtagcctccaaaaaaaggaagaaaccttctcggcctgccaaaaccaggaaaagacaggttggccctcagtccggagaagtgaggaaagaggcgcctagggatgagaccaaggcagatacagacactgcaccagcctcttttcctgctcctgggtgctgcgaaaactgcggcatcagtttttcaggagatggcactcagaggcaaaggctcaagactctctgtaaggactgtcgcgcacaacggatcgcctttaacagggagcagcgtatgttcaaaagagtcggttgcggagaatgtgcagcctgccaggtgaccgaagattgtggggcatgcagcacttgcctcttgcagctgccccacgatgtggcatccggcctattctgtaagtgcgaaagaagacggtgtctccgcattgttgaacggagccgcggttgtggtgtctgtcgcggatgtcagactcaagaggattgcggccactgtcctatttgtttgaggccaccacgccctggcttacgacggcagtggaaatgcgtccagcgacgttgcctgcggggaaagcacgccagacgaaagggcggatgcgacagtaagatggctgctagacgacgcccaggcgctcagccactgcctcctcccccaccatctcagagccctgagcccaccgagccccatcctagagccctagcaccatcccccccagctgagtttatatattattgtgttgacgaggacgaacttaaaaggttactcccatctgtctggtcagaatccgaggacggcgcaggttctccaccaccttaccggaggagaaagcggccaagctccgcccgtaggcatcatctgggtccgactctgaaacccacgcttgccacgcgcactgcccaaccagatcacacacaggctccaacgaaacaggaggcagggggaggcttcgtgttacccccaccaggaacagacctcgtgttcctccgggaaggcgcatctagtccagtgcaggtgcctggacccgttgccgcatcaacagaagcattactccaggaagctcaatgctccggattgtcatgggttgttgccttacctcaggtgaagcaggagaaggccgacacacaggatgagtggactcccggaacagccgtgctgactagccctgttttggtgcccggatgtcccagcaaggccgtcgaccccggactaccgtctgtgaagcaggagccgccagaccctgaagaagataaggaagaaaacaaagacgatagtgctagtaaactcgcacccgaggaggaagctgggggagccggtacccctgtgattacagagatattctctctgggaggaactcggtttagggacaccgctgtgtggctaccgcgtagcaaagacctcaagaaaccaggtgcgagaaagcagtag

SEQ ID NO: 230352 - DNA, 1512 bp, synthetic construct
  misc_feature 1..1512: note = Description of Artificial Sequence: Synthetic coding sequence
  source 1..1512: mol_type = other DNA
atggccgaggattggttagattgccccgctcttggacccggatggaagaggcgagaggtctttaggaaaagtggggcaacatgtggcagatccgacacctattaccagagccctactggcgaccggattcggtccaaggttgagctgacaaggtacctgggcccagcttgtgaccttaccctcttcgacttcaagcaggggatcctttgctacccggcacccaaagcacatccggtcgccgtggcctctaagaagcgcaagaagccaagtagacctgccaaaacgcgtaagaggcaggtagggcctcagagcggcgaggtgcggaaggaggcccctcgcgacgaaaccaaggccgacacggacactgccccagcgtccttccccgctcccggatgttgcgaaaattgtggtatctccttttcgggtgacggaacccaacgtcagcgccttaagacactgtgtaaggactgtagagcccaaaggatcgcctttaatcgagaacagcgcatgtttaaacgcgttgggtgtggcgaatgtgctgcgtgccaggttacggaggactgtggcgcatgctcgacgtgtctcctgcagctgcctcatgatgtagcttccggtctgttctgcaagtgcgagaggagacgctgcctacgcattgtggagcggtccagaggttgcggagtatgccgagggtgccaaacccaggaggattgcgggcactgtcccatttgtctgcgacctcctcgccctggcctcaggaggcagtggaagtgtgtgcaacggaggtgtctgcggggtaagcacgcacgtagaaaaggaggctgcgatagtaagatggctgccaggcgccgtcccggagcccagccactgccccctccccctccttcacagagcccggagcccaccgagccacatccgagggcgctggccccttcacctcccgcagaatttatctattactgtgtggacgaggacgagttgaagagattgctccctagcgtgtggtccgagtctgaagacggcgctggaagcccacccccataccgaagaagaaagaggccctcatcagccagaaggcatcatttagggcctactttaaagcccaccctggcgacaaggacagctcagcccgaccatacacaagcacctacaaaacaggaagcgggtggaggattcgtcttgccgccacctgggaccgatctggtcttcctccgcgagggagctagttccccagttcaggtccctggaccagtcgcagcctctacagaggctctcttacaggccgtggaccctggtctgccatccgtgaagcaggaaccccctgatccagaggaggataaggaagaaaacaaggacgattccgcctctaaactggcccctgaggaggaagccggtggggctggcacccccgtcataacagagatattttctcttggcggaacccgattcagggacacagcagtgtggctgccccgatcaaaggacctgaaaaagcccggtgcccgtaaacagtag

SEQ ID NO: 230353 - DNA, 1671 bp, synthetic construct
  misc_feature 1..1671: note = Description of Artificial Sequence: Synthetic coding sequence
  source 1..1671: mol_type = other DNA
atggccgaagactggctggattgccccgctctggggcctgggtggaaacgccgagaagtgtttcggaaatctggagcaacttgcggccgtagtgacacctactatcaatcccctactggggatcgcatcaggtccaaggtggaactgacgagatatctcggccctgcctgtgatctcactctcttcgacttcaagcaaggcatcctctgctaccctgctccaaaagcccatcccgtggccgtggccagtaaaaaaagaaagaaaccaagtcgaccggcaaagactcgcaagaggcaggttggtcctcagagcggtgaggtgaggaaggaagcaccacgcgatgaaacaaaggcagacacggacactgcgccagcatccttcccggctcctggctgttgcgagaattgcggcatttcgttcagcggggacggtacccagcggcagcggctaaaaacactgtgtaaggactgccgtgcgcagcggatagctttcaatagggagcagcgcatgttcaagtcccggggttgcggggtctgcaggggatgtcagacgcaggaagactgcggccactgcccaatctgcctgaggccaccaagacctgggctaagaagacagtggaaatgcgtgcagcgaagatgcctccgtggcaaacacgcccgaaggaaaggtggctgtgactccaaaatggctgcgcgtcggcgtccaggtgcccaacctctgcccccaccgccaccgagccaatcacccgaacctaccgaaccccacccacgcgctttggcaccatcgccgccagccgagttcatctactactgcgtcgacgaggacgagctccaaccttataccaatcggaggcaaaaccgcaaatgcggagcatgcgccgcttgtcttagacgaatggattgtggacgttgcgatttctgctgcgacaagcctaaatttggcggttctaaccagaagcgacagaaatgcaggtggaggcagtgtctgcagttcgccatgaagcgcctcctacctagcgtgtggagcgaatccgaagatggagccggaagcccaccaccgtaccggcgtcgtaaacggccttcctccgccaggcgacaccacctgggacctactctgaaacccactctcgctaccaggacagcccagccagatcacacgcaggcacctacgaagcaagaggccggtggaggctttgtgctcccaccaccaggtacagaccttgtgtttcttcgggaaggcgcatcatctcctgtacaggtccctggccctgtggcggcttcaacagaggccctcctccaggaagctcagtgctcaggcctctcctgggtcgtggcactgccacaggtgaagcaggagaaggccgatacacaggacgagtggaccccagggaccgctgtgctaaccagccctgtcctagtacccggatgtccttccaaggctgtcgatccaggactgccgtccgtgaaacaagaaccccctgatccagaagaagacaaggaggaaaacaaagacgactctgcatccaaactcgcgccagaagaggaagctggcggagcaggcacgccggtgatcaccgagatcttctccctcggtggcacccgattccgggacacagccgtgtggttgccccgatccaaagacctgaaaaaacccggagcccgtaagcaatag

SEQ ID NO: 230354 - DNA, 1818 bp, synthetic construct
  misc_feature 1..1818: note = Description of Artificial Sequence: Synthetic coding sequence
  source 1..1818: mol_type = other DNA
atggctgaagactggttggactgccctgcgctgggcccagggtggaagcgcagagaggtgtttaggaagtccggcgctacatgtggtagaagtgacacatattatcagagccctaccggagataggattagatcaaaagtggagcttactcggtatcttggccctgcttgtgatctgacactgttcgacttcaagcagggcattttatgttaccctgccccaaaagcccatccagttgctgtagcatcaaaaaagagaaagaaaccatctaggccagccaagacacgcaaaaggcaagttggaccacagagcggggaagttcgcaaagaagcacccagggatgagaccaaggccgatacagatacggctcctgcttccttccctgcccctgggtgttgtgagaactgcggaatctcgttcagcggtgacggtacacagcgccaacggctaaaaaccctgtgcaaagattgtcgggcacagcgaattgcattcaatagggagcagaggatgtttaaacgcgttggatgcggagagtgcgcagcttgccaggtgaccgaagactgcggcgcatgctcaacctgtctcttgcagttaccccatgatgttgcctccggccttttttgcaagtgtgaacgcagacgttgtctgaggattgtggagcgcagccgcggatgcggcgtgtgccggggttgtcagacccaggaggactgcggacattgtcccatctgtctgagacctcctcggccaggtctgaggcggcagtggaagtgtgtccagcgcagatgtctgaggggtaagcatgctcgaagaaaaggcggatgcgacagtaagatggccgctaggcggagacctggggcacagccactgccccctccgcctccaagtcaaagtcctgagccaaccgagccacaccctagggccttggccccttcccccccagcggaattcatttactactgcgttgacgaggatgagttgcagccctatactaatcgcaggcaaaacagaaagtgcggagcctgcgcagcctgtttgcggcgaatggactgtggcagatgcgatttttgttgtgataaacccaagttcggcggatctaatcagaagcgacagaagtgccgctggaggcagtgtctgcaatttgccatgaaaaggctgttgcctagtgtctggtctgagtcagaagacggagctgggagtcctcctccttatcgaaggaggaagaggccttcatcagcaagaaggcaccatctaggcccaaccttaaagcccacactggccacaagaaccgctcaacctgaccatacacaggcgccaaccaagcaggaagctggaggcggatttgtcttaccccctccaggcaccgacctggtctttctacgcgagggtgcatcatccccggtgcaggtgcctggccctgttgccgcttccactgaagcactcctgcaggaggcccagtgtagtgggctttcctgggtggtggcactgccccaggtcaagcaagagaaggccgatactcaggatgagtggacacccggaacagccgtcctgacctcacccgtgctcgttcctggctgcccttctaaggccgtagatcctggcctgcctagcgtgaaacaggaaccgccagatcccgaggaggacaaggaagaaaacaaggatgactcagcctctaagttggcccctgaagaggaggctggtggggcaggaacccctgtgataacagagatctttagtctgggtggaaccagatttcgtgatacagctgtctggctccctcgcagtaaagatctgaagaaacctggggctagaaagcagtag

SEQ ID NO: 230355 - DNA, 1512 bp, synthetic construct
  misc_feature 1..1512: note = Description of Artificial Sequence: Synthetic coding sequence
  source 1..1512: mol_type = other DNA
atggcggaagattggcttgactgccctgcacttgggccagggtggaagagacgcgaagtttttaggaagagcggcgcaacatgcggccgaagcgacacatactatcagagcccaactggagatcgcatccgcagtaaggtggaactgacccgctatctgggccctgcctgtgacctgactctgttcgacttcaagcaggggattctctgttacccagcaccaaaagctcaccccgtggccgtagcctccaagaaacggaaaaagccgagcagaccagccaagactcggaagagacaggtcggcccacagagtggggaagtaaggaaggaagcccctcgggatgagactaaggccgataccgacacagctcctgctagttttcctgctcctgggtgctgcgaaaattgcgggatctctttcagtggagacggcacacagaggcagcggctcaaaacattatgcaaggactgcagggcccagagaattgcttttaacagggagcagcgaatgttcaagcgtgtcggctgtggggaatgtgccgcatgtcaagtgaccgaggactgcggtgcctgtagcacatgtctccttcagctacctcacgacgtggcctccggcttgttttgcaagtgcgaaaggcgcagatgtctgcgcattgtggaaaggtcacgcggatgcggcgtatgtaggggatgccaaacgcaggaggactgcgggcactgcccaatttgcctgcgcccaccccgacctgggctgcgaaggcagtggaaatgtgtgcagagacgttgccttaggggcaagcacgcccgtagaaagggtggctgcgacagcaaaatggccgctaggcggaggcccggtgcccagcccctgcctcctccacctccatcccagtccccggagccgactgagcctcatcctagagcactggccccttcccccccagcggaattcatctactactgtgtagacgaagacgagctcaaaagactgctgcccagcgtgtggtccgagagtgaggatggcgctgggtcaccacctccttaccgcaggcgaaagcgcccaagctcagcacggaggcatcatctgggcccaacgctgaaacccaccttagctaccagaacagctcagcctgaccatacacaggcccctaccaagcaggaggctggcggtgggtttgtgctgccgccaccgggtacggacctggtgtttttacgcgaaggagcctcctcccctgtgcaggtgcccggtcctgtcgctgcgtctaccgaagccctgttacaggccgtggacccaggactgccgagcgtaaagcaggaaccacctgatcctgaggaggacaaagaagaaaacaaggacgattccgcaagcaaactcgcaccagaggaagaggcaggaggcgcaggaacccctgtcattactgaaatattctcactcggagggacccggtttcgggataccgctgtctggctgcctcggagcaaagacttgaaaaagccaggggcacgtaagcagtag

SEQ ID NO: 230356 - DNA, 1650 bp, synthetic construct
  misc_feature 1..1650: note = Description of Artificial Sequence: Synthetic coding sequence
  source 1..1650: mol_type = other DNA
atggctgaggattggctggactgcccagccctcgggcctggatggaaacgcagggaggtgttcaggaaaagcggagcgacgtgtggcagatcagatacctactaccagagcccgactggagatagaatccgaagcaaagtggagctcacccgatatctgggtcctgcatgcgatttgaccctattcgactttaagcaggggatcctctgctaccctgcccctaaggcgcatcctgtcgcagtcgcttctaagaaacggaagaaaccttcacggcctgctaaaacccgcaagcgccaggtgggtccgcagagtggtgaagttagaaaggaagcccctagggatgagacgaaggcagacaccgacaccgctccggctagctttcctgccccaggttgttgtgaaaactgtggtatcagcttttctggcgacggaactcagcggcagcggctgaagaccctttgtaaggactgtagggctcagagaatagcatttaaccgtgagcagaggatgttcaaacgagtaggatgcggagaatgcgccgcatgccaagtgactgaggactgcggggcttgctcaacttgcctgctgcagttgccacacgatgtggcttctggtctcttctgtaagtgcgagcgcagacgttgcctccggatcgtagagcggtctagaggctgcggcgtatgccgcggatgtcagactcaggaagactgcgggcactgtcccatttgcttgcgtccacccaggcctggcctcaggcgacaatggaaatgcgtgcagaggaggtgcctccggggtaaacacgccagaaggaaagggggatgtgatagcaaaatggcagccaggcgcagacccggtgctcagcctctgcctcccccaccacccagccagtcccctgagcctactgagccccatcctagggcacttgcaccatccccacccgctgaatttatatattattgtgtggacgaggacgagctgaagcgtctgctcccgagtgtatggtctgagagtgaggatggggctggttctcctccaccgtacaggcgccgaaagcgacctagcagcgctcggaggcaccatctgggacccactctgaaacctacactcgctacacggaccgctcagcctgaccatacccaggcccctacaaaacaggaggccggagggggattcgtactacctccgccaggtaccgatctcgtgttcctgcgtgagggcgcttcttcacccgtgcaagttccaggccctgtagctgcctctactgaagctctgctgcaagaggcacagtgttccggacttagctgggtcgtggctcttccccaggttaagcaggaaaaagctgacacccaggatgagtggacccccggaacggcggtacttacatccccagtgctcgttcccggttgccctagtaaggctgttgaccctggcctgcccagcgtgaaacaggaaccgccagacccagaggaagataaggaggagaataaagatgattctgcttcaaaattagcccctgaggaggaggctggtggtgctggcactcctgttataacagaaatcttttctctcggcggtactcgcttcagggatacagccgtctggttgcctaggtccaaagacttgaagaagccaggggcaagaaagcagtag

SEQ ID NO: 230357 - DNA, 1818 bp, synthetic construct
  misc_feature 1..1818: note = Description of Artificial Sequence: Synthetic coding sequence
  source 1..1818: mol_type = other DNA
atggctgaggattggctggattgcccagctctgggcccagggtggaagcggagggaggtatttagaaagagcggagccacttgcggaaggtccgacacctactatcagtctcccacaggcgaccgcatacggtctaaggtggagctgacaagatatctgggacccgcatgtgacttgactctatttgatttcaagcaggggatactgtgctacccagctcccaaggctcatccagtcgccgttgcctcaaaaaagagaaagaaaccatcaaggcccgctaaaacacggaaacggcaggttgggccacagtcaggggaagtgcgaaaggaggctccaagagacgagactaaggctgatacagatacggcccctgcctcctttccagcgccagggtgctgcgagaactgcggcatatccttcagcggagacggcacccaaagacagagactgaaaaccttgtgtaaggattgccgtgcccagaggattgcttttaacagggaacagcgtatgtttaaacgggtgggttgtggagagtgtgctgcctgtcaggtcactgaggattgcggcgcttgttcgacctgccttctacagctgccacatgacgttgcttcaggactgttttgcaaatgcgaaaggcggcgatgtctgaggatagtcgaaagatcccgcggatgcggcgtctgcagaggctgtcagacacaggaggactgcggacactgcccgatttgtcttcgaccgcctaggcccggtctgagaaggcagtggaagtgtgtccagaggaggtgtctgaggggtaagcatgcaagaaggaaaggaggctgtgactccaagatggctgctcgcagaaggcccggtgctcagcctctaccacccccaccccctagtcagtctcctgagcctactgagccacaccccagagcccttgcccctagccctccagccgaattcatctattactgcgtcgatgaggacgaactgcagccatacacgaatcggaggcaaaataggaagtgtggagcgtgtgcagcttgtttgcgcagaatggactgcggacggtgcgacttttgctgcgataagcctaaattcggcggtagtaaccagaagcggcagaagtgtcgttggagacagtgtctgcagttcgccatgaaacgattgttgccgagtgtatggtccgagtccgaggatggtgccggttctccacccccttacagacgcagaaaaaggcccagctctgctagaaggcatcatctgggtcctactctgaagcctacactcgcgacccgaaccgcacaaccggaccacactcaggcgcctaccaagcaggaggcagggggaggattcgtactgcctcccccagggacggatctcgtattcctccgagaaggggcttcaagcccagttcaggtcccgggtcctgtcgcagctagcactgaagcactgctccaggaggctcagtgttcagggctaagctgggtggtggctcttcctcaggtaaaacaggagaaagccgacacccaggatgagtggacacccggaacagccgtgctcacctctccagtgttagtgcctggctgtcccagcaaggctgtcgatcctggtcttccaagtgtgaagcaggaaccaccggaccccgaggaagataaagaagagaacaaggatgacagcgcttccaaactagcacctgaagaagaggctggtggggcaggaacaccggttatcactgaaatcttttcactagggggaaccagattcagagatacagcagtgtggctgccacgttccaaggatctcaaaaagcccggagccaggaagcagtag

SEQ ID NO: 230358 - DNA, 1971 bp, synthetic construct
  misc_feature 1..1971: note = Description of Artificial Sequence: Synthetic coding sequence
  source 1..1971: mol_type = other DNA
atggggggtttccgcctgcgcaccggtaggaacgccgctctcaatagcgatcgcctccttctcctacctgttgcctccatggctgaggactggctggactgtcctgcgctgggtcctggatggaaacgacgggaagtgtttaggaaatccggggcaacgtgcgggagaagcgacacatactaccagtcacctaccggagaccgcattcgcagcaaggtcgagctgactcgctatctgggccctgcttgcgacctaactttgtttgacttcaaacagggcattctgtgctatccagctccgaaggctcatccagtcgccgtggcctcaaaaaaacggaagaaacccagccgtcctgcgaaaactcggaaaagacaagtgggaccccagtcaggggaggtgcgcaaagaggccccaagggacgaaacgaaagctgatactgataccgctcctgcaagctttcctgcgccaggttgctgcgagaactgcggcatcagctttagtggcgacgggacacagagacaacgattgaagaccctctgtaaagactgtcgagctcagaggatcgcgtttaatcgggaacagcgcatgttcaaacgtgtgggatgcggtgaatgcgctgcatgccaggttacggaggattgcggcgcttgtagtacctgcctcctgcagctcccccacgacgttgcaagcgggcttttttgtaaatgcgaacgcagacggtgcctgcgcatcgttgaacgttccagaggatgcggagtctgccgagggtgccagactcaggaggattgtgggcattgtccgatttgcctgagaccccctcgccctggcctgcgcagacagtggaaatgtgttcagaggcgatgcctcagacacctggcgcataggctccggagaagacatcagaggtgtcagcgtcggacgcccttggccgtggcccctccaactggtaaacatgcgaggcgcaagggcggatgcgactccaaaatggcagctcgccgtaggccaggcgcacagccactcccccctcctccaccaagtcagagtccagagccgacagaaccccatccgagagctcttgctcccagtcccccagcagaattcatttactactgcgtagatgaagacgaactccaaccttacaccaatagaaggcagaataggaagtgtggtgcttgtgccgcttgtctgaggagaatggattgcggccgatgcgacttttgctgcgacaaacctaagttcggcggatctaatcagaaaaggcagaagtgccgatggagacagtgccttcagtttgccatgaaacgcttgctgccatccgtctggtccgagagcgaagatggtgctggctcgcccccaccctacaggaggagaaagagaccctccagcgcacgtcggcaccacctcggccctacactgaagcctactttggccacaaggaccgcacagcccgaccacacccaagcccctaccaaacaggaagcaggtggagggttcgtgcttccccctcccggtaccgatttggtgtttctgagagaaggcgcatcgagcccagttcaggtccccggtccagtagcagctagcacggaggccctcttacaggaagcccagtgcagtggactatcttgggtagtcgctttgccgcaagtgaagcaggaaaaagccgatacgcaagatgaatggacgccaggcactgccgtccttacttcccctgtactcgtgcctggctgccccagtaaggccgtggacccgggattaccctcagtgaaacaagaaccacctgatccagaagaggataaggaggaaaataaggacgattccgcatctaagcttgccccagaggaagaagccggtggggctggcactcccgtaataacagagattttctctcttggcggtactagattccgggatactgccgtctggttgccaagatccaaggatctgaaaaaacctggcgctaggaaacagtag

SEQ ID NO: 230359 - DNA, 1611 bp, synthetic construct
  misc_feature 1..1611: note = Description of Artificial Sequence: Synthetic coding sequence
  source 1..1611: mol_type = other DNA
atggccgaggactggcttgattgcccagcacttggacccggttggaagcggagggaagtctttcgtaaatccggcgcaacgtgcggacggtcagatacgtactatcagagccctacaggcgacagaatccggtctaaagtggagctaaccaggtatctgggacccgcttgtgacctcaccctgttcgactttaaacagggcattctgtgttacccagccccaaaggctcaccccgtggccgtggccagtaaaaagcgcaaaaagccatcccgtcccgctaaaacacggaaacgtcaggtcggacctcagagtggggaggtcagaaaggaggccccacgcgatgagacaaaagcagatactgatactgcccctgccagttttcccgcacccggttgttgcgaaaactgtggcattagcttctccggagacgggacccaacgtcaaagactgaagacactatgcaaagactgcagagcccagcggatcgcttttaatagggaacagcggatgttcaagcgagtgggctgtggcgagtgcgccgcttgtcaggtgaccgaagactgcggagcttgctccacttgtttactgcaactcccccacgacgttgcctcaggattgttctgcaaatgtgaacggaggcgctgcctccgaatagtggagcgctctagggggtgcggagtgtgcagaggatgccagacgcaggaggactgtggccattgtccaatttgcttacgcccaccgaggcccggacttcggaggcagtggaaatgtgttcaaaggaggtgcctgagaggaaagcacgccagaagaaagggagggtgtgacagcaagatggccgctcgtcgcaggcctggagcccagccactacctccgcctcccccttctcagtctcctgagcccacagagccccagccctacaccaaccggcgacagaacagaaagtgcggagcttgtgccgcatgtctcaggcgcatggactgtggccgttgtgacttttgttgtgataaacccaagttcggcggtagcaatcagaagcggcagaagtgcagatggcgtcaatgcctgcaattcgccatgaaacgcttactcccctcagtgtggagcgagtccgaggatggggctggaagcccccctccttaccggaggcgcaaacgcccttccagtgcacgccgacaccaccttgggccaacacttaagccaacacttgccacgcgaaccgcccagcccgaccacactcaagcgcctaccaagcaggaggcaggagggggtttcgttctgccgccacctgggacagacctcgtgttcctgagagaaggcgcaagcagtcctgtacaggtacctgggcctgtggccgcttccaccgaagcattgctgcaggctgtggaccccggtctccctagcgtgaaacaagagcctccggatcctgaagaggataaagaagaaaacaaagacgactccgcgtctaagttagcccctgaggaagaggccggaggtgccggtacacccgtcatcactgagattttctcactcggtggcaccagatttagggacactgcagtatggctgccgagatccaaagacctgaaaaagcccggtgcacggaaacaatag

SEQ ID NO: 230360 - DNA, 1893 bp, synthetic construct
  misc_feature 1..1893: note = Description of Artificial Sequence: Synthetic coding sequence
  source 1..1893: mol_type = other DNA
atggccgaggactggcttgattgtcccgcactgggcccagggtggaaacgaagagaggtgtttagaaaatccggggctacatgcggtcgttctgatacctactaccaaagccccactggcgatcgaatcagatcgaaggtggagttgaccaggtacctgggaccagcatgtgacctcaccctcttcgattttaagcagggaatcctgtgctatccagctccaaaagcacaccccgtcgccgttgcctccaagaagagaaagaaaccatctagacctgcaaagacgaggaaacgccaggtcggacctcagtcaggagaagtgcggaaagaggcaccccgtgatgaaacaaaagccgatacggatacagctcctgcctcttttcctgcccctggctgttgcgagaattgcgggatatctttctctggggacgggacccaacggcagcgtctaaagacattgtgtaaagattgtcgcgctcagagaattgcttttaatcgcgagcaacggatgttcaagcgagtggggtgcggagaatgtgcagcttgtcaggttaccgaagactgtggcgcttgctctacatgccttctccagctcccacacgatgtggcgtctggtttgttttgcaagtgcgagcgaaggagatgtttgcgaattgtggagcgtagccgcggatgcggcgtctgccggggatgtcagacacaggaagactgcggacactgcccaatctgcctccggcctccgagacccggactccgtaggcagtggaaatgcgttcaaaggcgttgccttaggcacctggcacacaggctacggaggaggcaccaacggtgtcaaaggcggacacctctggcagtcgccccaccaacagggaaacatgctcgccgtaaaggaggctgcgattcgaaaatggccgctaggagacggccaggagcccaaccgcttccgccacccccaccgagtcagtcccccgaaccaacggaaccccatcccagggccttggcccctagtcccccagcagaattcatctactactgcgtggatgaagacgagctccagccctatactaacaggcggcagaacaggaagtgcggggcatgcgctgcatgccttcgcaggatggattgcggtcgttgcgacttttgttgtgacaaaccaaagtttgggggtagtaatcaaaagagacaaaagtgccgatggaggcagtgtttgcagttcgccatgaaacgactgctgccatccgtgtggtctgagtccgaagacggagcgggatctccaccaccttacagaagacggaaacgccctagttccgcccgaaggcatcacctcggtcccaccctgaagcccaccttggccaccaggactgcacagcctgaccatacccaggcacccactaaacaggaagcgggaggaggctttgtgctgcccccacccggtacagacttagtgtttttgagggagggcgctagctctccagttcaggtcccagggcctgtggcagctagcactgaggcactgcttcaggaggcacagtgctcaggcctgtcctgggttgtagcccttcctcaggtcaagcaggagaaggctgatactcaagacgagtggacaccgggaactgccgtgttaacctcccccgtactggtgcctggctgcccctcaaaagctgtggatccaggattgccttccgtcaagcaggagccgcctgacccggaggaagacaaggaagaaaataaagatgacagtgcatcaaagctcgctcccgaagaggaagccggaggagcgggaacgcccgtgataacagagatcttctccttaggaggtacccgtttcagggatacagccgtgtggcttccaaggtcgaaagacttaaaaaaaccaggtgccagaaagcaatag

SEQ ID NO: 230361 - DNA, 1704 bp, synthetic construct
  misc_feature 1..1704: note = Description of Artificial Sequence: Synthetic coding sequence
  source 1..1704: mol_type = other DNA
atggccgaggattggctagactgccctgcccttggccctggatggaaaagaagggaggtgtttcggaagagcggcgcaacatgcggaaggtctgacacttattatcagagtccgactggcgaccgaattcgatctaaggtggaactgacacgctacctcgggcctgcttgtgaccttacacttttcgacttcaaacaaggcattctctgctatcctgcacctaaggctcaccccgttgcagtagcgagcaagaagcgcaagaaaccatcgcgcccagccaagacaagaaaacgccaagttgggcctcagtcaggcgaggtgagaaaagaagcccctagagacgagactaaggcggacaccgacaccgcgcctgcatcattccccgcaccgggttgctgtgagaactgtggcatctctttctctggagacgggacacagcgccagcggctcaagacactgtgtaaagattgccgggcacagagaattgccttcaacagagagcagaggatgttcaagtcaaggggctgtggtgtgtgtagggggtgccaaacacaggaggattgcggtcattgccctatctgtctgagacctccgcgacctggccttcggcgacagtggaagtgcgtgcagcgtaggtgcctccggggaaagcatgctcgaaggaagggaggatgcgatagtaaaatggcggcacgacgacggcctggggctcagccactcccccctccgccaccaagccagtcacctgagccaaccgaaccacacccacgcgcactcgctccgagcccaccagccgaatttatctactactgcgttgacgaggatgagctaccttatacaaatcggcgtcagaataggaagtgcggtgcttgcgctgcttgtctgagacggatggactgtggacgctgcgatttttgttgcgataagcccaagttcgggggttctaaccagaaacgccagaagtgtagatggagacagtgtctccagttcgcaatgaaacgactgttacctagcgtctggtccgaatctgaagatggcgctggctcgcccccaccttacaggaggcgaaagaggccctctagcgcaaggcggcaccacctcgggccaactctcaaaccaacactcgctacccggacagcccaacccgatcatactcaggctccgacgaagcaggaggctggtgggggattcgtacttccccctccgggtacggatcttgtctttctgcgggagggggctagctcacctgtccaagtacccggtccggttgctgcttccacggaggcactgttgcaggaagctcagtgcagtggattgagctgggtggtggctttacctcaggttaaacaggaaaaggctgatactcaggatgaatggacccctggtaccgccgtgctgacatcgcccgtgctggtgccgggttgcccgtcaaaggccgtggatcccggtctacccagcgtgaagcaagaacccccagatccggaagaggacaaagaagagaacaaggacgacagtgcctcgaaactggctccagaagaggaagcgggaggagcaggaactccggtgattaccgagattttctctctgggtggaacacgctttcgtgacacggctgtgtggcttccgcgttattaccatttagccctagactggaagtgcaattgtggctatcatctctgctgtagatccgttcttgttccttag

SEQ ID NO: 230362 - DNA, 1608 bp, synthetic construct
  misc_feature 1..1608: note = Description of Artificial Sequence: Synthetic coding sequence
  source 1..1608: mol_type = other DNA
atggccgaggattggttagactgtcccgctctggggcctggttggaaacgcagggaagtgtttcgcaaatccggggcaacctgcggaagatcagatacctactaccagagccccaccggagaccgcattagatcaaaggtggaacttacacgctacttgggaccagcctgcgacttgacactcttcgactttaagcaaggtatcctgtgctatccagctcctaaggcccatccagtggcagtggccagcaaaaagcggaagaagccttcccggccagccaagaccaggaaaaggcaggtagggcctcagtctggagaggtcagaaaggaagcgccacgggatgagaccaaggctgatacagataccgcgccagccagcttccctgctcccggttgctgcgagaactgtgggatcagtttcagcggggatgggactcaaagacaaagactcaaaactctgtgcaaggactgtagggcacagcggatcgcatttaatcgggaacagcgaatgttcaaacgagtgggatgcggcgagtgcgcggcatgtcaggtgactgaagactgcggcgcttgttctacctgccttctccagcttccccacgacgtcgctagcgggctgttttgtaagtgcgagaggagaagatgtctcaggatagtcgagcgaagcaggggatgcggggtgtgtcggggttgccaaacacaagaagattgcgggcattgccccatctgccttcgccctccaaggcccggattgaggaggcagtggaaatgcgtgcaacggagatgcctgcgcggaaagcacgcccgacgcaagggaggctgtgattccaagatggctgcacgtcgaaggccaggggctcaacctctacccccaccacccccttcgcagtcccctgagcccacagaaccacatcccagggccctggccccttcgccacctgcagagttcatctactactgtgttgatgaggacgaacttaaaagactgctccccagcgtctggagtgaaagcgaggatggcgctggttcacctcccccttataggcggaggaaaagaccctcttccgccaggcgccatcatctgggtcctacgctgaagccaaccctggctacgagaacagcccagcctgatcacacgcaggctcccacaaagcaggaggccggaggcggatttgtgcttccccctcccggaaccgacctggtattcctcagagaaggagcttcctcccccgtccaggtacccggaccagtcgctgcctctaccgaggcactcctgcaggcagttgatcctggtctccctagcgttaagcaggaacctcctgatcctgaggaagataaggaagagaacaaagatgatagcgcctccaagctcgccccagaagaggaggcagggggagcgggtaccccagtcataaccgagatcttttctctcgggggaacccggttcagagacaccgccgtgtggttgcctcgggctggcactcgagaaggcaaaatggacgtgaagtgtgggaggccacggactcagtggtccccaagagctagggctgggacacatgaggacggacttgagccaatgtcggtcagccaccatctacaactgcgatag

SEQ ID NO: 230363 - DNA, 1968 bp, synthetic construct
  misc_feature 1..1968: note = Description of Artificial Sequence: Synthetic coding sequence
  source 1..1968: mol_type = other DNA
atggctgaggattggcttgactgcccagccctcggtccaggttggaagcggagagaggtttttcgcaagagcggcgctacatgtggcaggtccgacacctattaccaaagcccgacaggggaccgaattcgcagtaaagtagagttgacaagatacctgggacccgcttgtgatctcaccctgttcgacttcaagcaaggcatactgtgttaccctgcccctaaggcccatccagtggctgttgccagcaaaaagagaaagaagccgtcccgtcccgcaaagacacgaaaaaggcaagtagggcctcagtctggtgaagttcgcaaagaagcgccacgcgacgagactaaagcggatactgacactgcccctgcgtcgtttcctgcccctggttgctgcgaaaactgtggaatctcctttagtggcgacggaactcagcgccaacgtctgaagacgctctgtaaggattgccgagcccagcgtatcgcattcaaccgggaacagcgcatgttcaagcgagtagggtgtggcgagtgcgccgcttgtcaggtgactgaagactgcggcgcttgtagcacttgtctactccagttgccccacgacgtggccagcggactgttctgtaagtgtgaacgcaggcgatgcctcaggattgtagaaaggagtaggggttgcggtgtctgtagaggttgtcaaactcaagaagactgcggccattgcccaatctgtctcagaccccctagacccggtctaaggcgacagtggaaatgtgtgcagagacggtgcttgcgtggcaaacacgctcggcgaaagggtggatgcgatagcaagatggccgctcgcaggcggccaggggctcagccccttccccctcccccaccctcccagagcccagaaccaactgagccccatcctcgtgctttggccccatctcctcctgctgagtttatctattattgtgttgacgaagacgagctgcagccctacactaataggcggcagaaccgtaaatgtggagcatgcgccgcatgtctgcggcgtatggactgcggacgttgtgatttttgctgcgacaaaccgaaatttggtggcagcaaccaaaagcgccagaaatgccgctggcgacagtgcctgcaatttgcgatgaaacggctactgcccagcgtgtggtctgagagcgaagatggcgcagggagcccaccaccctaccgtagaagaaagaggccctcgtctgctagacgtcaccacctgggacccacactgaaaccaacccttgcgaccagaacggctcagcctgaccatacgcaggcaccaaccaagcaggaggcagggggagggttcgttctgccaccaccaggcacagacctggtattcctgagggagggagcatcatctccagtgcaagtacccggacctgtggctgccagcactgaggccctgctccaggaggcccagtgcagcggactgtcatgggtcgtagccctcccgcaggtgaagcaagagaaggccgacacccaggacgaatggacacccggtacagcggtactgacctcccccgttttggtgcctgggtgcccgtctaaagccgtggaccccggacttccttccgtaaaacaggaacctccagatcctgaggaagataaggaggagaacaaggacgatagcgcgtccaagttagccccagaggaggaggccggaggagccggaactccagtgattactgaaattttctccctaggcggaaccagattcagggacaccgctgtctggcttcccagcctgcagggacgccacagcggtagagaagatggatgtaaggtgtgggaaactgaggataccgtggagccaacttctacatcatggaacccacgcggatggccaggtactcatgtttctctgtcccccccacccgcatcaatgatgtgggtgtcctgccggcgatcatggtgtcctagctctcagtcatag

SEQ ID NO: 230364 - DNA, 1236 bp, synthetic construct
  misc_feature 1..1236: note = Description of Artificial Sequence: Synthetic coding sequence
  source 1..1236: mol_type = other DNA
atgcgcgcacatcctgggggaggcaggtgctgcccagagcaggaggaaggagagtccgcagcaggcggttccggggctggcggtgacagtgctatagagcagggagggcagggaagtgccctagctccgtcccctgtttcaggggtaaggcgggagggagcacgaggcggtgggcgaggacggggacgatggaagcaggcaggtagagggggaggcgtgtgcgggaggggacgtgggagaggtcgcggacgcggacggggaagaggcaggggcagaggccgagggagacctccttcggggggaagtggattaggaggtgacggtggaggctgcggagggggaggatcgggagggggtggtgctccacgtagggagcctgtccctttccccagcggatcagcaggtccgggaccccgtggtcctagagccacagagtcagggaagcggatggattgtcctgcgctgcccccagggtggaaaaaggaggaggtcattagaaagtcaggactcagtgctggcaaatcagacgtctactatttctcaccttctgggaagaagttcagatcgaagccgcagctggccaggtacttgggcaacaccgtcgatttatcatcattcgatttcagaactgggaaaatgatgccgtcgaaactccaaaagaacaagcagcgcctccgaaatgaccctcttaatcagaacaagggcaaacctgacctcaatacgacactgccgattcgccagactgctagtattttcaaacaacccgttacaaaagtcacaaatcatcctagcaacaaagtgaagtcagatcctcagaggatgaacgagcagcctaggcaattgttctgggaaaaaagactgcagggactgagtgcctccgacgtcacagagcaaattataaagactatggagttacctaaggggctgcaaggtgttggacctggatccaacgacgagaccctccttagcgccgtggcatcagctctacacacgagttcagctccaatcaccggacaggtgagcgccgctgttgagaaaaacccggcagtttggctgaataccagtcaaccactatgcaaggcatttatcgtgactgacgaggacatcaggaaacaggaagaacgcgttcaacaggtaagaaaaaagctagaagaggctctcatggctgatatacttagtcgggcagccgacaccgaggaaatggacatcgagatggactctggcgatgaagcttag

SEQ ID NO: 230365 - DNA, 909 bp, synthetic construct
  misc_feature 1..909: note = Description of Artificial Sequence: Synthetic coding sequence
  source 1..909: mol_type = other DNA
atgagggcccaccccggaggcggaagatgctgccctgagcaggaggaaggtgagagtgcagccggtggttcgggcgctggcggagatagcgcaatcgagcaggggggacagggcagcgccctggctccgtcaccagtttcgggtgttaggagagagggcgctagagggggagggcgagggagggggcgatggaagcaagctgggagaggaggcggtgtctgtggcagagggcgaggacggggtcggggacgcggtcggggaaggggccgagggcgaggcagaggccgtcctccttccgggggttccggcctggggggagacggcggtggctgcggcggaggtggtagtgggggaggcggtgctcccaggagagagccggtgcccttcccctccggctcagcaggcccaggaccccgaggccctcgagctacagaatcaggcaagcgtatggactgtccggctttgcctcccggatggaagaaagaggaagtcatcaggaaatctggactcagcgccggaaaaagcgatgtgtattatttcagcccatctggaaagaaattccgtagtaaaccacagctggccagataccttggtaacaccgtggatctgtctagtttcgacttccggaccgggaagatgatgccctcaaagctgcagaagaataagcagcggctgcgcaacgatcctttgaaccagaacaaactacgctggaacacccataggcccgcaccctggcacgccctgtcaaggttgtgtctgctgattcgatgcctgctgtgcttggaatgtgcctaccctctgccactccatttggtgaacagctacagctccaaaacacaactgcactgtctgcatctttgggaggcatgtcccgcatactctagacagaaccagtcgttcccaccatag

SEQ ID NO: 230366 - DNA, 909 bp, synthetic construct
  misc_feature 1..909: note = Description of Artificial Sequence: Synthetic coding sequence
  source 1..909: mol_type = other DNA
atgcgtgctcaccctgggggaggcaggtgctgtcctgagcaggaggagggagagtccgccgcagggggttctggggctggcggtgattccgcaatcgagcaaggcggacagggctctgccttggctcctagccccgtttctggagtaaggagggagggcgcaaggggcggaggtagggggaggggccgatggaagcaggcgggaagaggtggcggtgtgtgcggaaggggccgaggccgtggtcggggacggggtcgcggacgcggtagagggagaggcaggggcagacccccatctggaggcagcggccttgggggagacggtggaggctgcggtggaggaggcagcggcggagggggtgcgccaagacgggaacccgttccattcccaagcggaagtgctggccctggccctaggggccctagggctacggaaagcgggaaacgcatggattgccccgcactcccacctgggtggaagaaagaggaagtcatcagaaaaagcggcttgagcgcgggaaagtccgatgtatactattttagccctagcggtaagaagttccggagtaagccccagcttgcacggtacctgggtaacaccgtcgacctgagttcgtttgatttccgcacagggaaaatgatgccaagcaagctccaaaagaataaacagaggctgaggaatgacccactaaaccagaacaaactgaggtggaacactcatcgccctgccccttggcatgccctcagccgcctgtgtctactaattagatgcctcctctgcctggaatgcgcgtatccactgccccttcatttagtgaactcctactcttccaagacacagttgcactgtctgcacctctgggaagcttgtcctgcctattcccggcagaatcaatctttccccccatag

SEQ ID NO: 230367 - DNA, 876 bp, synthetic construct
  misc_feature 1..876: note = Description of Artificial Sequence: Synthetic coding sequence
  source 1..876: mol_type = other DNA
atggagcgaaaaaggtgggaatgtcctgcgctgccccaggggtgggagagggaagaagttcccaggcgttcaggcttgtctgccggtcatcgcgacgtgttctattactccccttctggcaagaaatttagaagcaagccccagctcgcacggtatcttgggggaagtatggatctgtcgacatttgattttcgaacaggcaagatgctgatgtccaaaatgaataagagtcgccagcgtgtgcgctatgacagctcaaaccaggtgaagggcaagcctgacctcaacactgccctccctgtaagacagactgcttctatctttaagcaacccgtgacaaagattaccaaccatccgtctaataaggtcaaatcagatccacagaaggctgtcgaccaaccacgccagcttttctgggaaaagaaactgagcgggctgaatgctttcgacatcgctgaggaattggtcaagacaatggatctaccaaaggggctgcagggcgtgggacctggctgcactgatgagacgttactgtccgcgattgccagcgcactccataccagtacaatgccgatcacaggacaactgtccgctgctgtggaaaaaaaccctggagtctggttgaacaccactcaacccctctgtaaagcttttatggtgacagatgaggacatccgcaagcaggaagaattggtccagcaagtgagaaagaggctagaagaggcactgatggctgatatgctggcccacgtcgaggaacttgcaagggacggagaggcacccctggataaggcttgtgctgaagatgatgatgaggaggacgaggaagaggaagaggaggaacccgatccggacccagagatggagcacgtttag

SEQ ID NO: 230368 - DNA, 780 bp, synthetic construct
  misc_feature 1..780: note = Description of Artificial Sequence: Synthetic coding sequence
  source 1..780: mol_type = other DNA
atggaacgaaagagtccaagcgggaagaagtttcggagcaaaccgcagctggcgcgttatctgggcggatccatggacctctccacctttgactttaggactggtaaaatgctaatgagtaaaatgaataaaagtagacagcgagtccgatacgactcgtccaatcaggtgaagggaaagccagatttaaacacagccctacccgttaggcagaccgcctccatcttcaaacagccggtgacgaagatcactaaccaccccagcaacaaggtgaaaagcgacccgcaaaaagccgtggaccagccgcgacagcttttctgggagaagaagctctccggtttaaacgccttcgatatcgccgaagagctggttaaaaccatggacctgccgaagggcctccagggggtgggcccaggttgtaccgacgagacgttactgtccgccatcgcctcagcactgcatacttccactatgcccattacagggcaattgtccgccgctgtcgaaaagaatcccggagtctggcttaatactacacagccgctgtgcaaagcctttatggttactgacgaagatatcagaaaacaagaagagctagtccaacaggtgcggaagcggttggaggaggccctaatggccgatatgctggctcatgtagaggaattggctagagatggagaagccccactggataaggcttgcgccgaagacgacgatgaggaagacgaagaggaagaagaagaggaacctgaccctgatccagaaatggaacacgtgtag

SEQ ID NO: 230369 - DNA, 4485 bp, synthetic construct
  misc_feature 1..4485: note = Description of Artificial Sequence: Synthetic coding sequence
  source 1..4485: mol_type = other DNA
atgaacggcggaaaagagtgcgatggaggagataaagaagggggactccctgcgattcaggtgcccgtgggctggcagcgacgagttgaccagaacggtgtgctttacgttagtccttccggtagcctgctttcctgtctggaacaggttaagacttacctgctgacagacggtacgtgtaagtgcgggctggaatgcccattaatcctgccaaaagtttttaactttgacccaggcgctgccgtgaaacagcgcacagcggaggacgtcaaggctgacgaggatgtaactaaactgtgtatacacaagaggaagatcattgcagttgccaccttgcacaagtcaatggaggcgcctcacccctctctagtcctcacatccccgggaggcggaacaaatgctacccctgtggtcccctcccgggctgctacacccagatcagtccgaaacaagagccatgaagggattactaattcggttatgccggaatgtaagaatccatttaagttgatgattgggtcatccaatgctatgggcagactgtatgttcaagaactgcctggctctcagcagcaggaactgcatccagtgtatcccaggcaacgccttgggagttccgagcacggacagaaatctcccttccggggtagtcatggcggattgccctcaccagctagctcggggtcccagatatacggggacggatccattagccctcggacagacccactgggttcccctgacgtttttacacgcagcaatccaggattccatggggctcctaatagtagtcccatacaccttaatcggacacccctgtcgccaccatctgtcatgttgcacggctctccggtccagtcatcatgtgctatggctggcaggacaaatatccctcttagccctaccctgacaactaagtctcccgtgatgaaaaagcctatgtgtaacttctccacaaatatggaaattccccgagccatgtttcaccataaaccgccacaggggccaccgccacctccaccaccaagctgcgccttacagaagaaaccgctgacgtccgaaaaagaccctctcgggattcttgatcccatcccaagtaaacccgttaatcagaaccctgtaataataaaccctacctctttccacagcaacgtgcacagccaggtgcctatgatgaacgtctcgatgcctcccgctgttgtgcctttaccctcaaacttacctctgcccacagtgaagcccggacacatgaaccacggaagccatgtgcagcgcgtgcagcacagtgcatccacctctctttcaccgtcccctgtgacatcacccgtgcatatgatgggaactggaatcggtcggattgaggcatctccacagcgcagtagatcctctagcacgtcttcggaccatggtaactttatgatgccacctgtcggcccacaggctacctccagtgggatcaaagtgcccccaagaagtcccagatctactatcggaagccccaggcctagtatgccttcatccccatccactaagagcgatgggcatcatcagtacaaagatataccaaaccccctaatcgctggaatcagtaatgtccttaacacgccctcctctgcagctttcccaaccgcatccgccggttcctcatccgtgaaaagtcagccaggccttctaggtatgcctctaaaccaaattctgaaccagcacaatgcagctagcttccccgcttcctctctgctgtccgccgctgctaaggcacagttagcaaatcagaacaagctggccggtaacaactcttctagcagtagtaatagtggcgcagtcgctggctctggcaataccgaaggccactcgactctgaatactatgtttcctcccactgcaaacatgctgctccccacgggggaaggccagagtggcagggccgcattgcgggataagctcatgagtcagcaaaaagacgcgttgcgcaagagaaagcagccacctactacagttctctctttgctgagacaaagccaaatggacagctccgcagtccctaagccgggacctgatttgttacggaagcaggggcagggcagcttccctattagttcgatgtcccagctgctgcagtccatgagttgccagtccagccatctgtctagcaattcgacacctgggtgtggcgcttcgaataccgccctgccttgttctgcaaaccagcttcacttcactgaccccagcatgaacagctccgtgttgcaaaacatccccttgcgcggagaggccgtgcactgtcataacgctaacactaactttgtgcacagcaattcacctgtcccaaaccatcaccttgccggtctgatcaaccagatccaagcatcaggcaactgcggcatgctgagtcagagcggcatggctctgggaaactctctccaccctaacccccctcaatcaaggattagcactagctcaactccggtcattccaaattccatagtgagcagttacaatcagaccagtagcgaagcaggcggttctgggccttcaagttccatcgcaatcgccggtaccaaccatcccgcaatcacgaagaccacctccgtgttgcaggacggggtgatcgttaccaccgcggctggaaacccactgcaaagccagctccctattggaagtgacttcccatttgtcggtcaagaacacgcactgcacttccctagcaacagtacttctaacaaccacctgccacatccactgaacccttcactcctgtccagcctgccaatatccttaccagtcaatcagcagcatctactgaatcaaaatctgttgaatattctgcaaccgtctgcaggcgaaggagacatgagtagtataaacaacaccctatctaatcatcagcttacacatctccagtctctgcttaacaataatcagatgttccctccaaaccagcagcaacagcagctgctccagggttatcaaaatctgcaggcgtttcaaggccagtctaccattccatgcccagcaaacaacaacccaatggcttgcctcttccaaaacttccaggtacggatgcaggaagatgccgctctccttaataaaagaatctccacacaaccaggcctaaccgctctccccgaaaacccaaacactactctgccacccttccaggacactccctgtgaattacagccacggattgatcccagtcttggccagcaagtgaaggacggtctcgtcgtgggcggaccaggcgacgcatctgtggatgcgatctataaagctgtggtggatgccgctagtaaggggatgcaggtggtgattaccaccgcagtaaactccactacccagatcagtcctatccccgcactctccgcgatgtctgcattcaccgctagtatcggagacccactcaatttgtccagcgccgtgtctgccgtcattcatgggagaaacatgggaggggttgaccatgacggtcggctgagaaattcacgtggcgctaggctccctaaaaatctggatcatgggaagaatgtgaacgaaggtgatggctttgaatatttcaagagcgcctcctgccacacctctaaaaaacaatgggacggagagcagagtcccagaggagaaagaaacagatggaaatatgaggagtttctagatcacccaggccacatacactcaagcccctgccacgaacgccctaataatgtgtccaccctgccttttttgcccggagagcagcacccaattctgctgcccccacgcaattgccccggagacaaaatactggaagagaacttcaggtacaataactacaagcgcactatgatgagctttaaagagcgtctggaaaacactgtcgagagatgtgctcacatcaatggcaataggccccgacagtctagagggttcggggagctcctgagtacggcaaaacaggatttggtcctcgaggaacagagcccatccagtagtaacagcctggagaactctctggtcaaggactacatacattacaatggagatttcaacgccaagtcagtcaacggctgcgtgccttctccctctgatgcaaaatcgatcagttcggaggacgacctaagaaaccccgatagccccagcagtaacgagttaattcactataggcctcgaactttcaacgtgggggatctggtgtggggtcaaatcaaggggctcacctcctggcccggaaaactagtgagggaggacgatgtgcacaacagctgccagcagtccccagaggaagggaaagtggaacccgagaaattgaaaacccttactgaaggtcttgaggcctattcccgggtgcggaaacggaacagaaaaagcggtaagctgaataatcatctggaggcagctatccatgaagccatgagtgaactggataagatgtctggtactgtccatcaaatcccgcagggggataggcaaatgcgaccgccaaaacccaagaggaggaagatcagtagatag

SEQ ID NO: 230370 - DNA, 2178 bp, synthetic construct
  misc_feature 1..2178: note = Description of Artificial Sequence: Synthetic coding sequence
  source 1..2178: mol_type = other DNA
atggccgcagcatctgcagtttctgtgcttttggtggccgctgagagaaatcggtggcatcgactaccgtccttgctcctgccgccacgcacctgggtatggcgacaacgaactatgaagtacaccacagcaactgggagaaacatcaccaaggtgctgattgcaaaccgcggtgaaattgcttgccgcgtaatgcgcaccgccaaaaagttgggggtgcagacagtcgctgtatacagcgaggcagatcggaactctatgcatgtcgacatggccgacgaggcctattccatcggccctgcgcctagtcaacagtcctacctgtccatggaaaagatcattcaagtggccaaaacatctgcagcccaggccatacacccaggttgcgggttcctctctgagaacatggagtttgcagagttgtgtaagcaggaagggattatcttcatcggcccaccaccaagcgccattagggacatgggcattaaatcaacatccaagtccatcatggctgcagctggagtgccagtggttgaaggctaccatggcgaggaccagtcagatcagtgcttaaaagagcacgctcgcagaatagggtatccagtgatgatcaaggccgtgcggggtggagggggtaaaggcatgcgaattgttcggtccgaacaggagttccaggagcaattggaatcagcaagaagggaggccaagaaatcattcaatgacgacgccatgctgattgaaaagttcgtggatactcctcggcacgtggaagttcaagttttcggcgaccatcatggaaacgccgtgtacctcttcgagcgtgattgctctgtacagcggaggcatcagaagataatagaggaagcgccagcgcctggcattaaaagcgaagtgaggaaaaaactgggcgaggctgccgtgcgtgcggctaaggctgtcaattacgtgggcgctggcacagtggaatttatcatggattctaaacacaacttctgcttcatggagatgaatacccgtttacaggtggaacaccctgttaccgaaatgattacaggcacagacttagttgaatggcagttacgtatcgctgctggcgaaaaaatccccttgtcccaggaggagatcacacttcaaggacatgcctttgaggcaagaatttatgccgaagatccctccaacaattttatgcccgtggctgggccacttgtgcaccttagtacacccagagccgacccgtcgacaagaattgagacaggagtgcgccagggtgatgaagtgtccgttcattacgatccaatgatcgcaaaactcgttgtttgggctgcagacagacaggctgccctgaccaagctgcgctactcactgcgccagtataacatagtgggactgcacaccaatattgactttctcttgaacctgtccggccatccagagttcgaagccggtaacgtccatacagacttcatccctcagcatcataaacagttgctcctgtcaaggaaagccgcagcaaaggagagcctttgccaggccgctctagggcttattcttaaggagaaagcaatgaccgacacattcactttgcaggcccatgaccaattttccccgttctcaagtagctcaggcagacgcctgaacataagttacaccaggaacatgacgctgaaggatggaaaaaataacgtggccatagctgtgacatacaaccacgacgggtcctacagtatgcagattgaggacaagactttccaggttcttggcaacctgtatagtgaaggcgactgcacatatcttaaatgtagcgttaatggagtggcaagcaaagcaaagctgatcattctggaaaatacaatatatctgttttcaaaggaaggctccattgagattgatatcccagtcccgaaatatctctcctcagtttcaagccaggaaacccaaggaggcccacttgctcccatgacaggcacgatcgagaaggtcttcgtcaaagcaggagacaaggtcaaagccggagattcactgatggttatgatcgcaatgaagatggagcatacgatcaagtccccaaaagacggcacagtgaaaaaagttttctaccgcgagggggctcaggccaatagacatacgcctctcgtcgaattcgaagaggaggagtccgataagagggagtcagagtag

SEQ ID NO: 230371 - DNA, 1728 bp, synthetic construct
  misc_feature 1..1728: note = Description of Artificial Sequence: Synthetic coding sequence
  source 1..1728: mol_type = other DNA
atggagaagatcattcaggtcgccaagacttcggctgcgcaacacattcagtccattatggcagccgctggagtgcctgttgtcgaaggctatcacggcgaagatcagtctgatcagtgtctgaaagagcacgccaggagaataggctatcctgtgatgattaaggcagtcaggggcggagggggtaaaggaatgagaatcgtgcgaagtgaacaggagtttcaggaacagttggaatcggcacggcgtgaggcaaagaagtcttttaacgatgacgcaatgctcatcgagaagttcgtggacactcccagacatgtggaggtgcaagtgtttggggaccaccacggcaatgccgtttatctttttgaaagagactgctctgttcaaagacggcatcagaagataattgaggaggcgccagctcctggaatcaaaagcgaggtgaggaaaaaactgggagaggccgcagtgcgagccgctaaggcagttaattacgtgggggctggcaccgtggaatttataatggactctaagcataatttttgcttcatggagatgaacactagactgcaagttgaacaccctgtcactgaaatgatcacaggcacggacctcgttgaatggcaactccgcatcgcagccggtgagaagattcctctgtcccaggaggaaatcactttacagggccacgctttcgaggctaggatttacgcagaagatccatcgaacaactttatgcctgtggcgggaccgcttgtccacttgtccacacctcgggcagatccttccaccagaattgaaaccggtgtgaggcaaggggacgaagtgagcgtgcactatgatcccatgatagctaagctcgtggtctgggccgctgacaggcaggccgctttaaccaaactgcgatactctctgcgacaatacaatattgtgggtttgcacactaacatagattttcttcttaatctcagtggccatcctgagtttgaggccggaaacgtgcatactgactttatcccccagcaccacaagcagctgctcctgtctcgcaaagcggctgcaaaggagagcctgtgtcaggcggctctgggcctgatcttaaaggagaaggccatgacagatacctttacactgcaggcccacgatcaatttagcccattcagctcgagtagtggcagacgactgaacatcagctatactagaaacatgaccctgaaggacggtaaaaataacgtggccattgctgtgacgtacaatcatgatgggagttacagcatgcagatcgaggataaaaccttccaggtgcttggcaacctgtactctgaaggcgattgcacgtacctgaaatgttctgttaatggtgtggcaagcaaggccaaactgattatcctcgagaacacaatataccttttttctaaagagggatctatcgagattgatattcctgtacctaagtacctaagctccgtatcatcccaggagactcaggggggtccactggcccctatgactggtacaatagagaaagtgttcgtcaaggctggggataaagtgaaggccggagatagtttgatggttatgattgcaatgaaaatggagcataccatcaagagtcccaaggatggaactgtcaagaaggttttttaccgggagggagcccaggccaataggcacacaccactggtcgagttcgaagaggaggaaagcgataaaagagagagcgaatag

SEQ ID NO: 230372 - DNA, 1425 bp, synthetic construct
  misc_feature 1..1425: note = Description of Artificial Sequence: Synthetic coding sequence
  source 1..1425: mol_type = other DNA
atggcagccgctagtgcagtttctgtgcttctggtggcagctgaaagaaaccgctggcaccgactcccgtcactgttattgccccctcgaacatgggtgtggcgccaaagaaccatgaaatatacaactgccacagacgaagcgtatagtatcggacctgctccatcgcagcaatcctacctctctatggaaaaaattatacaggtcgccaagacgtctgcagcacaagcaattcacccaggatgcgggttcctcagcgaaaacatggagttcgcagaactgtgtaagcaggagggcatcatatttataggccctcctccctctgcaattcgtgatatgggtatcaagtccacatctaaatcaataatggcagctgccggagtgcccgtggttgagggatatcatggcgaagatcagagtgatcagtgtcttaaagaacacgctcgccgaattggctacccggtgatgattaaagccgtcagagggggagggggtaagggcatgcgaatcgtgaggagtgaacaggagttccaggagcagctcgagagcgcacggagagaggccaagaagtctttcaatgatgacgcgatgctcattgagaagtttgtagacacacccaggcatgtggaagtccaggtgttcggggaccatcatggaaacgctgtgtatcttttcgaaagggactgcagtgttcagcgaaggcatcagaagatcatcgaagaagccccagcccctggaattaagtcggaagtgcgtaagaaactcggggaggcagctgtgagagctgcgaaagctgttaactatgtcggcgcagggacagtggagttcatcatggacagcaaacacaatttctgttttatggagatgaatactcgcttgcaggtggagcatccggtgaccgaaatgattacaggaacagacttggtggagtggcaactccgtatcgcggcaggggagaagatccccttgtcacaggaggaaataaccttacaaggccacgcttttgaagccagaatttacgcggaggacccgagtaataactttatgccagtcgctgggcctctggtacatctctccacaccacgtgctgatccctcaactagaatcgagacaggggtgcgccagggcgacgaagtatctgtacactacgacccaatgatcgccaagctggtggtgtgggccgcagaccgccaggctgcattaaccaaattgaggtactctcttcgtcagtacaatatagttggtctacataccaacctgacctcatactctacctgtctcgccacgcagtcgctgaaacttggtacatgcacccttatatcgagcctgaatactaccaatagctgctgcagcgtgggtagactgcagccaaaatcactctatgcaagacagccttgggtgtcatcttctaggcggaagccatag

SEQ ID NO: 230373 - DNA, 1281 bp, synthetic construct
  misc_feature 1..1281: note = Description of Artificial Sequence: Synthetic coding sequence
  source 1..1281: mol_type = other DNA
atggagtttgctgagctctgcaaacaagagggcataatcttcatcgggcctccaccctccgccatccgagatatggggattaagtccacatcaaagagtatcatggcagctgccggtgtgccagtggttgaaggctatcacggcgaggaccagtctgaccagtgcttgaaagaacatgcccgtagaatcggctaccccgttatgatcaaagctgtcagaggaggcggagggaaggggatgaggatagtgagatccgagcaggaattccaggagcagctcgaatccgcaagacgggaagcaaaaaaaagcttcaacgatgatgcgatgctgatagagaagttcgtggatacacctcggcatgttgaggtccaggtgttcggcgaccaccacggcaacgccgtgtacctctttgaacgggactgttccgtacaacggagacatcagaaaatcattgaggaagcgcctgctcctgggatcaagagcgaggtgaggaagaagctgggcgaggcagctgttcgggctgccaaggctgtgaattatgtaggagccggaacagtggaatttatcatggatagcaaacacaacttctgttttatggagatgaatacgcgcttgcaggtggaacatcctgtgactgagatgattacaggaacagaccttgtggagtggcagttgcgaattgcggctggagagaaaattccgttaagtcaagaagaaatcactctccaggggcacgctttcgaggcacggatttacgccgaagatccctctaacaacttcatgcccgtggcaggacctctggtccatttgtctacgcccagggcggatccgtccacccgcattgaaaccggggttaggcagggggatgaggtttccgtgcattacgacccaatgattgccaagctggtagtgtgggccgcagaccgccaagccgctttgacaaagttacggtacagcctgcggcagtacaatatcgtaggattacacactaacatcgatttcctgctgaacttgagtggtcatcccgagttcgaggccggaaatgtgcacacggacttcattcctcagcaccacaagcagctcctcttatctagaaaggcggctgccaaggagagcctgtgccaggccgctctcggactcatacttaaggaaaaagccatgacggacacattcactctgcaggcacacgaccagttttcccccttctcgtcctctagcggtcgcaggctgaacatctcatacacaagaaacatgaccctgaaagatggaaagaataattag

SEQ ID NO: 230374 - DNA, 603 bp, synthetic construct
  misc_feature 1..603: note = Description of Artificial Sequence: Synthetic coding sequence
  source 1..603: mol_type = other DNA
atggagaaaattattcaggttgcgaaaacatccgcggctcaggccattcacccaggctgtggattcctgagcgagaacatggaattcgcagaattgtgtaaacaggaaggcatcatttttatcggaccaccacctagcgctatacgggatatggggatcaagagtacttctaaatctatcatggctgccgctggcgtccctgttgtcgagggatatcatggcgaagatcaatccgaccagtgcctcaaagagcatgcaagacgaattggctaccctgtgatgataaaagccgtccggggagggggaggcaaggggatgagaattgtgagaagcgagcaggagttccaggagcagctcgagtccgctcgcagggaggctaaaaagtcctttaatgacgatgctatgctgattgagaagttcgtcgacactccacgacatgtggaagtccaggtgttcggcgatcaccatggcaatgccgtgtatttgtttgaaagagactgcagcgtccaaaggcgacatcaaaaaataatagaagaggctcctgccccaggcatcaagtctgaggtgcgcaagaagggaaggtcctgctcccagtcgtgttag

SEQ ID NO: 230375 - DNA, 1578 bp, synthetic construct
  misc_feature 1..1578: note = Description of Artificial Sequence: Synthetic coding sequence
  source 1..1578: mol_type = other DNA
atgtgggcagtcctgcggctcgcgctgcgtccatgtgccagagcatccccagcaggacccagagcctaccacggagacagtgtggcgtctctagggacccagccagatctaggatccgccttgtaccaagaaaattacaagcagatgaaggcattagtaaaccagctccatgaaagagtggagcatatcaagttgggaggtggggagaaggcccgtgccttgcatatttcaaggggcaagctgctgccgagggagcgcatcgataaccttatcgacccaggctccccatttcttgagctgagccaattcgcagggtaccagctgtacgacaacgaggaagtgcccggaggtgggataattaccggcattgggcgagtctcaggtgtcgagtgtatgatcatcgctaatgatgcgacggtgaaaggcggagcatactaccctgtaactgtgaagaaacagctacgggcacaggagattgccatgcagaaccgactgccctgtatttatctggtagattcaggcggagcatatctgcctagacaagccgacgtttttccggatagagaccacttcgggcgaaccttctacaatcaagccattatgagttctaagaatatagctcaggtgaaggccgctactggcgaggaagtgtcagccgaagacctcgggggtgctgatctacattgtcggaagtccggggtgagcgatcattgggccctggatgaccatcatgcccttcatctgacacgaaaggtggtccggaacctgaactatcaaaaaaaacttgatgtcacgattgagccgagcgaggagccgctctttccggctgacgaactctatggtatcgtgggcgctaatttgaaacggagcttcgatgtgcgtgaagtgattgctagaatcgttgatggcagcaggtttacagaatttaaggccttctacggcgatactctcgtcacagggtttgctaggattttcggatatcccgtgggaatcgtcggaaacaacggtgtactgttctccgagtcagcaaaaaaaggaacccatttcgtccagctctgctgtcaaagaaacatccctcttctgtttctgcagaatattaccggatttatggtgggcagagagtacgaggcagagggcatcgcaaaggatggggctaaaatggtcgccgctgtcgcttgcgcccaagtccccaaaataacccttatcattggcggaagctacggagctggtaactacggcatgtgcggtcgagcatattcacccaggtttttgtacatctggcctaatgcccgaatctcagtaatgggcggagagcaggccgcaaacgtccttgccactatcaccaaagaccagcgggcacgggaaggcaaacagttcagtagcgcagatgaggcagctcttaaagagcctattattaagaaattcgaggaagaagggaatccatactactccagtgcacgagtttgggacgatggaataattgatcccgcagatacgcgactcgtgctcggcctatcttttagtgccgcactcaatgcccctattgagaagaccgatttcgggatcttccgcatgtag

SEQ ID NO: 230376 - DNA, 1692 bp, synthetic construct
  misc_feature 1..1692: note = Description of Artificial Sequence: Synthetic coding sequence
  source 1..1692: mol_type = other DNA
atgtgggccgttctgcgcctggctttgaggccctgcgcaagagcgagtcctgccggtcccagggcttaccacggcgattcagtggcttccttagggacgcaaccggatctcggttccgccctgtatcaggagaattacaagcagatgaaggctctggttaatcagctgcacgagcgtgtcgagcatatcaagttgggcggaggcgaaaaggctcgagcgctgcacatcagcagaggcaagctattgcccagggagagaatcgacaatctaattgatcccggaagtccgttccttgagctgtcccagttcgcagggtatcaactgtacgataacgaggaggtgccaggaggaggaatcatcacaggcattggtcgggtctccggggtggagtgcatgattatcgcaaatgacgctacggtgaagggaggcgcatactatccggtgaccgtaaagaaacaactgcgggcacaggagattgctatgcagaatcgactgccatgtatctacttagtcgattccggaggagcctacctgcctcggcaggccgacgtgtttcctgaccgcgaccacttcggaagaaccttctataatcaggcaataatgagctcaaaaaatatcgctcagattgccgtcgttatggggtcctgcacagctggcggtgcctatgtgccagcaatggccgacgagaatataatcgttcgtaagcagggaaccattttcctcgccggacctcctctggtaaaggccgcaacgggagaggaggtgtctgcagaagacctgggtggtgctgatctgcactgcaggaaatctggagtgagcgaccactgggccttagatgatcaccatgcgctgcacctgacccggaaagtcgtgagaaacctgaactatcagaagaaactcgacgtgacaattgaaccgtccgaagagccactgttcccagccgatgagttgtacggaattgtgggggctaatctgaaaagaagcttcgacgtgcgggaagttattgctaggatcgttgacggctccaggttcaccgaatttaaagctttttacggggatacactggtcactggcttcgctcggatctttggctatccagttgggattgtaggcaataacggcgtcttgttctcggaatctgccaaaaagggaacgcactttgtgcaactgtgttgtcaacgtaatatccccctgctcttccttcagaacataaccggctttatggtgggaagggagtacgaagctgaggggattgctaaagatggcgcaaagatggtagctgccgtggcttgcgcccaggtccctaagataacactcattattggtggtagttacggcgctggaaattacggcatgtgcggcagagcttacagtcccagatttctgtacatctggccaaatgcgcgaatctctgtgatgggcggagaacaggctgcaaacgtgcttgcaactatcaccaaggaccaacgagcaagggagggcaaacagttctctagtgccgatgaagccgcactgaaggagccaatcatcaagaagttcgaagaggaagggaatccttattacagcagcgccagagtgtgggatgatgggataatagaccctgcggacactcgactggttctgggactttccttcagcgcagcgctgaatgcacctatcgagaagaccgattttggcattttccgcatgtag

SEQ ID NO: 230377 - DNA, 870 bp, synthetic construct
  misc_feature 1..870: note = Description of Artificial Sequence: Synthetic coding sequence
  source 1..870: mol_type = other DNA
atggctaagcacatccaaaaagagattcagaggggcgttgagtcgtgggtctcgctcggcaaccggaggccgcacctgtccatcattcttgtcggggataacccagcgtcccatacttacgtaaggaacaagatacgggctgcaagcgccgtcgggatttgcagcgagttaatattgaagccaaaggacgtctcgcaggaggagctactggatgtgaccgaccagctgaatatggaccccagagtatccggaatcctggttcaattaccactccctgaccacgtcgacgagcgcactatctgtaacgggatcgctccggagaaagatgtggacggttttcacataatcaatattgggagactgtgcctcgaccagcatagcttgattcctgcaactgcctccgccgtatgggagatcatcaagcggacgggcatccaaactttcggcaaaaacgtggtcgtggccggtaggtcaaagaacgtgggtatgcctatagccatgttactgcatacagacggggagcatgagagacccggaggtgacgcaactgtaactatcgctcacagatacacaccgaaagaacaattaaaaattcacacccaactggccgatattattatcgtcgccgctgggatccctaaactaattacatcggatatggtgaaagagggtgccgctgtgatagacgtgggaatcaactacgtgcatgaccctgtcaccggaaagaccaagctcgttggcgacgttgacttcgaagctgtgaaaaagaaagccggatttataactcccgtgccaggcggagtcggtcctatgactgtggctatgctgctaaaaaacacactcctcgctgctaagaagatcatctattag

SEQ ID NO: 230378 - DNA, 672 bp, synthetic construct
  misc_feature 1..672: note = Description of Artificial Sequence: Synthetic coding sequence
  source 1..672: mol_type = other DNA
atggctaaacacatacagaaggagatccagaggggagtggagagctgggtgagcttgggaaaccgacggcctcacctttccatcatcctcgtcggtgacaatcccgctagtcacacttatgtgcgtaacaagatccgagccgcttcagcagtgggtatttgttcagagcttattctgaagcccaaggatgtctctcaagaagaattgctggatgtgactgaccaacttaatatggacccaagggttagtggcatcctggtacagcttcccttacccgaccatgtggacgagcggaccatctgtaacgggattgcccctgagaaggacgtggatggtttccatattattaacattggtagactttgtctcgaccaacattcactgatccccgcaacggcaagcgcagtttgggagattattaagcgcactgggattcagacgttcggcaagaacgtggtcgtggctgggaggtccaaaaatgtgggtatgccaatcgctatgttactccacaccgacggcgaacacgagcgtcctggcggtgacgccaccgtgaccatagcacatagatacacccccaaggagcagctcaaaatacacactcagctcgctgacataataatcgttgccgcagagaggttccaccacttcgcccaggacttaagcaacagctag

SEQ ID NO: 230379 - DNA, 762 bp, synthetic construct
  misc_feature 1..762: note = Description of Artificial Sequence: Synthetic coding sequence
  source 1..762: mol_type = other DNA
atggctaaacacattcagaaggaaattcaacggggagtggagagctgggtttctctgggtaaccgacggcctcacctgtctatcatcctagtgggagacaatcccgcatcacacacatatgtgagaaataagattagagctgcgtccgcagtcggcatttgttcagagctgattttgaagcccaaagatgtaagccaggaagaactcctggacgtaactgaccaactgaatatggatccaagagtgtcagggattctggttcagttgcctctgcccgaccatgtagacgagcggacaatatgcaatgggatcgccccagagaaggatgtcgacgggttccatattattaatattgggagactgtgccttgaccagcatagcctgattcctgctaccgcaagcgccgtctgggagatcattaaaaggaccggcatacagactttcgggaagaatgtggtggttgccggtaggtctaagaatgttggaatgcccattgccatgctactgcacacagacggagagcacgagcgtccaggcggagacgctaccgtcacaatcgctcaccgttacaccccaaaggagcagctgaaaatccatactcagctggctgatattatcatcgtggccgctggcatccccaaacttattacttctgatatggtgaaggaaggggctgccgtaattgacgtcggcataaattatgtccatgacccggtcactggaaaaacaaaactggttggtgacgttgatttcgaggcctag

SEQ ID NO: 230380 - DNA, 1044 bp, synthetic construct
  misc_feature 1..1044: note = Description of Artificial Sequence: Synthetic coding sequence
  source 1..1044: mol_type = other DNA
atgacagtgcctgtacgcggattctccctgcttaggggcaggctcggacgtgcacccgctctcggcagaagcacagcaccaagtgtgcgggcaccgggagaaccgggtagtgccttcagaggattccgcagctccggcgtgcggcacgaggccattatcattagcgggacagaaatggctaaacacatccaaaaagaaattcagcggggtgtggaatcgtgggtctctttggggaaccggcgaccccatttatccattattctggtgggggataatccagccagccacacctatgtccggaataagatcagggctgcctctgcagtgggaatctgtagcgaactcatattgaagccaaaggatgttagtcaagaggagctgttagatgttactgaccagctgaatatggaccccagagtctcaggcatattggtacagctccctctgcccgaccatgtggatgagcggaccatctgcaacggcatcgcccctgaaaaggacgtggatggcttccatatcatcaatataggaaggttgtgtttggatcagcactctttgatccccgcaacagcaagtgctgtgtgggaaattatcaaacgtactggaatccagacgtttgggaaaaacgtcgttgttgccggacggtccaagaacgtggggatgcctatcgcaatgctcctgcatacagacggagagcacgagcgtcccggaggagacgctacagttactatcgctcaccggtatactcccaaggagcagttgaagatccacacccagctggcagatataatcattgtggcagctggaattcccaagctgatcacatccgacatggtcaaagaaggagccgctgtcatagacgtgggaatcaactatgtgcatgaccctgtcactggcaaaaccaagctcgtcggcgacgtggattttgaggcggtgaagaagaaagccggattcatcacacctgtgcccggaggcgtcgggccaatgactgtggctatgctgctgaagaacacactactggccgcaaaaaagatcatttattag

SEQ ID NO: 230381 - DNA, 441 bp, synthetic construct
  misc_feature 1..441: note = Description of Artificial Sequence: Synthetic coding sequence
  source 1..441: mol_type = other DNA
atggatcctcgagtgtccggtatcctggtccagctcccattacccgaccatgtggacgaacggacaatttgcaacgggatcgcacccgaaaaagatgtggacggatttcatataattaatatcggacgactgtgtctggatcagcactctctcattcccgcaacagctagtgccgtatgggaaatcatcaagaggaccggaattcagacattcggcaagaacgtggttgttgccggacgaagcaagaacgtcggcatgcccatcgctatgctcctgcacactgatggtgaacacgagcgccctggcggagatgctactgttacaattgcgcaccgatatacacccaaagagcagctaaagatacacactcagctcgcagacatcatcatagtggctgccgagcgcttccaccacttcgcccaggacctctctaactcatag

SEQ ID NO: 230382 - DNA, 1257 bp, synthetic construct
  misc_feature 1..1257: note = Description of Artificial Sequence: Synthetic coding sequence
  source 1..1257: mol_type = other DNA
atgccaatgttgctgcctcatccccaccaacacttcctgaaggggctcctgcgggctccctttcgctgctatcacttcattttccatagcagcacccacctcggttccggcattccctgtgcccagcccttcaattccctcgggctgcactgtactaagtggatgctgctctccgacgggctgaaaaggaagctctgcgtgcagaccactctaaaggaccacacggaaggattaagtgacaaagaacagcgcttcgtggataaactttacaccggcctgatccaaggacagcgcgcatgtctggccgaagctatcacgttagtcgaatcaactcattcccgtaaaaaggaactggctcaggtcctgttgcaaaaggttctgttgtaccacagagaacaggaacaaagcaataaaggaaagcccctggccttcagagttgggctctctggcccaccgggagccggaaaaagcaccttcatcgagtatttcggtaagatgctcacggagcgaggtcataaactttcggtcctagcagtcgacccttcctcttgcacatcggggggatccctcctgggcgataagacacgcatgacagagctgtcaagagatatgaatgcgtatatcaggccgtcaccgactcggggaacactggggggagtaacccggacaactaacgaggctatactcctgtgtgaaggtgccggatatgatatcatcctgattgaaaccgtaggagttggccagagtgagtttgctgtcgctgatatggtggacatgtttgtgctcctgctgcctcctgctggaggagatgaactgcaggggataaaaagaggtattatcgagatggccgacctcgtggcggtgacaaagtccgatggcgatctgattgtccccgctcggagaatccaggctgaatacgtgtcagccctgaagttgctaaggaagcgatcacaggtctggaagccaaaagtgatcaggatttccgcgaggagcggggaaggcattagtgagatgtgggacaagatgaaggatttccaggaccttatgctcgcctctggggagctgacagccaaacgaaggaagcaacagaaagtttggatgtggaatctgatccaggagtctgtgctggagcactttaggacccaccctaccgtacgcgaacaaattcctctactggagcagaaagtgcttattggggctctttcccccggtttggccgcagacttcctgctcaaggcattcaaatcacgggactag

SEQ ID NO: 230383 - DNA, 1275 bp, synthetic construct
  misc_feature 1..1275: note = Description of Artificial Sequence: Synthetic coding sequence
  source 1..1275: mol_type = other DNA
atgcctatgctgctgcctcacccacatcaacattttcttaaggggctgctgagagcaccgtttcgttgctaccacttcatcttccacagctccacccatctcgggagtggcatcccatgcgcccaaccattcaattccctggggttgcattgtactaaatggatgctgttatcagacggcctgaaaaggaaattgtgcgtgcaaaccaccctcaaggaccatacagaggggctgagtgacaaagagcagcggtttgtcgacaagctctataccggcttaatacaaggccagcgcgcatgccttgccgaagcaatcacactggtagaatccacccatagccgcaaaaaggagctcgcacaggtcctactgcagaaggtactgttatatcatcgggagcaagaacagtccaacaagggtaaacccttagcttttagagtcggactttcaggcccacccggagcgggtaaatcaaccttcatcgagtatttcggtaagatgctcaccgagcggggtcacaagttaagcgttttggccgttgatcctagttcttgtaccagtggcggatctctactgggtgacaagactcgcatgaccgagttgagtcgggacatgaatgcctacatcaggccctcccccactcggggtacactgggcggagttacacgaacaacaaacgaggccatccttttatgtgaaggagccggatatgatattattctgattgaaacagtgggcgtagggcagtctgagtttgcagttgccgatatggtcgatatgtttgtcttgcttctcccccctgcgggaggggacgaattacagggaattaaacggggtattattgaaatggctgacctagtggccgtgactaagagcgacggtgatcttatcgtcccggctcgcagaatacaggctgaatatgtgtctgcccttaagctcctgcgaaagcgttcacaggtttggaaacccaaagttatacggatctccgctcgctcaggtgaaggaatctccgagatgtgggacaaaatgaaggatttccaggatctaatgctggcttctggggagctgaccgccaagcgaaggaagcagcagaaagtatggatgtggaacctgatccaggagagcgttcttgaacactttaggacgcatcctaccgtgcgtgagcagatcccgctgctcgagcagaaagtgttgataggggctctgagtccaggcctggccgctgacttcctgttgaaggctttgaaggctgaaactaataagattcatcccgtgtag

SEQ ID NO: 230384 - DNA, 414 bp, synthetic construct
  misc_feature 1..414: note = Description of Artificial Sequence: Synthetic coding sequence
  source 1..414: mol_type = other DNA
atggctgacttggttgcagttaccaaatccgatggagatctgatcgtgccggcaaggcgtattcaggcagagtatgtcagcgcacttaagctcctgaggaaaaggagtcaggtctggaaacctaaagtcattagaatttccgcacgctccggggaggggatatccgaaatgtgggacaaaatgaaggactttcaggaccttatgctggcctcaggtgagctgactgctaagcgtcggaagcagcaaaaagtgtggatgtggaacctcatccaggaatcagtccttgaacactttcgaacgcatcccactgttcgggagcagattccattgctggagcagaaggtgctcatcggagcacttagcccaggcctcgccgcagatttcctcctaaaagccttcaaaagcagagattag

SEQ ID NO: 230385 - DNA, 480 bp, synthetic construct
  misc_feature 1..480: note = Description of Artificial Sequence: Synthetic coding sequence
  source 1..480: mol_type = other DNA
atggctgggctcaccaggttcgctctggaattagtgacagaaaaaggtcacaccttcgctgaggagcttcagaagattcagtgcacactacaggacgtcggctcagcgttggccacaccctgctcgagcgctcgtgaggcgcacctaaagtacacaacttttaaagccggaccaatactggagttggagcagtggatcgacaagtacacctcacagctcccgccactgactgctttcattctcccctccggtgggaaaatcagcagtgcccttcacttctgccgcgctgtgtgtcgcagggcagagcggagagttgtgccactggtgcagatgggcgagaccgatgcaaacgttgccaaattcctcaatagactttctgactacctctttactctagcaagatacgccgcaatgaaagagggcaaccaggaaaagatttatatgaagaatgatcctagtgcagaatccgagggtctgtag

SEQ ID NO: 230386 - DNA, 753 bp, synthetic construct
  misc_feature 1..753: note = Description of Artificial Sequence: Synthetic coding sequence
  source 1..753: mol_type = other DNA
atggccgtatgcggactaggcagccgactgggcctgggtagccgcttggggcttcggggttgctttggggctgccagactgttataccccagatttcagtcacgcggacctcagggggtggaagatggtgacagaccccagccctcatccaaaaccccgcgtatccctaagatctacacaaagacaggggataaaggttttagcagcacttttaccggggaaaggcgtccaaaagacgatcaggtgttcgaggccgtcgggaccactgacgaacttagcagcgccataggcttcgcgctggagctcgtcacggagaagggacacactttcgctgaggagctgcaaaagatccaatgcacgcttcaggatgtcggatccgcgttagccaccccctgctcctcagctagagaggctcacctcaaatacaccacatttaaggctggccctatactggagctcgagcaatggatcgataaatatacctcccagctccccccactgactgccttcatcctccctagtggtgggaaaattagttcagcgttacacttttgcagagccgtttgtagaagggccgaacgacgagtggttcctcttgtccaaatgggcgagacggacgctaacgttgctaaattcctgaatcgcctcagcgattatctatttacactggcaagatacgccgcaatgaaagaggggaatcaggaaaaaatatacatgaagaacgatcccagcgcagagagcgaaggcctctag

SEQ ID NO: 230387 - DNA, 849 bp, synthetic construct
  misc_feature 1..849: note = Description of Artificial Sequence: Synthetic coding sequence
  source 1..849: mol_type = other DNA
atggaacctaaggtggctgagctgaagcagaaaattgaggacaccctttgccctttcggctttgaagtgtaccctttccaagttgcttggtacaacgagctcctgccacctgccttccacttgcccctgcctggccctactcttgccttcctcgtcttgtcgactcctgcaatgttcgatcgagcactcaaaccattccttcagagctgccatttgagaatgcttaccgatcccgtggatcagtgtgtggcctatcatttaggccgtgtgagagagagcctgccagagctccaaattgaaattattgctgactacgaggtacatcccaatagacgccctaagatcctggcgcagacagccgcacacgtggccggagcagcctactattaccagagacaagatgttgaggccgatccctggggtaaccagcggataagcggggtgtgtattcacccaagatttggcggttggttcgctataagaggagttgtgctcctgccaggcattgaggtccctgacctgccacctagaaagcctcacgactgcgtccctacccgcgcagacagaattgcgcttcttgaaggatttaactttcattggcgagactggacctatcgtgacgcggttaccccacaagaaagatactctgaagaacagaaggcttattttagcacacctccagctcaaagactggcattattaggactagctcagcctagtgaaaagcctagttctccttcacctgaccttccgttcactacacctgcacccaagaaaccagggaatccgtctcgggcaagatcttggctgtctcctcgagtcagccccccagcatctcccggaccatag

SEQ ID NO: 230388 - DNA, 891 bp, synthetic construct
  misc_feature 1..891: note = Description of Artificial Sequence: Synthetic coding sequence
  source 1..891: mol_type = other DNA
atggccaatgtgctgtgtaaccgcgctaggctcgtgagttatctgcccggtttctgctccttggttaaacgcgttgtaaatcctaaagcattctccacagccggaagtagcggcagcgatgaaagccatgtcgccgcagcgcctccagatatttgttcccgcactgtgtggccagatgagaccatgggcccttttggaccccaggatcaacggtttcaattgcccggtaacattggatttgattgtcatcttaacggtacagcatcacagaaaaagagcctcgtgcacaagactctgcctgacgtgctcgctgagccactttctagcgaacggcacgagttcgtgatggcacagtatgtgaatgaattccaaggcaatgatgcacccgtggagcaggagataaattcagctgagacctacttcgagagcgcgagggtggaatgtgcgattcagacctgcccagaactccttcgtaaagactttgaaagcctcttcccagaggtggccaatggtaagttgatgattttaacggtgacgcagaaaacaaaaaacgacatgaccgtgtggtccgaggaggtggagattgaacgtgaggtactcttggagaagtttattaatggggctaaagagatctgctatgcccttcgtgccgaaggatattgggcagacttcatcgacccgagcagtggactcgcctttttcggcccatacacgaataacacactctttgaaaccgatgaaaggtacagacacctcggcttttccgtagacgacctcggatgctgtaaagtgataaggcactcactttggggcacacacgtggttgttggatccatttttaccaatgctactcctgattcccacatcatgaaaaagctgagtggcaattag

SEQ ID NO: 230389 - DNA, 891 bp, synthetic construct
  misc_feature 1..891: note = Description of Artificial Sequence: Synthetic coding sequence
  source 1..891: mol_type = other DNA
atggctaatgtgctctgtaatcgggcacggctggtcagctatctgcctggcttctgttccctggtcaaacgggtcgtgaaccctaaggctttctccaccgccggaagttctggttccgatgaatctcacgtggcggcagctccacctgatatctgctcccggacggtttggccagatgagacgatgggtccatttggtccacaggaccagagattccagttgcctgggaacatcggattcgactgccatctgaatggaacggcatcccaaaaaaaatcacttgttcacaaaacactgcccgacgtccttgccgaaccactgtcatctgagcgccatgagtttgtgatggctcagtacgtgaatgaattccagggcaatgacgctccagtggaacaggaaattaactcagctgagacatactttgagagcgcgagagtcgagtgcgcaatacagacttgtccagaactacttcggaaggatttcgagtcactgttccctgaggtcgcaaacggcaagctgatgatcctgacagtcacccagaaaaccaagaatgacatgactgtgtggtcggaggaggttgagattgagagagaggtactgctggaaaaatttattaacggggcaaaagaaatctgttatgcgctcagagctgagggctactgggctgactttatagatcccagctctggactggccttcttcgggccatatacaaacaacacgctgttcgagactgacgagcgttataggcatctgggattttccgtggacgacctgggatgctgtaaggttattcgccactctctgtggggcacacacgtcgttgttggaagtatctttacgaacgctactccggattcacacattatgaagaagctgtcgggcaattag

SEQ ID NO: 230390 - DNA, 531 bp, synthetic construct
  misc_feature 1..531: note = Description of Artificial Sequence: Synthetic coding sequence
  source 1..531: mol_type = other DNA
atggcacgggtcttgaaagccgcagccgcaaatgcagtcggcctttttagtaggctacaagcacctattcctactgtacgcgcttcgtcaacatcacagccactggatcaggttacgggaagcgtgtggaatttgggtcgtttgaaccacgtggcaatcgctgttccagatctggaaaaggctgcagctttctacaagaacatactgggggcacaggtctccgaggcagtgccgttgccagagcatggagtgagtgttgtgtttgttaacctcggcaacacgaagatggagcttctgcaccctttaggtcgggattcacctatcgccggattcctgcagaagaacaaagccggaggcatgcatcatatctgcatcgaggtggacaacatcaacgccgcagtgatggaccttaagaaaaagaagatccgctctctgtctgaggaagtcaagattggagctcacggcaaacccgttatattcctgcacccaaaagactgcgggggagtgcttgtagagctagagcaggcctag

SEQ ID NO: 230391 - DNA, 2070 bp, synthetic construct
  misc_feature 1..2070: note = Description of Artificial Sequence: Synthetic coding sequence
  source 1..2070: mol_type = other DNA
atgattgagatggcggcagagaaagaaccctttttggttcccgcacccccacccccactgaaagacgaaagcggaggagggggtggacccaccgtgcccccacatcaggaggccgcaagcggggagcttcggggaggaacagaacgaggccctggcagatgtgcccctagtgcaggtagcccagctgcagcagttggtagggaatcacccggagccgctgccacctcctctagcgggccacaggcacagcagcaccgcggtggagggcctcaggctcagtctcatggagaagctcgcctgagtgatcctccgggtcgcgcagcacctcctgacgtgggcgaggagcgacgcggagggggaggcacggaactcggccctcctgcccctccaaggcctcgaaatgggtatcaacctcataggcctcccggagggggaggcggtaaacgcaggaactcctgcaacgtcggaggaggtggtggaggtttcaaacatcccgcttttaaaaggcgcagacgcgtgaatagtgactgtgactcggtattgccatccaatttcttactcggaggcaacatcttcgaccctctaaatctgaactctttattagatgaggaagtgtcccggacattaaacgctgaaacccctaaatcctcgcctttgcctgctaaagggcgagacccagtggagattctgatacccaaagacataaccgatccgttgtccttgaacacatgcacggatgaaggacatgtggttctagcgtccccactgaagaccgggaggaaaaggcataggcacaggggccagcaccaccagcaacagcaggcggctgggggttccgagtcacatcccgtgccgcctaccgctccgctaacccctctcctgcacggggagggcgctagtcagcaaccccgtcatcgtggtcagaacagagatgctccacagccatatgaactaaacacggctatcaattgcagggacgaagtcgtctcccccttgcctagtgctctccagggaccatcaggctccttgtcagcacctcccgcagcatctgtgattagcgcaccgccttcttccagttcacgacatcgaaagcgcaggagaacatcatctaagagtgaggcaggcgcacgaggtggcggtcaggggtccaaagagaaggggagaggatcatgggggggacgccaccatcaccatcatccactgcccgcagccggttttaaaaagcaacaaagaaagtttcagtatgggaactactgcaagtactacggttaccggaacccctcatgtgaggacggcagactcagggtactcaagcccgagtggtttcgaggacgggatgttctcgaccttggttgtaatgtgggtcacctcacactgtctattgcctgcaagtggggcccttcccgaatggtgggcctcgacatcgactcccgtctgatccattcagcccgtcagaacatacggcactatttgagtgaggaactcaggctgccgccacagacccttgaaggtgaccctggggctgaaggggaggaagggactactaccgtgagaaaaaggtcctgtttcccagcttccctgacagcatctagagggcctatcgcagcaccccaggtgccgctggacggcgctgacaccagtgttttccctaacaacgtagttttcgtaaccgggaattatgtcttagatcgcgatgatttggttgaggcccagacacctgaatacgatgtggttctttgcttgtccttgaccaagtgggtccatttaaactggggtgacgaaggacttaagcggatgtttcgaagaatctataggcacctgagacctggcggaattttagttctggagcctcaaccctggtcaagctacggcaagagaaagacgctgacggagaccatctacaaaaattactaccgtattcagctgaagcctgaacagttctccagctatcttacttctcccgatgtaggattctcctcttatgagctcgtcgccacgccacacaacacctccaaaggattccagcgccctgtctaccttttccacaaggcacggtccccttcccattag

SEQ ID NO: 230392 - DNA, 663 bp, synthetic construct
  misc_feature 1..663: note = Description of Artificial Sequence: Synthetic coding sequence
  source 1..663: mol_type = other DNA
atggtaggactggatatcgactcgcgcttgatccactctgctaggcagaatataagacactacttatccgaagagttgaggttgccccctcagactctcgagggagatcccggtgccgaaggcgaggagggtaccactactgtgaggaaacgatcttgttttccggcaagcttaaccgcctccagaggacccattgcagccccacaggtgcctttggatggcgctgacacaagcgtcttccctaacaacgtggtgttcgtgacagggaattatgtgcttgaccgtgacgacctggttgaagcacaaaccccggaatacgatgtcgtgctctgcctgtctctcacaaagtgggtgcacctgaattggggagacgaagggctcaaacgtatgttccgtaggatctaccgtcacctgagacctggtgggattctggtcctggaaccgcagccgtggtcatcctacggcaaaagaaaaaccctgaccgagaccatctataaaaattattacaggattcagcttaagccagagcagttcagttcctatttgacttcacctgatgtggggtttagctcatatgagctggtcgccactcctcacaacacgtctaaaggcttccagaggcccgtttacctgtttcacaaggccagaagtccgtctcactag

SEQ ID NO: 230393 - DNA, 852 bp, synthetic construct
  misc_feature 1..852: note = Description of Artificial Sequence: Synthetic coding sequence
  source 1..852: mol_type = other DNA
atggcttctgggacaacaacaacagcagtaaaaattggcatcattggagggactggcctagatgatcctgaaatcctcgaaggacgcacagaaaagtacgtagacactcctttcggcaagccctctgacgccttaatccttggcaaaataaaaaatgttgactgtgtcttgttggctagacatggaagacagcacacaataatgccctccaaggttaactaccaagcaaatatttgggctttgaaggaagaggggtgtacacatgtgattgtcaccaccgcttgtggcagcctgagagaggagattcagccaggggatattgtcataatagaccagtttattgacaggaccacaatgcgaccccagtccttttatgatggcagccacagctgtgccaggggagtctgccatattcccatggccgagccgttttgccccaagacgagggaggtgttaatcgaaaccgccaaaaagttggggctgcggtgccactccaagggcactatggtgactatagagggaccccgtttttctagcagggccgaatctttcatgttcagaacctggggtgccgatgtgattaacatgactactgtgcccgaagtggtgttagcgaaggaagcaggaatttgctacgcatctattgcaatggccacagactacgattgctggaaggagcacgaggaggctgtgagtgttgatcgggtgctgaaaacgctgaaagaaaatgcaaacaaagcaaagtccttgctactgaccaccattcctcagattggttctaccgaatggtctgaaaccctccacaacctcaagaatatggcgcagttttcagtgctgctacccaggcactag

SEQ ID NO: 230394 - DNA, 468 bp, synthetic construct
  misc_feature 1..468: note = Description of Artificial Sequence: Synthetic coding sequence
  source 1..468: mol_type = other DNA
atggctgcggagacccggaacgtcgccggagccgaggctcccccaccccagaaacgatactaccgccagagagcacattccaatcctatggccgaccacactctgcggtaccctgtgaaaccagaggaaatggactggtctgagctttaccccgagttctttgcccctttaacccagaatcagtcacatgacgatccgaaagacaagaaggagaaacgtgcccaggctcaggttgagtttgccgacataggctgcggttatggcggactactcgcagacaaggacgtgcttccactcccaaggcccaccttccaggcagataaagctcaggttgcaaaccaccagtctcacccagcctctaggatctgcttaagggcaaaaagctggggcgcaggcgtgtaccataatagatgtgccggagcaaccaggcttgatgtccactcattccgaagagcccctacagtctag

SEQ ID NO: 230395 - DNA, 831 bp, synthetic construct
  misc_feature 1..831: note = Description of Artificial Sequence: Synthetic coding sequence
  source 1..831: mol_type = other DNA
atggctgcagagaccagaaacgttgctggagcagaggcacctccacctcaaaaacggtactacaggcagagagcccatagcaaccctatggctgaccacacactgaggtatcctgtgaagcccgaggaaatggattggagcgaactgtacccagaattttttgcccctctcacccagaatcagtctcacgatgatcctaaagacaaaaaggagaagcgagcacaggcccaggtggaattcgccgacatcggctgtgggtatggaggcctcctggtggaactcagcccgctgttccccgacactctgatcctgggccttgaaatccgggttaaggtcagcgactatgtccaagaccgtattagggcactgcgcgctgcccctgccggaggttttcagaatattgcgtgcttgcgttctaatgcaatgaagcacttaccaaactttttctacaagggccagctgaccaagatgtttttcctgtttcccgacccccattttaagcgcacaaagcacaagtggaggattattagtcccacgctgctggctgagtatgcttatgtgttgcgggtgggaggcctggtgtatacaatcactgacgtcctggagctgcatgattggatgtgtacccacttcgaggaacaccctctctttgagcgagtcccacttgaagatctctctgaggacccagtcgtggggcacctcggtactagcacagaggaggggaagaaggtgttgcgtaatggaggcaaaaacttccccgctatttttcggaggatccaagaccctgtgctgcaggctgtgacaagccagaccagcttgccgggtcattag

SEQ ID NO: 230396 - DNA, 2274 bp, synthetic construct
  misc_feature 1..2274: note = Description of Artificial Sequence: Synthetic coding sequence
  source 1..2274: mol_type = other DNA
atggctgaggttggcagaacagggatttcttaccccggagccctgctgcctcagggtttttgggccgcagtggaagtatggctcgagcgccctcaggtcgcaaataagagactctgcggcgctagactggaggcacggtggagcgccgcactgccatgcgcagaagcgaggggtcccggaacctccgccggatctgaacagaaagaacggggtccaggaccgggacagggtagtcccggagggggacccggaccgaggtctctgtccggccctgaacagggcacagcctgttgcgaactcgaggaagctcagggacagtgccagcaggaagaggcacagcgggaagccgcttccgtgcctctgagggactcggggcatcctgggcatgccgagggcagggaaggtgactttcctgctgccgatctggatagcctctgggaagacttcagtcagagccttgccagaggtaactcagagctgcttgcctttctgacctctagtggggcaggcagccagcctgaggctcagcgagagttggatgttgtgcttaggacagtgattccaaaaaccagccctcactgcccccttaccaccccacggagggaaatcgtagtgcaggacgtcctgaatgggaccattacctttctgcccctagaggaggacgacgaggggaaccttaaggtgaagatgagtaatgtttaccagattcagttgtcccattccaaggaagagtggtttataagtgtgctcatcttctgccccgagcgctggcactccgacggaatcgtgtaccccaagcctacgtggctcggcgaggagcttctggcaaaactggctaagtggtcagtcgaaaacaagaagagtgattttaaatcaaccctaagtctcatttctattatgaaatactccaaggcctaccaagagctcaaggaaaaatataaagagatggtgaaggtctggcccgaggtgactgatcctgagaaatttgtgtacgaggacgtggctattgcggcatatttgctgatcctgtgggaggaagagcgcgcagagaggaggctgaccgcaagacaatcgttcgttgatctgggatgcggaaacggactgctggtccacatactctctagtgaagggcacccaggacgcggtatcgatgtccggcgaaggaagatctgggacatgtacggaccccagacccaactggaagaggacgccattacccctaacgataagaccttattccccgatgttgattggcttataggaaatcatagcgacgagctgaccccatggattcccgtgatagccgcacggtcctcctacaactgccgctttttcgtgcttccttgttgtttctttgatttcattggcaggtacagtaggagacaatctaaaaagacacagtatcgcgagtatctggacttcattaaagaggtcggattcacttgtggcttccatgtggatgaagactgcctgaggatacctagtacgaagcgcgtgtgcttggtcggaaaatccaggacatatcccagttcgagggaagcctcggtcgacgagaaaagaacacagtatatcaaatctagacgcggatgccctgtgtcccccccaggatgggagctgtcccctagccctaggtgggtagccgcaggctctgcgggtcactgtgatggtcagcaagccctcgatgcccgtgtggggtgtgtcacaagggcatgggcagccgagcacggtgccggtcctcaagcagagggtccatggctgccgggttttcatcccagagaaaaagcagagagggtgaggaactgcgctgccctgcctagggacttcatcgatcaagtcgtgctccaggtagctaatctccttctgggtggcaagcagctgaatacaaggtcatcgcgcaacgggagcctgaagacctggaacgggggtgaatcgctatctctggccgaagtggcaaatgagctggacactgagactctccggaggcttaagagagagtgcggtggacttcagaccctcttgcgcaactcacaccaggttttccaggtcgttaacggacgagtgcacattagggattggcgcgaggagacattgtggaaaacaaaacagcccgaggcaaagcaacggttgctcagcgaggcttgcaagacaaggctgtgttggttttttatgcatcaccctgacggctgcgccctctcgactgactgctgccccttcgcccacggacctgccgaactgcggcctccgagaaccacaccacgcaagaaaataagctag

SEQ ID NO: 230397 - DNA, 1236 bp, synthetic construct
  misc_feature 1..1236: note = Description of Artificial Sequence: Synthetic coding sequence
  source 1..1236: mol_type = other DNA
atgtgtattaaattctcctcagtaattgccaagaagaatgaacgctggcacagcgacggaatcgtgtaccccaaacccacctggcttggagaggaactcttagctaagctggcgaaatggtccgtcgagaataagaaatcagactttaaatctactctgtctctcatttccatcatgaaatacagtaaagcttaccaagaacttaaggagaagtataaggagatggtcaaggtgtggcctgaggtcaccgaccctgaaaagtttgtgtatgaggatgtggcgatcgccgcttacctgctaatcctgtgggaggaagaacgagctgagcggaggctcactgcaaggcaaagctttgtggacttaggctgcggcaacggcctgttggttcatatcctctcctctgaaggccatccgggtcggggaatcgacgttcgtcgacgcaagatctgggacatgtatggaccacagacacagttggaggaggatgccatcacacctaacgacaagacccttttccccgacgtcgattggctgatcggcaatcattccgacgagctgaccccgtggattcccgtgattgcagcacgctcatcttacaactgccggttcttcgttctcccctgttgcttctttgatttcatcgggaggtattcccgaaggcagtcaaaaaaaacacagtaccgggaataccttgattttattaaagaggtgggttttacttgtggcttccacgtggatgaggactgcctccgaatcccctccacgaaacgggtttgtctggtgggtaaatctaggacttacccatcatccagggaggccagcgtcgatgaaaaacgcactcagtatattaaatcccggaggggctgcccggtcagccctcctgggtgggagctgtcccctagtcccagatgggtcgcagctggcagcgccggacactgcgatggccagcaagctctggatgcaagggtgggttgtgtgacgcgggcttgggccgctgagcacggagctggccctcaagcagagggtccatggctacccggatttcatcccagagagaaggcagagcgcgtgaggaactgcgcagcgctccctagagactttattgaccaggttgtgctgcaagtggcaaatctgctgctaggcggaaagcagctgaacaccagatcctcccgaaatggctctcttaagacctggaatggcggtggcaagctgtcaactattctcggaaggggctag

SEQ ID NO: 230398 - DNA, 1743 bp, synthetic construct
  misc_feature 1..1743: note = Description of Artificial Sequence: Synthetic coding sequence
  source 1..1743: mol_type = other DNA
atgagcgatacttggagttctattcaagcccacaaaaagcagcttgatagcctccgggagcggctccagcgaagacgcaaacaggatagtggccacctcgatttacgaaaccctgaagcggctctgtctccgacgttccgctccgacagcccggttcccaccgccccaacatccggagggccaaagcccagcacagcttccgcagtgccagagttagccacagaccctgaactcgaaaagaaactattacaccacttgagcgatctagcgttgacccttcctactgacgccgtgagcatttgtcttgccatatccacgcccgacgcacccgctacccaggacggggtggagtctctgcttcaaaaattcgcagcgcaggagctgatcgaggttaaacgtggactgctccaggacgacgcccaccccacactggtgacttacgctgatcattctaaactaagcgctatgatgggagccgtcgccgagaaaaaggggccaggcgaggtcgcaggcacagtcaccggccagaaacggagggcggaacaggactctacgacagtggctgcctttgcatcgtctctggtctcaggtcttaattcctctgcctcagagcctgccaaagaaccggctaaaaagtcacggaaacacgccgcaagcgatgttgatctggagattgagtcattgctgaatcaacagtcaacgaaagagcaacagtcaaaaaaggtgtcccaagaaattttggagctgttaaacaccacaaccgctaaggagcaatccattgtggagaaatttaggtcacgagggcgtgcgcaggttcaggaattttgtgattatggcacaaaggaggaatgtatgaaagcaagtgatgccgacagaccatgcagaaagctgcattttcgaagaatcattaataaacacacggatgagagcttgggcgattgtagttttctgaatacttgctttcacatggacacctgcaagtacgtgcactacgaaatcgacgcctgtatggattcagaagctcctggctcaaaggaccataccccctcacaagagttggctctaacccaatccgtcgggggagactcctccgccgatcgcctgttccctccccaatggatatgttgcgacatccgctaccttgatgtttctatcctgggtaaatttgctgtggtcatggccgacccaccctgggacatccacatggagctcccttacggaacgctgaccgacgatgagatgcgtcggcttaatatcccagtcctccaagacgacgggtttttgtttctgtgggttacaggcagggccatggagttgggccgtgagtgtctgaatctttggggatatgagcgcgtcgacgagatcatctgggtaaagaccaaccaattgcaaaggatcatacgtaccgggagaaccggacattggctaaaccatggcaaggagcactgcctcgtgggggtcaaggggaacccccagggatttaaccagggtctggactgtgacgtcatcgtggcagaagtaaggtctacatctcacaaacccgacgagatctatggtatgattgagcggctgtctccaggcactcgtaaaattgagctttttggtagaccccacaacgtccagccaaattggatcacccttggaaaccaactagatggaattcacttgctagaccccgacgtggtggcgaggtttaaacagcgataccctgacggaatcattagtaaacctaaaaatctctag

SEQ ID NO: 230399 - DNA, 492 bp, synthetic construct
  misc_feature 1..492: note = Description of Artificial Sequence: Synthetic coding sequence
  source 1..492: mol_type = other DNA
atgtccgacacgtggagctccatccaagcacacaagaagcagctggattcacttagggagcggttgcagagacggaggaagcaggacagcggacacctggatcttcgcaaccccgaggccgctctgagccccacatttcggtctgattctccagttccaaccgcacccactagcgggggtcccaagcccagcacggcgtccgccgtccccgagctggccaccgaccctgagctggaaaaaaagctccttcatcatctgagcgacctcgcattgactctcccaaccgatgctgtgtcaatttgccttgctatatcgacgccagacgcgccagccacgcaggatggcgtggaaagtctcctgcaaaaatttgccgctcaagaactcatcgaagtgaaacgcggtttgctccaggacgacgcgcacccaactctcgttacatacgccgatcatagcaagttgagcgcaatgatgggcgcagtggccgaaaaatag

SEQ ID NO: 230400 - DNA, 462 bp, synthetic construct
  misc_feature 1..462: note = Description of Artificial Sequence: Synthetic coding sequence
  source 1..462: mol_type = other DNA
atgtcagatacctggtcctccattcaagctcataagaaacagctggattcgctgagagaacggctccagcgtagaagaaagcaggattctggccatctggatctgcggaaccctgaagccgctctctctcccaccttccggagtgactcacccgtccccaccgctcccacttccggaggacccaaaccctccacagcctcagcagtgcccgaactggccacggaccccgagttagaaaagaagcttctccatcatttaagcgatctcgcactcactctgccaacggatgcagtttctatctgtctggctatctccaccccagatgcccctgctacccaggacggtgtcgagtccctgcttcaaaaatttgccgctcaggagttgatcgagcatcgtaaccagcagcggtcacagccgaggaaccagggtaacatgctcccgcaaatgctgatctggcgttag

SEQ ID NO: 230401 - DNA, 879 bp, synthetic construct
  misc_feature 1..879: note = Description of Artificial Sequence: Synthetic coding sequence
  source 1..879: mol_type = other DNA
atgctaggggcttgggctgtggagggcactgccgtggcccttctgagacttttgctgctcctgctgccccctgccattagaggccctggactgggagtagcaggtgttgccggtgccgctggtgccggtctgcccgagtccgtgatttgggccgtgaacgcaggtggggaggctcatgttgatgtgcatgggattcacttccggaaagacccacttgaaggcagagtgggaagagcatctgattacggtatgaagttgcccattttgagatcaaatccagaggatcagatcctgtatcaaaccgaacgctataatgaggagaccttcggttacgaagttccaatcaaagaggaaggcgattatgtgttggttctcaagttcgcagaggtctactttgctcagagccaacagaaggtctttgacgtacgattgaatggtcacgtggtggtcaaagatcttgatatattcgaccgcgttgggcattccaccgcccatgatgagatcatcccaatgagtatccgcaagggcaaactatccgtacagggggaggtctctacctttaccggcaaactgtatatagagttcgtcaaaggctactatgataatcctaaggtgtgtgctctgtacattatggctggcacagtggacgatgtgccgaagctgcagccgcacccagggctggagaaaaaggaagaggaggaggaagaagaggagtacgacgaagggtctaacctcaagaagcagacaaacaaaaaccgtgttcagtcaggcccacgaacccccaatccatacgctagtgacaacagttcactcatgtttcccatcttggtagccttcggggttttcatccccactctcttttgtctttgccggttgtag

SEQ ID NO: 230402 - DNA, 1035 bp, synthetic construct
  misc_feature 1..1035: note = Description of Artificial Sequence: Synthetic coding sequence
  source 1..1035: mol_type = other DNA
atgcttagtgaggtgttattagtcagtgctcctggtaaggtaatcctgcacggagaacacgcagttgtgcatggcaaagtagctctcgccgtgagcctgaatctcaggacgttcctccggctgcaaccacattctaacgggaaggtggatctgagtctccctaacattgggatcaagcgtgcttgggatgttgccagactgcaatctttggatacctcttttttagagcagggggatgtcactacaccgaccagtgagcaggtcgagaaattaaaagaggtggcaggactccctgatgattgcgcggtaacagagcgcttggccgtgctggcgtttctctacctttacctgtccatctgcagaaagcaaagatggaccaaggaagaccttgaacttataaacaagtgggcctttcaaggtgaaagaatgattcatggcaacccatcaggcgtggataacgcagtgagtacctggggaggagccttgagatatcaccaagggaaaataagctccttgaaacgcagccccgcactgcagatactgctgactaacacaaaagtaccacgtaatacaagagctctggtggccggagttcgtaaccgattgcttaagtttcccgaaatcgtggcaccattgctaaccagcatagacgccatcagtctggagtgcgagcgtgttctcggtgagatgggagaagcccctgcccctgaacaatacttagttctggaggaactgattgatatgaaccagcatcacctgaatgctcttggcgtgggacacgcttccttggatcagctctgtcaggtgacaagggcacgcggactccacagtaagcttaccggagcgggtggtgggggttgtggaattactttattaaaacccggattggagcagccggaagttgaggcaacaaagcaagccctaaccagctgtggcttcgactgcctcgagacatccatcggtgcccctggcgtctctatccattccgcaaccagtttggatagccgtgtccagcaggcattggatggattgtag

SEQ ID NO: 230403 - DNA, 516 bp, synthetic construct
  misc_feature 1..516: note = Description of Artificial Sequence: Synthetic coding sequence
  source 1..516: mol_type = other DNA
atgctttccgaagttttactcgtctctgctccaggaaaggtcatcctgcacggagagcacgccgtcgtgcatgggaaggtagcacttgccgtctcgctcaatcttcgcactttccttagactgcagccacactcaaacgggaaggtggacctgagtctgcccaacatcgggatcaagcgtgcctgggatgttgctcggcttcagtcgctggataccagcttcttagaacagggcgacgtgacaacccccacctcggaacaggtggagaaattgaaagaggtcgccggactccccgacgactgcgccgttactgagcggctcgccgtgttggcattcctgtatctctacctatcgatctgcagaaagcagcgcgcactgccaagtctggatattgttgtctggagcgagcttccacctggagcaggattggggagctcagcagcgtactctgtttgtctggccgcagcccttctgacagtgtgcgaagaaattcctaatcccttgaaagatggatag

SEQ ID NO: 230404 - DNA, 1035 bp, synthetic construct
  misc_feature 1..1035: note = Description of Artificial Sequence: Synthetic coding sequence
  source 1..1035: mol_type = other DNA
atgctttccgaggttctcctcgtttcagcaccgggaaaggtaatcctacatggcgagcacgcggtcgtacatggtaaggtggctctggccgtcagcctaaaccttaggactttccttagactgcagccccactcaaacgggaaggttgacctgagtctgccaaatatcgggataaagcgtgcctgggatgttgccagactccaatccctagacacttccttcttggaacagggggatgtgacaacaccaacctctgagcaagtcgaaaaactgaaggaagtggcagggctgcccgacgattgcgccgttactgaaaggctggctgtgttggctttcctatatttgtacttgagtatctgccgcaagcagcggtggaccaaagaggacctcgaactgattaataaatgggcgttccaaggcgaacgtatgatacacggcaatcccagtggggtggataatgcagtgtctacatggggaggagcgctgcgctaccaccagggaaaaatcagctctttaaagagatcacctgcccttcagattcttttgaccaacacgaaggtgccgagaaacactcgcgctttggtggcaggggtgaggaatcgtctactgaagttccccgaaatcgtagctcccttactgacgtcgatcgatgctatcagtctggaatgcgagagggtgctgggagaaatgggagaggcgcctgctcctgagcagtacctggtcttagaggaacttatcgacatgaatcagcatcatctgaacgccttaggagtcggccatgccagcttggaccagctgtgccaggtgacgagggccagaggcttgcactctaagctcacaggtgcgggtggtggcggatgcggtataaccctgcttaagcctggtctcgagcaacccgaggttgaagcaacgaagcaggccctaacttcctgtggctttgactgcctcgagacaagtattggcgctccaggcgtaagcattcattccgccaccagtctagattcaagagtccagcaagccctggacggtttgtag

SEQ ID NO: 230405 - DNA, 609 bp, synthetic construct
  misc_feature 1..609: note = Description of Artificial Sequence: Synthetic coding sequence
  source 1..609: mol_type = other DNA
atgatccatggcaatccatcaggcgtggataatgctgtgtcaacctggggcggagcccttcgctaccatcagggaaagattagttccctaaaaaggagtcccgcactgcagattctccttaccaatacgaaagttccaaggaacaccagagcgctggtcgccggtgttcgcaaccggctgttgaagttccccgagatagttgcccctctactgacatctatcgatgcaatctctttggagtgcgaaagagtgctaggagaaatgggcgaggccccagcccctgagcagtatctggtgctggaggagctgatagatatgaatcagcaccatctcaatgcactgggtgtcggccatgcgtccctggaccagctgtgccaggtgacccgagccagaggtcttcattcgaagctaaccggagccggaggtggagggtgtggcatcacccttctgaagccaggactagagcagcctgaggtcgaagccaccaagcaagctcttacctcttgcggttttgactgcctcgagaccagtatcggggcaccaggagtgtctattcactcggctacgtccctggattcacgggtccagcaggccctggatggactttag

SEQ ID NO: 230406 - DNA, 606 bp, synthetic construct
  misc_feature 1..606: note = Description of Artificial Sequence: Synthetic coding sequence
  source 1..606: mol_type = other DNA
atgctgagcgaagtgctgttggtctctgcgcctggcaaggttattcttcatggcgagcacgccgttgtccatgggaaggtagctctcgcagtcagtctgaatctccggactttcctgcgcttacagccgcactcaaatgggaaagttgatctcagtctgcctaacattggcatcaagcgggcatgggatgtggctcgcttacagagcctggacacttcatttctggaacaaggcgatgtcacaactcccacaagcgaacaagttgaaaagctgaaagaggtagctggcctgcccgacgattgcgctgtaactgagcggctggccgtacttgccttcctttatttgtacctctctatctgtaggaaacagcgggcattgccaagcctcgacatcgtggtgtggagtgagctgccacctggtgctggtctgggctctagcgctgcatactctgtctgcctggccgcagctctcctcactgtctgcgaggaaatccctaatccactgaaggacggggactgtgtgaatcggtggacaaaggaagacctagaacttatcaataaatgggcctttcagggagagagaatgattcacggcaatccttcctag

SEQ ID NO: 230407 - DNA, 1563 bp, synthetic construct
  misc_feature 1..1563: note = Description of Artificial Sequence: Synthetic coding sequence
  source 1..1563: mol_type = other DNA
atgcctagtctggtcgtttccggtataatggagcgaaacggcggttttggggagctgggctgcttcgggggaagcgcaaaagataggggactcttagaggacgaaagagccctgcagcttgcccttgatcagctgtgcctgctgggcctgggagagccaccggcacctaccgctggggaggacgggggaggcggagggggaggcgcacccgctcagcctgccgcaccacctcagcccgctccccctccaccaccggcagctccacctgccgctcctacggccgcacccgcagcacagaccccccagcccccaacagcacctaagggagcttcagacgctaagctttgtgccttatacaaagaggccgagctccggctgaaaggcagtagtaacacgacagaatgtgtgcctgtgcctacatccgaacatgtagcagaaatagtaggaagacaaggatgtaagattaaggctttaagggccaagacaaacacatacataaagacacccgtgcgaggggaagagcccgtgttcatggttaccgggagaagagaggatgttgccaccgccaggcgggaaattatttccgctgctgagcacttctccatgatacgggcatccaggaacaaaagcggggctgcctttggcgtcgccccagcactgcctggacaagtcactattcgtgtgcgggttccttaccgggtggttgggctggtcgtcgggcctaaaggagctaccattaagagaatacagcagcagaccaatacttatattattactcccagtcgggacagagatcctgtgtttgagatcaccggggctcccggaaacgtggaaagagctagagaggagattgagacccatatcgccgttcggacaggcaagatcctggaatacaacaacgagaacgatttcctggccggttcacccgacgccgctatcgattcgaggtactcggacgcatggagagttcaccagccaggctgcaagccattgagcacctttagacagaattcactagggtgcatcggcgaatgtggcgtagacagcggctttgaagcacccagactcggcgagcaaggaggagactttggttacgggggatatctgtttcctggatatggcgtaggaaagcaagatgtgtattatggcgtggctgagactagcccaccattgtgggcaggtcaagaaaatgctaccccaacttcagtcttattttcttcggcttcatctagttcaagctcctccgccaaggctcgggcaggccctccaggcgctcatcgatctccagctacttcagcgggtccagaacttgccggactcccacgcagacctcctggggagccactgcagggttttagtaagctcggcggtggagggctaaggtcacccggtggaggtcgcgactgcatggtgtgcttcgagtcagaagtaaccgctgccttagttccctgcggccacaatctgttttgtatggagtgcgccgtgcgaatctgtgaaagaaccgaccctgagtgtccagtgtgccacattacagctacccaggccattcggatcttctcctag

SEQ ID NO: 230408 - DNA, 1710 bp, synthetic construct
  misc_feature 1..1710: note = Description of Artificial Sequence: Synthetic coding sequence
  source 1..1710: mol_type = other DNA
atgcccagctctctgttcgcagaccttgaaagaaatggatccggcggtggaggtggaggttcttcgggcggtggcgaaaccctggatgaccaacgggcattgcagctggctctggatcaactgtctctgctaggtttggacagcgacgaaggagcttcactctacgatagcgagccaagaaaaaagagcgttaatatgacagaatgcgtaccagtccccagctccgaacacgtagcagagattgtggggagacagggatgcaagatcaaggcactgcgagcaaagaccaatacatatattaagactccagtgagaggtgaagagccagtgtttgtggtaaccgggaggaaagaagacgtggccatggccaggagagagattatttcagcggcagagcatttttccatgatcagggcttcccggaacaagaacaccgccctcaatggtgcagttccaggaccacccaatctccccggtcagactactattcaggtgcgggtgccttatagggtcgttggcctggtcgtgggccctaaaggcgcaaccatcaaaagaatccagcagcaaacccacacttacattgtgaccccgtcacgggacaaagaaccggtctttgaggtgacagggatgccggaaaatgttgaccgggctcgcgaagagatcgaggcacatatagccttgcgcacgggtgggattatcgagctcacggatgagaacgacttccatgccaatggaacggatgtgggctttgatctgcaccacggttcgggcggaagcggacctggctccctgtggagtaagccaacccccagcatcactcctacaccgggtcgaaaacccttcagttcttatcgtaatgattcaagctcgtctttgggatcagcctccactgactcttacttcggtggaggaactagtagcagcgctgccgcaacacagagactggctgactatagccccccttccccggctttaagttttgcccacaatggaaataacaataacaatggaaatggctacacctatactgcaggaggagaggctagcgtcccgtctccagacggctgtccagagcttcagcccacatttgatccggcacccgcaccgccacctggtgccccactgatctgggcccaattcgaacggtctcctggaggaggaccagcagcaccagtctcttcgtcgtgctcatcctcggcgtcctcttccgctagcagcagtagcgtggtatttcctggaggcggagccagcgctcctagcaacgcgaatttggggttgctcgttcaccgcaggttgcaccccggtacatcatgtccacgcctgtctcctccccttcatatggctcctggcgctggggagcaccatctggccaggcgagtccggtcagaccctggaggagggggactcgcttacgccgcttacgcaaacgggctgggcgcacagctcccagggctgcagccgagcgatacgagtggctcctcttctagctcatcatcgtccagcagctcttctagcagttcatcaggcctgagacggaaggggagcagggattgttccgtgtgcttcgaaagcgaggtcattgccgctctggtgccctgtggccacaatctcttttgtatggagtgcgcgaaccgcatttgcgagaagtctgagccagaatgcccggtctgccataccgctgttacccaggctattcggatcttctcatag

SEQ ID NO: 230409 - DNA, 1980 bp, synthetic construct
  misc_feature 1..1980: note = Description of Artificial Sequence: Synthetic coding sequence
  source 1..1980: mol_type = other DNA
atgccatccggttctagcgccgcactggcgctcgccgcagcacccgctcctcttcctcagcctcccccacccccacctccacccccaccaccccttcctcctccctcaggcggtcctgagttagaaggggacgggctcctcctgagggagcgcctggccgctctgggactcgatgatccctcacctgcagagcccggagctcctgcactgagggctcctgcagccgcagcgcaaggtcaagcccgtcgcgcagcagagctgtctcccgaagagagagcaccacctgggcgtccaggcgctccagaagcagcagagctcgaactagaggaagatgaagaggagggggaggaggctgaactcgatggcgacctgttggaagaagaggagctagaagaagccgaggaggaggaccgttcctcgttactcttgttgtcacccccagccgcaaccgcatctcagacccagcagatccctggtgggtcactgggaagtgtcctgcttccagctgccaggtttgacgctcgcgaagcggcagctgccgctgctgccgctggcgttctatacggcggtgacgacgctcaggggatgatggcagccatgctttctcatgcctacgggccaggagggtgcggagcagccgcagctgcattaaacggcgagcaggctgcactgttgcgacggaaaagcgtgaatacaacagagtgcgttccagtgccttcgagtgaacatgttgctgaaattgtcggcagacagggatgtaaaattaaggccctgcgagctaaaactaacacctatatcaagacccctgtccggggtgaagagcccatctttgttgtgacaggaaggaaggaagacgtcgcaatggctaagcgggagattctgtctgccgctgaacatttcagtatgatccgcgcatcccgcaataagaacggaccagccctcgggggactgagctgcagccccaacttgccgggtcaaacaacggttcaggtgagagttccctaccgggtggttgggctggttgtgggccctaagggtgctacaattaaaagaattcagcaacagacgcacacttatatcgttactccgtcgcgtgataaagagccggtgtttgaggtgacgggcatgcctgagaatgttgaccgagcgagggaagagattgaaatgcatatagctatgagaactggtaattatattgagcttaatgaagaaaacgacttccactacaatggaactgacgtgagcttcgaaggtggaaccctgggatctgcctggttgtctagcaatccagtgccaccaagtagggcacgcatgatttcaaactaccgtaacgacagttccagctctcttggcagtgggagcaccgactcatatttcggaagcaaccgcctggccgattttagcccgacgtcccccttctccaccgggaacttctggtttggggacactctgccctcagtgggctccgaggatctggccgtggactctcctgcattcgatagcttgcctaccagcgcacagaccatttggactcctttcgaacccgtgaaccctctgagcgggtttggtagtgatccatctggcaatatgaaaactcagcgcagaggtagccagccatctactcctagactgtcgccaacctttcctgagtctattgagcacccactggcacggcgagtgcgctcagatcccccatctactggcaaccacgtcgggctacccatctacattccagctttttcgaacggaactaattcctattcttctagtaatggtggcagcacgtcgtcctcacctccagagagtaggcgtaagcatgattgtgtgatctgctttgagaatgaagtgatagctgctctagtcccatgtggccacaatttgttctgtatggaatgcgcaaacaaaatttgcgaaaagcggactccgtcatgccctgtttgtcaaaccgccgttacacaggctatacagatacattcttag

SEQ ID NO: 230410 - DNA, 498 bp, synthetic construct
  misc_feature 1..498: note = Description of Artificial Sequence: Synthetic coding sequence
  source 1..498: mol_type = other DNA
tggaggtggacgtcatgtcggaggagcggatggggggcactggcaacccgtactcgcaggggaagaccgggaactcccccacctccgagaccttctccacctgacgttttcgccggattcgcccctcatcctgctgccttggggccaccaaccttgctggccgatcagatgagtgtgatcgggagcaggaaaaagtctgtcaacatgaccgagtgtgtgcccgtgccatcctccgagcacgtggcagagattgtgggccgacagggttgtaagatcaaagctctcagagcaaagacgaatacctatatcaaaacacccgtcagaggcgaggagcccgtgtttatcgtgactggtagaaaggaagacgttgaaatggccaaaagagagatcctgtctgcagccgaacatttttcgatcatccgcgctacacgctctaaagctggcggactgcctggtgccgctcaggggccacccaatctccctggacaaacaacctag

SEQ ID NO: 230411 - DNA, 2001 bp, synthetic construct
  misc_feature 1..2001: note = Description of Artificial Sequence: Synthetic coding sequence
  source 1..2001: mol_type = other DNA
atgccatcatctttagggcaaccagatggtgggggaggaggaggcggaggcggaggcggtgtgggtgccgcaggcgaggatccaggaccagggccagcccctccacccgagggagctcaggaggctgcaccagcacctcggccacctcctgagccagacgacgcggcagctgccctccgcctggccctggaccagctaagtgcgttagggttagggggagccggtgataccgatgaggagggtgccgcaggagacggtgccgctgctgctgggggagccgatggaggtgccgcacccgaacctgttccacccgatggaccagaagcaggcgcaccacccacattggcccctgcggtcgccccagggtcgctaccgctgctggatcccaacgctagtcccccaccgccaccaccaccaaggccaagtcccccagatgttttcgcaggtttcgcacctcaccccgctgccttgggccctcccacgctcctagccgatcagatgtctgtgatcggctccaggaagaagtctgtgaacatgaccgagtgtgtgccagtgccctcaagcgagcatgttgcagaaattgtaggcagacagggttgtaaaatcaaggccttgcgagccaagacgaacacatatattaagacaccagtgcgcggtgaagagcctgtgtttatcgtgaccggcagaaaagaggacgtggagatggctaaacgggaaatcctctccgccgcagagcatttcagcattatcagggcaactcgctcgaaagcgggtggcctgcccggtgccgctcagggacctcccaacctgccaggacagaccacaattcaggtccgagttccataccgagtcgtaggcctcgtcgtgggccctaagggggctactatcaaacgcatacagcagcgcacccatacgtacatagtgacccccggaagagataaggagcctgtgtttgctgtgaccggaatgccagagaatgtggaccgtgcgcgagaagagatagaggcccatattactttaaggactggtgcttttacagacgccggaccagactctgacttccatgcaaatggcactgatgtttgtctagatttgctgggtgcagctgcatctctctgggctaaaacaccgaatcagggaaggcgcccacctaccgctacagccggactgaggggagatacggccctgggagccccttctgctccagaggccttttacgcaggcagcagaggaggccctagcgttcccgatcctggccctgcgagcccttactctgggtccgggaatggtgggtttgcatttggtgccgaaggtccaggcgctcctgtggggaccgccgctccagatgattgcgattttggcttcgatttcgatttcctcgccctggacttgacggtgccagccgcagctacaatatgggcaccgttcgagcgcgctgctccgcttcctgccttctccggatgcagtaccgtcaatggagcccctggcccaccggcagcaggcgcaagacgtagcagtggcgctggcacccctaggcattccccgacactccctgagcctggcggactgaggctggagcttcccctgagtcgccgtggtgcccctgatcccgtgggtgctctgtcttggagaccccctcaaggccctgtgagttttcccggaggtgccgctttttcaacagctacatccttaccgagttcgcccgctgccgcagcgtgcgcaccactggattctggtgcttccgagaattccaggaagccaccgagcgccagttccgcccctgccttggcacgcgagtgtgttgtttgcgccgaaggcgaagtgatggcagccttggtgccttgcggccataacctattttgtatggattgcgccgtccggatttgcggaaaatcagagcccgagtgccccgcttgtcggacgccagccacacaggccatcagggtcgagacagaaaccccgcagcctggaggagcatctgctttgcagcgccagtattag

SEQ ID NO: 230412 - DNA, 1956 bp, synthetic construct
  misc_feature 1..1956: note = Description of Artificial Sequence: Synthetic coding sequence
  source 1..1956: mol_type = other DNA
atgccaagcagtctggggcaaccagatggcggaggtggtggcggtggcggaggaggcggagtgggcgctgctggagaggatcctggaccgggacctgcaccccctcccgaaggggctcaagaggccgcacctgccccacgcccaccccctgagccggatgacgcagcggctgcgctgaggctcgccttggaccagttgtctgccctgggactgggcggagcaggagataccgacgaagaaggtgccgcaggcgacggagcggctgctgccggtggcgcagatggtggagctgcacctgagcccgttccacccgatgggccagaggcaggggcaccgcctactcttgccccagctgtcgctcctggtagtttacccctgcttgatccaaacgcaagtcctccgccacctcccccaccaaggcccagtccccctgacgtgtttgcaggttttgctccccatccggcagcccttgggccaccaacactcttagcagatcagatgtctgtcatcggttctcgtaagaaatcagtgaatatgaccgagtgcgtgcccgtcccgtcttcggagcacgttgctgaaatagtaggacggcaaggatgtaagattaaggctcttcgggcaaagaccaacacctacataaaaacccctgttcgaggagaagagcccgtgttcatcgtcacggggagaaaagaggatgtcgagatggctaagcgcgaaattctaagcgcggctgagcacttttcgatcattcgggcaacaagaagcaaggcaggcggtctgccgggagcggctcagggccctcccaacctgccaggccagacgaccatccaggtcagagtcccctatcgagtagtaggcttggtggtcggtcctaaaggcgctactatcaaacgtattcagcagcgaacccacacttacatcgtgaccccgggaagagacaaggagcctgtgtttgccgttacaggtatgccagagaacgtagaccgggcaagagaggagatcgaagcccatataaccctgcgcactggtgcattcacagacgccggacctgactccgatttccacgcaaacggtacagacgtctgtctggaccttttaggcgcagccgctagtctgtgggcgaagaccccgaaccaagggagacgtccgccaacagcaaccgcaggattgaggggagacaccgctcttggagcaccatcggcgcctgaagcgttctatgccggtagtaggggtggacctagcgtgcccgacccgggaccagcaagcccctacagcggaagtggcaacggcggtttcgccttcggagctgagggaccgggagctcccgtcggaaccgcggcaccggatgattgcgattttggcttcgactttgacttcctggctttggatctcaccgtaccagctgctgccaccatttgggctccatttgaaagagctgcccctttacctgccttctccggctgcagtacggtgaacggtgctccaggaccccctgcagctggggcaaggagatcctccggcgctggaactccaagacattcacccaccctccctgagcccggtggcctgcgtttagaactacctctctctcggaggggcgctcctgatcctgtgggggctctgtcttggcggccaccacagggaccggtctcttttccgggaggcgctgccttttctacagctacttcactaccctcctcacctgccgctgcagcctgtgctcctctagactccggggctagtgagaattctaggaaaccaccctccgcgagtagtgccccagctctggcacgagagtgcgtggtatgcgcagaaggagaagtcatggcagcactggtaccctgcggccacaacctcttttgcatggattgcgctgtccggatttgtggcaaaagtgaacctgagtgcccagcctgccggacacctgctactcaggccatccatatattttcttag

SEQ ID NO: 230413 - DNA, 966 bp, synthetic construct
  misc_feature 1..966: note = Description of Artificial Sequence: Synthetic coding sequence
  source 1..966: mol_type = other DNA
atgcagtgccgcctccccaggggtctggccggtgctttgctaacccttctgtgtatgggactgctgtgtttaagataccatttgaacctaagtccccagcgtgtccagggtacgccagagctgtcccagcctaacccgggacctcctaagttgcaactgcatgacgtttttattgctgttaaaaccacacgcgcattccacaggctaagacttgaactcctcctcgacacatgggtgtcccgcaccagggaacagactttcgtatttaccgattcccctgacaaagggctgcaggagcgcctgggcagtcacctggtggttactaactgcagcgcagagcactcacatcctgcactgagctgtaaaatggccgctgagtttgatactttcctggcctccggcttacgttggttttgtcatgtggatgacgataactacgtgaatccgagggctcttcttcaactgttgagggcttttccgctcgccagagatgtgtacgttggacgtccgagccttaatcgaccaattcatgctagcgaacctcagccacataatcgaaccagactggtgcagttctggttcgcaactggcggagctggtttttgcatcaatagaaagcttgctctcaagatggccccttgggcttctgggagccgatttatggatacatccgcactgataagattgcccgatgactgcaccatgggatacattatagagtgcaagttgggaggtcgtctccagccaagtcctttatttcactcccacctagagaccctacagctgctccgcacagcccagctccccgagcaggtcacactgtcatatggtgtcttcgaaggtaaattaaatgtgatcaagctgcaggggccattttcccccgaagaggatccttccaggttccggagtctgcattgcttactttacccagacaccccctggtgtccacagctcggcgcacgttag

SEQ ID NO: 230414 - DNA, 924 bp, synthetic construct
  misc_feature 1..924: note = Description of Artificial Sequence: Synthetic coding sequence
  source 1..924: mol_type = other DNA
atgcagtgtagactccccagagggctggctggagccttgcttaccctcctctgtatggggcttctctgcctgcggtatcatctgaacctgtcaccccagcgcgtgcagggcaccccggagctaagtcagccaaatcccggtcctccaaagttgcaactccacgatgtgttcatcgccgtgaaaactaccagggctttccatagacttcgtctcgagctgctgctcgacacatgggtgtcgagaacacgggagcaggtgacacgcagccacctcgtcgtcacgaactgttcagcggagcattcccatcctgctctaagctgtaaaatggcagccgagttcgatacatttctggccagcggcctccgatggttttgccatgtcgacgacgacaactacgtaaacccccgagcactacttcagctcctacgagccttcccgcttgcgagggatgtgtatgtgggcagaccaagtctgaacaggccaattcatgctagtgaacctcagccacataacagaaccaggcttgtccagttctggttcgctacgggtggcgctggattctgcatcaatcgcaagctcgctctcaagatggccccatgggcaagtgggtctcgcttcatggataccagcgcactgataaggctgccagacgattgtaccatgggctacatcattgagtgtaaactcgggggtagattgcagccaagcccactgttccactcccacctcgaaacacttcagctccttaggacagctcagctcccagagcaggttaccctgagctatggagtgttcgaaggaaaactgaacgtaatcaaattgcaggggcctttcagtccagaggaggatccatcaagatttcggagtcttcactgcttgctgtaccccgacaccccatggtgtccccagctcggcgcaaggtag

SEQ ID NO: 230415 - DNA, 357 bp, synthetic construct
  misc_feature 1..357: note = Description of Artificial Sequence: Synthetic coding sequence
  source 1..357: mol_type = other DNA
atgcagtgtcggctcccacgagggttggccggtgcgctactcaccctgctttgtatgggattactgtgccttaggtatcacctaaatttgtctcctcagcgtgtgcaaggcacccctgagttaagtcagcccaaccctggtcctccaaagttgcagcttcacgatgtatttatcgccgtgaaaaccacccgcgcatttcacagacttcgcctggagttgctcctggacacatgggtgagcaggaccagggaacagaccttcgtattcactgactctcctgataaggggctgcaggagcggctggggtccccagatagttctagtctgctgcaagggccaaccttatggtccccgtag

SEQ ID NO: 230416 - DNA, 399 bp, synthetic construct
  misc_feature 1..399: note = Description of Artificial Sequence: Synthetic coding sequence
  source 1..399: mol_type = other DNA
atggccgctgaattcgataccttcctggcctcaggactgagatggttttgtcacgtcgacgatgacaattatgtcaatccgagggctctgctgcaactgctccgggctttcccactggccagggacgtgtatgtgggtaggccgtccctgaacaggcccattcatgcttcagaaccacagcctcataatcgcacccgtctggttcagttctggttcgcaacgggcggagctggcttttgcattaaccggaagctcgcactcaaaatggcgccttgggccagcgggagcagattcatggacacctctgctctcattaggctgcctgacgactgcactatggggtatattattgaatgtaaacttggaggcagactacagccttctcctctgttccactag

SEQ ID NO: 230417 - DNA, 132 bp, synthetic construct
  misc_feature 1..132: note = Description of Artificial Sequence: Synthetic coding sequence
  source 1..132: mol_type = other DNA
atggcggctgaattcgatacgttccttgcctcagggctccgttggttctgccacgtcgatgatgataactacgtaaatcccagggccctcctgcaactgctcagggcatttcctctggcacgggacgtgtag

SEQ ID NO: 230418 - DNA, 264 bp, synthetic construct
  misc_feature 1..264: note = Description of Artificial Sequence: Synthetic coding sequence
  source 1..264: mol_type = other DNA
tgatcccatttagaaactcttcagctgctccggacggcccagctgccggagcagataagtctgccgccattgagcgccttaagtcgatacaccctcgtgagccccgctggctgccctatgaatcctgaacttctcggtaagggttgggctgagacttccggttgcgcgctggctcccaaagtcgctctgtgggtaccgggaaagtgccttgttatagggtcaccatggcaggggctgcgcgtggtcggaaaaccacgcatctag

SEQ ID NO: 230419 - DNA, 999 bp, synthetic construct
  misc_feature 1..999: note = Description of Artificial Sequence: Synthetic coding sequence
  source 1..999: mol_type = other DNA
atggggctgggcccagtgttcctactgctggcgggtatttttcccttcgccccacctggcgctgcggctgagccgcactccttgcggtataacctcacagttctgtcgtgggatgggtccgtccagagcggatttttagctgaggtgcacttggacgggcagcctttcttaagatatgacaggcagaagtgccgcgcaaaaccccagggccagtgggctgaagacgtgctaggtaacaagacttgggatagagaaacccgggacctcaccggaaatggtaaggatcttcgcatgaccctggcgcacatcaaggatcagaaggaggggttgcacagtctgcaagagattagagtgtgcgaaattcacgaggataactcaactcgcagttcccagcatttctactacgacggcgaacttttcctgtcccagaacttggagacagaggaatggactgtgccccaatcctctagagctcagacactggctatgaacgtccgaaatttcctgaaggaggatgctatgaagacaaaaacccactaccacgctatgcacgccgattgcctgcaggaactccggaggtacctggagagtggggttgttctgcggcgtacagtgccccctatggtgaatgtgacacgttccgaagcctcagagggaaacatcactgttacatgtcgggcatcatccttttatcctaggaacataatcctgacctggagacaggatggtgtgtctctgagccatgacacccagcaatggggggatgtgctgcctgatggcaacggaacataccagacatgggtggctactaggatctgtcggggtgaggagcaaagatttacatgttacatggaacattctggcaatcactccacacatccagtgccaagtgggaaagtgctcgtgttgcagagccactggcagactttccatgtgtcagctgtagccgcaggatgttgctacttctgctattattatttcctatgtccactgctctag

SEQ ID NO: 230420 - DNA, 585 bp, synthetic construct
  misc_feature 1..585: note = Description of Artificial Sequence: Synthetic coding sequence
  source 1..585: mol_type = other DNA
atggggcaacgagaccagggtctggaccgggagcgtaagggcccacaggatgaccctggcagctaccagggccctgagagacgaaactttctgaaagaagatgccatgaagacaaagacccactatcatgcaatgcacgcggattgccttcaggaactgcggagatatttagagagcggagtggtgctgcgcaggacagtgcctccaatggtaaacgtgactagaagcgaggcgtccgaaggcaacatcacagttacatgtcgcgcaagctccttctaccccagaaacatcatactgacatggcgccaggacggcgtatctcttagtcacgatactcaacagtggggtgacgtactgcccgacggaaatgggacctaccaaacctgggtggccacaaggatctgcaggggtgaagagcagcgattcacatgttacatggagcattcgggaaatcacagcacacaccctgtgcccagtgggaaagtgctcgtgcttcagtcacactggcagacgttccacgtgtcagctgtggccgcaggctgttgctatttttgctactactacttcctgtgtcccctgctctag

SEQ ID NO: 230421 - DNA, 870 bp, synthetic construct
  misc_feature 1..870: note = Description of Artificial Sequence: Synthetic coding sequence
  source 1..870: mol_type = other DNA
atgggccttggccctgtgttcctcctgttggctggaatcttccccttcgccccacctggggcagccgctgagcctcactccctccggtacaaccttaccgtcctttcatgggacggatccgtgcagagcggttttcttgccgaggtgcaccttgatgggcagccattcttgcggtatgatcggcagaagtgtcgagccaaaccgcaagggcagtgggccgaagacgtgctcggtaataaaacctgggatagggaaacgagagacctgaccggtaacggaaaggatctgcggatgaccctagcacacatcaaggatcagaaggaagtgcctcagtctagtcgggctcaaaccttggcaatgaacgtgcggaactttctcaaggaggatgccatgaaaaccaaaacccactatcatgccatgcatgccgactgtctacaggagctgcggaggtacctcgagagtggagtcgttctgcgccgaacagtgcctcctatggtgaatgtgactcgtagcgaggcttctgaagggaacatcactgtcacatgcagggcttccagcttttatcctcggaatataattctgacttggagacaggacggtgtttcactcagccatgatacacaacagtggggagacgtcctacccgacggaaacggcacttatcagacctgggtggccactcgaatctgtaggggtgaggagcagaggttcacgtgttatatggaacatagtgggaatcattccacacaccctgtgccatccggcaaagtcctggttttgcaatctcattggcaaacctttcacgtcagcgcagtggctgccggatgctgttatttctgctactattacttcttatgcccgcttctgtag

SEQ ID NO: 230422 - DNA, 738 bp, synthetic construct
  misc_feature 1..738: note = Description of Artificial Sequence: Synthetic coding sequence
  source 1..738: mol_type = other DNA
atgggtcaaagagaccaacgtcttgatcgagaacgaaagggtccacaagatgatccagggtcttatcagggaccggagaggagaaacttcttgaaggaggatgccatgaagactaagacccactatcatgccatgcatgctgactgcttgcaggagttgcggagataccttaagagcggtgttgtattacgcagaaccgtgcccccaatggtaaatgtaacccgtagcgaggcaagtgagggcaatattacagtgacctgccgagcaagcggattttacccctggaacattaccctgtcctggcgccaagacggggtcagcctgtcgcacgacacccagcagtggggtgacgtgcttcctgatggcaatgggacctatcagacttgggtggcgacaaggatttgccaaggcgaggaacagaggttcacctgttatatggagcatagcggcaaccacagcactcaccccgtgccctcaggcaaggtgcttgtgctgcagtctcactggcagacattccacgtatccgccgtggccgctgctgccatcttcgtgatcattattttttatgttcgctgctgtaagaaaaagacatccgccgctgaggggccagagcttgtctctctccaggtcctggaccaacatccggtgggtacatccgatcacagagacgccacccaactggggtttcagcccctgatgtcagacctcggctcaacaggctctaccgagggcgcatag

SEQ ID NO: 230423 - DNA, 1152 bp, synthetic construct
  misc_feature 1..1152: note = Description of Artificial Sequence: Synthetic coding sequence
  source 1..1152: mol_type = other DNA
atgggactgggacccgttttcttactcctggctggtatttttccgtttgccccacctggggcagccgcagaaccgcactctctcaggtacaaccttaccgttctctcctgggacggcagcgtgcagtctggctttctgacggaggtccatttggacggccagcctttccttcgatgcgaccgccaaaaatgtcgagctaaaccccaggggcagtgggccgaggacgtgctggggaacaagacttgggaccgggagaccagggacctgacgggaaacggaaaagatctccgtatgaccttggctcacatcaaggaccagaaagaaggacttcactctctccaggagatacgtgtctgcgagatccacgaggacaactcaactaggagctctcagcacttttactacgatggcgaattgtttcttagccagaacctggaaacaaaagagtggacaatgccccagtcttctagggctcagacacttgcaatgaacgttaggaactttctgaaggaagacgcaatgaagacgaagacacattatcacgccatgcatgctgactgtctgcaggaattgcgcagatacctgaagagcggcgtagttcttagaagaactgtccctcccatggtgaatgtgacacggtctgaggcttctgagggaaatattaccgttacttgtagggcctctgggttttatccctggaacatcactttgtcctggaggcaggacggcgtcagcctatcacacgatactcagcaatggggagacgtcctgcctgacggcaatggaacctaccagacatgggtggctacccgcatatgccagggcgaggagcagcggttcacctgctacatggagcatagtggtaaccactccacacaccccgtcccctccggcaaggttctggtgctacagtcccattggcaaacattccacgtgagtgccgtagcagcggcagctattttcgttataatcatcttttatgtacggtgttgcaagaagaaaacttctgctgcagagggaccggaacttgtatctttacaggtgctggaccagcaccccgtcggaacaagcgatcatcgcgatgctacccagctgggattccagcccctcatgtctgacctggggagcaccggatcaactgaaggggcttag

SEQ ID NO: 230424 - DNA, 870 bp, synthetic construct
  misc_feature 1..870: note = Description of Artificial Sequence: Synthetic coding sequence
  source 1..870: mol_type = other DNA
atgggcctcggtcctgtgttcctcctgctggctggtatctttccctttgcaccccctggagctgccgctgagccccactcattaaggtataacctgaccgtgctgtcctgggacggatctgtacaatcaggctttttggcagaggtgcatctggatggacagccattccttagatatgacaggcagaaatgccgagccaagccccagggacagtgggcagaagatgtcttgggaaataaaacctgggatcgggagacaagggacctcaccggtaacgggaaggacctccgcatgaccctggctcacattaaggatcagaaagaagtcccccaaagctctcgcgctcagacactcgcgatgaacgtccggaatttccttaaggaagatgccatgaagaccaagactcattatcacgccatgcacgctgactgtctgcaggagctcagacggtacttggagagcggtgtagtgcttaggcgaacagtccctccaatggtgaacgtcacccgcagcgaagcgtcagagggcaatatcaccgtaacatgtcgtgcgtcatctttttatcctcggaacatcattttgacctggcgtcaggatggcgtctctttgtcccacgacacccaacaatggggagacgtgttacctgatggtaatgggacataccagacttgggtcgctacaaggatatgcagaggcgaagaacagcggtttacatgttatatggagcattcaggtaaccactctacccatcccgtcccttccggcaaggtccttgtgcttcagtcccattggcagacctttcacgtttctgcagtcgctgcgggatgttgttatttttgctactactactttctgtgcccactgctgtag

SEQ ID NO: 230425 - DNA, 999 bp, synthetic construct
  misc_feature 1..999: note = Description of Artificial Sequence: Synthetic coding sequence
  source 1..999: mol_type = other DNA
atgggcttagggcctgtctttctgttacttgccggtatcttcccttttgccccacccggtgccgctgcagagccccacagtctgcgttataatctgacggtgctatcttgggatggatcggtgcagtccggttttctggccgaagtccacttggatggccagcccttcttgcgatatgacaggcagaagtgtcgtgctaagcctcagggacagtgggctgaagacgttctcggcaataaaacatgggatcgcgagaccagggacctcaccggaaatgggaaggatctgagaatgaccctagcgcacatcaaagaccagaaagaaggcctccactcactgcaggagataagagtgtgcgagatccatgaagataacagtactcgctcctcccagcacttttactatgacggggaactctttctctctcagaatctggagacggaagagtggaccgtgccacagagttctcgagcccagacactggctatgaacgtgcggaactttctaaaggaagacgccatgaaaacaaaaacacactatcatgccatgcatgccgattgcttacaggaactccgtaggtatctggaaagcggcgtggtgctgcgtaggaccgtaccacctatggtgaatgtgacccgatctgaagcgtccgagggcaacatcaccgtgacctgtagagcttcttctttttatcccaggaacatcatccttacctggaggcaagacggagtgtctctcagccatgacacacaacagtggggagacgtgctgcctgacggaaatggcacatatcagacttgggtggcgactaggatctgtaggggcgaggagcagcgttttacctgctacatggaacactcggggaaccactccacccacccagtaccatctggaaaggtgctggtgctccagtcccactggcaaactttccatgtgtctgccgttgcagccggatgctgttatttttgttattattattttctgtgcccactgttgtag

SEQ ID NO: 230426 - DNA, 585 bp, synthetic construct
  misc_feature 1..585: note = Description of Artificial Sequence: Synthetic coding sequence
  source 1..585: mol_type = other DNA
atgggtcagagagaccaaggactggatcgcgaaagaaaaggaccacaggacgatccgggtagctaccagggtcctgagaggcgtaattttctgaaggaagacgctatgaagacaaagacccattatcacgctatgcatgccgactgcctgcaggagcttcggaggtatctagagtcaggggtggttctgcgtagaacagtgccccctatggtcaacgtaacccgttccgaggcatccgagggaaacataaccgtcacttgtagagcttcttctttctatccccgaaatattatactgacatggaggcaggacggagtgtccctgtcccatgatacccagcagtggggggatgtccttcccgatggaaacggcacatatcagacatgggtggccactcgcatctgtaggggcgaggagcagaggttcacctgctatatggagcactccggtaaccattccacacaccctgtcccatcaggtaaagtcctcgtgctgcagagtcactggcaaaccttccacgtgtctgctgtcgccgctggctgctgctatttttgctactattatttcctctgtcctcttctgtag

SEQ ID NO: 230427 - DNA, 831 bp, synthetic construct
  misc_feature 1..831: note = Description of Artificial Sequence: Synthetic coding sequence
  source 1..831: mol_type = other DNA
ttcccatttgcccctcctggcgctgcagccgagccacattcgctaagatacaatcttaccgtcctttcttgggatgggtcagttcagagcggcttcctcgcagaagtccatctggacggccagccttttctgcgatacgatcgtcagaaatgccgggcaaaaccccagggacaatgggccgaggatgttctcggaaacaaaacctgggatcgtgagactagggacctcacaggtaacggcaaggacctgagaatgaccttagcccacatcaaagaccaaaaggaagttccgccaatggtcaacgtcacacggagcgaggcctcagaaggtaacataacggtaacttgtcgtgcctcctctttttacccgcgaaacattactctaacctggagacaggacggcgttagcctgagtcacgatactcaacagtggggtgacgtgttaccagacggaaacggcacataccagacctgggtagctacaaggatttgccagggcgaagaacagagattcacttgctatatggaacactcgggaaaccactccactcatccagtcccatctgggaaggtcctggtcctgcagtcacattggcaaacctttcatgtcagcgccgttgccgcagccgctgccgcaatcttcgtgattattatcttctacgtacgctgttgcaaaaaaaagaccagtgctgctgaggggccagagctggtctcactgcaggtgttagatcaacaccccgtgggtacaagtgaccatagagatgcaacacagctgggttttcagcctctgatgagcgccctaggatcaaccggatcaaccgagggggcttag

SEQ ID NO: 230428 - DNA, 1158 bp, synthetic construct
  misc_feature 1..1158: note = Description of Artificial Sequence: Synthetic coding sequence
  source 1..1158: mol_type = other DNA
atgggcctcggccctgtatttctactgcttgctggtatttttccattcgcccctcctggagctgccgcagagccacactccttgcgatataatctgacggtgctgagctgggacggcagcgtccagtctgggttcttggcagaggtccatttggatgggcagccttttctaagatatgatagacagaaatgtcgagccaagcctcagggacagtgggcagaggatgtccttggcaataagacttgggatagggagacaagagatctgactggaaacggcaaggatctgcgaatgaccctcgcacatattaaagaccagaaggagggcctgcactcgctgcaggaaattcgggtgtgtgaaatccacgaggacaattctacccgatcttctcagcatttctactatgatggagaacttttcttaagtcaaaatgttgagaccgaagaatggacggtcccccaatcaagccgcgctcagactttggccatgaacgttcggaatttcttaaaagaagacgctatgaaaaccaaaacgcactatcacgccatgcacgccgattgtctgcaggagctcagacgctacttggagtccagcgttgtgcttcggaggagagtgccccctatggtgaatgtgacaagatcagaagcaagtgaggggaatatcactgtgacatgtcgggcttcgagcttctaccctaggaatattactctaacgtggcggcaagatggggtatcattgtcccatgacacacaacagtggggtgacgttctgccagacggcaatggcacgtaccagacatgggttgccaccaggatctgccagggtgaggagcagagattcacatgctacatggagcactcaggcaaccactcaactcacccggtgccctcggggaaagttttggtgctccagagccattggcaaacattccacgtgagcgcagttgccgcagctgcagcggcaatcttcgtaattattatattttatgtcaggtgctgtaaaaagaagactagtgcggcagagggccctgagttggtgtctcttcaggtcttggatcagcaccctgtaggaacctccgatcatcgcgatgccacccagctgggatttcagcctctgatgagtgctcttgggtccaccggcagtaccgaaggagcttag

SEQ ID NO: 230429 - DNA, 744 bp, synthetic construct
  misc_feature 1..744: note = Description of Artificial Sequence: Synthetic coding sequence
  source 1..744: mol_type = other DNA
atgggacaaagagaccaagggctggatcgagaacgcaaaggcccacaggatgaccctgggagctaccagggtccagagaggagaaacttccttaaggaggatgctatgaaaacaaagacccattaccacgcaatgcacgccgattgcttacaagaattgcgcagatacctggaaagcagcgtggtcttgaggagaagagtgcccccaatggtcaatgtgacgcgcagtgaagcttcagaaggaaacatcacggtgacatgcagagctagctcattctaccccaggaacatcactctgacctggcgccaggacggtgtgtcattatcccacgatacccagcaatggggtgatgttctcccagacgggaacggaacctatcagacttgggttgctacacggatctgccaaggtgaagaacagcggttcacctgttatatggagcactcaggtaaccattctactcaccctgtgcctagtggcaaagtactggtattgcaaagccactggcagacttttcacgtgagcgcagttgcagccgcagcagcggctatttttgtgattatcattttttacgtgcgctgttgcaagaaaaaaacatcggctgctgagggaccagagctggtgagcttacaggttctcgatcagcaccctgttggcacctctgatcatagagacgccactcagctgggatttcagcctctaatgtcagcccttggatccacgggctccaccgagggcgcatag

SEQ ID NO: 230430 - DNA, 672 bp, synthetic construct
  misc_feature 1..672: note = Description of Artificial Sequence: Synthetic coding sequence
  source 1..672: mol_type = other DNA
ttcccttttgcccctccaggagccgcagctgaaccccactctctcaggtacaatctgacagtcctctcttgggatgggtcagtacagagcggctttttagcagaggttcacctggacggtcagcccttcctccgatacgatagacaaaagtgtagggccaagccccagggtcagtgggcggaggatgttctagggaacaaaacatgggaccgggagaccagagatctcaccggcaacgggaaagatttgagaatgacactcgctcacatcaaagaccagaaagaagtgccccctatggtgaatgtgacccggtctgaagcctctgagggcaatatcactgttacctgccgcgcttcttcattttatccaagaaacatcatcctgacttggcgccaggacggtgtttctctcagccacgacacacagcagtggggtgatgtcctgcccgatggcaatggcacctaccaaacatgggtggccacacgtatctgtagaggagaagagcaaagatttacatgttacatggagcactctggtaaccacagtacccaccctgtgccatcaggtaaagtcctagtgttacagtcacactggcagactttccatgtttccgccgtcgctgcaggctgctgctacttctgttactactattttttgtgccccctgctgtag

SEQ ID NO: 230431 - DNA, 672 bp, synthetic construct
  misc_feature 1..672: note = Description of Artificial Sequence: Synthetic coding sequence
  source 1..672: mol_type = other DNA
tttccctttgcgccacctggagctgcagcggaaccccactcgcttcgctataacctgactgtgctttcgtgggatggatcggtccagagtgggtttctcgctgaggtccacttggacggccaaccattccttcgatacgatagacagaagtgtagggccaagcctcaaggccagtgggctgaggacgtactgggtaataaaacatgggaccgcgaaacacgcgacttaaccggaaatggcaaagacctgaggatgaccctggcgcatattaaggaccagaaggaggtcccgcctatggtgaacgttacccgcagtgaagcttcggaaggcaatattacagtcacatgcagagcatcctcattctaccctcgcaacataatcctcacctggcgccaggatggcgtgagcctgtcccatgatacccagcagtggggagatgtcctgccggatggcaacgggacgtatcagacatgggtggcaacgcggatttgccgcggtgaagagcagcgcttcacgtgctatatggagcactcagggaaccacagcacccacccagtgccctccggtaaagtgctggtcctacagtcccattggcagacattccatgtatcagccgtggcagcagggtgttgttacttctgttattattatttcctttgcccgctcctgtag

SEQ ID NO: 230432 - DNA, 672 bp, synthetic construct
  misc_feature 1..672: note = Description of Artificial Sequence: Synthetic coding sequence
  source 1..672: mol_type = other DNA
ttcccctttgcccctcccggagcggcagcagaacctcatagtctgagatataatctgacggtgcttagctgggacggcagcgtacagagcggcttccttgctgaagttcaccttgatggacagccatttctgcgttacgataggcagaagtgcagagccaaaccgcaaggccagtgggcagaggatgtcttaggcaacaagacctgggaccgagaaacccgggacctcacaggcaacgggaaagatttacggatgactctcgcacatataaaggaccagaaagaagtcccacccatggttaatgttacgcggagtgaggctagcgaagggaacatcacagtgacctgtcgggcttccagtttctatccgagaaacatcattttaacttggaggcaggatggggtgtcgctgagccatgatactcagcagtggggcgacgtcctgccagacggtaacgggacataccagacttgggttgcgacgcgcatctgccggggagaagaacagcggttcacgtgttacatggagcactcaggaaaccacagcactcatcctgtgccttctggcaaggtgttggtgttacagtctcattggcaaacattccacgtgagcgccgtggccgctgggtgctgttacttctgctattactacttcctgtgtcctctcctgtag

SEQ ID NO: 230433 - DNA, 999 bp, synthetic construct
  misc_feature 1..999: note = Description of Artificial Sequence: Synthetic coding sequence
  source 1..999: mol_type = other DNA
atgggcctcgggcctgtttttctgctactcgctggaatcttcccatttgcgcctcccggtgctgctgctgagccccattccctcagatacaatctcacagtcctgtcttgggacgggtccgtccagtcagggtttttggccgaggtgcacttagacggccagcctttcctgcgttatgaccgacaaaaatgtagagcgaaaccccaaggccagtgggccgaggatgttctggggaataagacgtgggatagagaaactcgtgatctgaccgggaatgggaaggacctgcggatgactttggcccacatcaaggatcaaaaagaaggtctccactctctgcaagaaatcagggtctgtgagatccacgaagacaactctaccagaagctcacagcacttttactacgacggagaactgtttctctctcagaacttagaaacagaagagtggactgtcccacagtcttcccgcgctcaaactctggcaatgaatgttcgtaacttcctgaaagaggatgctatgaagacaaagacacactaccatgccatgcatgcggattgcctccaggagctgcgaaggtatctggagagtggagtcgtccttagaagaactgtcccccctatggtgaacgttactcggagcgaagcctctgaagggaacatcaccgttacttgtcgtgcgagctcattttaccctcgcaacattatcctgacttggcgacaagacggggtgtccctttctcacgatacccagcagtggggagacgtgctgcccgatggcaacggcacataccagacttgggtcgccacaagaatttgccgaggggaggaacaaaggtttacctgttacatggaacatagtggaaaccatagcacgcaccccgtgccatctggcaaagtgctagtcctccaatcgcactggcagacattccacgtgtccgccgtggctgccggttgctgttacttttgctactattactttctgtgtccgttgctctag

SEQ ID NO: 230434 - DNA, 1029 bp, synthetic construct
  misc_feature 1..1029: note = Description of Artificial Sequence: Synthetic coding sequence
  source 1..1029: mol_type = other DNA
atgggcctaggtccagtgttcctcttgctcgctgggattttcccattcgctccaccaggcgctgccgcagaaccccactctctgagatataacctcaccgttttgtcctgggatggatcggtgcagagcggatttcttgcagaggtccatcttgacggacagccctttctgagatacgaccggcagaaatgtcgtgctaaaccacaagggcagtgggcagaagacgttttgggcaataagacgtgggatcgggaaactagagacctcaccggaaatggcaaagaccttcggatgacactcgctcatatcaaagaccaaaaggaggtgccgcagagcagccgcgctcagactctggccatgaacgtgaggaacttccttaaggaagacgccatgaagaccaaaacacattaccacgctatgcatgcagactgcctgcaagaacttcgccgttaccttgaaagctctgtggttctccgacgtcgtgtacctccaatggtgaacgtcactagaagcgaggcttctgagggaaacattacagtgacatgcagagcatccagcttctaccccaggaatatcacactgacctggagacaggacggtgtgtctctctcacacgacacacaacagtggggggacgtcctaccagatggcaacggaacataccagacttgggttgccactagaatttgtcagggcgaggagcagcgattcacttgttatatggagcactccggcaaccattcaactcaccctgtccctagtggaaaagttctcgtgctgcaaagtcattggcagacgttccacgtaagcgccgtggcagctgcagccgctgccatctttgtcatcattatcttctacgtgaggtgttgcaaaaagaagaccagcgccgcagaaggacccgagctggtgagccttcaagtgctggatcaacaccctgtcggtacaagcgatcatcgcgatgcaacacagttagggtttcagccgttgatgtccgctctgggttctacaggcagtacagaaggggcttag

SEQ ID NO: 230435 - DNA, 825 bp, synthetic construct
  misc_feature 1..825: note = Description of Artificial Sequence: Synthetic coding sequence
  source 1..825: mol_type = other DNA
tttcctttcgcgcctccaggggctgccgctgaaccccacagtctgcgctataatttaacagtgctgtcttgggacggaagtgtacaatctggattcctaacagaggtgcacttggatggccaaccattcctgaggtgtgatagacagaagtgtagagcgaagcctcagggccagtgggccgaggacgtgcttgggaacaaaacttgggaccgggagacccgggatcttacaggcaatggaaaggacctccgcatgacactcgcccacattaaagaccagaaggaggtgccgcctatggtgaacgtcacccgcagtgaggcctcagaaggcaacataaccgttacttgtagagccagtgggttttatccctggaatattaccctatcgtggcgacaggacggagtgtctttgtcacatgacacgcagcagtggggagacgtcctacctgacggaaacgggacataccagacttgggtggccactcggatctgccaaggcgaggagcaaagattcacctgctacatggaacatagcggaaaccattccacacacccagtgccatccggaaaagtactggtcctccagtcacattggcagacctttcacgtgagcgccgttgcggcagcggctatctttgtaatcattatcttctacgtgcgctgttgtaaaaagaaaactagcgcagccgagggcccagagctagtgagtctccaggttttggaccagcatcccgtgggcaccagcgatcaccgcgacgccacccaactgggctttcagccactcatgagtgacctgggctccaccggctcgacggagggagcatag

SEQ ID NO: 230436 - DNA, 585 bp, synthetic construct
  misc_feature 1..585: note = Description of Artificial Sequence: Synthetic coding sequence
  source 1..585: mol_type = other DNA
atgggccagcgagatcagggactggaccgggagcgcaaaggcccacaggacgatcctggaagttatcaggggccagagcgcagaaattttctgaaggaagacgccatgaagactaaaacccattatcatgcgatgcatgcagactgccttcaggaactcaggagataccttgaatctggcgtggtactgagaagaacggtcccacctatggtgaacgtgacacgttcagaagcgagtgagggtaatatcactgttacatgtagagcatcaagcttttatcccaggaacataattctgacatggaggcaggatggggtcagtctgagccacgacacccaacaatggggtgacgtgctcccagacggcaatggaacctatcagacatgggtcgccacgcgtatctgccgcggagaagaacagcgatttacctgttacatggagcactccgggaatcactctactcatcccgtaccttccgggaaggttctggtcctccagagtcattggcaaacattccacgtgagcgcagtcgccgctggatgctgctacttttgttattactatttcctctgtcctctgctttag

SEQ ID NO: 230437 - DNA, 870 bp, synthetic construct
  misc_feature 1..870: note = Description of Artificial Sequence: Synthetic coding sequence
  source 1..870: mol_type = other DNA
atgggcctaggaccagtatttttgctgctagctggaattttccccttcgctcccccaggcgctgccgcagaaccacacagcctgcgctataacctgaccgtgttgtcctgggatgggagcgttcagtctggatttctcgctgaagtgcatctggatggccagcctttcctgcgctacgaccgccagaagtgcagagcgaaaccacagggccagtgggctgaggatgttctgggcaataagacctgggaccgagagacacgcgatctgaccggcaacggcaaagatcttcggatgacactcgcacacattaaagaccagaaggaggtccctcagagtagtagagctcagacactggctatgaatgtcaggaacttcctgaaagaagatgcaatgaagactaagacccactatcatgctatgcacgctgactgcctgcaagaactccggcgttacctggagagcggggtggtgcttcgcagaactgttccccctatggtgaacgttacacggtccgaagcctccgaaggtaatattaccgtcacctgccgcgcttcctccttctaccctagaaatatcattctgacctggagacaggacggagtatctctgagccatgacactcagcaatggggcgatgttttgccagatgggaacgggacctatcagacatgggtcgccacccgaatatgtagaggcgaggagcagaggtttacctgctacatggagcattcagggaaccatagcacccatcctgtgccctcaggaaaagttctggttctgcagtcccattggcaaacattccatgtttccgcggttgctgcagggtgctgttatttctgttactactactttctgtgccctttactatag

SEQ ID NO: 230438 - DNA, 999 bp, synthetic construct
  misc_feature 1..999: note = Description of Artificial Sequence: Synthetic coding sequence
  source 1..999: mol_type = other DNA
atggggcttggacctgtgttcctcctgttggcgggtatcttcccattcgctccccctggcgctgctgctgaaccacattcactcagatacaatcttacagttctcagctgggatggatccgtgcaatctgggtttctcgctgaagtgcatcttgacggacagccatttctgagatacgacaggcaaaaatgtagagcaaaaccgcagggacagtgggccgaagatgttctgggaaataagacatgggatcgcgagacacgtgacctgacaggaaacggaaaggacttacgaatgactctcgctcacattaaggatcagaaggaaggtctgcactcgttgcaggaaatccgggtttgcgagatccacgaggacaactcaacccggtcctcacagcatttttattatgatggcgaactatttctgagccaaaacctggagactgaggagtggaccgtcccacagtctagccgagcacagacactggccatgaacgtgcggaatttcttaaaagaggatgccatgaagactaagactcactaccacgccatgcatgcagattgtttgcaagagctcagacgctatttggaatcgggcgtggtgctgaggagaacggtgccccctatggttaatgtgacgcgaagtgaggcatcagaaggaaacatcacagtgacctgtagagcatcaagtttttacccccgaaacatcattctgacttggagacaggatggtgtcagcctaagccatgacactcagcagtggggagacgttctgcctgatgggaacggcacctatcagacatgggttgcaacccggatttgccgcggagaagagcagaggttcacatgttacatggagcactccggtaatcattctacccaccctgtgccaagcggcaaggtcttggtattgcaatcgcactggcagacattccacgtttctgccgtcgcggctgggtgctgttatttctgctactactacttcctatgccctctcctgtag

SEQ ID NO: 230439 - DNA, 999 bp, synthetic construct
  misc_feature 1..999: note = Description of Artificial Sequence: Synthetic coding sequence
  source 1..999: mol_type = other DNA
atggggctgggccctgttttccttttgctcgcaggcatcttcccattcgcacctcctggcgcagccgcagaacctcattctctaagatacaatctgactgtcttgagctgggatgggtcagtccagtctggctttctggccgaggtgcacctcgatggacagccatttttaaggtacgataggcaaaagtgcagagcaaagccacaggggcagtgggctgaagacgtgctgggcaataagacctgggaccgcgaaacacgcgacttgacgggcaacgggaaggatctgagaatgacactggcacacattaaagatcagaaagaagggctccattccttgcaagagattcgagtgtgcgagattcacgaagataattctacacggtcttctcagcacttctattacgacggcgaactgttcttgtcacagaacttggaaacagaagaatggaccgttccacaatcctcccgcgcacaaacactggccatgaacgtgaggaactttctgaaagaggacgctatgaaaacaaagacccattaccatgccatgcatgcagattgtttgcaggaactacggaggtatctagaatcgggggttgtactcaggagaacagtgccccctatggttaatgtgacccgttctgaagcgagcgagggtaacatcacggtcacctgtcgagcgagtagcttttaccccagaaacattattctgacctggcgacaagatggagttagtctcagccacgacacccagcagtggggagacgtcctcccagatgggaacggaacataccagacttgggtcgcaacccgaatatgtcgtggcgaagaacagcggtttacatgttatatggagcacagcggaaatcattcaacccatcctgtgccgtcagggaaagttctcgtgttacagagtcattggcaaactttccatgtgagtgccgttgcagctggctgctgctatttctgttactactattttctgtgccctctgttgtag

SEQ ID NO: 230440 - DNA, 1152 bp, synthetic construct
  misc_feature 1..1152: note = Description of Artificial Sequence: Synthetic coding sequence
  source 1..1152: mol_type = other DNA
atgggcctaggtcccgtcttccttctgctcgctggcatcttcccatttgcccctccaggggcagctgcggaaccacatagtctcagatacaaccttaccgttctgagctgggatgggtcagtgcagtcagggttcctaaccgaggttcacttagatgggcagccgttcttaaggtgcgacaggcagaaatgtcgagccaagccccagggacagtgggccgaggatgtattggggaataaaacttgggacagagagactagagatctgaccggcaatggcaaagatctgaggatgacgcttgctcacattaaggaccagaaggaagggctccattccctacaggaaattagagtttgtgagatccacgaggacaattcgactcggtcctcccagcacttctattacgacggtgaactgttcctgtcccagaatcttgaaacaaaggagtggactatgcctcaaagcagccgcgctcaaactcttgcaatgaacgtcagaaacttcctgaaggaagatgcaatgaagaccaaaacacattaccatgctatgcatgcagactgtttgcaggagctgagacggtatctgaaatccggtgtcgttcttcgacgcactgtcccacccatggtgaatgtaactcgatctgaagcatccgaaggtaatatcactgtgacctgtcgcgcttccgggttttatccctggaatatcaccttaagctggcggcaggatggcgtttcgctgtcccatgatacccagcagtggggcgatgtgctccccgatggcaatggcacctatcagacatgggtggccacccgaatctgccagggggaggaacagaggttcacctgctatatggagcacagcgggaatcactccacacaccccgtgccaagtgggaaagtcctcgtgttacagtcccattggcaaactttccacgtgagcgccgtcgcagctgccgcaatttttgtaatcataattttttacgtgagatgctgcaagaaaaagacaagtgccgctgaagggcctgagctggtgtctttacaggtcctggatcagcaccccgtgggcacctctgatcatcgggacgccactcagctcggtttccagcctctgatgtcagatctgggcagcaccggctccacggagggcgcatag

SEQ ID NO: 230441 - DNA, 999 bp, synthetic construct
  misc_feature 1..999: note = Description of Artificial Sequence: Synthetic coding sequence
  source 1..999: mol_type = other DNA
atgggtcttggacctgtgtttttgctgctggcaggcatcttcccttttgcgcctccgggagccgcagcagagccccacagtcttagatataacttgaccgttctgagttgggacggttccgtacagtcaggcttcctggccgaggtccacctggacgggcagccatttctgaggtacgaccgacagaaatgccgggctaagccacaaggtcaatgggcagaggatgtactgggcaataagacatgggatcgggaaacccgcgatctgactggcaacggcaaggaccttcggatgacacttgctcatatcaaggatcagaaggaggggctgcactctctgcaagagatacgtgtgtgtgagatccacgaagacaatagcaccagatcctcccagcatttctactacgatggggagctattcttgtctcagaatctggagactgaagagtggacagtcccccagtcgagtagagctcagaccctcgccatgaatgtgaggaatttcctgaaggaagacgccatgaagactaagactcactatcatgccatgcacgcggattgcctgcaggaactgagaaggtacctggagtcaggcgtggtgctgcggagaacagtgcccccaatggtcaatgtcacgaggagcgaggctagtgaaggaaacattacggtcacctgccgggctagctcattctatcccagaaatatcatactgacatggagacaggatggtgtcagtttatctcacgatacacaacagtggggcgatgtgctccctgatggcaatggaacctaccagacgtgggtcgctacacggatttgtcgcggagaggaacaacggtttacttgttacatggagcactcaggtaatcactctacccacccagttccctctgggaaagtcctggtgctgcaaagtcattggcagactttccacgtgagtgcagtggctgccggatgttgttacttctgttattattacttcctctgcccccttctgtag

SEQ ID NO: 230442 - DNA, 999 bp, synthetic construct
  misc_feature 1..999: note = Description of Artificial Sequence: Synthetic coding sequence
  source 1..999: mol_type = other DNA
atggggctgggccctgtgttcctcctattagccggtatattcccctttgcccctcctggagcagctgccgaaccccatagtttaaggtataacctgacagttctctcttgggatggcagtgtgcaatccggttttctagcagaagtgcatctggacggtcagccgtttcttcggtatgaccgtcaaaaatgtagggcgaagccacagggacaatgggccgaggatgtgctggggaacaagacctgggaccgtgagacccgggacctgacgggtaacgggaaggatcttcggatgacattggcccacatcaaagatcaaaaagaagggctgcacagtctgcaggaaatccgcgtctgcgagatccatgaagataacagcactcgcagctcccaacatttttactacgatggagaattgtttctgtctcagaacgtcgagactgaggaatggactgtcccgcagagcagccgagcgcagacgttggccatgaacgtgaggaatttcctgaaagaggatgccatgaagacaaagacccactatcacgccatgcacgctgattgcctccaggagctaagaagatatctcgagagttccgtcgtactccggagacgcgtccctcctatggtgaatgttacccgctcagaagcatctgaaggaaatatcaccgttacctgccgagccagcagtttctaccctcgaaacatcacactgacatggcgtcaggatggggtgtctctctcccacgacactcagcaatggggggacgtcctgcctgatggaaatggcacctaccagacatgggttgctaccaggatttgccagggcgaagaacagagattcacctgctacatggaacattctggtaaccattccactcatccagtgccaagtggaaaagtgctggtgctgcagagccattggcaaaccttccacgttagtgctgtcgcagcttgctgctgctacttttgttattactacttcctttgccctctgctatag

SEQ ID NO: 230443 - DNA, 1152 bp, synthetic construct
  misc_feature 1..1152: note = Description of Artificial Sequence: Synthetic coding sequence
  source 1..1152: mol_type = other DNA
atgggtctgggcagggtacttctcttcctggcagtagccttcccatttgcacctccagctgctgctgctgaaccccatagcttacggtacaacctgatggtgctgtcacaggatgggtccgtgcagtctggtttcctggccgaagggcacctcgatgggcaacccttcttgcgatatgatcgccagaaacggagggcaaaacctcaggggcagtgggcagagaatgtgcttggtgctaaaacctgggataccgagactgaggatctgacagaaaatgggcaggatctccgaagaaccctgacccatataaaggaccagaaagggggacttcatagtctgcaagagattcgggtgtgcgaaattcacgaagactcttccactaggggctcaagacacttttactacgacggggagttgtttttgagccagaatcttgagacccaggaatcaaccgtcccccagagttcccgtgcacagacactagcaatgaacgtgacaaacttctggaaagaagacgctatgaaaactaaaacacactatagagctatgcaagctgactgcctccagaagttacagcggtatctcaaaagcggagtggccatccgcaggaccgtgccacccatggtgaacgtcacgtgttctgaggtgtctgaagggaatattactgtgacgtgtagagccagctccttttacccgagaaatatcaccctcacatggcgtcaggacggcgtaagcctcagccataatactcagcagtggggggacgttcttcccgacggaaacggcacttatcaaacctgggttgcgactcgcatccgacagggcgaggaacaaagatttacctgttacatggaacacagcggtaatcacggaacgcacccagtgccatctggtaaggccttagtgttgcagtcccagcggacagacttcccctacgtctcagccgctatgccttgctttgtaattatcatcatcctgtgcgtcccgtgttgcaaaaagaagacatctgctgctgagggaccagagttagtttcccttcaggtgttagaccagcaccctgtagggaccggggatcaccgcgacgcggctcagctggggttccagcctttgatgtcagctaccgggtctactggctcgaccgaaggcacatag

SEQ ID NO: 230444 - DNA, 1152 bp, synthetic construct
  misc_feature 1..1152: note = Description of Artificial Sequence: Synthetic coding sequence
  source 1..1152: mol_type = other DNA
atggggctgggcagggttctactgttcttggcagtggccttcccatttgcgcctcccgctgcggctgcggagcctcatagtttacgctacaatctcatggtcctcagccaagatggatcagtccagtcaggcttcctggctgagggacacctggacggccaacctttcttgcgctacgatcgccagaagcggagagcaaagccacaggggcagtgggccgaagacgttctcggagccaagacctgggataccgaaactgaagacctgaccgagaatggacaggacctgcgccgaaccctgacccatatcaaggaccagaagggcggtttgcatagcctgcaggagattcgagtatgcgagatccacgaagattcctcaactagaggaagccgccacttctattatgatggagaactatttctgtctcagaatttggaaactcaggagtcaaccgtaccccagtcctctcgggctcagactctcgccatgaatgtcaccaatttctggaaggaagacgcaatgaaaactaagactcactaccgagctatgcaggctgactgtcttcagaagctccaaaggtatctcaagagtggtgtagccatacgtcgtacagtgccgccaatggtgaacgtaatctgcagcgaagtatccgaggggaacatcaccgtaacctgcagggccagtagcttctatcccaggaatatcacgctgacatggcggcaagacggcgtttcgttgtcccacaatactcaacaatggggggatgtcctgcccgatggaaacggtacttaccagacatgggtggcaaccagaatcaggcagggagaagaacaacgatttacctgttatatggaacacagtggcaaccacgggacccaccccgtgccatctggaaaagccctcgtgctccagtcccagcggaccgactttccttatgtaagtgctgccatgccatgctttgtgataattatcattttgtgtgtgccatgctgcaagaaaaagacgagtgcggcagagggaccggagctcgtttccctccaagtgctagatcagcatccggtaggcacaggcgaccacagggacgctgcccagctagggttccaaccactgatgtctgctaccggcagtaccggcagcaccgagggaacatag

SEQ ID NO: 230445 - DNA, 1023 bp, synthetic construct
  misc_feature 1..1023: note = Description of Artificial Sequence: Synthetic coding sequence
  source 1..1023: mol_type = other DNA
atgggcctggggagggtgttgcttttcctagccgtcgcgttcccctttgcccctcccgctgctgctgcagagcctcactcactccgctacaacctcatggtactgtctcaggacggtagtgtgcaatccggcttcctggccgaggggcatttagacggccagcctttcctgcgatacgacaggcagaaacgaagagcgaaacctcagggccagtgggctgagaatgtgttaggcgctaagacatgggatactgaaacagaggacctcaccgagaacggccaggatcttcgcaggactctgactcacattaaagaccagaagggggtgccacagtcgtctagggctcagacgttagctatgaacgtgactaatttctggaaggaggacgcaatgaaaaccaaaactcactatagagccatgcaggccgactgcctccagaagctacagagatatctaaagtctggagtggccataagaagaacagtgccaccaatggtgaacgtcacatgctccgaggtatcggagggaaacatcacagtgacctgtagggcatcttccttctaccccagaaatatcactctgacatggaggcaagatggagtatctctgagtcacaacacacagcaatggggggatgttttaccagacggcaatgggacctaccagacctgggtggcaacccggattcggcaaggggaggagcagcgctttacttgttacatggaacacagcggcaatcacgggacccatccagtgccatctggcaaggccctagtactccaatctcagcgcacagatttcccgtacgtctccgcggctatgccatgcttcgtgatcattatcatcctgtgtgtgccttgttgcaagaagaagacatccgctgccgagggtccagagctggtctccttgcaagtcctagaccagcacccagtggggacaggtgaccatagagatgccgcacagctgggattccagccactgatgtcggcaaccggaagtacaggtagcacagaggggacttag

SEQ ID NO: 230446 - DNA, 1023 bp, synthetic construct
  misc_feature 1..1023: note = Description of Artificial Sequence: Synthetic coding sequence
  source 1..1023: mol_type = other DNA
atgggtctcggaagagtcttgctttttttggcagtcgccttccccttcgctcctcccgctgccgctgccgaacctcattccctgaggtacaacctcatggtgcttagccaggatgggagtgtgcagtcggggtttcttgccgagggtcatctggatgggcagccttttttgaggtatgaccggcaaaagcggagggccaaaccgcagggccagtgggctgaagacgtcttgggggcaaaaacatgggataccgaaacagaggacctgacggagaacggacaggacttacgccgtactttaacgcacattaaggaccagaaaggagtgcctcagagctctcgagcacagacgctagcaatgaacgtcacaaacttctggaaagaagatgcaatgaagacaaagacgcattacagggcaatgcaggccgattgtctccagaagctgcagcgctacctgaaatcaggtgttgccattaggaggaccgtgccacctatggtgaacgtcacttgctcagaggtctccgagggtaatattactgtgacctgtcgagcaagcagcttctatccgaggaatattacccttacctggaggcaggacggggtgagcttgtcccataacacccagcagtggggtgacgtattaccagacggaaatgggacataccagacatgggtcgccacaagaatccgccagggggaagaacagagattcacatgctacatggaacatagcggaaaccacggcactcatccggtgccatctggaaaggcactcgtacttcagtcccagcgcactgactttccctacgtatcagctgcaatgccttgctttgtgatcattatcatcttgtgcgtcccttgctgcaaaaaaaaaacctcagcagccgaagggccagaattggtgtccctccaagttctggaccagcacccagtggggacaggcgaccaccgagacgctgcccaactgggtttccagccgttgatgtcagccacgggctctacggggagtactgagggagcctag

SEQ ID NO: 230447 - DNA, 126 bp, synthetic construct
  misc_feature 1..126: note = Description of Artificial Sequence: Synthetic coding sequence
  source 1..126: mol_type = other DNA
atgggactgggcagggtgctattgttcctggcggtcgcattcccattcgcccctcccgctgccgctgccgtcgagatgggcttccatagggtgtcacaagatgggttggacttgttgacaagttag

SEQ ID NO: 230448 - DNA, 1083 bp, synthetic construct
  misc_feature 1..1083: note = Description of Artificial Sequence: Synthetic coding sequence
  source 1..1083: mol_type = other DNA
tagccccattctctacgctacaacctgatggtgctgagtcaggatggctccgtgcagtctggtttcttggctgagggtcatctggacgggcagccttttctgagatacgacaggcagaagagacgggcaaaacctcaggggcagtgggcagaagacgtgctgggtgctaaaacttgggacactgagactgaagatttaacggaaaacgggcaggatctgcgccgtacactcactcacattaaggatcagaaggggggacttcactccctgcaggagatccgggtgtgcgagattcacgaagatagtagcacacggggatctcggcatttttactatgatggagaactgttcctttcacagaacctggaaacccaggaaagcactgtcccgcagagctcacgagcccaaaccttagctatgaatgtgaccaatttttggaaagaggacgccatgaaaactaagacccactatcgcgcaatgcaggccgactgcctccaaaaactccaaagatatctcaagtctggggtggctatcagaaggacggtcccccctatggtcaacgtaacgtgtagtgaagtgtccgaaggaaatatcacagtgacttgccgagcaagctctttctacccacgcaatatcactctgacctggagacaggacggcgtttccctgtcacataatacccaacagtggggagatgttctgcccgatggaaacggaacatatcaaacatgggttgctacccgcatacggcagggagaggagcaaagattcacttgctacatggagcatagcggaaatcacggcacgcacccagtgcctagcgggaaggcgttagttctgcagtcacaacgcaccgatttcccctacgttagcgccgctatgccatgcttcgtgatcatcattattttatgcgtcccttgctgcaagaaaaaaacttccgcagccgagggccctgagcttgtttcactgcaggtgctggatcagcaccccgtgggaacaggtgaccatagggacgctgcccagctgggtttccagccactgatgtctgccaccggcagcacgggatccaccgaaggagcctag

SEQ ID NO: 230449 - DNA, 1152 bp, synthetic construct
  misc_feature 1..1152: note = Description of Artificial Sequence: Synthetic coding sequence
  source 1..1152: mol_type = other DNA
atgggattgggcagagttctgctgtttctcgctgtggctttcccattcgctcccccagctgcagcagctgagcctcacagcctacggtataatctgatggtgctgtctcaagacggaagcgtccaaagtggttttctggctgaaggacacctcgatggccaacctttcctccggtacgaccggcagaagcggagagccaagcctcagggtcaatgggccgaggatgtcctgggcgcaaaaacttgggacactgagaccgaagacctaactgagaatggtcaggaccttagaaggacccttacacacataaaggaccagaaggggggattgcatagcctgcaagaaatcagggtctgcgagattcacgaagattccagcaccagggggtcaagacacttctactatgatggggaactgttcctgagtcagaacttggagacccaggagtccactgttccacagtctagccgggcacagaccctggctatgaatgtaaccaacttctggaaagaagacgcaatgaaaactaagacacactacagggctatgcaagccgattgcctccagaaactccagagatacctgaagagcggagttgcgattcgccgaacagtgccaccaatggtgaatgtcacttgctccgaggtgtcagaaggaaacatcacagtcacatgccgcgcaagtagcttttatcctcgcaacatcactttgacgtggcgtcaagatggtgtgtccttatcacacaatacccagcagtggggcgatgtgctgcccgacggcaacggcacctaccagacttgggtagcaactagaatacggcaaggagaggagcagcgcttcacatgttacatggagcacagcggaaaccatggcacccaccccgtgccctcaggtaaagcccttgtcctgcagtcccaaaggacagactttccttatgtttcagctgcaatgccatgttttgtgataataattattctgtgtgtcccgtgctgtaaaaaaaaaacttctgcggctgaggggccagaactggtgtctttgcaagtcctggaccaacaccctgtgggaacaggagatcatagagacgcagctcagctcggattccagccactgatgtctgctaccggttctaccggctcaactgagggagcctag

SEQ ID NO: 230450 - DNA, 1023 bp, synthetic construct
  misc_feature 1..1023: note = Description of Artificial Sequence: Synthetic coding sequence
  source 1..1023: mol_type = other DNA
atgggtctcgggagggtgctgcttttcctggccgtcgcattccccttcgcaccgcctgccgctgcagccgaaccacacagtttgcgctataatcttatggtcctttcccaggacgggtccgtccagtctggattcctagctgaaggacacctggacggacagcccttcctgcgctatgacaggcaaaaacggagagcgaaaccacaagggcagtgggcagaagacgttcttggcgcagagacgtgggacacagagactgaagacttaactgagaatggtcaggatttgcggcgtaccctcacacacatcaaagaccagaaaggagtgccacagagcagcagagctcaaacactcgccatgaacgtgaccaacttctggaaggaggatgctatgaagactaaaactcactatagggccatgcaggccgattgtcttcagaagcttcagcgctaccttaaaagcggggtggccatccggaggactgtaccgcctatggtcaatgtcacttgcagcgaagtcagcgagggaaatatcacagtcacctgccgtgcatcttcattttaccctcggaatatcactttaacttggaggcaggatggggtttcccttagccacaacacacagcagtggggtgacgttttacccgatgggaacggcacgtaccagacgtgggtggctacaaggataagacagggtgaggagcagcgattcacctgctatatggaacactcgggaaatcatggaacccatccagtaccaagtggtaaggccctggttcttcaaagccagagaacagattttccctacgttagtgctgctatgccctgttttgtgattataatcatcctttgcgtcccatgttgtaagaaaaaaacaagtgccgcagaagggccagagcttgtgtccctgcaagtgttggatcagcaccccgtgggcacaggggaccaccgcgatgcagcccaactgggctttcagccactaatgtctgccacaggcagcactggctccacagagggagcctag

SEQ ID NO: 230451 - DNA, 1152 bp, synthetic construct
  misc_feature 1..1152: note = Description of Artificial Sequence: Synthetic coding sequence
  source 1..1152: mol_type = other DNA
atgggcttaggaagggtgttgcttttcctcgcagtggcatttccttttgcccctccagcagctgccgcagagcctcatagcctcagatataacttaatggtcctgagccaggacggttccgtccagtcgggatttcttgccgaaggtcacctcgatggacaaccttttctgcgctacgatcgacagaaaaggcgcgcaaaacctcagggccagtgggctgaggatgtgttgggagcagagacttgggataccgaaacagaggacttgaccgaaaacggccaagatctacgcaggactttgacgcacatcaaggaccagaagggtgggctccacagtctccaagaaattcgcgtttgtgagatacacgaggactcgtcgacgcgaggttccaggcacttctattacaatggggagctgttcttgagccagaaccttgaaactcaggagtcaaccgtgccccaaagctctcgcgcacagaccttggcaatgaacgtgaccaatttctggaaggaggacgctatgaagacaaagacccactatcgggctatgcaggccgactgtctgcagaagttacaacgatacctgaaatctggcgtggccatacggagaacggtgccacctatggtgaatgttacatgtagcgaggtatctgaaggcaacataacagtgacatgtcgagcatctagcttctatcctagaaacattactctgacctggcgacaggatggcgtgagcctctcccataatactcagcagtggggggatgtgctcccggatggcaacggcacataccagacatgggtggccacccggattcggcagggagaagagcagaggttcacttgctacatggagcactccggcaatcatggcacccacccggtgcccagtggcaaggccctcgtcctgcagtcgcagagaacagattttccctacgtcagcgcagctatgccttgcttcgtaattataattatcctctgtgtaccctgctgtaagaaaaaaactagtgccgctgaagggcctgaactggtgtctctgcaagtgctggaccagcatcctgtggggactggcgatcaccgggacgcagcacagcttggatttcagccccttatgagcgccactggctctacagggagcactgagggagcctag

SEQ ID NO: 230452 - DNA, 1023 bp, synthetic construct
  misc_feature 1..1023: note = Description of Artificial Sequence: Synthetic coding sequence
  source 1..1023: mol_type = other DNA
atgggcctgggaagagtgcttctgtttctggccgtggccttcccgtttgctcctcccgcagccgcagctgaacctcactcccttagatacaatctaatggtgctaagtcaagatgggagtgtccagagtggcttcctcgcagaaggccacctcgatggtcagccctttctgaggtacgatcgccagaaacgtagggctaagccacagggacagtgggccgaggatgtgttgggggcaaagacttgggataccgagactgaggacctgaccgagaacggtcaggacctcaggcgcactctgacacacataaaggatcagaaaggcgtgccccagtcctccagggcccagaccttggcgatgaatgtaactaatttctggaaagaggatgctatgaagacgaaaacacactacagggcaatgcaggctgattgcctgcagaaactgcagcggtatctgaagtctggcgtggccattaggcgaacggtgccgccaatggtgaacgtaatttgctctgaggtgtcagaaggaaacatcacagtgacatgccgggctagcagtttctatccaagaaacattaccttaacctggaggcaggacggcgtgagcctgagccataacacccagcagtggggggacgtcctgcctgatgggaacgggacgtatcaaacttgggtggctacccgaatcaggcaaggggaggagcaaaggttcacatgttacatggagcattctggcaatcacggtacacaccccgtgccaagtggtaaggccttagtactgcagtctcaaagaaccgacttcccttatgtgtccgccgcaatgccgtgcttcgtgatcattatcatcttgtgtgtcccctgttgcaagaagaagactagcgcagctgaaggcccagagttggtatctttgcaggtgctggaccaacaccccgtgggcaccggagaccacagagacgctgctcagctaggttttcagccgctgatgtctgcaaccgggagcacaggctctacagaaggaacatag

SEQ ID NO: 230453 - DNA, 1023 bp, synthetic construct
  misc_feature 1..1023: note = Description of Artificial Sequence: Synthetic coding sequence
  source 1..1023: mol_type = other DNA
atgggcctcggtcgagtgcttctcttcctggccgttgctttcccgttcgctccgcctgcagctgctgcggagccccactccctcaggtataatctgatggtcctgtcccaggacgggtctgttcagtccgggtttctcgcagagggacatctggatgggcaaccctttctcaggtatgaccgccagaagcgtcgagcaaaacctcaggggcagtgggcagaagacgtgctgggtgccgagacttgggataccgaaaccgaggacctcacggaaaatggtcaggacctacgcaggactctgacccatattaaagatcagaaaggtgttcctcagtcatcccgggcacaaacactggccatgaatgtgacaaatttctggaaagaagatgcaatgaagactaaaacccattatagagcaatgcaggcagactgtctgcaaaagctgcagcggtacctgaaatcaggtgtggccatccgacgaacagtcccccctatggtaaacgtgacatgttctgaagtcagtgaaggcaatatcaccgtcacttgccgtgcctcatctttctacccacggaatataactctgacttggagacaggatggcgtgtcactgtcccataacacacagcaatggggagacgttttaccggatggcaatgggacataccagacttgggttgccacccgcatcagacaaggtgaagaacagaggttcacttgctacatggagcactccgggaaccatggaacacatccggtgccaagtggaaaagcgctggtgctgcagagccagcggaccgatttcccttacgtatctgccgcaatgccttgctttgttataatcataatcctttgcgtgccctgctgtaaaaagaagacatctgccgctgagggacccgagctggtgagcctccaagtgttggatcaacacccggtcggcacaggcgaccaccgagatgcagcgcagctgggatttcagcccctaatgtcagccaccggctcaacaggctcgactgaaggcgcatag

SEQ ID NO: 230454 - DNA, 1023 bp, synthetic construct
  misc_feature 1..1023: note = Description of Artificial Sequence: Synthetic coding sequence
  source 1..1023: mol_type = other DNA
atggggctagggcgtgtgttgctgtttcttgctgtggcatttccttttgccccaccagcggcagcagcagaaccccactctctgcggtataatctcatggtgctgagccaggacggatcagtccagagcggattccttgccgaaggacatcttgatggtcagcccttcctgcgatacgaccgacagaagcgccgtgcaaaaccccaaggtcagtgggccgaaaatgtcctgggcgcaaaaacctgggacaccgagactgaggatctgacagagaacggccaagacctgaggagaaccctgactcacattaaagatcagaaaggagtgccgcagtcgtcgcgggcacagactcttgcaatgaatgtgaccaatttctggaaggaagatgctatgaagacgaaaacccactaccgggctatgcaggcagattgtctgcagaaactgcagcggtacttgaaatccggggtggctatcagacgaaccgtccctcctatggttaacgtaacttgtagtgaagtgtctgagggcaacatcactgtgacttgccgggcaagcagcttctaccctagaaatatcaccctgacttggagacaggacggcgtttcactcagtcataatacgcagcaatggggtgacgtgctgccagacggaaacggtacctaccagacctgggttgcgaccagaatccgccaaggcgaagagcagagatttacttgttacatggaacactcagggaaccacggcacgcacccagtgccatccggaaaggccctggtcctgcaatcccagcgcaccgactttccttatgtgagcgcagccatgccatgctttgtgattatcatcatactgtgcgtaccatgttgcaagaagaagacaagcgccgctgagggcccagaactggttagcctccaggttctcgatcagcacccggtaggtacgggtgaccacagagacgcagctcagctgggtttccaaccactgatgtcagccactggatctactggatcaacagaggggacttag

SEQ ID NO: 230455 - DNA, 1152 bp, synthetic construct
  misc_feature 1..1152: note = Description of Artificial Sequence: Synthetic coding sequence
  source 1..1152: mol_type = other DNA
atgggccttggccgagttctcctttttcttgccgtggcatttcctttcgctccacctgctgcagctgccgagccgcactcccttaggtataatctgatggttttgtcacaggatggaagtgtccaaagcggattcctggcagaagggcatctggatggtcagccatttctccggtatgaccggcagaagcggagggcaaagccccagggccagtgggccgaggacgtccttggtgccaagacatgggatacggagaccgaagacttgacagagaatggacaggatttgagaagaactttgacccatatcaaagatcagaagggtgggttacacagtctgcaggaaattagagtttgcgagatccacgaggattcatctaccagggggagccggcacttctattatgacggcgagctgtttctgtcccagaacctcgagacccaagagtccacagtcccccagagcagccgagcccagaccctcgcaatgaatgtgactaacttctggaaggaggacgctatgaagactaagacacactatagagccatgcaggccgattgcctccagaagttgcagcgatacctgaagagcggtgtcgccatcaggcgaacggtgccccctatggtcaacgttacttgttcagaagtcagtgagggcaacattacagttacttgtcgcgctagttctttttatcccagaaacatcacactaacatggcgccaggacggagtgagcctgtcccacaatactcagcagtggggtgatgtactccccgatggcaacggcacataccagacttgggtggctacccgcataaggcagggcgaggagcagcggtttacctgctacatggagcatagcgggaaccatggaacccatcctgtgcctagcggcaaggccctagttctacagagccagcggactgatttcccctatgtgtctgcagcaatgccctgttttgtgatcatcattattttgtgcgtcccgtgttgcaagaagaagacttctgcggctgaggggccagaactcgtgtcattgcaggtgctcgaccagcacccagtgggcactggcgaccatagggacgcggctcaattagggttccagcctctgatgtcagcaacaggttcgactggctcaacagaaggggcatag

SEQ ID NO: 230456 - DNA, 1152 bp, synthetic construct
  misc_feature 1..1152: note = Description of Artificial Sequence: Synthetic coding sequence
  source 1..1152: mol_type = other DNA
atggggttgggtagggtgctgctcttccttgctgtcgcattcccttttgcccctcccgcagcggctgcagagccgcactcacttcggtacaatctgatggttctttcacaggatggcagtgttcagagtgggtttttggcagagggtcatttagacggccaaccattcctgagatacgataggcagaaacgtagagcaaagccccagggacaatgggcagaaaacgtgctaggcgctaagacatgggacaccgaaaccgaggaccttactgagaacggccaagatctgagaagaactctgacacacatcaaggatcagaaaggcggacttcattcactgcaggaaatacgcgtgtgcgagatccacgaagactcctccactcgaggcagccgccatttctactatgatggagagcttttcctgtcccagaacctggaaacacaggaatctaccgtcccacagtcatcccgcgcacaaacactcgccatgaatgtgacaaatttttggaaagaagacgctatgaagactaagacacattatagggctatgcaggccgattgccttcagaaactgcaaaggtatttgaagagcggcgtggcgatccggaggactgtccctcctatggtcaatgtgacctgtagtgaagtatccgaaggcaacattaccgtgacatgcagagcatccagtttttaccctaggaatatcactcttacttggcgccaagacggggtaagtctttcccataacacacagcagtggggcgacgtactccccgatggcaacggaacatatcaaacatgggtggcaacacggattcgccagggcgaggaacagaggtttacatgttatatggagcacagcggcaaccacgggactcaccctgtgccgtctggtaaagcactggtgctgcagtctcaaaggaccgacttcccatacgtgagtgctgctatgccctgcttcgttattattattatcctgtgcgtgccatgttgcaaaaaaaagacaagtgccgctgaaggccctgagcttgtctccctccaggtgcttgatcagcaccccgtgggcaccggagaccacagagatgctgcccagttgggcttccagcccctgatgagtgctactggctccacaggttccacagagggcacatag

SEQ ID NO: 230457 - DNA, 1023 bp, synthetic construct
  misc_feature 1..1023: note = Description of Artificial Sequence: Synthetic coding sequence
  source 1..1023: mol_type = other DNA
atgggtctcggaagggtgttgctgttcctagcagttgctttcccattcgcaccgcctgccgctgctgcagagccgcactccttgcgctacaatctcatggttttgagtcaggacgggagcgtgcagtcggggttcctcgcggaaggccatttagacggccagcccttcctgcggtatgaccggcagaaacgcagggccaaaccacagggtcaatgggctgaagacgtcttgggagcgaaaacctgggacaccgaaacagaagacctgactgagaatggccaagatctgcggagaacactcacccatattaaggaccagaaaggagtgccacagtcttcacgggcacagacactggccatgaacgtgaccaatttctggaaagaggatgcgatgaaaactaagactcactaccgggcaatgcaagcagactgcctgcagaagctgcagcggtacttgaagtccggggtggctattaggcgaaccgtgccacccatggtaaatgtaacttgtagcgaagtgtccgaaggcaacattacagtgacatgccgggcatcaagcttttatcctcggaacatcacactaacatggcggcaggatggcgtgtcgctctctcataatacacagcaatggggggatgtgctcccagacggcaacggaacataccagacgtgggtggccacaaggattcggcagggtgaggagcagcgctttacgtgctacatggaacattctgggaatcacggtacacacccagtgccctcaggtaaggccctggtcctgcaaagccaaagaacagacttcccatacgtgtccgcagccatgccctgttttgtgattatcatcattctgtgtgttccgtgctgtaagaagaaaaccagcgcagccgaggggccagaactcgtgtctctccaggttctcgatcagcatccggtcggaaccggtgatcacagagatgccgcacagctcgggtttcagcctctcatgagtgccacaggtagcactggatccaccgagggcgcatag

SEQ ID NO: 230458 - DNA, 954 bp, synthetic construct
  misc_feature 1..954: note = Description of Artificial Sequence: Synthetic coding sequence
  source 1..954: mol_type = other DNA
tgaccacactcactacgctacaatctcatggtcctctctcaagatggctccgtgcagtcagggttcctggcagagggtcatttggatggccagccgttcctgaggtacgaccgccaaaagcgtcgggctaagccccaaggacaatgggcagaggacgtgctaggagccaaaacatgggacaccgaaaccgaagatcttactgaaaacggtcaggatctgaggaggactttgacacacatcaaggatcagaagggtgtgcctcagagttccagagcccaaacactggcaatgaatgtgacgaacttctggaaggaagatgcaatgaagaccaagacccattacagagcgatgcaggctgactgtctccaaaaactgcagagatacctgaagtccggggtggctatcaggcgtacagttccccctatggtaaacgtcacatgttcagaggtgagcgaaggaaacatcactgtcacgtgtcgtgcctcgagcttctacccccgtaatatcacactgacgtggcgccaggatggagtcagtctgagccataatacccagcaatggggcgatgtcctcccggacggcaacgggacctatcaaacctgggtggccacgcgtatccgccagggcgaggaacagcggttcacatgttatatggagcattcgggaaatcacggcactcatcccgttccgtctgggaaagcccttgtgctgcaatcccagcggacagactttccgtacgtcagtgccgcaatgccttgctttgtgatcataataattctgtgtgttccatgctgcaagaaaaagactagtgctgcagagggaccggagcttgtgagcctgcaggtcctggatcaacatccagtgggcaccggcgatcaccgcgacgctgctcaactgggatttcagccactcatgagcgccacgggcagtacgggatcaacggagggcgcttag

SEQ ID NO: 230459 - DNA, 1152 bp, synthetic construct
  misc_feature 1..1152: note = Description of Artificial Sequence: Synthetic coding sequence
  source 1..1152: mol_type = other DNA
atgggattggggagggtgctgttattcctggcagtagccttcccattcgctccacctgccgctgccgcagagccacattctcttagatataatctgatggtgctttcccaggacgggagtgtacagtcaggttttttggcagaggggcatctagatggacagccctttctgcgttatgatcggcagaaacgcagagctaagcctcaggggcagtgggcagaggatgtgctgggggctgagacttgggacaccgaaaccgaggatttgacagagaatggacaggacctgcggaggacacttacgcatatcaaagatcaaaagggtggtctgcactcactgcaggagattagggtgtgcgaaatgcatgaggacagttccacaagggggtcaagacatttctactataacggtgagctttttctttctcaaaacctagagacacaggagtcaactgtgccccagtccagtagggcccagacgttagcaatgaatgtcaccaatttctggaaagaagacgcaatgaagaccaaaacccactaccgcgcaatgcaggccgattgcttacaaaagttgcagcgctatctaaaaagcggcgtagccataaggcggaccgttcccccaatggtgaacgtgacttgttctgaggtgagtgaaggaaatatcactgtgacctgcagagctagctccttttaccccaggaacataactttgacttggaggcaggacggagtgtccctaagtcacaacactcagcagtggggggacgtgctgcccgacgggaatggaacgtaccagacctgggttgccacgcgaatccgtcagggggaggagcagcgctttacatgctatatggagcactcaggcaaccatgggacacacccggtaccctccggcaaggcactggtgctgcagagccaaaggactgacttcccttacgtgtccgccgcaatgccctgttttgtgatcattattatcctttgcgtcccctgctgcaaaaagaagacctccgccgcagagggtccggaactggtaagtctgcaagtcttggaccagcatcccgtgggaacaggagaccaccgggacgccgcacaactgggcttccaacctctcatgagtgctaccgggtccaccggtagtactgaaggagcatag

SEQ ID NO: 230460 - DNA, 1056 bp, synthetic construct
  misc_feature 1..1056: note = Description of Artificial Sequence: Synthetic coding sequence
  source 1..1056: mol_type = other DNA
atggtgctttcacaggacggcagcgttcagtctggctttctcgcagaagggcacctcgatgggcagcccttcctccgttacgaccgccagaagagacgtgcgaaaccacagggtcagtgggccgagaatgtcttgggcgctaaaacttgggacaccgaaaccgaggatctcactgaaaacgggcaggatctgcgacgaacactgactcacattaaggatcagaagggcggactgcactcactgcaggaaattcgcgtctgtgaaatccacgaggactctagcactcggggatccaggcacttttactatgacggggaactgttcctctctcagaatttagagacacaggaatccacagtgccacagtccagtcgcgctcagaccctcgccatgaatgtgaccaatttctggaaagaggacgctatgaaaactaagacacattaccgagcgatgcaagccgattgtctacagaaactgcagaggtacctgaaatctggtgtggctatccggaggaccgtgccacctatggtgaacgtgacgtgttctgaagtgtcggaaggtaacatcactgtgacgtgcagagcgtcctccttctaccctaggaatatcacacttacttggagacaagatggagtgtctttgtctcataacactcagcagtggggtgatgttcttccggatggaaatggcacataccaaacttgggtcgcgacgcgaattaggcaaggtgaggagcagaggttcacgtgctatatggagcatagcggtaatcacggcactcatcccgttcccagcggcaaggcactagtgttgcaaagccaacggactgatttcccctatgtctcagcagcaatgccctgtttcgtgatcatcattattctgtgtgtgccctgctgcaaaaaaaaaacctccgcagccgaaggccctgaactagtgtccctccaggtacttgaccagcatcccgtgggcacaggggatcatagagacgcggctcagctgggcttccagcccctcatgagtgcaaccggctcaaccgggagcacggaaggtacttag

SEQ ID NO: 230461 - DNA, 126 bp, synthetic construct
  misc_feature 1..126: note = Description of Artificial Sequence: Synthetic coding sequence
  source 1..126: mol_type = other DNA
atgggactcgggagagttttactttttctcgccgttgcatttccatttgcaccgcctgccgcagcagcagtggagatgggatttcacagagtgtctcaggatggtctcgatctgctgactagttag

SEQ ID NO: 230462 - DNA, 126 bp, synthetic construct
  misc_feature 1..126: note = Description of Artificial Sequence: Synthetic coding sequence
  source 1..126: mol_type = other DNA
atgggcctgggtcgggtgctgctctttttggcagttgctttccctttcgccccacccgcagctgccgctgttgagatgggcttccaccgtgtgtcacaagacggcttggacctcctcacaagctag

SEQ ID NO: 230463 - DNA, 1056 bp, synthetic construct
  misc_feature 1..1056: note = Description of Artificial Sequence: Synthetic coding sequence
  source 1..1056: mol_type = other DNA
atggtcctttctcaggacggaagcgtccagagtggtttcttagctgaaggacatctggacggacagccgtttttaaggtatgatcgacagaaaaggcgtgcaaaaccccagggtcagtgggccgaggatgtgctcggggcagaaacttgggatacagagacagaagatctgaccgagaacgggcaggacctgcgccgaaccctgacacacatcaaggatcagaaaggcggactgcatagcttacaggagattcgcgtgtgtgagatgcatgaggactcctccacacggggttctcgacatttttattacaatggagaactgtttctgtcgcagaacctcgagacacaggagagcaccgtcccccagagctctcgcgcacaaacgctagctatgaacgtcacgaacttctggaaagaagacgctatgaaaacgaaaacccattaccgggctatgcaggcagattgcttacaaaagctgcagagatatcttaagtcaggggtagctatcagacgaactgtgccaccaatggtgaatgtgacatgttctgaggttagcgagggtaacattacggtgacatgtagagcatccagcttttacccacgaaatatcaccctgacctggaggcaggatggcgtcagtctcagtcacaatacacagcagtggggggatgtgctcccagacggcaatggcacttatcagacttgggtcgccacccggatccgccaaggcgaggaacaacgatttacatgctatatggagcattctggaaatcacggaacccatcccgtcccttctggtaaagccctagtcctgcagtctcagcgcactgactttccttacgtcagcgccgctatgccttgtttcgtgatcattatcatcctgtgtgtgccttgttgcaaaaagaaaacgtcagctgcggaaggtccagagctggtttctctccaggtcttagaccagcatcccgtcggaacaggggatcaccgcgatgccgctcagttgggcttccaaccccttatgagtgcaactggcagtaccggtagtactgaaggcgcttag

SEQ ID NO: 230464 - DNA, 1056 bp, synthetic construct
  misc_feature 1..1056: note = Description of Artificial Sequence: Synthetic coding sequence
  source 1..1056: mol_type = other DNA
atggtattgtctcaggacggatccgtacagtctggctttctagccgaggggcacctggacggacagcctttcctgcggtatgaccgccaaaaaagacgggctaagcctcagggccaatgggcagaggacgtgttaggagccaagacgtgggacacagaaactgaggatcttacagagaacggacaggacttgcggaggaccctgacgcacattaaagatcagaaggggggactgcactccctgcaggaaattcgggtctgtgagatccacgaagacagttcgacacgagggtctcgtcatttctattacgacggagaattgttcttgtcacagaacctggaaactcaggagagtaccgtcccccaatccagccgtgctcagactctggccatgaacgtgactaatttctggaaagaggatgctatgaaaacaaaaacgcattatagagcgatgcaagctgactgtctgcagaagctgcagcggtacctcaagtcaggggtggcaattcgtaggaccgtgcctccaatggtgaacgtcatttgctccgaagtgagcgagggaaatatcacagtgacctgtcgggcatcgagtttttatcccagaaatattacactgacttggcgccaggatggagtgagtcttagccataacactcagcaatggggagacgttctgccggatgggaatggtacttatcaaacctgggttgcaaccagaataagacagggtgaggaacagcgtttcacctgctacatggagcacagtggcaaccacggaacacatcctgtgccttccggaaaggctctcgtgcttcagtcccagcgaacggatttcccctatgtttctgccgcaatgccttgttttgtcatcattatcatactctgtgtgccttgctgtaagaagaaaacgagcgcagcagaggggccagaactagtatcccttcaggttctcgatcaacaccccgtgggaactggggatcaccgcgacgctgcgcagctcggatttcagcctctgatgtccgcaacaggctccacaggtagcacagaggggacttag

SEQ ID NO: 230465 - DNA, 126 bp, synthetic construct
  misc_feature 1..126: note = Description of Artificial Sequence: Synthetic coding sequence
  source 1..126: mol_type = other DNA
atggggctggggagagtactattgttcttagccgttgcctttcctttcgcccctcctgccgctgccgctgtcgaaatggggtttcatagggtttctcaagacgggcttgacttactgacctcctag

SEQ ID NO: 230466 - DNA, 126 bp, synthetic construct
  misc_feature 1..126: note = Description of Artificial Sequence: Synthetic coding sequence
  source 1..126: mol_type = other DNA
atgggcctcgggagggtgctgttgttcctagccgtagcctttccatttgcaccccctgcagcagcggctgttgagatgggttttcatcgtgtgagccaggatgggttggatttgctaacctcttag

SEQ ID NO: 230467 - DNA, 1056 bp, synthetic construct
  misc_feature 1..1056: note = Description of Artificial Sequence: Synthetic coding sequence
  source 1..1056: mol_type = other DNA
atggtgctgtcccaggacggatctgtgcagagcggattcctcgcagagggacacttggacggtcagcccttcctgagatacgacaggcaaaagcgacgagccaaaccacaaggacagtgggctgagaacgtcctgggcgcaaagacctgggacacagagacagaagaccttacggaaaatggccaagacctgagaaggactctcacacatattaaggaccagaagggcggattgcattctctacaggagatcagagtatgcgaaatccatgaagacagtagcacaagggggtctcgccacttttactacgacggggaactcttcttatctcaaaatctcgaaactcaagagtcaaccgtcccccagtcatctagggcccaaacactggcaatgaacgtgacaaacttttggaaggaggatgctatgaaaactaagacgcattatagagctatgcaagctgactgcctgcagaaattgcagaggtacctgaaatccggagtggcaatccgacgaaccgtgccccctatggttaacgtaacttgttcagaagtatcggaaggaaacatcacggtgacttgtagggcaagctcattttatcccagaaacattaccctgacatggcggcaagacggggtgagcctcagccacaatacccagcagtggggggacgttttgcctgacgggaatgggacatatcagacgtgggtggccacccgcatcagacagggtgaagagcagcgcttcacttgctacatggaacattcaggcaaccatgggacccatcccgtgccaagtggaaaggctctggtgctgcagtcacagcgtaccgattttccttacgtgtctgctgccatgccttgcttcgtcatcatcattatactctgcgtgccttgctgcaagaaaaagacctctgccgcagaagggcctgagctcgtcagcctccaggtcctggaccagcatccagtgggaaccggtgatcatagagacgctgcccaattgggtttccagcctttaatgtcagccaccggtagtactggatcgacggagggaacttag

SEQ ID NO: 230468 - DNA, 126 bp, synthetic construct
  misc_feature 1..126: note = Description of Artificial Sequence: Synthetic coding sequence
  source 1..126: mol_type = other DNA
atggggttggggcgtgtgttgctgtttctggcagtcgcattccccttcgcgccacccgcagcggcagccgttgagatgggatttcatagggtttctcaggacgggttggatctcctgaccagttag

SEQ ID NO: 230469 - DNA, 126 bp, synthetic construct
  misc_feature 1..126: note = Description of Artificial Sequence: Synthetic coding sequence
  source 1..126: mol_type = other DNA
atgggcctgggaagggtgctgctgttcttggccgtcgccttcccctttgccccacccgctgccgcagcggtagagatggggtttcaccgggtcagtcaggacgggcttgacttactcacttcctag

SEQ ID NO: 230470 - DNA, 1056 bp, synthetic construct
  misc_feature 1..1056: note = Description of Artificial Sequence: Synthetic coding sequence
  source 1..1056: mol_type = other DNA
atggtcctgagccaggacggcagtgtgcagtccggattcctggccgagggccatcttgatggacagcccttcctccggtacgacaggcagaagcgcagggcgaagccacagggccaatgggcagaggacgtacttggcgctgaaacttgggacaccgagaccgaagacttgacagaaaatgggcaagatctccggcgtaccttgacccatatcaaggaccagaagggaggactgcattctcttcaagaaattagagtctgtgaaattcacgaggactcatcgactagagggtctaggcacttttactacaatggagagcttttcttgtctcaaaatctcgagactcaggagagcacagtgccccaaagtagccgcgcacagactctggctatgaacgtcacaaatttttggaaggaggatgccatgaagacgaaaactcattatcgggcaatgcaagccgattgcctccagaaattgcagcgttacctgaaaagtggggtggccattaggcgcacggtgcctccaatggtcaacgtgacctgcagcgaagtgagcgaaggtaacattaccgtcacgtgcagagctagtagtttttacccgagaaatattaccctgacctggcgtcaggacggagtctccctctcgcataatactcagcagtggggagacgtcctgcctgacggtaatggtacttaccagacctgggttgctacaagaattcggcagggcgaggagcaacgatttacatgttatatggaacactccgggaatcacggtacccacccagtgccctcaggtaaagcccttgtgctgcaatcacagcgcaccgactttccatatgtgagtgccgctatgccctgttttgttataattattattctctgcgtgccatgttgtaagaaaaaaacttctgctgccgagggacctgaactggtctcgctccaggtgcttgaccagcacccagtgggaaccggtgaccaccgagacgccgctcagcttggcttccaaccgcttatgtcagccaccggctctactggctcaaccgagggggcttag

SEQ ID NO: 230471 - DNA, 2088 bp, synthetic construct
  misc_feature 1..2088: note = Description of Artificial Sequence: Synthetic coding sequence
  source 1..2088: mol_type = other DNA
atgtcaccacccaaagatccaagtccctctcttcccctcccgtcttcaagttctcatagcagcagccctcccagttcttcctctaccagtgtgtcaggtaacgcgcctgatggctccagtcccccacagatgactgccagtgaacccctcagccaggtcagcagaggtcatccaagtcctcctacccccaatttcaggagacgggcagtggctcaaggagccccaagagaaatacctctttacctcccgcatcatcctaaacccgagtgggccgagtactgcctggtgtcaccaggggaggacggcctgtccgatcctgctgaaatgacttccgacgaatgccagccagctgaagcacctctgggggatatcggcagcaatcatagagaccctcacccaatttggggtaaggaccgctcatggaccggtcaggaactgagcccccttgccggtgaggatagggagaagggtagcacgggagccagaaaggaagaggagggaggcccagtgctggtgaaggaaaaactgggccttaaaaagctggtgcttacacaagagcaaaagactatgttgctggactggaatgacagtattccggagagcgtccacctcaaagcaggagagcgcatttctcagaagagcgccgaaaatggccgaggcggacgagtgctaaaacccgtgcgtcccctgctactgccacgagcagcaggagaaccattaccaacacagcgcggagcccaggaaaagatgggtacaccggctgaacaagcccagggggaacgtaatgtcccaccaccgaagtcgccactgcggctcatcgccaatgctattcgcaggtcacttgagcccctcctgagcaatagcgagggcggaaaaaaagcgtgggccaagcaggaatccaaaacccttcccgcacaagcatgcacccggtcattctcactgagaaaaactaactcaaacaaggacggagaccagcacagccctggcagaaaccagtccagcgctttctctccgcctgatccagctctgagaactcatagtctccctaatcgaccatcaaaggttttcccagctctccgctccccgccatgttcaaagatcgaagatgttcccacgctactcgagaaagtctccctccaagagaattttccagacgcctcaaagccccctaagaaacgcatcagtttgttctcatctctgcgcctgaaggacaaatcttttgaatccttcctccaggagtcgcgacagaggaaagacattagagacttgttcggaagccctaaacggaaggtcctgcccgaggacagcgcacaggcccttgagaagctgttgcagcctttcaaaagtacgtcacttcgccaggcagcccctcccccacctccacctccgccaccacccccaccccctcccactgcaggaggggctgatagtaagaacttccccctgagggcccaggtgactgaggcgagttcttcagctagcagcacctcctccagttccgcagacgaggagttcgacccacaactgagcctccagcttaaagaaaagaagacactgcggaggaggaagaaattggagaaggcaatgaaacaacttgtgaagcaagaagaactgaaaaggctgtacaaggcgcaggctatccaacgccagttggaggaagtggaggaacggcaacgggctagcgaaattcagggcgtgaggctggagaaagctcttcggggtgaagctgattccgggacccaggacgaagctcagctgttgcaggaatggtttaagttggtcttggagaaaaacaagttaatgagatacgagtctgagcttctcatcatggctcaggaactggagctggaggatcaccagagccgactggaacagaagctgagagaaaaaatgcttaaggaggagtcccagaaggacgagaaagaccttaatgaagaacaagaggtgttcaccgaactgatgcaagttatcgagcagcgagacaaactagtcgacagcctcgaggagcagcgcattagagagaaagccgaggatcagcactttgaatcattcgtgttttcccgcggatgccagctgagtaggacctag

SEQ ID NO: 230472 - DNA, 90 bp, synthetic construct
  misc_feature 1..90: note = Description of Artificial Sequence: Synthetic coding sequence
  source 1..90: mol_type = other DNA
atgtccccacccaaagaccccagccccagcctcccgcttccttcttcatcgtcgcattcttccagcccgccttcttcaagctccacgtag

SEQ ID NO: 230473 - DNA, 522 bp, synthetic construct
  misc_feature 1..522: note = Description of Artificial Sequence: Synthetic coding sequence
  source 1..522: mol_type = other DNA
atgagtctcttgggacccaaggtattactgtttcttgccgctttcatcatcacttcagactggatccctctgggcgtcaacagccagaggggagatgacgtgacacaggcaacacccgaaacatttaccgaagaccctaatctcgtgaacgaccctgctacagacgaaacggtgctggccgtcttagcagatatcgccccatctactgacgacttagctagcctgagtgagaagaataccacagctgagtgctgggacgaaaagtttacttgcacccgtttgtactctgtgcaccgccctgtaaaacagtgtatccatcagctatgtttcacatcactccgcaggatgtacatcgtcaataaagagatttgtagccgtttggtctgtaaagagcatgaggccatgaaagatgagttatgtcgccagatggccggactcccccctaggcggctgagaagatccaattattttcggttgccaccatgcgaaaacgtggaccttcagagacccaacggtctgtag

SEQ ID NO: 230474 - DNA, 492 bp, synthetic construct
  misc_feature 1..492: note = Description of Artificial Sequence: Synthetic coding sequence
  source 1..492: mol_type = other DNA
atgtccctcctgggaccaaaggtcttgcttttcctggcagccttcattatcacctccgattggattcccttaggtgttaattcccagaggggtgacgacgttacccaggctacccccgagacatttacagaagatccaaatttggttaatgatccggctacagacgaaacagtcctggcagtgctcgctgacattgcaccatccacggacgatctagagtgctgggacgaaaagtttacttgtactagactctactcggtacacaggccagtcaagcaatgtatccaccagctttgtttcacctctctgcgcaggatgtacattgttaacaaggagatctgctcccggctggtatgcaaggaacacgaagccatgaaagacgagctgtgtcgccagatggccggattacctccccgacgacttcggcgttccaactattttaggctgcccccatgtgaaaacgtggatttgcagcggcctaacggtttatag

SEQ ID NO: 230475 - DNA, 447 bp, synthetic construct
  misc_feature 1..447: note = Description of Artificial Sequence: Synthetic coding sequence
  source 1..447: mol_type = other DNA
atgtcactcctggggcctaaggtgctgttattcttagctgcctttattatcaccagtgactggatcccactgggcgtcaactcccagcgtggagatgatgtgactcaggctactcctgaaacgttcacggaagaccccaatcttgttaatgatccagccaccgatgaaacggagtgctgggacgagaaattcacctgcacacggctatactccgttcatagacccgttaaacagtgcatacaccagctgtgcttcacaagtctgaggcggatgtatatagtcaacaaggaaatctgttcgcggcttgtgtgcaaggagcatgaggcaatgaaagatgaactgtgtaggcagatggctggcttgcccccacgtcgcctgcgaagatctaactatttccggcttcctccgtgcgaaaatgtcgacttacaacgaccaaatggcttgtag

SEQ ID NO: 230476 - DNA, 492 bp, synthetic construct
  misc_feature 1..492: note = Description of Artificial Sequence: Synthetic coding sequence
  source 1..492: mol_type = other DNA
atgtcattgctggggccaaaagtcctgctttttctcgccgcattcattattacgagcgactggataccactcggtgtcaattctcagcgcggtgacgatgtgacccaagctactcccgaaaccttcaccgaggacccaaatctagtcaacgatcccgcaacagacgagaccgtgctagctgtgcttgccgacatcgcaccatcaaccgatgacctggagtgctgggacgaaaaattcacatgcacacgcttatactctgttcatagaccagtcaagcaatgtatccaccagctgtgctttactagccttagaagaatgtacattgtgaacaaggaaatctgttcccggctggtctgtaaagagcacgaagctatgaaggacgagttgtgcaggcagatggccggtctgcctccaagaaggctgcgtcgctcgaactacttccgcctccctccgtgcgagaatgtggatctccagaggcctaatggattgtag

SEQ ID NO: 230477 - DNA, 276 bp, synthetic construct
  misc_feature 1..276: note = Description of Artificial Sequence: Synthetic coding sequence
  source 1..276: mol_type = other DNA
atgtctcttctgggtccgaaagtgcttctgtttctggcggcattcattatcacatctgactggatccccctcggcgttaacagtcaacggggagatgatgtcactcaagctacaccggagactttcactgaggacccaaacctagtgaatgaccccgcaactgacgaaactgtcctggctgttctcgctgacatcgcccctagcaccgacgacctggctagcctgtcggagaagaatacaacggctgagtgttgggacgagaagtttacgtgttag

SEQ ID NO: 230478 - DNA, 1320 bp, synthetic construct
  misc_feature 1..1320: note = Description of Artificial Sequence: Synthetic coding sequence
  source 1..1320: mol_type = other DNA
atgtctgtgccatcagcccttatgaagcagccgcctattcagagcaccgcgggagcagtacccgtcaggaacgaaaagggggagatttcaatggaaaaggtaaaagtcaagagatatgtgagcgggaagcgccctgactatgccccaatggagtcttccgatgaagaagacgaggaattccagttcattaagaaagctaaggagcaggaagctgagcccgaggagcaggaagaagatagctctagtgatccaagactgagaaggttgcaaaatcggatttccgaggacgttgaggagaggcttgctcggcaccgcaagatcgtggagccagaggtggtgggcgaatctgacagcgaggtggagggagacgcttggagaatggagcgcgaagactcatcagaagaggaggaggaggagatcgacgacgaagagatcgagaggcggagaggtatgatgcgccagagagctcaggagaggaagaacgaggagatggaagtaatggaagtggaggatgaagggaggtccggtgaagagagtgagtcagagagtgagtatgaggagtacaccgattctgaagacgaaatggaaccaagattaaagcccgttttcatcagaaagaaggatcgcgttactgtgcaagaacgggaagctgaggctcttaaacaaaaagagcttgaacaagaagccaaaagaatggccgaggagagacgtaagtatacactgaaaatagtcgaagaagagacaaaaaaggagttagaggagaacaagaggtctctcgccgctctggatgcactaaatacagacgacgaaaatgacgaggaagagtatgaggcctggaaggtgcgggaactcaaacggattaagcgtgatcgcgaagacagagaggcgctggaaaaggagaaggccgaaattgaaagaatgcggaacctgactgaggaagaacggagagctgagctgagagctaacgggaaggtaataaccaataaggccgtcaagggcaagtacaaatttctgcaaaaatactaccatcgtggtgcttttttcatggacgaagacgaggaggtgtataagcgggatttctcggctcccaccttggaggaccacttcaataaaacgattcttccgaaagtgatgcaggtgaaaaacttcggtagaagcggccgtaccaagtatacacatctggtggaccaagacacaaccagctttgattccgcctggggtcaggaatcagctcagaatacgaagtttttcaaacagaaggccgcaggggtgagggacgtgttcgagcggccaagcgctaagaaaagaaaaaccacctag

SEQ ID NO: 230479 - DNA, 549 bp, synthetic construct
  misc_feature 1..549: note = Description of Artificial Sequence: Synthetic coding sequence
  source 1..549: mol_type = other DNA
atgagagcagcatatcttttcttgcttttcctccccggactgctggctcaaggccagtacgacttagaccctttacctccgttccccgatcacgtgcaatacacccactattcagatcagatcgataatcctgactactacgactatcaggaggtcacaccacgtccatctgaggagcagttccagtttcaaagtcagcagcaggtccaacaggaggtaataccagctcccactccagagcctgggaatgctgagctggaaccgactgagcccggaccactagactgtcgggaagagcagtatccgtgcacacgtttgtatagtatccataggccctgcaaacaatgcctaaacgaggtgtgtttctacagtctgagacgagtctacgttattaacaaggagatttgcgtgcgaaccgtctgcgcccatgaagagctgctccgcgcagatctgtgccgagataaattttcaaagtgcggcgtgatggccagctcaggcctatgccaatctgtggctgcgtcttgcgcacgatcatgtggcagttgctag

SEQ ID NO: 230480 - DNA, 552 bp, synthetic construct
  misc_feature 1..552: note = Description of Artificial Sequence: Synthetic coding sequence
  source 1..552: mol_type = other DNA
atgcgtgctgcttacctgtttctgctgttcttacctgctggtcttctcgcccaaggacagtacgacctcgacccactgcctccattccctgaccatgtacaatacacccattactccgaccagatcgataatcccgactactatgattatcaggaggtcacaccacgtccttctgaggagcagttccagttccagtcccaacaacaggtgcaacaggaggtgatcccggcacctacgccagaaccaggcaacgccgaactcgagcccactgaaccaggcccactggattgtcgcgaagagcagtatccatgcactcggctctactccatccatcgcccttgcaagcagtgcctcaacgaggtttgtttctatagtcttaggagggtgtatgtcatcaataaagagatttgtgtcaggactgtgtgtgctcacgaagagctgttaagggcagatctgtgccgggacaagttctccaagtgcggcgttatggcttcttctggattatgccaatctgtagccgcatcatgcgccaggtcatgcggatcctgttag

SEQ ID NO: 230481 - DNA, 549 bp, synthetic construct
  misc_feature 1..549: note = Description of Artificial Sequence: Synthetic coding sequence
  source 1..549: mol_type = other DNA
atgcgcgctgcctatctctttctcctctttctaccaggtttgttggcccagggtcagtacgacttggaccccctgcctcctttccccgaccatgtccagtatactcactactccgatcagatagataaccccgattattatgattatcaggaggtcactcctcgcccaagcgaagagcagttccagttccagagtcagcagcaggtgcagcaggaggttattcccgctccaactccggagccgggaaatgccgaactggagcctacagaaccgggacccctagactgtcgagaggaacagtatccgtgcacgagactttatagcatacaccgcccatgtaaacagtgtctgaacgaggtgtgtttctacagcctcaggagggtctacgtcataaacaaggagatctgcgtcaggacggtatgcgcccatgaagagttattgagagccgacctgtgcagagataagttctccaagtgtggggtgatggcctcctccggcctttgccagtctgtcgccgcatcttgtgccaggagctgcggcagctgttag

SEQ ID NO: 230482 - DNA, 1089 bp, synthetic construct
  misc_feature 1..1089: note = Description of Artificial Sequence: Synthetic coding sequence
  source 1..1089: mol_type = other DNA
atgaaactgcactgctgcctgtttacattagtggcctcaatcattgttcctgcagccttcgtgctggaggacgtggattttgaccagatggtttcactggaagcgaaccgctccagttataatgcaagcttcccatcatcatttgagctgtccgcttctagtcactccgacgatgacgtgataattgccaaggagggcacgagcgtgagtatcgaatgcctgctgacggcctcacactacgaagacgtacactggcataactctaaaggtcagcagctggacggccgatctcgtggtggaaagtggctggttagcgataactttctcaacattactaacgtggcattcgatgatagaggcctgtatacttgctttgtgacttctcctattcgtgccagctactcagtgaccttaagagtgattttcacctcaggtgatatgtccgtttattacatgatagtctgcctgattgcctttacaattaccttgatcctcaatgttacccgattgtgtatgatgtcctctcacctcagaaaaacagagaaggcgattaatgagttttttaggaccgagggcgcagaaaaacttcagaaagcgtttgaaatcgcaaaacgaatccccataattaccagcgcgaagaccctcgaattagccaaggtcacccagtttaaaacaatggaattcgcgaggtatatcgaggagttagctaggagcgtgccattgcccccactgatcctgaactgtcgtgcatttgtcgaggaaatgtttgaagcggtgagggtggatgaccccgatgacttaggagaacgcatcaaggagagaccggcacttaatgcccaaggaggcatttacgtaattaatcccgaaatgggcagaagcaattcacccggaggcgattccgacgatggtagtctgaatgaacagggccaggaaatcgctgttcaagtgtcggtccatctgcagtctgaaactaaatccatagatactgagagccaggggagttcacatttttctcccccagatgatataggaagtgccgagagcaactgtaactacaaggatggcgcttacgagaactgtcagctgtag

SEQ ID NO: 230483 - DNA, 1089 bp, synthetic construct
  misc_feature 1..1089: note = Description of Artificial Sequence: Synthetic coding sequence
  source 1..1089: mol_type = other DNA
atgaagctccactgttgtctttttactctcgtggccagtatcatcgtgcccgctgcttttgtactggaagatgtagattttgatcagatggtttccctggaggccaatcgcagcagctacaatgcttcatttccttcctccttcgaactgagtgctagctcccacagcgatgatgatgttatcatcgccaaggagggcacctccgtgtcaatagagtgccttttgacagcatctcactacgaagacgtgcattggcataattccaagggccagcagctcgacggccgatctagagggggaaagtggcttgtgagtgacaactttttgaatattactaatgttgcatttgatgaccggggattgtacacatgctttgtgacaagtcccattagggctagttattctgttactctccgagtgattttcacaagtggggatatgtcagtctactacatgatagtctgtttaatagcgttcactattacactgatcctcaatgttacgaggctctgtatgatgagtagccacctgcgcaagactgagaaagcaattaatgaattctttaggacggagggtgccgagaaattgcagaaggccttcgagatagctaaacggattcccattatcacttctgctaagactctggagctggctaaggtcacgcagttcaagaccatggaatttgcgaggtatattgaagaactcgcccgtagcgttcccctgccgccactgattttgaactgtcgcgcattcgtggaagaaatgttcgaggcggttagagtggacgatcctgacgacttgggggagaggataaaggaacgaccagccctgaacgcacagggcggaatctacgtgattaacccggaaatgggacgctcgaattcacccggaggagacagcgatgatggatcactgaatgagcagggacaggaaattgcggttcaggtgtccgtccacttgcagtcggagacaaagagcatcgatacggagtcacagggaagctcccatttctcacccccagacgatattggaagcgctgaatccaattgcaattataaggacggggcatatgaaaactgccagctgtag

SEQ ID NO: 230484 - DNA, 651 bp, synthetic construct
  misc_feature 1..651: note = Description of Artificial Sequence: Synthetic coding sequence
  source 1..651: mol_type = other DNA
atgtccgtctattacatgattgtctgtctcatagcattcacgatcaccctgatcctgaacgtgacccgcctatgcatgatgtcttcccacctgagaaagactgagaaggctattaacgagttcttcaggacagagggggcagagaaactgcagaaagccttcgaaatcgccaaacgtatcccaataatcaccagcgccaagactctggagcttgctaaagtcacacagtttaagaccatggagttcgctcgctacattgaagaacttgcccgtagtgttccgttgccacccctgattctcaattgccgggcattcgtggaagaaatgttcgaggccgtgcgcgtagatgacccagacgacctcggggaaaggatcaaggagcgcccagccttgaatgctcaaggaggcatttacgtgattaaccctgagatgggcagatccaactcccctggcggagatagcgacgatggaagccttaatgagcagggccaggaaatcgcagtccaagtgtctgtgcacctccagagcgagacaaagtccatagataccgagtcccaggggtcgtcccattttagtcccccagatgacattggatcagccgaatcgaattgcaactacaaggacggggcatacgaaaattgccagctatag

SEQ ID NO: 230485 - DNA, 54 bp, synthetic construct
  misc_feature 1..54: note = Description of Artificial Sequence: Synthetic coding sequence
  source 1..54: mol_type = other DNA
atgaagttacattgctgcctcttcacccttgtggcatctatcatcgtgccatag

SEQ ID NO: 230486 - DNA, 330 bp, synthetic construct
  misc_feature 1..330: note = Description of Artificial Sequence: Synthetic coding sequence
  source 1..330: mol_type = other DNA
atgaagttacactgctgtctgttcaccctggtcgcctccatcattgtgccggcagctttcgtactggaagacgtcgactttgaccagatggttagcctcgaagcaaaccgtagttcctacaacgcctccttcccgtcctcatttgagctgtctgcctcctcccactccgacgatgacgtgattatcgctaaggaggggacaagcgtgagcatcgaatgcctcctaacagccagccattacgaagatgtgcactggcacaacagtaagggccagcagctcgatggcaggagtcgcggtggtaaatggctcgtctccgataatttcctctag

SEQ ID NO: 230487 - DNA, 372 bp, synthetic construct
  misc_feature 1..372: note = Description of Artificial Sequence: Synthetic coding sequence
  source 1..372: mol_type = other DNA
atgaagctccactgctgtctctttacacttgtggctagcattattgtgcctgcggcatttgtgctcgaggacgtggacttcgatcagatggttagtctagaggccaatcgtagctcgtacaatgcaagcttcccaagcagctttgagctttctgccagcagtcactcagacgacgacgttatcatcgctaaggagggaactagcgtcagtatcgagtgtctactcaccgcctcacattatgaggatgtgcattggcacaacagtaagggacagcaactggacgggagatcaagagggggtaagtggctcgtatccgataactttctcaacattactaatgtggctttcgatgaccgtgggctctacacctag

SEQ ID NO: 230488 - DNA, 768 bp, synthetic construct
  misc_feature 1..768: note = Description of Artificial Sequence: Synthetic coding sequence
  source 1..768: mol_type = other DNA
atgaaggccctgctggccctccctctgctgctgctgttgtctacacccccatgcgctcctcaggtgtctggcatccggggtgacgctcttgagcgattttgtcttcagcagcccctcgattgcgacgacatttacgcacaaggttaccaatctgacggagtctaccttatctatccctcaggtcctagcgtacctgtacccgtgttttgtgatatgacaaccgaagggggaaaatggactgtgttccagaaacgctttaatggctccgtctctttcttccgcggatggaacgactacaaacttggatttgggagggctgacggagaatattggctgggtctccagaatatgcacttgttaacgcttaagcaaaaatatgaactgcgtgtggatttggaagactttgaaaataatacggcctatgcaaaatacgcggatttttctatttcacctaatgcggtcagcgccgaggaagacggatatactttgtttgtggctggcttcgaagacggcggagccggagactcactgagctaccatagtggacagaagttctcaacatttgatcgcgaccaagatttgtttgtgcagaactgcgccgcactctcaagtggtgccttttggttcaggagctgtcacttcgccaatctaaatggattttatctcgggggaagccacctatcgtatgccaatggcatcaactgggctcagtggaagggattctattattctctcaagcgtacggagatgaagatcagacgcgcttag

SEQ ID NO: 230489 - DNA, 840 bp, synthetic construct
  misc_feature 1..840: note = Description of Artificial Sequence: Synthetic coding sequence
  source 1..840: mol_type = other DNA
atgggggaactgtcaccactccagcgtcctttggctacggagggtactatgaaagctcagggtgtgttgctgaaactggcgctgctggcgctgcctctcctcctgttgctgtctactccgccatgtgcaccccaagtgagcggtatccgcggagacgccctcgaaagattttgcctacagcagccattggattgtgacgatatctacgcacagggctaccagagtgacggcgtgtatctcatttacccaagcggcccatctgtgcctgtccccgtcttttgcgacatgaccacggagggaggtaaatggaccgttttccagaagcggtttaacggctccgtgtcgtttttcagggggtggaatgactataagttgggcttcggcagagcagatggtgaatactggctcggcctgcagaacatgcatcttctcaccctgaagcagaagtatgagctgagggtggatctcgaagacttcgagaataataccgcttacgccaaatacgccgacttttcaatcagtccaaatgcggttagcgcggaggaggacggatataccctcttcgttgcgggattcgaggatggcggtgcgggagactccctgtcctatcatagtggtcagaaattctctacctttgacagggatcaggatctgtttgtccagaactgcgctgccctgtccagtggggctttctggtttcgatcctgtcacttcgccaacctgaatggcttctatctcggcggttcccacctatcttatgccaacgggatcaactgggctcagtggaaaggtttctattattctttaaagcgcaccgaaatgaagattcgtcgggcttag

SEQ ID NO: 230490 - DNA, 468 bp, synthetic construct
  misc_feature 1..468: note = Description of Artificial Sequence: Synthetic coding sequence
  source 1..468: mol_type = other DNA
atggtcgacctgacccaagtgatggacgacgaggtctttatggcgtttgcctcttacgctacaatcatcctctccaagatgatgctgatgtcaaccgccacggctttttaccggctgacaaggaaggtgtttgccaaccccgaggactgcgttgctttcgggaagggagaaaatgcaaagaaatatctgcggaccgatgatcgagtggaaagagtgcgccgtgcccacctgaacgacctcgaaaacattattccttttctcggtatcggcttgctgtatagtctgtccgggccagatccgtctacagctatcttgcattttaggctatttgtgggcgcacgcatttaccatacgattgcgtatttgactcctctgccacaacccaacagagcgttgagtttcttcgttgggtacggcgtgaccctcagtatggcctataggctgctcaagtctaaactgtatctttag

SEQ ID NO: 230491 - DNA, 468 bp, synthetic construct
  misc_feature 1..468: note = Description of Artificial Sequence: Synthetic coding sequence
  source 1..468: mol_type = other DNA
atggtcgacctgacacaagtgatggacgacgaggtctttatggccttcgcatcatacgcgacaattatactcagcaagatgatgctaatgtcaactgcgactgctttttataggttaactcggaaagtttttgccaacccggaagactgtgtagcatttggcaagggcgagaacgccaagaagtacctccggacagacgatcgtgtcgagcgggtgcggcgtgctcacctgaacgatctcgagaacataattccctttctgggaattggactcctctactcacttagcggtccagaccctagcaccgccatcttacactttaggctttttgttggcgcacgcatttaccatactattgcttatcttacccctctgccgcagcccaacagagccctcagttttttcgtgggatatggcgttactctgtccatggcctatcgactgctgaagtctaagttatatctttag

SEQ ID NO: 230492 - DNA, 468 bp, synthetic construct
  misc_feature 1..468: note = Description of Artificial Sequence: Synthetic coding sequence
  source 1..468: mol_type = other DNA
atggtcgacttgactcaggttatggatgatgaggtgtttatggctttcgccagctacgccacaatcattctgtccaaaatgatgctgatgagcacagccacagcattctacagactcacgagaaaagtcttcgcaaacccggaagactgcgtggctttcggaaaaggtgagaacgccaaaaaatacctccgaactgacgatcgagtggaacgagtgcgcagggctcatttgaacgatctggagaacatcattcctttcctgggtattgggttactgtattcgctgagcggccctgacccgtctactgcaattctgcattttaggctgttcgtgggggcacgcatttaccacaccattgcttacctgacgccactacctcagcccaacagagcccttagcttttttgttgggtacggtgtaacacttagcatggcttataggctgctgaaaagtaaactttatctttag

SEQ ID NO: 230493 - DNA, 468 bp, synthetic construct
  misc_feature 1..468: note = Description of Artificial Sequence: Synthetic coding sequence
  source 1..468: mol_type = other DNA
atggtggacctaacgcaggttatggacgatgaagtcttcatggcatttgcctcctacgctactatcattctctctaagatgatgctgatgtccactgccaccgctttctaccggctgaccagaaaagtgtttgcaaatcccgaggattgtgtggcatttgggaaaggagagaacgccaagaaatatctgaggaccgatgaccgcgtggagcgcgtccgacgggcacacctcaatgatcttgagaatatcataccgtttctcggaatcggattgttatatagtctgagcggcccagacccctctactgccatcctacattttcgactgtttgttggggctcggatctaccacaccatcgcctacctgacaccgctgccccagcccaaccgggctctaagcttctttgtaggatatggcgtgaccctgtcaatggcctaccgacttctcaagagcaagctgtatctttag

SEQ ID NO: 230494 - DNA, 234 bp, synthetic construct
  misc_feature 1..234: note = Description of Artificial Sequence: Synthetic coding sequence
  source 1..234: mol_type = other DNA
atggtcgaccttacgcaggtgatggatgatgaggtttttatggccttcgcttcctacgccacgataattctaagcaaaatgatgctgatgagcactgctactgccttctacagactcactcggaaggtcttcgccaaccccgaagattgcgtggccttcggtaagggcgagaacgccaaaaaatatctgcggaccgacgatagggtagagcgcgtgagaagggcgcatttatag

SEQ ID NO: 230495 - DNA, 129 bp, synthetic construct
  misc_feature 1..129: note = Description of Artificial Sequence: Synthetic coding sequence
  source 1..129: mol_type = other DNA
atggtcgatctcacacaggtcatggacgatgaagtcttcatggcatttgccagttatgctaccatcatattgagcaaaatgatgttgatgtccacagccacagcattctatcgactaactaggaaatag

SEQ ID NO: 230496 - DNA, 243 bp, synthetic construct
  misc_feature 1..243: note = Description of Artificial Sequence: Synthetic coding sequence
  source 1..243: mol_type = other DNA
atggtagacctgacgcaagtaatggatgatgaagttttcatggcttttgctagctacgctaccatcatcctttccaaaatgatgcttatgtccaccgccaccgctttttataggctcactcgaaaagtgtttgccaacccagaagactgcgtggctttcgggaagggagaaaacgcgaagaaatatctgcggactgacgatagagtggaacgagtgaggcgtgcccacctgaatgatctctag

SEQ ID NO: 230497 - DNA, 264 bp, synthetic construct
  misc_feature 1..264: note = Description of Artificial Sequence: Synthetic coding sequence
  source 1..264: mol_type = other DNA
atggtggacctcacccaagttatggacgacgaagtcttcatggccttcgcttcctatgctaccatcattctgtctaagatgatgcttatgtcgactgccacggccttttacagactgactaggaaggtttttgcgaatcctgaggactgcgtggcctttgggaaaggggaaaacgcgaagaaatacttgaggaccgatgaccgcgtggagagggtgcgcaggattaaacagacactgtcaatttatctcgcttcctcgatttag

SEQ ID NO: 230498 - DNA, 444 bp, synthetic construct
  misc_feature 1..444: note = Description of Artificial Sequence: Synthetic coding sequence
  source 1..444: mol_type = other DNA
atggcagggaacagcatcttactggctgctgtgtctattctgtcagcctgccagcaaagctactttgcactgcaggtggggaaagctcggctgaagtataaagtgacacccccagcagtgaccggttccccagagttcgaaagagtcttccgggctcagcagaactgcgtggagttctatcctatttttatcatcacgctgtggatggctggctggtatttcaaccaggtgtttgccacttgtctgggattggtttacatctatggaaggcatctctatttctgggggtactctgaggcggctaagaagcgaatcacagggtttaggctgtcattaggaatcctggcccttctcaccctgctgggggctctgggcattgcaaattccttcctggatgagtatttagacctgaatatagcaaagaaactccggaggcagttctag

SEQ ID NO: 230499 - DNA, 444 bp, synthetic construct
  misc_feature 1..444: note = Description of Artificial Sequence: Synthetic coding sequence
  source 1..444: mol_type = other DNA
atggcagggaattctatcttgttagcagcagtcagtattttatcggcatgccaacagtcttactttgctctgcaggtggggaaggcgcgtctcaaatacaaggtgaccccgcctgctgtcaccgggtcccccgaattcgagcgggtgttccgtgcacagcagaactgcgtagaattctaccccatttttattattaccctttggatggctggttggtactttaatcaggtcttcgccacctgtctgggactggtgtatatctacggcagacacctttatttttgggggtactcagaggcagcaaaaaaaaggataaccggatttagactttccctgggtatcctggcgttgctgacactgctgggagccttggggattgccaattcatttctggacgagtacctggacttgaacatagctaaaaaattgagacgccagttttag

SEQ ID NO: 230500 - DNA, 234 bp, synthetic construct
  misc_feature 1..234: note = Description of Artificial Sequence: Synthetic coding sequence
  source 1..234: mol_type = other DNA
atggcgggaaattccatcctgctcgccgcagtgtcaatcttgagcgcctgtcagcagagttacttcgcgttgcaggtaggcaaagctaggctgaagtataaggtgaccccgcctgcagtaactggcagtccagaatttgagcgggtgtttcgcgctcacttttgctatctttcaggttcaggggtgcatatctggccttcccccatcctgctgggaattttcaggtcttgctag

SEQ ID NO: 230501 - DNA, 501 bp, synthetic construct
  misc_feature 1..501: note = Description of Artificial Sequence: Synthetic coding sequence
  source 1..501: mol_type = other DNA
atgccttggcgcggacgtagattccgactgtgtcggcgaaagatggcagtgctctccaaagaatatggtttcgtgctactaacgggggcagcaagcttcatcatggtcgcccacctggcaatcaatgtctccaaagcacgtaaaaaatataaagtggagtaccccattatgtattcaacagaccccgagaatggtcatatttttaattgtatacaacgtgcccaccaaaacacccttgaggtctatccacccttcctcttcttcctggccgtcggcggagtatatcaccccagaatcgctagtggcctggggctggcatggattgttggtagggtactgtacgcttacggttattacaccggggagccgtccaaaaggagtcgcggagctctggggtcaattgctctcctcggcttagtcgggaccaccgtgtgcagcgcatttcaacacctgggttgggtgaagagtgggcttggatccgggccaaagtgttgtcactag

SEQ ID NO: 230502 - DNA, 459 bp, synthetic construct
  misc_feature 1..459: note = Description of Artificial Sequence: Synthetic coding sequence
  source 1..459: mol_type = other DNA
atggccgtgttgagtaaggagtatggcttcgtgctcctgacaggagccgcatcttttataatggttgcacatctcgcgattaacgtttctaaggcccgaaaaaaatataaggttgaataccctattatgtacagcaccgatccagagaacggtcacattttcaactgcatacagagggcgcatcagaatacccttgaggtgtaccccccttttctttttttcctggccgtgggaggggtgtaccacccgagaatagcgtctggccttgggttagcatggattgtggggagagtgctgtacgcttacggatactacaccggagagccctcgaagagaagcaggggcgctttaggttcaatagccttgttgggtctcgttggcacgaccgtgtgttccgcatttcagcacctggggtgggttaagtctggcctggggagcggcccaaaatgctgccattag

SEQ ID NO: 230503 - DNA, 501 bp, synthetic construct
  misc_feature 1..501: note = Description of Artificial Sequence: Synthetic coding sequence
  source 1..501: mol_type = other DNA
atgccttggcggggacgtaggtttaggttatgccgaagaaagatggccgtcttgtccaaagagtatgggttcgtgctattgactggtgcagcttcttttattatggtagcccatctcgccattaatgtttccaaggccaggaaaaagtataaggtcgaatatcccattatgtattcaactgatccagagaacggtcacatctttaactgcatccagagagcgcatcagaacacactagaagtgtaccccccttttctgttttttctggcagttgggggagtctatcacccgcgaatcgctagtggtctcggtttggcgtggatcgtgggtagagtgctgtatgcttatgggtattacacgggagagccctccaagaggagtcgtggagccttgggaagcatcgctttattaggcttggtgggtacgacagtttgctcagccttccagcatctcggctgggttaagtctggactcggttccggtccaaaatgttgccattag

SEQ ID NO: 230504 - DNA, 501 bp, synthetic construct
  misc_feature 1..501: note = Description of Artificial Sequence: Synthetic coding sequence
  source 1..501: mol_type = other DNA
atgccctggagaggtaggcgatttcggttatgtagacggaagatggccgtcttgtcaaaagaatatggctttgtcctgcttactggcgcagcgtcctttatcatggtggcacatctagccatcaacgtgtcaaaagccaggaaaaagtacaaagtggaatacccaattatgtactcgacagaccccgaaaacggacacatctttaattgcatccagcgggcacatcagaatacacttgaggtttaccccccatttctgttttttctcgccgtggggggtgtgtaccatccaaggatagctagtgggctaggacttgcctggatagtgggtcgagtgttgtacgcctacgggtactacaccggtgaaccatctaagcggtctcgtggcgcactcggatcaattgctctcttggggttagttggaactacagtgtgttccgcgttccagcatctgggttgggttaaatctggattgggtagcgggcctaagtgttgccactag

SEQ ID NO: 230505 - DNA, 459 bp, synthetic construct
  misc_feature 1..459: note = Description of Artificial Sequence: Synthetic coding sequence
  source 1..459: mol_type = other DNA
atggcagtccttagcaaggaatatgggtttgtcttactgactggcgctgcatcctttataatggtggcacatctggctattaacgtgagtaaagctcggaagaagtataaagtcgagtaccctattatgtactccacagaccctgagaacggtcacatatttaactgcatccagagagcccatcagaacactctggaggtgtaccctccctttctttttttcctagctgtaggcggtgtctaccacccacggatagcatcaggcctcgggttagcctggatcgtggggagagtgctgtacgcttacggatactatacaggcgagcctagtaagcgctcaaggggcgctcttggatcaatcgccctgctgggcctggtgggtacaaccgtgtgtagcgcctttcagcatctggggtgggttaagtccggcttgggctccggtcccaaatgttgtcactag

SEQ ID NO: 230506 - DNA, 501 bp, synthetic construct
  misc_feature 1..501: note = Description of Artificial Sequence: Synthetic coding sequence
  source 1..501: mol_type = other DNA
atgccatggcgtggacgcagattcaggttgtgccgccgtaaaatggctgtgttgtcaaaagaatatggcttcgtactcttgactggggcagcttccttcataatggtggctcatctggcaataaacgtctctaaagctagaaagaaatataaggtggagtatccaattatgtatagcacagaccctgaaaacggtcacattttcaattgcattcagcgggctcatcagaataccctcgaggtctacccacctttcctgttctttctcgccgtagggggtgtgtaccacccacgaatcgcatccggtctaggactggcatggatcgtgggaagagtgctctatgcctatgggtattacaccggggaaccctccaaaaggtctagaggggctctgggatccatcgctcttcttggtctggtgggcactaccgtgtgctccgcctttcaacacctgggatgggtaaaaagtggactcggatcaggcccaaagtgttgtcactag

SEQ ID NO: 230507 - DNA, 972 bp, synthetic construct
  misc_feature 1..972: note = Description of Artificial Sequence: Synthetic coding sequence
  source 1..972: mol_type = other DNA
atgcccagattgactttcgcaccaaagggctggccacatcctcccacctcactccattggtggctcttccaggagctgcctacaccctcggaaaacagcatgcccccaggtctctcaacaccaaccgcaagtcaggagggggctggacccgtccctgatcccagtcagcccacgaggcggcaaatccgcctgtcatctcccgagcgacagcgattgtcttccctcaacctgacccctgatccggagatggagccgccacccaaacctcctaggagctgcagtgccctcgcaaggcatgctttggagtcctcatttgtggggtgggggctccctgtgcagagccctcaggccctggttgctatggaaaaggaggagaaggagagtccgttctctagcgaggaagaggaagaagacgtgccactggacagcgatgtggagcaggcgctccaaacgtttgcgaaaacatccggcacaatgaacaactacccaacatggcgacggacacttctcagacgcgcaaaagaggaagaaatgaaaagattttgtaaggctcagacaatccagagaaggctgaacgaaattgaagctgcgctgcgtgagctggaagctgagggggtcaagctcgagctggcactgcgtcgacaatcatcctccccagagcaacagaagaaactgtgggtgggccagctgctccaactcgtcgacaagaaaaacagcctggtggctgaggaagcagagctgatgatcacagttcaggagctgaatttggaagagaaacagtggcagctggatcaggagctgagaggatatatgaacagagaggaaaatttgaaaactgctgccgatcgccaggctgaagaccaagtcctccggaagttagtggacctggttaatcagcgagatgcgctgattaggttccaggaggagagacggctgtccgagctcgcactagggaccggcgctcaagggtag

SEQ ID NO: 230508 - DNA, 2946 bp, synthetic construct
  misc_feature 1..2946: note = Description of Artificial Sequence: Synthetic coding sequence
  source 1..2946: mol_type = other DNA
atggcttcccctactagtaccaatcccgctcatgcacacttcgagagcttccttcaggcacaactgtgtcaggacgtcctaagctcttttcaggaactctgcggcgctttgggactcgagcccggagggggattgcctcagtaccacaagataaaagatcaactgaactattggtctgctaagtccttgtggactaaactggataagcgtgcaggccagccggtctaccagcaggggagggcatgcacgagcaccaaatgtctggtcgtcggggctgggccttgcggcttgcgggtggctgtcgagctggcgctgctgggcgctcgagtggttctcgtagaaaaaagaaccaagttttctaggcacaacgtcctgcacctctggccctttaccatccacgacctccgagcgctcggcgctaaaaaattttacgggcgattctgcactgggactctcgatcacatttctatacgccaacttcagctgctgctgttaaaggtggctttgctgctgggggtagagatacattggggagtgaccttcaccgggctccagccaccacccagaaagggaagcggttggcgtgcccagctccaacccaacccccctgcgcaactagccaactatgagttcgacgtgctgatttctgctgctggaggaaaattcgtgcccgaaggttttaaggtgagagaaatgcgcggaaagctggctatcgggattaccgccaactttgtgaatggtcgaaccgtggaagaaacacaggtgcccgaaatttctggtgtcgccagaatttacaatcaatccttttttcagtcactgcttaaggctacaggcatcgatttggagaatatagtctattacaaagatgatacacactacttcgtcatgaccgctaagaagcaatgcctcttgcggctgggcgtcctgcgacagccattttggcccctgggtacaggtgtagcacgtggcttcctcgctgcatttgacgcggcttggatggtcaagcgctgggccgagggagccgagtccctcgaggttttagcggagcgagaaagtctctaccaactccttagccagacctcgcctgaaaatatgcacaggaatgttgcccagtacggccttgatcctgctactcgatacccaaatctcaacctcagagccgtaactcccaatcaggtgcgagatttatacgacgtcctcgcaaaggaacccgtgcagcgtaataacgataaaacggacactggaatgccggctaccgggtccgctggaacccaagaagaacttctgcgctggtgtcaggagcagactgctggctatccgggagtgcatgtttctgacctttccagttcctgggcagacggactggccttatgcgccttggtctaccggttacagcccggactcctcgagcctagtgaacttcagggtctaggcgctttggaagccaccgcttgggcattgaaggtcgccgaaaacgagctggggatcacacccgtggtgtccgctcaggctgtcgttgccggatcagacccactcggcctgatcgcttatctgtcccactttcactcagctttcaagtccatggctcattccccagggcctgtgtctcaggctagccctgggacaagcagcgctgtactcttcttaagcaaactgcagcgtacgctgcagcggtccagagccaaagagaatgccgaagacgctggaggtaagaaactgcgtctcgagatggaggctgagacgcccagcacagaggttcctccagacccagaacccggagtaccactgacacccccaagccaacaccaggaggctggggctggagacctgtgcgccctgtgtggcgaacacctgtacgtgctggaacgactttgcgtcaacgggcattttttccatagaagttgttttagatgtcacacttgtgaggccaccttgtggccaggagggtacgaacagcatccaggcgacgggcacttttactgcttacaacatctgccacagacggaccacaaggcagagggctccgatcggggacccgaatcccctgaactgcctaccccttcagagaactccatgcctcccggactaagtactcccactgcctctcaggaaggtgcgggaccggtgcctgacccgagccagcctactcgccgacaaattcgccttagttctccagagcgacaacgactttcttctctgaacctgaccccagatcctgagatggaacctcctcccaaacctcctagatcgtgctcagctctggctcgacatgccctcgagagcagctttgtgggctggggcctgccggtgcaatcaccacaggctctcgtggccatggagaaggaagaaaaggaatcaccattttcaagtgaggaagaagaagaagacgtgcctctcgacagcgacgtcgaacaagcactccagacctttgcgaaaacctccggtactatgaacaactatcctacttggcgcagaacgttgttaagacgcgcaaaagaggaggaaatgaaacgtttttgcaaggcacaaaccattcaaagacggctgaacgagatcgaagctgctctccgggagttggaggccgagggagtcaagcttgaactggctctacgtaggcagagctcgtcccccgagcagcagaaaaaactatgggtgggccagttactccaactggttgataaaaagaactcgctggtagccgaggaggccgagctcatgataaccgtacaagagctgaacctggaggagaagcagtggcagctggaccaagaattacgcggttacatgaacagagaggaaaatctcaagaccgctgcagataggcaagccgaagaccaagtcctcaggaaactcgtggacctcgtgaaccagagagacgctcttatcagattccaagaggagaggcgcctgtctgagctggcccttggaaccggggctcagggctag

SEQ ID NO: 230509 - DNA, 3204 bp, synthetic construct
  misc_feature 1..3204: note = Description of Artificial Sequence: Synthetic coding sequence
  source 1..3204: mol_type = other DNA
atggcttcccctacgtccaccaatccggcacatgctcatttcgagtccttcctccaagcccagctatgccaggatgtccttagtagcttccaggaactgtgtggcgcactgggattggaacctggtggcggtctgccacagtaccataaaattaaagatcagctcaattattggagtgccaagagtctctggacgaagctggacaagcgtgccggacagcctgtgtaccaacaaggaagagcatgtacaagcaccaaatgccttgtagttggcgctggaccatgcgggctgagggtggcagtggaactggcactgctcggcgcacgagttgtcctcgtagagaagcgcaccaagttctcccggcacaatgtcctccatttgtggccttttaccattcacgatctcagagcccttggtgcaaaaaagttctatggaagattctgcaccggaacattggaccacatttctattcggcagctgcagcttctacttctcaaggtcgctttgctcctgggtgtggaaatccactggggagtcacgttcacgggacttcagccaccccctcgcaagggtagcggctggcgcgcacagttgcagcccaatccccctgcacagcttgccaactacgagtttgacgtgttgatctccgctgccggtgggaaatttgtccccgagggttttaaagtgagagagatgcggggaaaactggctattggcattaccgccaacttcgtcaacggccgtactgttgaggaaacacaagtgccggaaatatctggagttgcccgaatttacaatcaaagtttctttcaatcgttactgaaggcaaccgggatcgatctcgagaacattgtttattataaagatgacacccactatttcgtgatgaccgccaaaaagcagtgtttgctgcggttgggggtgttgcgacaagactggcctgatactaatcggttgctgggatctgctaacgtggtgcccgaggccctccagcggtttaccagggccgcagcggacttcgccactcatggtaagttgggcaagctggaattcgcccaggacgcccatgggcagcctgacgtgtccgcctttgacttcacttccatgatgagggctgaatcctcagcgcgagtgcaggaaaagcatggggcaaggctgcttttgggcctcgttggcgattgcctggtggaacctttctggcctctgggcacaggcgtggctcgagggtttttggccgcattcgacgcagcctggatggttaagcggtgggcggagggtgcagaaagccttgaggtgctcgctgagcgagaatctctttaccagctgctgtcacaaacctcccccgagaatatgcacaggaacgtggctcaatacggtctcgatcccgctacgcgctacccaaatctcaatttgagggcggtcactcccaatcaggtccgggacctctatgacgttctggctaaggagccagtgcagaggaacaatgataagactgataccggaatgcccgcaaccggctctgcgggtactcaagaggagctcctgagatggtgtcaggagcagaccgcgggataccccggagtgcacgtgagcgatttgagcagctcttgggccgatgggttggccctgtgtgctctggtgtaccgcctgcagcctgggctgctggagccgagtgagcttcaaggtttgggggcacttgaagcaaccgcgtgggctctgaaggtggcagaaaatgaattgggaatcactccggtagtcagcgcgcaggccgttgtggccggttcggatcctctaggcctcatcgcatacctatctcattttcacagtgccttcaaaagtatggcccactcccctggacccgtcagccaagcctccccaggtacttcctcagctgtcctgttcctgtccaagctccagcggactctccagagaagtcgcgcaaaggagaatgcagaggatgccggtggtaagaagctacgtctggaaatggaggccgagactcccagtacagaagtgccgccagacccagagccaggagttcccctgacacccccaagtcagcatcaggaagcaggcgcaggtgatctgtgcgccctttgcggcgaacatctgtacgtgttagagcgcctctgcgtgaacgggcattttttccacagatcttgttttagatgccacacctgtgaagccaccctatggccaggaggctacgaacagcatcccggagacggacacttttactgcctccaacacctcccccagacggatcacaaggccgaaggaagcgatcgcggtcctgagagccccgaactgccaacaccaagcgaaaacagcatgccgcctggtctgtcaacccctacggcctcgcaggagggagctggtcccgttccagatccaagtcagccgaccagacggcaaatcagactcagtagcccagagcgtcagcggctgagctcactgaacctgacacccgatcccgagatggagccaccgcctaagcctccacgatcctgctcagctctggctcggcatgcgctggagtcatcattcgtgggatggggactgcccgtacagtctccccaggccttggtggccatggaaaaagaggaaaaggagagcccatttagcagtgaggaagaggaagaagacgtccccttggactcggacgtcgagcaggctctgcaaacatttgccaagacctcgggaactatgaataactaccccacctggaggcgaaccctcctcaggcgggctaaggaagaggaaatgaaacgcttctgtaaggctcagaccattcagaggagacttaacgagatagaggccgctctgagagaactggaagcagagggagttaagctggagcttgccctcagacgacagtccagttcacctgagcagcagaaaaagttgtgggtgggacagcttctccagctcgtggacaaaaagaattctttggtggccgaggaagctgagcttatgatcaccgtacaggaactgaacctggaagaaaaacaatggcagctcgaccaggaacttcgcggatatatgaatagagaggagaacctaaagactgcagcggacagacaggctgaagaccaggtcctgcgaaagctggtggatctggtcaatcagagggatgcactcatccgcttccaggaagagcggaggttatcagagctggccctgggcaccggtgcacagggttag

SEQ ID NO: 230510 - DNA, 3261 bp, synthetic construct
  misc_feature 1..3261: note = Description of Artificial Sequence: Synthetic coding sequence
  source 1..3261: mol_type = other DNA
atgagttgcttgagccactcttctctgcccagctgttgccccccacaggaagccagcatggcaagtcctacaagcaccaatcctgcgcacgcgcacttcgaatcttttctccaggcacagctttgtcaggacgtgctgagtagcttccaagaactgtgcggggctctggggctcgagcccggaggaggcctcccccagtaccacaagattaaagaccagctcaattactggtctgccaagagcctgtggactaaattagacaagcgggctggccaacctgtgtaccagcagggacgggcatgtacttctactaagtgtctggtggttggcgctgggccttgtggacttcgggtggccgtggaattggcacttctgggtgctcgggtagtgctggtggaaaagagaacaaaatttagtagacacaacgtgctccacctgtggccttttaccattcatgatctgagagccttaggagccaaaaaattttacggcaggttttgcaccggcactctggatcacatcagtatcaggcagttgcagcttctgctgctcaaagtggctctgctcctgggcgtggaaatccattggggcgtgacattcaccggcctacagcccccacctagaaagggctcagggtggagagctcaacttcagcccaatccacccgctcaactcgccaactatgagtttgatgtgcttatctccgccgcaggaggaaaatttgtccccgaagggttcaaggtgcgtgagatgcggggtaaactggccatcggtattacagcaaacttcgttaacgggcgaactgtcgaagagacacaagtcccggagattagcggggtcgcacgaatatacaatcagtccttcttccagtccctactgaaggcaacagggatcgacctcgaaaatatagtctattacaaagatgacacacactactttgttatgacagcgaaaaaacaatgtctactgagactgggtgtgctgcggcaagactggcccgatacaaatcgactgttaggctccgccaatgtggttcccgaggctctccagaggtttacaagggccgctgcggacttcgctactcatggtaagctgggaaagctcgaatttgcccaggacgcccacgggcaacctgatgtatctgccttcgatttcacctcgatgatgcgcgctgagtcaagcgcgagggtacaagaaaaacacggcgcaaggttgctactggggctggttggtgactgcttagtagagccattctggccactggggactggcgttgccaggggtttcctggccgcatttgatgctgcttggatggtgaaaaggtgggctgaaggagcagaatcacttgaggtcctggctgagagagaatcattatatcaactactctctcagacttccccagaaaacatgcatcggaacgtggcccagtacggactcgacccggcaaccagatatcccaatctcaacctgagagccgtgacccccaaccaagtcagagacctgtacgacgtccttgccaaagagcctgtacaacggaataacgacaaaaccgatacaggaatgcccgcaactggaagcgccggaacccaagaagaactgctccgctggtgccaagaacagactgctggctacccaggagtacatgtctcagatctgtcttcctcgtgggctgatggactagccctgtgtgcgctggtttatcgactgcaaccaggacttcttgagccatccgagctccaagggttgggggcactggaagctacggcgtgggcactgaaggtggctgagaatgagctggggataactccggtggttagtgcccaggctgtggtggcagggtccgacccgctgggtctgattgcctatcttagtcacttccactccgcttttaaatcgatggcgcattcccctggaccagtctcccaggcatcacctgggacaagctctgctgtgctcttcctctccaagctgcaaagaacccttcagcggagccgggctaaggaaaacgctgaggatgccggtggcaaaaaactgagactggagatggaagctgagacaccaagtacagaggttccccctgatccggagcctggcgtacctctgacgccgccttctcagcaccaggaagctggtgctggcgatctttgtgcactgtgtggagaacatctgtatgttcttgagcgtttatgtgtgaacggccacttctttcatcgctcatgttttaggtgccacacgtgcgaagcaaccctgtggcccggaggatacgagcaacatccgggtgacggccacttctactgcctgcagcacctgccccagactgatcacaaggcagaggggagcgaccggggtcccgaatctcccgagctgccaactccatcggagaactctatgccccctggtctgagcacccccaccgcatcccaggaaggcgcagggccagtgcctgacccctcacagcctacacgtcgtcaaataaggctgagcagtcctgaaaggcagcggctgtcgtccttgaatctcactccagatccggagatggagcctccccctaagcctcctcggtcttgctctgcgctggcccgacatgcgttagagtcatcatttgtgggatggggccttcccgtacagagcccacaggcacttgtggccatggagaaagaggagaaagaatctccgttctctagtgaggaagaagaggaggacgtcccgctcgacagcgatgtggagcaggccctgcagacgttcgccaagacctccggcacaatgaataattacccaacctggaggcggacccttctgagaagggccaaagaggaggagatgaaaagattttgcaaggcacaaactatacaaagacgattaaacgagatagaagcagcactaagagaactggaggccgagggagtcaagctggaattggcattacggagacagtcatcttcccccgagcagcagaaaaagctgtgggtaggacagctgcttcagctcgtggacaaaaaaaatagcctagtagcagaggaggccgaattaatgatcaccgtccaagagcttaacttggaggaaaagcagtggcagctggaccaggagctgaggggttacatgaacagagaggaaaatctcaagactgcagctgataggcaagccgaagatcaggttcttcgaaagttagttgatcttgtgaaccagcgggatgcattgattagattccaggaggagcgcaggctgtccgaattagctctggggactggtgctcaaggatag

SEQ ID NO: 230511 - DNA, 1776 bp, synthetic construct
  misc_feature 1..1776: note = Description of Artificial Sequence: Synthetic coding sequence
  source 1..1776: mol_type = other DNA
ccaaaatatgttctcccctcagaagcccaggtcgtgcccgcaaagcagttacagccacaggatagaagtagtgttccggaacattctctgctggctggcacccaggaagaactcttaagatggtgccaggaacagacagccggttaccccggtgttcatgtgtcagatctgtcatctagctgggctgatgggttagcactgtgcgctctggtctacaggctgcaacccggattgctcgagccttctgagttgcagggccttggtgccctcgaagccacagcttgggcccttaaggtggccgaaaacgagctgggcatcacgcccgttgttagcgcacaagcggtggttgccggatctgatcctcttggactgattgcttatctgtctcatttccactcagctttcaagtcgatggcccactctcctggccctgtcagccaagcttcacccggaacatcctcagctgtgctgtttctgagtaaactccaacgaactctacaaagaagccgagctaaggagaacgctgaagacgctggagggaaaaaactgaggttggaaatggaggcagaaaccccaagcacagaggtcccccctgacccggagcctggtgttcctctgacacccccaagccagcaccaggaagccggagctggtgacctctgtgctctgtgcggagaacacctctatgtgctggagagattgtgcgttaacggtcatttcttccaccggagctgcttccgctgtcacacctgcgaagctacactttggccgggagggtatgagcagcatccaggcgacgggcacttctactgtctgcagcacctcccacagacagaccacaaggccgaggggtctgataggggaccagaatcccccgagctgccaactccgagcgagaacagtatgcctccgggactaagtactcccaccgcaagccaggaaggggcaggtcctgtaccagaccccagccagcctacacgtcggcagatccggctttccagcccggaaaggcaacggctcagttctctgaaccttacccccgaccccgagatggaacccccacctaaacctccgaggtcgtgctctgcattagcacgacacgccctggaaagctcatttgtgggatggggcctccctgtgcagtccccccaggctttagtcgccatggagaaagaggaaaaggagtcgccgttttcatccgaggaggaggaagaagatgttccattagattccgacgtggagcaggcacttcagacattcgccaagacctctggcaccatgaataattatcctacgtggaggcgtacattgctaaggagggcaaaggaggaggaaatgaaacgattctgcaaagctcaaaccatccagaggcggctcaatgaaattgaagcggctcttagggagttggaagctgagggggtgaagctcgagttggcactgcgtcgacagtcatcaagtcctgagcagcagaaaaagctttgggtcggccaacttctccagctcgtagacaagaagaactctctagtggccgaggaggccgaactgatgatcacggtacaggagctgaacctcgaggagaaacaatggcaactcgaccaggagctgagaggttacatgaatcgggaggaaaacctcaagaccgctgctgatcggcaggcggaggatcaggtgttgagaaagttggtggacttagtgaatcagcgggatgcactgattagattccaagaggagcggagactgtccgagctcgcactcggcaccggggcacagggctag

SEQ ID NO: 230512 - DNA, 735 bp, synthetic construct
  misc_feature 1..735: note = Description of Artificial Sequence: Synthetic coding sequence
  source 1..735: mol_type = other DNA
atggctagcccaacgtcaaccaatccagctcatgcccacttcgaatctttcctacaggcccagctgtgccaggatgtcttgagcagtttccaggagttatgtggcgctctcggactcgagcctggaggcggactgccccaataccacaagatcaaagatcagttgaattattggtcagccaagagcttgtggacaaagctcgataagcgcgctgggcagccagtctatcagcagggtagggcgtgcaccagcacgaagtgtctcgtggttggcgcaggcccttgtggcttgcgggtggccgtggaactcgccctactaggggctagagttgtgcttgttgagaagagaactaaattcagccgccacaacgttctgcatctgtggcccttcaccatacacgacctgcgcgctctgggggcaaaaaagttctatggaaggttttgcaccggcaccctggaccatatcagtatacgtcagctgcaactcctgctgttgaaggtcgcactgttactgggagttgaaattcattggggagtcacatttacaggactgcagccgcctcctcgtaagggttcaggatggagggctcagctgcagcccaaccctccagcccagctggcaaattatgagtttgacgtgctcatttctgcagccggaggaaaattcgtgccagaggggtttaaagtgcgggagatgagagggaagcttgcgatcggtattacagcaaatttttag

SEQ ID NO: 230513 - DNA, 3375 bp, synthetic construct
  misc_feature 1..3375: note = Description of Artificial Sequence: Synthetic coding sequence
  source 1..3375: mol_type = other DNA
atgggcgagaatgaggacgagaaacaagcgcaagcaggtcaggtcttcgaaaactttgtgcaggcttcgacctgcaagggaacgctccaagcattcaacatactgaccaggcacctcgatctcgatcccttagaccaccgcaatttttactccaaattgaagtccaaagtgactacatggaaagccaaggccttgtggtacaagcttgataagagaggctcccacaaggagtataagagggggaaaagttgcaccaacactaaatgcctgatcgtggggggaggaccttgcgggctgaggaccgctatcgagctggcctaccttggcgcaaaagtcgtggtggtcgagaaacgcgactcattttctcggaacaatgttcttcacctttggccctttaccatccacgatctgaggggcctcggggcaaaaaaattttacggcaagttctgcgccggaagtatcgaccatattagcatcaggcagttgcagttgattttgttcaaagtggctttaatgctgggcgttgagatccacgtgaacgtggaattcgtaaaagtgctagaacctccagaagaccaagagaaccaaaagatcgggtggagagccgaatttcttcccaccgaccatagtctcagtgagttcgagtttgacgtgataattggcgcagatgggaggagaaataccctggagggctttcggagaaaagaatttcggggaaagcttgccatcgcaataaccgccaacttcattaaccgcaacagcacggccgaagccaaggtggaggaaataagcggggttgcctttatcttcaaccagaaattctttcaggacctgaaagaggaaacagggatcgatttagagaacatcgtctattataaggactgcactcattattttgtcatgacagcaaaaaagcagtctctgctcgataaaggtgttatcatcaatgactacatcgacactgaaatgctgttgtgtgccgaaaacgtcaaccaggacaacctcttgagctacgcaagggaagcagctgatttcgctacgaattaccagctgccttccctggatttcgcaatgaatcattacggccagccagatgtggcaatgtttgattttacctgtatgtatgcctccgagaacgccgctctagtgcgggagcgccaggcccaccaattgctagttgcacttgtaggcgactccttgctcgagcctttctggcccatgggtacaggatgcgcaaggggattcctagcagccttcgataccgcatggatggtcaagagctggaaccaaggtacccctccactcgaactcctcgccgagcgagagtcactatacaggctgcttccacagaccactcccgagaatatcaataaaaattttgagcaatacacattggatcccggaacgaggtatccgaatctgaatagccactgcgtgcgaccacaccaagtgaaacacctatatataaccaaagagttagagcattatccactcgaacgcttgggctcagtgaggaggagcgtaaacttgtcccgcaaggaatccgacatacgaccttccaaattactcacatggtgccagcagcagaccgagggctaccagcatgtaaacgtcaccgacctgaccacttcatggcgctccggcctggcactctgcgccattattcatcgttttaggcctgaactcataaactttgactctctgaatgaagatgacgccgtggaaaataaccagctcgcatttgatgtcgcagagcgcgaatttgggattcctccagtgaccaccggaaaagaaatggcaagcgcacaggaaccggataaactaagtatggtaatgtatcttagcaagttctacgagctgttccgaggtacacccttgcggccagtggactcctggcgtaagaattatggtgaaaacgcagatcttagcctcgcgaagtcaagtatttccaataactaccttaaccttacctttccacgtaagcgcacaccaagagtcgacggacagacgggtgagaacgacatgaataaaagacgcagaaagggattcactaatttagatgaacccagcaatttctctagccgctccctcgggtcaaatcaggagtgtggctctagcaaagaagggggtaaccaaaacaaggtgaaatctatggccaaccaactcctggcaaaatttgaagaaagtactcgcaacccaagtctcatgaagcaggaaaggcgggtcagcggtataggcaagccggttctttgttccagcagcggaccccctgtacactcatgctgcccaaaacctgaagaagcaacaccttctcccagtccacctctgaagcggcagtttcccagtgtagtcgtgaccggacacgttctgagggaactcaaacaagtgtcggcaggttccgagtgtctgtcaaggccatggagggcaagagctaaatccgatctgcagctcgggggtacagaaaactttgcaactctgccctctacgagacctagagcacaggcgctgtccggtgtgctctggcgcctgcagcaggtagaggagaagatattacagaagagggcccagaatctcgcaaatagggagttccacaccaagaatattaaggaaaaggcagcccacctggcttcaatgtttgggcacggcgactttccacagaacaaattgctgagcaaagggcttagccatactcaccccccaagcccccctagtcggctcccttctccagaccctgcagcctcttctagcccttcaaccgttgattcagcttcccccgcaagaaaagaaaagaagagcccttccggttttcatttccacccctcccacctgcggaccgtgcatccccagcttactgttggaaaagtgtcctcggggatcggagctgctgctgaggttctggtgaacctgtacatgaatgaccaccgccctaaagctcaggccacatcccccgatttggaaagcatgcgtaaaagtttccccctcaatctgggcggatctgacacctgttatttctgtaagaaaagagtatacgtcatggagaggctgagcgcggaaggacacttctttcatcgggagtgtttccgatgctcaatttgcgctactactctgcgcctggctgcatatacatttgattgcgatgaggggaagttctactgtaaaccccactttatccactgcaagaccaactccaaacagcggaaacgtcgggctgagttaaagcagcagagggaagaagaagctacctggcaggagcaggaggctcccagaagagacaccccgaccgagagcagctgcgctgtggcggcaatcggtacattagaagggagcccacccgtccacttctccttacccgtgctgcaccccctgttgggttag

SEQ ID NO: 230514 - DNA, 3312 bp, synthetic construct
  misc_feature 1..3312: note = Description of Artificial Sequence: Synthetic coding sequence
  source 1..3312: mol_type = other DNA
atgggtgagaacgaggatgagaagcaggcccaagccggacaagtattcgaaaacttcgtgcaggcctccacatgcaagggcactttacaggcgtttaatatcctgactcgacatctggatctggatccattggaccacagaaatttctattctaagctaaagagtaaggtgaccacctggaaggcgaaggcactatggtacaaattggacaagagaggttctcacaaagaatacaagcggggaaaatcctgtaccaataccaagtgccttatcgtcggcggtggtccgtgcgggcttaggaccgccattgagctagcttatctcggggctaaggtggtggttgtggaaaagcgagattccttctccaggaataacgtcctgcatctctggccttttacaattcatgacctccggggactgggagcaaaaaagttttacggcaaattttgcgccggatcaatcgaccacatcagcatccgacagctgcagttgatcttatttaaagtggctctgatgcttggcgtggaaatccacgtgaatgtggagttcgtgaaggtattggagccacctgaggaccaggagaatcaaaaaattggctggagggcagaattcctacctactgatcattctctttcagagtttgagtttgatgtcattatcggcgcagacggacggagaaacacactggagggttttcgacggaaagagttccgcggaaagctggccatagcaattacggcgaattttatcaatcgaaatagtacagcagaggctaaggttgaggagatcagcggagtggctttcattttcaaccagaaatttttccaggatctgaaggaagagacaggcatcgacctcgaaaacattgtctattacaaagactgcacccactattttgttatgacagccaaaaaacagagtctgctagacaagggcgttattatcaatgattacattgacacagagatgctcctgtgcgccgaaaatgtgaaccaggacaacctcctgagttacgctagggaggccgcagactttgctaccaattatcagctcccgtcacttgatttcgccatgaatcactacggacaaccagatgtggctatgtttgatttcacctgtatgtacgcatccgagaatgctgctcttgtgagagaacggcaggctcatcaacttctggttgctctcgtgggagattcgcttctggagccgttttggcctatgggcacagggtgcgcccgaggattcctggcggcatttgacacggcttggatggtcaaatcttggaaccaaggcacaccaccccttgagcttctggctgagcgagagtcactctacagactgctgccccaaacgactccagagaatattaacaaaaattttgaacagtataccctggaccccggtaccagatatcccaaccttaacagccattgcgttcgtcctcatcaagtcaagcacttatacattaccaaagagttggaacactaccccctagagaggctgggcagtgtccgcaggtctgttaacctttcgagaaaagagtccgacatacgacccagcaagttactcacctggtgccagcaacaaaccgagggctaccaacatgtgaacgtgacagacctgacaacctcttggcggagcgggcttgctctttgtgctataattcacaggttcaggccagagctcatcaatttcgattctttgaatgaggatgatgccgtggaaaataatcagctggcttttgacgttgctgagcgagagtttgggataccaccggttactactggaaaagagatggcctcagcccaagaaccggataagctgagtatggttatgtacctgtcaaaattttatgagctgttccgcggtacccccctgcggccagtcgactcctggagaaagaactacggtgagaacgctgatctctccttagcaaaatctagcatatccaacaattatctcaacctcacttttcccagaaagagaaccccgagggtagacgggcagacaggtgagaacgacatgaacaaacgaagacggaaaggtttcacgaacctggatgaaccatcaaatttctctagtagaagcttgggatccaaccaggagtgtggctcatccaaagagggtggtaatcagaataaggtgaagtccatggccaatcagctcttggccaaattcgaagagagtacacggaatccatccttgatgaagcaagagcgtcgtgtgtccggcatcggaaaacccgtgctgtgcagtagtagcggcccaccagtgcatagctgttgcccgaagccagaagaagccacgccgagcccttccccacccctgaaacgccagtttcccagcgtggtggtgacaggacacgtgctgagagagcttaagcaagtctccgctggaagcgagtgtttgtcaagaccttggagagcacgagcgaaatctgacctgcagctgggcggaaccgagaacttcgcaacgcttccatcgacacgtcctcgcgcacaagcattgtccggagtgttatggcgcttgcagcaggtcgaggagaagatcctgcagaagcgcgcacaaaatctggcaaaccgcgaattccacaccaagaatatcaaagaaaaagcggcacatctggcctccatgtttggacacggggacttcccccagaacaaactcctgagcaaaggcttaagccacacacaccctccatctcctccctcaaggctcccaagcccggacccagctgcctcttcatccccaagcaccgtcgactctgcctcccctgcgagaaagctgacggtcggcaaagtgtctagtggcattggagccgctgccgaggtgctggtgaacctctacatgaacgatcatagaccaaaagcacaggccacgtcacccgacttagagtcaatgcgaaaatccttcccattgaacctggggggaagtgatacttgttatttttgcaagaagagagtctacgtcatggagaggctatcggctgaaggccatttctttcaccgggaatgttttcgatgtagcatttgcgccactacactcagacttgccgcatataccttcgattgcgacgagggaaagttttactgtaagccccattttattcactgtaagaccaactctaagcaacgcaagagaagggctgagctgaaacaacagcgtgaggaggaagccacctggcaagagcaagaggctccccgaagagatacaccaactgaatcatcttgtgccgtggctgccataggaacactggaaggtagtcctccagtgcacttttcactcccagtcctccaccctttgttgggctag

SEQ ID NO: 230515 - DNA, 2931 bp, synthetic construct
  misc_feature 1..2931: note = Description of Artificial Sequence: Synthetic coding sequence
  source 1..2931: mol_type = other DNA
atgggcgagaatgaagacgagaagcaggctcaggctggccaggtttttgaaaatttcgtgcaggccagtacttgcaagggaacccttcaagcctttaatatactcacacggcacttagatttggatcccctcgaccatagaaatttctactccaagctgaagagtaaggtaacaacgtggaaagccaaggccctgtggtacaagctggataaaagaggatcgcacaaagagtataaacggggaaaatcttgtacaaacacaaagtgcctcatcgtgggaggcggaccctgtggccttagaacagccatcgaactcgcctacctcggcgcaaaagtcgtggtggtcgagaagagggacagtttctcacgcaacaacgtcctccatctctggccattcacaatccacgatctgaggggcttaggagcaaaaaaattttacgggaagttttgtgccggatctatcgatcacatatctatccgccagctccaactcatcctgtttaaggtcgcattaatgctgggggtggaaattcacgttaacgtcgaatttgtcaaggtactggaacccccagaggaccaagagaatcagaaaatcggctggagagccgaattcttgccgaccgaccacagcttgagcgaattcgagttcgacgtgattatcggcgctgacggaagacggaacaccttagaaggcttcaggcgcaaagaatttagggggaaactggccatagcaatcactgccaacttcatcaatcggaacagcacagccgaagccaaagttgaagaaatatcgggagtagcgtttatttttaaccagaagtttttccaggacttgaaagaggaaactggtatcgacctggaaaacattgtgtactacaaagattgcactcattattttgtgatgacagccaagaagcagtcactcctcgataaaggcgttattataaatgattacattgacactgagatgctactctgcgcggagaatgtcaaccaggacaacctactgtcttacgcccgagaggctgccgatttcgctacaaactatcagttgccttctctggactttgctatgaatcactacggacaacctgacgtcgctatgtttgacttcacctgtatgtacgcctctgagaacgcagctctcgtgcgggaaagacaggcccaccaacttttggtcgctctggtaggggattcgttgctcgagccattttggccaatggggacgggctgcgcgaggggtttcctcgcggcattcgacacggcatggatggtgaagtcttggaaccagggcactccgccacttgagctgctggccgaaagggaatcactgtacaggcttttaccccagaccactcccgagaacattaacaaaaatttcgagcaatatactttagaccctggaactcggtacccaaatctcaattcccactgcgtgaggccacaccaggtgaaacacctgtatattaccaaggagctcgaacactatccactggagcgactgggttccgtgcgcagaagcgtcaatctcagccgcaaagagtcggacatcagaccgagtaagctgctcacatggtgtcagcaacaaacggaggggtaccaacacgtgaacgtcaccgatctgacaacctcctggaggtctgggctggccttgtgcgctatcatacatcgttttcgccctgagttaatcaactttgattcactcaacgaggatgatgcagtggagaataatcagctcgccttcgatgtagctgagcgggagttcgggattccgcctgtaacgaccggtaaagaaatggcctccgcccaggagccagataagttgagcatggtgatgtatctctctaagttctatgaactgttccgcggtacccctctgaggcctgtggatagttggaggaaaaattatggagaaaatgcagacttgagcctggcaaaaagctccatttccaacaactatctgaacctgacattccctcgtaaacgcaccccacgcgttgacggccaaacaggtgaaaatgatatgaataagcgtcggaggaaaggatttacaaacttagacgagccatccaattttagctccaggtccctcggcagtaaccaagagtgcggctctagcaaggaaggcggaaaccagaacaaagtaaaaagcatggccaaccagttgttagccaagtttgaagaaagcactcggaacccaagcctgatgaagcaggagaaaaaaagtccctcagggttccactttcatccctctcacctgcggaccgtgcaccctcaagaatctatgcgcaagagctttccacttaatttggggggtagcgatacatgttacttctgtaaaaaacgggtttacgtaatggaacgcctgtctgccgaaggccatttttttcacagggaatgctttcggtgcagcatctgtgccacaacactcaggctggcagcatacacgttcgactgtgacgaaggtaaattttactgtaagcctcatttcatacactgtaagaccaacagcaaacaacgcaaaaggcgggcagagcttaagcagcaacgtgaggaggaagccacatggcaagagcaggaagcgccaaggagagatacaccaacggagtccagctgtgccgttgccgcaatcgggacccttgaaggaagccccccaggaatctccacctcctttttcaggaaagtacttggctggcctctgaggctccctcgggacctgtgtaattggatgcagggcctgttacaggccgctggtctgcatattagggataatgcctacaactattgctacatgtacgagctgctctcgctggggctgcctctgctttgggctttctccgaagtgttggcagccatgtatcgggaatctgaagggtccctagagtcaatctgcaactgggtgctccggtgctttcccgttaaattgaggtag

SEQ ID NO: 230516 - DNA, 363 bp, synthetic construct
  misc_feature 1..363: note = Description of Artificial Sequence: Synthetic coding sequence
  source 1..363: mol_type = other DNA
atgggcgaaaacgaagacgagaaacaggcacaggccggacaagtgtttgagaacttcgtacaggcctccacttgtaagggcacactccaggcgtttaacatactaacgcgacatttagatctggatcctctggaccatcgcaatttctattccaagctcaaatccaaggtgactacttggaaagccaaggcgttgtggtacaaactggataagcgcggttcacacaaagagtacaaacgcggaaaatcgtgcacaaacactaagtgcctcatcgtcggcggaggtccctgcggattgagaaccgccatcgaactggcttacctgggggctaaagtggttgtggtggagaagcgagatagctag

SEQ ID NO: 230517 - DNA, 405 bp, synthetic construct
  misc_feature 1..405: note = Description of Artificial Sequence: Synthetic coding sequence
  source 1..405: mol_type = other DNA
atgggagagaatgaagacgaaaagcaggcccaagcaggccaggtgttcgagaacttcgtccaggcaagcacatgtaagggcaccctgcaggcctttaatatcttgactagacacttggacctggaccccttggatcaccgaaatttctactccaagctcaaaagtaaagtgacaacatggaaagctaaggccttatggtataagctggataagagagggagtcacaaagagtataaacgtggcaagagctgtaccaacacgaagtgcttgatcgtgggcggaggcccatgcggactgcggactgccatcgaattggcttacctaggtgctaaggtggtggtggtggagaaaagagatagtttttcacggaacaatgttctgcatctgtggcccttcactatctag

SEQ ID NO: 230518 - DNA, 267 bp, synthetic construct
  misc_feature 1..267: note = Description of Artificial Sequence: Synthetic coding sequence
  source 1..267: mol_type = other DNA
atgggcgaaaatgaggacgagaaacaagcccaggccggtcaagtgttcgagaattttgtccaggcctctacttgtaaggggacacttcaggcttttaacatcctgacccggcatctagacctggatccactggatcatcggaatttttatagcaagctgaaaagcaaagtcaccacctggaaggctaaagccttatggtacaaactggacaaacggggaagtcataaagaatataagagggggaaatcatgtaccaacaccaaatag

SEQ ID NO: 230519 - DNA, 12 bp, synthetic construct
  misc_feature 1..12: note = Description of Artificial Sequence: Synthetic coding sequence
  source 1..12: mol_type = other DNA
atgggagaatag

SEQ ID NO: 230520 - DNA, 297 bp, synthetic construct
  misc_feature 1..297: note = Description of Artificial Sequence: Synthetic coding sequence
  source 1..297: mol_type = other DNA
atgggagagaacgaggatgagaaacaagcacaggcagggcaagtattcgagaatttcgtacaggcttctacatgcaaaggcacattgcaggcgtttaacatcttgactcgacatctggatttagatccactcgatcaccggaacttctactctaaacttaagagcaaagtaactacatggaaagctaaggccctgtggtacaaacttgacaagcgcggttcacacaaagaatacaaaagagggaagagttgtactaacactaaatgtttaattgtcggaggcggaccttgcggctag

SEQ ID NO: 230521 - DNA, 267 bp, synthetic construct
  misc_feature 1..267: note = Description of Artificial Sequence: Synthetic coding sequence
  source 1..267: mol_type = other DNA
atgggagagaacgaagatgagaagcaggcgcaagcagggcaagtgttcgagaactttgtgcaagcatcaacatgcaagggcacacttcaggcattcaacattctcactcgacatctggacctggatcccttggatcatagaaatttctactcaaagctcaagagcaaagtcaccacatggaaagctaaggcactttggtacaagctggacaaaagaggcagccacaaagaatataagcgtgggaaaagctgcacaaacaccaaatag

SEQ ID NO: 230522 - DNA, 309 bp, synthetic construct
  misc_feature 1..309: note = Description of Artificial Sequence: Synthetic coding sequence
  source 1..309: mol_type = other DNA
atgggcgaaaatgaagatgaaaaacaggctcaagcgggacaagtgttcgaaaattttgtccaggccagcacctgtaaggggaccttgcaggcattcaatattctgacccgacatttagacctcgatcctcttgatcaccgcaacttttattcaaaattgaagagcaaggtgaccacgtggaaggccaaagctctctggtacaaactagataaacgcggatcacacaaagagtataaacgaggcaagtcttgtacgaacacaaagtgcctcattgtgggaggaggcccttgcggtctccggactgcctag

SEQ ID NO: 230523 - DNA, 2805 bp, synthetic construct
  misc_feature 1..2805: note = Description of Artificial Sequence: Synthetic coding sequence
  source 1..2805: mol_type = other DNA
atgggagaaaatgaggacgagaagcaggctcaggccggtcaggtgttcgaaaacttcgtccaagccagcacttgtaagggaacgttgcaggccttcaacattctcactcggcacctggatctggacccgctggaccatcgcaacttctacagtaagctcaaatctaaggtgaccacttggaaagcaaaagccctttggtacaaacttgacaaacgcggttctcacaaagagtataaaagaggaaagagctgcactaatacgaagtgtctcatcgtggggggtggcccatgcggactgaggactgcaatcgaactcgcctacctgggagcaaaggttgtggtggtagagaaaagggacagcttttctcgtaacaatgtgctgcacctgtggccattcacaattcatgatttgcgcggactgggagctaaaaaattttacggaaagttctgtgccggtagcattgatcatatatccatcaggcagttgcagttaatacttttcaaagtagccttaatgctgggcgtcgagatacacgtaaacgtagagttcgttaaggttttagagccacctgaggaccaggaaaatcagaagatcggatggcgcgcagaatttctacctacagatcacagtctgagcgaatttgagtttgacgtgattattggcgcagacggccgacgcaatacgttggaaggcttccgacgcaaggagttcaggggaaagttagctatcgctattacagccaacttcattaacaggaatagcacagctgaggcgaaagtggaggagatttcaggtgtcgcattcatattcaatcagaaattttttcaagatcttaaggaggagacggggattgacctggaaaacattgtgtactacaaagactgcactcattatttcgttatgacagccaagaaacagtccctgcttgataaaggtgtaattattaatgactacattgatacagaaatgctgctatgcgcagagaacgtcaatcaggataacttgttaagttacgcacgcgaagcagctgacttcgcgactaattaccagctgccaagtctcgactttgctatgaatcattatggccagccagatgtcgctatgtttgactttacttgtatgtacgcctctgagaatgcagctctggtgagggaacgtcaggcccaccagctgctggtggccctggtgggcgatagtctgcttgaacccttttggcctatggggacaggatgcgccagaggctttctggcagcatttgataccgcttggatggtcaagagctggaatcagggcacacctccattggaactcctggccgagcgtgaaagtctgtatcggttgcttccccagacaaccccagagaatattaacaagaattttgaacagtataccctggatcctggtactcgatatcctaacctaaactcgcattgtgtgcggccacaccaggtaaagcacctgtacatcacaaaagaactcgagcactaccctctggagaggctggggagtgttcgcaggagcgtgaacctgtcgaggaaggagagcgacattaggccaagcaaactactgacttggtgccagcagcagaccgaaggctatcagcacgtgaatgtcactgacctgacgacaagttggcggagcggtctggctctgtgtgccatcatacaccgttttcgccctgaattaattaatttcgatagtctgaatgaggatgacgccgtggaaaataaccaactggcttttgacgtggccgagcgggagttcgggattccgccagtgacgacaggaaaggaaatggccagcgctcaggaaccagacaagctgagcatggtgatgtacctctccaagttttacgaactttttagaggaactccactccggccagtggattcttggcgaaaaaattatggtgagaacgccgatctgtcgctggcaaaaagttctatttccaataactacctaaatctcacctttccccgaaagcggacacccagagtagatgggcaaacaggcgagaatgacatgaacaaaagacggcgtaagggatttactaatctcgatgagccgagtaatttctccagtaggtcacttggcagcaaccaggagtgcgggagtagtaaggagggcggtaaccagaacaaggtgaagtccatggcaaaccagctgctcgcgaagttcgaggagagcacaagaaacccatcgctgatgaaacaggagaagaaatcaccttcaggtttccattttcatccatctcacttaagaacggtgcaccctcagctgacagttggtaaagtctcaagcggaatcggagctgccgcagaggtgctcgtgaatctctatatgaatgatcacagaccaaaagctcaggccacatcccctgatctggaaagcatgagaaagtcttttcccctgaatctaggcggatccgatacatgttatttctgtaagaagcgcgtctacgtgatggaaaggctgtccgccgaggggcacttcttccaccgagaatgcttccgttgtagcatttgtgcaaccaccctcaggctggcagcctacaccttcgattgcgacgagggtaaattttactgtaagccgcatttcattcattgcaagactaattccaaacagcgtaaacggagagccgaacttaagcaacaaagggaagaagaagcgacttggcaggaacaggaagcccctagaagggacacacctactgagtcgagctgtgcagtggcagctatcggcacacttgagggctcgccccctgtacacttttctctgcctgtgcttcatccccttctcgggtag

SEQ ID NO: 230524 - DNA, 1638 bp, synthetic construct
  misc_feature 1..1638: note = Description of Artificial Sequence: Synthetic coding sequence
  source 1..1638: mol_type = other DNA
atgagatcctctcccgacctcaacagtcattgtgtgcgcccacaccaggtgaaacatctgtacatcacaaaggaacttgaacactacccccttgaacggctcggttccgtccgccgtagcgtgaacctgtcacgaaaagagtctgacattcggccttcaaagcttttaacatggtgccagcagcagaccgaggggtaccagcatgtcaacgtgacggatctcaccaccagctggcggtccggcctggccctctgtgcaattatccaccgcttccggcctgagttgattaatttcgatagcctcaatgaggatgatgctgtcgagaacaatcaactggccttcgacgtcgcggagcgcgaatttggcattcccccagtgactactgggaaggagatggcttcggctcaggaacccgacaaactgtccatggtcatgtacttatccaagttctacgagctgtttagagggacccccctgcgccctgtggactcttggagaaagaactacggagagaacgccgatctgtccctggctaaatcaagtattagtaacaattatctgaatctgacctttcctaggaagagaactccgcgtgtggatgggcaaaccggagagaatgacatgaataaacggagacggaaaggctttaccaacctcgatgagccctccaacttcagctcacgctccctggggagtaaccaggagtgcggctctagcaaagaaggcggaaatcaaaacaaagtcaagtctatggccaaccagctgctggccaagttcgaagaatccacacgtaatccatctctcatgaagcaagagaaaaaatcaccctctggattccatttccacccctcacaccttaggactgtccatccgcagctcacagttggcaaggtttcttccggtatcggcgcagctgcagaggtcctcgtcaacctctatatgaacgaccacaggcctaaagcccaggccacctctcccgacctcgagagcatgcgtaaaagcttcccactaaacttaggagggtccgatacctgctatttttgcaaaaagagagtgtacgtaatggaaagactgtcagctgaggggcatttcttccacagggagtgttttaggtgttcgatatgcgctactacactcaggttggccgcatacacgtttgattgcgatgaagggaaattctactgtaaaccacactttatccattgtaagacaaattccaagcagcgtaagagacgagccgagcttaagcagcagcgcgaggaagaagctacttggcaagaacaggaggccccacgacgcgatacccctaccgagagcagctgcgcagtggccgcaatcggcaccctggaggggtctccccctggcattagcacaagtttctttcgcaaggtgctcgggtggcctcttagactccccagggatctgtgtaactggatgcaaggactcctacaagccgcaggccttcatatccgagacaacgcctacaattattgttacatgtatgagctgctttccctggggctgccactgttatgggctttttcagaagtcttagctgcgatgtatcgcgaaagcgagggctcccttgagagtatatgcaactgggtcctgagatgtttccctgttaagctgcgatag

SEQ ID NO: 230525 - DNA, 3273 bp, synthetic construct
  misc_feature 1..3273: note = Description of Artificial Sequence: Synthetic coding sequence
  source 1..3273: mol_type = other DNA
atggccaccttgctctcacaccctcaacagaggcctcctttcctgagacaagccatcaagatccgccgaagaagggtaagagatttacaggatcccccaccccagatggcccctgagattcaacctccctcccaccatttttcgccagagcagcgggcactcctatacgaggacgcgctgtacacagttctgcatagacttggtcaccctgagcctaatcatgtaactgaagcctccgaactgttgagatatttgcaggaggccttccacgtagagcccgaagaacaccagcagaccctccaacgggtgcgagagctggaaaagcctattttttgcctgaaggccactgtgaagcaagccaagggaattcttgggaaggacgtgtccggctttagcgacccatattgcctcttgggtatcgagcaaggcgttggggtgccagggggaagtccaggatctaggcaccgccaaaaggcagtagtcagacacacaattccagaggaagagacccataggacacaggtcatcacgcaaacgctcaatcctgtctgggatgagaccttcatcctggaatttgaagatatcacaaacgcttcctttcacctggatatgtgggacctggacacagtggaaagtgtacgccagaagctgggagaactcacagatctgcacggcttaagacgcattttcaaggaggctaggaaagacaagggacaggatgactttcttggtaacgtggttctgcggttacaggacctgcgctgcagggaagatcaatggtaccctctcgaacctagaaccgagacgtatccagacagaggacagtgtcacctgcaatttcagctcatccataaacgcagagccacaagcgcctcaaggtcccagccatcctacaccgtgcacctgcacctactgcagcagctggtgtcacatgaagtaacccagcacgaggcagggtctacctcatgggatggctcactgagtccacaggctgccacagtcctgtttctgcacgccactcagaaggatctttcagattttcaccagtcaatggcgcaatggctggcctacagtcgcctttaccagagtctggaatttccatcgagttgcttgcttcatccaatcacctctattgaatatcagtggatccagggtcggctgaaggccgaacaacaggaggagttagccgctagttttagcagtctgttgacctatgggttgtcactcattaggcgcttccgctccgtgtttccgctcagcgtgtctgacagcccagccagacttcagtctcttctcagagtgctggtgcaaatgtgtaaaatgaaggcattcggagagctgtgcccaaacactgcacccctgccccaacttgttacggaagcccttcaaacagggaccacagaatggttccaccttaagcagcagcaccaccagcccatggtccagggtatccctgaagcgggtaaagctctcctgggattagtacaggacgtgatcggtgacttgcaccaatgccagaggacctgggacaaaattttccacaacacccttaagattcatttattttccatggctttccgagagctccagtggctcgtagctaagcgggtccaggaccataccacagtggtaggcgatgttgtcagccccgagatgggagagtcactgtttcagctctacatatctctgaaggaactctgccagctacggatgtcgagctccgagagggacggggtgttggcacttgataattttcataggtggttccagcctgctattccttcttggctccagaagacctataatgaagcactggcccgtgtacaaagagccgtgcagatggatgaattagtcccgctcggcgaacttacaaagcacagcacttctgccgtggacctcagcacttgttttgcgcaaatttcgcacaccgctaggcagctggattggcccgatcctgaagaggcctttatgattactgttaaattcgtggaagatacctgtcgtctggctctagtctactgctctctaattaaagccagggctagagagttgtcgtctgggcagaaagaccagggccaggctgcaaacatgctgtgcgtggtggtaaacgatatggaacagctccggctcgtaattgggaagctgccagcgcaacttgcatgggaagccctagagcagagggtgggggcagtgcttgaacagggacagctacagaacacactccatgcccagttgcaaagcgccctggcagggctgggacatgagatcaggactggggttcggacccttgctgaacaactcgaggtcggaatcgccaagcatatccaaaagttggtgggagttagggagtctgtactcccggaggatgccatactccctctcatgaaattcctggaggtcgagctgtgctatatgaacacaaatctggttcaagagaattttagtagtctgctgacactgttgtggactcatactctgaccgtgcttgttgaagcagctgcatcacaacgcagctcgtcccttgccagcaacagacttaaaatagccttgcaaaatctcgaaatctgtttccacgcagaaggatgtggactcccccctaaagccttacacacagctacattccaggcccttcagcgtgatctcgaactgcaggcggcatcctcaagagaactcatacgaaaatatttttgtagccgaatccagcagcaggcagaaaccacctccgaggagcttggcgcagtgaccgtcaaagccagttaccgcgcatcagaacaaaagctaagagtcgagttattaagcgcgtcgagcctgcttcctctcgattccaatggtagttctgatccatttgtacaactaacactcgagcctaggcacgaattccccgaacttgctgctcgcgaaacccagaagcacaagaaagatctgcacccgctcttcgatgagacctttgagtttctagtaccagcagaaccctgcagaaaggcaggcgcatgtttactcctcaccgtgctggattacgacaccctaggtgccgacgaccttgaaggcgaggcatttctgcccctccgggaagtcccaggcctcagtgggtcagaggagccgggagaggtgccccagacgaggctgccattaacctatcccgctcccaacggtgacccgattctacagttgctggaaggtaggaaaggcgatagggaggcacaggtctttgtgagactcaggcgtcacagggccaaacaggcttcccagcacgccctgcggccagcgccatag

SEQ ID NO: 230526 - DNA, 2847 bp, synthetic construct
  misc_feature 1..2847: note = Description of Artificial Sequence: Synthetic coding sequence
  source 1..2847: mol_type = other DNA
atggaggaaagaaagcacgaaacaatgaatccagcgcacgttctgttcgataggtttgttcaggctaccacctgcaaggggaccttgaaagccttccaagagctctgtgatcacttagagctcaaacctaaggattatagaagcttctatcataagttaaagagcaagctgaactactggaaggccaaagctctgtgggccaagctcgataaaagagggtcccataaagattacaagaaaggtaaggcttgtactaataccaagtgcctgataatcggcgctggcccatgcgggttgcgcacagcaatcgatttgtctttgctgggcgctaaggttgtggtaatcgaaaaaagagacgctttcagcaggaacaatgtgctacacctttggccattcaccattcacgatctacgtggcctcggggcaaagaagttctatggaaagttttgcgcgggtgcgatcgatcacatttccatccgccagctacagctgatacttctcaaggttgcactgatactggggatcgagatccatgtgaatgtggaatttcaagggctaatccagcccccagaggatcaggagaacgagcggattggttggcgggctctggttcaccccaagacacatcccgtttctgagtacgagtttgaagtgatcattgggggagatgggagaaggaacacattagagggattcagaaggaaagagtttcgtgggaagctagccatcgctattaccgcaaacttcattaatcgcaatacaacagctgaggcaaaagtggaagagatttcaggagttgcctttatcttcaaccagaaattcttccaggagcttagggaagccactggtatagatctggagaacattgtgtactataaagacgatacacactatttcgtgatgacagctaagaagcagtctctcctggataagggcgtgatacttcacgattatgccgatacagaacttctgctaagtcgagagaatgtggaccaagaggctctactgtcctacgccagggaggccgctgattttagcacacagcaacagcttccctccctcgactttgccatcaatcattatggtcaaccggatgtggccatgttcgattttacatgcatgtatgccagtgagaacgccgcactcgtgcgagaacaaaatgggcatcagctgctcgttgcacttgttggagattcactgctcgagcctttctggccgatgggcacagggatcgctcggggtttcctcgccgcaatggactctgcttggatggttcgaagctggtctttaggcacttcaccactggaagtcctggccgagagggaaagtatctataggcttctcccacagacaacacccgaaaacgtcagcaaaaatttcagccagtacagtatagatcccgtcacgagataccccaatattaatgtgaatttcctgagacccagccaggtgcgtcacctgtacgacaccggcgaaaccaaggacattcacttggagatggaatcactggtaaactctcgaactactcctaagctgacgcgaaatgagtccgtggcaagatctagtaagctcctcgggtggtgtcaacggcagacggacggatacgctggggttaatgttaccgatctcacaatgtcttggaaatctgggcttgcgctctgcgccatcattcaccgatataggcccgacttgattgattttgattcactcgacgagcagaacgtcgaaaagaacaaccagttggccttcgatatagcagagaaggaactggggattagtccaatcatgaccggaaaggagatggcatctgttggagaacctgacaagctctctatggttatgtacctcacacagttctatgaaatgttcaaggacagcctgccttctagcgataccctagatctaaatgcggaggagaaggctgttctgatcgcgtctactcgctcgcctatttcctttctgtcaaagctgggccagactatctcccgcaaacgaagtccaaaagataagaaggagaaggacctcgacggcgctggaaaaaggcggaaaacctcacagagtgaggaggaggaggccccaagggggcataggggagaacgccctaccctcgtctcaaccctgactgataggagaatggatgttgccgtagggaatcagaataaggttaagtatatggcaactcagctgctcgccaaatttgaagagaacgcaccagctcaaagcatcggcatcagacggcagggctctatgaagaaagaatttccacagaatctcgggggttctgatacgtgttatttctgccagaagagggtctatgtcatggaaagactgtccgccgaaggtaaattcttccaccgctcatgctttaaatgtgagtactgcgccacaactctgagactgagtgcatacgcatacgatattgaagatggaaagttctattgtaaaccacactactgctatcgcctgagcgggtacgcccagagaaaacggccagccgtggccccactgtcaggcaaggaagcgaagggccctttgcaggatggggctaccaccgacgccaatggccgagctaacgctgttgcgtcctctacagaacgcacccccggatccggggtcaatggcttggaagagccatctatagcaaagaggctgaggggaacacccgaaaggattgagctggagaactatcggctgagccttcgtcaggccgaagctcttcaagaggtgccagaagaaacacaggcggagcacaacctgtctagtgtgttagataccggcgctgaggaagacgtcgcttccaggtcggctcggcgagctgccggaaggcccccagcaactcggccttag

SEQ ID NO: 230527 - DNA, 2901 bp, synthetic construct
  misc_feature 1..2901: note = Description of Artificial Sequence: Synthetic coding sequence
  source 1..2901: mol_type = other DNA
atggaggaacggaagcacgagaccatgaaccccgcacacgtcctgtttgataggttcgtgcaggctaccacatgcaaagggactctgaaggctttccaggagctttgcgaccacctcgaactgaaacccaaagattataggtctttctaccacaagctgaagtccaagctgaactactggaaggccaaagctttgtgggctaaactggacaagcggggttcgcacaaagactataaaaaggggaaagcttgtactaacacaaaatgtctgattatcggggctggaccctgtggcctcaggacagccattgacttgtctcttctaggggctaaggtggttgtcatcgagaagcgcgatgctttcagtaggaacaatgtgctccacctgtggccctttactatacacgacttaaggggacttggtgccaagaaattttatggcaagttctgcgccggagcgattgaccacatcagcattagacagttgcagttgattcttcttaaagtggctctgatcttgggcattgagattcacgttaacgtggaatttcagggactcatacagccacccgaggaccaggaaaacgagaggattggctggagagctctggtgcatcctaaaacacatccagtgagtgaatatgaattcgaggtcataatcggcggtgacgggaggaggaatactctcgaaggtttccggagaaaggaattccgcggaaaacttgccattgccatcaccgccaactttatcaatcgcaatactaccgcagaagccaaagttgaggagatttccggcgtggctttcattttcaaccagaagtttttccaggagttgagagaggcaacaggaatagacctggagaatattgtgtactataaggacgacacccactactttgtgatgaccgcgaagaagcaatccttgctagataagggggttatcctacacgactacgcggataccgaactgctgctctcacgcgagaacgtcgaccaagaggccttgctatcctacgctcgagaagccgcagacttcagcacccagcagcagctgcctagtcttgattttgcgattaaccattacggacagcccgatgtagccatgtttgactttacatgtatgtatgccagtgaaaatgcagccctcgtgagggagcagaacgggcatcagttgctggtggcgcttgtaggggattcattgcttgaacccttctggcccatgggaaccgggattgcacggggatttctggccgctatggattcggcctggatggtgcgctcttggtctctcggaacctccccactcgaagtgctcgccgagcgcgagtccatctataggctcttaccgcagaccactccagaaaacgtgtccaaaaacttctctcagtactcgatagatccagtgaccaggtatccaaacatcaacgtaaacttcttgcggccatctcaggtcagacacctctacgatacaggagagaccaaagacatccacctggaaatggaaagtctggtgaattcccgcacaacccccaaacttaccagaaacgagagcgtggccagatctagcaagctcctgggatggtgccagcgccagaccgatggctacgcaggcgtgaacgttaccgatctaacaatgtcctggaaaagcggcttggccttgtgcgctataattcaccgctacaggccagacctcatcgactttgattccctggacgagcagaacgtggaaaagaacaaccagttggcatttgatatcgcagagaaagagttagggatctccccaattatgacaggaaaagagatggccagcgtgggcgaacccgacaagctgagcatggtgatgtacctgacacaattttacgagatgttcaaggatagtttacccagtagcgatacactcgatcttaatgcagaggagaaagcagtgctcatcgcgtctacgagatcgccgatctctttcctctcaaaacttggtcaaacaattagccgcaagaggagcccaaaagataagaaggaaaaggacctagacggtgccggtaaacgccgaaaaacaagtcagtctgaagaggaagaggccccacgcggacataggggtgagagaccaaccctggtctcaactctgactgaccggagaatggatgtagcagtcggtaatcagaataaggtcaaatacatggcaacccagctgttggctaaatttgaggagaacgctcctgcccagtccatcggaatccgcaggcagggaagcatgaagaaagagttccctcaaaacctaggaggtagcgacacctgctacttctgccagaaaagggtgtacgtcatggagagactgtccgccgaaggtaaattctttcaccgtagctgctttaaatgtgaatattgcgcaactactttaaggttgtccgcctacgcatatgatatcgaagatggaaaattttattgtaagccccactactgttatcggctgagtggttatgctcagcggaagagacccgctgtggccccactgagcggaaaggaggctaagggaccgcttcaggacggggcaaccactgacgctaatgggagggccaatgctgtcgcttcatctaccgagaggactcccggaagtggagtgaacggcctagaggagccctcaatcgccaaaagactgcggggaacccctgagcgaatcgagctcgagaattaccggttaagccttaggcaggcggaagctctgcaggaagtacccgaagaaactcaggccgagcataatctgagcagtgtgctggatacgggcgcagaagaggacgtggcgtcacgagactgggtcagtccctggctccctagaatggtgagcaacagttgggcccagatgattcacccccctcagcctcccactgttctcggcagtcaaatgtag

SEQ ID NO: 230528 - DNA, 4713 bp, synthetic construct
  misc_feature 1..4713: note = Description of Artificial Sequence: Synthetic coding sequence
  source 1..4713: mol_type = other DNA
atgtccgactcactgtggacggccctgagtaatttttctatgccttccttcccgggtggatcaatgttcaggcggaccaagagttgccggacatctaaccgtaaaagtctgattctcacatcaacatccccaaccctgcctcgcccacatagccctcttccaggccacctcggttccagccctttggattccccaaggaatttctcacctaatacgcctgcccacttttcttttgccagttccagaagagcagatgggagaagatggagccttgcatctctgcccagctccgggtatggaacgaataccccgtcctctaccgtgtcatcctcctgttctagtcaagaacggttacaccagctcccataccagcctacggtggacgaattgcactttctcagcaaacacttcggctccaccgaatccatcactgacgaagatggcggtagacgctcaccagctgtgagaccccgaagtcggtcactgagccctggcaggtcacccagctcatacgataatgagatcgtaatgatgaatcatgtgtacaaggaacggttccctaaagcaacagcccagatggaagaaaaattacgggacttcaccagggcttacgagccagatagtgttcttccacttgccgatggcgtgctgtcgtttattcaccaccaaatcatcgaattagcgcgagattgcctgaccaaatcacgagatggactgatcactacagtctatttctatgagttacaggagaatctcgagaagctactccaggatgcatatgagcggtcagagtcgctggaggtcgcttttgtgacccagcttgtaaagaagctgctgatcataatcagcagacccgcacgcttgttggagtgcctcgaatttaaccccgaggagttctaccacctgttagaggccgctgagggccacgcaaaggagggtcatttagtcaagacagatatcccccgttacattattcgccaactagggcttactcgagatccatttccagacgtggtgcacctggaagagcaggacagtggcggttccaataccccagagcaggacgacctgtccgaaggtcgttcctctaaagcaaagaagccacccggagagaacgattttgacaccataaagctaattagcaacggagcctatggcgcagtgtaccttgtccgccaccgtgacactaggcagagatttgctatgaaaaagattaataagcaaaacttgatcctgagaaatcagatccagcaggctttcgtggagcgcgatatcctgacttttgcagagaacccttttgtggtaggcatgttctgttccttcgaaacacgacgacacctgtgtatggtcatggagtatgttgagggaggtgactgcgcaacactgctcaagaatattggggctctgcctgtagagatggccaggatgtactttgccgagactgtgctggccctggaatacctccacaattatggaattgtccaccgggatctaaaacccgataatctgctcatcacttctatgggacatatcaagctaacagattttggactgtccaagatgggccttatgtcgctcaccacgaatctgtacgagggtcacattgagaaagacgcgagggagttcctcgacaaacaggtctgcgggacgcctgaatacatcgctcccgaggtgatccttcgccaggggtatggcaagcccgtggattggtgggcgatggggatcatactttacgaatttctcgtgggctgcgtgccctttttcggggacacccccgaagagctgtttgggcaggtaatctccgacgatattctatggcccgaaggtgacgaggctttgcccacagaggctcagctcttaatatcctctctgctccagacaaacccacttgttcggctgggtgccggaggggctttcgaagtgaaacagcactcctttttccgcgatctcgattggacaggcctgttgcggcaaaaggcagagtttattccgcatctggagagtgaggatgataccagttacttcgacacccgttctgaccgatatcaccatgtcaatagctacgacgaggacgacacaaccgaagaagaaccggtggaaattagacaatttagttcatgctcccctaggttttctaaggtctacagcagtatggagcagctgagccagcacgaacctaagacgccagtcgcagccgctgggagttcaaagcgggagcctagcacaaagggcccagaagagaaggtcgccggaaagcgggagggccttggcggtctgactcttcgagaaaaaacctggaggggtggtagccctgaaattaaaaggttcagcgcatctgaggcctcctttttggaaggagaagcctccccccctttgggcgctcggcgacgtttctcagcccttctggagccaagccgattttctgcaccccaggaggatgaagacgaagcccgtctccgtcgcccacctaggccgagcagcgatcctgcgggaagcttggacgcacgcgctcctaaggaggagacacagggagaaggcacgtctagcgccggagactctgaggccacggatagacctaggcctggcgacttatgccctccatcgaaggatggcgacgcatccgggcctagggcaactaatgacctggtgctgagaagagcaaggcaccaacaaatgtccggcgatgttgccgtcgaaaagcgaccatcgcgtaccggaggtaaggtcattaagtccgctagcgcaaccgctctttccgttatgatccccgcagtggaccctcacggctcgtccccactagcatctcctatgtctcctagatcactatcctcaaacccaagtagtcgggattccagcccttcgcgcgactacagtccagccgtgtctgggctgcgatcgcccatcaccattcagcgcagtggaaagaagtacggttttacattacgggctatcagagtgtacatgggcgacaccgatgtatattctgtccaccacatagtgtggcacgtggaggagggtggtcctgcccaggaggcagggttgtgcgccggagaccttattacgcacgtaaatggagagcccgtacacgggatggtccaccctgaagtggtcgaactgattctgaaaagtggtaataaagttgcagtgaccacgaccccattcgaaaacacgtcaatccggataggccctgctcggaggtccagctacaaggctaagatggcgaggcgaaacaaaaggcctagcgccaaagaaggtcaagaaagtaagaagagatccagcctgtttcggaaaatcacaaagcagagcaacctgctacacacttcaaggagcttatcttccttgaatcggtctcttagcagcagcgactctctaccgggatctcccactcatgggctgcctgccagaagcccaacccactcctaccgcagcaccccagatagcgcttacttaggggcatcatcccagagctcttcacctgcctcctcgacacccaacagccccgcaagcagcgcttctcatcacatacgccctagcacccttcacggattaagccccaaattgcaccggcagtaccgctcagcgagatgtaaaagcgctggtaatattcctctctcccctctagctcacacgccctctccaacgcaagccagtccccctccgctgcccggtcataccgtcggctcctcccatacaacacagagttttcctgcaaagctgcattctagtcctcctgtcgtgcgacccagacccaaatcagccgagccacccaggtcacctcttttgaaaagagtccagagcgctgaaaaactgggggcatcattgtcggctgacaagaagggagccctgcggaaacatagtctggaagtgggacacccggacttccgcaaggactttcacggtgagcttgccctacactcgctcgctgaaagtgacggggagactcccccagtggaggggctgggggcaccacggcaagtggccgtgaggcggctcgggaggcaggaatcacccctatccctgggtgcggacccattgctgcccgaaggtgcttctaggccacctgtctcttccaaagagaaggaatctcctggcggtgccgaagcctgcaccccacctcgagccacaacaccaggcggtaggaccttggagagagatgtggggtgtactcgccaccagtccgttcagaccgaagacggaactggcggaatggccagagccgtggcaaaagcagcactgtccccagtgcaggaacatgagaccgggaggaggagctcctctggtgaagctggaactcctctggtgcccatcgttgtcgaacccgctaggcctggcgctaaagccgtcgttccgcagccactgggcgctgatagcaagggccttcaggaacccgcacccttggctcccagcgtgccagaggccccacgtgggagggagcggtgggtgctggaagtagtcgaggagcgcaccaccctttctggacctcgcagtaaaccagcttccccaaagttatcccctgagccgcagaccccgtcattagcccctgcaaagtgtagcgctccatcctctgctgtcactccagtcccccctgcgtctctcctgggatctggcaccaaacctcaggtaggcttgacttctaggtgtcccgcagaagctgtcccccctgcaggactaaccaaaaagggggtctcctccccagcacctcccggtccatag

SEQ ID NO: 230529 - DNA, 2178 bp, synthetic construct
  misc_feature 1..2178: note = Description of Artificial Sequence: Synthetic coding sequence
  source 1..2178: mol_type = other DNA
atgagcgactctctttggaccgcacttagcaatttctcaatgccaagttttccaggagggtctatgtttcgacgcactaaatcctgtagaacttctaacagaaaatcactcatccttactagcacatcccctacactccctcgcccacactcccccttgcccggacaccttggttcctctcccctggattcgcccagaaacttctcaccaaatacacctgctcatttcagttttgcctcttccagacgggctgacgggaggcggtggtctctcgcaagcttgcctagctcaggatacggaacaaacacaccctcctccacggtgagttcgtcgtgcagttcccaggagcgtctgcatcagctcccctaccagccgacagtggatgagttacattttcttagcaagcacttcgggagtactgagagtataacagatgaggacggcggtcgcaggtcccctgccgttagacccagaagccgcagcctgtctccagggaggagcccttcaagttacgataacgagatcgtcatgatgaatcacgtctacaaggagaggttccctaaggcaaccgcccagatggaggaaaaactgagggatttcacaagggcttacgaaccagattcagtcttaccactcgccgacggcgtcctgagctttattcaccaccaaatcattgaattagcaagagattgcctgactaagagcagagacggactgataaccaccgtctatttttacgagctgcaggagaacctggagaaacttttgcaggacgcctacgagcgatcagagtccctggaagtggcctttgtgactcagctcgtgaagaaactccttatcattatttccagaccagcgcgactgctggagtgtcttgagttcaatccggaggagttctatcacctcctagaggctgccgaagggcacgccaaggagggccaccttgtcaagaccgacattcccaggtacattatccgtcagttagggttaactcgtgacccttttccagatgtcgtacaccttgaagaacaagacagtggaggctccaatacccccgagcaggacgatttgagcgaaggccgtagtagcaaagccaagaagccacctggtgagaacgacttcgatacaattaagctgatctccaacggcgcatacggcgcagtgtatctggttagacatcgggataccaggcagcgattcgctatgaaaaaaattaacaagcagaacctgattctccggaaccaaatccagcaggcttttgtggagcgtgatattctgactttcgcagagaaccccttcgtggtgggtatgttctgcagctttgaaacccgcaggcatctgtgtatggtaatggagtacgtagagggcggagattgcgctaccctactgaagaatattggtgctctcccagtggaaatggcgcgaatgtacttcgcagaaaccgtgcttgccctggaatacctccataactacggaatcgttcatcgcgatcttaagcccgacaatctgctgatcacgtccatgggccatattaagttgacagacttcgggctgtcaaaaatgggactcatgagccttactacaaacttgtacgagggtcacatcgagaaagacgccagggagtttctggacaaacaagtatgtgggacccctgagtacattgctcccgaagtcatactgagacaaggttatggcaagcccgtagattggtgggccatgggcatcatcttgtatgaatttcttgtggggtgtgtcccattcttcggcgacaccccagaggagctattcggccaggtcatcagcgatgacattctgtggccagagggagacgaggcactacctaccgaggcacagcttctcatctcatctttgctccagaccaatcctttggtgagactgggtgcgggtggcgcttttgaggtcaagcagcactcgtttttcagggatctagactggactggactgctccgccagaaggctgagtttattccccatttggagtccgaggacgatacgagttattttgatacccgctcagatcgctatcaccatgtcaacagttatgacgaggacgatactaccgaggaggaacccgtagaaatccgacagttttctagttgttctccacggttctctaaggtgtacagcctcagaatccacatgtacacatacaagtag

SEQ ID NO: 230530 - DNA, 5396 bp, synthetic construct
  misc_feature 1..5396: note = Description of Artificial Sequence: Synthetic coding sequence
  source 1..5396: mol_type = other DNA
atgaagcggtcacgctgtagagatcgcccacagccccctcccccagatcggagagaagacggcgtgcagagggccgcagagttgagccagtctctccctcctagaagaagggctccacccggacgtcagcgcctggaagaacggacaggtcctgccggacccgaagggaaggagcaggatgtggtgacaggcgtgagcccattactttttcgtaagctaagcaacccggacattttctccagtactggtaaggtcaaactgcagcgtcagctttcccaggatgactgtaagctgtggcgtgggaatctggccagcagcctgtctggaaagcagttactgccgctctcttcctccgttcattcttctgtcggacaggtgacatggcagtctagcggcgaggcctcaaacctggtgaggatgcgaaaccaaagtttaggccagtcggctccttcattgaccgcaggtctcaaagaattgtcgttgcctcgcagggggagtttctgccgcacaagcaaccgtaagtctctcatcgtgacatcctccacatcaccgacactccctaggccacacagcccgttacatggccacactggtaacagtccactggactcccctcgcaatttttcccctaacgccccagctcactttagttttgtgccggctcggaggaccgatgggcgtcgatggtctctggcatcactgcccagttctggctacggcactaacactccctcctctacggtctcttcaagctgcagctcgcaggaaaagcttcatcaactgccattccagcctaccgctgacgaactccactttctcaccaaacacttcagcacagaatccgttcctgacgaagaaggccgacagagcccagcaatgaggcccaggtccaggagcctgtcccccggaaggagccccgtgagctttgattcagagattattatgatgaatcacgtctacaaggaaagattccccaaggcgaccgcccagatggaggaaagactggccgagtttatcagttctaatacccctgatagcgtgttgccactagctgatggcgctctgagttttatccaccaccaggtcattgaaatggcacgggattgccttgacaaaagtcggagcggcctgatcacctcacagtacttctatgaactgcaggataacctggagaagcttctccaggacgcccatgagcggtccgagagttcggaagttgcttttgttatgcagcttgttaaaaaactgatgattattattgcaagacctgctaggctgctcgagtgcctggagtttgacccagaggagttctatcacttgctggaagccgcagaaggtcacgctaaggaaggacagggtattaagtgcgatattcctaggtacatcgtcagtcagttgggcttgactcgagacccactggaagaaatggcacagttaagtagttgtgactcccccgacacaccagaaaccgatgacagtattgagggccatggagcgagcctgcctagcaagaaaactcccagcgaagaggactttgaaacgattaaactcataagtaatggcgcatatggggctgtattcctggtacgtcacaagtctacacggcagaggtttgctatgaaaaagatcaataaacagaatcttattttgcgcaaccagatacagcaagcatttgtcgaacgagacattttgacctttgcagagaaccccttcgtggtgagcatgttttgcagtttcgatacaaagagacatttatgcatggtgatggaatatgtggaggggggagactgcgccaccctgctaaaaaatattggtgctttgccggtggacatggtccgactctactttgccgaaactgtgttggccctggagtatctccataattacgggatagtgcaccgagatttaaaacctgacaacctgttaattacaagtatggggcacatcaaactgactgactttggtctcagcaagatcggtctgatgtccctgaccaccaacttgtacgaaggtcacattgagaaggacgctcgagagtttttagacaagcaggtgtgtggcactccagagtacatagctcctgaagtgatcctgcgccaggggtatggcaagcccgtcgattggtgggcaatgggcataatcctgtatgaattccttgtcggctgcgtcccattctttggcgacacacccgaagaattgttcgggcaggtcatttccgacgagattgtttggccagagggagatgaagccctgccacccgacgctcaggacctgacatccaagctcctgcaccagaacccactggagaggctcggaactggctcggcatacgaagtgaagcagcatcctttcttcaccggtctcgactggactggcttactgcgccagaaggcagagttcattccccaactcgaaagcgaagacgacacgagctattttgacaccaggtcagaacgttatcaccatatggacagtgaggacgaagaagaagtgagcgaagacggctgcctggagataagacagttcagttcatgctccccgaggtttaataaggtctactcatcgatggagagattgagtctgctggaagaacgacgtactccaccacccacgaagcgcagcctttccgaagagaaggaagaccactccgatggccttgcaggactgaaagggagggataggtcctgggtgatcggctctccggaaattctgcggaaaagactctctgtgagcgaatctagccatacggagagtgattcatcacccccaatgaccgttcggcgacggtgctccggcctgctcgatgccccacggtttcctgaaggcccagaggaggcatcttctactctcagaaggcagccccaggaggggatctgggtgctgacccctccctcaggggagggcgtatcaggaccagtaaccgagcatagtggagaacaacggccaaaattggacgaggaagcagtcggccgttcttctggcagttcaccagccatggaaacacggggtcgcggaacgtcccagctggccgagggagccactgctaaggccattagcgacctggcggtaagacgggctaggcatagactgctgtcaggggattctacagaaaagcggacagctcgtcctgtcaacaaggtgatcaagtctgcatctgccacagctctgagtcttcttataccctccgagcaccacacttgctccccactggccagccctatgtctccgcactcccagtcttctaacccttccagtagggatagcagcccatccagggattttctacctgctcttggaagcatgcgccctccaattattattcacagggcaggtaagaagtacggattcaccctgcgtgctatacgcgtctatatgggcgattccgatgtgtataccgtccatcatatggtctggcacgtggaggatggaggcccagcgtccgaggccggactgagacaaggcgacctcatcacacacgttaatggagagcccgttcacggactggtccatactgaagtcgttgagctaattctgaagtccggaaataaggtagccatttcaacaacaccactggaaaacacgagcataaaggtgggtccagcaaggaaaggcagctataaagccaagatggctaggcgcagtaaaagaagtagaggaaaggacggccaggagtcacgcaagcgctcctcactgtttcggaaaattactaagcaggcctctttgctccacacgtcccgtagtctgtcaagcctcaatagatctctatcttctggcgagtctggtcccggtagtcccacccatagccactcattatcaccacggagtcccacacagggatatcgagttacgccggacgccgtacattctgttggcggaaattcctctcaatccagttccccaagttcatccgtgcctagctctcccgcagggtctgggcatacacgtccgtcatcgttacacggactcgctcctaagctccagcgccagtaccgttccccccgacgcaaatcagcaggctctatacctctctcccccctcgcccatactccctccccccctcccccaactgcctccccccaacggagcccctctccactgtctggtcacgtggcccaagccttccctaccaagctgcacctgagtcctccactgggcagacagctgagccgacctaaaagcgcagaaccacccaggtctcccctactgaagagagtccagagtgctgaaaagttggccgcagctcttgccgcttcagagaaaaaacttgccacctccaggaagcatagtcttgatctccctcacagcgaattaaaaaaggagctgcctccacgcgaagtgtcacccctggaagttgtgggggcaaggagcgtcctgtccgggaagggtgccctgccaggcaaaggagtactgcagccggctcccagccgcgcactgggcactctgcggcaggatagggctgagagacgagaaagtttacagaagcaggaagcaataagagaagtggatagtagtgaagacgacaccgaggaagggcctgagaactcccaaggtgcacaggagctctcgctcgccccacacccggaggtttcccaatcagtggcccctaaaggggctggggagagtggtgaagaggacccctttcctagcagagacccgcgaagtctcgggccaatggttccctctctgctcactggtataactctcggcccacctaggatggagtctccgtcgggtcctcacagaagactggggagtcctcaggccattgaggaggcggctagttcgagctccgccggtccgaacctcggccagtcaggcgcaaccgaccccatcccgcctgaagggtgctggaaggcccagcacttgcacactcaagcacttacagcactcagcccaagcacatcgggcttaactcctacgagcagttgcagccccccaagcagtacaagcgggaaactctcgatgtggtcctggaaaagcctgattgaggggcctgatagggctagtccatctaggaaggctacaatggctggcggactggccaatctgcaagatctcgagaatacgactccagcccagcctaagaacctgagtcctagagaacagggaaagactcagcccccaagtgctccccgactggcgcatccttcgtacgaagatcccagtcagggttggttgtgggaaagtgaatgcgcccaagctgtgaaggaagaccctgccttaagcatcacccaggtgccagacgcctccggagatagacgccaggatgtcccctgcaggggttgtcctctgacacagaagagcgagccgtcattacgcaggggacaagagccaggcggacaccagaagcatcgggacctcgccctggtcccagacgagttactgaagcagactta

SEQ ID NO: 230531 - DNA, 2379 bp, synthetic construct
  misc_feature 1..2379: note = Description of Artificial Sequence: Synthetic coding sequence
  source 1..2379: mol_type = other DNA
atgttctcccccacctccgctcctgcactgttcctcaccaaggtacccttctccgccgattgcgcacttgcaacctcccctcttgccatctttctaaatcctcgcgcacatagtagccctggtacaccgtgctctagccggccactgccctggtcttgtcgcacaagcaatagaaagtccctgatcgtcaccagcagtacttccccgactctacccagaccacattccccacttcacggtcacacaggtaattctcctttggactcccctcgaaatttttctcccaacgctcctgctcatttttcatttgtgcccgctcgaagaactgacgggaggagatggagtctggcatccctcccaagctccggctatggaacaaacacaccatccagcacggtcagctcttcatgcagctcacaggagaaattgcaccagcttcccttccagcctaccgccgacgaattgcactttcttacgaagcatttctccaccgagagcgtcccagacgaagaaggtcgccagtcaccggctatgcgacccagatcccggtcactctcacccggtcgaagtcctgtgagctttgattcagaaattataatgatgaatcacgtttacaaagaacgattccctaaagctacagcgcagatggaggaacgactcgcagaattcatctcctccaacacccctgacagcgtgctccccttagcggacggcgctctctcttttatacaccatcaggtgattgaaatggcaagggactgtcttgataaatccagaagtggccttatcactagtcaatatttctatgaattgcaagataacttggagaagctgctgcaggacgcccacgaaaggtctgagtcctctgaagttgccttcgttatgcagctagtgaagaaactgatgatcatcattgctagacccgctagactgctggagtgtcttgagttcgatcctgaggagttttaccatctcttagaggccgcagaaggtcacgcgaaagaagggcagggaattaagtgcgatattccaagatacatcgtttcacagctcgggctgacccgggacccacttgaggagatggctcagctgtcttcgtgtgatagtcctgacactcccgagacagacgactccatagaaggccacggagcaagcttaccgagtaaaaagaccccttctgaagaagattttgaaaccattaagcttatttcgaacggcgcatatggtgctgtcttcttagtccgacataagagtacccgccagcgtttcgcgatgaagaaaatcaacaagcaaaacctaatcctccggaaccagattcagcaggctttcgtcgagagggatatattgaccttcgctgaaaacccattcgttgtgagcatgttctgtagtttcgacacaaagagacatctgtgtatggtgatggagtatgtggaaggcggagactgcgcgactctcctgaaaaatatcggagcccttcccgtcgacatggttagattgtacttcgcagaaaccgtgctggccttggaataccttcacaattatggaatagttcatcgggatttgaagccggacaacttgcttataacgtccatggggcacattaaattgacggattttggactgagtaaaatcgggctaatgtcgctcacaacgaacctgtatgagggccacatcgagaaggatgcccgagaatttttagataagcaggtttgcggcacacctgaatacatagcccctgaggtcatcctgaggcagggctatggaaagccagtggactggtgggcaatggggataattctgtatgaattcctggtgggatgcgtgcccttcttcggcgatacccctgaagaattatttggccaggtgatctcggacgagatcgtgtggcctgagggggacgaggccctgccacctgacgcccaagacctgacctctaagctgctgcatcagaaccccctggagcgcttgggtaccggatccgcatatgaggtgaaacagcatcctttcttcaccggattggattggaccggcctattacggcagaaggccgagttcatcccacagttagagagcgaagatgacacatcttatttcgacactcgctcagaacgctatcatcacatggatagtgaggatgaggaagaggtttccgaggatgggtgtctggaaattagacagttcagtagctgttcaccccgattcaacaaggtgtactcgagtatggaacggttaagtctcctggaggaacggaggacacctcccccaaccaagcggtccctgtcagaggaaaaggaagaccacagtgacggactggcgggactcaaaggcagagacagatcgtgggttataggctctcctgagcatcacccttctgcgtag

SEQ ID NO: 230532 - DNA, 4827 bp, synthetic construct
  misc_feature 1..4827: note = Description of Artificial Sequence: Synthetic coding sequence
  source 1..4827: mol_type = other DNA
atgaagcgaagcaggtgccgggatcggccacagccaccgccacccgatcggcgagaggacggagtgcaacgggctgccgaactcagccaaagcctcccaccaagaagaagagcccctcccggtcgacagagactcgaagagcgtacagggccagccggacccgaaggtaaggagcaggacgttgttaccggcgtgagcccactgctgtttaggaagctgtcgaatccagacatattttccagtacaggcaaggtaaagcttcagcgtcagctgtcccaggacgactgcaagctatggcgtggaaatctggccagctccctttccggcaaacagctgttgcctctatccagttctgtccactctagcgtggggcaggtgacatggcagtcctctggcgaagcttcgaatttggtgaggatgaggaatcagagtctcgggcagtctgccccatccctgactgcagggctgaaagagctatctctgccaaggcgtggcagtttctgcagaacatccaaccgcaagagtttgatcgtgacctcctctaccagcccgacattgcccagaccacactcacccctacacggacacacagggaattctccattagattcccctaggaatttcagccccaatgcccctgcccactttagttttgtccctgccagacgaactgacggacgacgttggagcctggcctctcttcccagctccggctatggcaccaacactcccagttccacagtcagcagctcttgttcaagtcaggaaaaacttcaccagctgcccttccagcccacagcagacgagcttcactttctcaccaagcacttttctaccgaaagtgtcccagacgaggaaggcaggcagtccccagccatgcgaccacgatcacggtctctgtcaccaggccgatcccctgtatccttcgattcagaaatcatcatgatgaaccacgtctacaaagaaagatttcctaaggcccatgagcggagcgagtcgtctgaggtggcgttcgtaatgcagctcgtcaagaagctgatgattatcatcgctcggcctgctagactattggagtgtttagaatttgatcccgaggagttttaccatctgttagaggcagccgaaggccacgccaaggaagggcagggtatcaaatgcgatatcccgaggtatatagtcagtcaactggggttgacacgcgatcccctggaggaaatggcccaactgtcgagttgcgatagtcctgatactccagaaaccgacgacagcattgaaggccatggagcttctttgccctcaaagaaaactccatcggaggaggacttcgaaactatcaaacttattagcaatggcgcttatggagctgtgttcttagtccggcacaagtctactcgacaacggttcgcgatgaaaaaaatcaataaacagaacctgatcctccgcaaccaaatccagcaggcattcgtggagcgcgacattctaacgttcgcagagaatccatttgtggtgagtatgttttgctcgttcgacactaaacgccacctgtgcatggtgatggagtacgtggagggtggagactgcgcaaccctgctgaagaatatcggtgcactccctgtggatatggtccggctgtacttcgctgagactgttcttgcacttgaatacttgcacaattatggaattgtgcaccgcgatctgaagcctgacaacctattaattactagcatgggtcacattaagcttaccgacttcggactgagtaaaatcggtctgatgagccttactacaaatctgtatgaaggccacattgaaaaggacgccagggagttcctggacaagcaggtgtgtggaactccagaatatatcgcgcctgaagtgatcctgcgacagggctatgggaagccagttgactggtgggctatgggcatcattttgtatgagtttctcgtaggctgcgtgccgtttttcggagacacaccggaagagctcttcggccaggtgatttctgatgagatcgtgtggccagaaggggacgaggccttgccgcctgatgcgcaagatctcaccagcaagctcctccaccagaaccccctggagcggttggggacagggagcgcctatgaagtgaaacagcaccctttttttactggactggattggactggattgctgcgccaaaaggctgaattcatccctcagttagaatccgaggacgatactagctacttcgatactcgatctgagagataccatcacatggactccgaggatgaggaggaagtctccgaagacgggtgtctagagatccgacaattctcctcctgcagcccaagattcaacaaggtgtattcaagcatggagcgtctcagtttgctggaagagaggcggacaccccctcccactaagagaagcctctctgaggagaaagaggatcattcggatggattagctggactgaaaggcagagatcggagttgggtgatcggcagccccgagatacttaggaaaagactcagcgttagcgagagtagccatacggagagtgactcctcaccacccatgaccgtcagacgacggtgctccggtctcttggacgcaccgcgtttcccagagggccctgaggaagccagctccactctccgcagacagccacaggagggaatctgggtcttgacgcccccttccggggagggcgtgtcaggtccagtgaccgaacattcgggcgagcaaaggccaaaattggatgaggaggctgtggggagaagtagcggcagcagcccagcaatggagactcgtgggagaggcacaagtcaactcgccgaaggcgcaacagcaaaagctatttcagacctggctgttaggagggctagacaccgtctgctgtccggcgactctacagagaagcgtaccgctcgacccgtgaacaaggtgataaagtcagctagcgcaactgcactgtccctgttaatcccctcagagcaccatacatgcagtcctctcgcaagcccgatgagtcctcattcccagtcctcgaatcctagcagtcgggacagctctccctacggattcactttacgcgctattagagtttacatgggtgattcagacgtctatactgtgcaccatatggtctggcatgttgaggacgggggacctgccagcgaggcagggctgagacaaggcgatctcatcacacacgtaaacggggagcctgtacatgggcttgtacacacggaggtggtcgaattgattcttaaaagtgggaataaagttgccatatccacgactccactagagaatacaagcatcaaagtgggtcctgccagaaagggctcctataaggcaaagatggcaaggagatcaaagaggagtaggggaaaggacggacaggagtcaagaaagcgctctagcctgttcagaaagattactaagcaggccagccttctccataccagcagatctctgtcctccctcaatcgttcactgtcctccggggagagcgggccaggcagccccactcactcccatagtctgtctcccagatcacccacccaggggtacagggttacacccgatgccgtgcacagcgagttatctcggccaaaatccgcagagccgccacggtctcccctgttgaaacgtgtgcagtccgcagaaaaattagccgctgctctagctgcaagcgaaaagaaactggctacatcccgcaaacacagtctggacctcccacactccgagctcaagaaggagctgcctccacgagaagtctcccccctggaagttgttggagccagatcagtcctcagtggtaagggcgctcttccaggcaagggcgtgttacaacccgcaccatctcgagccctcggcactctaaggcaggatagagcagaaaggcgagagagcttgcagaagcaagaagccattagggaagtggatagctctgaggatgacaccgaggagggccctgagaattctcagggcgcacaggaattgtcacttgctcctcacccagaggtgtcacagtctgtcgcacccaagggcgcaggcgagtctggagaggaggatccttttccctctagagatcccagatccctaggaccgatggtgccctccttgctgacagggattaccctcggtccacctcgaatggagagcccaagcggccctcataggaggcttgggagcccccaagctatcgaagaggcagcaagctcttccagcgccggtccgaacttaggccagtccggcgcaactgacccaattcccccagagggctgttggaaagcccagcacctccatacccaagcattgaccgcattatccccatcaactagtgggctcacacccacctcgtcttgctcaccgccttcctccacttcaggaaagctgtcgatgtggtcttggaaatcactaatcgagggtccagatagggcgtcaccttcccgtaaagccactatggccggtggcctcgccaaccttcaggacttggagaataccactcctgcccagccgaagaacctgagcccacgcgaacaaggcaagactcagcccccatctgcccctcggctggcccaccctagctatgaggatccatcacagggatggctgtgggaatctgagtgtgcacaggcagtcaaagaagatccagcactgtcaataactcaggtacccgacgcatccggcgacagacgccaggacgtgccctgtcgtggctgtcccctcactcagaagtccgagccatccctgcgtcggggtcaagagcctggaggccaccaaaagcatcgggacctcgcgctagtgcccgatgagctcctgaagcagacatag

SEQ ID NO: 230533 - DNA, 1893 bp, synthetic construct
  misc_feature 1..1893: note = Description of Artificial Sequence: Synthetic coding sequence
  source 1..1893: mol_type = other DNA
atgaggccccgatctcggagtctgtccccgggtaggtctcctgtgtccttcgattccgagattatcatgatgaaccacgtctacaaggagcggttccctaaggccaccgcacaaatggaggaaagactcgccgagttcataagcagtaacacgccagattcagtgcttccactggccgatggcgctcttagtttcattcaccaccaggtgatcgagatggccagggactgtctcgacaagagcagaagtggattgataaccagccagtacttctacgagctgcaggataaccttgagaagctccttcaggacgaatttgaccctgaggaattctaccacctgcttgaagccgctgaaggccacgcaaaggagggccaagggattaagtgcgacatccccagatacattgtgagtcagcttggcctgacgagggaccctttggaggagatggcacagctgagtagctgcgatagtccagatacgcctgaaaccgacgattcgatcgaaggccacggggcttcactgccctcaaagaaaactccctcagaagaggacttcgagaccattaagctgattagcaacggagcctacggtgcagtgtttctggtgaggcacaagagcactcggcagagattcgccatgaaaaaaatcaacaagcagaatcttatactgcggaaccagatccaacaggcatttgttgagcgggatattctgacatttgcggagaaccctttcgtcgtgtccatgttttgttcatttgatacaaagcgccacctgtgtatggtaatggaatacgtagaaggtggcgattgcgcaaccctcttgaagaacatcggcgcactgcctgtggatatggttaggctgtatttcgcggagacggtgttggctctggagtatttgcataactacggcattgtgcacagggacctgaagcctgataacttacttattaccagtatggggcacatcaagctcactgactttggtctgagcaagatagggctgatgagcttaactacaaacctgtatgaagggcatatcgaaaaagatgctcgagaattcctggacaaacaggtgtgtggaactcccgagtacattgcccctgaggtcatactgagacaaggatatgggaagccggtggactggtgggctatgggcatcattctttatgaatttctggtgggatgtgttccgtttttcggagacacccctgaagaattattcggccaggtcatttcagacgagattgtctggcctgagggcgatgaagcgcttcctcccgatgcccaggacctgactagtaaactgctgcatcagaacccattagaaaggctcggtacaggctccgcctacgaagtgaagcaacatccttttttcacgggactggactggactggacttctgcgccagaaggcagagtttatcccccagttggagtcggaggatgacactagctatttcgatacgcggtccgagcgctatcaccatatggacagtgaggacgaggaagaggtctccgaggacggatgtctcgagattcgacagttttcaagttgttcaccgagattcaacaaagtgtacagctcaatggagcggttatctttgcttgaggagagaaggactccgcctcctaccaagcggtctttgtctgaagaaaaagaagatcactctgacggccttgctgggttgaaggggcgtgaccggtcttgggttatcggttctcccgagattctcagaaagcgactcagcgtgagtgagtcgtccctgctgaaggtggctgggcgaccgtctaccttttcgcagcacttcggcacgcatccccaccaacaactgctgtcatctcagttgcatctgtgggaggcagaacacgtggtactagagatcccttactag

SEQ ID NO: 230534 - DNA, 1035 bp, synthetic construct
  misc_feature 1..1035: note = Description of Artificial Sequence: Synthetic coding sequence
  source 1..1035: mol_type = other DNA
atggatgacagctcaatcctcagacggaggggcttgcagaaggagctctcgctgcccagacgtggatccttttgtcgtacaagcaacaggaaatcactcatcgtgaccagttcgaccagccctaccctccctcggcctcattcacctctgcacggccacacagggaactcgccattagactcaccacgtaacttcagccccaacgccccagcccacttttccttcgtacccgcaaggtcccacagccaccgggctgaccggaccgacgggagacgttggtcactggcctcattgccctcatccggctatggcactaacaccccgagtagtactgtttcgagctcctgttcctcacaggagaaattgcatcagttaccatttcagcccactgcggacgagctgcatttcctcaccaaacatttcagtaccgaaagtgtacctgatgaggaaggaaggcagagcccagcgatgaggcctgctcctagcagagccctcggaacactgcgacaggaccgggcagaacggagggaatccttacagaagcaggaagccatccgtgaagtggatagttccgaagatgataccgaggaaggccctgaaaatagtcagggtgcccaagagctgagcttggcaccccaccccgaggttagccaatccgtcgctccaaaaggtgccggagagtccggcgaggaagatccctttccaagcagagaccctagaagcctggggcctatggttcctagcttactaacaggaattacactcggcccacctcggatggaaagcccaagcgggcctcatcgcaggttgggctcaccacaagccatcgaggaagccgctagttcatccagtgccggaccgaacttagggcagtcaggggcaaccgaccctatccctcctgaagggtgctggaaggcccagcacctgcatacacaggcccttaccgcattgtctccctccacctctggactggcacacctcatgaggatacccgcaagggccggatatggtagcctctcagtccacaagcagtag

SEQ ID NO: 230535 - DNA, 3930 bp, synthetic construct
  misc_feature 1..3930: note = Description of Artificial Sequence: Synthetic coding sequence
  source 1..3930: mol_type = other DNA
atggatgagtctagcctgcttcggaggcggggattgcagaaggagctcagtcttccccgtagaggccgtggatgtagaagtggcaacagaaagtctctcgtcgtggggactccttctccaacattgtccaggcccctttcgcccttaagcgttccaacggccggatcatccccactggactctcctcgtaatttttccgctgcttctgccctgaactttccctttgcaagacgcgcagacgggagacgctggtccttagcatccctcccatcatcgggctacgggaccaacacacctagttctacactttcatcaagttcaagctctagggaaagattgcatcaattgccttttcagcctacccccgacgaactgcattttctaagcaaacacttcagatcctcagaaaatgtcttggatgaggagggcggacggtccccccgtctgcgccctaggtcacgctctctgtcgcctggtcgcgctacagggacttttgataatgaaattgtcatgatgaaccacgtctatcgggagagatttcctaaagccacagcccaaatggaagggaggctacaggagtttctaaccgcatacgccccaggggcacgactggccttggctgacggtgtccttggttttatccaccaccagatcgtggaactggctcgggactgcctggcaaagagcggtgagaacctcgtgacatctcgatacttcctggaaatgcaggagaaattagaacggctgctgcaagacgctcatgaaagatccgattctgaggaggtcagtttcattgtccagctggtccgtaaactgctgataatcatttcacggcctgcacggttgctagaatgcctggagttcgaccccgaagaattttatcatcttttggaagctgccgagggccatgccagagagggccagggtattaagacagaccttcctcagtatataatcggacagctggggcttgccaaagatcctctcgaagagatggtcccgctatcacacctagaagaggagcagccacccgctcccgagtcaccggagagtcgggcactggttgggcagtcccgtcggaaaccctgcgaatcagactttgaaaccattaaactgatcagtaacggcgcttacggggctgtgtatctggtgagacacagggatactcgccaacgtttcgccatcaagaaaatcaataaacagaatctgattttgaggaaccagatacagcaggtttttgtcgaaagagatatcctcacctttgcagaaaatccatttgtcgtctcaatgttttgtagctttgagacccgtcggcatttgtgcatggtgatggagtacgtcgagggtggagattgcgctaccctcctgaaaaacatgggaccgcttcccgtggatatggccagactatacttcgcggaaaccgtgctcgctttggagtatttgcacaattatggcattgtgcatcgcgatttaaaaccagataatctccttatcacctctcttgggcatataaagctcaccgacttcggtttgtctaagataggactcatgtccatggctaccaatctgtatgagggtcacattgagaaagacgctcgggagtttattgataaacaggtgtgtggtactccagagtatatcgctccagaggtgatttttcgccagggatacgggaagcccgtcgactggtgggccatgggcgtcgtgctgtatgagtttctcgtggggtgtgtgcccttcttcggcgacacccccgaggaactgtttggacaagtggtctctgatgaaatcatgtggcctgagggcgacgaggcactgccggcagacgcccaggacctcatcaccagacttctgagacaatcccccttggatcgccttgggacaggtggtactcacgaggtcaagcagcatccattctttttggctctggattgggccggtctcttgaggcacaaggcagagttcgtcccgcaattagaggctgaagatgatacatcttattttgatacacgttcagaacggtatagacatcttgggtcagaggacgacgaaaccaacgatgaggagtccagtaccgaaatcccacagtttagctcttgctcacaccggttctccaaggtgtactctagcagtgagttccttgccgtgcaacccacccctacattcgcggagcgcagttttagcgaagatcgcgaagaaggttgggagaggagcgaagtggactacggacggagattatctgcagacattaggctgcggagctggacttcttctggcagcagctgtcagagcagctcatcacagccagaaaggggtccatccccatccctcttaaacactatatcacttgatactatgccaaaattcgctttttctagcgaagatgagggagtggggccaggcccagccggtcctaagcggcctgtgtttatactgggagagccagatcctccccctgccgctactccagttatgcctaaacctagcagcttatctgcggacaccgccgctctctcacatgcgcgactccggtccaacagtatcggcgcacgacattcgacaccaaggcctctcgacgctggtaggggaagaagattaggcggacccagagatcccgctccagagaagtcccgcgcttccagctcgggaggttcgggaggcggttcaggaggacgcgtacctaaaagtgccagcgtcagtgcattatctctaatcataaccgccgacgatggatcaggcggacccctgatgagccctcttagccctcggtcactgtcttcgaatccttcttcccgggacagttcaccctctagggatccaagccccgtctgcgggagcctgaggcccccaatagtgatccatagctcggggaagaagtatggcttcagcctgcgggcaatcagggtatatatgggagattccgacgtgtataccgttcaccacgtggtgtggtctgttgaggacggctctcctgcacaagaagccggactccgcgcaggggatctgattacccatattaacggtgagtcggttctcggtttggtgcatatggacgtggtcgaactgcttctaaagagtggaaacaaaatcagtctgcggactaccgctctggaaaacacaagtatcaaagtgggccctgcccgtaaaaatgtagccaagggcagaatggctcggagaagcaagaggtcccggaggcgcgaaacccaggatcgccgaaaatctctgtttaagaaaatctctaaacagacatccgtattgcacacatcccgctctttttcctctggcttgcaccactcactgtcatcaagcgagtccttaccgggatccccaacgcacagcctaagtcctagccccactacgccatgccggtccccagcccctgatgtgccagccgacaccacggctagccctccatccgcttcacctagtagctcctctcctgcctcccctgccgcagctggacacactaggccaagtagcctacacggccttgccgctaaactcggtccacctcgccctaagactgggagacgtaaaagtacaagctcaatcccaccctcaccactcgcttgccccccaatatcagcgccacctccgaggtccccaagcccactccccggacatcctcctgcaccagctcgcagtcctaggttgcgcaggggacagagtgcagacaagctgggaaccggcgagcggctggatggtgaggccggtagacgcaccaggggcccagaggccgaacttgtggttatgcggaggctccatcttagtgagaggcgcgacagctttaagaagcaggaggctgtgcaagaagtttccttcgatgaaccccaggaggaggccacggggctcccgaccagtgtgccccagatcgctgtcgagggagaggaggccgtccctgtagccctcgggccaacaggtcgcgactag

SEQ ID NO: 230536 - DNA, 2523 bp, synthetic construct
  misc_feature 1..2523: note = Description of Artificial Sequence: Synthetic coding sequence
  source 1..2523: mol_type = other DNA
atggatccaaccgccggaagcaagaaagagcccggaggaggtgccgctaccgaggaaggggtcaaccggatcgccgtccctaaaccaccatcaatcgaggaattcagcatcgtgaagccgatttcacgaggagccttcggaaaagtctacctgggccagaaaggtgggaaactttatgcagtcaaagtcgtcaagaaagccgacatgatcaataagaacatgactcaccaggttcaggctgaaagggacgctctggccctatccaagtctcctttcattgtccacctctattactcgctgcagagcgctaataacgtctatctagtcatggaatacctcatcggaggagatgtcaaaagcttgctccatatctacgggtattttgatgaagaaatggccgtgaagtatattagcgaagtggcccttgcactggattacctgcacagacatgggataatccacagggacctgaagcccgacaatatgctcatcagtaatgaggggcatatcaaactgacagactttggcctttctaaggtcacgcttaatcgtgacattaacatgatggacattctgaccaccccgagcatggctaaaccgagacaggactattctcgcaccccaggccaagtgctgagtctcatttcctcactgggcttcaataccccaatagcagaaaagaatcaggaccccgctaatatcttgagtgcatgcttatccgaaactagtcaattatcacaagggttagtgtgccccatgagcgtggatcagaaagatacgaccccttatagcagtaaactgctcaaaagctgcctcgagacagtggctagcaacccaggaatgcctgtgaagtgcctgacttccaacttactgcagagcagaaaaaggctggccactagcagcgccagctcacaatcgcacaccttcattagctctgttgagtccgagtgtcacagctcaccaaagtgggagaaggactgccaggaaagcgatgaggccctcggtcccaccatgatgtcctggaacgccgttgagaaactctgcgcaaagagcgctaacgctatcgagactaaaggcttcaataagaaggatctagagctggcactgagcccgatacataactcatccgccttacccacgaccggacgcagttgcgtgaacctggctaaaaaatgcttttctggtgaagtgagctgggaggcggtcgagctggatgtgaataatattaacatggacacagacacaagccagctcggcttccaccagagtaaccagtgggccgttgacagcgggggtatcagcgaagagcacttggggaaacgcagcttgaaaagaaacttcgaactagtagattccagtccatgtaaaaagatcattcagaataaaaagacgtgcgtcgagtacaaacataatgaaatgacaaactgctacaccaatcaaaataccgggctcaccgtggaggtgcaggatctgaagttatccgtccacaagtcccagcagaatgactgtgccaataaagaaaacatcgtgaactcattcacagacaagcagcagacaccggaaaagttgcctattcctatgatcgcaaagaatctcatgtgcgaattggatgaggactgtgagaagaatagtaagagagactatctaagcagttcattcctgtgctccgatgatgaccgtgcctctaagaatatttccatgaacagtgattcctcattcccagggattagtatcatggagtcaccgctcgaatcgcagccattggatagcgaccggagcattaaggagagcagcttcgaagagtcaaatatagaggatcccctgattgtgacaccagactgccaggaaaaaacttcccccaaaggggttgagaacccagcggtgcaggaatctaaccagaaaatgctcggccctccactggaagttcttaagacactggcctctaagagaaacgcagtggcattccggtcgtttaactcccatataaatgcctctaacaattctgagcccagccgcatgaacatgacatctctggatgccatggatatcagttgcgcatactccggaagctaccctatggctatcacccccacccagaagcgtaggagttgtatgccacatcagacccctaaccaaataaagtctggcaccccctaccgcacaccaaagtcagtacgcaggggggtggccccagtggacgacgggagaatcctggggacccctgattatctcgctccggaactgctgttaggccgagcgcacgacatcccgtggccagagggggaggagaaactgagcgataatgcccagtctgccgtggaaattcttctgaccatcgacgatacaaaaagagctgggatgaaggaactgaaaaggcatccactgttctcagatgtggactgggagaatctacagcaccagaccatgccattcattcctcagccggatgacgagaccgatacaagctacttcgaagccaggaatacggcgcaacacctaacagtgtccggctttagtttgtag

SEQ ID NO: 230537 - DNA, 2640 bp, synthetic construct
  misc_feature 1..2640: note = Description of Artificial Sequence: Synthetic coding sequence
  source 1..2640: mol_type = other DNA
atggatccaacagccggatccaaaaaagagccaggtggtggagccgctacagaggaaggagttaatcgcatcgcagttcctaagcctccctccattgaggagttcagcatcgtgaagccaatcagcagaggagcctttggtaaggtttacctcgggcagaaaggagggaagctgtatgctgtgaaagttgtgaaaaaagccgacatgataaataaaaatatgacgcaccaggtgcaagcagagcgggacgcgttggccctgtccaagtcaccattcattgtgcatctctactattccttgcagtccgccaacaacgtctatctggtgatggagtatcttattgggggagacgttaagtccttgcttcatatatacggctatttcgacgaagaaatggcggtaaagtatatttcagaggtcgcccttgctttggattacctgcatagacacggtatcatccacagagacctgaagcccgataatatgctgatcagtaatgaaggacacatcaaactgaccgatttcggcctgagcaaggttacactgaaccgggacatcaacatgatggacattctcactacacccagtatggcgaagcctcgccaagattattctcggacccccggacaggtgctgagtctgatctcaagcctaggatttaacactccaattgccgagaagaatcaagacccagctaatatcctatctgcttgcctctctgagaccagccaactttcccaggggcttgtttgcccaatgagcgtggaccagaaagacaccaccccatactcaagcaaacttttaaaatcttgcctggagaccgtggctagcaatcctggcatgcctgtgaagtgtctgacctccaacttgctgcaatcccgaaagcggctcgctacttctagcgcctcatcccagtctcatacgttcattagctctgtggagagcgagtgccactccagccctaaatgggagaaggactgccaggaaagtgacgaggcgctgggcccaacgatgatgagctggaacgcagtggagaaactgtgtgccaagtcagcaaacgctatcgaaactaagggattcaacaagaaagacttagagctggccctttccccaattcataattcttccgctctacccacaacaggccgtagttgtgttaatttggccaaaaagtgtttcagtggtgaagtaagctgggaagccgttgagcttgacgtgaataatatcaatatggacactgatacatcccagctcggcttccatcagtccaaccagtgggcagtcgacagcggaggaattagcgaggaacatctgggcaagcgaagccttaaaagaaacttcgaactggtagactctagcccctgcaaaaaaattattcagaataagaagacttgcgtcgaatacaaacacaacgagatgaccaactgctacactaaccaaaataccggcctcacagtggaggtccaggatctgaagctctctgtacacaaatcccagcagaatgattgtgccaataaggaaaacatcgtgaatagctttacagacaaacagcagacaccggaaaagctacctattccgatgattgcgaagaacttgatgtgcgagctggatgaggattgcgaaaagaacagtaaacgcgactacttatcaagctcattcctttgcagtgatgacgacagggcctcaaagaacatcagtatgaattccgatagcagctttccaggcattagcatcatggaaagcccactcgagagtcagcccctggactctgacagatctatcaaagaaagcagcttcgaagagtcaaacatcgaggaccccctgattgtcaccccagattgtcaggaaaagaccagtccaaaaggcgtcgagaatccggctgttcaggaatccaatcagaagatgcttgggcctcctctcgaggtattaaagacactagcctcaaaaaggaacgctgtcgccttccggtctttcaactcccatatcaacgcaagtaacaacagcgagccaagccgaatgaatatgacctcgctggatgccatggatatttcctgcgcgtactcaggtagttatccaatggccataacaccaactcaaaagcgcaggtcttgtatgcctcaccagcagactcctaatcagattaagagtggaaccccctatcggactccaaagagcgtgcgcagaggagtcgcgcctgtcgacgatgggaggatcttagggacacctgattacctggcaccagagctgctgctgggaagggcccacggacccgcagtcgattggtgggccttgggcgtttgtttatttgaattcctcacgggcatcccacccttcaacgacgagacacctcagcaggtgtttcagaacatcctcaaacgcgacatcccctggccagaaggagaagagaagctgtccgacaacgcgcaatctgccgtcgaaattttgctgactatcgatgataccaagcgcgctgggatgaaggaattgaaacgacacccactcttttcggacgtcgactgggagaatttgcagcaccaaactatgccattcattccccaaccagatgacgagactgacacttcttacttcgaagctcgcaatacggctcaacacctaacagtcagcggcttttccctctag

SEQ ID NO: 230538 - DNA, 2637 bp, synthetic construct
  misc_feature 1..2637: note = Description of Artificial Sequence: Synthetic coding sequence
  source 1..2637: mol_type = other DNA
atggatcccacagctggatctaagaaggaacccggaggtggggcagccacagaagagggagtgaacagaattgctgtgccaaagcctccatccattgaggagttcagtatcgttaagcccatcagccggggtgccttcggtaaagtttatctcggacagaaaggcggaaagctgtatgcagtgaaggtcgtaaagaaagcggacatgattaataagaacatgactcatcaggtccaagcagagagggacgccctggctctgtctaaaagccccttcatagtgcacctttattatagtctgcagtcagccaataacgtgtatttggtgatggagtatctcattggcggagatgtgaagtctctgcttcacatatatggctacttcgacgaagaaatggcagtgaagtacatcagcgaggtcgcccttgccctggactatcttcatcgtcacgggattatccaccgcgatctgaagcccgacaacatgctgattagtaacgagggccatattaagttaactgacttcggtctctcaaaggtcacattgaaccgggatatcaatatgatggacatcctcaccaccccttctatggccaaacctcgccaagattacagtcgcacccccggacaggtgctcagtctgatttctagcttggggtttaataccccaatcgccgaaaagaatcaagatcctgctaatatcctgagcgcttgtttgtcggaaacatcacagctctcacagggtctggtgtgcccaatgtctgtagatcagaaagataccacgccctactctagtaagctgctcaagtcgtgcctcgagacagtggcctcgaacccagggatgcccgtgaaatgtcttacctctaacctcctgcaaagccgcaaacggcttgccacctccagcgcgtcatctcagtctcacacattcatcagctctgtggaaagcgagtgtcactccagccccaagtgggagaaggattgccaggaatccgatgaagccttgggcccaacgatgatgagctggaacgctgttgagaagctgtgtgcaaagtctgccaacgccatcgagactaaggggtttaacaaaaaggacttggagctcgccctcagtcccattcacaattcctctgccctaccaaccactgggcgatcctgcgtcaaccttgctaaaaagtgcttcagcggagaagtatcctgggaagccgtcgagcttgacgttaataacatcaatatggatacagacaccagtcagctgggcttccatcagtcaaatcagtgggccgtcgactcagggggaatctctgaagaacacctggggaaacgctccctgaagaggaactttgagcttgtggactcatccccgtgtaaaaagattatccaaaataaaaaaacctgtgtcgaatataaacacaacgaaatgacgaattgctataccaatcagaacactggactaacagtggaagtacaggacctgaagctgtccgtgcacaaatcccagcagaacgattgtgccaacaaggaaaatattgtaaattcatttacagacaagcagcagacacctgaaaagcttccaattcccatgatcgccaagaatctgatgtgcgaattagatgaagattgtgagaagaacagtaagagagattacctctcatcgtcttttctgtgctcagacgacgatcgcgctagcaaaaatatctctatgaacagcgattcttctttccccggaatatcaatcatggagtcgcctttggaatcccagcctcttgactctgatcggagcatcaaggagagcagctttgaggagagtaatatcgaggatcccttgatagttaccccagattgccaggaaaagaccagtccaaaaggcgtcgagaatccagccgtgcaggaaagcaaccagaagatgctaggacctcccctggaggtattaaagacactcgcgtccaagaggaatgctgtggcgtttcgaagcttcaacagccacattaatgcaagtaacaacagtgaaccgagtagaatgaatatgacttccctggacgcgatggatatctcgtgtgcctattcgggtagctaccctatggctattactccaacacaaaaacgtcgaagttgtatgccccaccagaccccgaatcaaatcaaatccgggactccatatcgaacaccaaaatctgtgaggcggggtgtggcacctgtcgatgacggtaggatcctggggaccccggactacctggcccctgagctgttattgggtcgggctcatggacctgcggtggattggtgggcactgggcgtgtgcctcttcgagtttctcaccggcatcccaccctttaatgacgaaaccccgcagcaagtgttccagaacatccttaaacgcgatatcccttggccggagggcgaggagaagctgtcagacaacgctcagagcgcagttgagattctgctgaccatcgatgacacaaaaagagcgggaatgaaagaattgaagagacatccactgtttagcgacgtggattgggagaacctgcagcaccagacaatgcctttcattccgcagccagatgatgaaaccgacactagctattttgaggcacggaacactgctcaacatctgaccgttagcggtttctccctctag

SEQ ID NO: 230539 - DNA, 17816 bp, synthetic construct
  misc_feature 1..17816: note = Description of Artificial Sequence: Synthetic coding sequence
  source 1..17816: mol_type = other DNA
atgcaaaagggtttgctcgaccaggacaccgggcttgtgctgctggagagtcaggtgattatgtcaggactgatcgcacccgagaccggcgaaaacctgtcacttgaggaagggatcgctagaaaccttataaacccacagatgtatcagcagctgcgcgaattgcaggacgcacttgctctcatctcacgactgactgagagcaggggacccctttctgtggtggaggccatcgagaagcgcatcatcagtgagaccgtaggcctgaagatcctagaggcccatctggcgacgggtggattttcgttgtctccctctgaaaactgcatcaatttggaagaggctttccaccagggcctcataagcgcctggctgcactccgttctggagagttatctgcgtacatccaagaatctcatcgatccgaacaccgctgagaaaatcgggttgctggacctgatgcaacgctgtatcgtgcaccaggaatccgggttcaaactgctgcccgttaaacagctggctgggggaatggtttcgctgaagagcggtcgaaaggtgtctatcttcagggccgtacaagagggtctcattgatcgtcaggtcactgtgcggctgttggaggcccagctgttcgctgggggaatcgttgatccccgaaccggccatagactcaccgttgaagaggctgtaaggcacaacttaattgaccaggacatggcatgcgccatccttattagacagttacaaacaggaggaattatagacaccgtgactgggcagagactgaccattgacgaggccgtgagcaacgacttagtggccgctaagatcgccctagtcattctggagtctttgtggagttttatggggctgctctggcctgaaagcggggaaatactgcctattaccgatgccctcgaacaaggcattgtgagcacggaactagcgcataaaatactctccaacagacagcacataaaggccctcttcctgcccgcaactacagaaatcctctcctggaagaaagcgattgaaagtgggatcctcgacagggatctcgccaacaacctgaagtcaatctgcattcctgacgttatgccgcacatgcagttagctgacagcgccgagcagaatatcaatccaggcgcagccgtgctgccttgttcaaagtcccatccaaaagccaccgcgtcccagtctgagaatctgttgtttcaactgatgacacactcttacattaacgtgcagaacggtcagaggctgctgctgttggataaagaactgatggagaccctgacgtctagggatgagtaccaaactagtccgcctaaggtggtggagatcggccaccagcggcagaagacccccgaaggcttgcaggaatccgctaacgttaaaatcagcggaacattttctagcgggtggactgtcaggctgcctgagttccaattcagctcccagaataaggaatatcctgatcgggaggattgcacaactgagaaaggcaagaaaacaaccgttgaaactgaggattcctccgttgagaatcccgagcaggatctgtttgttgagcagaaagagcggaaccccaatatcgatgccctgaaagtcattaataaagtgaagcttgaggttcaaagacaattgataggcactcagagagaagatcagaccgccgttagtgtgcgggaaaatgccagtcggggacatctattaacaattccacctgctgaagccgagggtgtccccctggtggtggataaagatgttttttccgttgagacccctaaaaaggaacatcagccccttagaaacacttcctttacgtgccagaatgagcaggcccacacgctagagacggagtatatccatgacgagaccgggggatcccatatcaaacctcaaagtaaaaaactacaagtacaagttaaaaaaacacttggcatcaagctcgaactcaagtcagagaccgatggtaacgtacaccccttggataagaaagaaatgctgaagaaaactttcctggccaaggatgatcacaaagaatcacaggaagcccaaaacattgctggtggcagcatgatgatgtctgaaaagacagatgaggaagattccggcagagaaatctttctatcatgttctcacccgctcgagctgctagaggaagctactctcaatgttttatctgcgcagctcctggatgggggtatttttcacgaacagactggacagaagctcctgctgaacgaggccatttcacgcggtattgttccctctcacaccgcggtcaagctgatggagaaactgaacatgttccagggcttctttgactcacagacctgtgagtcactcacaaccgaagaagtgatcaatgaaggtttgatggatgaaaagctgctgcataacgtactgatggctgacaaggccatctcaggtgtactggacccacgaactcagactctgtgttccgtgaaagacgcagtcacggtcgggctcctggataaagaaaccgccaccagaattctggagaggcaggtggtgacaggtggaatcattgatctcaagcgcggaaaaaaagtctccgtgacgctggcttccacgctgggactggtagatgttgcagatcaacctgagctgattaatctggagaaagcatctaaggggagggatgcggagaagaccgttcgcgagcgattgattagtttgcagatggagacaactggactgattgaccccgattctaaggccccactgacagtcgtccagtcaatcgatagggggctcttggagcgcgaagaagccgtgcgtttgctgacaaagcaggtagtggacggtggtattatccaccacatctccgggatgcggctatctgtggacaatgcatttcgacatggactgatcggggaagacctcgccgaaaagttgaagagagtggagaatctcaatatccaccaaatttttaaccctgaaactaaagagaacatttctttgcctaaagcaattaagctggatcttattacatctgatctcaagcgcgagatacaggaagttcaagctttcacggggaacttcgtagatctcatctcaggacagcggcttactctggctgaggccaagaaagaaggccttctgacgaacgaggccgttctttccccaggtatgatgcacggaattgtggacccagagaattgtcgcattgttccctactccgaactggttaaaaagtgcaagatagatatagagagcggccagaggtatctggaggtgatccccttctctgatattaaggacggagtgtctgataaggtgctaactctatcccaggctatccaattggggaaagtcgatttcgcctcaaccttgaaggtcctggaagcccaagcaaacaccggcggtatcattgacactgctactgggaagagattgaccttagctagcgcccttgaggagaagctcgtggatgaaaacatggttcggattattgcctctcatcaagtgttgaacggtgggattgtggatatcttttccgaccagcgggtgaccctcgtggaggcaattgagaaacgcctgatttccccggaactagccaatatgatccagattgacagctcagaattttccgaccacagggcacagattgagaagcaggagggcatcgaggtttgcgccctccaaaacgagttccttggcaaagatatgcttattgcctgtaatcagacagctgaaatgtcatgcaacaaagtggaggagtctgaacgcctgttccaggtcgagaatcagagcgcccaggaaaaggtgaaagtgcgcgtgtccgatggcgagcaggccaagaagtccagggagatttccctgaaggagttcggatgcaaagatcagcgcaagccgaggatgagttctgacgccaaagagtttattagcattatcaacccacataatctgaaaggaaaaagtctggggcaggtttctctgacacacccctacagcgaatgcgatttcaaactgaaggaggtcgcgaggaataacatgggtaacgacaccaacgaagagcaagagaaggctgtgaccaaaattgaaataatctcccatatgaaacaaagcaccagctgcctggattcagaagagatccgcgagaaccaaggagaagtgatactggaggttcaggagacttattgtgaaacaagtgggaagctcccaagtgaacaggtgttgcaacaacctatgaacgcccgtgtgaaatccaaaagggagaaaagggaggtaattgtggaagagtcaattaggacttgtaaaccagccttcctcagcgaagagaagctgtaccaggaaactgcaattcgagacgagcacgattcacatattaagagccaaccgagagagatgacatcttcagaaaagggaaaagaagccgataccgagatgggattcagcataacgttcaagatcgaggagtccagtagtcaggtggtcccccagggcatcagcgtaaagcacttagacgccctcactctgttctcctccaagcaggcaaacgaggggaaagtgaataacctgagtctgtgtttgacacttaagccagaggagaacctgagtcgcgagatcgcctgtggggctcagtctgagcctttcccttgtatgacgccccgaccagaggggcttcactatcaggaatccgacggaaaggcccaggtgacaggccctagtcagatcagcaagacagacaaatcattccagggaacaacacgccaggagactaactaccaggactcttgggtcacatctaagaccaaagagaccaagcaccaaatctcaagcagtaatgagtgcaaagagaaatcctatcaggaggtgtcttttgatccggcaagaggcttgaagctcgaagaaataacagtctcccgcccagattcaaaagaagtgaggtatctggagttcagcgaccggaaggacctgcaccatcagggaagcaagtccgatgataaactgtgcgggactctcaagtcagagatagctactcaagagctgacaggagagaaatttctggagatggctaatccgaatgttgccggacttgaggctggttcaattgaggacatagtaacccagcgagggtcccgcgtgctgggatctttcctcccagagaaactgttcaagggcgtgtctcagaaagagaacaccggacaacagaatgcgattattagtccaactgttctggaaacctcggaagagaaaactgtatccttgactgtttgctcagcagtgaagacggaaaaaacaccacaggaaaaactccgcgagtcccccggttccgaacaaacaccatttatgacagccccagaagggaaggggaacggtggtgtcaatcctgagcccttccgcgcaacacagaacgtttttaccaggcagctatgcctcgagcacgacgagaaactggtgtcctacctctccctacttcggaacatcgaaatgaggacgaagcagattcagcccctcgaactcaaccttgccgagttgcaggacttgctttgccaggccaaagtgctggaaagggaactgaaagacctaacaactctggtctcccaggaactagagtgtgtaaaccagatcataatttctcagccccaggaagtgcctgcacagttgctgaaggctctcgagaaggacgccaaaaaccttcagaagtctctatcaagtgtgtcagacacctggaattctagactcctgcattttcaaaacgcggtggaaatcgagaagacaaaagtgttaaaccagcacacacaattagaggggaggttgcaggatcttcgagcctgggtgggcaacaagaacctgattctcaacagcaaagggtcaaactcagaaatcgacgtggactctctgaacctttgcctccagcaatatgaggatttaaagcaacccatggctgagcgcaaggcccagctggacgccctggccttcgacattcaattcttcatctcagaacatgctcaggacctgtctccccagcaaaacaggcagatgctgcgtctattaaacgaattgcaacggtcttttcaggacattctggagcagacagctgctcaagtagatgcgctgcagggtcatctgcagcagatggagcaggaggccttggtgaaaaccctgcaaaaacaacagaatacctgtcatcagcagctagaagacctgtgttcttgggtggggcaggccgagcgcgctctggcaggtcaccaggggaggaccacacagcaggatctaagtgcccttcaaaaaaaccagagcgacctgaaggacttgcaggatgacattcaaaaccgcgcaacttcctttgctacagttgttaaagatatcgaaggattcatggaagaaaatcagacaaagttaagtcccagggagttgaccgcattgcgagaaaagcttcaccaggccaaggaacaatacgaggcgctgcaggaggaaactagagtggcccaaaaggagcttgaggaggctgtgacatcggcactgcagcaggagacggaaaaaagcaaagcagccaaagaactggctgaaaataaaaaaaaaatcgatgccctgctggattgggtgacatccgtgggatcttctggagggcagctgctgactaatctacctgggatggaacagctgtccggagctagcctcgaaaaaggagcactggatacgaccgacggttacatgggggtcaatcaggccccagagaaattagataagcagtgcgaaatgatgaaggcaaggcatcaagagttattatcccaacagcagaatttcattctcgccacacagtctgctcaggctttcttagatcagcacgggcacaacctgacccctgaagagcagcagatgttgcagcagaagctgggggagctgaaggagcagtacagcactagtctggcacagtccgaagcagaactgaagcaggtacagacgctgcaagatgagttacagaagtttctgcaggaccacaaggaattcgaatcctggctcgaacgatccgagaaggagctcgagaatatgcataagggcggtagttctccagaaacactgccatcccttctcaaaagacagggcagcttttctgaggatgtgatctcacacaaaggcgatcttcgattcgttaccatttcgggtcagaaagtactagacatggagaactccttcaaggagggcaaggaaccttcagagattggtaacctggtgaaagataagctcaaggacgccaccgagcggtatactgcattgcactcaaagtgcacgcgcctgggcagccacctgaacatgctccttggacagtaccaccagttccaaaattctgctgattctctccaagcatggatgcaggcttgtgaggccaatgtggagaaactgctatcagatactgttgcctcagatcctggcgtgctacaagaacaattggccacaactaaacaattgcaagaggagttagccgagcatcaggtgcctgttgaaaagctgcagaaggtagctcgcgacatcatggagattgaaggcgaacctgccccagatcaccgacacgtacaggagactacagactcaatcctgtctcacttccagagccttagctattccctggccgagagaagttcattgctccagaaagcaattgcccagtcccagtccgtgcaggagtctctggagtctctgctgcagtcaataggcgaagtggagcagaacttagaaggtaagcaggtgtctagtttatcttctggcgtaattcaggaagctctcgctaccaatatgaagcttaagcaagatatagcccgtcagaaatctagcctcgaggctactcgtgagatggtgactagattcatggagaccgccgacagcaccaccgccgcagtgttgcagggaaagttggcagaagtttctcagcgatttgagcagttatgtctgcaacagcaggagaaggagagcagtctcaaaaaactattaccacaggccgaaatgttcgagcacctgtctggcaaactccagcagttcatggaaaataaaagtcgaatgctggcttccggcaatcagcctgatcaggacatcactcatttcttccagcagatccaagagctgaatctcgagatggaggaccagcaggaaaacctggatacactagaacacctggtcaccgagctgagctcatgcggctttgccctggatctgtgccagcaccaagatcgggtgcagaacctcaggaaggactttaccgaactccagaagacagttaaggaacgtgaaaaagatgcgtcaagctgtcaagagcaattggatgaattccgtaagttggttaggaccttccagaagtggctgaaggaaaccgaggggtcaattcctcccactgagacgtcgatgagtgccaaagagttggaaaaacagatcgagcatctcaaaagtctgctggacgattgggcctcaaagggaaccctggttgaggagatcaactgtaaaggcacgtccctagagaacctcattatggaaatcactgccccagacagccaggggaaaaccggctccattctgcccagcgtgggttcgagcgtgggcagcgtaaacggctatcatacctgcaaggatctgacagagattcagtgcgatatgagcgatgtcaacctgaaatatgagaagctggggggagtgctacacgagaggcaagaatccttacaggccattcttaatcgaatggaagaggtacacaaggaggccaactcagtgctgcagtggttagaaagtaaggaggaggtactgaaatctatggacgctatgagtagccctaccaagacggagacggtgaaagctcaggcagaatctaacaaggcctttctggccgaactggagcagaacagtccaaagattcagaaagtaaaggaagccttagctgggctgctggtaacctaccccaattcacaagaagctgagaattggaagaagatccaggaagagcttaattctcggtgggagagggcaactgaggtgaccgtggccaggcagcggcagttagaggagtcagcatcacatctggcttgctttcaggccgctgagagtcaactcagaccctggctaatggagaaagaacttatgatgggcgtacttgggcctctttccatcgaccctaatatgctgaatgcacagaagcagcaggttcaatttatgctcaaagagtttgaggcaagaagacagcagcacgaacagcttaacgaggcagcacagggtattctcacgggacctggtgatgtctccctgagtacatcgcaagtgcagaaagagttgcagtccatcaatcagaaatgggtggaactgaccgacaaattgaacagtcgctccagtcagatagatcaggccattgtcaaaagtacacagtaccaggaactgctgcaggacctctcagaaaaggtccgagccgttggccaacgactttccgtgcagtctgctatttccacacagcctgaagcagtaaagcagcagctggaagaaacctccgagatcagatctgacttagaacagttggatcacgaagtgaaggaggcccaaacactctgtgatgagctctccgtactaattggtgaacagtacctaaaagatgaactcaagaagaggctggaaacagtggccctcccacttcagggattagaggacctggcagcagaccggatcaaccggcttcaagcggcactagcctccacgcagcagttccagcaaatgttcgatgaactgagaacatggctggatgacaagcagagtcaacaggccaaaaattgccccataagtgccaaactggagcggctgcagagccagctgcaggagaacgaggagtttcagaaatcccttaatcaacactcggggtcatatgaggttatcgttgctgagggggagagtcttctgctcagcgtccctcccggtgaggagaagcggaccctccagaatcagctcgtggagctgaagaatcattgggaggagctttccaaaaagactgccgacaggcagtcccgcttaaaggattgtatgcaaaaggctcaaaagtatcagtggcatgtggaagacctggtgccttggatcgaggattgtaaggctaaaatgtccgagctgagagtcaccctggacccagtgcagctggagagcagtttactaagatcaaaggctatgctaaacgaagtcgagaaaagacggtcactcctcgagatcctcaacagcgcggctgatatactgatcaattccagtgaggccgatgaggatggcatccgggatgaaaaagctgggatcaaccagaacatggatgctgttactgaagaacttcaggctaaaacaggtagcctggaggagatgacacaacggcttcgcgagtttcaggagagtttcaagaacatcgaaaaaaaagtggagggtgcaaagcaccagcttgagatctttgacgccctggggtcccaagcatgtagcaacaagaatctagagaagctgcgcgctcaacaggaagttttgcaggccctggaacctcaagtggactatcttaggaatttcacacagggcctggttgaagacgctcccgacggttccgacgcctctcaattgctacaccaagcagaggtcgcccagcaagagttcctggaggtgaaacaaagggtcaacagcggctgcgtcatgatggaaaataaactggaaggcatagggcagtttcactgtcgagtacgtgagatgttctctcagttggcagacctcgacgatgaattggatggaatgggggctatcggacgggatacagacagtctccaatcgcagattgaggatgtgcggctgtttttgaataagatccacgtactgaaactagacatagaagcatcagaggcagaatgccgtcacatgttagaggaggagggaaccctagatctgctgggactgaagagagaactggaagctttaaacaaacaatgcgggaaactgacagagagaggaaaagcgagacaggaacagctagagcttacgcttggcagggtagaggatttttataggaagctgaagggactcaacgatgcgaccaccgccgctgaggaggcggaagctctccaatgggtggtgggcactgaagtcgagattatcaaccaacagcttgctgatttcaaaatgtttcaaaaggagcaagtggatccactacagatgaaattgcagcaggtgaacgggctgggtcaggggctgattcagtccgcgggaaaggattgtgacgttcagggcttagaacacgatatggaagaaatcaatgccaggtggaacacgcttaacaagaaagtcgctcaaaggatcgctcagctgcaggaggccttgttacattgcgggaaattccaggatgctttggaacccctcttaagctggctggctgatacagaagaactgatcgcgaatcaaaaacccccatccgccgaatataaagttgttaaagcccagatccaggaacaaaagctgctgcagcgtcttttggacgaccgcaaggcaacggtggacatgctccaggccgagggaggacggatcgcacagtcagccgagttagctgatagagaaaagatcacgggccagctcgagtcactggaatcacggtggacagagctcctgagcaaggcagctgcccgacagaagcaactggaagatatcctggttctcgccaagcagtttcacgagactgccgagcctatctcagatttcctgtccgtgaccgaaaaaaagctggcaaattccgaacctgtaggaacccagaccgctaaaattcagcaacagatcatcaggcataaagccctggaagaagatatcgaaaaccacgcgaccgatgtgcaccaggccgtgaaaatcggccagtctctcagcagcttgacaagtcccgcagagcagggcgtcctgtcagaaaaaatcgattctcttcaggccaggtattctgagattcaggatcggtgttgcaggaaagccgcactgttggatcaagccctcagcaatgcgcgtttgttcggagaagatgaagtggaagtgcttaattggttggcagaggtcgaggacaaactaagctcagtctttgtgaaggatttcaagcaagacgtcttgcaccgtcagcacgcggatcacttggctttgaatgaggaaattgtgaatcgcaaaaaaaacgtagaccaggccattaagaatggacaagcactgctcaagcagactaccggcgaggaagtgttgctgattcaggagaagctagatggcattaaaacacgatatgcagacatcaccgtgacttcctccaaggccctaaggacactcgagcaggccagacagctggctacaaaatttcagagcacatacgaagagctcacaggatggctcagggaagtggaagaagagctagccacttcaggaggccagagccccaccggtgaacaaattccccagttccaacaaaggcagaaagagctgaagaaggaggtcatggagcatcggttggtgcttgacaccgtgaacgaggtgtccagggctctgctagagctggtgccttggcgagccagagaggggctggacaaattggtgtcggatgccaacgagcagtacaagttagtgagcgacacaatcggccagcgagtcgacgaaatcgatgcagcaattcagcgctcccagcagtatgagcaggccgcagacgcagaactcgcatgggtggcagagaccaagcgaaaactgatggctctcgggccaatccggttggagcaggaccagaccactgcacagctgcaggttcagaaagccttttcgattgatatcattaggcacaaggattcgatggacgagctgttttctcatcggagtgaaatcttcgggacttgcggcgaagagcagaaaaccgtcctgcaagaaaaaacagaatcacttatccagcagtacgaggctatatctcttctgaacagcgaacgctatgcacgtctggaaagggcccaagtgctcgtcaaccagttctgggagacctatgaagaacttagcccctggattgaggagacccgggcactgatcgcccagttgccttcccccgctatagatcatgaacagttgagacagcagcaagaggaaatgcgccagcttcgggaatcaattgctgaacacaagccacatatcgacaaacttctgaaaatcgggccacagctcaaggagctgaaccccgaggagggggagatggtggaggaaaagtatcagaaagccgaaaatatgtatgcccaaattaaagaagaggtgcgtcagagggcattagcacttgatgaggccgttagtcagagcacccagatcaccgagtttcatgacaagattgagccaatgctggaaacactggagaatcttagctctaggctgcgcatgcccccattgatacctgccgaagtcgataaaattagggaatgtatctctgacaataaatccgccactgtagagttggaaaaactgcagccaagttttgaagcccttaaaagacggggagaagagttaattggaagatctcaaggggctgacaaggacctggcggctaaagagattcaagataaattagaccagatggtgttcttctgggaggatattaaggccagagcggaggaaagagagattaaatttctggacgtcttggaactcgccgagaagttctggtacgacatggctgcgctccttacaacaattaaggacacccaagacatcgtccacgatctcgagtctccaggcattgatccaagcattatcaaacagcaagtggaagcagccgaaacaattaaagaagagactgacggtttgcatgaggagctggagttcattcgaatactgggagccgacctcatcttcgcttgcggggagacagagaaacctgaggtccggaagagcatagacgagatgaataacgcctgggagaatcttaacaagacctggaaagaacgcttagaaaagctagaggacgccatgcaggccgcagtgcaataccaggatactcttcaggccatgtttgattggctggataacacggtcataaagctctgtaccatgcctccagtgggcacagatttgaacaccgtcaaagaccagttgaatgagatgaaggagttcaaagtggaggtgtatcagcaacagatcgagatggaaaagctcaaccaccagggagagctgatgctgaagaaggctaccgacgaaacggatcgtgacatcattcgcgagccgctcaccgagctgaagcacctgtgggaaaacctgggagaaaagattgcgcatcgacagcacaagctagagggcgctttacttgcgctaggacagtttcagcatgcactggaagagctgatgagctggctcactcacaccgaagaactgttggatgcccagcgaccaataagcggcgaccccaaggtcattgaagtagagttggcgaagcatcacgtgctcaagaatgatgtcttggcgcaccaggccaccgtagaaaccgtaaacaaagccggaaacgagcttctggagtcctcggccggtgacgatgcatccagcctgcgatctaggctggaagcaatgaaccagtgctgggagagtgttttgcagaagaccgaagagcgggaacagcagttgcagagcacacttcagcaggctcagggctttcactcagaaatcgaggactttctcctcgagcttacacgcatggagtctcagttgagcgcctcaaaaccaaccggcggtcttccagaaacagcccgagagcagctggatactcatatggaactgtattcgcagctcaaagctaaggaagagacctacaatcaacttctagataaaggcaggttaatgctgctgtccagagacgactccggttcaggtagtaaaacggaacaatccgtggccctgctggagcaaaaatggcatgtggtgtccagcaaaatggaggagagaaagagcaaattggaagaggccctcaacctcgccactgagttccagaactccctgcaggaattcattaattggctaactctggccgagcagtctctgaatatcgccagcccccctagtctgatcctcaatacggtattgagccaaattgaggaacacaaggtgtttgccaatgaggtgaacgcccacagagatcagattatcgagctcgaccagactggtaaccagctgaagtttctttcccagaaacaagacgtggtgttgatcaagaatctcctcgtgtccgtgcagtctcgctgggaaaaggtcgtccaacgctccattgaacgcggacggtcattagacgatgctcgcaaaagggctaagcaattccatgaggcctggaagaagctgatcgattggcttgaggatgctgagtcccacctggatagcgagctggagatctctaatgatccggataagatcaagctccagttgtccaaacacaaggaattccagaaaacattggggggaaaacaaccagtctacgataccactattcgtacaggtagggcactaaaagaaaagacactgctacccgaagactctcagaaattagacaacttcctcggagaggtccgggacaaatgggataccgtttgtggcaagtctgtggagagacagcacaagttagaagaagccctgctcttttccggacaatttatggacgcactgcaagctttagtcgactggttatataaagtggaacctcaactcgccgaagatcagcccgtccatggggacctcgaccttgttatgaacttgatggacgcccacaaggttttccagaaggaactgggaaaacgcacgggaactgttcaggttctcaaacggtccggtagagagctaatagagaactctcgggacgatacaacctgggtgaaggggcagttgcaggagctgagtacccggtgggacactgtgtgcaaactgagcgttagtaagcagtccagactggaacaagctctgaaacaggcggaagtcttccgcgacacggttcatatgttgttagagtggctgagcgaggccgagcagactctgagatttcgcggagcactacctgacgataccgaggccctgcagagtctgatcgatactcataaagaattcatgaagaaggtggaagagaagagagtagacgtcaactctgccgtggccatgggggaggtcatcctggcagtgtgtcaccccgactgcataacgacaatcaaacactggatcaccatcattcgggctagattcgaagaggttctgacctgggccaaacaacatcagcaacgcctcgagactgcgctgtcagagcttgttgcaaacgctgagttattagaggagctattggcgtggatccaatgggcggaaactactctcatacagcgggaccaggaacccattccacagaacattgacagagtcaaagcactgattgctgaacaccagacatttatggaggagatgacgaggaaacagcccgatgtagacagagtgaccaaaacttacaagcgcaagaatattgaaccgacgcatgcacccttcattgaaaagtctaggagtggaggcagaaagtctctgagtcaacccacaccacctccaatgcccatcctcagtcagtccgaagccaagaatccacgcattaatcaactgagtgcacgctggcagcaggtatggcttttagctttggagcggcagcgtaagctgaatgacgcactggacagactcgaggagctgaaggaatttgccaatttcgattttgatgtgtggaggaaaaaatacatgaggtggatgaaccacaagaagagccgggtgatggacttcttccgaagaattgacaaggatcaggacggtaagatcacaaggcaagagttcattgacggaatactggcctcaaagtttcctacaactaagctggaaatgacagccgtagccgacatattcgaccgcgatggagacggctatattgactactacgagtttgtggctgctctccatcctaacaaagacgcgtaccgcccaacaactgacgcggataaaattgaggacgaggtaacccgtcaggtggctcagtgtaagtgtgccaagcgatttcaagtggaacagatcggagaaaataagtataggttttttctaggaaatcagttcggcgactcacaacagttacgcctcgtgagaattctccggagtacggtcatggtccgagtgggaggtggatggatggctctagacgagtttctggtaaagaacgacccttgccgggctagaggaaggacaaacatagagctgagagagaagtttattctcccagagggtgcttcccaggggatgacccccttccgatctcgcggaagacggagcaaacccagttcgagggccgcaagtccaactcgaagcagctcctccgctagccagagcaatcatagttgtactagtatgccctcttcccctgctacacctgcttcgggaacaaaggtgattcctagctcaggatccaagctgaagagacccactccaacctttcactcaagtagaacgtccctggctggggacacttccaattccagcagccccgcttcaacgggcgctaagactaaccgcgctgatccgaagaagtctgctagcaggccaggctccagagccggtagccgcgcaggatctcgtgcctcatcccggagagggagcgatgcctccgacttcgatctgttggagacacagagtgcttgctccgacacttccgagtcctcagctgccggagggcaggggaatagtagaaggggcctgaacaagccctcgaaaatccccaccatgtctaagaagacaactaccgcttccccccgaacacccggaccaaagcgcta

SEQ ID NO: 230540 - DNA, 16293 bp, synthetic construct
  misc_feature 1..16293: note = Description of Artificial Sequence: Synthetic coding sequence
  source 1..16293: mol_type = other DNA
atgagcagctcagacgaggagacgctgtccgaacgttcatgtcgcagcgagcggtcatgcagatctgaaagaagctaccggtcagaacgttcgggaagtctgtcaccatgtcccccaggggatactctgccctggaacctcccactccacgagcagaagaaaaggaaatcacaagattccgtactcgatccagccgagagagctgttgtgagagtggcagacgaaagggacagggtgcagaaaaagactttcaccaagtgggttaataagcatttgatgaaggtccgtaaacacatcaatgacctgtacgaagatctgagggacggtcacaacttgatctctctgcttgaggtgctcagtggcatcaagctgcctagggagaagggacggatgcgatttcatcgactgcagaacgtgcagatcgcgctcgacttccttaagcagcgccaggtcaagctggttaatattcggaatgatgatatcacagatgggaatcctaagctgaccctggggcttatttggaccataattctgcactttcagatctctgatatctacattagcggcgagtctggggatatgtcagctaaagaaaaattactactctggactcagaaagtgacagctggatataccggtatcaagtgtactaactttagcagctgctggagcgacgggaaaatgtttaatgcactgattcatagataccgtccagaccttgttgacatggagcgtgtgcagattcagtctaaccgagaaaacctcgaacaagcctttgaggtggccgaacggcttggcgtaacaaggttgctggatgctgaagatgtcgacgtgccttccccagatgagaagagcgttatcacatatgttagttctatttatgatgcctttcctaaggtgcctgagggtggagagggtatttctgcaactgaggtggatagtagatggcaggagtaccagtctagggtagatagcctaatcccttggattaagcagcacacaatcttaatgtcagataagactttccctcaaaaccctgttgagctgaaggcactgtacaatcagtacattcactttaaagagaccgagattttggctaaggagagagagaaaggcaggattgaagaattgtacaagctcctggaagtatggatcgagttcgggagaatcaagttaccgcaggggtatcatcccaacgacgtagaagaagagtggggcaaactgattatcgaaatgctggagcgcgagaaaagtttaagaccagctgtggaacgtctcgagctgttgctgcagatcgccaataagatacagaacggtgcacttaactgtgaagaaaaacttaccttggccaaaaacaccctgcaggctgatgccgctcatctcgaaagtggacagccagtccagtgtgaatctgatgttattatgtacatccaagaatgtgagggcctgatacgtcagttacaggtggacctgcagattctccgggatgagaattattaccagcttgaggaactggcgtttcgggtaatgaggctgcaggacgagcttgtaactctgcggctcgagtgcacaaacctgtaccggaagggtcactttacctctctcgagctggtcccgccatcaaccttaaccaccactcacctcaaggcagagcccctgaccaaggcaactcacagttcctccacaagctggttcaggaaacccatgacacgtgctgagttagtagcgatttccagctctgaggacgaaggcaatctcagattcgtctatgaacttctgtcatgggttgaagagatgcagatgaagttggagcgcgcagaatgggggaacgacctaccatctgtcgagctccagctggaaacacagcagcatatacatacctccgtggaagaactgggttcctctgtgaaggaagcccgactgtacgagggcaagatgtcccaaaactttcatacatcttacgccgagacattaggcaagctggagacccagtattgcaagcttaaggaaacaagttccttccgaatgaggcacctccaatcactccacaagttcgtgtctcgggctaccgccgaactgatttggctgaatgaaaaagaagaggaggaattagcttacgattggtccgataacaacagtaacatttccgctaagagaaattacttctccgagctcaccatggaactggaagagaagcaggacgtgttcagatcattgcaggacactgccgaactgctcagtttggaaaaccatccagcgaaacagaccgtcgaggcttattcagccgctgtacagtctcagctacagtggatgaaacagctctgtctgtgcgtcgagcagcacgtgaaagagaatacagcatattttcagttcttctcagacgcaagagaactcgaaagcttccttcgaaacctgcaggacagtataaagcgcaagtattcatgcgaccacaatactagcctgagccggcttgaggaccttctccaggacagcatggacgagaaagagcagcttatccaatctaagagcagcgtagcttccttggtgggcagaagcaagaccattgttcagttaaagccaagatcccctgaccatgtgttgaaaaatacaattagtgtcaaagctgtgtgcgactatcggcagattgaaatcacaatctgcaagaatgacgagtgcgtgctagaggacaactctcagcggacgaaatggaaggtgatttctcctacaggtaacgaagcaatggtaccatctgtgtgctttcttatcccaccgcctaataaggacgctattgaaatggcttctcgagtggaacagagctatcagaaagtcatggctctgtggcaccagctgcatgtcaatactaaatccctgattagctggaattacctgcggaaagatctggatctggtgcagacatggaatctggaaaagctacgttcgagcgcgcctggcgagtgtcaccagatcatgaagaatctccaggcacactacgaggattttctgcaggattctcgcgattcggtcctgttcagtgtagcagataggctacgccttgaggaagaggttgaggcctgcaaagcaaggtttcaacatttgatgaaatcaatggaaaacgaggataaggaggaaacggtcgcgaagatgtacatctccgaactcaagaacatccggctgcgcctggaggaatatgaacagagagtggtgaagcgtatccagagtctagctagctcgaggaccgatagagatgcgtggcaagacaatgctcttcggattgctgagcaggagcacacacaggaggaccttcagcagctgagatctgacctcgacgctgtcagcatgaagtgtgacagtttccttcatcagtccccatcctccagcagcgttccaactctcaggagcgagcttaatcttcttgtggagaagatggatcatgtgtatggcctgagcactgtttatctgaacaagctgaaaactgttgacgtaattgttaggtccattcaggatgcagagctcctcgtgaaaggctatgagatcaagctgtcccaggaggaggtggttttggccgacctcagtgccctggaagcacactggtccaccctgcgtcattggctgtccgacgtaaaggataaaaactccgtgttttctgtgctcgatgaagagatcgccaaagctaaagtggtcgccgagcagatgtctcgactcactcccgaacgcaaccttgatctagagagatatcaggaaaagggcagtcagttgcaggaaaggtggcaccgcgttatcgcccagttggaaattcggcagtccgaactcgaaagcatccaagaagtgcttggggactatcgggcatgccatgggacattaataaagtggattgaagagacgacggcccaacaagaaatgatgaagccaggacaagcggaagattcaagagttttaagtgaacagctgtctcagcaaactgcccttttcgccgagattgagcggaaccaaacaaagcttgatcagtgtcaaaagttctcgcagcaatattcgactattgttaaggactacgagctgcaactgatgacatataaagcattcgtcgaatcccaacagaaatcacctggaaaaagaaggcggatgctgtcgagctccgatgccataactcaggaattcatggatttacgtaccagatacacggctctggttactctgactactcagcatgtaaagtatatctcagacgctctgcggcgtttggaggaagaagaaaaagtggtcgaagaggaaaaacaggagcacgttgagaaggttaaagaactcctcggttgggtctcaacacttgcacgcaatacccagggcaaagccacctcttcagagactaaggagagcaccgacatcgaaaaagccattctggaacagcaggtactgtccgaggagcttacaacgaagaaagaacaagtgtcggaggcaataaagacaagccaaattttccttgccaagcatggccataaactgtccgagaaggaaaagaagcagatctcagagcagctgaacgcgctgaataaggcttaccatgacctgtgcgacggctccgccaatcagctgcaacagctgcagtcccagcttgcccatcagactgaacagaagacgcttcagaagcagcaaaacacctgtcatcaacagctggaggacttgtgctcatgggtgggccaagccgagagagccctcgctggtcatcagggcagaacgactcagcaggacctctcagccttacagaaaaatcagagcgacctcaaagacttgcaggacgacattcagaaccgggcaacttcctttgcgacagtagttaaagatatagagggattcatggaagaaaatcaaaccaaattgtccccaagagaattaacagccttgcgtgaaaagcttcatcaggctaaggaacagtatgaggccttacaagaagagactcgggtcgcacagaaagagctcgaagaagccgtaacttccgccttgcaacaggagaccgagaagtccaaagcagctaaggagctggctgagaacaagaagaagatagatgcactcctggattgggtcacgagtgtgggctcttcaggcggacaactgctcacaaaccttcctggcatggaacaactgagcggggcttcactcgagaagggtgccctggatacgacagatgggtatatgggggttaatcaggcccctgaaaagctggacaagcagtgcgaaatgatgaaggctagacaccaggagttattgtctcagcaacagaattttatcctggctacacagtccgctcaagcgttcttggaccagcacggccacaatctgacccccgaggagcagcagatgttgcagcagaaattgggggagttgaaggagcagtatagtacttccctggcccagtcagaggcggaacttaaacaagttcagaccttacaggatgaattgcaaaaatttctacaggaccataaggaattcgagtcctggctggagagaagtgaaaaagaactggaaaatatgcacaaagggggttcaagtcctgagaccttgccttccctactgaagcggcagggtagcttttctgaggacgtcattagccacaagggtgatctcaggttcgtgacaatatccggccagaaagtgctggacatggaaaattcttttaaagaagggaaggagccctcagaaatcgggaatctcgtgaaagacaaactgaaagatgcgacggagagatacactgccttgcattccaagtgcactagactcggctcccacttgaacatgctcctcggacagtatcaccagttccagaattcagctgactctctacaggcttggatgcaggcatgcgaggctaacgtggaaaaacttctaagtgacacagtggcaagcgaccccggagtgctccaggagcagttggctaccaccaaacagctgcaggaggagttagctgaacaccaggttccagtggaaaagttacagaaggttgctagggatattatggagatcgaaggggagccggctcccgatcacaggcatgtacaggaaaccacggactctatcctgtcacatttccagtctctcagctatagtctcgcagagcggtctagtcttttgcagaaggccattgcacaaagccagtcagttcaggaatccctggagtccttactgcagagtattggcgaagtcgaacagaatcttgagggtaaacaagtcagtagcttgtccagtggagtgatccaagaagccctggccactaatatgaaattaaagcaggatatagccaggcagaagtcctcccttgaagccactcgggagatggtcacccgttttatggaaacagctgattcaaccactgccgcagttctgcaaggcaaactggcagaagtatctcagcgatttgagcagttgtgtctgcaacaacaagagaaggagagctccttgaagaagctgctgcctcaggcagagatgttcgagcatctgtccggaaagttgcagcaattcatggagaacaagtcacggatgctggcttcaggcaaccaacctgaccaagatattactcattttttccagcagattcaggaacttaacctggagatggaggaccagcaggagaacttggatacactggagcatctagtgacagagctgtccagctgcggtttcgcactggatctctgtcaacatcaggatagagtacagaacctgcggaaggattttactgaactacaaaaaactgtgaaagagagagagaaggatgctagctcttgtcaggagcagttggacgagttccggaagctggtccggactttccagaagtggctcaaagaaaccgaagggtctattcccccaaccgagacatctatgtcagcaaaagagctcgaaaaacaaatcgagcacctcaaaagcctgctcgatgactgggctagcaaggggacactggtcgaggaaatcaattgtaagggaacttctctagagaatctcataatggagataaccgccccagacagtcaggggaaaactggtagcatcttgccttccgtgggcagcagtgtgggaagtgttaatgggtatcatacctgtaaggatctcacagagatccaatgtgatatgagtgacgttaatctcaagtacgagaaacttggcggagtgctgcacgagagacaggaaagcctgcaggccatcctgaaccgcatggaggaggtgcataaggaggcaaattcagtactacagtggcttgaatccaaagaggaggtgcttaagtccatggatgcaatgtcgtcccctacaaaaacagagacagtcaaggctcaggctgaaagtaacaaggctttcctcgcggaactggaacagaactcccctaaaatccagaaagtcaaggaagctctggctggactgctggtaacctatccaaactcgcaggaggccgagaactggaaaaagatccaggaagagctgaactctaggtgggagagagctactgaagtgaccgtggcaagacaaaggcagttggaggaatcagcatcccatctggcatgcttccaggcggcagagtcccagctcagaccctggttaatggagaaggagctcatgatgggggtcctcggaccccttagtattgaccccaatatgctgaatgcgcaaaaacaacaagttcagttcatgttgaaggagtttgaggctcgcaggcagcagcacgagcaactgaacgaggccgctcagggaatccttactggaccaggagacgtctctctcagtacgtcacaggtccagaaagagctccagtctatcaaccagaaatgggtggagctgaccgataagctgaacagccgatcttcccagatcgatcaggccatagtcaaatctacgcagtaccaagagctgttacaagatttatccgagaaggtacgtgccgtcggtcagaggctgagcgttcagagcgcgatttccacacagcccgaggccgtgaaacagcagctggaagagacctccgaaattaggagcgatttggagcaacttgaccacgaagttaaggaagcccagactttatgtgatgaactatccgtgctcatcggcgagcaatacctgaaggatgagttgaaaaagagacttgagaccgtggctcttcccctacaggggcttgaggaccttgccgctgatagaataaacaggttgcaggctgctttagcctcaactcagcagtttcaacagatgtttgacgagctgagaacatggttggatgacaaacagtcacaacaggcaaaaaattgccccataagcgccaaactcgagaggttgcagtcccagctacaggagaatgaggaattccaaaaaagcctcaaccagcactcagggtcttacgaggtgatcgtagcagagggtgagagtctactgttatctgtgcctcccggtgaggaaaagcgtacacttcaaaatcaattggttgaattaaagaatcactgggaggaactctctaaaaagacagcagacagacagtctcgcctgaaggactgcatgcagaaggctcaaaaatatcagtggcacgtggaggacttagttccctggatcgaggactgcaaggcaaagatgtccgaactgagggttactcttgaccccgtgcagttggaaagcagcctgctgagaagtaaggccatgcttaatgaagtggagaaaagacggtcccttcttgaaatattaaactcagccgcagatatcttgataaatagcagtgaagcagacgaagacggaatcagagatgagaaagcaggtataaaccagaatatggatgcggttaccgaagaactgcaggccaagactgggtcgctggaggagatgacacagaggcttagagaatttcaggaatcattcaaaaatatcgagaaaaaagtcgagggagccaaacatcagcttgaaattttcgacgccctgggtagccaggcctgctctaacaaaaacctcgaaaaactaagagcacagcaggaagtgttgcaggctcttgagcctcaggtagattaccttaggaactttactcaagggctcgttgaagatgcccctgacgggagtgacgctagtcaattgctgcatcaggctgaagtagctcagcaggagtttctggaggtgaaacagagggtgaattcaggctgtgtgatgatggaaaataaactcgaaggaataggccagttccattgtcgtgtgcgcgagatgttttcacagctcgcggacctggacgatgagctggacggtatgggagctatcgggagggatactgattccctccaatctcagattgaggacgttcgactgttcctgaataagatacatgtgcttaaactggacattgaagcatctgaggcagaatgcaggcatatgctggaagaagaagggaccctggacctattggggctcaagcgggaattagaggccctgaataagcagtgtgggaagctgactgagagaggcaaggcaaggcaggagcagttggaattgaccctcgggagagtcgaggacttctacagaaagctaaagggccttaatgacgctactaccgctgctgaagaagcagaggcccttcagtgggtggttggtacagaggtcgaaatcattaatcagcagttggctgattttaagatgtttcagaaggaacaagttgacccactccagatgaaactgcaacaggtgaatggcttgggacagggcttgatacaaagcgccggtaaggactgcgatgtgcagggactggaacatgatatggaagagatcaacgctcggtggaacacgctcaacaaaaaggtggctcaacgtatcgcacagcttcaggaggcccttctgcactgcggaaagtttcaagatgcactagaacctcttttgagttggctggctgatacagaggagttgattgccaatcagaaacctcccagtgccgagtataaagtcgtgaaggcccaaattcaggaacaaaaactgctacagaggctcttagacgataggaaggccaccgtcgacatgctgcaggcggaagggggtagaattgcacaatctgcagagctggcagatcgcgaaaaaatcacagggcagttggagtcccttgagagccggtggaccgagctattgagcaaggctgccgctcgccaaaagcaattagaagacatcctggttctggccaaacagttccacgaaaccgccgagccaatatcagactttctcagtgtgaccgaaaaaaagctggcgaatagtgagccagtcggaacccaaacagcaaaaatccagcagcagatcatccgtcataaagccttggaagaggacattgagaatcacgctaccgatgtgcaccaggccgtgaaaatcggccagtctctgtcaagcttaacatcccccgcagaacaaggagtgcttagcgagaagatagattcccttcaagccaggtactctgaaatccaggatcgatgctgtcgaaaagccgcattgttagatcaagctctgtccaatgcgagactgtttggcgaggacgaggtggaagtgcttaactggttggccgaagtggaagataaacttagcagtgtatttgtcaaggacttcaaacaggacgtgttacatcgccagcacgcggaccacctggctttaaacgaggagatcgtgaatcgcaaaaaaaatgtggatcaggctatcaagaatgggcaggctctgctgaaacagaccaccggtgaagaggtgctgctcattcaggagaaactggacggcatcaaaacgagatatgccgacattactgtgacttcctcaaaggccctcaggactctggaacaggcacgacagctggcgactaagtttcagagcacctatgaggagctcaccggctggctgagggaggtggaagaggaactggccacctctggaggacagtcacctacgggagagcaaattcctcaattccagcagcgtcaaaaagaattgaaaaaagaagtgatggaacatcgactagtgttggatacagtgaacgaagtatcaagagctctgttagagctggtcccctggcgggctagggaaggcctcgacaagctcgtgagtgatgcaaacgaacaatataagctggtgagtgataccattgggcagcgggtggatgagattgatgccgcaattcaacgctcccagcagtatgaacaggcggcagatgctgagctcgcttgggtggctgaaactaagaggaagctgatggctctgggtcctatccggctggagcaggaccagacaacggctcagcttcaggtacagaaagccttttccatcgacatcattcgccacaaggattcaatggacgagctgttcagccacagaagtgagatctttggaacctgcggagaggagcagaagaccgtactacaggaaaagaccgaaagcctgattcagcagtatgaggctatttcattgcttaatagcgaacgttatgctcgcctggaaagggctcaagtgttagttaatcagttctgggagacctatgaagagctgtctccatggatagaagagacgcgcgcacttattgcacagttgcctagccctgctatcgaccatgagcagttgaggcagcaacaggaagagatgagacagttgcgtgaatccatagcggagcacaaaccacatatcgacaagctgcttaaaattgggcctcagttgaaagaacttaatcctgaggagggggagatggtggaagagaagtaccagaaagcggaaaatatgtatgcacagattaaggaagaggtccggcaacgtgcactggccctggatgaagctgtctctcagtctactcaggtaagccagttccacgacaagatcgaacctatgctggaaacactcgaaaatcttagcagccgactgcggatgcccccactgattcccgcagaggtagacaaaatccgtgaatgtatcagtgataataagagtgcaacagtagagctggagaagcttcaacccagttttgaggcactgaaaaggcgcggtgaggagctgatcggcaggtctcagggtgctgacaaggacctcgcagcaaaggagatccaagacaagctggaccagatggtattcttttgggaggacataaaagctagggcggaggaaagggagattaagttccttgatgtcctcgagctcgcagagaaattttggtacgatatggcagctcttctaaccacgattaaggatactcaggatatcgttcatgatctggagtcgcctggcattgatccttccataatcaagcagcaggtagaggccgctgagactatcaaagaggaaactgacggcttgcatgaagaacttgagttcattaggatcctgggggctgatctgattttcgcctgcggtgaaactgagaagcccgaggtgaggaagtcaatcgatgaaatgaataacgcctgggagaatctgaataagacctggaaggaaaggctcgagaagctagaggacgcgatgcaggcagccgtccagtaccaggatacgcttcaagcaatgttcgattggctagataacaccgtgataaaactgtgcacaatgcccccagtaggaacggatttgaacactgtcaaagaccaactgaatgaaatgaaggagttcaaggtcgaggtttatcagcagcagattgagatggagaagctgaaccatcagggtgagctgatgctgaaaaaggcgaccgatgaaacagacagagatattatccgcgaacccctgaccgagttgaagcacctctgggagaatctaggtgaaaagatcgcccatagacagcacaaactcgagggggctctcctcgctctaggccagttccagcacgccttggaggaactcatgtcttggctgacgcatactgaagagctgctggacgcccagcgaccaattagcggagaccctaaagtcatagaagttgagctggcaaagcaccacgtcctgaagaacgatgttctagctcaccaggccactgtggagactgtaaataaagccggtaatgagcttcttgagagtagcgcaggggacgacgcttcaagtctgagaagccgactggaggccatgaatcagtgttgggagtccgtgctccagaagaccgaggaacgagagcagcaattgcagtcaactctccaacaagcacaggggttccacagtgagattgaagactttcttctagagcttactcgaatggagtcacagctgtccgcgtccaaacccactgggggtttgcccgaaactgctcgtgagcagcttgatacccacatggagctatattctcagctcaaggctaaagaggagacatataatcagctgctggacaaaggacgactgatgctgctgtcacgggacgattcgggttcgggatctaaaaccgaacagtccgtagcgctgttagaacagaagtggcacgttgtttcttccaagatggaagagcgtaagtctaagctggaagaggcgttgaatctggctaccgagttccagaactcgcttcaggagtttataaattggcttacactggccgaacagtccttgaacatagcatctcctcctagcctcatactcaacaccgtgctgtcacaaatcgaggaacacaaggtcttcgccaatgaggtgaatgctcacagagaccagataattgaactggatcagaccggcaatcagctgaaatttctgtcccagaaacaggatgtggtgctgatcaaaaacctgctagtttccgtgcaatctagatgggagaaggtggtgcagcgctccatcgaacggggtcgatctttggatgacgctaggaagagagcaaagcagtttcacgaagcctggaaaaagctaatcgattggcttgaagacgccgaatcgcatctggactccgaactcgaaatatctaatgatccagacaaaatcaaactgcagttatccaaacacaaagagttccagaagacactagggggaaagcaaccagtctatgatacaaccatcaggacggggagagcgcttaaggagaaaacccttttacctgaagactcccagaaactggacaattttctaggcgaggtgcgcgacaaatgggacacagtctgtggaaagagcgtggaaagacaacataagctggaggaagccctgctgttcagcggccagttcatggacgcattacaggccttggttgactggctgtacaaggtagaaccacagctcgccgaggaccagcctgtgcatggggacttggacttggtcatgaacttaatggatgcccataaggtctttcaaaaggagctggggaagcgcaccggaaccgtccaggttctcaagagatcaggacgcgagctgatcgaaaactctcgtgatgacacgacgtgggttaaaggacaactgcaggaactctccactagatgggacaccgtgtgcaagctcagcgtctctaagcagtcccgactagaacaggccctgaagcaagccgaggtgtttagggacaccgttcatatgctgcttgagtggctgtcagaagcggagcagacactgaggtttcgcggtgccctgccagacgataccgaggcccttcaatccctaatagatacgcacaaagagttcatgaaaaaggttgaggaaaaaagggtggacgtcaattctgccgttgcaatgggtgaggtgattctggccgtttgtcaccctgactgcatcactacaatcaaacactggattactatcatccgtgcaaggttcgaggaagttcttacttgggcgaaacaacatcagcagcgactggagacagccctgagcgaactggtggccaatgctgagctattggaggagctgctggcttggattcaatgggcagaaaccaccctgatccagagagaccaggaaccgatccctcagaacatcgacagagttaaagcattgatagcagagcatcaaacgttcatggaggaaatgacgcgaaaacagcccgacgtcgaccgcgtgacgaagacatacaaaagaaagaacatcgagcctacccacgcaccatttatcgagaagtcaaggtcggggggtagaaaaagcttaagccaaccaaccccacctcctatgcctattcttagtcagtctgaggccaaaaatccccgtattaaccagctgagcgcgagatggcaacaggtgtggctgcttgctctggagaggcagaggaagctgaatgatgctctggatagattggaagaactgaaagagtttgctaattttgactttgatgtatggcgtaaaaaatatatgagatggatgaaccacaagaaatcacgggtgatggatttttttaggcgcatcgacaaagatcaggacgggaagattaccaggcaagaatttattgacggcatcctggcaagcaaattccccaccactaagctcgaaatgaccgcggtagccgatatatttgatagggacggcgacggctacatagattattatgaatttgtggcggctcttcacccaaataaagacgcttaccggccaaccacagacgccgacaagatagaggatgaggtgaccaggcaggtggcgcagtgcaaatgcgccaaaaggtttcaggtggagcaaatcggcgagaataaatataggttcggagattcacagcagcttcgactcgtacggatcttaagaagcactgtgatggttagagtgggcggaggatggatggcactcgatgagttcctcgttaagaatgatccctgccgggcacgaggtcggactaatatcgaattgcgggaaaagtttattttgccggaaggtgccagtcaaggtatgaccccgttccggagccgcggacggaggtctaaaccatcctcacgagctgcctctcccactaggtccagctcaagcgcgtctcaaagtaatcactcatgcacttccatgccttcatctccggcaactcccgcatccggcactaaagtgattccatcttctggaagtaaactgaagaggcctacacctaccttccatagcagcaggacgagcttggctggcgatactagcaactcgagtagccctgcctctaccggggcaaagaccaatagagcagatccaaagaaaagtgcatcacgccctggctcacgggcagggtcccgtgccggaagtagggcatcaagccggagagggagtgatgcatccgatttcgatttgttagaaactcagagcgcctgctcagataccagcgagtcctccgcggctgggggacagggaaattcgaggagagggctaaacaagccatccaaaattcccaccatgagcaagaagaccactaccgccagccccaggacaccaggccctaagagatag

SEQ ID NO: 230541 - DNA, 16293 bp, synthetic construct
  misc_feature 1..16293: note = Description of Artificial Sequence: Synthetic coding sequence
  source 1..16293: mol_type = other DNA
atgagctcaagtgacgaggaaaccctgagcgagaggagttgccgaagtgagcgaagttgtcgcagcgagcggtcttaccggagtgagcgctccggttctcttagcccatgtcccccaggagatacgctgccatggaatttgccgttgcatgagcagaaaaaacgcaagagccaggactctgtcctcgatcccgctgagcgtgccgtggtgcgggtggcagacgagagggatagggtccaaaagaagacattcaccaagtgggtgaacaaacacctgatgaaagtgcggaagcacattaatgatctgtatgaggatctcagagacgggcataatctgatatccctactggaggtgctaagtggcatcaaattgccaagggaaaagggacgcatgcggtttcaccggctgcagaacgttcagatcgccctggacttcctcaagcaacggcaagtgaaattagtgaacataaggaacgatgatattaccgacggcaacccaaagctgacactgggcctgatctggaccattattttgcatttccaaatctcggacatttatattagcggagagagcggcgatatgtcagctaaagagaagcttctcctatggactcagaaagtaaccgctggttacacgggaatcaagtgcaccaacttttcttcctgttggtcggatggaaagatgtttaacgctctgatccaccgttaccggcctgacctagtggacatggagcgcgtgcagatccaatccaatcgcgaaaacctggaacaggccttcgaagttgcggaaagattgggggtgactcgtctcctcgatgctgaggatgtcgacgtgccttcgcccgatgagaagtccgtgattacgtatgtctccagcatttatgatgcttttcccaaggtccccgaaggaggggaaggcatcagtgcaacggaggttgattcacgatggcaggaataccagtctcgggtcgacagcctgatcccctggattaagcagcacacaatcctgatgtcagacaaaacttttccccagaaccccgttgaactgaaagcactttataaccagtatatccatttcaaagagacggaaatcttggccaaagaacgcgagaaaggaaggatcgaggagctttacaagctgctcgaggtatggatcgagttcggtcgcattaaactgccccagggttaccatccaaacgatgtcgaggaagagtggggcaagctgataatagaaatgcttgaacgcgagaaatcattgcgtccagccgttgagcgcctggaactgcttctccagatcgcaaataaaatccaaaacggtgcactgaattgtgaggagaaattgaccctggcgaagaacactttacaagcagatgcagcccacttggagtcgggccagcctgtccaatgtgagtctgatgtaataatgtacatccaggagtgtgaaggtctgattcgacagcttcaggtggatctgcagattctcagggatgagaactactaccagctcgaggagctcgcttttcgggtgatgaggcttcaggatgaattggttaccctgaggctggagtgcaccaatttgtaccgcaaaggacacttcaccagcctggaacttgtgccgccaagtacactgacaaccacacacctgaaggccgagcccctcactaaggccacccatagcagtagcaccagctggtttaggaagccgatgacaagagcagaactggtagctatttcttcatccgaggacgaggggaacttaagatttgtgtacgagctgctttcctgggtggaagaaatgcagatgaagctggagcgggctgagtggggaaacgacctgcccagcgttgagctccagctcgagacacaacagcacatccacacctccgtagaggaactaggttcatctgtgaaggaggctagactatacgagggaaagatgtcgcagaattttcacacttcgtatgcggagactttgggcaaactcgaaacgcagtactgtaagctgaaagagacgtccagtttccgaatgaggcacttgcagagtcttcacaagttcgtgtccagggctacggctgagctgatttggctgaatgagaaggaggaggaagaactggcctatgattggagcgacaacaattctaatatctctgctaaacgcaattactttagcgagctgaccatggagctagaagagaaacaagacgtgtttcggtccctacaggacactgctgagctcctgtcgctcgaaaatcaccctgccaagcaaacggtggaagcttactcagccgctgtccagtcccagctgcaatggatgaaacagctttgcctatgcgtggaacaacacgtaaaggagaatacagcctattttcagtttttcagcgacgctcgcgagctggaatcctttcttaggaatttgcaggatagcatcaaaagaaagtactcctgcgaccacaatacgagcttaagcagactggaagacctactgcaggacagcatggacgaaaaggagcagttgatccaatccaaatcttcagtggcttccttggttgggaggagtaagactattgttcagcttaaacctagatctccagatcacgtgcttaaaaataccatcagcgtgaaagctgtgtgtgattacaggcagattgagatcactatctgcaaaaacgatgaatgcgtgctcgaagacaattcacaacggaccaaatggaaagtgatcagccctactggtaacgaagccatggtgcctagcgtttgtttccttatcccccctcccaataaggatgcgatcgagatggcctctcgcgtggaacagagctaccagaaagtgatggcactgtggcaccaactccacgtcaataccaagagtctgattagctggaattatttgcggaaggacttggacttggtgcagacatggaatctggagaagctgcggagctctgctcctggagaatgtcatcagattatgaaaaatctccaggcgcactacgaggatttcctgcaggactctcgggattccgttctgttcagtgtcgccgatagacttcgcctagaagaggaagttgaggcgtgcaaggccagattccagcacctgatgaaaagcatggaaaatgaagataaagaggaaaccgtggcaaaaatgtatatttcggaactgaaaaatatcaggttacgtttggaggagtacgagcaacgtgtagtcaaacgcattcagagtttagcctccagccgaacagatcgcgacgcgtggcaggataacgctttgcggattgccgaacaagaacatacccaggaggacctgcagcagcttcgctctgatctggatgctgtgagtatgaagtgtgattccttcctgcatcaaagcccctcatcaagttctgtgccaaccctccgttcagaacttaatctgctggttgaaaaaatggatcatgtttacggcttgtcaacagtctatctaaacaaattgaagacagtcgatgtcatcgtgcggtcgatccaggatgcagagcttctggtgaaagggtacgagatcaagctgagccaggaagaggttgtccttgcagatctgtcagctctcgaagcacactggtcgactttgaggcactggttgtcggatgttaaagataaaaattcagtcttttcagtgctggacgaggaaattgctaaagcaaaggtggtggcagagcagatgagccgcctgacacccgaacgtaaccttgatcttgagcgataccaggagaaaggctcccaactgcaggagaggtggcacagggttatcgcgcagcttgagatacgtcaaagcgaattggagagcatccaggaagtactgggagactatcgggcatgtcatggcacgctgatcaaatggatagaggagaccactgctcagcaagagatgatgaagccaggacaggccgaggattctcgggtgctctcagagcagctgagccagcagacagctctttttgccgaaatcgagcgtaaccagacaaaattagaccagtgtcagaagttctcccagcagtattctactatcgttaaggactacgagttacaacttatgacatacaaagcctttgttgaaagtcagcagaagagccccggaaaaaggcggaggatgctgtccagctccgacgcaataacccaggagttcatggacctaaggacccgctacactgccctggttactctgacaacacagcatgtcaaatacataagcgacgcattgcggaggctggaagaggaagaaaaggtagtcgaggaggaaaagcaggagcatgtcgagaaggtgaaagagttattagggtgggtgtcaacattggcccgtaacacccaaggtaaagcgacatccagtgagacaaaggagagtactgacatcgagaaggccattctggaacaacaagtgctttctgaggagctgactacaaaaaaagaacaggtttctgaagctatcaagacatctcaaatcttcctggcgaagcatggccacaagctgagcgagaaagaaaaaaaacaaattagtgaacagctgaacgcactgaataaagcatatcacgacctgtgtgacggtagtgccaatcaattacagcaacttcagtctcagctcgctcatcagactgagcaaaagactctccaaaaacagcaaaacacttgtcatcagcaactggaagatctgtgctcatgggtggggcaggcagagcgagccctggccggtcatcagggacgcactactcaacaagacctctcagcgttgcagaagaatcagagcgatctgaaggacctacaggacgacattcagaatagggccacctctttcgccacggtcgtcaaagatatcgaggggttcatggaagagaaccagacgaaactgagtccacgtgagctgacagcactccgagagaagcttcaccaggccaaggaacagtacgaagctttgcaagaagagaccagagttgcccagaaggagctggaagaagctgtgaccagcgcattgcaacaggaaaccgaaaagtcaaaggcggcaaaggagttagccgagaacaagaagaaaattgacgcattgcttgactgggtcaccagcgtgggatctagcggcggtcagctcctgacaaatcttcccggaatggaacaattgtctggtgcatccctggagaaaggagccctagatactactgacggttatatgggggtcaaccaggctcctgagaagctggacaagcagtgcgaaatgatgaaggctcggcaccaggagctattatcgcagcagcagaactttattctggccactcagtccgcccaggccttcctggatcagcacggacacaacctgactcctgaagaacaacagatgcttcagcagaaacttggcgagctgaaggagcaatattcaacgtcgctggcccagagtgaggccgagctgaagcaagtgcagaccctgcaggatgagctgcagaagttcctgcaggatcacaaagagttcgaaagctggctcgagcgctccgaaaaggagctagaaaatatgcacaaaggaggatcttcccctgagaccttgccctcgctccttaagcgccagggtagtttttccgaagatgtgatttctcataagggtgacctgaggttcgtgacgatcagcggccagaaggttcttgatatggagaattctttcaaagaaggaaaggaaccctccgagattgggaatttggtcaaagacaagttgaaggacgccacagagcgatacacagccctccactccaaatgtacccgactaggtagtcacctcaacatgctgctgggacagtaccaccaattccagaactcggccgattctctgcaggcctggatgcaggcttgcgaggctaatgtggagaaactgctgtcagacacagtggcctctgatcccggtgtcctacaggagcaactggcaactaccaagcagttgcaggaggaacttgctgagcatcaggtgccggtcgaaaagctgcagaaggtggcacgagatatcatggagatagagggagagcctgccccagatcatcgtcacgttcaggagaccacagactctatcctctctcatttccagagtcttagttacagccttgctgagcgcagctctctgctacagaaggccattgcccagtcccagtccgtccaggagtctctcgagtctctcctgcagagcatcggagaggtagagcaaaacctcgaaggaaaacaagtgagctcattatcgagcggtgtgatccaagaggctcttgcaactaatatgaagcttaagcaggatattgcaaggcagaaaagtagcctcgaggctactagagaaatggtaacgagatttatggaaaccgcagactctacgaccgctgctgtgctgcaggggaaacttgctgaagtgtcgcagaggtttgaacagctctgtctgcaacagcaggagaaagagagcagccttaaaaagctgctcccgcaggctgagatgttcgaacacctgtccgggaagctacagcagttcatggagaacaaaagtagaatgctggcctctggcaaccaaccggatcaggatataacccactttttccagcaaatccaggagctgaacctggagatggaggaccagcaggaaaacctggacaccctcgagcatctcgtcaccgaattgtcatcctgcggttttgctttagacctctgtcagcaccaggacagagtgcaaaatctgcgaaaggatttcacagagctgcagaaaactgtgaaggaacgggaaaaagacgccagctcatgtcaagagcagcttgatgagtttagaaagctggtgaggacctttcagaagtggctgaaagaaactgagggctccattccacctaccgagacatccatgtccgcaaaagaactggaaaaacagatcgagcatttgaaatccttgctggatgattgggccagtaaaggtactctggttgaggagatcaactgcaagggaactagcttagaaaatctgatcatggagattacagctcccgacagtcagggaaaaaccggatctattctcccgagcgtcggctcatcagtgggatcagtgaacggataccatacatgcaaagacctgactgagatacagtgtgacatgtccgacgttaacctcaaatacgagaagctgggaggagtgcttcacgaacgacaggagtccctccaggccattctcaataggatggaggaggtccataaagaagccaattccgtgcttcaatggctggaaagtaaagaagaagtgctcaaaagtatggatgccatgagctctcccaccaaaaccgaaacagtcaaggcacaggcggagtcgaataaagctttcctcgccgaattagaacagaattccccaaagatccaaaaggtcaaggaggctcttgcgggactgttggtgacctaccccaactctcaggaggctgagaattggaaaaagatccaggaggaactcaacagccggtgggaaagagctacagaggttactgtggctagacagagacagctggaagagtcagctagtcacttggcctgcttccaggctgcggaatcccagctcagaccttggctgatggaaaaggaattgatgatgggtgtcctgggaccactctctatagacccaaacatgttgaatgcccaaaagcagcaggtccagtttatgttgaaagagttcgaagctcgcagacagcaacacgaacagttaaacgaagcagcccagggtattttaacgggtccaggggatgtcagtctctccacctcccaggtccaaaaggagctgcagagcatcaaccagaagtgggtggaactgacagacaaactaaactcccggtcgtctcagatcgatcaagcaattgtgaagtcaacccaatatcaggaactgcttcaggatttaagcgagaaggttagagccgtgggtcagcggctctcagtacagtcggcaataagcacacagcccgaagctgtgaaacagcaactggaggagacaagtgagattcgctcagacttggagcagctagatcatgaagttaaggaagcgcaaacactctgtgatgagctctcagtcctgatcggggagcaatacctgaaagatgaactcaagaagaggctcgagaccgtcgccctgccccttcaaggcttagaagacttggccgctgacaggataaacaggctccaagcggctctggcatcaacacagcaattccagcagatgttcgacgagttaaggacctggttagacgacaagcagagtcagcaggcaaaaaactgtcctataagcgcaaaattggaacgtctgcaatctcaactgcaagaaaacgaagagttccagaaaagtctgaaccaacactctggaagttacgaggtgattgtcgccgagggtgaaagcctcttgctgagtgtcccaccaggggaggagaagaggacactgcagaaccaacttgtagagctcaaaaaccactgggaagagctgtctaaaaagaccgccgaccgacaaagtcgactgaaagactgtatgcagaaggcccagaaataccaatggcatgtcgaagaccttgtgccctggatcgaggattgcaaggcaaaaatgtccgaactgcgcgtgaccctcgatccagtccaactggaatcctctctgttgaggagtaaagcaatgcttaatgaggtggagaaaaggcgttcactcctcgagatccttaactcagcggctgatatcctgatcaactccagcgaggccgacgaggacggcattcgagatgagaaggctggcataaaccagaacatggacgccgtaactgaggagctgcaggctaaaaccggctcactggaagaaatgacccaacggctccgtgaatttcaggaaagctttaagaacattgagaagaaagtggagggcgcaaaacaccaactcgagatatttgacgctctcgggagccaggcgtgctctaataaaaaccttgaaaaattgagggctcaacaggaggtgctgcaggccttggagccacaggtcgactatctgcgcaactttactcaaggattggtagaagacgctccagacggatctgatgccagccaactattgcaccaagccgaggtggctcagcaggaatttctcgaagttaagcaacgagtaaactctggatgtgtaatgatggaaaacaagctggagggaattggccagtttcattgccgcgtgagggaaatgttcagtcagctggccgacttggacgatgaactggacggtatgggggctatcggcagggataccgactcactgcagtcccagatcgaggatgtgcgactgtttctgaataaaatccacgtgctcaagctggatatcgaggcatccgaagctgaatgtcgccacatgctggaggaggaaggaactctggacctgctgggacttaagcgagagctagaagccttaaataagcagtgtgggaagttaactgagcggggaaaggcccgacaggaacagcttgagctcaccctgggaagagtggaagatttttaccgtaaattaaaaggtttgaatgacgcgacaacagccgcagaagaggccgaggcactgcaatgggttgttggcaccgaggtcgaaattatcaaccagcagttggccgactttaaaatgtttcagaaggagcaggttgatcccctccagatgaaattgcaacaagtcaacggccttggccagggcctcatccagtctgcaggcaaggattgcgacgtacaggggctcgaacatgacatggaggagatcaacgcaagatggaatacgctgaacaagaaggtggctcagcggatcgcgcagttgcaggaggcattgctgcattgtggaaaatttcaggatgcgcttgagccacttctcagctggctcgccgatacagaggaactgattgctaatcagaagcctccatctgcagaatacaaagtggtcaaggcccagattcaagaacagaaactgctgcagaggcttttagacgataggaaggctactgtggacatgcttcaagcagaaggcggacgcatcgcacagtctgccgaacttgcagatagggagaaaattacaggacagctggagagtcttgagagtcgatggacagagctacttagtaaagcagctgctcgccagaaacagctcgaggacatactcgttctggccaaacagttccacgagaccgcagagccaatttctgactttcttagcgttaccgagaagaaactggcaaactctgagcctgtgggcacccagacagcaaaaattcagcagcaaatcattcggcacaaggccctggaggaagacattgagaatcacgcaacagacgtccaccaggccgtgaagatcgggcaaagcctgagtagtcttacttcaccggcagaacaaggtgtcctctctgagaagatcgatagcttacaggcaaggtattccgaaatccaggacaggtgctgcagaaaagccgctctgttggaccaagctttgtctaatgctcggctgttcggggaggacgaggtggaggtccttaactggttagcggaagtcgaagacaaacttagctccgtgtttgtcaaagatttcaagcaggacgtccttcaccgccaacatgccgatcacctggcacttaacgaagaaattgtgaataggaagaagaacgtggaccaggccatcaaaaacgggcaggctttactaaaacagactaccggcgaggaggtgctgctcatccaggaaaagctcgatggaattaaaacaaggtacgcggatattactgtgacctcatctaaagccctgcgcaccctggagcaggcgagacagttagctacaaaattccaatctacctatgaggagcttactggctggctcagagaggtcgaagaggagctggcaacctcagggggacagagccccacaggggagcagattccccagttccagcagcggcagaaggagctaaaaaaagaggtgatggaacacaggctcgtgctggataccgtgaatgaggtgtcaagggcactactcgaactcgtgccttggcgagcaagagaggggttagataaactggttagtgatgcaaacgagcaatacaagctggtctctgatacaatcggccaaagggtggatgaaattgatgccgcaattcagcgctcacaacagtacgaacaagccgctgacgctgagctggcctgggtcgctgagaccaagcgcaagctgatggctctcggacctatcaggttggagcaggatcaaactaccgcccagcttcaagtccagaaggcattcagtattgacattattcggcacaaggatagtatggacgaacttttctcacatagatccgaaatcttcgggacttgcggcgaggaacagaagacagtgctgcaggagaagaccgaatctttaatccagcagtacgaagccatcagcctgctgaattcagagagatacgctcggctggaacgcgcacaagtgttagtgaatcaattctgggaaacgtatgaggagctgagtccctggatcgaagaaaccagagccctcatagcccagttacctagccctgccatcgaccatgaacagttacgtcagcagcaggaggaaatgcggcagctacgagaatctatcgccgaacataaaccacacatcgataaactgctcaagatcggtccacagctgaaggagttgaacccggaggaaggggaaatggtcgaagagaagtatcagaaagccgaaaatatgtacgcccagatcaaggaggaggtccggcagcgtgccctggctctggatgaagccgtatcccaatctacccaaattacggagtttcatgataaaatcgagcctatgctggagactctagaaaatttatcttcacggctgagaatgcccccactgatcccagccgaagtagataaaatacgcgagtgcatatccgacaataaaagcgctaccgtcgagcttgagaagcttcaaccctcattcgaggcactcaagcgcaggggagaggaacttatcggaaggagtcagggcgcagacaaagacctcgctgcaaaagagatccaagataagctggatcagatggtctttttttgggaagacattaaagcgagagctgaggaacgtgagataaaatttctagacgtgcttgaattggctgaaaagttctggtacgacatggccgcactcttaaccactataaaggatactcaagacatcgtgcatgatctcgagtctccaggcatagatccaagcatcattaaacaacaggtggaagccgctgaaaccattaaggaggagacggatggactccacgaagaactcgaattcattcgtattctcggagctgaccttatcttcgcctgcggcgagacagaaaaaccagaagtccgcaagagcatcgacgagatgaacaatgcctgggaaaacctgaataaaacctggaaagaaagacttgaaaagctggaggatgcgatgcaggcagccgtacagtatcaagacaccctgcaggcgatgtttgactggctggataacactgtgatcaaattgtgcacaatgccacccgtgggaacggatctgaatactgtcaaggaccagctcaatgagatgaaggagtttaaagtagaagtgtaccagcagcagatcgagatggagaaactcaatcatcagggcgaactaatgctgaaaaaggctaccgacgagacagacagggacattatcagggaaccactgaccgaattgaaacatttgtgggagaatctgggagagaaaattgctcatcgacaacacaaactggagggggcactgctcgcgttgggccagtttcagcacgccctggaagagctcatgtcctggctgacccacaccgaggagctcctggacgcacaaaggcctatcagcggtgacccaaaagttatcgaggtggagctggctaagcatcatgtcttaaaaaatgacgtgttggcacaccaagccacagtggagaccgtgaacaaggctggaaatgagctgctggaaagcagtgctggtgacgatgccagttccctgagatcacgattagaggctatgaaccagtgctgggagagtgttctccagaagaccgaagagagggagcagcagctccagtctaccctgcagcaagcacagggattccacagtgagattgaggattttcttttggagttaaccagaatggaatcacaactcagcgcttcgaagcctaccgggggtttacctgaaaccgcaagggagcaacttgacacccacatggaactatattctcaactgaaggctaaggaggagacatacaatcagctccttgacaagggcaggctgatgctcctctcccgtgacgattcaggttccgggagcaagacagaacaaagcgtcgccctgctggaacaaaaatggcatgtcgtgagctccaagatggaggaacggaagtccaaacttgaggaagccctgaatctagcaacagagttccagaattctctgcaagagtttatcaactggctcaccttggctgaacaatcattgaatattgcgtcccctcctagcctgatactgaacaccgtactcagccagatcgaggagcacaaggtgtttgcaaacgaggttaacgcccacagggaccagatcattgagctggaccagaccggcaaccagcttaagtttttaagtcagaaacaggatgtggtcctgattaaaaacctgctggtgagtgtccagtctcgctgggaaaaggtggtccagcgctcaatagaacgcggaagaagcctggatgatgccaggaagagggccaagcagttccacgaagcctggaaaaagttaatcgactggctcgaggacgccgaaagccatctggacagtgagttggaaatctctaacgatccagacaagatcaagcttcagctgtccaagcacaaagagttccaaaagaccttagggggaaaacagcccgtgtacgacaccacgatccgcacggggcgtgccctgaaggagaagacccttctacctgaggattcgcaaaagctcgacaactttttgggcgaggtcagagataaatgggacaccgtatgcggtaaaagcgtggaacgccagcataagctggaggaggctctcctattctctggacaattcatggacgctcttcaggcacttgtcgattggctatataaggtcgaacctcagttggccgaggatcagcctgtgcacggcgatttagacctggtcatgaatctgatggacgcccacaaggtattccaaaaggaactcggcaagaggacaggaactgtgcaggtactaaagaggtcaggcagagagctgatcgagaatagtcgcgatgataccacctgggtcaaaggccagctgcaagagctgagcaccagatgggatactgtttgcaaactgtctgtgagcaaacagtcacgactggaacaggctttaaagcaggccgaggtattcagggacacagtccacatgcttctagaatggctttccgaggccgagcagactctgaggtttcggggagccctgccggacgacacagaagccttacaaagcctgatagacacccataaggagttcatgaagaaggtggaagaaaaaagggtggacgttaactccgcagttgccatgggtgaggtgattttggcggtctgtcaccccgattgcattacaacgatcaagcactggataactatcataagagcaaggttcgaagaggtactgacgtgggccaaacagcaccaacaaaggctcgaaaccgctcttagtgagttagtggccaacgccgaactgttggaggaactgttagcatggattcagtgggcagagactacacttatccaaagagatcaggagcccatcccccagaatattgaccgagttaaggccctgattgctgaacatcagactttcatggaggaaatgaccaggaagcagccagatgtagatcgggtcaccaagacatacaaacgaaaaaacatagaacccacccatgctcccttcattgagaaatcaagaagtggcggtcgcaaatcattgagtcagcctacacccccacctatgccaattcttagccagagcgaagccaaaaatcctaggatcaatcagctgtcggcgagatggcagcaggtttggctgctggccttagagcgtcaacgaaaactgaatgacgccctggacaggctggaagagttaaaggagttcgctaattttgactttgatgtttggagaaagaagtatatgcgatggatgaatcataagaagtcccgtgtgatggacttctttcgtagaatagataaagaccaggacggtaagataacccggcaggagttcatcgacggcatactggcttctaagtttcccacaactaagctcgagatgactgctgtggctgatatcttcgatcgagacggcgacggctacatcgactattatgagttcgtggctgcccttcaccccaacaaagacgcgtatcgtccgaccaccgacgccgacaagattgaggacgaggttactcgccaggtggcccaatgtaagtgtgccaaacggtttcaggtcgaacagatcggtgagaataaatacaggtttggggattcacagcagctgaggcttgtgcgcatcctacgttcaacagtgatggttcgagtggggggaggttggatggccctcgacgaatttcttgtcaaaaacgacccatgccgagccaggggacgcactaacatcgagctgagggagaaattcattctacctgagggggcttctcagggcatgacaccttttcgaagcaggggcagacgctccaaaccctcttcaagagctgcttccccgacgcgatcgagcagtagcgcctctcagtcgaaccacagctgtacctcgatgccttcgagccctgctacccctgcgagcggcaccaaggttattccttcatctggctccaaactaaaaaggccaactccaactttccacagtagtagaacatccctggccggtgacacctccaactcttcatcaccagcaagcactggcgctaagaccaaccgcgcagacccaaagaagagcgcctctcgtcctggtagccgggctggaagccgagccggttctcgggcttcgagtaggaggggtagtgacgcttctgattttgaccttctagaaacccagagtgcatgctctgatactagcgaaagctcagcagctggcggacagggcaactctcgaagaggacttaataaacctagtaaaatccccactatgagcaagaagactacgactgctagtccccgaactcctggcccaaaaagataa

SEQ ID NO: 230542 - DNA, 3188 bp, synthetic construct
  misc_feature 1..3188: note = Description of Artificial Sequence: Synthetic coding sequence
  source 1..3188: mol_type = other DNA
atgggcaacagcctcggatgcttcaaggaaccaaaggaaagtatcgcaatacctgagaaggctccgatcagccccaagaagagggtcagatttaaaaggcggtggaggggaaaaaagattccaacacctgaggcatcacaccaggaagagacttctgagggaacgggtgttatcgaggaaacagaaacactgacaaagctgaccgagtcgttgcagaaggaggacggggtgggcggtgtggagcataccccacccgatattttgttgccaggagattcagcccctaactccagagttgtggaccgaggaatgatcgtacaggtaaaggaacgatttcaaggcgaggttcagaccgcccacctgttactcgagaatgaaagttctgtggccggaggcgtctgggacagccttgaagagggtatgaccgtgatcgcacaccttctggataatcccgcagaacggaattgcgagaagtctgtgtctcagctcgtggagttcccccgaactgctagttgttcctcccgagccgtactcctaccattgcaaggagagacagccgtggagaaggggaacatccaaaggggatttaggtcatgcgccctcccacgcacggactatcctacggacaaaggcaatcaggaacaatttagtgaagggtggtcggtggaggaaggcactaagtcggtgtccggggctccccagaccgcgtcttggatcatcgaatgctctgtatctagtctgctcctcgatcagcccggaggtcaacgtagaaccgaaccatctcacgtgggacaggtccctccacaggactctaggctgcctacctctcagtcagatctgtccattagtggcgttacggtgtctatccttccttcaagcagcgggtacggcagtgatggccctcatatacatggaattcagcccaaggataccgaacccgagaagagtagtactagcttctccgaggaggacgggacattgagcttggaggcaagccacactccttcatgggggctggaagaaatcagcgacatttacattagcggggagagcggggacatgagtgcaaaagaaaagctgctcttatggacgcaaaaagtaaccgccggatacactggaataaagtgcacaaatttctcgagctgctggtccgacggcaaaatgtttaatgccttgattcacagataccggcctgatctcgttgatatggagcgcgtccagattcagagcaaccgcgaaaacctcgagcaggccttcgaagtggctgagcgcctgggcgtgactagattgcttgatgctgaggatgtagacgttccctcaccggatgaaaaaagcgtgattacctacgtcagcagcatctatgatgcattccctaaagtccccgagggcggagagggcatcagcgctacagaggttgacagtagatggcaggagtaccagagtagagtggacagcctgatcccttggataaaacagcataccattctgatgagtgacaagacgttcccacagaatcccgtggagctcaaagctctgtataatcaatatatccatttcaaggagaccgaaatactcgctaaggagagggagaaaggaaggattgaggaattgtataagctcttggaagtgtggatcgagttcggacgcatcaagctaccccaggggtaccaccctaatgatgtggaggaagagtggggtaagctgatcatcgaaatgcttgagagagagaagtctttgaggccggcagtagagcggctcgagctgcttctgcagatcgcaaataagatccagaacggtgccttaaactgcgaagagaagctgacactggctaagaacacgcttcaggcagacgctgctcacctggagtctggccaaccagtgcagtgcgagtcagacgtgattatgtacatacaggaatgcgagggactcatccgacagctccaggtggaccttcaaatcctgcgcgatgagaactattatcaactggaggagcttgccttccgcgtgatgcgactccaggatgagctggtaacgctgaggctggaatgtaccaatttgtataggaagggacacttcacttccctcgagttggttccaccttctacgctcaccacgacccatctaaaagccgagcctctgacaaaggccacccactcttctagcacctcttggtttcgtaagccaatgacacgtgctgaattagttgcaatctcgtcaagtgaagatgaagggaaccttagattcgtgtatgagctgctctcatgggtggaagagatgcagatgaaactcgagagagcagagtggggcaacgacctccctagtgttgagctgcagctcgagacacaacaacacattcacacttcagtcgaggagctcggcagtagcgtcaaagaggctaggctttacgaaggaaagatgtcccagaattttcacacttcatacgcagagactttaggcaagctcgagactcagtactgtaaactgaaggaaacatcatcgtttcgaatgcggcatcttcagtctctccataaatttgtttccagggcgaccgcggagctcatctggcttaatgagaaagaagaagaagaactggcgtatgattggtccgataacaattctaacatttccgccaaaaggaactatttctcagagctaaccatggagctcgaagaaaagcaagatgttttcaggtcgctgcaggatacagctgagctactgtccctcgagaaccatccagctaagcagacagtcgaagcctacagcgccgctgtacagagtcagctacagtggatgaagcaactatgtctgtgtgtcgagcagcacgttaaagaaaacactgcgtactttcaattcttctccgatgccagagagctagaatcttttctcaggaacctccaagactccattaagaggaaatactcttgcgaccataacaccagtttaagtaggctggaagaccttctgcaggattctatgttccaagacgaaaaggaacaactgatccagtctaagagctccgtggcctcacttgtcggtagatcaaaaacgattgttcaacttaagccaaggtctcccgaccacgtcttaaagaacacaataagtgtgaaagcagtgtgcgactatcgccagattgaaggtagaacaatcctgtctgagggttacgggcctttggcttccgccgcttgcta

SEQ ID NO: 230543 - DNA, 22167 bp, synthetic construct
  misc_feature 1..22167: note = Description of Artificial Sequence: Synthetic coding sequence
  source 1..22167: mol_type = other DNA
atgtctagctcagacgaagaaactctgtccgagcgatcttgccggtccgaaaggtcgtgccgaagcgaacgtagctatcgctctgagaggtcagggagcctgtccccctgtccacctggcgacactcttccgtggaacctgcctttacatgagcagaaaaagagaaaatcccaagatagcgtgctggatcctgctgaacgggcagtggttcgggttgctgacgaaagagacagagtgcagaaaaagaccttcacgaaatgggtgaacaaacatttaatgaaggttcgtaagcacataaacgacctctacgaagatctccgcgacggacataatctgatctccctgctggaggtgctgtctggcataaagcttcccagagagaaagggagaatgaggttccatagattacagaatgtgcagattgccttggacttcttgaagcaacgacaggtgaagctcgtaaatatccgaaacgacgatatcaccgacggaaaccccaaacttaccttgggtctgatctggaccattattctgcactttcagatctccgacatctatatatccggagaatctggggatatgtccgctaaagagaagttgctgttgtggactcaaaaggtgaccgccggttacactggaatcaaatgcacaaacttctcatcctgctggtctgacgggaagatgttcaacgcgctaatccacaggtataggcccgacttggttgatatggaaagggtgcaaattcagagcaatagggaaaacttggagcaggctttcgaagtcgccgagaggttgggcgtgacaagactgttggatgctgaggatgtcgacgtacccagcccagatgaaaaatcagtgatcacctatgtgtcatcgatttatgacgccttcccaaaggttcccgaaggaggtgaggggatcagtgccacggaggtcgactctagatggcaagagtaccaaagcagagtagattccttaataccgtggataaagcaacatacgatactgatgagcgacaagacctttcctcaaaaccctgtggagttaaaggctctttacaaccaatatatccactttaaagaaacagagatcctcgcaaaggagcgcgaaaaggggcgaatcgaagaactatataagctgctcgaagtttggattgaatttggtagaatcaaactgcctcagggataccatccaaatgatgtcgaggaggaatggggcaagctgattatcgagatgctcgaaagagagaagtccctccgacccgctgtagaacgtctggaacttctgctccagattgccaataagatacagaatggggctctcaactgtgaggagaaattaacactggccaagaacaccctgcaagctgacgccgcacatttagagtctggtcagcccgtgcagtgtgagtctgacgttatcatgtatattcaggagtgtgaaggacttatcaggcagctgcaggtcgacctccagatcttaagggacgaaaattactatcagctcgaggaactcgcttttcgcgtcatgcggctccaggatgagttggtcacactgcggctggagtgcactaacttgtaccgtaaaggccacttcacatccctggagctggtccccccaagcacgctgacaaccacccatttgaaggcggaaccgctgactaaagccacgcattcaagctctaccagctggtttcgcaaacccatgacgcgggctgagttggtggctattagttcgtcagaggatgaagggaatcttcggtttgtttacgaacttctctcttgggtggaagagatgcagatgaaattggagcgggctgagtgggggaatgatttgccatccgttgaactccaactcgagacccagcagcatattcacacttctgtggaggaacttggcagtagcgttaaggaggctagactttacgaggggaagatgtctcagaatttccacacctcatacgccgaaacactggggaagctcgaaactcaatattgtaagctgaaggagaccagtagttttcggatgaggcaccttcagtccttacataaatttgtgagccgcgcaactgccgaactcatatggttaaatgagaaagaggaagaagagctcgcgtatgactggtccgataacaacagtaacatttctgctaagcggaactatttcagcgaactaacaatggagctcgaagaaaagcaggacgtgtttaggagcctccaggacacggcagaactgctctctctggaaaatcaccccgcaaaacagacagttgaagcgtacagcgctgccgtgcagtcgcagctgcagtggatgaagcagctgtgcctttgtgttgagcagcatgttaaggagaacacagcctacttccaatttttctcagacgctagagagttagagagtttcctgcgcaacctgcaagacagcattaaacgtaagtacagttgcgatcacaacacctcattgtcccgtcttgaagacctgctacaggactccatggacgagaaagagcagctcatccaaagcaaatcaagtgtcgccagcctggtggggaggtccaaaactattgtccagctgaaaccccgatccccagaccacgtgttaaagaatacaatctcagtaaaagctgtatgtgactacaggcaaatagagatcactatatgtaagaacgacgagtgcgtactcgaagataatagccagcggactaaatggaaagtcattagcccgactggcaatgaagccatggtgcccagcgtatgcttccttattcctcccccaaacaaagacgccatagagatggcttctagggtcgagcagagttatcagaaggtcatggctctttggcatcagctgcacgttaacacgaaatctctgatttcctggaactatcttcgtaaagatcttgatctcgttcagacatggaatctggagaaactgagatcatccgccccaggcgagtgtcaccagatcatgaaaaatctacaggcccattacgaggactttctgcaggattctcgggatagcgtgctatttagcgtggctgaccgccttcggctcgaggaggaggtggaagcatgcaaggccagattccagcacctcatgaagtctatggagaacgaggataaggaggagacagtagcgaaaatgtatatctcagaacttaaaaacattagattgaggcttgaggagtatgagcagcgggtagttaaacgcatacagtcactcgcttcgagccgaaccgacagggacgcctggcaagacaacgctttgcgaatcgcagagcaggagcacacacaggaagatctacagcaattaaggagcgacttagacgccgtatcaatgaagtgcgacagtttcctccaccaatctccttcttcctcttccgtcccaactctgcgcagcgagcttaacctgcttgttgaaaagatggaccacgtgtatggactgtctaccgtgtatctcaacaaacttaaaaccgtcgatgttatcgtccgcagcatacaagacgccgagctcttagtgaagggatatgagataaaactttcacaggaggaagttgtccttgctgatctgtcagcgctggaggcccactggtccacgctgagacactggctaagcgatgttaaggataagaactccgtgtttagcgtgcttgatgaggaaattgctaaagctaaggtggtggcagaacagatgagcagactcacccctgaaaggaacctcgatctggaacggtaccaagaaaagggctcacagctccaggagcggtggcacagggtcatcgctcagcttgaaatccgacagtctgagttggagagcattcaggaagtgctgggggattacagggcttgccacggtactctgataaagtggattgaagaaacgacggcgcagcaggaaatgatgaaaccaggtcaggctgaggactcaagggtcctgtccgagcagttgtctcagcaaaccgctctgtttgctgagatagagcggaaccagacaaagctcgatcagtgccagaagttcagccagcagtattcaactatcgtaaaggattacgaattacagttaatgacgtacaaggcctttgtggagtcccagcaaaaatcccctggcaaacgacgtcgcatgctctcaagttccgacgccatcacacaggagtttatggacctcagaaccagatatacagctctcgtcactcttacgacacagcatgtaaagtatatcagcgacgctctcagaaggctagaggaagaggagaaggtggtagaggaggagaaacaagaacatgtggaaaaggtgaaagaattgctgggctgggtgagcacactggccagaaacactcagggaaaagcaacaagtagcgagactaaagagtcgacagacatcgaaaaggcaatcctggaacagcaggtgttatctgaggagctgactacaaagaaggagcaggtttcagaggccattaaaacatcacaaattttcttggccaagcacggtcacaagctcagcgagaaggagaagaagcaaatttctgagcagcttaatgccttaaacaaagcatatcacgatctctgcgacggatcagccaaccagcttcaacagctgcagtcccagttggctcatcagactgaacagaaagaatgcagagccgtcgctggtgtgatcgatctggggacagtcgagatcttccccatcttcaaggctatgcagaaagggttattggatcaggatactggcttggtgctgttggagtctcaagtaattatgtccggcctgattgcaccggaaaccggtgagaacctgagcctcgaggaaggaatcgccaggaatctgatcaatccgcagatgtaccagcagctccgtgaactccaagatgctttggcactcatatcaagattaacggagagtcgaggtccattgagcgtggtcgaagctattgagaaacggatcatctctgaaaccgtgggactgaagatactggaagcccatctggcaaccggtggttttagcctctctccctcggaaaattgtatcaatctggaggaagcctttcaccaggggcttatttctgcgtggctgcactctgtgcttgagtcatatttacgaacttccaaaaacctgatcgaccctaataccgccgaaaaaatcggcctgttggacctgatgcagaggtgtattgtgcatcaggagagcggctttaagctgctccctgtaaaacaactggcaggcggaatggttagccttaaatccgggcgaaaggtttcgatctttcgcgctgttcaggaaggcctgatagacaggcaggtgactgtaaggctccttgaggcccaactatttgcgggtggaatagtcgaccccaggacagggcatagactgaccgtggaggaagcagtgagacataacctcatcgatcaggacatggcctgtgccatcctcatcagacagctccagacagggggaattatcgatacggtgaccgggcagcggttgacaattgacgaggctgtgtccaacgacttggttgctgcgaaaattgcccttgtcatcctggagtccctgtggtcctttatggggctgctttggcctgagagcggggagattctcccaatcacagatgctctcgaacaggggattgtgtcaactgagctggcccacaagatcttgtctaatcggcagcacataaaggctctctttttacctgctacaacagagattctttcttggaagaaagctatagaaagcgggatacttgaccgcgacctggctaacaacttgaagtccatctgcatcccagacgttatgccacatatgcagttggcagattctgccgagcagaacatcaatccaggggctgccgttctcccttgttccaagagtcacccaaaggcgaccgcctcccagagcgaaaatctgctctttcaactgatgacccactcctatattaacgtccaaaatggacagcggttgcttctcctcgacaaagagctgatggagactcttacctctcgggacgaatatcagacatcccctccaaaggtcgtcgaaatcggccaccaacggcagaagactcccgaggggttgcaggaatccgccaacgttaaaatatcagggaccttctctagcggatggaccgtgcgactgcctgagttccagttctctagccaaaataaagagtatcctgatagagaggactgtaccaccgagaaaggaaaaaaaactacggtggaaacagaagattctagcgtggaaaacccggagcaggacctatttgttgagcagaaagagcgtaaccccaatatcgacgcccttaaggtgattaataaagtcaagttagaagtgcagcgccagttaattggaacccaaagggaggaccagactgccgtctctgttcgggaaaacgcctcaagaggccacctgctcaccattcccccagccgaagcggaaggtgtccccttagtggtggacaaagacgtgttctctgtagaaacacctaaaaaggagcaccaacccttgaggaatacatctttcacatgccagaatgaacaggcccacactctggaaactgagtatattcacgacgaaaccggcggtagccatattaagcctcagagcaaaaagctgcaggttcaggtgaaaaaaactctgggtatcaagttagaactgaagagcgagacggacgggaatgtgcaccctctggataagaaagagatgctgaagaagacgtttctggctaaggacgatcacaaggagtcccaggaggcccagaatatcgctggcggatccatgatgatgagtgagaaaactgacgaagaagattccggaagagagatatttctaagttgtagccacccactcgaactgttggaggaagctaccctgaatgtactcagcgcccagttacttgacggcggaatcttccacgagcagacaggacaaaagttgctgcttaatgaggctatttcacgagggatcgtaccatctcacaccgcagtcaagctgatggagaagctaaacatgttccaggggttcttcgactcccagacatgtgagagcttaaccacagaggaggtcattaatgagggcctcatggatgagaagcttttgcacaacgtgctgatggcagacaaggccatcagcggggtactggatccaagaactcagactttgtgtagcgtaaaagacgcagtgacagtggggctgctggacaaggagaccgccacgcgcattctggagcggcaggtggtgactgggggtattatcgatcttaagagaggaaaaaaggtatccgtgactcttgcttccacgcttgggctagtggacgtggcagaccagcccgagctcattaatctggagaaggccagcaagggtcgtgatgccgagaagacggtccgtgaaaggcttatttcactgcagatggaaacgacgggcctgatcgatcctgactcaaaagcacccctgacagttgtgcagtctatcgaccgcggtttactcgaacgagaggaggccgtccgactcctgacaaagcaggtcgtggacggaggcattattcatcacattagcggcatgagactgtctgtagacaatgcatttaggcatggactcatcggtgaggaccttgccgagaaactgaaacgcgtggagaacttgaatatacatcagattttcaatcccgagaccaaggagaacatctccttacctaaggcaatcaaacttgatctgatcacttctgatttaaaacgtgagatccaagaggtgcaggcctttacggggaatttcgttgacctcatctccggacaacgcttaacccttgcagaggccaaaaaggagggcctcctaacaaatgaggccgttcttagtccagggatgatgcacggaattgtggaccccgagaattgtcggattgtgccctactccgaactggtgaagaaatgtaaaatagacatcgaatcaggccagcgctacctggaggtgatccccttttccgatatcaaggacggcgtgagcgacaaggtcctgacattgagccaggcaattcagctaggcaaagttgactttgcctccacgcttaaggtgttggaggcgcaggccaacaccggtggtattatcgataccgccacaggcaagcgcttaacactggccagcgcactggaggagaaactcgtcgatgagaatatggtgaggattatcgcctcccatcaggttctcaatggagggatcgttgacatcttcagtgaccagcgggtgactctggtcgaggccatcgagaagaggttgatcagcccagagcttgccaacatgatacaaattgactcctccgagttttcagatcaccgagctcagatcgaaaaacaagaggggattgaggtttgcgccctgcaaaatgagtttttaggaaaagatatgctaatcgcatgtaatcagactgcagagatgagttgcaacaaagttgaagagtccgaaaggctattccaggtggaaaatcagtccgcccaggagaaggtgaaggttagagtgtccgacggcgagcaggcgaaaaagtctagggaaatcagcctgaaagagtttggatgcaaggaccagagaaagcccaggatgtcatcagatgccaaggaatttatcagcattatcaacccccataatttaaaggggaaatctcttgggcaagtaagtttgacacacccttactctgagtgtgacttcaagttaaaagaagtggcccgaaacaacatgggtaatgatactaacgaggagcaagagaaagccgtcactaaaattgagattatcagccatatgaaacagtccacctcctgcctggactccgaggaaatccgggaaaatcagggcgaggtaatactggaagtgcaagagacatactgcgaaacatctggcaagctgccgtctgagcaggtgctgcagcagcctatgaacgctcgcgtgaagagcaaacgggagaagagagaggtgatcgttgaggagtcaatccggacgtgcaagcctgcatttttgagtgaggaaaaactttatcaggaaactgcgataagagacgagcacgattcacatatcaaatcccagcctagggaaatgacgagtagcgagaaggggaaagaagccgacacagagatggggttttccatcacatttaagattgaggagtcctcgagccaggtggtgccacagggcattagtgttaagcatctcgatgctctgacacttttttcgtctaaacaggctaacgagggtaaagtcaacaacctgagcctgtgcctgactctgaagcctgaggaaaacctctcaagggagattgcctgtggcgcacagtccgagccgtttccatgcatgacacctcgtccagagggactgcactaccaggagtcagacggaaaggctcaggtgaccggtcccagccagatctcaaagacagacaaaagctttcagggaaccaccaggcaggagactaactaccaagatagctgggtcacatccaagactaaggagactaaacaccagatttctagctcgaatgagtgtaaagagaagagctaccaagaagtgtccttcgatcctgcaagaggactgaagctggaggagataaccgtaagccgtcccgattccaaagaagtgcgatacctggaattctccgatcgcaaggatctacaccaccagggcagtaaatctgacgacaagctttgtggcaccctgaagagcgaaattgccacacaggagttgacaggcgagaagttcttggaaatggcgaatccgaacgtggctggcctcgaggccggttcaatagaagacatcgtgacccaacggggtagccgtgtgctggggagctttttaccagaaaaacttttcaagggagtgtctcaaaaggagaataccggccagcagaatgctattatctctccaaccgtgctcgaaacttctgaggagaagactgtttccttaaccgtgtgttctgccgtaaagactgagaagactccgcaggagaagcttcgagaaagccccggttccgagcaaacaccttttatgactgctccagagggcaaggggaacggaggggtgaacccggagcccttccgcgcaacccagaatgtgttcacgagacagctctgccttgagcacgatgagaagctcgtgagctacctcagtcttctccggaacattgagatgaggactaaacaaatccagccgctcgaacttaacctggccgagctccaggaccttctgtgtcaggcaaaagtattagagcgcgagctgaaagacctgacaactctagtcagtcaggagttggagtgtgttaatcagatcatcatttcacaaccgcaggaggtaccagcacagctgctaaaggctctggagaaggacgccaaaaacctacaaaagtcactttcaagtgtaagcgatacttggaattctcgactccttcactttcagaatgcggtggagattgaaaagactaaagttttgaatcaacacacgcagctagagggcagactgcaggacctgagggcctgggtgggtaataaaaacctgatactgaatagtaaaggcagcaatagcgagatcgatgtggattctctgaacctgtgtctgcagcagtacgaggacttaaaacagcccatggcagagcgcaaggcgcaactggacgccctggcttttgatatccagtttttcatttctgagcatgcccaggacctctccccccagcagaaccgccaaatgttgaggctcctgaacgagctgcagagatcattccaggacatattggagcagactgccgctcaggtcgacgcgctgcagggacatttacaacagatggaacaggaagcccttgtaaaaacattgcaaaagcagcaaaacacatgtcaccagcagctcgaggacctgtgcagctgggtgggacaggccgagagagcattggctggccatcagggacgcacgacacagcaggatctgagtgctctgcagaagaatcaaagcgatctgaaagacctgcaagatgatatccagaaccgggcaactagctttgctactgtcgtgaaggacatcgaaggctttatggaagaaaatcaaaccaagctctcacctcgggagcttaccgccctgcgagaaaaacttcaccaagctaaagaacaatatgaggccctccaggaggaaacaagagtagcccagaaagaattagaggaagcggtcacatccgccttgcagcaggagaccgaaaagagcaaggcagctaaggagctcgcagaaaataagaagaaaatcgacgctctccttgattgggtgacctcggtggggtcctccgggggacagctcctcacaaacttaccgggaatggaacagctgtccggcgcttctctggagaaaggggctctagacactaccgatggatacatgggggttaaccaggctcccgagaagctcgacaaacaatgcgagatgatgaaagctaggcaccaggagctcttatcacagcaacaaaattttatcctcgcaacccaaagcgcacaggcctttctagatcagcacggtcataacctgacacccgaggagcagcaaatgttgcagcagaagctcggcgagttgaaggaacagtattccacctctctggcacagagcgaggcggaactgaagcaggtgcagaccctgcaggacgagctgcagaagttcttgcaagaccacaaagagttcgagtcctggcttgagcggtccgaaaaagagctcgagaacatgcataagggtgggtcttcccccgagactctaccgtccttgcttaagcgtcaggggtcttttagcgaggacgtgattagccataagggtgacctgcggtttgttaccatcagcggccagaaagtactcgatatggaaaattcattcaaggagggtaaagagccctctgaaatcggtaatcttgtgaaagacaagctgaaagatgccactgaacgatacaccgccctgcacagtaagtgcacaaggttaggatcccaccttaatatgcttttaggccagtaccatcagttccagaattctgccgattccctgcaggcctggatgcaggcatgtgaagcgaatgttgagaagcttttatccgacaccgtagcttcggatcccggagtgctccaagagcagctcgcgaccactaagcagttacaggaagaattggctgaacaccaggtccctgtcgagaaactgcagaaggtggccagggatattatggaaattgagggtgagccagctcccgatcatcggcatgtccaggaaaccactgactccatcttgtcccacttccagtccctttcatatagcctcgcagagcgatccagcctgttgcaaaaggcaattgcccaatctcaatctgtccaggaatcactagaaagcctgctgcaatctatcggcgaagtcgagcagaatctagaaggcaagcaagtgagcagcctgagtagtggggtgatccaggaagcactcgctaccaacatgaaactgaaacaggacattgccaggcagaagagctccctcgaagcaacgagagaaatggtgactcgatttatggaaactgccgattcgaccactgcagccgtgctgcagggaaaactggccgaggtatcccaacggttcgagcagttatgcttgcagcaacaagagaaagaaagttctctgaagaaattgttgccccaggccgaaatgtttgagcatctcagcggcaaactccagcagtttatggaaaacaagtccaggatgttagcaagcggcaatcagccagaccaagatataacacactttttccagcagattcaggagctgaacctggagatggaggatcagcaagagaacctggatacgttggaacatctggttaccgagttgagtagctgcggatttgctctggatctctgccagcaccaggaccgagtgcaaaatctccggaaagactttactgaactgcaaaagaccgttaaagagagagagaaggatgcttcctcctgccaagagcagctggacgagtttcgcaaactggtccggacgtttcaaaaatggttgaaggagactgaagggagtataccacccacagagacatcaatgagcgcgaaagagttggaaaaacagatcgaacatctgaagagcctgctagacgattgggcgagtaaaggaactttggtcgaagaaatcaattgcaaggggactagcctagaaaaccttattatggagataactgccccagactctcagggaaaaactgggtccatacttccttcagtgggaagttcggtgggtagcgtgaatggataccacacctgcaaggacctgacggagatacagtgcgatatgtctgacgttaacctgaagtacgagaagctgggaggtgtgcttcacgagcgtcaggaatcactgcaggcaatactgaataggatggaagaggtacataaagaggcgaattcggtgctccagtggctggagagcaaggaagaagttctaaaatcaatggacgccatgagttcccctacaaagacagagactgtcaaggcacaagccgaatctaacaaggcctttctggcagagcttgagcagaacagtccaaaaattcagaaggtaaaagaagcacttgcaggtctgctggtcacttaccccaacagccaggaggccgaaaattggaagaaaatccaggaagaattgaactccaggtgggagcgcgctactgaggttaccgtggctaggcagcgtcaactggaagaaagtgctagccaccttgcctgctttcaggcagcagaaagccagttacgaccctggctgatggagaaggaacttatgatgggcgttctgggccctctaagcattgaccccaacatgctgaacgctcagaaacaacaggtacagttcatgctcaaagagttcgaagccagaagacaacaacacgagcaactgaatgaagcagcacagggaattctcaccggacctggcgatgtgtccctctctactagccaagttcaaaaggaattacagtcaataaaccagaagtgggtggagctcaccgacaaactcaactcgagatcttcccaaatcgaccaggctattgtgaagtctacgcagtatcaagagctcctgcaggacctgtctgaaaaagttcgcgcagtgggccagcgactatcagtacaatctgccatctctactcagcctgaggcagtcaagcagcaactggaagagacatctgaaatccggagtgatttggagcagctggaccacgaagtaaaggaagctcagacactgtgcgatgagctgagtgtgctgatcggcgagcagtacctaaaggacgaacttaagaaacggctggagactgttgctctacctctccaagggcttgaggatctcgctgctgaccgtatcaatcggctgcaggctgcactggcctccacccagcagtttcagcaaatgttcgacgaacttcgaacttggttggatgacaagcaatcacagcaagccaaaaactgtcctatcagtgcaaagctcgagcgattacagagccaattgcaggagaatgaggagtttcagaagtctctcaatcaacacagcgggtcgtatgaggttatagttgccgagggagagtctttactgttgagcgttccacccggagaggagaaaagaacactgcagaatcagctagtggagttaaagaatcactgggaggagcttagcaagaagactgcagatagacagagtcggctgaaagactgtatgcagaaggcacaaaagtatcagtggcacgtggaggacctagtgccctggattgaagactgcaaagccaagatgtccgaactccgagttactctggatccggttcagctggagtccagcctactcaggagcaaagccatgctgaatgaggtggagaaacggaggtctctgttggagattttgaactctgccgcagacattctgattaactcgtccgaggctgacgaagacggaattcgtgatgaaaaagcgggtatcaaccagaacatggacgcagtgacagaggaactccaggctaaaacaggttccctggaggaaatgacacaacgactcagggagtttcaggaatcctttaaaaatattgaaaagaaggtggagggcgctaagcaccagctggagatttttgacgcgctgggctcacaagcgtgctcaaataagaacctggaaaagctccgtgctcaacaggaagtgttgcaagcccttgagccacaggtggattacctccggaatttcactcagggcctggtggaagatgcgcctgacgggagtgacgccagccaactgttgcaccaggctgaagtcgcccagcaggaatttctggaagtgaaacagagagtcaacagtggttgcgtcatgatggagaataagcttgagggaatcgggcagttccactgtagagtacgagagatgttctcacaactcgcagaccttgatgatgaattggacggcatgggcgcaattgggagagacacagactcactgcaatcacagatcgaagatgtcaggctctttctgaacaaaattcacgtgctgaaactggacatcgaggcaagcgaggcagaatgcagacatatgctcgaggaggaaggcacactggatctgcttggattaaaacgagagctcgaggccctgaacaagcagtgtggcaagttgactgagcggggaaaggccagacaggagcagcttgagctgaccctgggccgagtagaggatttctaccgcaaattgaagggcttgaatgacgccacaacggctgccgaggaagctgaggccctgcaatgggtagtggggaccgaggtcgaaatcatcaaccagcagctcgccgacttcaagatgttccaaaaagagcaggttgaccctctgcagatgaaactgcaacaggttaacggactggggcaaggactgatccagagcgccggtaaagactgtgatgtgcagggattggagcatgatatggaagaaattaacgcaagatggaacacacttaataaaaaggttgctcagcgcatagctcaactccaagaggcactgctgcactgcggtaagtttcaagacgccctcgagcccttactaagttggctggctgacaccgaggagctcattgccaaccaaaagccacccagcgccgagtacaaggtggtaaaggctcagatacaggaacagaaactactccagaggctactcgatgacagaaaggctacggtcgacatgttgcaggccgaggggggacgaatcgcacagtcagcagagcttgcggacagggagaagattaccgggcagctcgagtctctcgaatcccggtggacagagctcctgtctaaggccgctgccagacagaagcagttggaggacatcctggtgttagccaaacaatttcacgaaaccgctgagccgatatcagactttctatccgtgaccgaaaagaagctagcaaatagcgaacctgtaggaacgcagactgctaagattcaacaacagattattaggcacaaagctctgaatgaggagatagttaaccgcaaaaaaaacgtagatcaggccatcaaaaacggacaggccttgctgaagcaaactaccggagaggaggtgctgctgattcaggagaaactcgacggaatcaagacacggtatgccgacataacggtgacctcctcgaaggcccttaggactcttgaacaggctagacaactggcaacgaagtttcagtccacatatgaggaattaactgggtggctccgggaggttgaggaagaacttgcgacctccgggggtcagagtcctactggggaacagatcccgcagttccagcagcgccaaaaagagctcaaaaaggaggtcatggagcatcgcctggtgctagatactgtcaacgaagtgtcacgcgctttgctcgaactggtgccgtggcgcgcacgcgaaggcctggataaactcgttagcgatgccaacgagcaatacaagcttgtctcagacaccattggccagagggttgatgagatagatgccgcaattcagcgaagccagcaatacgagcaggcagccgacgctgaacttgcctgggtcgcagaaacgaagcggaagctgatggcattaggcccaattcgcctggagcaagaccaaacaaccgcacagttacaggttcagaaagctttctccattgatatcattagacacaaagactcaatggacgagcttttttcccatagatctgagattttcgggacttgtggggaagagcagaaaactgtgctgcaagagaagaccgagtccttaatccaacagtacgaggcaatatcactgctgaactctgaaaggtacgcaagattggagcgcgctcaagtgttggtgaaccagttttgggaaacatatgaggagctgagcccttggatagaggaaacgagagctttaatcgcccagttgccctcccctgctatagaccacgaacagttaagacaacagcaggaagagatgagacagctacgcgaatcaatcgctgagcataagcctcacattgacaagctgctgaagattggaccgcaactgaaggagctgaaccctgaggagggcgagatggtggaggaaaagtatcagaaggccgagaatatgtacgcccagatcaaagaagaggtccggcaacgagcactggccttagacgaagccgtgtcccagagtacacaaatcactgagttccatgacaagattgaacctatgctcgagaccctcgagaacctgtcctctcggttgcgcatgccacccctaatccccgcagaggttgacaagataagggagtgtatttccgacaataaatcggcgactgtcgaactggaaaagttgcagcccagctttgaagccctcaaacgtcgcggagaggagttgattggacggtcccaaggtgccgacaaggatttggcagccaaggaaatacaggacaagctcgatcaaatggtattcttttgggaggacataaaagccagagcagaagaacgagagataaagttcctggatgtcctggaattggctgagaagttctggtacgatatggccgctctgctgacaactatcaaagacacacaggatatagtgcacgatttggaatctcccggaatagacccatccattatcaaacagcaagtcgaagcagctgagaccatcaaggaagaaacggatgggcttcacgaggagttggagtttatccgcatcctgggcgcagacctcatttttgcgtgtggcgagacggagaaaccagaagtccgtaaaagtattgacgaaatgaataatgcctgggagaatttgaacaagacttggaaggagcgcttggaaaagctcgaggacgccatgcaggccgcagtccaataccaggatacactgcaggccatgtttgattggttggataacaccgtcattaaactatgcactatgccacctgtcgggaccgatctgaacaccgtgaaagatcagctgaacgagatgaaagaattcaaagtggaggtctatcagcagcagatcgagatggagaaactgaatcaccagggcgagctgatgctgaaaaaagcaacagacgaaactgacagagatattatccgggaaccccttacagagcttaagcatttgtgggaaaacctcggggaaaagattgcccatagacaacacaaactggagggtgccctgctggcgctgggtcaatttcagcatgcactggaagaactgatgtcttggctgacccacacggaggaactgcttgacgcccaacggccaatatcaggagacccaaaggtgatagaggtggagctggctaagcatcatgtcctcaaaaacgatgtgctcgctcatcaggccaccgtggaaaccgtgaataaagctggaaatgaactactagagtctagtgcaggagacgacgccagttccctgcgcagtagattggaggcgatgaatcaatgctgggagtccgtcctgcagaagacggaagaacgtgagcagcagcttcagtccacactacagcaagctcaggggtttcacagcgagatcgaagattttttactcgaactcactaggatggagtctcagctgtctgcttccaagccaacgggtggcctccctgagacagcacgggaacagttagatactcatatggaactgtattctcagctaaaggcaaaagaagaaacctacaaccagttacttgataaggggagactgatgttgctcagccgggatgacagcggaagtggatcaaaaaccgaacagtcagtggccctgcttgagcagaagtggcatgttgtgtcatctaagatggaggagcgaaaatcaaagttagaggaggctctgaacctggccactgagtttcagaatagcctccaggaattcataaactggctaactcttgcagaacagtccctgaacatcgccagcccccctagccttattctaaacacggtgttgtcccagatcgaggagcacaaggtgttcgcaaacgaagtgaacgctcacagagaccagatcatcgaactggatcaaactggtaatcagctcaagtttctctcccaaaagcaggatgtggtgctaattaagaatctgcttgtctccgtgcagtcacgatgggaaaaggtggtacagaggtccatagagcgaggaaggtcactcgacgatgcaaggaaacgggcaaagcagtttcatgaagcttggaaaaagctcatcgattggctggaagacgccgaatctcacctggactcagagctcgagatctcaaacgatcctgacaagattaagttacagttgtcgaagcataaagaattccagaagacgcttgggggaaagcaacctgtctacgacaccaccatccggaccggacgagccctaaaagagaagaccctgttacccgaggatagtcagaaattggataactttctcggggaagtgagagacaaatgggacacagtttgtggcaagtccgttgagcggcagcataaactcgaagaggcgttgctgttctcagggcagttcatggatgccttgcaggcgcttgtggactggctctataaggtggagccacagcttgcagaggaccagccggtgcacggagacctggatctcgttatgaacttaatggatgctcataaagtgttccagaaggagctgggcaagcgcaccggcacggtccaagtgcttaagcggtctggccgagaactgatcgaaaacagcagggacgatactacttgggttaaaggacagctgcaggaactgagcacacgttgggacaccgtatgcaagttaagcgtttcaaaacaatccaggttggagcaagctcttaagcaagccgaagtgtttagggatactgtccacatgctgctggagtggctgtcggaggcagagcaaaccctgaggtttagaggcgctcttccagatgacacagaggccctacaatccctcattgacactcacaaggaattcatgaagaaagttgaggagaaacgggtcgacgtcaacagtgccgtggctatgggtgaggtaattctagccgtgtgccaccccgactgcatcacaactattaagcactggattaccatcattcgggctaggtttgaggaggtgctgacctgggcaaaacagcatcaacagcgcctcgaaacagccttgagcgagctagtggccaacgccgaactgttggaagaattgcttgcttggattcagtgggctgagaccaccttgatacagcgagatcaagagcccattcctcagaatatcgatagagttaaagctctcattgcggaacaccaaaccttcatggaggaaatgactaggaagcaacccgatgtcgaccgggtaacaaaaacttataagcggaagaacatcgagcctacccacgcgccatttattgaaaagtcccgcagtggaggccgaaagtctctgtcccaacccactcccccacctatgccaattctgagccaatctgaggcaaaaaaccctaggataaatcaactgtctgcacgatggcagcaggtttggctgctcgccctagagcggcaacggaagctgaacgacgcgcttgacagactcgaggagttaaaggagttcgctaacttcgactttgatgtgtggaggaagaagtacatgagatggatgaatcacaaaaagagcagggtgatggattttttcaggcggatcgataaggatcaggatggcaagatcacacgtcaggaattcattgacgggatcttggcatccaaatttcctacaacaaaactcgagatgacggctgtcgccgatatttttgatcgagatggtgatgggtacatcgactactacgaatttgtcgcggctctccatcctaacaaagacgcttataggccgaccacagatgccgacaagatcgaggacgaggtcacgcgccaagtggctcagtgcaagtgcgctaaacgtttccaagttgagcaaatcggagaaaataaataccggttcggcgattcacagcagctgcgcctggtgcggatcctgagatccactgtcatggtcagggtcggaggcggttggatggcccttgatgaatttctggtcaaaaacgatccgtgccgcgcacggggacgcacaaatattgagctccgagagaagtttatcctgcctgaaggggctagtcagggcatgactcctttccggtcccggggtcgacgctcaaaaccatcctcccgtgccgctagtcccactcgctcttccagtagtgccagtcaaagtaatcatagttgcaccagtatgccttcaagcccagctactccggctagtggaaccaaagtgattccgtccagtggctccaaactcaaaaggcccacgcccactttccattcatccaggacttcactagccggagatacctcgaacagtagctctccagcgtcaacgggcgcaaagacgaatagggctgatcccaagaagtccgcctctcgaccaggctcgcgggcaggctcccgagcgggatccagagcaagctcacggagagggtccgatgcaagtgacttcgatctgctcgagacacaaagcgcatgcagcgatacctcagaatcttcagctgccggaggccaaggcaactcccggagaggtcttaacaaacccagtaaaatcccaaccatgagtaagaagacgactacagcctctccacgaacccctggacctaaacggtat

SEQ ID NO: 230544 - DNA, 1155 bp, synthetic construct
  misc_feature 1..1155: note = Description of Artificial Sequence: Synthetic coding sequence
  source 1..1155: mol_type = other DNA
atcaccagcccctgggcaccacgcccttcctgcagcagcccatgggcaatgtcatcttctgacgaagaaacgttaagtgagagatcttgtcgctctgagaggtcatgccggtccgagagaagctaccggagcgagcggagtggttctctgagcccttgtccacctggcgacacactgccttggaatctccccctgcacgaacaaaagaaaagaaagtctcaggattccgtactggatccagctgagagagccgtcgtgcgggtggcagatgagagggatagggttcaaaaaaaaacattcactaagtgggttaacaagcatctcatgaaggtccgaaaacacatcaacgacttgtatgaagatctgagagacggccacaatttaatctctctactggaggtattgtctggcattaagctcccacgcgagaaaggacgcatgaggtttcacagactgcagaacgtgcaaattgctctggatttcttgaagcagagacaggttaagctcgtgaatatccggaacgatgacatcacagacggcaatccgaaacttacattagggcttatctggaccatcattcttcactttcagatctccgacatttatatctctggcgaatctggggacatgagcgcaaaagaaaaactccttctttggacccaaaaggtgaccgcaggatatacgggcattaagtgtactaacttctcttcttgctggagtgatggcaagatgttcaacgcgctgattcatcgttatcggccagatctggtggatatggaacgtgtccagattcagtccaaccgggagaacctggaacaggcgtttgaggtggctgaaagactaggcgtgacacggctgctcgacgctgaggacgtggatgtgccttccccagacgaaaagtcagtcataacctatgtgtcttccatctacgatgcttttcccaaggtgcccgaaggaggggaaggaatctcagccacagaggtggattctcgctggcaggagtaccagtccagggtggactcactgatcccttggatcaaacaacacactattcttatgtctgataagactttccctcagaacccagtggaactcaaagctttatacaatcagtacatacatttcaaagagaccgagattctagccaaggagtag

SEQ ID NO: 230545 - DNA, 603 bp, synthetic construct
  misc_feature 1..603: note = Description of Artificial Sequence: Synthetic coding sequence
  source 1..603: mol_type = other DNA
atgcctcttctggattccagttatctcccacctacaatcttcatattgacacacgttctgggtgtggcgggagtgttgtactggaagcggcacgccagagggcgagcagacgagcgagatagggtgcagaaaaagacattcacgaagtgggttaataagcatcttatgaaggtgcgaaagcatatcaatgatctttatgaggaccttagggacggacataacctcatatcactcttggaagtcctgtccgggattaagctccctcgcgaaaaaggccgaatgcgattccaccgactgcagaatgttcagatcgctcttgatttcctgaagcagagacaagtaaaacttgtaaacatacggaatgacgacatcactgatgggaaccctaagctgactttagggcttatctggaccatcattctgcactttcagatcagtgacatatacatctccggagagtctggagatatgtctgccaaagaaaagctgttgctatggacccagaaggtcacggctggctatacgggtattaagtgcactaatttttcctcatgttggtcagacgggaagatgtttaatgccctcattcacaggtatcggtag

SEQ ID NO: 230546 - DNA, 15902 bp, synthetic construct
  misc_feature 1..15902: note = Description of Artificial Sequence: Synthetic coding sequence
  source 1..15902: mol_type = other DNA
atgtcttcctctgacgaagagaccctgagcgaaaggtcctgcaggtctgaaagatcctgccgttccgagaggtcttaccgctccgagaggtctggttcactatccccctgtcccccaggagacaccttaccttggaatcttcccctgcacgagcagaagaaacgtaagagccaagatagtgtcctggatcctgccgagagggctgtggtgcgcgtggcagacgaacgggatcgcgttcagaagaaaacgttcacgaagtgggtcaacaagcatcttatgaaagtgcggaaacacatcaatgacctatatgaagacctcagggatgggcataatctaatatccctgttggaagtgctgtcagggataaagctcccgagagagaagggcaggatgcgattccatcgcctgcaaaacgtgcagattgcactcgacttccttaaacagcggcaggtcaagttggtcaatatccgcaatgatgatataactgacggaaacccaaaactgaccctgggtctaatctggactattattctccacttccaaatttcagatatttatatcagcggcgaaagtggtgacatgtcagcaaaggagaagctgcttttgtggactcagaaggtcacggccggatatactggaattaagtgtactaattttagctcttgttggtcagatggcaagatgttcaacgccttaatccaccgctataggccagacctggttgacatggaaagggttcagatccaatcgaaccgggaaaatctcgaacaagcgtttgaggtggccgagaggctgggcgtgacaaggctgcttgacgcggaggatgtcgatgtgcccagccccgacgagaaatcggtgatcacatacgtctctagcatttatgacgccttccctaaagtgcccgaggggggagagggcattagcgctactgaagtggactcacgctggcaggagtatcagtccagagtggactccctgatcccatggatcaaacaacatactatcctcatgtccgataagacatttccccagaacccagtggaacttaaggcgctttacaatcagtacatccattttaaggagaccgaaattctggctaaggaaagggagaaagggaggatagaggagttgtacaaactcctcgaggtctggatcgaattcggacgcatcaaactgccacagggctaccatccaaatgatgtggaggaggagtggggcaaactgattattgaaatgttggagcgagagaaaagcctccgccctgccgtagagcgtttagaactccttctgcagatcgccaacaaaattcaaaatggcgctttaaattgtgaggaaaagttgaccctcgctaagaataccctgcaagcagatgccgctcacctggagagtggtcaacctgtgcagtgcgaaagcgacgtgattatgtatatccaggagtgtgaggggctaattcggcagctgcaggttgacttacagattcttcgagatgagaactactaccagctcgaggagttggcctttagagtgatgcgcctgcaagatgagctggttactttgcgcttagaatgtactaatttataccgaaagggccatttcacgtccctagagctggtaccacccagtaccctgaccacaacacaccttaaggctgagccattaacaaaagccactcactccagctccacctcctggtttcgcaagcccatgactcgagcagagttggttgccattagttccagcgaagacgagggaaatctgcgcttcgtttacgagctgctcagttgggtcgaggaaatgcagatgaaactggagcgggctgaatggggaaacgacctgccttctgtggaactgcagttggagacccaacagcacattcatacctcagtggaagagcttgggagttctgtcaaggaggctcgcctatacgagggcaaaatgtcgcagaatttccacacgtcatacgctgaaactctgggcaagctcgaaactcaatactgcaaactaaaggaaacttcctcctttagaatgaggcacctgcagagtcttcacaagtttgtgtccagggcgacagccgagctcatttggttaaatgagaaggaggaggaggagcttgcctatgactggtccgataataactctaacatcagcgccaaaaggaactacttttccgagctcacaatggagttggaggaaaaacaggatgtttttcggtctttgcaggatacggccgaacttctgtctttggaaaatcatcccgcaaaacagactgtcgaggcatactctgcggctgtgcagtcgcagctgcagtggatgaaacaattgtgcctatgcgtcgaacagcacgtgaaagagaatactgcctactttcagtttttctccgatgccagggagcttgagagttttttgcggaacctgcaggattcaatcaagcgaaaatatagctgcgatcacaacacaagtcttagccggctagaggacctcctgcaggactccatggatgagaaagagcagctcattcaatctaagagttctgtggccagtctggtgggacgcagcaaaacaatcgtccagcttaaaccgcgatcaccggatcatgtgctgaaaaataccatctccgtgaaggccgtgtgtgattaccgccagattgagatcacaatttgcaagaacgacgagtgcgttctcgaagataactcacagaggactaagtggaaggtgataagtcctactggaaacgaggccatggtgccgagcgtgtgtttcctgatcccgcctccaaataaggacgccatcgagatggcatcgcgggtcgaacagtcctatcagaaagtgatggccctgtggcaccagctgcatgtgaatacgaagtcccttatttcgtggaattacctacgtaaagacctggacttggtccagacttggaacctggagaagcttaggagctccgccccaggagaatgccatcagatcatgaaaaacctgcaggcacattatgaggacttcctgcaagattcccgcgatagtgtgctgttttccgtggcggacaggctgcgcttagaggaagaagtggaggcttgcaaagctcgttttcagcatttgatgaaatctatggagaacgaggataaggaggagactgttgctaagatgtacatctccgaactgaagaatatccggctgcgactcgaagagtacgagcagcgtgttgttaaacggatccagtccctcgcctccagccgcacagaccgcgacgcttggcaggataacgccctgagaatcgctgaacaagagcatactcaggaggacctccaacaacttcgcagtgacttggatgctgtttccatgaagtgcgactctttcctgcaccagagcccctcatctagctctgttccgactctgcggtctgaactgaatcttttagtggagaagatggaccacgtttacggcctgtccactgtatacctgaacaagttgaagacggtagatgttatagtgcgatcgattcaggacgccgagttgctggtgaagggctatgaaatcaaactcagtcaggaggaggttgttctggccgacttatcggccttggaagcacactggtctacactaagacattggctcagtgacgtgaaggacaaaaattcagtgtttagcgttttagatgaggaaatcgccaaagctaaagtagtggccgagcagatgtctaggctgactcctgagagaaacttggatttagagcggtaccaagagaagggctctcagctgcaagagcgctggcaccgcgtgattgcacaattagagattcgacagtcagagctagagtccattcaggaggtgcttggcgactaccgagcatgtcacggtacactgatcaagtggatcgaagagacgactgctcagcaggaaatgatgaaacccggtcaggcagaagatagtcgtgtgctatctgaacaactttctcagcagacagccttgttcgccgaaatcgaacgcaaccagactaaactcgatcagtgtcagaaattttctcagcaatattccactatcgttaaggactacgagctccagctgatgacatataaggctttcgtggaaagtcaacaaaagagtccaggcaaacggcgacgaatgctcagttcaagtgacgcgatcacgcaggaattcatggacttgcgcaccaggtataccgcccttgtcacactgaccactcagcacgtgaagtatatttccgacgctctccgcagactggaggaggaggagaaagttgtcgaggaggagaagcaggagcatgtcgagaaagttaaggaactgctgggatgggtctctacattggcacgtaacacccagggtaaggccacatccagcgaaaccaaggagagcacagacattgagaaagccatccttgagcagcaggtgttaagcgaggagctcaccaccaaaaaggaacaggtcagtgaagcaatcaagacctcccagatctttctcgccaaacacggacacaaactcagtgagaaggaaaaaaagcagatctccgaacagttgaacgcgctcaataaggcctaccacgacttgtgcgatggatccgctaaccaactccaacagctccagtcccagttggcccaccagacagagcaaaaaacgctgcaaaaacaacagaacacttgccatcagcaactggaagacttgtgttcctgggttggtcaggcagagcgtgcattagctggacatcaggggcgaaccacccagcaggacctgagcgccctccagaagaatcagtcagatctgaaggatctgcaagacgatatacagaaccgggctactagcttcgctactgtggtgaaggatatcgaaggtttcatggaggagaatcagaccaagctgagccctcgagaattaactgcgctgagagaaaagctgcaccaggccaaggagcagtatgaggctcttcaggaggagacgcgggtcgcccagaaagaactggaagaagccgtgacttccgccctacaacaagagactgaaaagtcaaaagctgctaaggagttggccgaaaataagaaaaagatcgatgctctcttggattgggtgacaagcgtgggaagctccggaggtcaactgttgaccaacctccctggtatggaacagctttctggcgcttccctggagaaaggagctcttgatactaccgatggctacatgggagtaaatcaagctcctgaaaagctcgacaaacaatgcgagatgatgaaagccaggcatcaagagctgctgtcccagcagcagaacttcattctggctacacagtctgcacaagcatttctggaccagcatggtcacaatctgacaccagaagagcagcagatgctgcagcaaaaattgggtgagctgaaagaacagtactccaccagtctcgcccagtcggaggctgagttgaagcaggtacagactcttcaggacgagctgcagaaattcctgcaggaccacaaggagtttgaatcatggctggagcgcagcgaaaaagagctcgaaaacatgcacaaagggggtagctcaccagaaactctgccgtccttactgaagcggcaaggatcattctccgaagacgtcattagccacaaaggggacctcaggtttgttactattagcggccaaaaagttctggatatggagaattcattcaaggaaggaaaggaacccagtgagattgggaacctggtgaaggacaaacttaaggatgcaaccgaaaggtacaccgctcttcacagtaagtgtactaggttggggtcccatctgaatatgctccttgggcagtatcatcaatttcagaactcggcagactccctgcaggcatggatgcaggcttgcgaagctaatgtagaaaagctactgagcgacacagtcgcctctgaccccggtgttcttcaagagcagctggctacgacgaagcagctgcaggaagagctggcagagcaccaggtgcctgttgagaagctgcagaaggtcgccagagacattatggagatagaaggggaaccagctccagatcatcgacacgtccaggaaaccactgactcaatcctttctcactttcagtctctcagctactcactggctgagcggagttctctgcttcagaaagcaatagctcagagccaaagcgtacaggaatcgctggagagccttctgcagtccattggggaagttgaacaaaatctagagggcaaacaggtctcgtcactcagcagcggcgtaatacaggaggctttggccaccaacatgaagcttaagcaggatatcgcacgacagaagtcctcattggaagcaacccgcgaaatggtcacaaggttcatggaaaccgctgactcgaccactgctgctgtgctgcaaggcaaactcgctgaggtgtcacagcggtttgaacagttatgcctgcagcagcaggagaaagaatccagcctcaaaaagctcctcccccaggctgaaatgtttgaacacctgtcagggaagcttcagcagtttatggagaacaagtcccgcatgcttgcaagcggcaatcaacctgatcaagacattacgcatttcttccagcagatccaggaactgaacttggaaatggaggaccagcaagaaaaccttgacaccctcgagcacctcgtgactgagttgtcctcatgcggatttgctctggacctgtgtcaacatcaggaccgggttcagaacctgagaaaggattttaccgagttgcagaagaccgtcaaagaacgggagaaagatgctagtagctgtcaggagcagctggatgaattccgtaagctggtgaggacctttcagaagtggcttaaggaaacggaaggatcgattccaccaacagagacctccatgtcagctaaagaactagagaaacagattgaacatcttaagagtcttttagacgattgggcgtcaaagggtaccctggtggaggagatcaactgcaagggcactagtctcgagaatctgatcatggagatcacagcaccggatagtcaaggaaagactgacctgacagaaatccaatgtgacatgtccgatgtcaatttgaaatatgaaaagcttggcggagttctccacgaacgccaggagtctctgcaggccatactcaaccgcatggaggaagttcacaaagaagcaaatagtgtgctccagtggttggagagtaaagaagaagtgttgaagtccatggatgctatgagctcccccaccaagacagagaccgtcaaagcccaagccgagtcgaataaggcattcctggcagagcttgagcagaacagccccaagatccagaaagtgaaggaggcgctggccggtctgctagtgacttatccaaactcccaagaggcagaaaattggaaaaagatacaagaggagttgaacagtcgctgggaacgggctacagaggttaccgttgccagacagcggcagctcgaggagagcgcctcacacctcgcgtgtttccaggctgcagagtcacagctgcgcccttggttgatggagaaggaactcatgatgggcgtcttaggccctctcagcatagatccaaatatgctgaacgcccagaagcagcaggttcagttcatgctgaaggagttcgaggccaggaggcagcagcatgaacagctgaacgaagccgcacaagggatcctgacggggccaggcgacgtgtctctgagcactagtcaggtccagaaggagctgcagagtatcaatcagaaatgggtggaactcacagacaagctgaactccagaagttcacagatcgaccaagcgattgtaaagagtacccagtatcaagaactgctccaggatctgtccgagaaagtgcgagcagttggccagagactgtccgttcagagtgccatcagcactcagccagaggcagtgaagcagcagctcgaggagacaagtgagattagatcagacctggagcaactggatcacgaagttaaggaagctcagacactctgcgacgaactgagtgtgctcatcggcgagcagtatttaaaagatgagctgaaaaagaggctggagaccgtagccctgccactccaaggactcgaagacttggcagcagatcgaattaacaggctgcaggccgcacttgcatccacacaacagtttcaacagatgtttgatgaattacgaacatggttggatgataaacaatcgcagcaggctaaaaattgcccaatttccgccaaactcgaacgacttcaatcacaactgcaagaaaacgaggagtttcaaaaatcccttaatcagcacagcggaagctacgaggtcattgttgccgagggggaaagtcttctgttgtccgttcccccaggggaggaaaagcgtactctccagaaccagttggtggagctgaagaaccactgggaagagttgagcaagaaaaccgcggacagacagagtcggctcaaggactgcatgcagaaagcgcagaaataccagtggcacgtcgaagacctggtgccatggatagaagactgcaaggcaaagatgagcgagttgcgggtgactctcgaccccgtgcagctcgaaagttcgctacttcggtctaaagccatgctgaatgaggtagaaaagagaagaagtctcctggagatcctgaactctgccgctgatattctgatcaactcaagcgaggccgatgaggatgggattagagatgagaaagcaggcatcaatcaaaacatggacgctgttaccgaggagctgcaggctaagactggcagtcttgaggagatgacacaacggctgcgtgaattccaggaatcttttaaaaatattgaaaagaaagtcgagggtgctaagcaccagctcgagatatttgacgcactaggtagccaggcgtgtagtaacaagaacttggagaaactgcgcgcacagcaagaagtactgcaggccctagaaccccaggttgactacttaagaaacttcacccagggcctggtagaagatgctccagatggctctgacgcgtcccagctgctccaccaggccgaagtagcacagcaggaattcctggaagtgaagcaaagagtgaacagcggctgtgtgatgatggagaataaactggaagggattgggcagttccactgtcgtgtacgagagatgtttagtcaactggccgacctggacgacgaactggatgggatgggcgctattggaagagacaccgattccctccaatcccagatagaggacgtcagattgtttttgaataagatccacgtcctgaaactggatatcgaggccagtgaggccgaatgtagacatatgctggaagaagaaggtaccctggacctcttgggcctaaagcgggagcttgaggcgttgaataagcaatgtggcaagctgaccgagcgagggaaggcgagacaagagcagctcgagttgacgctcgggagagtggaggacttctacaggaaacttaaagggttgaacgatgccacaacggctgccgaagaggccgaggcactacagtgggtggtgggcaccgaagtcgaaatcatcaaccagcagcttgctgactttaaaatgttccagaaagaacaggtcgacccacttcagatgaagctccaacaggtgaacggcttgggacagggactgatccagtcagctggcaaagactgcgacgtacaagggctggaacacgacatggaagaaattaatgcacgctggaacactcttaataagaaggttgcgcagagaatagcacaactgcaggaagctttgctgcactgcggaaagttccaggatgctttggagcctctgctttcctggctggctgacacagaggaactgatcgcaaaccagaagccgccatctgcggagtataaggtggtaaaggcacagattcaagagcagaagctcctgcaacgccttttagacgacagaaaagccactgtggatatgctgcaggcagagggtggcagaattgcccaaagcgccgagctcgcggatcgtgagaaaataacgggtcagttagaatccctagaatcaagatggaccgagctcctgagcaaggctgctgcaaggcagaaacagttggaagacatcctggtgctggctaagcaattccacgagacggctgaacccataagtgattttttatctgtcacagaaaagaaactggccaattcggagcccgtgggcactcagaccgcgaagatccagcagcagattattcggcacaaagccttaaacgaggagatagttaaccgcaagaagaacgtggatcaagcgattaagaatggacaggcacttctaaaacagacgaccggcgaggaggtgctgctcattcaggaaaaactggacggcattaagactagatatgccgatatcacggtaacttcctctaaggccctgcggactctagagcaggctcgacaactggctacgaagttccagtccacttacgaagaattgaccgggtggctgagagaagtggaggaagagctagcaacatcaggaggtcaatccccaaccggcgagcagatcccgcagtttcagcagcggcaaaaagagctcaaaaaagaagtgatggagcatagactggttctggacaccgtcaacgaggtgagtcgggcactccttgagctggtaccatggcgggcacgagagggtctagacaagctagtgtccgatgccaacgagcagtacaagctggtgtctgatactatcggccagagagtggacgagattgacgctgctattcaaagatcgcagcagtatgaacaggctgcagacgccgaattggcttgggtcgccgaaaccaagcgaaaattgatggctctaggacccatacgcttagaacaagaccagacaacagcacagttgcaggttcaaaaggccttcagtatcgatattattcggcacaaagactctatggatgagcttttttctcaccggtccgagatctttggcacttgtggggaagagcagaaaactgtgctccaggagaaaaccgaatccctgattcagcaatatgaagccattagcttgcttaatagtgagcgctacgcgaggcttgaacgtgcccaggttctcgtgaatcagttttgggagacctacgaggaattgagtccttggattgaagagacgcgtgctctgatcgcccagctgccgagccccgctattgatcatgagcagctgcgacagcagcaggaagaaatgaggcaactgcgtgagagtatcgcagagcacaaaccacacatcgataaattgctgaagatcgggcctcagctgaaggagctgaatccagaagagggcgagatggttgaggagaaataccaaaaggctgaaaatatgtacgcccagatcaaagaggaagttagacagagagcgctcgccctggacgaggctgtctctcagtctactcaagtttctcagtttcatgacaagattgaaccgatgcttgaaaccctcgagaacctgtcttcccggttgcgcatgccgccattgataccagccgaggtggacaaaatcagggagtgtatctctgataacaaaagcgcaacagtagagctcgagaagctccaaccgtcatttgaggccctcaagcggagaggcgaggagttgatcggaaggagccagggagcggataaggatctggcagcgaaggagattcaggataagctagatcaaatggtttttttctgggaggatattaaggcccgagctgaggagagagaaatcaagttcctcgacgttctggaattggccgaaaaattctggtacgatatggctgccctcctcaccaccatcaaggatacccaggacatagtgcacgacctggaatcccctgggatcgacccaagcataattaagcagcaagtcgaagccgcagagacgatcaaggaggagacagatgggctgcatgaggagctggagttcattaggatcctcggagctgatcttattttcgcttgcggtgagacagagaaacccgaagtcaggaaatctattgatgaaatgaacaatgcatgggagaatctcaataaaacatggaaagagaggctggaaaagctggaggatgccatgcaggctgccgtgcagtatcaggacactctccaagccatgtttgactggctggacaacaccgttatcaagctctgtacaatgccgccagtgggaacagatctgaataccgtgaaggaccaactgaatgagatgaaagaatttaaggtggaggtataccagcagcagatcgagatggaaaaattaaaccatcaaggggaactcatgctgaaaaaagccactgatgagactgatcgcgacatcatccgtgagcctttaacggaattaaagcacctgtgggagaacctcggcgaaaagatagcccacaggcaacacaagcttgagggcgctctcttagccctgggccaattccagcatgcgctggaagaacttatgtcctggctgacgcacacggaagagttgctcgacgcacaaaggccaataagtggggatcccaaggtaatagaggtggaactggcaaaacatcacgttctgaaaaacgatgtgctggcgcaccaggccacagttgaaacggtgaataaggctggtaatgaattacttgagagttcagccggtgacgatgcatcttcccttcggagtcggctggaggctatgaaccagtgctgggagagcgtgttacagaagactgaggagagggaacagcagctccagtctactctgcagcaggcccagggttttcactctgagatcgaggatttcttgttggagctgacccggatggagtcacagctgagcgcttcaaagccaaccggcggactgcccgaaaccgccagggagcaactagatacccacatggagctttatagccagctaaaggccaaggaagaaacttataatcaactgctggacaagggtcgattgatgctgctttcacgggatgattctggatcaggatccaaaacagagcagagcgtggccctgctcgagcaaaaatggcatgtcgtgtctagcaaaatggaggaacggaagagcaagttagaggaggccctgaacctggccacggagttccagaactcgttgcaagagtttatcaactggctcactctggccgaacagtccttgaacatcgcctcaccaccgtcattgatcctgaacaccgtgctctcgcagatcgaggaacataaagtctttgccaacgaggtcaacgcccaccgggaccagattattgaactagatcagacaggcaatcagctgaagtttctcagccagaaacaggatgtggtgttgatcaagaacttgttggtctcagtccaaagtcggtgggagaaggttgtgcagaggagcatcgagcggggtaggtcactagacgatgcccgaaagagggctaaacaattccatgaagcctggaagaaactcattgattggctcgaagacgccgagtctcatctcgacagcgagctcgaaatttccaatgaccctgataaaatcaagttacagctaagtaagcataaggaattccagaaaaccttaggaggtaaacagcccgtgtatgatacaacaatccggacggggcgtgccctaaaggagaagaccctcttgccagaggattcacagaagctggacaattttctgggggaagtaagagataaatgggatacggtgtgcggaaaaagcgtagagcggcaacacaaactggaggaggccctgctcttctcagggcagtttatggatgctctgcaggcactcgtggactggctgtataaagtggagccccagctcgcagaagatcagcctgttcacggtgatctggacttagtaatgaatctcatggatgctcacaaggtcttccagaaagaacttggcaaacgcacaggaacagtgcaggtgcttaagagaagtgggagagagctaattgagaatagccgggatgataccacttgggtcaaaggccagctgcaggaactatctaccaggtgggatacagtctgcaaactgtccgtgagcaagcagagccgtctggagcaggccctcaaacaggctgaggtatttcgggacaccgtgcatatgctactcgaatggctctctgaggctgagcagaccctacggtttagaggagccttgccagacgacactgaggcgttacagtccctcatcgacacccataaggaattcatgaaaaaggtggaggaaaaacgcgttgacgtcaactcagctgtagccatgggagaagtcattctggctgtttgccatcctgactgcataactaccataaagcactggataaccatcatccgggctcggttcgaagaggtcctcacctgggcgaagcagcaccagcagcgtctggagacagcactgtcggagcttgtcgctaacgccgaattgttggaagaacttttagcatggatacagtgggccgagacaaccctgatacagagagatcaggaacctattcctcaaaacatcgacagagttaaagccctgatagctgaacatcagacgtttatggaggaaatgacccgcaagcagcccgacgtcgacagggtaacaaaaacgtacaagcggaagaatatagagccaacgcatgccccattcatcgagaagtctagatccggcggacggaagagcctctctcagcctaccccaccacccatgcctattctaagccagagtgaggcaaagaaccctaggattaaccagctgagcgcccgttggcagcaggtctggttacttgccttagaaagacagagaaagctcaatgacgccctcgaccggttggaggagctaaaagaatttgccaactttgactttgatgtttggcgcaagaagtatatgagatggatgaaccataagaagagccgcgtgatggattttttccgccgaattgacaaggaccaggacggcaagatcacaaggcaggagttcatagacggcatcctggccagtaaatttccaacgaccaagctggaaatgaccgccgtggccgacatcttcgacagagacggagatggctacattgattactacgagtttgtagccgctctacacccaaataaggatgcgtaccgtccaactaccgacgccgataaaatagaagatgaagtaacccgtcaggtggctcagtgtaaatgcgccaagcggtttcaagtggagcagatcggcgagaataagtaccggtttggagattctcaacaactgcggctggtccgaatcctgcgatccactgtgatggtgcgagtgggaggaggatggatggcgctggacgagttccttgtgaagaacgacccgtgtcgcgcaagaggtcgcacaaatatcgaactgagggagaaatttatcctgccggaaggtgcctcacagggaatgacaccattcaggtcacggggtcgccgatccaaaccatcgtccagggcagctagccccactcgctcctcgtcttccgcctcccagtctaaccactcctgcacctcaatgccttcttcccccgcaactcctgcctctggtactaaagttattcccagtagcggatctaaacttaagagacccaccccgacgttccactcctctaggaccagcctagctggcgacacgtccaacagttcgagtccagcctctacaggagcaaagacaaatagggctgaccccaaaaaatctgcctcaagacctggctcccgtgccggttcccgggcagggtctagggcttcctctcgtagggggtccgacgcctctgacttcgacttgttggaaacccagtcagcttgctccgatacctccgagtctagtgcagccggaggacagggcaacagcagaagagggctgaacaagccatctaagataccgaccatgtctaaaaagacaacgactgcttcccccagaaccccgggtcctaagcgcta

SEQ ID NO: 230547 - DNA, 1035 bp, synthetic construct
  misc_feature 1..1035: note = Description of Artificial Sequence: Synthetic coding sequence
  source 1..1035: mol_type = other DNA
atgaccgcagtggcagatatttttgatcgggatggcgatggctacattgattattatgaattcgtagcagctctgcatcctaataaggatgcttatcgacccacaacagacgcggacaagatagaggacgaggtgacccgacaggtggcacaatgtaaatgcgcaaaaagatttcaggttgagcagataggggagaataagtaccggttcggcgacagccagcaactgaggctcgtcagaatactaagaagtaccgtgatggttcgggttggagggggatggatggccttggacgagtttcttgtgaagaatgacccctgccgtgctcgagggaggactaacattgaattgagagagaaatttattctccccgaaggtgcgagccagggaatgaccccattcagatctcgcggacgcaggtctaagccaagctcgagagcggcttcacctaccaggtcgagttcctccgcctctcagagcaaccattcttgcactagcatgccatcctctcccgctaccccagcttcaggtacgaagacctccctgcagttcagtcggtgttacgataagccttggctcgtgaattccaaggccggaactcctatcagagatagccacagccccgatctgcaactgccgacacccgaagtgattccaagttcaggaagtaaacttaagcgaccaacacctacgtttcatagctcacgcaccagcctcgccggagacaccagcaacagctcatcccccgctagcacaggcgctaagactaacagggctgacccaaaaaagagtgcgtcccgacctggctccagggccggatccagagccggttcacgcgcatctagccggagagggtccgatgcctccgattttgacctcctggagacccagtcagcctgctctgacacctccgagagcagtgcggcaggtggacaggggaattctcgacgagggctgaataagcccagcaaaattcctaccatgtctaagaagactactacagccagtccaagaacccctggtccaaagagatag

SEQ ID NO: 230548 - DNA, 16292 bp, synthetic construct
  misc_feature 1..16292: note = Description of Artificial Sequence: Synthetic coding sequence
  source 1..16292: mol_type = other DNA
atgagctcctctgacgaagagacattatctgaaaggtcctgtcgtagcgagagatcttgtcgttctgagagaagttaccggagtgaaaggagtggaagcctgtccccatgccctcccggagacaccctcccctggaatctgccactacatgagcagaagaagcgaaagtcacaagatagtgtcctggatcctgcggaaagggctgtcgtccgggtggccgacgagagggacagggtgcagaagaagacattcacaaagtgggttaataagcacctgatgaaagtgcggaaacacatcaacgatttgtatgaggatctgcgggatggccataatttgatcagtcttctggaagtgctgtcaggaataaagctccctcgggaaaaaggtcggatgcgcttccaccgattgcagaatgtccagatcgccttggactttcttaagcaacgacaggtgaaactggtgaacatccgaaatgacgatattacagatgggaaccccaagctgaccctcgggctgatttggacgatcatccttcacttccagatctcagatatttacatttccggagaatccggggacatgagtgctaaggaaaagctcttactttggacccagaaagtgacagctggatatactggcattaaatgcacaaatttttccagctgttggtctgatggaaagatgttcaacgccttgatccaccgctacagacctgatttagtggatatggaacgggtgcagatccaaagcaatagagagaacctagaacaagccttcgaggtggcggaacgattgggcgttacgagacttctggatgccgaggacgtggacgtaccctctcctgatgaaaagtcagtcattacttacgttagctctatttacgatgcttttccaaaggtcccagagggcggagaaggcatcagcgccactgaggtagacagccgctggcaggagtaccaatctcgagtggattcactgatcccatggataaaacaacatacaatattgatgtctgacaaaaccttccctcagaacccggttgaactaaaagccctgtataatcagtacatccacttcaaggagacagagatactggcgaaggaacgggaaaagggacgtatcgaagaactgtataagctgctggaggtatggatcgaatttggccgaatcaaacttccccaggggtaccaccccaacgatgtggaagaagagtggggcaaattaattattgaaatgctcgagcgggaaaagtccctcagaccagctgtggaacggttagaactgctcttgcagatcgctaacaagattcagaacggagccctgaattgcgaggagaagctcaccctggccaagaacactctccaggctgatgctgctcatctggagtctggccagccagtacagtgcgagagcgatgtgattatgtatattcaggaatgtgagggtttgatcaggcagttacaggtagatctgcagattctgagagacgagaattattaccagttagaagaattagcctttcgtgtgatgagattgcaggacgagctcgtgaccctgcgcctggaatgcaccaacctgtacaggaaaggccactttacttctttggaactggtacctccatctactttgactaccactcatctgaaggccgaaccactgacaaaggcaactcactccagttctaccagttggttcaggaaaccaatgacaagagcagagttagtggctatcagcagttccgaggatgagggaaacctcaggtttgtctacgagctattaagctgggtggaagagatgcagatgaaactggagagagccgaatggggcaacgacctgccgtctgtggagctccagttggaaacccagcagcatatccacactagcgtcgaggagctaggaagcagcgtgaaggaggccaggctctatgaaggcaagatgagtcagaattttcacacatcttacgccgagacacttggaaaactcgagacacagtactgcaagcttaaagagacttctagcttcagaatgagacacttgcagtcactgcacaagttcgtctctcgggctacagctgaactcatttggctgaatgagaaggaagaggaggagctcgcatatgactggtcagacaacaactcgaacattagtgcaaagcgcaactactttagcgaattgacgatggaattggaagaaaaacaggacgtgttccgcagtttacaagacacagctgaactcctcagcctcgagaaccaccctgccaagcaaaccgtcgaggcctactcagccgctgtacaatctcagctgcaatggatgaagcaattatgcctttgcgtagagcagcatgtgaaagaaaatactgcgtactttcagttctttagcgatgccagagagctggaatcttttctgcgaaacctccaggatagcataaaaagaaagtattcctgtgatcataacacaagtctttctcgcctcgaggatctgctgcaggacagcatggacgaaaaagagcagctgattcagagtaaaagttcggtagcctcactggtgggcaggagcaagaccatcgttcaactcaaaccaagatcacctgaccacgtgttgaaaaacactatttctgtgaaggctgtgtgcgactatcggcagatcgagattacaatatgcaagaacgacgaatgcgtcttagaggacaattcccaacgcaccaaatggaaagtcatttcacctacaggcaatgaggccatggtcccgagtgtgtgctttctgatcccaccacccaacaaggatgctatcgagatggcctctcgagtagagcagagttatcaaaaagtcatggcactttggcatcagttgcatgtgaacacaaagtcactcattagttggaactaccttcgcaaggatctcgaccttgtccaaacctggaatctcgagaagctgcgttctagtgccccaggcgaatgccaccagatcatgaagaacttacaagcccactacgaggatttcctgcaggacagccgcgatagtgtgctgttttccgtcgcggaccgattgcgcctcgaggaagaagttgaggcgtgcaaggctcgctttcaacacctcatgaagtctatggagaacgaggataaagaagaaaccgtggccaaaatgtacatctcggagctcaagaacatcagactacgactggaggagtacgaacagagggtcgtgaagagaatccagtccctagcatcttcccgtaccgatcgcgacgcctggcaggataatgcactgagaatcgccgaacaagagcacacccaggaggatctgcagcaactgcggtctgatttggatgccgttagtatgaagtgtgactcattcctacatcagtcaccgtcctcctccagcgtcccaacactgagatccgaactgaatctacttgtcgagaagatggatcacgtttacggactgtcaacagtgtacttgaataaactcaaaacagtggacgtaattgtgcggagcatacaagacgctgaattactggtaaagggttatgagattaaactgtcccaagaggaggtggtcctggcagatctcagcgccctggaggcccattggtccacactccgccactggctatcggacgtgaaggacaaaaatagtgtgtttagcgtgctcgacgaggaaattgccaaggccaaagtggtagctgaacagatgagtagactgactcccgagcgcaacctggacctggaaaggtaccaagaaaaaggctcacaacttcaagaaaggtggcatcgcgtgatcgctcagctcgaaatccggcagtcagagctggaaagcatccaggaagttctgggtgactatcgcgcttgtcacggtacactgattaagtggattgaggagacgaccgcccagcaggaaatgatgaaacccggtcaggcagaggactcccgggtgcttagcgagcaactatcacaacaaactgcgttatttgctgagatagagcggaatcagaccaagctggatcagtgtcaaaagttttcgcagcagtattctacaatcgttaaagattatgaattgcagctgatgacctacaaggccttcgttgagagccagcagaaatcccctggtaagcggagaaggatgctgtcatccagcgatgccattacccaggaatttatggacctgcgtactcggtatacagcgttggttaccctgacgactcagcacgtcaaatacatttcggatgccctacggagattggaagaagaggagaaggtggtggaggaggagaaacaggaacacgtggagaaagtcaaagaactcttggggtgggtgtcaactctggcaagaaacactcaaggcaaagcaacctcatccgaaaccaaagagtctactgacatcgaaaaggccatactggaacagcaagtgctttcagaagaactcactaccaagaaggaacaggtgtcagaagccattaagacctcacagatctttttggccaagcatggacacaagctgtccgagaaggaaaagaagcagattagcgaacagctaaatgccttaaacaaagcttatcacgacctgtgtgacggaagtgccaaccagttgcagcaactgcagagtcagctggcacaccaaacagaacaaaagaccctgcaaaagcagcagaacacgtgccaccaacagctagaagacctctgctcttgggtgggacaggcagagagggcactggccggacaccagggacgtactacacagcaggacttgagcgctctgcaaaagaaccagagcgacctgaaggacctgcaggatgacatccagaacagggctacctctttcgcaactgtggtgaaggatattgagggctttatggaagagaaccagactaagctgagtcctcgagagctcacagctctgagagagaagttgcaccaagccaaagagcagtacgaagccctgcaggaggaaactcgggtggctcagaaggaacttgaggaggccgtgacgtccgccctgcagcaggaaactgagaagtcaaaagctgcgaaggagctagcagaaaacaagaagaaaatcgacgcattgctggactgggttaccagtgtcggcagttcaggaggccaactgttaaccaaccttccaggaatggagcaattgagcggtgcctccctggagaagggagcactcgacacgacggatgggtacatgggagttaatcaggccccagagaaactggacaaacaatgtgaaatgatgaaggcgaggcaccaggagctgttgtctcagcaacagaattttatcctggctactcaaagtgcccaggcctttctcgaccagcatggacacaatctcacccccgaagaacagcagatgctccagcagaagctcggagagctgaaggagcagtatagcacttctctggcacagtcagaggctgagctgaagcaggtgcaaactttacaggacgagttacaaaaattcctgcaggatcataaggagttcgagagctggctggagcgatccgagaaggaactagagaatatgcacaaggggggttcctccccggagactctgccctccctgttaaagcggcagggctcttttagcgaggacgtgatatcacataaaggagacctaagatttgtgaccatctcagggcagaaagtgctcgatatggagaactcattcaaggaaggaaaggagcctagcgaaattggaaatttagtgaaagacaagcttaaagatgccacagagcgatatacggctctccacagtaagtgtactagactgggttcccatctaaacatgcttctcggccagtaccatcaatttcagaattcggccgatagcctccaggcatggatgcaggcttgcgaagccaacgtggagaaactgttaagtgacaccgtggcctctgaccccggagtgctgcaagagcagctcgcaactaccaaacagctgcaggaggagctagcagagcatcaagtccccgtcgaaaaactccagaaggtggcccgtgatattatggaaatagagggcgagccagcccctgatcatcgtcatgtgcaggaaaccactgactccattctgagccacttccagagtctgagctactcactcgcggagcggtccagcctactgcagaaagccatcgcacagagtcagagtgtccaagaaagcttagagagtctgttgcagtctattggcgaagtcgagcagaatctagaggggaaacaggtgtcttcacttagctcgggtgtgatccaggaagcccttgcaaccaatatgaagcttaagcaggacatcgctcgccaaaaatcatccctcgaagctactcgcgagatggtgaccaggttcatggaaaccgctgactctacgaccgctgccgtgctccagggcaagttagctgaggtttctcagcgtttcgagcaactttgcctgcaacaacaggagaaagagagcagcctgaagaagctgctgccccaggcagaaatgtttgaacatctgagcgggaagctgcagcagtttatggagaataaatctaggatgttagcgtcaggcaatcagcctgatcaggacatcactcattttttccaacagatccaggaattgaatttagagatggaggatcagcaggagaacctcgacacactggaacaccttgtgacggaactatcctcctgtggcttcgccctggatctctgtcagcaccaggatagagttcaaaatctgcgaaaggatttcactgagctgcagaaaacggtgaaggaacgtgaaaaggacgcatcaagttgccaggagcagctcgacgaatttcggaaattggtaaggactttccagaagtggcttaaagaaacagagggtagcatcccacctacagaaacttctatgtcagccaaagaactcgagaagcagattgaacatctcaaatctctgctggacgattgggccagtaaagggacactcgtcgaggaaatcaactgcaaggggactagcctagaaaacctgatcatggagatcaccgctcccgattcgcagggcaaaaccggatccatcttgccctcggtgggctctagtgtcgggtctgtgaatggctatcatacatgtaaggatctgacagagatacagtgtgacatgtcagatgtaaacctgaaatacgagaaactgggaggagtacttcatgaacgtcaagaatcattgcaggctattctcaaccggatggaagaggtgcataaggaagctaatagcgttttgcaatggctggagtcgaaggaagaagtccttaagtccatggacgctatgagtagtcccacgaaaactgagaccgtgaaagcacaggcggagagcaataaggctttcctggcggaacttgagcaaaactcccccaaaatccagaaagttaaagaggctctggctggtctgctggtaacatatcccaactcgcaggaagccgaaaattggaagaaaattcaggaagaactgaactccaggtgggagcgggcaactgaagttacagtcgctcggcagagacagctcgaggaaagcgccagtcatctcgcctgctttcaggcggctgagtctcaacttcggccttggctgatggaaaaggagctgatgatgggcgttctgggcccattgtcaattgaccctaatatgctgaacgctcagaaacagcaggtacagtttatgttgaaggagttcgaggcacgtcgacaacagcatgaacaacttaacgaagctgcacaaggcatattaacagggcctggggacgtatctctttcaacctcacaggtgcagaaggagcttcaatcgataaaccagaaatgggtggagttgaccgataagctaaatagccgatccagtcagattgatcaggcaatagtgaagagtactcagtaccaggaactgttgcaggacctctcagaaaaggttcgagctgtcgggcagagactttccgttcaatccgctatctccacacagccagaggccgtgaaacagcagctcgaggagactagcgagatacgcagtgatttggagcagcttgaccatgaagttaaggaggcccagacattatgtgatgaactcagcgtgctgatcggcgaacagtacctcaaagatgaacttaaaaagcggctggagacggtcgccctgcccttacaaggcctggaagacctcgctgccgacaggataaatcgcctccaggccgcactggcttcaacgcaacagtttcagcagatgttcgatgagctgaggacatggcttgacgacaagcagtctcagcaggcgaagaattgccccatttccgcaaagctcgagcggctgcagtcccagcttcaggagaacgaagagttccagaaatcgctcaaccagcattctggaagttatgaggtgattgtcgccgagggtgagtccttgctgctaagtgtcccccctggcgaagagaaacgcacattgcagaaccagctggtggagctcaagaaccactgggaagagctctcaaagaaaacggcagatcggcaatctaggttaaaagactgtatgcaaaaggcacaaaaataccagtggcacgtcgaggatcttgttccctggattgaagactgtaaggccaaaatgagtgaactcagagtgacacttgacccagttcaattggaatcttccctcctgagatctaaggctatgctgaacgaggtggagaagcgtagatctctgttggagattttgaattcagctgccgacatccttatcaatagcagtgaggcagacgaggacgggattcgtgatgagaaagccggaattaatcagaacatggatgctgtcaccgaagagctgcaggcaaagacaggctctctcgaagaaatgacacaaaggctgcgcgaattccaggagtctttcaagaacatagaaaagaaggtagaaggcgctaagcatcagctggagatcttcgacgccttggggagccaagcctgttctaataagaatctggaaaaactgagggcacagcaggaggtcctccaggctctggaaccgcaggtcgactatttacgcaacttcacccaggggctggtggaggacgcccctgatggcagtgacgcctctcagttactgcatcaggccgaagttgcgcagcaagagtttcttgaggttaagcagagggtgaactctggctgcgtgatgatggagaacaaactagaaggcatcggccaatttcactgcagagtgagggagatgttctcacaactggctgacctggatgatgagttagacggcatgggggcaattggcagagatacagattctctgcaaagtcaaattgaggacgtgagactatttctgaacaagatccacgtgttgaagctggacattgaggcctcggaagctgaatgcagacatatgctcgaagaagaaggtaccctggacctcctgggtctcaaaagagaactcgaggctctgaacaaacaatgtggcaaactgactgaacggggaaaagccaggcaggaacagctggagttaaccctggggagagtcgaggatttctacagaaaactcaaggggctaaatgacgcaacaacggcagctgaagaggctgaggccctccagtgggttgtcggcacagaggtggagattattaatcaacaactggcggatttcaaaatgtttcaaaaagagcaggttgatcccttacagatgaagttacaacaggtcaacgggctgggccaaggcttgatccagagtgctggtaaagactgcgacgtacaaggcctagaacacgacatggaggagattaacgccagatggaataccctgaataagaaggtagcccagaggatcgctcagctgcaggaggccctcctccattgcggtaaatttcaagatgcgctcgagcccctgctgagttggctggcagacactgaggagctcatcgcgaatcagaagcccccatcagcagaatacaaggttgttaaggcccagattcaagagcagaagctactccaacggttgctggatgaccgtaaagctaccgtcgacatgttacaggcggagggtggcaggattgcccagtctgctgaactggcagaccgggagaagattaccggccagctggagtctctggaaagtcgctggactgaactcttaagcaaggccgcagctcgtcagaaacagctggaggatattctggtactcgccaagcaatttcacgagactgcagagcccatatctgatttcctctcagtcacagaaaagaaactagccaattctgagcctgtgggtacccaaactgccaagatacagcagcagatcataaggcataaagcactggaggaagacattgagaatcacgctaccgacgtgcaccaagcggtgaagattggccagtcattgtcaagcctgaccagtccagccgagcaaggcgtgctttccgaaaagatcgatagtctgcaggcccgatactctgagattcaggatagatgctgtagaaaggccgctcttctggaccaggccttgagcaacgcacggctttttggcgaggatgaagtggaggtgttaaactggttggcagaggtcgaagacaaactgtctagcgtgttcgtcaaagactttaagcaggatgtgctacatcggcagcacgcggatcacttggcacttaacgaggagatcgtgaacaggaaaaagaacgtcgatcaggctattaaaaacggccaggcacttttgaaacagactactggggaggaggtgttgctgattcaggaaaaattggatggaattaagactcgctacgcggacataactgtcacctcaagcaaggctcttagaacactcgaacaagctcggcagctggcgactaagttccagtccacatatgaggagcttaccgggtggctgagagaagtggaagaagaactggccacctcaggcggacagtctcctaccggagagcagattcctcagtttcagcagagacagaaagagcttaaaaaggaggtgatggaacaccggttagtcctcgatacagtgaacgaggtttcaagagccttgctggagctagtgccttggcgagcgagagagggcttggataaattagtcagcgacgcaaatgagcagtacaagctcgttagtgacaccattggacagagagtggacgaaattgacgctgctatccaacgctctcagcagtatgagcaagcagcggatgcagaactggcgtgggtggctgagactaagcgtaagctgatggcgttaggccctatccgccttgaacaggatcagacaacggcccagcttcaggtccagaaggcctttagcatcgatatcattaggcacaaggactccatggatgagttgtttagccaccgctcagagatcttcggcacctgcggagaggaacaaaagactgtgctccaagaaaaaaccgagtctcttattcagcagtacgaagcgatctccttgctcaatagtgagcgatatgctcgactagaacgtgcacaagttttagttaatcagttctgggaaacatacgaagagctcagcccatggatcgaggaaactagagctttaatcgcccagttgccctctcccgctatagaccacgagcagttaagacagcaacaagaggaaatgaggcagctgcgggaaagcatcgcggagcataagccacacatcgacaagctccttaaaatcggcccacagctgaaagaactgaatccagaagagggcgaaatggttgaggagaaataccagaaagccgaaaacatgtatgcacagattaaagaggaggtgcgccaacgggctctcgctttggatgaagcggtgagtcaatcgacacaaatcacagaatttcatgacaagatcgagcctatgctggaaaccttagagaatttaagctcccgtctgcggatgcccccactgattccagccgaggtagacaaaatccgcgagtgtatcagcgacaataaaagtgccactgttgaactggagaagctccagcctagcttcgaggcattaaaacgccgaggtgaggagctgattggacgctctcagggtgccgacaaagatctcgctgccaaggaaatccaggataaactcgatcaaatggtttttttctgggaggatatcaaggctagggccgaagagcgcgagatcaaattcctggacgtactggagttagcggagaagttttggtatgacatggcagcgttgctgactacgatcaaagacacccaggatattgtgcacgacctggaaagtccaggcatagatcccagtattattaagcagcaggtcgaggcagccgagaccataaaggaggaaaccgacgggttgcacgaggagctggaattcattagaattctgggcgctgacctgatttttgcatgcggcgaaacggaaaaacccgaagtgagaaagtctattgacgaaatgaacaacgcttgggagaatttgaataaaacatggaaagagcggctggagaaacttgaggatgccatgcaggccgcagtgcaatatcaggataccctgcaagccatgtttgattggctcgacaataccgtcatcaaattgtgcaccatgcctccagttggaaccgatctgaacacggttaaagaccaacttaacgaaatgaaagagttcaaggtggaggtataccaacaacagattgaaatggaaaaactgaatcatcagggcgagctcatgctcaagaaagcgactgatgagactgatcgcgacatcattagggaacctctgaccgaactcaaacacctctgggagaatctgggcgaaaagatcgcacatcgacagcacaagctcgagggagctctcctcgcgctggggcagtttcaacacgccctggaggagctgatgtcttggctcactcacactgaggaactgcttgatgcccagagacctatctctggcgaccccaaggtcatcgaagtggaattggccaagcaccacgtactcaagaatgacgtactcgcccaccaagcaaccgtggagacggtgaacaaagccggaaatgaacttctggagagctccgcaggagacgacgcaagctcacttaggtctaggctggaggcaatgaaccagtgttgggagtcagtgttacagaaaaccgaggaacgtgagcaacagctgcaaagcacactgcagcaagctcagggatttcattctgagatcgaagactttctcctggagctgacccgcatggagtctcaactgtctgcgagcaagcccacaggtggcctgcccgagacggccagagaacaactggacactcacatggaactgtatagtcagctgaaggcgaaagaagaaacatacaaccagctgctcgataaaggacgcctgatgctgctttcacgcgatgattctggcagcggcagtaagacagagcaaagtgtcgcactgctggaacagaagtggcacgttgttagcagcaagatggaagagagaaaatccaaactggaggaggcattgaacctggcaacggaatttcagaatagcctgcaggaattcatcaattggctgaccctggccgagcagtctctgaatatagcatctccaccctccctcattttgaataccgttctcagccagatagaggagcataaagtgttcgctaacgaagtgaacgcgcaccgggaccagataattgagctggaccagactggtaatcagctgaagtttctcagccagaagcaagatgttgtcttgatcaagaacctgctggtctccgtgcaatctagatgggagaaggttgtgcagcgctctattgagagaggtaggagtttggacgatgccaggaaacgcgctaaacagttccatgaggcctggaagaaactgattgattggcttgaagacgccgagagccatctggattcagaactggaaatctcaaatgaccccgataagataaaactccagcttagcaagcacaaggagtttcaaaagacactgggtggcaagcagcctgtgtatgacacaacgattcgcacaggccgagcactgaaagagaaaactttgctgcctgaggatagccagaaactcgacaatttcctaggggaggtgcgtgacaagtgggataccgtgtgcgggaagagcgtcgaacgacaacacaagctggaggaggccctgctttttagcgggcaatttatggatgcactgcaggccctggtggactggttatacaaggtggaaccacagttagcagaagaccagccggtacacggtgatttagacctggtgatgaaccttatggacgcccacaaggtgtttcagaaggagctcggaaagcgcaccggaacggttcaggtgttaaagaggtctggcagggaactgattgagaatagtcgagacgacaccacctgggtcaagggccagctgcaggagctgtctactcggtgggacaccgtgtgcaagctgagtgtctcaaaacagtctagactggagcaggcactgaagcaagcagaagtcttcagggatactgtgcacatgttactggagtggcttagcgaagctgaacagactctacgattcaggggcgctctgcctgacgataccgaagccctgcagtcactgattgacacccataaggaatttatgaagaaggttgaggaaaagcgggtcgacgtgaacagcgccgtagccatgggagaggtcatacttgcagtctgtcatccggattgtatcacgacaatcaaacactggatcacaattatcagggctcgattcgaggaggttctcacttgggccaagcagcatcagcagcggctggagactgcgctatcagaactggtagccaatgccgagctgcttgaggagctcctggcatggatccagtgggccgagaccacactaatccagcgtgaccaggaacccatccctcagaatattgacagggtcaaagcattgattgccgaacatcagacattcatggaggaaatgacccgtaagcaacctgatgtcgacagggtcactaagacatataaacgcaagaacatcgagcccacccatgctccattcattgaaaaaagtcgttccggcggtcgtaaaagcctgtctcagccaactccacctccaatgcctattctgagtcagtctgaagcaaagaatcctagaataaaccagctgtccgcacggtggcagcaggtttggctgctcgctctcgaaagacagcggaagctgaatgacgcgcttgaccggctggaagagctgaaggagtttgccaatttcgatttcgatgtttggaggaagaaatatatgagatggatgaaccataagaagtctagggtgatggacttcttccgccgaatcgataaagatcaggacgggaagatcacacgccaggagttcattgacggcatactcgcctctaaattccccacaacaaagttggaaatgaccgcagtggccgacatcttcgacagggacggtgatggttacatcgattattacgagtttgtggcagcccttcatcccaataaggacgcctacagaccaacgacagacgctgataaaatcgaggatgaggtgactcgccaggtggctcaatgcaaatgcgccaagcgctttcaagttgagcagattggagagaacaaataccggttcggtgactcccagcagctaaggttggtgagaattttacgcagtaccgtgatggtgagggtgggcggaggatggatggcactggatgaattcttggtcaagaacgacccttgcagggcacgcggtcgcactaacatagaacttagggagaagttcatattgcccgagggagcctcccaaggtatgaccccctttcgaagccggggtcgcaggtctaaacccagcagcagagcagcttctccaacgcggtcttctagtagcgccagccaatccaaccacagttgcacctccatgccctcttctcctgccactccagccagcgggaccaaagtaattccatcatcgggatcaaagctcaagcgacctacacccacattccactcctctagaacctctctggcaggagacacttctaactcctcctcacccgcttccaccggcgctaagaccaatagggccgatccaaaaaagagcgctagtaggcccggatctcgcgctggctccagggctggcagtcgggcttcctctagacgcggttccgatgcatctgactttgacctactcgaaacccagagcgcctgtagcgacacgtctgaatcatcagctgctggaggccagggaaattcacgccgtgggcttaacaaaccttctaagatacccactatgtccaagaagacgactaccgccagtcccagaactccgggaccaaagcggta

SEQ ID NO: 230549 - DNA, 8411 bp, synthetic construct
  misc_feature 1..8411: note = Description of Artificial Sequence: Synthetic coding sequence
  source 1..8411: mol_type = other DNA
atggatggggtggctgaattcagtgaatatgtgtccgagactgtggatgtcccgtctcccttcgatctgcttgaaccaccaacctcagggggattcctcaagctatccaagccctgttgctacatattcccaggaggaaggggcgactctgccctattcgcagtgaatggatttaacattctcgtggacgggggatccgataggaagtcatgcttctggaagcttgtacgccacctggacaggatcgatagtgttctcttaactcacatcggcgcagataatctaccaggtatcaacggcctgcttcagaggaaggtggccgaactcgaggaggagcagagtcagggatcctcttcgtattcagattgggtcaaaaatctgatcagtccagagttaggagtggtgtttttcaatgtgccagagaagttgagactgcccgacgcttctagaaaagccaaacggagtattgaggaagcatgcttaactctacagcacctgaaccgtcttgggatccaggccgaacctctgtatagagtggtcagcaatacgatcgaacccctgacactgtttcataagatgggagtgggcagactggacatgtatgtgctgaacccagttaaagactccaaagagatgcagttcttgatgcagaagtgggctggcaacagtaaggcaaaaaccgggattgtgctaccaaacggcaaagaagcagagatcagcgtcccttacctaactagcattaccgcactggtggtatggttacccgcaaatcctaccgagaaaattgtacgcgtcctgttcccaggaaacgcacctcagaacaagatcctcgaaggtcttgaaaaacttaggcacctcgatttccttcggtaccctgttgccactcagaaagacctggcgagtggcgctgtgcccactaacttgaagccgtctaagattaaacaacgggctgatagtaaagagagtcttaaggccaccacaaaaaccgctgtttctaagctggccaaacgcgaggaggtggttgaggaaggagccaaagaagctcggagcgagctggcgaaagagttagctaagactgagaagaaggctaaagaatcgagcgagaaaccacccgaaaagccagccaagcccgagcgggtgaagacagagagcagtgaggctctaaaagccgagaagcgtaagttgatcaaagataaagttgggaagaagcatcttaaggagaaaataagtaagctggaggaaaagaaggacaaggagaagaaagagattaagaaagaacgcaaagagctcaagaaggatgaaggcagaaaggaggagaagaaagacgctaaaaaggaggaaaagcggaaggatactaagccagagctgaagaagatctccaagcccgacctcaaacctttcacaccagaggtgaggaaaacactatataaagctaaagtgcccggtagagtcaagattgacagatctcgagccatccgaggggagaaagagctgtccagcgaacctcaaactccacccgcacaaaaggggacggtccccctgcccaccataagtggacacagggaacttgtcctgtcatctcccgaggatcttacccaagattttgaggagatgaagcgggaggagagagcactgctcgccgagcaaagagacactgggctcggtgacaaaccctttcccttggacactgccgaggagggaccacccagtacagccattcagggcactcccccaagcgttccgggtctgggacaggaggaacacgtgatgaaggagaaagaacttgtgcccgaggtcccagaggaacagggatcaaaggatcggggacttgattccggggctgaaacggaggaagagaaagatacctgggaggagaagaagcagagggaggccgagaggcttccggacagaactgaagcacgcgaagagagcgaaccggaggtcaaagaagacgttattgagaaagctgaactcgaagagatggaggaagtccacccgagtgatgaagaggaggaagacgctacaaaggctgaaggcttttaccaaaagcatatgcaagaacctctgaaggtcactcctcgcagcagagaagccttcggtggaagggaactgggcttacaaggtaaagcacccgaaaaggagacgagcttattccttagcagtctgaccacaccagccggagccactgagcatgtgtcgtacatccaggatgagactatccctggatactcagaaacggagcagaccatctcagacgaagaaattcatgacgagcctgaagagagacctgccccaccccgatttcacactagcacatacgatctaccaggaccagaaggagctgggcctttcgaggcgtcacagcccgcagactccgccgtcccagccacttctgggaaagtatatggcaccccggagacagagctcacctaccccactaacattgttgccgcaccattagcggaggaggagcacgtgtcttccgcgacttcaatcaccgagtgcgacaagctgagcagcttcgcaacatcagtggcagaagatcaaagtgtggcatctctgactgctccccagactgaagagaccggaaagagcagtctcctgctagacactgtgacaagtatcccgagcagcagaaccgaagcaacccagggactggactacgtgccttcagcgggtactattagtccgacctccagcctcgaagaagataaaggatttaaaagccccccttgcgaagacttcagcgttactggtgaaagcgaaaagcgcggagagatcatcggcaagggcctgtctggtgaacgggctgtcgaggaggaagaggaagagacagcaaacgttgagatgtccgagaagttgtgctctcagtacggtacacccgttttctcggctccagggcacgctctgcatccaggagagcccgctctgggagaagccgaagaaagatgtctgtccccagacgacagtactgtgaaaatggcctcccctcccccttctggaccgccatctgctactcacactccgtttcatcagagtcccgtggaagaaaagagtgaaccacaagatttccaggaggcagacagttggggcgatacaaagcgcacccccggagtgggaaaagaggatgcggcagaagagaccgtcaagccgggtccagaggaaggcaccttggaaaaggaagagaaagtgcctccaccacgcagtccccaggcacaggaggctcctgtaaatattgacgaggggctgaccggctgcacaatacagctgctgccagcccaggataaagcaattgtcttcgagattatggaagccggtgagcccacaggccctattttgggtgctgaagctctgccaggaggactgcgcactttaccacaggagcctggaaagccccagaaggatgaggtcctgagataccccgaccggagcttgagtccggaggatgccgaatctttatctgtgctgtcagtaccatcccccgacacagccaatcaggaacccacaccgaaaagtccgtgcggactcacagagcagtatttgcacaaagatagatggcccgaagtcagcccggaggacacccagtcactttcgttgagcgaggaaagcccatctaaggagacctccctggacgtctcttctaagcagctgagcccggagtcactggggaccctgcaattcggggagcttaatctgggaaaagaggaaatgggtcacctgatgcaagccgaagatacaagccaccataccgcccctatgagcgtgcccgagccacacgccgctacagcctctcccccaaccgatgggactaccaggtacagcgcccagaccgacatcacagacgatagcttggatcgtaaaagcccagccagctccttcagccatagcacgcccagcggcaacggaaagtaccttccaggcgcaataacctcacccgacgaacacatcctgacccccgattcttctttctccaaatcacctgaatcattgcccggaccagctctcgaagacattgccatcaagtgggaagacaaggtgcctggtcttaaggatcgaacctctgagcagaaaaaggaacccgaacccaaggatgaagtacttcaacaaaaagataaaactctggagcataaagaagtggtggaacctaaggatactgccatttaccagaaggacgaggcccttcacgttaaaaatgaggcggtgaagcagcaggataaggccctggaacagaagggcagagatctggagcagaaggacacagccctcgagcagaaagacaaagcccttgagccgaaggacaaagatttagaggagaaggataaggctctcgaacagaaggacaaaattcctgaggagaaagacaaagcactcgaacaaaaggacaccgctctggagcagaaagataaggcgctggagccaaaggacaaggacctggaacagaaagacagggttcttgaacagaaggagaagatccccgaggaaaaagacaaagcactggatcagaaggtacgatctgtggagcataaggctcccgaagacacagtggctgagatgaaggatagagatcttgaacagaccgacaaggcgccagaacagaagcaccaggcgcaggaacagaaggacaaagtgagtgaaaaaaaagatcaggcactggagcaaaagtactgggcgcttgggcagaaagatgaggctctggaacagaacattcaagctttagaagagaatcaccagacgcaggagcaggaaagtctggtccaggaggataaaaccaggaaaccaaagatgctcgaggagaaatccccagaaaaggtgaaagcgatggaagagaagcttgaggccctgctggaaaagacaaaagcattgggtcttgaggagagcttagtacaggaaggacgtgccagggagcaggaggagaagtattggcgtggacaagacgttgtccaagagtggcaggaaacctcaccaacccgagaggagcccgctggggaacagaaagaacttgcgccagcatgggaggacacaagccccgagcaggataaccggtattggaggggtcgtgaggacgtggctctggagcaggatacctattggagggagctgagttgtgagcgcaaggtctggtttccccatgagctggacggacagggagccaggcctcattacactgaagagcgggagtcaactttcttggatgaagggcctgatgacgagcaggaagtaccactaagagagcatgctacgaggagcccatgggccagcgatttcaaagacttccaggaaagttctccgcagaaaggacttgaagtcgaacgctggttggcagagtcgcctgtcggactgccccctgaagaggaggataagctgacacggtctcctttcgaaatcatctctccacctgccagcccgcctgaaatggtgggacaacgagtgccttctgccccaggacaggaatcccctatcccagaccctaagctcatgccacatatgaagaatgagcccacgaccccctcttggctggcggacatccccccttgggtccctaaagacaggccgctgcctccagcccctctatcccccgctcccggaccgccaacccccgcacctgaatcacatacccctgcgccattttcctggggcactgccgaatacgacagcgtcgtcgcagctgtgcaagaaggcgctgccgagctggaggggggaccgtacagccctctgggtaaggactaccgaaaagctgaaggtgaacgcgaggaggagggccgagctgaggctccagataagtcctcccacagcagcaaggtgccagaggcttccaaaagtcacgctaccactgaacctgaacagacagagcctgaacagagagaacctaccccctatccagatgagcggagtttccagtatgccgacatctatgaacagatgatgttgactgggttgggtccagcatgcccaaccagagaacccccactaggggctgccggagactggcctccctgtttatcaacaaaagaggctgccgctggaagaaacacaagtgctgagaaggaactcagcagcccaatcagccctaaaagcctccagtcagatactcctacattttcctacgccgcactggcaggccctaccgtcccaccaaggcccgagcccggaccgtcaatggagccttcactgacccccccagctgtccctccaagagcccctattctgtctaaagggcctagtcctccactaaatggtaatattttgtcatgttcgccagaccgccgtagccctagtcctaaagagtctggccgtagccactgggacgatagtaccagtgatagtgagcttgaaaagggcgcacgcgaacagcccgaaaaggaggcccagtccccttcgccccctcaccctatccccatgggctcgcctaccctgtggccagaaacggaggcccatgtcagtccccctctggattcccatctcggccctgctcgcccatcactggatttccctgcatctgcgttcggattttcctcactgcagccggctcctccacagctcccaagcccagccgagcctagaagcgctccctgcggcagcctggctttcagcggagacagggctctcgctctggcacctggccctccaacacgtactaggcatgatgagtacctggaggttaccaaggccccatccttggattcctccctgccgcagcttccctcaccctcttcgcctggagctccattgctgtcaaatcttccgagacctgccagccctgccctgagcgagggttcatcttcagaggccaccaccccggttatctcatccgtagcggaacgttttagcccctccctggaagccgctgagcaggaatcgggcgagctggatcctggtatggaacctgccgcacacagcctctgggacctcaccccattgagccctgctcctcctgcgtccctggacctcgcactggcgcctgccccttctttgcccggtgatatgggggacggcattctgccctgccatttagagtgttctgaggctgctaccgagaaaccatcaccatttcaggttccctccgaagattgtgctgccaacggaccgaccgagacctccccaaaccccccagggccagccccagcgaaggcggagaatgaggaagctgccgcatgccctgcatgggaacgtggggcttggcctgaaggcgctgagcggagctccagacctgacactctgcttagccctgagcagccggtttgtcccgctggcggatcgggaggtccgccaagcagcgcctccccggaggttgaagcgggacctcaggggtgcgcgacggaacctcggcctcataggggcgaattgtcccccagtttcttgaacccccctctccctccgagcatcgacgatcgcgacttgagcaccgaggaagtgaggcttgtgggaagagggggacgtcgccgagtgggcggtcctggcactacagggggaccttgcccagtcactgacgagacacctccgacatcagccagtgactccggatcctctcaaagcgattccgacgtgccgccagaaacagaggaatgcccctccataacagccgaagcagcactcgacagcgacgaggatggcgacttcttacccgtagataaggccggaggcgtatctgggacccatcatcctcgacctggacacgaccctccacctcttccccaacccgaccctagaccgtcaccacccaggccagacgtgtgtatggcggatcccgagggactgagtagtgagagtggcagggttgagagacttcgagaaaaagaaaaagtccagggcagagtgggcagacgggcacctggaaaagcgaaacctgcctccccggcaaggaggctcgacctcaggggtaaacgatctcccacccccggaaaaggaccagccgatcgagcaagccgcgcaccaccgcgacccaggagtaccacgagccaagtcaccccagccgaggaaaaagacggacactcacccatgtcaaagggcttagtaaacggactcaaagccggtcctatggccctcagctccaagggcagctccggggctcccgtgtatgtcgacctggcctatatccctaatcattgttctggaaaaaccgcagatttggatttctttcgccgagtgagagcgagctactacgtcgtgtctggtaacgacccagccaacggtgagccaagcagagccgtgctagatgctcttttagaggggaaggcacagtggggcgaaaacctccaggtaaccctaatccccacccacgacactgaagtgaccagagagtggtaccaacaaacccatgagcagcagcaacaacttaatgtgctagttctcgcttcttcttctaccgtggtgatgcaggatgaatcttttcccgcttgcaagatagagtttta

SEQ ID NO: 230550 - DNA, 9125 bp, synthetic construct
  misc_feature 1..9125: note = Description of Artificial Sequence: Synthetic coding sequence
  source 1..9125: mol_type = other DNA
atggagaccgaagctgagcccgcacggcctcatggtgttgcaatggagaccacccccggactggggttgcggtcgccaggcgctcccctcgcccagaaccccgctgaattgctgtgtgaggccggagccgcagtggcagctgccagatgggacctgcagaagcatagtctgctaatcgtaatcggcgatattggtacagagtctcagttgcgggcagtgagagctcacctggaacaaggaatattgtcttggaatatagatttatccagcttcgatttgaatcagcagcttcgcctgttcatcacccgccatcttgcccacttctcaagcgaagtaaaaggacagagaacactgtgccaccagtctgagattctggagaccatcatactcgtgaatccctccgctgacagcatctccagcgaagtccaccacctgctgtcttcatcttccgcctataagctgcttatcctgtcaggccagtcattagagcctggaggcgacctgatactacagtccggtacatattcatatgagaactttgcgcaggtgctgcataaccccgaaattagtcagttgctcagcaatcgagacccaggtatccaggccttcttgacagtgagctgtttaggtgagggcgattggagccacctgggactttcaagctctcaggaaacccttcacttgcgtctcaatcctgaaccgaccctccccactatggatggagtggccgagttcagtgaatacgttagcgagacagtggacgttccatcaccttttgacctgttagaacctcctacttccgggggatttttaaaattgagcaagccttgttgttacatattcccaggcggaagaggcgacagcgccctctttgctgttaatgggttcaatatcctggttgatgggggtagcgataggaaatcttgcttctggaagttggtacgccatctcgaccgcattgatagcgtgctgcttacgcacatcggggctgacaacttaccaggcataaacggactattgcagcgcaaagtggcggaactcgaagaggagcaaagccaaggctcatccagttattcagattgggttaaaaatctgatctctcctgaattaggcgtggtgttctttaacgtgcctgagaagctgcgactgcccgatgcctcccggaaagcaaagcgatcaattgaggaggcctgcctgacgctgcagcatttgaatcggcttggcatccaggccgagcctctttatcgtgtggtgagtaacaccattgagccattgaccttgtttcacaaaatgggagtcggaaggctggacatgtatgtactgaatcccgtgaaggattcaaaggaaatgcagtttctgatgcagaaatgggcaggcaactccaaggccaagacaggcatcgtgctgcccaacggcaaggaggcagagatctctgttccctacttgacatcgattactgccttggtggtctggcttccagccaatcccaccgagaagattgttcgggtgctttttcctggcaacgcaccacagaacaaaatcttagagggactcgagaaactcaggcacctagactttctgcgctatcctgtcgctacccaaaaagatctggcctccggcgcagtgccgactaatctcaaaccgtcaaaaattaagcagagggccgattctaaggaaagcctgaaagctaccacgaagactgccgtatccaagctggctaagcgcgaggaggtggtcgaagagggcgcaaaggaggcgagaagtgaactggcaaaagagctcgcaaaaacggagaaaaaggccaaggaatcctccgagaaacccccagagaagcctgccaaaccagaaagggtcaaaacagaatcgagcgaagcgctgaaggcagagaagcgaaagctcattaaggacaaggtggggaagaagcacctgaaggaaaagatttccaagcttgaggagaaaaaagataaagagaagaaggagatcaaaaaggaaagaaaagagcttaaaaaagacgaaggtaggaaggaggagaagaaggacgcaaagaaagaggagaagaggaaagataccaagcctgaacttaagaaaatcagcaagccagacctgaaaccattcacacccgaagtccgcaagaccctgtataaagccaaagtgcctggtcgggtcaagattgacagaagtcgcgctatacggggagagaaggagctgagtagcgagccacaaacaccgccagcccagaaggggactgtacccttgcctacaatttctggtcacagagaactagtgctgtcttctcctgaagatctcacacaggatttcgaggagatgaagcgcgaggagagagccctgctcgccgaacagcgagacaccggtctgggggataaacccttcccgttggataccgctgaggaaggccctcccagtacagccattcaaggcacacctccaagtgtcccaggcctcgggcaggaagagcatgtgatgaaagagaaagagcttgtacctgaggtccccgaggagcaggggtccaaggataggggattggactcaggagctgagaccgaggaggagaaggatacttgggaggagaagaaacagagagaagcagaaaggcttcctgatcgaaccgaggctcgggaggaatccgagcccgaggtcaaagaggatgtgatcgaaaaggccgagctcgaggagatggaggaggtccacccctcagacgaggaggaggaggatgctaccaaggcagagggcttctatcagaagcacatgcaggaacctctcaaggtcacaccgagatcccgggaagcctttggagggagagaactgggattgcaaggtaaggccccagagaaagagacatccttgttcctgagctctctgactacgccagccggagctacggagcacgtttcctatatccaagatgagaccatacccggatactcagagactgaacagaccatctcagatgaggagatacatgatgaacccgaggagcgccctgcacccccacggtttcatacaagcacctatgacttgcctgggccagagggcgctggtccctttgaggcatctcagccagcagactcagccgtgccagccacttctggaaaggtctacggcacacccgagaccgagctcacttatcctactaatatcgtcgccgcaccgttagcagaagaagagcatgtgagctcggctacctctataacagagtgcgataaactttctagcttcgctacctcagtcgccgaggaccagagcgtggcctccttaactgctccacagacagaggagacaggaaaatccagtctcctcctggatactgtgacatccattcccagttcaagaactgaggcgacccagggtctggattatgtaccgtccgctgggacaatcagcccaacttctagtctcgaggaagacaaaggatttaagagcccaccttgcgaggacttttctgtgactggggaaagcgagaagagaggggaaatcatcggaaagggactctccggtgaaagagcggttgaagaagaagaagaggaaaccgccaacgtcgagatgtcagagaaactctgtagtcagtacggcacccccgtgttttcagctccgggtcacgctttacacccaggtgagccagctctaggggaggccgaggagagatgcctgtctccagacgactctaccgtaaaaatggccagcccccctccatctgggccacccagcgccacacatacccccttccatcagtcacctgtcgaggagaaaagcgaaccacaggattttcaggaggcagactcttggggcgacaccaagagaacgcccggagtggggaaggaagatgccgctgaggaaactgttaaacccggtccagaggaaggcaccctcgaaaaagaggagaaggtcccgccaccacggtcaccccaggcacaggaggcgcctgtgaatatcgatgaggggctcaccggctgtacaattcaattgctgcccgcacaggataaggcgatcgtgttcgaaattatggaggccggtgagcctactggtcctatcctgggagccgaggccctgccaggcggattgcgaacacttccccaggaaccagggaaaccccaaaaagatgaggtcctgagataccctgataggagcctgagcccagaggacgccgagtccctttcggtgctatccgttccttctcctgatactgcaaaccaggagcctaccccaaaatcaccttgcggcctaactgagcagtatttacataaagatcgatggccggaggtgagccccgaggacactcaaagtctttccctgtctgaagaatccccctcaaaggagacctccttggatgtctcatctaaacagctatcccctgagagcctcggcactttacagtttggcgaactgaatctgggcaaagaggaaatgggacacttgatgcaggccgaagacacatcacaccatacagcccctatgagtgtgccggaaccgcacgccgcaaccgcttctccccctaccgacggtacgactagatatagcgcgcagacagacatcaccgatgattccttggacaggaagagcccagcctcatctttttcccatagcacgcctagcgggaatggaaagtacctacccggtgcaatcacctctcctgacgaacacatcctgactcccgactccagcttctctaaatcacccgaatcgctacccggaccggctctcgaagacatagccattaagtgggaggacaaggtgcctggactgaaggaccgcactagcgaacagaagaaggagccggagcctaaggacgaggtgctccagcagaaagataagacactcgaacataaggaggtggtagagccaaaagacacggctatctatcagaaggacgaagccctccatgtgaaaaatgaagccgttaagcaacaggataaagcattggaacagaagggcagggatctcgagcaaaaggatacagctttggagcagaaggacaaggcgctggaaccgaaggataaggatctggaagagaaggataaagctctggaacaaaaagacaagatccccgaggagaaagacaaggctctggagcagaaagacactgctctggagcagaaggataaggcgttagaacctaaggacaaagacctggagcagaaggatcgcgtgttggagcagaaggagaaaatccctgaagagaaggacaaggccctggatcagaaagtgcgaagtgttgagcacaaggccccagaggacacagtggccgaaatgaaggaccgcgatctcgagcagaccgataaagccccagaacagaagcaccaggcacaggagcagaaagacaaggtgtccgagaaaaaagatcaggctctggagcagaagtactgggccctggggcagaaggacgaagccttggaacagaacattcaggccctggaagagaaccaccagactcaagaacaggaatccctggtgcaagaggacaagacacgaaaaccgaagatgctcgaagaaaagtctccagagaaggtaaaagctatggaagagaagctggaagcactcctggaaaaaaccaaggctcttggcctagaggagagccttgtgcaagaaggtcgcgctagagaacaggaggaaaagtattggcgtgggcaggacgtggtacaagagtggcaagaaacgtcccctacacgggaggagcccgctggcgaacagaaggagcttgcccctgcatgggaggatacctcccccgaacaggacaacaggtactggcgcggtcgcgaggatgtggccctggagcaggatacttactggagggagctcagctgtgaaaggaaggtgtggttcccacacgaactcgatggtcagggcgctcggccacactataccgaggagcgtgagagcaccttcctcgatgagggaccagacgacgagcaagaagtgcctctgagggaacatgccacgagaagtccctgggcatcagatttcaaagattttcaggaaagctctcctcaaaaaggtctggaggtagaacgctggctggctgagagccccgttggtttgcccccagaagaggaggacaagctcactagatccccattcgaaatcatctctccacccgcatctcctcccgaaatggttggccagcgcgtgccttcagctcctggccaggaatctcccattccagacccgaaactgatgccacacatgaagaacgagccaactaccccctcatggcttgccgatatcccaccatgggtccctaaggaccgtccccttcctcccgctccactgtctcctgcacccggtcccccaacgcccgcacctgagtcgcataccccagccccattcagctggggtacagcggagtatgattctgtcgtcgcagctgtccaggagggtgcagccgaactggaaggaggtccctatagccctctgggaaaggattatagaaaggcagagggggagcgcgaggaggagggccgtgccgaagcaccggataagtcctcacatagctctaaagtccccgaggcctcaaaatcgcatgccaccaccgagccagaacagaccgagccggagcagcgagagcctactccatatcccgatgagcgcagcttccagtatgctgatatatatgagcagatgatgctaactggcttagggcctgcatgtccaacaagagagccccctctcggcgcagctggcgactggccaccttgcctgagcacaaaggaagccgctgcgggaaggaatacctctgccgagaaggagctatcttcccccatttctcctaaaagcctgcagtcagacactccaaccttcagctacgctgctctggctggccctacggttccccctcggcctgagccaggtccttcgatggaaccgagccttaccccacccgcagtacctccaagggctcctatattgtctaaaggcccttctcctcctctgaatggcaatatcctgagttgctcgcccgaccgcagatccccaagccctaaggagtccgggcgaagccactgggatgatagtactagcgattcagaactggaaaaaggagctagggagcagcctgagaaggaggctcagagcccctccccccctcatcctattccaatggggtctcctactctctggccagagacagaggcccacgtgtctccccctttagactcccacctggggccagcaagaccgagtctcgacttccctgccagcgcatttggatttagtagccttcaacccgctcctccccagctgccatccccagctgagccacggtccgcgccatgcgggtcactcgccttttccggggatagagctctagctttggcaccaggccctccgactagaactagacacgatgaataccttgaagtgactaaagctccaagccttgattcctcactgccacagctcccctccccctcgagcccgggagcgcctttgctgtcaaacctgccacggccagcaagcccagctctgagtgagggctcctccagcgaggctacaaccccggtgatttcctctgtcgctgaaaggttctcaccatccctggaggctgcagagcaagagtcaggggagctcgaccctggcatggagccggcagcccattccttgtgggacctaacaccattgtcccctgccccaccggctagcctggacctggctttggcccctgcaccgtctcttccaggtgacatgggcgacggcattctcccctgtcacttggagtgtagtgaggctgcaacggaaaagcccagccccttccaggtcccctccgaggactgcgctgcgaacggccctacagaaacatcccctaacccgccaggtccagctcctgccaaggccgaaaatgaggaggccgctgcttgccccgcttgggagcgcggagcctggccggagggcgcagagagatctagtcggccagacacactgctgtcccctgagcagcctgtctgtcccgctggcggatctggcggacctcccagttctgcatcaccggaagtggaagccggaccacaggggtgtgcaaccgaaccgaggcctcaccggggtgagcttagtcccagcttccttaacccccctcttccaccgtcaatcgacgacagagacttatctactgaggaagtgcgattggtggggcgtggagggagacggcgagtcgggggaccaggtaccactggagggccttgtcctgtaacagatgagacccccccaacatctgcctccgactcaggctccagccagagcgacagcgatgtgccacccgagaccgaggagtgccctagtattacagctgaagcagctttagatagtgatgaggatggggattttcttccagtggacaaggctggcggtgtgagtggcacacaccatccacgccctggccatgacccaccacccctgccccagcctgaccctagaccctcccccccaagacccgatgtttgtatggctgatcctgaaggactttcttctgagtcgggtagagtggagagactgcgagagaaggagaaggtgcagggtagagttggcagaagagcaccagggaaggcgaagcccgcttctccggcaagaagattggacctgaggggcaaacgatccccaacccccggaaaaggtccagctgaccgcgcttcgagagctcccccaagaccccgaagcacaacgtcccaggttacccctgcggaagagaaggacggccacagcccaatgtcgaaaggactggtcaacgggctgaaagccggacctatggcactgagctccaaaggtagtagcggagctccggtttatgtggatcttgcgtacatccctaatcactgttcaggtaagacagccgatcttgatttttttcggagagtcagagcatcctactatgttgttagtggaaatgaccccgcaaacggggagccttcccgtgccgtgctcgatgctctgttagagggcaaggcgcaatggggagagaacttacaagtgacactgatacccactcacgacaccgaggtgaccagggagtggtatcaacaaacacacgagcagcagcaacaattgaacgtgctcgtgcttgcatccagtagcactgtcgttatgcaggatgagagttttcccgcatgtaaaattgaattcta

SEQ ID NO: 230551 - DNA, 8417 bp, synthetic construct
  misc_feature 1..8417: note = Description of Artificial Sequence: Synthetic coding sequence
  source 1..8417: mol_type = other DNA
atggacggcgttgccgaattctcagagtatgttagtgagaccgtggacgtgccaagtccatttgacttgctggaaccacctactagcggtggcttcctgaaactgtctaagccttgttgctatattttccccggtggccgtggcgattctgcactttttgctgttaacgggtttaacattctcgtggatggaggatcagaccgcaagtcctgcttctggaagttagttcgccatttagatagaattgatagcgtcttgttgacacatatcggggcagacaacctccccggtataaatgggcttctccagcggaaggttgccgaactggaggaggaacagtcccagggttcttcgagctactctgactgggtaaagaatctgatctctcctgagttgggcgttgtgtttttcaatgtgccagagaaactgcgactacctgatgccagccgtaaggcaaagcgatcaatcgaggaagcttgcctgacactccagcatcttaaccgcttaggaatccaggcagagcccctttaccgggttgtgtcaaataccatcgaaccgcttaccttgttccataagatgggcgtgggacggctggatatgtatgttctgaatccggtgaaggattccaaagagatgcaatttctgatgcagaaatgggcaggaaactctaaagcgaagaccggtattgtgctgccaaacggtaaggaggcggagatcagtgtcccttaccttacttcaattaccgccctcgtggtatggttacctgccaaccctacagaaaaaatagttcgagtgttgtttccgggaaatgccccacagaataagatcctggaaggcctcgagaaattacggcatctggatttcctacgatatccagttgccacgcagaaagacctggcttctggtgctgtcccaaccaacctgaaacctagcaagatcaagcagagggctgatagcaaagagagcctgaaggctaccaccaaaactgctgtgagcaaattggccaaaagggaggaggttgtagaagaaggagcaaaagaagcaagatcagagttggctaaggagctggccaagacagagaagaaggccaaagaatcaagtgagaagcctcccgagaaacctgccaagccagagcgcgtgaaaactgaatcatcagaagctttgaaggcagaaaagaggaagctgatcaaggataaagtgggaaagaagcatctaaaagaaaagatcagcaagcttgaagaaaagaaggataaagaaaaaaaggagatcaagaaggagcggaaggaattaaagaaggacgaggggagaaaggaagaaaaaaaggatgcaaaaaaagaagaaaaacggaaggatactaaaccagaactgaagaagattagtaagcctgatctgaagcctttcacccccgaggtgcgcaagacactttacaaagctaaggtccccggacgcgtgaaaatagaccgctctcgggctatcaggggtgagaaagagctgtcaagcgaaccccaaaccccacctgcccaaaaaggcactgtcccccttcctacaatctccgggcatagagagttggtcctctcgagccccgaagatctaacacaggactttgaagagatgaaaagggaggagagagccctattggctgagcagcgcgatacgggcctcggcgacaagccattccctttggatactgccgaggaggggcctccaagcacagcgatccagggtacgccaccttcggttcccggtctgggccaggaggagcatgttatgaaggagaaagagctggtgccggaagtccccgaggagcagggtagcaaggaccggggactcgacagtggggctgagacagaggaggaaaaagacacatgggaggaaaagaagcaacgggaagctgaaagactgcccgatcgcaccgaagctcgagaggaatcggagcctgaagtgaaggaagatgtcatcgaaaaggccgagctcgaagagatggaggaggtccatccatctgacgaagaagaagaggatgccactaaagccgagggattttaccagaaacatatgcaagaaccgctgaaggtgaccccccgaagccgggaggctttcggaggaagagagcttggcctgcagggcaaagccccagagaaagagaccagcctcttcttaagctccctaaccactccggctggggctacagaacatgtctcatacattcaagacgaaaccatccccggttacagtgagactgagcagacaatttcagacgaagagatccatgacgaacccgaggagcgcccagcaccaccaaggttccatacctctacatacgatttgccaggtcccgaaggcgctgggcctttcgaggcttctcagcctgccgacagtgccgtgcccgctacctctgggaaggtgtacgggacacccgagaccgagctgacctatcctactaacattgtggcagcccctctggcggaggaagagcatgtatcttccgccaccagcattacagaatgcgacaagctgtccagttttgctacatcagtggcggaggaccagtccgtcgcctctcttaccgcaccacagaccgaggaaacaggcaaaagcagtctcctgctggatacagtaaccagcattccttcctcccggacagaagcgacccagggactcgactatgttcccagtgccggaacaatctccccaacatcctctctcgaggaggataaggggttcaagagccctccttgtgaagatttttcagtgaccggagagtccgagaaaaggggggaaatcatcggcaaagggttaagcggggagagagccgtagaggaggaagaggaagagactgcaaatgtcgagatgagtgagaagttgtgctctcagtacggtactcccgtcttttctgcccctggccacgccctccaccctggtgaacctgccttgggcgaagctgaggagagatgtctgtcacccgatgactctacagtgaagatggcctcaccgcctccatctgggccaccatctgccactcacaccccttttcaccagagtccagttgaagagaaaagcgaaccacaagactttcaggaagccgatagctggggcgataccaagcggactccgggagtgggcaaagaagatgcggctgaggaaaccgtgaaacctgggccagaagagggcaccctggaaaaggaagagaaggtgccaccacccagatcccctcaagcgcaagaggcccctgtaaacatcgatgaaggcctgacagggtgtacaatccagctactcccagctcaggacaaggccatagttttcgagatcatggaagcgggagagcctaccgggcctatcttgggcgcagaggcgctaccaggcggactgagaaccctcccgcaggaacccggaaagccacagaaggacgaggtcttgcgctaccccgatcggagtcttagccctgaagacgccgaatccctgtctgtgttgagtgtgccaagcccagacaccgctaaccaggagcccaccccgaagtcgccatgtgggcttacagagcaatacttgcacaaagaccggtggccggaggtttctccagaagatacacagtcactctccctgtccgaggaaagtccctccaaagaaacatctctggatgtgtcctccaagcagttatcccctgaatctctcggcactttgcagttcggcgagctgaacctgggaaaggaggaaatgggacatttaatgcaagcagaggacacttctcatcacaccgcacctatgagcgtccctgaacctcatgcggcaacagcgagtccacctactgatgggacaacccggtatagtgcgcagactgacattaccgacgacagtttagacagaaaatcacctgcttcctccttcagccacagcacccccagcggaaatggaaagtaccttccaggagcaataacgtccccagacgagcacatactcaccccagacagttctttttctaagagccctgagagcctgcccggtcccgcactcgaggacatcgccatcaagtgggaagacaaagtccctggcctgaaagatagaacctccgagcagaagaaggaaccggagcccaaagacgaggtgttgcagcagaaggataaaacccttgagcacaaggaggtcgtggaaccgaaagacacagcgatctaccagaaagatgaggccctgcatgttaaaaacgaggccgtcaagcagcaggacaaggcccttgagcagaaagggcgtgatcttgagcagaaggacactgcactggagcagaaggacaaggctctcgaacctaaggacaaggatctggaagaaaaagacaaggccttggaacagaaggataagataccagaggaaaaagataaggcgttagaacaaaaagacaccgccctggaacagaaggataaggctctcgaacctaaggacaaggatctggaacagaaggaccgcgtcttggagcaaaaagagaaaattccagaggaaaaagataaggccctggaccagaaggtgagatccgtcgagcacaaagccccagaagataccgtggctgagatgaaggatcgtgacttggaacaaacagacaaagcccctgagcagaaacaccaggctcaggagcaaaaagacaaggtgtctgaaaagaaagaccaggccctcgaacagaagtactgggcacttggccagaaggatgaggcactagagcagaacatacaggctcttgaagagaaccaccagacgcaggagcaggaaagcctggtccaggaggataagacaaggaagcccaaaatgctagaagagaagagccccgaaaaagtcaaagccatggaagaaaagctcgaagccctgttagagaagaccaaagctctgggcctcgaagaaagtttggtccaggagggtcgggcaagggagcaggaggagaagtactggagaggacaggacgtggtccaggaatggcaggaaacctcgcccactcgcgaggaacctgcaggggagcagaaggaactggcaccggcatgggaggataccagtccagagcaggacaatcgctactggaggggcagggaggacgtcgctctggagcaggatacctattggcgggagctatcatgtgagcgaaaagtctggttcccccatgagcttgacgggcagggcgctagaccccattacacagaggaaagagaatctacgtttctggacgaaggtcccgatgatgaacaggaggtgccccttcgggagcatgcaacacgcagcccttgggccagtgattttaaggacttccaagaaagtagccctcaaaagggactggaagttgagcgttggctcgccgagtctccagtgggactgcctcctgaagaggaggacaagctaactcgcagtcccttcgaaataatctcgccccctgcctcacctcccgagatggtcggccaacgggtcccaagtgcccctgggcaggaatcaccaataccggaccccaaattaatgcctcatatgaagaatgaaccaacaactccttcctggcttgccgatatccccccatgggtcccaaaggataggcccttaccgccagccccactgagcccagcgcctggccctcctacccccgctcctgagtctcatactcctgcgccattctcctgggggactgctgaatacgacagcgtggtggcggcagtgcaggagggggcagcggaactggagggcggtccatactcccctctgggcaaggactaccgcaaagctgaaggcgagagagaggaggaggggagggccgaggcccctgacaaaagctcccacagctccaaggtgccagaggcttctaaaagtcacgcaactacagagcccgaacagacggagcctgaacagagggagcccactccttaccctgacgaaagaagcttccaatacgccgacatctacgagcaaatgatgctcacagggctgggccctgcctgtccgacacgcgaaccccctctgggtgcagctggtgattggccgccatgtctttccactaaggaagcagccgctgggaggaacacctctgccgagaaagaactgtccagccctatcagtccaaagtcgctccagagtgacaccccaactttctcctacgccgctttagccggaccgactgtgccaccacggccagagcccggtccgtccatggaacctagcctgacgccacccgcagttccgccacgcgctcccattctgtccaaaggacccagcccccctctgaatggcaacatcttatcttgctcccccgataggagaagcccttctcctaaagagagcggcagatctcattgggacgatagtacttccgattccgaattggagaaaggcgctcgggaacagcccgagaaagaggctcaatctccatcaccgcctcaccctatcccgatgggtagccctacattgtggccagaaaccgaggcccatgtctcccccccactcgacagtcaccttggacccgctcggccttcattggacttccctgccagcgccttcggattctccagtctgcagcccgcaccacctcagttgcctagtcccgctgagccacgctccgccccttgtggtagtctggcctttagtggggaccgagcccttgccctggctcctggacctccaacacggacaagacacgacgagtaccttgaggtcaccaaagccccttctcttgattcctctttaccgcagttaccgagtcctagcagccctggcgctcctttgctgtcaaacctcccgaggcctgcatctcccgcactgtctgagggaagttctagtgaagccacaacacccgtcatttcctcagtcgcagaaagattctcccctagcctcgaggctgctgagcaggagtccggggagctggatcctggaatggaaccagccgcacactctttgtgggacctgacgccgctttctcctgctccaccagcctcactagatttagctcttgccccagccccaagcctgccgggagacatgggcgacggtattctgccctgtcatttagagtgctccgaagccgcaactgagaagccatctccctttcaggtcccaagtgaggattgtgctgccaacggtcctacggagacttcgcctaacccaccaggcccagctccagccaaggctgaaaatgaagaagccgctgcctgtcccgcttgggaacgaggcgcatggccagagggggctgaaaggtcttctcggccagatacgcttctcagtcccgaacagccagtttgccccgctgggggttcagggggaccacccagctcagcatcgcctgaggtggaagcgggaccccaagggtgtgcgaccgaacctcgcccacatcgcggtgaactgtcaccctcgttccttaatccacccctgcctccctccatcgatgaccgggatctatctaccgaagaagtgcgcttagtggggagagggggaagacgccgtgtcggcggacctggaaccactggtggaccgtgtcctgtcacagatgagactcccccaacatccgcgtcagattccggctcctctcagagcgatagcgatgtgcctccagaaacagaagaatgccccagcattactgctgaggcagctttggactctgatgaggacggcgacttcctccccgtcgataaagctgggggagtcagcggaacccaccatcctagacctggacacgacccacctccactaccacaaccagatcccagaccaagcccacctcggccagacgtgtgtatggctgacccggagggattatcaagcgagtccggaagggttgagagactaagggaaaaagaaaaagtgcaaggcagggtggggaggcgagctcccggaaaagccaagccagcaagcccggcacgtaggctcgatttgaggggaaagaggagccctacgcccggtaaaggcccagctgaccgagcctcccgggcacctcctcgcccacgctctaccaccagtcaggtcacaccagcggaagaaaaagacggccactctcccatgtcaaagggactggtgaacgggttaaaggccggaccaatggcactgagctccaaaggcagttcgggggctcccgtctacgtagacttagcctacatccccaatcactgtagtggaaagacagccgatctggattttttccgcagagtgcgggcaagttattacgtggtgtccggaaatgatcctgccaatggcgagccatcgagagccgtgctggacgccctactggaagggaaggcccaatggggtgagaatcttcaggttagtgtgaccctgatccctactcatgataccgaagtgactagggagtggtaccaacagacccacgaacagcagcagcagctgaatgtactagttctagcctcttcaagtaccgtcgtgatgcaggacgagagctttccagcctgcaaaattgaattcta

SEQ ID NO: 230552 - DNA, 1884 bp, synthetic construct
  misc_feature 1..1884: note = Description of Artificial Sequence: Synthetic coding sequence
  source 1..1884: mol_type = other DNA
atggacggcgtcgccgaatttagtgaatacgtgtccgagaccgtggacgttccctcaccgttcgatctgctggagcccccaacttctggcggatttcttaagctgagtaagccatgttgttacatcttccctggcggacgaggcgactccgcattgtttgcagtcaatggattcaacatcttggtagacggaggcagcgatagaaaaagttgtttctggaagctagtcagacatcttgacagaattgattcagttctactgacgcatatcggcgctgacaacttgcctggaatcaatggtctgctgcaacgcaaagttgctgagcttgaggaggaacagagtcaaggctcatcctcgtacagcgattgggttaaaaatttaatctctcctgagttgggagtagtgttttttaatgttcctgaaaagctgcgcctgcctgacgccagtaggaaagccaagaggtccattgaagaagcctgtctcactctgcagcacctcaatagacttgggattcaggcggaacctctgtatcgcgtggtctccaacacaatcgaaccgctgaccctgtttcataaaatgggagttggcaggctcgatatgtatgttctcaatccggtgaaagacagcaaagagatgcagttcctgatgcaaaagtgggcagggaattccaaggctaagaccgggatcgtgttacctaatggcaaagaagccgagatctcggttccatatttgacgtccatcactgccctcgttgtctggctgcccgcaaatcctaccgagaaaatagtgcgggtattattcccaggcaacgctccccagaataaaatcttagagggcctcgaaaagcttcggcaccttgactttttgaggtacccagtagccactcagaaagacctcgctagtggggctgttcctaccaacctcaagccaagcaagatcaagcaacgggcagatagtaaagagagcctgaaggccacaaccaaaacggctgtgtccaagctggccaagcgcgaggaggtcgtagaggagggagctaaggaggccaggtcagaacttgctaaggagctggcgaagactgagaaaaaggccaaagaaagttcagaaaaaccaccagagaagcccgctaaacctgagcgggtgaaaacagagagcagcgaggcccttaaggcggagaagagaaagctgatcaaagataaggtcgggaaaaaacatttgaaagagaaaattagcaaactcgaggaaaaaaaggacaaggagaagaaggaaatcaaaaaggaacggaaagaactgaagaaggatgaggggaggaaggaggaaaaaaaggatgctaagaaagaagaaaagcgaaaagacacgaaacctgagttgaaaaaaattagcaaaccggacttaaagcccttcactccagaggtgcgaaagacactgtataaagcaaaagtgcctggcagagtcaagattgaccggtccagggcaatcaggggcgagaaagagctctcctctgagccacagacgcctcctgcacagaaaggcacggttcccctgcccacgatctccgggcaccgcgaactagtcctgtcttcccccgaagatttaacccaggacttcgaggagatgaagagagaggaacgagcactgctggctgaacagcgagatactggcctcggtgacaagccgttccccctggacacagccgaagagggtccaccatcaacagctatccaggggacgcccccaagtgtgccaggactcggacaggaggagcacgtaatgaaagagaaagagctcgtgccggaagtgccggaggaacagggctccaaggaccgcggactggatagtggggcagaaacagaagaaaaaaaaaaaaaaaaaaagaagaagaagtag

SEQ ID NO: 230553 - DNA, 1680 bp, synthetic construct
  misc_feature 1..1680: note = Description of Artificial Sequence: Synthetic coding sequence
  source 1..1680: mol_type = other DNA
atggcagacgaaagaaaagatgaggccaaagctccacattggacctcggcgccactcactgaggccagtgcccattcccatccacctgaaattaaagatcaagggggagccggagaggggctggttcgctcagctaatggatttccttatcgtgaagacgaggaaggagccttcggggagcacggcagtcaggggacttatagcaacaccaaagagaacggcatcaatggcgagctcacaagcgccgacagggagaccgctgaggaagtgagcgcgaggatagtgcaagtcgttaccgctgaggcagtggctgtgctcaagggggagcaggagaaggaggcccaacacaaggatcagacagcagccctgcctttggcagccgaagagacagctaatctgccaccctccccgccaccaagcccagcaagcgagcagacagttaccgtggaggaggcagctggcggagagagtgctctggccccatctgtttttaagcaagccaaggataaggtctcgaattcaacactctctaagatcccagcactgcagggatcgaccaaatccccgagatacagctccgcctgtccttccacaactaagagggccaccttctccgatagtctgctaatccagcccacttcagccggttctactgataggttgccttacagcaagtctggtaataaggacggcgttaccaagagccccgaaaagaggtcctcgctgcctagaccaagcagcatcctgccacccagacgaggcgtgtcaggtgaccgcgacgaaaattcattttccctcaactcaagcatctctagttcggcaaggagaacaacccgctctgaacctattaggcgcgcaggaaaaagcggaaccagcactcctaccacccctggtagtacagcgattactcccggaactcctccttcttattccagtaggacccccggaaccccagggacgccaagttaccccagaaccccacatactcccggaacccctaagagtgctattttggtaccgagtgagaaaaaagtcgcgatcatcagaacaccccctaagagccccgctacgcctaaacagctgcgactcataaaccaacccttgccagatttgaagaacgtgaagagcaagataggcagcactgataacataaaataccagccgaagggtgggcaagtccgcatactgaacaaaaaaatcgatttcagtaaggtgcaaagtcggtgtggcagcaaggacaatatcaaacacagtgctggaggcggaaacgtgcagattgttacgaaaaagatcgatctgtctcacgtgacctctaagtgcggcagtcttaaaaatattcgtcacaggcccggtggcggacgtgtgaaaattgaaagtgtaaagctggacttcaaggagaaagcccaagccaaagtaggctcccttgataatgcccaccacgtgccgggaggcggaaatgtgaagatcgattctcagaagctgaacttcagagagcatgccaaggctagagtcgaccacggggctgaaatcataacccagtcgcctgggaggagcagtgtggccagcccacggaggctgagcaatgttagctcaagcggctccatcaatctgttagaaagcccacagcttgctacccttgcagaagatgtgacagcggctttggccaaacagggcttgtag

SEQ ID NO: 230554 - DNA, 5483 bp, synthetic construct
  misc_feature 1..5483: note = Description of Artificial Sequence: Synthetic coding sequence
  source 1..5483: mol_type = other DNA
atggcagatgagaggaaggatgaagccaaagctccccactggacatctgcaccccttactgaagccagcgcccactcccacccgcctgaaataaaagatcagggtggcgctggcgagggactggtcaggagtgccaacggtttcccgtaccgagaagatgaagagggcgcattcggagaacacgggagccagggcacttacagcaacactaaggaaaatgggataaacggcgagctgacatcagccgaccgggaaacagcagaagaggtgtcagccaggattgtgcaggttgtcaccgcagaggctgtcgctgttttgaaaggcgagcaggagaaggaggcccaacataaggatcagacagcggctctgccgctggccgctgaggaaaccgcaaacttaccaccttctccacctccctcacctgcctccgaacagactgtaacagtggaagaagacctcctaacggcctcgaagatggagtttcacgatcagcaggagctgaccccttctacagccgagcccagtgaccagaaggaaaaggaatcggagaaacagagtaagcctggagaggatctgaagcacgctgctctggtgagtcagccagagaccactaaaacctatcctgataaaaaagacatgcagggaacggaagaggagaaagccccactggcgctgttcgggcatactttagtcgcctcgctggaggatatgaagcagaaaacagaaccctcattagttgtcccagggattgacttaccaaaagagccccctactcccaaggaacaaaaagattggtttatcgaaatgcccactgaggctaagaaagatgagtggggactggttgccccaatttctccaggtccactgacacccatgagggagaaggatgtcttcgacgatatccctaaatgggagggtaagcagtttgactctcctatgcctagccctttccaaggaggatccttcactctgccgctagatgttatgaagaacgaaatagttacagagacctctccattcgcacccgcatttctgcaacccgacgacaagaagtcgcttcagcaaaccagtggaccggctaccgcaaaggattctttcaagatagaagaacctcatgaggctaaaccagataagatggctgaagctcccccttcagaggccatgactctgccgaaagacgcccatataccggtcgtcgaagaacacgtgatggggaaagtcctggaagaagagaaggaggcaatcaaccaggaaacagtccagcagcgagacacattcacaccaagcggccaggaacctatcctgacggagaaggagaccgagctgaagttggaggagaagacaactatcagtgataaggaagctgtgccaaaagaatcaaagccccctaagccggctgacgaggaaattgggatcatacagacatcaacagagcatacgtttagtgaacagaaagaccaagagcccactacagatatgctgaaacaggatagctttccggtgagtctcgaacaggctgttactgactctgccatgaccagtaaaactctagagaaggccatgacagaaccaagtgccctaatagagaagagttctatacaggaacttttcgagatgagagtagacgacaaagataaaatagagggtgtgggggctgccacaagcgccgagcttgacatgcccttctatgaggacaagagtggaatgtccaagtatttcgaaacctcagccctgaaggaggaggcgaccaagtccatcgagccaggaagcgactactatgagctctctgacactcgtgaatccgtgcacgagtctatagacactatgagccctatgcacaaaaacggtgacaaggaattccaaactggcaaagagagtcaaccctccccacccgctcaggaagctggttattctactcttgcgcaaagctatccaagtgatttaccggaggaaccttcctctccacaggaacggatgttcactatcgaccccaaagtgtacggagagaagcgagacctgcactccaagaacaaggacgatctgactctatctaggtccttgggtttgggcggtcgcagtgcgatagagcagcggtccatgagcatcaacctgccaatgagctgcctggatagcatcgcactcggatttaacttcggccgaggccacgacttgtcacctttggccagcgatatcctaaccaatacatcgggctctatggatgaaggtgatgattaccttccggctaccactcccgcactcgagaaggccccatgcttccccgttgagagcaaggaagaagagcagattgagaaagtgaaggccaccggtgaagaaagtacacaggccgagataagctgtgaatctccatttttggccaaggacttttacaagaatggaaccgtcatggcaccagacctgccggagatgctcgaccttgcagggacgaggagccggttggcctctgtgtccgcagatgccgaagttgcgaggaggaaaagtgtcccgtccgaaacagtggttgaagattctcggacagggctcccccctgtaaccgacgagaaccacgtgattgttaaaacagacagtcagctcgaagatttgggatattgtgtttttaacaagtacaccgtcccgttgccatcccccgtccaggactcagaaaacttatcaggcgaatcagggaccttttacgaagggaccgacgacaaagtaagacgcgatctggctacagatctcagtctgatcgaggtgaaattggccgctgccggaagagtgaaggacgagttttccgttgataaggaagcatcagcccacatctcaggggacaagtctggactatctaaggaatttgatcaagaaaagaaagctaatgatcggctggacacagtgctcgagaaatccgaggagcacgccgattctaaagagcacgctaaaaaaaccgaggaggcgggagatgaaatcgagaccttcggcctgggcgtgacgtatgaacaggccttggccaaggatctcagcatcccgaccgacgcttctagtgagaaggccgaaaaggggctgagttctgtacctgaaatcgctgaggtcgaaccatctaagaaagttgaacagggactggatttcgctgtccagggccaactggatgtaaaaatcagcgactttggccaaatggctagcgggctgaatatcgacgatagacgcgctaccgagttaaaactcgaggcaacacaagacatgacacccagctcaaaagctccgcaggaggccgatgcatttatgggcgttgagtccggccatatgaaagaggggaccaaagtctctgagactgaggtcaaagagaaagtggccaaacccgacctcgtccatcaggaggccgttgacaaagaagaaagctatgaaagctctggtgaacacgaatcccttacaatggaaagtttaaaggccgatgagggcaaaaaagagacttcccccgagagttctctgatacaggatgagatagctgtcaaattgtctgtggagattccatgtcctcccgcagtctcagaggccgacctggccaccgatgagagggcagatgtgcagatggaatttattcagggccctaaagaagaatcgaaggaaacacctgacatctccataacgccctccgatgtcgccgaaccattacatgagactatcgtgtctgaaccggcagagatccaaagtgaagaagaagaaattgaggctcagggagaatatgataagctcttatttagatctgacacgctccagataacggacctcggcgttagcggagctcgagaggagttcgtagagacctgtcctagtgagcataaaggggtcatcgagtctgtggtgaccatcgaagacgactttattaccgttgttcaaactaccactgacgagggtgaatcggggagccactccgtgcgctttgccgctctcgagcagccagaagtggaaagacgccctagcccacacgatgaagaggaattcgaagtcgaggaggcagccgaggcccaggccgagccaaaggatggctctccagaagcccctgcttcccccgagagggaagaggtggccttatcagagtataagaccgagacctacgacgactacaaagatgagaccaccattgacgactccataatggacgcagactcgctgtgggtggatacacaggacgacgaccgaagcattatgaccgagcagctcgagacaattccaaaagaggagaaagccgaaaaggaggcaaggagaagctcgctggaaaagcatcgcaaagaaaagccattcaaaactggtcgcggaagaataagtactcccgagcggaaagtggcgaagaaggagccttctactgtttctcgcgacgaggtgagaaggaagaaggccgtctataaaaaagcagaactagctaagaaaacggaagtgcaggctcattcaccgtcccgaaagtttatcctcaaacctgcaattaagtacactaggcccacccatctgagctgtgtgaaacggaagactacagcagctggtggcgagtccgcactagcaccctctgtgtttaagcaggctaaggataaggtctctgacggggtcacaaagtcaccagaaaaacgtagcagcctccctcgcccatcttcaatcctgccgcctcggcgtggagtcagcggtgaccgagacgagaatagtttctccttgaacagcagtatttcctcaagtgcaagacgcacaacccgaagcgaacccatacgacgggctggcaaaagtggtacttccacgcctaccactcctgggtccaccgccatcacccccggtactcccccatcttattcgtctcgaacccctggaacccccggaacgccatcatatcctagaactccacatacccccggaacccccaagtcagccatactggttccctcagagaagaaagtggctatcatccgtacccccccaaagagtcctgcaaccccgaagcagcttaggcttattaatcagccccttcccgaccttaaaaacgttaaaagtaagattggctccactgataatataaaataccagcctaaaggagggcaagtgcagatcgttacaaaaaagatagacctgagccatgtgacttcaaagtgtggaagtttaaaaaatattcgccaccgacccggtggagggagagttaaaatagagtccgttaaacttgacttcaaagagaaggcacaggcaaaggtcggctctttggacaatgcgcaccacgttcctggaggaggtaatgtcaagatagacagccagaaactgaattttcgagaacacgctaaagccagggtggatcacggagcagagataattactcaaagccccggacgatcatctgtcgcatctcccagaaggttatccaatgtgagcagtagcggcagtatcaatctcctggagagcccccagctcgccacgttggctgaggatgtgaccgcagcattggcaaagcaggggctgta

SEQ ID NO: 230555 - DNA, 1416 bp, synthetic construct
  misc_feature 1..1416: note = Description of Artificial Sequence: Synthetic coding sequence
  source 1..1416: mol_type = other DNA
atggctgatgagaggaaagacgaggccaaagcccctcattggacctccgcgcctctgactgaggcatctgctcattctcacccgccagaaattaaggaccaaggcggtgccggagagggtttggtccggagcgccaatggctttccttatcgggaagatgaagagggcgctttcggagaacacggaagccaaggcacatacagtaataccaaagagaacgggatcaacggggaactgacctccgccgatagggagactgctgaggaagttagtgctcggatcgtccaggtggttactgccgaggccgtggctgttttgaaaggcgaacaggagaaagaggcccaacacaaggatcaaaccgcagccctgcccctggcagccgaggaaaccgctaacctccctcccagccctcctccaagtcccgcttcagagcagaccgtgaccgtggaggaagcggctggcggagagtctgccctggccccttctgtatttaagcaggctaaggacaaggtctccgatggagtgactaagagccccgagaaacgctctagcctgccccgaccgagcagcatcctacctccccgtcggggtgtgtctggcgaccgtgacgaaaactcatttagcctgaacagcagcatatcctcatccgccagacgaacaactcgcagcgaacctattcgtagggccggtaagtctggaacttctacccctacaacacctggatcaaccgccatcactcctggcacgcctccctcatactcttcaagaacacccggtacaccgggtacaccctcttacccaaggacgccacacacgccgggaactcccaaaagtgccattctggtgccgagtgagaagaaagttgccattatcagaactccacccaagtctcctgcaacccctaagcaactcaggttaatcaatcagcccttgcctgacctgaagaacgtgaagagcaagataggatcaactgacaatatcaagtaccagccaaagggaggtcaggtacagattgttaccaaaaaaattgacctgtctcacgtgacaagcaaatgtggaagtttgaaaaatattaggcaccggccagggggaggtcgcgtaaagatagagtccgtgaagctggacttcaaagagaaggcgcaggccaaggtgggcagtctcgacaatgcccaccacgtccctggagggggaaacgtgaaaattgattctcagaagctcaatttccgggaacacgcaaaggcccgtgttgatcatggtgcggaaattatcacacagtcccctggcagatcctccgtggccagcccacggcgtctgagtaatgtcagctcttctggatctattaatctgctcgagtctccgcagctggccactctagccgaggacgtgacagccgcactcgccaaacagggtctgtag

SEQ ID NO: 230556 - DNA, 321 bp, synthetic construct
  misc_feature 1..321: note = Description of Artificial Sequence: Synthetic coding sequence
  source 1..321: mol_type = other DNA
atggcggacgaaagaaaagacgaagctaaggctcctcactggacctcagcaccccttaccgaggcctctgcacattcacaccctccagagatcaaagaccagggtggtgctggagaaggtctagtgcgctcagccaatggatttccgtatagggaggatgaagagggcgcatttggtgagcacggctcccagggcacctatagcaacaccaaggagaacggaatcaacggcgaactgaccagcgccgatcgggaaaccgccgaagaggtgtccgcccgtatcgtccaggtggtgactgctgaggccgtagcagtcctgtag

SEQ ID NO: 230557 - DNA, 1416 bp, synthetic construct
  misc_feature 1..1416: note = Description of Artificial Sequence: Synthetic coding sequence
  source 1..1416: mol_type = other DNA
atggccgacgagcggaaagacgaggccaaagctccacactggacaagcgctcctctaacggaggcctctgcccactctcacccaccggagataaaggaccaaggcggtgccggtgaaggcctggtccgctcagccaacggtttcccatatcgagaggacgaggagggggcattcggagaacacgggagtcagggcacctattctaataccaaagagaatggcattaatggggaactcacttccgcggatcgggaaactgcagaggaagtcagtgcccgaatcgtgcaggtagtaaccgcggaagctgtggcggtgttaaaaggtgaacaagaaaaggaagcccagcacaaggatcagactgccgctctacctttggctgctgaggaaacggcaaacctcccccctagtcccccaccctcgcctgctagcgaacagactgttaccgtggaggaagcagcgggtggggagagcgccttggccccttccgttttcaagcaagctaaggacaaagtcagcgatggtgtgactaagagtccagagaagagatctagcctaccaagaccttctagcatcttacccccacgcagaggcgtgtccggcgatcgggacgaaaattcattttccctgaacagtagtatctcttcttccgctagacgaactacgagaagtgagccaattaggagggctggtaagtcaggtacatccacgcccactacccccggttcaaccgccataacccctggaacaccgccaagttactcaagtagaactcctggcacccccggaacaccatcctacccaagaactccccatacacccggaaccccaaagtcagcgatcctcgttccgtccgaaaagaaagtcgccatcatccggactcccccaaaatcaccagccactcctaagcagctgcgcctgataaatcagcctctgccggacctaaagaatgtgaagagcaagattggcagcactgacaatatcaagtaccagccaaaaggaggtcaagtgcagattgtcacaaaaaaaatcgatctcagccatgtcaccagtaaatgtggcagccttaaaaacattcgacacaggcccggtggaggtcgggtcaaaatcgagtctgtgaagctcgactttaaggaaaaggcccaagctaaagtcggctccctggacaacgcccaccacgtcccagggggaggcaacgtcaagattgactcccagaagctgaattttagagagcatgcaaaggccagagtagaccacggcgctgagatcattacgcagtctccagggaggagctctgtggcttctcctcgaagactgagcaacgttagttcatccggctctattaacctcctcgagtccccccagctggcaaccctcgccgaagacgtgactgccgctctagcaaaacagggcttatag

SEQ ID NO: 230558 - DNA, 5471 bp, synthetic construct
  misc_feature 1..5471: note = Description of Artificial Sequence: Synthetic coding sequence
  source 1..5471: mol_type = other DNA
atggcagacgagcgtaaagatgaagcgaaggcaccccactggacttctgcccctctcaccgaggcatcagcacactcccaccctcccgagatcaaagatcaggggggagccggtgagggattggtgagatccgccaatggcttcccatacagagaagatgaagagggtgctttcggcgagcacggctctcagggaacctactcgaataccaaggagaacgggatcaacggggagctcacaagcgctgatcgggaaaccgctgaagaagtctccgcccgaattgtccaggttgtgaccgctgaggctgtcgccgttttaaagggggaacaggagaaagaagcacagcacaaggatcaaaccgcagcacttcccttggctgccgaagaaacagccaatctgcccccaagtcctcccccaagcccggctagcgagcagaccgttaccgttgaagaagcctctaagatggagttccacgatcagcaggagctgacaccatcaacagccgagcctagtgatcaaaaggaaaaagaatctgaaaagcaatcaaaaccaggagaagatttgaagcacgccgctttagtgtctcagcccgagacaacaaagacttaccccgataagaaggacatgcagggcacagaagaagagaaggctcctctcgcgctgttcggccatacactcgtcgctagcttggaggacatgaaacagaagaccgaaccatccctggtggttcctggaatcgacctcccaaaagaaccacccacaccaaaggagcagaaggattggttcatcgaaatgcccacagaggcgaagaaggatgagtgggggcttgtggcacctatttctccagggccactgacccccatgcgggagaaggacgtatttgacgacattccgaaatgggaagggaagcagtttgatagtcccatgccatcacctttccagggcggtagttttaccctaccactggatgtcatgaagaatgaaattgtgactgaaacgtccccctttgccccagcatttctgcaaccagatgataaaaaatccctgcagcagacctctgggccagccactgccaaggacagctttaaaattgaggaaccccacgaggcaaagcctgacaagatggcagaggccccaccatcggaagccatgacgcttccaaaggatgcgcatattcctgtcgtggaggagcatgttatgggcaaagtcctcgaagaagaaaaagaggctattaatcaagagaccgtgcagcagcgagacaccttcacaccttctggacaagaaccgatactaacggagaaggaaacggaactgaagctcgaggaaaagaccacaatcagcgataaggaagcagtgccaaaggaatctaaaccgccaaagcctgctgatgaggaaattggtatcattcagacatcaactgagcacaccttttctgaacagaaggaccaggagcctaccaccgatatgcttaagcaggatagctttccagtgagtctggagcaggccgtgacggattctgcaatgacttctaagaccttagaaaaagcgatgacagagccaagtgccctgatcgagaagagttccatacaggagttatttgaaatgagagttgacgataaggataaaatagagggggtcggggctgccaccagtgctgagctggatatgccgttttacgaggacaagagtgggatgagtaaatacttcgaaacaagcgccctcaaggaagaagcaacgaaatctatcgagcccggatccgactactatgaattaagcgacactagagagagtgttcatgagtctattgatacgatgtctcctatgcataagaatggagataaggagtttcagacaggaaaggagtctcagccatcaccccctgcccaagaggccggatattccacccttgctcaaagttacccttcagatttgccagaggagccctcgtctccccaggagcgtatgttcaccattgacccaaaagtgtatggggagaagagggacctgcatagcaaaaataaggatgatctgacattgtctcgctccctgggactcggcggtcgctcagcaatagagcaaaggagcatgtcgataaacctgccaatgagttgcctggatagtatcgccctgggtttcaattttgggaggggccatgacctgtctcctcttgcctccgacattttaaccaacaccagcggaagcatggatgaaggtgatgactatctacctgccactacacccgctctggagaaagcaccttgtttccctgtggaatctaaagaggaggaacagatagaaaaggtaaaagccacgggagaagaaagcacacaggcggagataagctgtgagtcaccgttccttgccaaggacttttacaagaatggtacagtcatggcacccgatctgccagagatgctggacctcgccggtactaggtcacgcctggccagtgtcagcgctgatgcggaagtggctaggcgaaaatccgttccatccgagaccgtggtggaagattccagaacgggccttccccctgtgactgacgagaatcacgttattgttaaaacagacagtcagctcgaggatttagggtactgcgtgtttaacaagtatacagtgccactcccttctcccgtccaggacagtgaaaacttgagcggtgagtcagggacattttatgaggggactgatgacaaggtgcggagagacctggccacagacctgagcctaatcgaggtcaaactcgcagcagcaggccgagtgaaggatgagtttagtgtggacaaagaggcctctgcacatatcagtggggataaaagtggactgtccaaagagttcgaccaagagaaaaaggctaacgacaggcttgataccgtacttgagaagtctgaggaacacgcagacagcaaggagcacgctaagaagacggaggaggcgggagatgagatcgaaacattcggattgggggtgacgtacgagcaggctttggcgaaggatttatcaatacccaccgacgcttcatctgagaaagccgagaagggcctctcctctgtgcccgagatagcggaagtggaaccctctaaaaaagttgagcagggcctggactttgccgttcaagggcaactggatgtgaagatctcagactttggtcagatggctagtggcctgaatattgacgaccggcgagctaccgaactgaagctggaagctacccaagacatgacgccttcctcaaaagccccacaggaggcagacgctttcatgggggtcgaatccgggcacatgaaagagggaaccaaagtgagtgagactgaggtcaaggagaaggtagccaagcctgacttagtacaccaggaggctgtcgacaaagaagaatcttacgaatcctccggcgagcacgagtcactgacgatggaatctctaaaagccgatgaagggaaaaaagagactagcccagagagttcgctcattcaggacgagatcgctgtaaagctgagtgtagagattccatgtcctccagccgtatccgaggctgacctcgctactgacgagcgcgctgacgtgcagatggaattcattcagggcccaaaagaagagtcgaaagagactccagacataagcatcactccctcagacgtggctgagccactgcacgaaacaattgtgtcagagccggctgagatacagtccgaagaggaagagatagaagcccaaggcgaatatgataaactgcttttccgctctgacactcttcagattaccgacctgggcgtatccggcgcacgggaagagtttgtggaaacatgtccctctgagcataagggtgtcattgagtccgtggtcactatcgaggacgactttatcacagtcgttcagactacaactgatgagggggaatcaggcagccactctgttagatttgctgccctggagcaacccgaagtcgagagacgccctagcccccacgatgaggaggagttcgaggtggaggaagcggcagaagcgcaggctgagccaaaggacgggagtcccgaagcccctgcctccccagagagagaggaggtcgcgctgagcgagtataaaactgaaacatacgatgactacaaagatgaaaccactatcgacgattccatcatggacgcggattcattatgggtcgatactcaggacgatgatcgatcaatcatgaccgaacagctggagaccatacctaaggaggagaaggcagagaaggaggctagacgttccagtctcgagaagcatcggaaagaaaagccattcaaaactgggaggggacgtatatccactcccgaacggaaggtcgctaaaaaggaaccctctacagtatctcgagatgaagttagacggaaaaaggcagtctacaagaaggctgaactggccaagaaaactgaggtgcaggcccatagcccgagccgaaaattcattctgaaaccagccatcaagtacacacgcccaacgcacctgtcatgtgtgaaacgaaaaacaaccgctgcgggaggggagagcgcattggccccttcagtatttaagcaggccaaggacaaggtatctgacggcgttaccaagagcccagagaagagaagttcactcccgcgacctagcagtattctaccaccacggaggggcgtgtccggcgatagggatgagaattccttttccctgaacagtagcatctcatccagtgctaggagaactaccaggtccgagcctattagacgcgctggtaaaagcggtacctctactcctaccaccccaggatcaaccgcgatcacaccgggtacaccgccatcatactcttcgagaactccaggcacaccgggtaccccctcttatcccagaacaccacacaccccaggtacccccaaatccgcaattctggtgccctccgaaaagaaggtagcaattatcaggacacccccaaaatcccctgcaactcccaaacagctgcgactcataaatcagccactgccagatctgaagaacgtgaaaagcaagatcggctccacagacaacatcaaataccaacccaaaggcggacaggtacagatcgtgacaaagaaaatcgacctgtcacacgtgacctctaaatgtgggtctttgaagaatatcaggcatcggcctggcggaggcagagtcaaaatcgaaagtgtcaaactcgatttcaaagaaaaggcgcaggctaaggtggggagtctagacaacgctcatcatgtgcctgggggaggcaatgtgaaaatcgactctcaaaagctgaattttcgcgagcacgcaaaggccagggtggaccacggggcagagatcatcacccagagtcctgggagaagcagtgtggctagcccacgacgtcttagtaacgtgtccagcagcggctctattaacctgctggagagcccccagctggcgacactggcagaggatgttactgcggcattggcaaagcaaggtctgta

SEQ ID NO: 230559 - DNA, 2664 bp, synthetic construct
  misc_feature 1..2664: note = Description of Artificial Sequence: Synthetic coding sequence
  source 1..2664: mol_type = other DNA
atggagacaactggggaccagggcatagaaggaatggcctacatggacgaaaacaggaatattacatttacctgtcctcgtacaccttccgagctcattaacaaaagcagcccactggaggtcttggagtccgccgcttgtgagaagctgcccacgccaaccccacaggtggtcaaggagggagatagcttccccgatacgctcgcaaaaaacggacaggaaatcgctcctgcgcaaatatccaagagcctgatggtggacaactacactaaggatggcgtccccggtcaggaacgacctaaaggtccatcggccgtggtaccatcaacgtctaccggcggagtcgctctgcctatcaccactgccattgagacggtgaacatccacggagaccattctctcaaaaataaagccgagctggctgactctatgaagaatgaggcaggtatcgatgagggccacgtgatcggagaatccgaaagtgtccactctggagcgtctaaacactctgtcgaaaaggtaaccgagttagccaagggacacctgttacctggggtgcccgtggaagaccagagcctcccaggcgaggcgagggctttggagggctatgcagaccgaggaaatttcccggcacaccccgtgaatgaagaaaaagagactaaggaaggcagcgtggcagtgcagatcccagacttattggaagataaggctcagaagctgtccttttgcgaggatcagaacgctcaggatagaaactctaaagggtccgactcgctcaataagaaagtggatctaaccctgctgtctccaaaatcagaaaatgacaagctgaaggaaatttccctcgcttgcaagatcactgagttggagagcgtctcacttcccacaccggagattcagagcgattttctgcactctaaagtcgaagccccaccatcagaggtggccgacaccctggtgattatgacagcaagtaaaggtgtgcgcctgcctgagccaaaagacaagatattagagacccctcaaaagatgactgaaaagagcgagtccaaaacccctggggagggcaaaaaggaagataagtctcgtatggcagagcccatgaaggggtacatgagacctacaaagtctagggggctgactcctttgcttcccaagtcaactatccaggagcaggaaaggcacaagcaactgaagagcgcgggaattgcccgaccagaggaaggccgaccagtggtcagcggaaccgggaatgatatcaccacccctcctaacaaggagctgccccctagccctgagaagaagactaagcctcttgcaaccacccagccagctaaaacgagcacctccaaagcaaagactcaacctacatcgctgcccaagcagcccgctccaaccaccatcggcggtctcaataaaaagcccatgagcctggcatccgggctggttcctgccgctccgccaaagagaccagccgtggcgtctgccaggccttccatcttgccttcaaaggacgtcaagcctaagcccatcgccgacgccaaggctcccgagaagagagccagcccatcaaaacccgcatccgcccctgcatcccgctccggatccaaatccacgcaaactgttgcaaaaacgaccacagccgctgccgtggcttctaccggcccatcctcccgcagccctagcacgcttctgcctaaaaagccaaccgcaataaagacggaagggaagccggctgaggttaaaaagatgacggctaaatcagtaccagctgaccttagcaggcccaaatccacatctacatcgtctatgaaaaagacaaccacactttcgggaacagcaccagcagccggagttgtgcctagccgggttaaggccacccccatgccatcccgaccctctacgactccattcatcgacaagaaacctacctccgcaaagccgagcagcaccactcctcgtctctcccgcctggctacaaacacctccgcaccggatctcaagaacgtgaggtcaaaggtcgggtccacggagaatataaaacaccagcccggaggcggaagagccaaagtggagaagaaaactgaagctgctgcaactactaggaagcccgaaagcaatgctgtaaccaagactgctggtccaattgcatctgcgcagaaacagccagccggtaaggtgcagatcgtatccaaaaaagtttcctactcccatatccagagcaagtgcgggagcaaagataatatcaaacatgtccctggcggaggaaatgtgcagattcagaataagaaggtggatattagcaaggtgagcagtaaatgtggatccaaggcaaatataaagcataagcccggaggaggtgacgtgaaaattgaaagtcagaagcttaattttaaagaaaaggcacaggccaaagtcggtagtttggacaacgtggggcatctcccagccggtggcgcagtgaaaacagagggaggcggtagcgaagcaccgctctgcccagggccaccagccggagaagagcccgctattagcgaggcagctccggaggctggagctcccaccagcgcctcaggcctgaatggacaccccactctgtctggtgggggagaccaaagggaggcgcaaactctggactcccaaatccaagagaccagtatctag

SEQ ID NO: 230560 - DNA, 1392 bp, synthetic construct
  misc_feature 1..1392: note = Description of Artificial Sequence: Synthetic coding sequence
  source 1..1392: mol_type = other DNA
atctgtgaggaacccgtcgctaagaaacgagaagaattagcgcatttttctaatagcagctctaactctggcaagaaggaactggggacagcgggactgtaccttcattctaagttggagcagatccctgaaggctcatcaaaggagaagggacaggaggacttttctgagaccaggattgactcctgttcccaggtgtgccagcggggtgaaaaacagcctggacaaactgctctcgcaggcaaaaaagagatcgaagtgaccgccacgcaatccactccatcttttcttttcgaaaagcccccacgcgatggcatagcgcgtcctgaggaagggcgaccagtcgtctccgggacgggtaatgacattacgaccccaccgaataaggaactcccacctagcccagagaaaaaaaccaagcccattgctgacgccaaagcacccgagaagagggcctctccctccaaacctgcatcggcacccgcttcccgatccggctctaaatctacgcagactgtcgccaagacaaccactgccgctgctgtggcatctactggaccatccagccggagcccctctacgctgctccctaagaagcccaccgctatcaagaccgaaggaaaacctgctgaagtgaagaagatgaccgcaaaatcagtcccagccgacctgtcccggccaaagtccacatctacctcttccatgaaaaagacaaccacattgtcaggcaccgcacctgcagctggagtggttccatccagggtgaaggcgactccgatgccgagtaggccctccacaactcccttcattgataagaagcctacgagtgccaaaccctccagcactaccccacgactgtcaagactagctactaacacgagcgcaccagatctcaagaatgtcagatctaaggtgggaagtaccgagaacattaaacatcagccaggcggaggcagagtccaaatcgtctcaaaaaaggtttcttatagtcacatccagagtaaatgtgggagcaaagataatattaaacacgtccccggaggaggcaacgtgcagatccaaaacaagaaggtggacatttctaaagtttctagtaagtgcgggagcaaggccaatataaagcacaaaccagggggtggcgatgtgaaaatcgaaagccagaagctgaactttaaggaaaaagcccaagccaaggtagggagcttagataatgtcggtcacttgcccgcaggaggcgctgttaagattgagacataccggctgacgttcagagcaaacgcgagagcacgtaccgatcacggggctgacatagtgtcacgccctccgcactttccaggcggaccgaactccggtagcagagtgcttggcccacttagccgagccgtgcactag

SEQ ID NO: 230561 - DNA, 3459 bp, synthetic construct
  misc_feature 1..3459: note = Description of Artificial Sequence: Synthetic coding sequence
  source 1..3459: mol_type = other DNA
atggcagacctctctctggccgatgcccttaccgaaccttcccctgacattgagggagagattaaaagagattttattgccacattagaggcagaagctttcgatgacgtcgtgggcgagaccgttggcaaaacagattacatcccgctcttggacgtggacgagaagactgggaactctgagagcaagaaaaagccgtgtagcgagactagccagatcgaagacaccccaagcagtaaaccgacgctcctggcaaatgggggtcatggggtagagggaagtgatacaaccgggagccccaccgaatttttagaggaaaaaatggcatatcaagagtacccaaactctcagaactggcccgaagataccaatttttgtttccaacccgaacaggtggtcgacccaatccaaacagacccatttaaaatgtaccatgatgatgacctggctgacctggtcttccctagttctgctactgctgatacctcgatttttgccggacagaacgaccccttgaaagactcatacgggatgagcccctgcaatacagccgtggtgcctcaaggctggtcagttgaggctctcaactccccacacagcgagagctttgtgtcgcctgaagctgttgccgaacctccccaaccaaccgccgtgccgttagaactggcgaaagagatcgagatggcaagcgaagaaaggccgcctgcccaggctctggaaatcatgatgggcttgaagactacagacatggccccaagtaaagagacagagatggccctagccaaggacatggctctcgccactaagacggaggtggccctcgccaaagatatggagtcccctacaaagttggacgtaactctggccaaggacatgcagcccagcatggagtcagatatggcgctcgtcaaagatatggagcttcctaccgaaaaggaggttgctctggtgaaagacgtccgttggccaactgagaccgatgtgagtagcgccaaaaatgtggtcttgccaaccgagactgaagttgcccctgcgaaagacgtcacactcctgaaagagaccgaaagggcttctccaatcaagatggatttggcgccatcaaaagatatgggtccacctaaggagaacaaaaaggaaacagagagggccagtcctattaagatggacctggcaccttctaaagatatgggaccacctaaagaaaacaagatcgtgccggctaaggacctcgtgcttctgagtgaaattgaggtcgcccaggcaaatgacatcattagttctacggagattagttccgcagaaaaagtggctctcagtagcgagactgaggtggctctggctcgcgacatgaccctgcctcccgaaacaaacgtgatccttacgaaagataaggccctaccccttgaggccgaggtcgctcctgttaaagacatggctcaattaccagagactgagatcgcgcctgctaaagacgtggccccatctaccgtcaaggaggtggggcttctgaaagatatgagtcccctttccgagacagagatggcactgggcaaggacgtcacacctccacccgagacagaggtggtgcttatcaagaatgtgtgcttgccacctgaaatggaggttgcccttactgaagaccaggtgcctgctctgaagaccgaggcgcctctggccaaggatggtgtgctcaccctcgctaacaatgttacgcccgctaaggacgtcccaccactcagcgaaactgaggcaactccagtgcccatcaaggacatggaaatagcgcaaacgcagaagggtatcagtgaggactcgcacctggagtcactacaggatgttggacaaagcgccgctcctacttttatgattagccccgaaaccgtgactggcaccgggaagaaatgcagcctcccagctgaggaggattccgtgcttgaaaagttgggggaacgcaagccctgcaattcccagcccagtgaactgtcgtccgagacatctggaattgccagacctgaggagggacggcctgttgtgtcgggaaccggaaacgatattaccacgcctcccaacaaagagctgcctccttcacctgaaaagaagacaaagccattagccaccactcagcccgctaagacctcaacaagcaaagccaagacgcaaccaacatctctgccaaagcagcctgcaccaacgactattggaggactgaacaaaaaacccatgtctctcgccagcggtctggtaccggctgcaccgcctaagcggccagctgtggcgtcagcgagaccttcaatcttgccctccaaggatgttaagcctaagcctatcgcagatgccaaagctcctgaaaagagggccagcccgtccaaaccggcaagtgctccagctagcaggagtggctccaaatcgacacaaaccgtggctaagaccacaaccgccgctgctgtggcttcaaccggtccgtccagtaggtccccaagcacattgctccctaagaaacctacagctattaagacggaagggaagccagccgaagtgaaaaaaatgactgcaaaaagcgtccctgcagacctctctcgcccaaagagtacctcaactagctccatgaaaaaaactaccaccctgtccggaaccgcgcctgctgccggagtggtcccatcccgcgtgaaagcaactcctatgccgagtagaccaagcaccacacccttcatcgataaaaagccaacttctgcaaagccctcgtctacaacccccaggttgtcacggctggcgaccaatacctccgccccagatttaaagaacgttaggagcaaagtgggtagtaccgagaatattaagcaccagcccggaggaggcagggctaaagtagagaaaaaaactgaggccgcagcaacgacgagaaagcccgaaagcaacgccgttactaagactgcaggacctattgcttcagctcagaaacagccagcagggaaagttcagattgtgtctaaaaaagtctcatattctcatatccagagcaagtgtggcagtaaggacaatatcaagcacgtacctgggggtggcaatgtgcagatacaaaataagaaggtcgacatctcgaaggtttccagcaaatgtggtagcaaagctaatatcaaacacaaacctggtgggggtgacgtgaaaatcgaaagccagaaattgaacttcaaagaaaaggcacaggccaaagtgggcagtctggataacgtcggccacctgccagcgggaggcgctgtgaaaactgaaggcggtggctcagaagcaccactgtgccctgggcctcctgcaggagaggagcccgcaatcagcgaagcggcacccgaagccggtgcccctacaagtgcctcgggcctgaacggtcaccctacattaagcggcggaggagaccagagggaggcgcagaccctcgacagccagatccaggagaccagcatttag

SEQ ID NO: 230562 - DNA, 2139 bp, synthetic construct
  misc_feature 1..2139: note = Description of Artificial Sequence: Synthetic coding sequence
  source 1..2139: mol_type = other DNA
atggagaccactggggatcagggcattgaaggaatggcatacatggatgaaaaccgaaatattacatttacctgccctcgaacgccatccgagttaatcaataaaagctcccctttggaagtattagaatctgccgcttgtgagaaactccccactccgaccccacaggttgtcaaagaaggtgactcctttcccgacacacttgccaagaacggccaagagattgccccagcccagatttccaaaagcctgatggtggacaactatacaaaggacggggtcccaggacaggaaaggcccaaggggccttcagccgtggtgccttccacaagcacaggaggcgtcgccctccccatcaccaccgcgattgagactgttaatattcacggagatcacagccttaagaacaaggcagaactggccgattccatgaaaaatgaggctggtatcgatgaagggcatgtcatcggtgagagcgagtccgtgcactctggggcttcaaagcatagcgtcgaaaaagttaccgagcttgcaaaaggccatctgctacctggggttcctgtcgaagatcaatcgctccccggagaggccagggccctagagggttacgcagatcggggtaacttccctgcccacccagtcaacgaagagaaagagaccaaggagggctccgtggcggtccaaattcccgatctcctcgaagataaagcgcagaaactttcattctgtgaggatcagaatgcccaggatcgcaattctaaaggtagtgacagcttgaataaaaaggtcgatctcacattactgtcccctaaatccgaaaatgacaaattgaaagaaatctctcttgcctgtaagatcaccgaactggagtccgtctctttgcctactcctgagattcaatccgatttcctccacagcaaggtggaggcaccaccttccgaggtggcggacactctcgttatcatgactgccagtaagggggtacgactgcccgagcccaaagacaagatcctggagactccccagaaaatgactgaaaagagcgaatctaagacacctggggaaggcaagaaggaagacaaatcccgtatggcggagccaatgaaagggtatatgcgacccactaaatccaggggcctgacacctctcctgcctaagtccactatacaggaacaggagcggcacaagcagctgaaatcagctggtatcgcccgaccggaggagggcaggcccgtcgtatcaggaacaggcaacgatattaccacgcctccaaacaaggagctccccccttccccagagaagaaaacgaagcctcttgccaccactcaacccgctaaaacgtccacatctaaggccaagacacaaccaacctccctcccgaaacagcctgctccgaccactatcggaggactgaacaagaaaccgatgagcttggcgtccggactagtgcctgccgcaccaccaaagcgtcctgcagtagcctcagcccgacctagtatcctgccaagtaaagatgtgaaaccaaaaccaatcgccgacgccaaggctcctgaaaagagagcctctccttccaagccagcatccgcccctgcgtctaggtctggatcgaagagcacccagactgtggctaagacaacaaccgccgctgctgtcgcaagtacaggcccttcttctaggtcgccgagcaccctcctcccgaaaaagccaacggcaatcaaaaccgaaggtaaaccagccgaagtgaagaagatgacagcgaagtctgttcccgctgacttgtccagacccaaatctacgagtacttcaagcatgaagaagaccaccaccctgagtggcaccgccccagcagcaggcgtggtcccttcgcgggttaaagcaaccccaatgccttcaagaccttccaccacacctttcattgataagaagcctactagcgcgaagccatcttccacaacaccacgactgtcacggctggcaaccaatactagtgccccagacttgaagaacgtgcgaagcaaggcaaaggtggaaaagaagaccgaagccgctgccaccaccagaaagcctgaatcaaatgcggtgacaaagactgcgggacccatcgcttctgctcagaagcagcctgcaggcaaagtgtag

SEQ ID NO: 230563 - DNA, 2436 bp, synthetic construct
  misc_feature 1..2436: note = Description of Artificial Sequence: Synthetic coding sequence
  source 1..2436: mol_type = other DNA
atggccgacctgagtctcgcagacgcccttacagagccaagtcccgacatcgagggcgaaatcaagagggactttatcgctactctcgaggccgaggccttcgatgatgtcgtgggcgaaaccgtgggcaaaactgattacatcccgcttctcgatgttgacgagaaaacaggtaatagtgaatctaagaaaaagccatgtagcgagacctctcaaattgaagacacccctagtagcaagcccaccctgctcgccaatggcggacacggcgtcgagggctccgatacaaccggatcaccaaccgaatttcttgaggagaagatggcctatcaggagtacccgaactctcagaattggccagaggacaccaatttctgcttccaaccggagcaagtcgtagatcccattcagacggacccttttaagatgtatcacgacgatgatcttgcggatttagtctttcctagctctgccaccgctgacacaagtatttttgctggccaaaacgaccctctcaaagacagctacggtatgagtccgtgtaacactgccgttgtcccccaaggatggagcgtggaagccctcaatagtccccacagcgagagcttcgtgagcccagaagctgtcgcagaaccccctcagcccaccgcagttccacttgaactggcgaaggaaatcgaaatggctagcgaggagcgccctcccgcacaagcgttggaaatcatgatggggctgaagacaactgatatggcccctagcaaggagacggaaatggcacttgccaaggacatggccctggcaaccaaaaccgaggtcgctctggcaaaggatatggaaagtcctacaaagctggatgtgaccctggctaaggacatgcagccatcaatggagtctgacatggccctcgtcaaggacatggagctgccaactgaaaaagaagtggcgctggtgaaggatggggtgcggcttcccgagccgaaggacaagatcctggaaacaccgcagaaaatgacggagaaatccgaatccaagactcctggggagggcaaaaaagaagacaaatcccgtatggcagagccaatgaaagggtacatgaggccaacaaagtcccgcggactaactccactactgcctaagtcgaccatacaggaacaggaaagacataaacagcttaaatccgctggaatcgccagacccgaagaaggaaggccagtggtcagcggaacggggaatgacataacaaccccccctaacaaagaactccctccaagtcccgaaaagaagacaaagccactggctaccacccagcctgccaagacctccacgagcaaggctaaaacccagccgactagtctccccaaacagcctgcacccaccactattggtgggctcaataaaaaaccgatgagcctggccagcggattagtcccagccgcaccaccgaagagaccagcagtggccagtgcccgtccaagtattttaccttcaaaagatgtgaaaccgaagcctatcgccgatgctaaagctcccgagaagagagcatcccccagcaagcctgccagtgccccagctagccggtcgggaagcaagtcaacacagactgtggcaaaaactacgaccgctgcggcagtagctagcactggaccatcctcccggtctccctctacattactgccaaagaaacccactgcgataaagacagaagggaagcccgctgaggttaagaagatgaccgctaagtccgttccagctgacttgtctagacccaagtctacaagtactagttcgatgaagaaaactactacattgagcggaaccgctccagccgctggtgtggtgccatccagggtcaaagctactcccatgccgagcagacccagcaccaccccttttatcgataagaagcctacatctgcaaagccaagttcaaccactcccagactgtctaggcttgccacaaatacttctgcccctgacctcaagaatgtgagatctaaggtgggctcaacagagaacatcaagcatcagcctggcggtgggcgagttcaaatccagaacaaaaaagtggatatatcaaaggtgtcttctaagtgcggttctaaagctaatataaagcataagcccggtgggggagatgtgaagatcgaatcacaaaagctaaacttcaaagagaaggcacaggccaaggttggtagtctcgacaacgttgggcacctacccgctgggggagctgtgaagaccgaggggggaggctcggaggctcctctctgtccaggaccgcctgcaggcgaagaacccgctatctccgaagccgcaccggaagccggagctccaacctctgcctccggacttaatgggcacccaaccctctcagggggaggcgaccagagagaggctcagacattggattctcagattcaggaaacgtctatttag

SEQ ID NO: 230564 - DNA, 3408 bp, synthetic construct
  misc_feature 1..3408: note = Description of Artificial Sequence: Synthetic coding sequence
  source 1..3408: mol_type = other DNA
atggccgacctgagcctggccgatgctctgacagagcctagccccgatatcgaaggggaaattaagagggacttcatcgccaccttagaagccgaggccttcgacgacgtggtgggcgaaaccgtgggaaaaacagattatattcccctcctggacgtcgatgagaaaactggtaactcagaatcaaagaagaagccatgtagcgagacatcccagatcgaagatacaccttctagtaagccaacattgcttgccaacggagggcatggggtggaggggtctgataccacaggaagtccaacagaatttctggaagagaaaatggcctaccaagagtaccccaactcgcagaactggcccgaagacactaacttttgctttcagcccgagcaggtcgtggaccccatacagactgatccattcaagatgtaccacgatgatgaccttgcggaccttgttttcccatctagcgccacagcagatacgagtattttcgccggacagaatgaccccctgaaggattcttatggcatgtctccttgtaacaccgcagtggtgcctcaggggtggagcgtcgaagccctgaactctcctcactctgagtcgttcgtcagtcccgaagccgtagccgagccaccccaaccaaccgcggtcccactggagctcgctaaagagatagagatggcatcagaagaacgtcctcccgcacaggccttggaaattatgatggggctcaaaacgaccgatatggccccatccaaagaaaccgaaatggcactcgccaaagacatggcgttagctaccaagactgaggttgctcttgctaaggacatggagagcccaactaaactggatgttacgctggctaaagacatgcagccctctatggagagtgacatggcgctggtgaaggacatggaactacccactgaaaaagaagtggcgctcgttaaggatgtgaggtggccaaccgaaacagatgtgagcagcgctaaaaatgttgtacttccgactgagacagaggtggcacccgctaaggacgtgacgctgctgaaagagacagaaagggcttcccctattaaaatggacctggcaccatctaaagatatggggccaccaaaggagaataagaaggagactgaacgtgctagcccgattaaaatggatcttgcaccatccaaagacatggggcctcccaaggagaacaagatcgtgccggcaaaagacttggtactcctgtctgagatcgaagtcgctcaggccaacgatattatctccagcacagagatctcaagtgccgagaaagtggcactgtcaagtgaaactgaagtggccttagctagggacatgacactaccacctgaaacaaatgtcattctgactaaggacaaggctctgcctcttgaggccgaggtggcacccgtgaaggatatggcccaattgccagaaacagaaattgcccctgctaaagacgtagctccaagcactgttaaggaggttggattgctcaaagacatgtctcccctgtctgaaacagaaatggctctgggtaaggatgtgactcctccgccagaaaccgaggtggtactcattaaaaatgtttgcctgcccccagagatggaggttgccctgactgaggaccaagtacccgcattaaagacggaggcccctttggccaaagacggagtgttaaccctcgcgaataatgtgacccccgctaaagacgtgcctcccttgtccgaaactgaggccacccccgtgcctatcaaggacatggagatcgcccaaactcagaagggaatcagcgaggattcacacctcgagagcttgcaagatgtcggccagtcagctgctccgaccttcatgatcagccctgaaactgtgactggcaccggtaaaaagtgctctttacccgcagaggaggattccgtgctcgagaagttaggagagaggaagccatgtaattctcagccttccgaactgtcaagcgagacttcaggcattgcacgacccgaggaaggcaggcccgtggtgtccgggaccggaaatgatattacgaccccaccaaacaaagagctgcctcctagccctgaaaagaaaacgaaacccctggctacgacgcagcccgctaagaccagtaccagtaaggctaaaacgcaacctacctcactcccaaaacagcctgcccctacaacaatcggcggactgaataagaagcccatgtctctggcgtccggattagtcccagctgcgccacccaaaaggcctgcagtggcttcagctcgcccttcaatcctcccaagcaaggatgtgaagccaaagcccatcgctgatgccaaagccccagaaaaaagagcttccccttctaagcccgcatccgcacctgcaagccggagcgggtccaagagtactcaaacagtggctaagacaaccactgccgcagctgtcgcatcaaccgggccttctagtagatccccttccacactgctgccgaagaaaccaaccgccatcaagaccgagggcaaacccgcagaggtgaagaagatgacggccaagtctgtgccggctgacctgtctcggcctaaatccactagcacatcctccatgaagaagacaaccaccctttctggcacagcaccagcagcaggcgtcgtgccgtctcgcgtgaaggcgactccaatgccatccaggccctctactacgcccttcattgacaaaaaaccaacctctgcaaagccaagctccacaacccccaggctgtcacgactcgctactaatacttccgcccctgatctgaaaaacgtcagatccaaagtcggatcgaccgaaaacattaagcatcaaccgggtggcggaagggctaaggttgaaaaaaaaaccgaggccgctgcaaccacaaggaaacccgaatctaatgcagtcacaaagactgcagggccaattgcttcagctcagaaacagcccgcaggcaaagtgcagatcgtttcaaagaaggtgtcgtacagtcatattcagagtaaatgtggatcaaaggataatattaaacatgtgcccggagggggtaatgtgcaaatccaaaacaaaaaggtggatatttctaaggtgagctccaagtgcggctcgaaagctaacataaagcataaaccgggaggaggcgatgttaagattgagtcacagaaactgaacttcaaggagaaggctcaggctaaggtgggctctctcgacaatgtaggacatctgccagctggcggtgccgtgaaaattgagacctaccgccttaccttccgcgcaaatgcgcgtgcgagaaccgaccacggcgctgatatcgtgtctcgccctccccatttccccggaggtcccaattccggctctcgggtgctgggtcctctttcacgggcagtccactag

SEQ ID NO: 230565 - DNA, 2487 bp, synthetic construct
  misc_feature 1..2487: note = Description of Artificial Sequence: Synthetic coding sequence
  source 1..2487: mol_type = other DNA
atgagtctgtctgataagcagactgctagcctgacagcagcctacggtcagctatcaaaaggaaaaccggctgagtgcagaatggactctccaaaagagatcagtcaggcaggtttcgaatggcagcgcaccgaaggaaagttaaacgaaattggactgaacgtttcaatggatggtcaacccaaggacggtctcgttaagaacgcatcctttctggaacaaaataaactctgcttctttgagggaaagctcgacaaagaactctcaatcgagatgcaagataaggattgccaagaggcgtcggggcacctcgaatcaaggtatgtgatctctgagacctgccatccattggaagggaattcagtgcaccaaaaaacaagcgagttccatctggggctgatagaagggccagacaagaataaaacaattccagtgcaaggtaaagtggccggaaaaaacggtctggaaaccaaatcacaaagcgacctggacttcccgggagctgcggacatacccactagatacgttaaagaacaagaaacgtccgtctggaacccctcgttccatcctgtcgctcagggttcacttgggagccgggaggcaacgccaggcgaaatggagaactcgatcactccaggttgcccggtcatcggagtggtgaatgataattcagaacagctcaagtgcgagtcccctctgttagtgagtctcgcccacccggcaccaataattgaacactccccaacgaccataccccctatcaccatggtgttcactcaagagcaccttaatgccagctgtcatatacgtgatcatgataaagagctcgagaagttgtcctcaactgaggaagccgtgctgaatcaggcaccccagcagaaaaaggctgtgaggcgggcactcagcgaatgttcgcacctcagtgtgccccctgcggtgaatctggcagataagtaccccgagctccctgccagggaagagccctcttccggactgctgccgccacccagctcgcctatgccttcccccacccctggtaaattgggcgcacccgctatgaagaggtccatgacggtgggggaagaacaaactgcttcttataaactgtctccaggaaagttgcctattttaagcacaaaggagatccccccatttatctgtgaagagcctgttgccaagaagcgggaagaactggctcatttttcaaattcctccagcaatagcggtaagaaggagctgggcacggccggactgtatttacactctaagctcgaacagattcccgagggcagttcgaaggaaaagggtcaggaggacttttccgaaacacgaattgacagttgcagccaggtgtgtcagcgcggagaaaagcagccaggccagaccgcattagccggaaagaaggagattgaggtgaccgccacacagagcactccttcattcctgttcgaaaaacctccgagagacggaattgcgcgacccgaggagggacggcctgtcgtcagtggcacgggcaatgacatcaccacaccccctaacaaggagcttcctccgagccctgaaaaaaagaccaagccgattgctgacgccaaggcgccagaaaagagggcctctccgagcaagcccgcatcggccccagcaagtcgctccgggtctaaaagcacccagaccgtagcaaaaactactacggcagctgccgtcgcttccaccgggccttcctcgagatcccccagtactctgttacccaagaagcccaccgccgacctgtcaaggccaaagtctacctccaccagtagtatgaagaaaacgaccaccttgtccgggacagctcccgctgctggggtggtgccgagcagagttaaagctacacctatgccctctaggccctctactaccccttttattgacaagaaacctacttccgctaaacccagctccacgacacccaggttaagcagacttgcaacaaacacaagcgcaccggaccttaaaaacgtccgtagcaaggtgggatctacagagaatattaagcatcagccaggcggaggccgagtgcaaattgtgtcaaaaaaggtgtcttactctcacatccagtcaaaatgtgggtctaaggataacatcaagcatgtccctggtgggggtaacgtgcagatacagaataagaaggttgacatttctaaggtgagctctaagtgcggatcgaaggcaaacatcaagcacaaacccggtggcggagatgtgaaaattgagagtcagaaattaaacttcaaggagaaggctcaggcaaaggtgggaagtttagacaatgtgggccacctcccagctggcggtgccgtgaagattgagacataccgactgacatttcgagccaacgcccgagccagaactgaccatggagcggatatcgttagcaggccaccacactttcccggaggcccaaattctggatccagagtgcttggcccactcagtcgagctgtccattag

SEQ ID NO: 230566 - DNA, 6893 bp, synthetic construct
  misc_feature 1..6893: note = Description of Artificial Sequence: Synthetic coding sequence
  source 1..6893: mol_type = other DNA
atggcagacctttcactggcagatgctctgaccgagccatccccagatatcgaaggcgagatcaaacgcgattttattgccacactggaggcggaggccttcgacgacgtggtgggggaaactgtgggtaaaacagactatataccactgctggacgtcgatgaaaaaacaggtaatagcgaaagcaaaaagaagccgtgttccgaaacatctcagattgaagatcttcccttgccccctcatcccgcttcattatctttccacctacccctggataccccttcttctaagccgacacttctggccaacggtgggcacggcgttgagggctctgataccacagggtcgcccaccgaattccttgaagagaagatggcatatcaggagtacccaaatagccagaactggccagaggacacgaacttctgcttccagcctgagcaggtggttgaccctattcagacagatcctttcaagatgtatcatgatgatgatctggccgatttagtgtttccatccagcgccacagccgatacttccattttcgcagggcagaatgacccactgaaggactcatatggcatgagcccctgcaataccgcggtggttcctcaggggtggagcgttgaagccctgaatagccctcatagtgagtcttttgtttctcccgaagcagtggccgaacctcctcagccaacagcggtgcctctggaacttgctaaggagattgagatggcttccgaagagagacccccagcacaggcattagagattatgatgggactgaagaccaccgatatggctccttctaaggaaactgagatggccctggctaaggacatggccctggcaacaaagactgaggttgccctggcaaaggacatggagtccccaaccaaactggacgtcactctggccaaagatatgcagccctccatggaaagtgatatggcactggtgaaggatatggagctcccaacggaaaaggaagtcgcgttagtgaaagatgtaaggtggccaacagagacggatgtatcttccgcgaagaatgtggtgctaccaacagaaaccgaagttgctccagccaaggacgttaccctgctgaaagagacggaacgggcatcccccatcaagatggacctagcaccctcaaaggatatgggacctccaaaggaaaacaaaaaggagaccgaacgggcttctcccatcaagatggatcttgctccgagtaaagatatgggaccacctaaggaaaataaaatcgtcccggctaaagatttagtgctattgtcagagatagaagtagcacaggctaacgacatcattagcagcacagagattagctccgccgagaaggtggccctgtccagcgaaaccgaggttgctttggccagggatatgacccttccaccagagaccaatgttatactgacaaaggataaggctctaccgctggaggcggaggttgcacctgtgaaagacatggcccagctcccagaaactgagattgccccagctaaggatgtagctccctccacggtgaaagaggttggtttactgaaggatatgagcccactgagtgagacagagatggcgcttgggaaagacgttaccccacccccagaaaccgaggtggtgctaataaagaatgtatgcttgcccccagagatggaggtggctctcacagaggaccaggtacctgcccttaaaaccgaggctccacttgcaaaagacggagttctgaccctcgctaataatgtaacccccgctaaagatgtgccccctctatcagaaactgaggcaacacccgtgcctattaaggacatggagattgctcaaacccagaaagggatctctgaagactcccatctcgagtcccttcaggacgtgggccagagcgccgctcctacattcatgatttcacccgaaacagtcactggaaccggaaagaagtgtagcctccccgcagaagaagactcggttctggagaagctgggtgagagaaaaccttgtaactctcagccaagcgagctttcttccgaaactagcgcaaattttatgtattgcgggacaccaccaacacaggcaaagcaagtctgcaggccctcagatcgcaggtcaacgcggccaaagcccgcaagagtgcctccagagctgcttggcggatcccccccttggaagaccctcgaccacaggctggggcactgcagcttaagcgagtcaggatgggtgagcggcagctccagctgcggcggtccagggaaccaaaggaagtccatccacgtggatagcctggaaccccagagggatctcgggcgagaagcgtgggatatagagtcaacacctatcatgatgaagaaaaagaaaaaaaaacctaaacagaagcggtacagccagccaagggcaggaggcccaagcgatgacgataacgctgacaagcctaagggccaccctttcgcagccgacacacagaaatctggtgtgctaccttcccaaccaacaaccatgggcactgagtacggcctggtttccggcgaaaatctgaagcgggaatgtttagtaaatagcagcgccgctagacttgtcgccgaaaattttgtgagtgagtccctgcgaatacccctctacccttccgaggaggctcctaagaccgcgatctcatcacagagtaaactcagggtcgaggaggaaagcaaaagcaacaaatccgttctccagaatcaagacaagaagctgctgaaacagcatgaatacaagccgcaacctgctcctcatctgaagacccctgtagacaagagtcagagcgtaggtcctctgaatctaaagggccctctggcagaagtcagcgcctacaatgtggagaccccactcgatattcggctgaaagaaggctgctcacccttcctggaccaggaagttatgggcgtggtctcaaagcccacagcggctaaagaaattccaaacctggtgcctacgctgatagcctccaatccgctggagtgtaacttgaaggagggcaataacgaaagcaagatgaccaagctccaaaatgtcaaacttaaagagttcccagagggtgcagaggaggacaaagagctgaagaaggaggctttcccaaacgaacggcaggaaataagcatattcacaagcgagcagctccaaggccaagtattagtccaggtgccaggcgtggagaacgagccgtttaagcgcatggccggtgacgggaaatcacgtaagggtcggggtagcagcggaaaaatgagaaccgattccgggaaagttaaggcgaagtccgaattaccgtttttgctggattcacaaaaagatgggagagccgtattgatccccagcgagccagtgtctaaaacggaggggatgaccacacaggacaagagtgaggaacttggactcaactcctctaaacagcccggaacaaaggcagatttgacggaggccgtggttatgggggagccaaaagaaatgacccagccaaaggtggctggcacaatgcaggctctgattcctctggaatccggatcaggtatgacccagactagcggcgtgtccacagagacgggcgacgtggtcaaggatatgggagtgaataaccagagcaaggagggcagatgcccatggaaggatcacgaggctgctccctggatttccgagaaacctaaaaaacgtggtaatgaaggtaaatctaaaaaatttaagaacaattactcaactcaacccgctagaatggagcgtaaggaagagatcttaaacccacctttcgaaggaaaagacggtgacacgggctctattccacataaaagcaaggaaataggttttactttcccaaaaatgcacgattcatctttctcacacacacctgacactcccactgttgaggccgtagaccggaagggagggaactttcaggtcaattttgtcgaactgggaaccttaggcgaaaataaaatctccaccgttaaggcctcaactgtgactgagcccccagctaaggtcaccgacgtttcttgtcaggaacagattcagggggctggatttgtgcccagcgtcgtgtccgaagaaaataaaaccgacgccgctaacagatacacggcagtggcagacaagccttccaagagatccaacgacggtaagtccaaaaaggtgaagaattccagtcctgagaagcacattttagaaaacaaaatagatgctaccaaaattcacgtgccgatggagactacaggcgatcaaggtattgagggcatggcatacatggacgagaaccgcaacatcactttcacatgcccccgaactccttccgagttgataaacaaaagttcccccttggaggttcttgagtcagctgcatgcgagaaactgcccactccaacacctcaagtcgtgaaggaaggggactcctttcccgacactctggcgaagaacggccaggaaatcgcaccggcacaaatctcaaagagcctcatggtcgacaactataccaaagacggagttcccggtcaggagcggccaaagggaccttcagcagttgtaccatcaacctctaccgggggagtggctcttcccattaccacagctattgagacagtcaacatccacggggaccatagccttaagaataaggccgaattagcagactctatgaagaacgaagcgggaatagatgagggccatgtgattggagaatccgaaagcgtgcattctggcgcttccaaacacagcgtcgagaaggtgaccgagctcgccaaaggtcacctcctcccgggagtcccagtggaagaccaatcccttccaggagaagcccgtgcgcttgaaggatacgctgaccgcggaaatttcccggcacaccctgtcaacgaggaaaaggagacaaaagagggatccgttgcggtacaaattccagacttgttggaggacaaggcacagaagctgtcattttgtgaggaccaaaacgcccaagaccgtaattcaaaaggctccgattctctgaacaagaaagtagacttaacacttctgagtcctaaaagcgagaacgacaagctaaaggagataagtctggcatgtaagatcacagaattagagagcgtgtcactccccacacccgagatccagagcgatttcctgcactccaaggtggaggcccctccatccgaagtcgcagacaccttagttattatgaccgcctcgaaaggggtccgtcttcccgagccgaaagataaaattctcgaaacgccccagaaaatgactgaaaaatcagagagcaaaactccaggagagggcaaaaaggaggataagtctagaatggccgagcccatgaaggggtacatgcggccaaccaaatcaagagggctaacccccctgctccctaagagcaccattcaagagcaagagcgacacaagcagctaaagagtgcaggcatcgctcgccctgaagaagggagacctgtggtgtctgggacaggaaacgacataaccactcctccaaataaagaactcccccctagcccagagaagaagaccaagccactggcgactacgcagccagccaaaaccagcacctccaaagccaagacacaacccacaagtctgccgaagcagcccgcacctacaaccattggcggactgaacaaaaagcccatgtctttggcgagcggattggtcccggcagcccctccaaagcgcccagctgtggcatcggcacgaccaagcatcctcccgtctaaagacgtaaagcctaagcccattgcagatgcaaaggcccctgaaaaaagagccagcccctcaaaaccagcctccgcccctgcctccagatctgggtctaagtccactcagacagtcgccaaaactaccaccgctgccgcagtcgcttcgaccgggcctagtagccgctctcctagtaccctgctgccaaagaagcccaccgccattaagacagaaggaaagccggctgaggttaagaaaatgacggctaaatctgtccctgcagacctctcccgtccaaagagcacatccacaagcagcatgaagaaaaccaccacattatctggtacagcacctgccgctggtgtcgtcccctcacgtgtgaaggccacgccaatgccttcacgcccaagcacgactccattcatagataagaagcccaccagtgcaaagccaagttcgaccacccctcggttatccaggctcgcaaccaatacatcagcccctgacttgaagaatgtaagatcgaaagtaggtagtaccgagaatattaagcaccagccaggcggagggcgagcaaaggtcgaaaagaagacggaggctgctgcaactactcgaaagcctgagtctaacgccgtcacaaaaactgccggtcccattgcctccgcccaaaagcaaccggctgggaaagtgcagatcgtgagcaaaaaggtctcatacagccacattcagtctaagtgtggctcgaaggacaacatcaaacacgtgcccggtggagggaatgtgcaaatccagaacaaaaaggttgatatctcaaaagtgtcatcaaagtgtggctctaaggccaatattaagcataaacccggagggggagatgttaagatcgaaagtcagaagctcaacttcaaagagaaagcgcaagcaaaggtcggatcactcgacaacgtcgggcatctgcccgctggtggagccgtgaagaccgagggcggaggatcagaagcaccactctgcccagggcctccagcgggagaggagccagcaatcagcgaggctgcccctgaggcaggagctccaacctcggcgtcaggcctcaatggccaccctacattgtccggaggcggagatcaacgggaggcccaaactttagattcccagattcaagagaccagtattta

SEQ ID NO: 230567 - DNA, 750 bp, synthetic construct
  misc_feature 1..750: note = Description of Artificial Sequence: Synthetic coding sequence
  source 1..750: mol_type = other DNA
atgactgcgaagagtgtgcctgcagacttatctcgtcccaaaagtacatcaacatcttctatgaagaagactacgacgctatctggtactgcccctgcggcaggtgtagtaccgtccagagtgaaggccactccaatgccatcccggcctagcaccactccttttatcgataaaaagcccaccagtgccaagccaagttccaccacacctcgactgtccagactcgccaccaatacgagcgcacctgacctgaagaacgtgcgttcgaaggtcgggagcacagaaaatattaagcaccagcccggagggggaagagtgcagattgttagcaagaaagtcagttattcccacatccagtccaaatgcgggtccaaggataatatcaaacacgtgcccggaggcggtaacgtgcagatccagaataagaaagtcgatatctctaaagtcagttctaaatgcgggtctaaagctaacataaagcacaaacccggaggaggagacgtgaagatagaatcgcagaagttaaactttaaagaaaaagcccaagctaaggtcggcagcttagataatgttgggcacctgccagctggaggagctgtgaagatcgagacctatcgactgacattccgagccaacgcgagagcacgaacagatcacggggctgatatagtgtcccgacctccccactttcctggcggtcctaatagcgggagtagagtgttgggccctctatctcgcgctgtgcattag

SEQ ID NO: 230568 - DNA, 300 bp, synthetic construct
  misc_feature 1..300: note = Description of Artificial Sequence: Synthetic coding sequence
  source 1..300: mol_type = other DNA
atggctgacttgtccctggccgacgcgcttacagagccgtcacccgacattgaaggcgagatcaagagagacttcatcgccactttggaagcagaagctttcgatgatgtagttggcgagacggtgggaaaaaccgattacattcctctgctggacgtggatgagaagacggggaatagtgaatcgaaaaaaaagccctgctctgaaacgtcgcagattgaagacacaccttctagcaagcctaccctgctcgcgaacggcggtcatggtgtcgaggggtctgacaccacagaagcttag

SEQ ID NO: 230569 - DNA, 2277 bp, synthetic construct
  misc_feature 1..2277: note = Description of Artificial Sequence: Synthetic coding sequence
  source 1..2277: mol_type = other DNA
atggccgagcccagacaggaattcgaggttatggaggatcacgcgggaacctacgggctcggcgacagaaaagatcaggggggatacactatgcatcaagaccaggaaggagatacggatgccggtctcaaggaatcccctctgcagacccctacggaagatggcagcgaggaacctggaagtgagaccagcgacgctaaatccactccgacggcagaggatgttaccgcaccactggtcgacgaaggggctcccggtaagcaggccgcagctcagccacacactgagataccggaaggaacaactgctgaggaagccggaataggagatacgcccagtcttgaagatgaggcagccggtcatgtgactcaggaacccgagagcggaaaggttgtacaagagggattcttaagagagccaggtccacctggactgagtcaccaattgatgtccggaatgcctggcgcacctctgcttcccgaaggaccaagagaggcaaccaggcagccctcggggaccggtcccgaagacaccgaaggcggtaggcacgctcccgagctgctcaagcatcagcttctgggagacctccatcaggaaggaccaccactgaaaggagctggtggtaaggagcggcctggctctaaggaggaagtggatgaagatcgggacgttgatgaatccagcccccaagacagccctccatccaaagccagtcccgctcaggatgggaggcccccacagacagcggctagagaagccacgtccattcccggatttcccgctgaaggcgctattccacttcccgtggattttctgtccaaggtcagcaccgaaataccggctagtgagcctgatggcccaagcgtggggagagccaaagggcaagatgctcctctggagtttacatttcacgttgagataacgcctaacgtccagaaagagcaagcccatagcgaggaacacctcggccgagcagcctttcctggcgcaccgggtgagggcccagaggcacgaggtccaagtctaggagaggacacgaaggaggctgacttacctgagccgagcgaaaaacagcccgctgctgccccacgagggaagcctgtttcaagggtgcctcaacttaaggctaggatggtctccaaatccaaagacggcaccggctccgacgataagaaagctaaaacttccacgaggagtagcgccaagacactaaagaaccggccatgtctttcgcccaagcaccccacccccggaagctctgacccactgatacagccgtcttctcccgctgtctgcccagaaccaccctcctcccctaagtacgtctcatcggtgacgagcagaacgggctcctccggcgctaaagaaatgaagcttaagggggctgatggtaagaccaagatcgccacacccagaggagcggcaccgccaggccagaaaggacaggcgaacgcaacacgcatccccgcaaaaacgcctcctgctccgaagactcccccttcatctggtgaacctcccaagagtggggacaggagcggctattcctcaccgggatcgcccggaacacctggaagtcgcagcagaacacccagtcttcccacacctccaactcgtgaacccaagaaagtcgcagtggtaagaactccgcctaaatccccttctagtgctaaatcacgtctccagaccgcaccggttcctatgccggacctcaaaaacgttaagagtaagataggaagtacagagaatcttaaacatcagccagggggagggaaagtccaaatcattaacaaaaagctagatctatccaacgtgcaaagcaaatgcggtagtaaggacaacataaagcacgtgcctgggggaggaagcgtgcagattgtgtataagccggttgatctgtccaaggtcacatctaaatgcggctctcttggcaacatacaccacaagccgggaggtggccaggtggaggtgaaaagtgagaaactggattttaaggaccgagttcagagtaagataggctcactggataacataacacatgtgcccggaggcggaaacaaaaagattgaaacacacaagctcacattcagagaaaacgcgaaggcaaaaacagaccatggtgccgagatcgtctataaaagccccgtagttagtggagatacttccccacggcacttaagcaacgtctcttctacaggatccatcgatatggtggacagtcctcagctggcaacgctggcagacgaggtgtctgccagtcttgcgaaacaggggctctag

SEQ ID NO: 230570 - DNA, 1152 bp, synthetic construct
  misc_feature 1..1152: note = Description of Artificial Sequence: Synthetic coding sequence
  source 1..1152: mol_type = other DNA
atggccgagccaagacaagagttcgaagtgatggaggaccacgctggaacatacgggttgggagacagaaaggaccagggaggatacactatgcaccaggatcaggaaggagataccgacgcaggcttaaaagcagaggaggccggaattggcgatacaccatcactcgaagacgaggctgctggacacgtcacacaagccagaatggtgtcaaaatcaaaagatggaaccgggagtgacgataaaaaagccaaaggagctgacggcaaaacaaagatagcgacacccagaggggctgcgccacccggacagaagggccaggcgaatgccactcgcatacctgcaaaaaccccccctgcgccaaaaactcccccttcgtccggagaaccccctaagagcggcgatcgatccggatatagctctcccggaagcccaggtacgcccggatcaagatcacgaacacccagtctgccaaccccacctactagagagcctaaaaaagtggccgtagtgagaacacctcccaagtccccttccagtgcgaagtctcggctgcaaacagcccctgtgccaatgcctgacctgaagaacgtgaaatccaagatcggctccacagaaaacttaaagcatcagccaggaggcggaaaagttcagattatcaacaaaaagctggatctttccaatgttcagtccaagtgtggttctaaagacaacatcaagcatgtcccaggtggagggtctgtgcagattgtttataaacccgttgatctgagcaaggtgaccagtaaatgtggaagcctgggcaatatacaccacaagccagggggtggccaggtggaggtaaagagcgaaaagctggatttcaaagatagagtccagagtaagataggaagccttgacaatataacccatgtaccaggaggcggaaataagaaaattgaaacacacaaattaacttttagggagaatgctaaggcgaagactgatcacggagccgaaatcgtgtacaaatccccggtggtgtctggagacacatctcctcgccatctgagtaacgtgagttccaccggcagtatcgatatggttgatagccctcagttagcaacgctggcagacgaagtctccgccagccttgccaagcagggactgtag

SEQ ID NO: 230571 - DNA, 1239 bp, synthetic construct
  misc_feature 1..1239: note = Description of Artificial Sequence: Synthetic coding sequence
  source 1..1239: mol_type = other DNA
atggcagagcccagacaggaatttgaggtgatggaggaccacgccggtacatacggcctgggagatagaaaagatcaggggggttacaccatgcaccaggaccaggagggagacacagatgctggtctgaaagagagtccactacagactccaacagaagacggctctgaggagcctggctcagaaactagcgacgccaaaagtacacctacagcagaggcagaagaagcgggtatcggagatactccctcattggaggatgaggccgctggccacgtaacccaggcaagaatggtgagcaaaagtaaggatggcaccggatcagacgacaaaaaagcgaagggcgctgacggcaaaacgaagatagccacgccacgcggtgccgcacccccaggacagaaaggacaagctaacgccacacggatccctgcaaagactcctccagctccgaaaacccccccaagctccggtgagcccccaaagtcgggagaccggagcggatactccagccctggctctcccggaacacctggctcccggagtcggaccccatcgcttcctactcccccaacacgcgagcctaaaaaggtggccgtggtgcgtacccccccaaaatcaccaagcagtgctaagagcaggttgcagactgctcctgttcccatgccagacctgaaaaacgtaaaatctaaaattggttcaactgagaatctgaaacaccagcctggcggtggcaaggtccaaataatcaataagaagcttgacttaagcaacgtgcagtccaagtgtggaagcaaggataacataaaacacgtcccaggcggaggctcggtgcagatcgtctataagcctgtagacttgtctaaggtcacgagtaaatgcggctctctcggaaacattcaccacaagccaggagggggtcaagtcgaagttaagagcgagaagctcgactttaaagatcgcgtccagagtaagatcggaagtttggataatattacccatgtacccggaggtggtaataaaaaaatcgaaactcataagctcacatttcgggaaaatgcaaaggcgaaaaccgaccacggggcagagatcgtgtacaagagcccggtcgtgtcaggcgacacgagccccaggcatctgagcaatgtcagttcgaccgggtcaattgacatggtggactcgccccagttggctacacttgctgacgaagtgagtgctagcctcgccaagcaaggtttatag

SEQ ID NO: 230572 - DNA, 2331 bp, synthetic construct
  misc_feature 1..2331: note = Description of Artificial Sequence: Synthetic coding sequence
  source 1..2331: mol_type = other DNA
atggctgaaccaaggcaggaatttgaagtgatggaggatcatgccggaacttacggccttggagacaggaaagatcagggagggtacactatgcatcaagaccaagaaggagacacagatgccggactcaaagaatccccactgcagacacccaccgaagatggaagtgaagagcctggcagtgagactagcgatgctaagtccactccgacagccgaggacgtgacagcgccactggtggatgagggagcccctggcaaacaggccgcagcacagccccataccgagatcccagagggcacaacagccgaggaagctggtataggcgacacaccttcattggaggatgaagctgccggacacgtaacacaggagccagagagcggaaaggtggttcaggaggggttcctacgtgaaccaggccctcccggactgtcgcaccaattgatgtctggtatgcctggggctccactgctcccggagggccctcgcgaggctacccgccagccttccggaacaggtcccgaggatacagaaggaggccgacatgccccagaactgcttaagcatcagctgctgggtgatttacaccaggaggggcctcccttgaagggggcagggggaaaagaacgcccaggatcaaaggaggaggtcgatgaagatcgagatgttgacgaaagctcaccacaagactccccaccctccaaagcatcgcccgctcaagacggtaggccacctcagacagccgctcgcgaagccacatccattccaggatttcccgcagagggagcaatcccactccctgtggatttcttgtccaaggtgtcaactgaaatcccagcatctgagcccgacggcccaagcgtcggtagggcaaaaggacaggacgcgccactcgagtttacctttcacgtcgaaattactcccaacgtccagaaggagcaggcgcacagtgaggaacatctaggcagagcggcattccctggcgctcccggtgagggaccggaagcacgcggtccaagtctcggtgaagatacaaaggaagccgacctcccagagccatccgagaagcagccagcagccgctccacggggtaaacctgtgtcaagagtgcctcagctgaaggccagaatggtctccaagtctaaagatggaaccggtagcgatgacaagaaggcaaagaccagcacgcgaagctcagcaaaaacgctgaagaaccgaccttgcctgagccctaagcaccccactcccggatcatctgatcccctcattcagccaagcagccctgcagtatgtcctgagccccctagttccccaaagtacgtgtctagcgtcacaagcagaaccggcagtagcggggctaaggagatgaagttaaaaggcgctgatgggaagacaaaaattgcaacccctcgaggggcagccccaccaggtcagaaggggcaagctaacgcaacgcggattcctgctaaaactcctcctgctcctaaaacgcctccctccagtgcaaccaaacaggtgcagcggcgtcctccaccagcagggcctcggtctgaaagaggcgagccaccgaagagtggggatcggagcggctacagctctcctggctcccctggcacccccggtagcagaagtaggacaccaagtcttccgaccccgccaaccagggagccaaaaaaggttgctgtagtgcggacccctccaaagtcaccttcatccgccaaatctcgactgcaaaccgcacccgttcccatgcctgatttgaagaacgtgaaatccaagattgggtccaccgagaatttgaagcatcagcccggaggaggcaaggtacaaattatcaataaaaaactggacctcagtaatgtccaatccaagtgcggctcgaaggataatatcaaacacgtaccagggggaggttccgtccagattgtgtataagccagtggatttaagcaaagtgactagcaagtgtggaagcctcgggaacattcaccataaacccggaggagggcaagtggaggtgaaaagcgaaaaactagatttcaaggaccgagttcagtccaagattggcagcctcgataacatcacccatgtacccggtggcggaaataaaaagattgaaacccacaagctgacctttagagaaaatgctaaagccaaaacagaccacggtgctgaaatcgtatataagtcccctgtcgtaagcggcgatacttctccaaggcatctcagcaatgttagcagcaccggctctatcgatatggtcgatagtcctcaattggcaactctggctgatgaggtctccgcaagcctggccaaacaaggactctag

SEQ ID NO: 230573 - DNA, 951 bp, synthetic construct
  misc_feature 1..951: note = Description of Artificial Sequence: Synthetic coding sequence
  source 1..951: mol_type = other DNA
atgctgagggctctacagcaacgtaagcgtgaagccggaatcggggatactccgtcactggaagacgaagccgctgggcatgtcactcaagctcggatggttagtaaaagcaaagatggtacaggaagcgacgacaagaaagccaaaggcgcagatgggaagacaaaaatcgccaccccacgaggggctgcaccacctgggcagaaggggcaggcaaacgctacacggattcctgccaagacacctcccgctcccaaaactcccccttccagcggcgagcccccaaaatcaggagacagaagtggatactcctcaccagggagcccgggtacccctgggtctcggtctagaacaccatccctcccgacgcccccaactagggagccaaaaaaagttgccgtggtgagaactccaccaaagagccctagctctgcgaagagtaggctgcaaactgccccagtcccaatgcccgatctgaaaaacgttaagtccaagatcggtagcactgagaatcttaagcaccagccaggcggagggaaagtgcaaatcgtgtacaagcccgtggacttatccaaagtaaccagtaaatgcgggagcttagggaacatccaccataaaccgggagggggacaagttgaagttaagagcgaaaagctggatttcaaagaccgcgtgcagagcaagatcggtagcctcgataatataactcatgtccccggaggagggaacaagaaaatagagacacacaagctgacatttcgcgaaaacgccaaagcaaagacggaccacggggctgagatcgtgtataaatcgcctgtcgtgtctggcgacactagccccaggcatctgtcaaacgtgtctagcaccggctccattgatatggtggacagcccccagctggccactttagccgacgaagtctcggctagcctcgcaaaacagggcctctag

SEQ ID NO: 230574 - DNA, 1326 bp, synthetic construct
  misc_feature 1..1326: note = Description of Artificial Sequence: Synthetic coding sequence
  source 1..1326: mol_type = other DNA
atggctgaaccaaggcaggagttcgaggttatggaggatcacgctggaacttatggactcggcgatagaaaggatcagggcggatacacgatgcaccaggaccaagagggagacaccgatgcaggattgaaggagagccccctgcagacaccaacagaggacggctccgaagaacccggtagtgaaacatctgacgcaaagagtacccctacagcagaggatgtgacggcgccactagtagatgagggggcaccaggaaagcaggccgctgcacagccccacaccgaaatcccagaagggactacggccgaggaggccggtatcggcgatacaccatctctcgaggacgaagcagccggacacgtgacgcaggccaggatggtgagcaagagtaaagacgggactggaagcgatgataagaaggctaagggtgcggacgggaaaacgaaaatcgccacacccaggggagcagccccaccgggtcaaaagggtcaggccaacgctacccgtattcctgccaaaacccccccagcccctaagactccgcctagctcaggcgaacctcccaagtcaggagacaggtctgggtactcttccccgggatccccaggcacaccaggaagcaggtcccgcacaccgagtcttcctaccccccctacccgcgaacctaaaaaagtcgccgtggtccggacgcctccaaaaagtccaagcagcgccaagagcaggctacaaaccgctcctgtgccaatgcccgatctgaaaaacgtgaagtccaagatcggaagcactgagaacctgaagcaccagcctggcggaggcaaagtccagatcattaacaaaaaactggacctctccaacgtccaaagcaaatgcggatctaaagacaacatcaaacatgtaccgggaggaggctctgtgcagattgtctataaacccgtggatctctccaaagttaccagcaagtgtggcagtcttggtaacatccaccataaaccaggagggggacaagtggaagtgaagtcagagaaactcgacttcaaggacagagtccagagtaagatcggaagcctcgataatattactcatgtcccgggaggcggaaacaagaagatcgagacacataagctgacgttccgggaaaatgcaaaggcaaaaaccgatcatggcgctgaaatcgtgtacaagagccccgtggtgtccggggacacatcccctcgacatctttcaaatgtgtcaagcacgggatcaattgacatggtggactccccccagcttgccacacttgcagacgaggtttctgcctcactggccaaacagggactgtag

SEQ ID NO: 230575 - DNA, 1080 bp, synthetic construct
  misc_feature 1..1080: note = Description of Artificial Sequence: Synthetic coding sequence
  source 1..1080: mol_type = other DNA
atggcggagcctagacaggagtttgaagtgatggaagaccacgccggaacctacgggctaggtgaccgaaaagaccagggtgggtataccatgcaccaagatcaggagggtgatactgacgccggtctcaaggagtcacctctccagacccctaccgaggatggcagcgaggagcctggcagcgagacatccgatgctaagtcaactcctaccgctgaagctcggatggtgtcaaagtccaaggatgggaccggctcagacgataagaaagcaaaaggagcagatggtaagaccaagatagccacacccaggggggcagccccacccggacagaaaggccaggcaaatgctacacgtattcccgcaaaaactccccctgctccaaagacaccaccatccagcggtgagccacccaaatcgggtgacaggtcaggatattcctccccagggtccccaggcactcctggctctagaagtaggacccctagtctgccaacgccccctactcgcgaacccaagaaggtagccgtggtgagaaccccccctaaatccccatccagcgcaaaatcccggctccagaccgcacccgtacctatgcccgacctgaagaacgtgaaatccaagattggatctaccgaaaacctgaagcaccagccaggtgggggtaaggtccagatcgtgtacaagcctgtagatttgtccaaagtcacctcgaaatgcggtagcttgggcaacattcaccacaaacccggaggcggacaagtggaggtcaagagcgaaaaactcgacttcaaggaccgggtgcagagcaaaattgggtccctggataatatcactcacgttccaggcggtggcaataagaaaattgagactcacaagttgacatttcgtgaaaacgccaaggccaagacagatcacggcgctgagatcgtgtacaaatccccagtcgtgagcggggacaccagtccacgacatctgtcaaatgtgtcatcaacagggagcattgacatggtggattcgccacagctcgccaccctggccgacgaagtctcagcatcactcgctaaacaggggctctag

SEQ ID NO: 230576 - DNA, 2331 bp, synthetic construct
  misc_feature 1..2331: note = Description of Artificial Sequence: Synthetic coding sequence
  source 1..2331: mol_type = other DNA
atggcggagcctcgacaggaattcgaggtcatggaggatcacgcgggaacctatgggctgggggatcggaaagatcaggggggttatacgatgcatcaggaccaggagggcgacacagacgccggactgaaggagagcccactgcagactcctaccgaagacggcagcgaagagcccggttctgagaccagcgacgccaaatcgacccccacagccgaagacgtcacggcccctttggtagatgagggagctccaggcaaacaggccgctgctcaaccccataccgaaattccggagggcacgaccgccgaggaggcagggatcggtgacacaccgtccctggaggacgaagcggctgggcatgtgacacaagaacctgagtctggaaaggttgtccaggaggggttcctacgggaaccgggaccgcctggtctcagtcatcagctgatgtccggaatgccaggcgctccactattacccgaaggacctagagaggccactaggcagcctagtggaactggtcccgaagacaccgaaggaggtagacacgcccctgaactgctgaaacaccagctcctgggcgatctgcatcaggaaggacctccgctgaagggagcaggtgggaaggaacgaccaggctctaaagaagaagtggatgaggatcgggacgttgatgagagttccccacaggatagccccccaagcaaggccagtccggcacaggacgggcgacccccacagactgccgctcgggaggcaaccagcattcccggtttccctgcagagggagcaattcctctgcctgtggatttcctttccaaggtgtccacagagataccggcaagtgaaccagatgggccttcggtgggccgtgccaaggggcaagatgccccattggagtttacctttcatgtggaaatcacgccaaacgtgcagaaagaacaggcccattccgaagagcatctgggtagggccgctttcccaggggctcccggtgaaggcccagaagcgagaggccctagtctgggagaagatacgaaagaggccgatctaccagagcccagcgaaaagcagcccgcagcagcaccaagaggcaagcctgtgtcccgggtccctcagttaaaggccaggatggtctccaaatcaaaagacggtacggggtccgatgataaaaaagctaagacatccactagatcaagcgcaaagaccctcaagaacaggccatgcttaagccccaagcaccctacgcccggtagctcagacccgctgatccaaccgagctcgcccgcagtgtgccctgaacctccttcttctcccaaatacgttagctctgttaccagcaggacagggagtagcggggctaaagaaatgaaattgaaaggagccgacgggaagactaaaatcgccacccctcggggtgctgcgcctccagggcagaaaggacaggctaacgccaccagaatccccgcaaaaaccccgccagcacccaagaccccacccagttctgccactaaacaagtacaacgtaggcccccacctgctgggcctagaagtgagcgaggtgagccgcctaagtccggtgacagaagcggatacagctcccccggtagccctggcacacccggtagtagaagtcggaccccctcccttcccacaccgcctacgcgcgaacctaaaaaagtagcagtggtgcggacaccccctaagtcaccttcctccgccaagagtcgccttcagactgcacctgtgcccatgcctgatttgaagaacgtgaagtctaaaataggttctaccgagaacctcaagcaccaaccgggtgggggaaaggtacagattatcaataagaagcttgacttgtctaatgtacaaagcaagtgtggctcgaaggacaacatcaaacatgtcccgggaggagggtccgtacagattgtctacaagcctgtagatttgagcaaagtcacatccaagtgtggctcccttggcaatatacatcacaagcccggagggggtcaggtggaagttaaaagcgaaaaactcgatttcaaagacagggtgcaatccaaaataggtagtcttgataacataacccacgtccctggcggtgggaacaaaaaaatcgaaacccataagctgacttttcgggagaatgcgaaagcaaagacagaccacggagccgagattgtgtataaatccccggtagtcagtggcgacacaagcccgcgacacctcagcaacgtgtcatcaacggggagcattgacatggtggacagcccccagctcgccactctggcagacgaggtctcagcatccctggccaagcagggcttatag

SEQ ID NO: 230577 - DNA, 1239 bp, synthetic construct
  misc_feature 1..1239: note = Description of Artificial Sequence: Synthetic coding sequence
  source 1..1239: mol_type = other DNA
atggctgagcctcggcaagaattcgaggtaatggaggaccacgcgggaacatacggcctgggagatagaaaagaccaaggaggctataccatgcaccaagaccaagaaggagacacagatgccggacttaaagagagcccactacagacgcccaccgaggacgggtctgaggagcccggttctgagacatctgacgctaagtccaccccaacagccgaagccgaggaagctggtataggcgatactcctagtttggaagatgaggcagccggacacgttacacaggctcggatggtttccaagagtaaggatgggactggcagcgatgataagaaggcaaagggggcagacggcaaaacaaagattgccaccccacgtggcgctgccccaccagggcagaaaggacaagcgaatgccacccggatccccgcaaaaactcccccagcccctaagactcctccttcatccggggagcccccaaagtccggagatcgatccgggtatagctcaccaggctctccgggaacccctgggagccggagtcgtacccccagcctgcctacaccacccactcgggaaccgaaaaaagtcgctgtggtcaggactccccctaaatcgccttcttccgcaaaatctaggctgcagaccgcacccgtccccatgcctgatcttaagaacgtgaaaagcaagataggtagcactgaaaatcttaaacaccagcccggaggcggaaaggttcaaattatcaacaagaagctggatctaagcaatgtgcagagcaagtgtggaagtaaagataatatcaagcacgtccctggaggcggatccgtgcagatcgtttacaagcctgtggatttgtcaaaagtcaccagcaaatgtgggtcccttgggaacatacaccacaaacctgggggtggccaggttgaggtcaaatcagagaaattagactttaaggaccgagtccaatctaaaattggtagtctggacaacataacccacgtgccaggcggtgggaacaagaaaatcgagacacataagctaacattcagagaaaacgccaaggccaaaacagaccatggagccgagatcgtgtacaagtccccagtcgtgtctggcgatacatcccccagacatctgtccaatgtgtcgagcacagggtccattgatatggttgattccccccaattggctacactggccgatgaagtttccgctagcttagcaaaacagggcctgtag

SEQ ID NO: 230578 - DNA, 795 bp, synthetic construct
  misc_feature 1..795: note = Description of Artificial Sequence: Synthetic coding sequence
  source 1..795: mol_type = other DNA
acacgcgaagcagaaggggctgatggtaagacaaaaatcgcaacacctaaaggacaggccaacgccacacggatacccgcaaaaactccaccagctcccaagaccccaccaagttccggagagcctccgaagagcggagacagatcgggttattcttctcctggctctccaggaactccaggatcacgatcgcgcactccctccctgccaacaccgcctacacgggaacctaagaaggtggctgtcgtgaggactccccctaagtcgccaagctcggctaagtcaaggcttcaaaccgctcccgtcccaatgccagaccttaaaaacgtaaagagcaagattggatctacagaaaatttgaagcatcagcctggtggcggtaaggtccagattgtttataaacccgtggacctgagcaaagtgaccagtaaatgtggctcactgggtaacatccatcacaaacctggcggagggcaggtggaagtgaagtcagaaaaactcgatttcaaagaccgtgtacagagcaagattggcagcctggataacatcacacatgttcccggaggcggtaacaagaagatcgaaactcacaagctgactttcagggaaaacgccaaagctaaaaccgaccacggtgcagagattgtgtataagtccccagttgtgagcggggacacatctcccagacacctgtctaacgtttctagcaccgggtccattgatatggtagattccccccagttggctacactggcggacgaggtgagtgcttcactcgctaaacaggggttgtag

SEQ ID NO: 230579 - DNA, 1059 bp, synthetic construct
  misc_feature 1..1059: note = Description of Artificial Sequence: Synthetic coding sequence
  source 1..1059: mol_type = other DNA
atggctgaaccgaggcaagagttcgaggtgatggaagaccacgctggcacatacggactcggagacaggaaggatcagggaggttatacgatgcatcaggatcaggagggcgataccgacgctggattaaaggctgaggaagctggcatcggagataccccaagtctggaagacgaggctgcgggtcacgtcactcaggctagaatggtgtctaaatctaaagatggaacaggatctgacgataagaaagcgaaaggagccgacggaaaaaccaaaatcgccacacccagaggagcagcaccacctggacaaaaagggcaagcgaatgcaactcggatcccggcaaaaactccccctgccccaaagacgcccccttccagtggggagcctccaaaaagcggggaccggagcggctacagtagccccggttcacccggtacccccggatccaggtcccgcacaccaagtttgcctacacccccaaccagggaacccaaaaaagtggctgtcgtcaggacaccacccaaaagcccatcatccgctaaatccaggctccagaccgccccagtgccgatgccagatctgaaaaatgtgaaaagcaaaatcggctccacagaaaacctcaagcaccaaccgggaggcggtaaagttcagattgtttataagcccgtggatctctcaaaggttacttccaagtgcgggagtctgggaaatatacatcacaagccgggtggtggccaagtggaggtgaagtcagaaaaactagattttaaggaccgggtccaatcaaaaatcggcagcttagacaacataacccacgtacctgggggtggaaacaaaaagattgagacacataaactcacatttagggagaatgccaaagccaagacagatcatggtgctgaaatcgtgtataaaagtcctgtcgtgagtggtgacacttctccacggcacttgtcaaatgtatcctctactgggtccattgacatggtcgactcacctcagctggccaccctggcagatgaagtcagcgctagtttggcaaaacagggcctctag

SEQ ID NO: 230580 - DNA, 1233 bp, synthetic construct
  misc_feature 1..1233: note = Description of Artificial Sequence: Synthetic coding sequence
  source 1..1233: mol_type = other DNA
atggcggagccacgacaggagttcgaagtgatggaggatcacgccggaacgtacggactgggcgaccggaaagaccagggcggatatacaatgcaccaggatcaggagggtgacacagatgcgggattaaaggagtccccactacagacgcctacagaggatggctccgaagagcccggaagcgagaccagcgacgccaaaagcactcccacagccgaggatgtgacagcgccactggtggacgagggtgcccctggaaagcaggctgctgcccagccacacacagaaattccggagggaaccactgccgaggaggctggcatcggggacaccccctctttagaagatgaagccgctgggcatgtaacgcaggcccgtatggtatcgaagagtaaggatggtactggctccgacgataagaaggctaagggggctgacggaaagaccaaaattgcaacccctagaggcgcagctcctcctgggcagaagggccaagccaatgctacgagaatccccgcaaagacacccccagctcctaaaacccctccctcgagtggcgagccccctaagagcggtgaccgatcaggctacagttcccctggcagtcccggtacaccagggagtcggtctcggaccccttcactgccaacacctcctacacgcgagccaaagaaggtcgcggtagtgagaacaccaccaaaatccccatcttccgccaaaagccgacttcagaccgcacctgttccaatgcccgatctcaagaacgtgaagtccaaaatcggctccacggagaacctaaaacatcagccaggcggagggaaagtgcaaatcgtgtataagccggtagacttatctaaagtgacgtcaaaatgtggcagtctcggaaatatacatcacaaaccaggaggcggtcaggtcgaagtgaaaagcgaaaagcttgactttaaggacagggtacagtctaaaattggtagcctggacaacattactcatgtcccagggggtggcaataaaaaaattgagactcataaactgacctttagggaaaacgccaaggctaaaacagatcacggcgcagaaattgtatacaagagcccagtagtgtctggtgacaccagccctcgtcatctctccaacgtgtcctcgaccggatcaatcgatatggtggacagtccccagctagccactctcgccgatgaggtatccgcctctctggcaaagcaaggcctctag

SEQ ID NO: 230581 - DNA, 807 bp, synthetic construct
  misc_feature 1..807: note = Description of Artificial Sequence: Synthetic coding sequence
  source 1..807: mol_type = other DNA
atggccgtcaacgtctactccacgtcagtaacttcagataacctgagtcggcatgacatgctggcttggattaatgaaagcttgcagttgaatctcaccaagattgaacagctgtgttccggagcagcttactgtcaatttatggacatgctctttcctggcagcatagccctgaagaaggtgaaattccaggctaagctggaacacgagtacatccagaattttaaaatcttgcaggcaggattcaagagaatgggagtcgataaaatcatacctgttgataagctggtaaagggcaaattccaggataactttgaatttgtgcagtggtttaaaaagttttttgatgctaactacgatggtaaagattacgatcccgtcgccgcaagacaggggcaggagaccgcagtcgcaccgtccctggtggctcccgctttgaataagccgaagaaacctctgactagtagttccgccgcaccccagcgcccaatatcaactcagaggactgctgcagcccctaaagctggccctggcgtcgtgagaaagaaccctggggttggcaacggagacgacgaagctgccgaactgatgcagcaggttaacgtgctgaagctgacagtggaagacctagagaaggagcgagacttctacttcgggaagctccgtaatatcgaactgatctgccaggagaacgaaggggaaaacgatcccgtgcttcagaggatcgtcgacatcctttatgctactgatgaaggattcgttattccagatgagggcggtccccaggaagagcaggaggagtactag

SEQ ID NO: 230582 - DNA, 984 bp, synthetic construct
  misc_feature 1..984: note = Description of Artificial Sequence: Synthetic coding sequence
  source 1..984: mol_type = other DNA
atgcctggcccaacacagacattgtcccctaacggcgaaaataacaatgacataatccaggataataacggcacaatcataccttttcgcaagcacactgtccgcggagagcgatcctattcatggggtatggccgtcaatgtgtattcaacaagtatcacccaggagaccatgagtcgtcatgacattattgcgtgggttaacgacattgttagtcttaactatactaaagtggaacagctgtgttcaggagcggcatattgccagttcatggacatgcttttccccggatgcatctccctcaagaaggttaaatttcaggctaaactcgagcatgaatatattcataatttcaaactgctccaggcatccttcaaaaggatgaatgtggacaaggtgattccagtggagaagcttgtcaaaggcagattccaggataatttggactttatacagtggttcaagaagttttatgacgctaattatgatggaaaagaatacgatcctgtggaagccaggcaggggcaagacgcaatccccccacctgaccctggagagcaaatatttaacttgccaaagaaatctcatcatgcgaatagtcccaccgctggcgcagccaagtctagtcctgcggctaaaccgggatcgactcctagccggccttcttcagctaagcgagctagcagtagcggatcagcctcgaaatccgataaggacttagagacccaggtcattcagctcaacgagcaggttcatagtctcaaactcgccctcgagggagtggaaaaagaacgagatttttattttggtaaactccgcgagattgagctgttatgccaggagcatggccaggagaatgatgatcttgtgcagcgcctgatggacatcctttatgcaagcgaagagcatgagggtcataccgaagaaccagaggcagaggagcaggcacacgagcagcaaccaccacagcaagaggagtactag

SEQ ID NO: 230583 - DNA, 855 bp, synthetic construct
  misc_feature 1..855: note = Description of Artificial Sequence: Synthetic coding sequence
  source 1..855: mol_type = other DNA
atggctgtaaacgtgtattcaacatccattactcaggaaaccatgtcacgccatgacattatcgcttgggtgaatgacatcgtttcgttaaattacacaaaggtggagcagctttgcagcggggctgcctactgtcagttcatggatatgctgtttcccggttgcatttcactgaaaaaagtcaaattccaagctaagctggagcacgagtatatccacaactttaagctgcttcaggcttcattcaagcggatgaacgttgataaggtgatccctgttgaaaagctcgtgaagggacgctttcaagataatttggattttatccagtggttcaagaagttttacgatgcaaactatgatggtaaagaatacgatcctgtcgaagccagacagggccaggacgcaattccccctcccgacccaggggaacagattttcaacctgccaaagaagagccaccacgcgaatagtccaacagccggtgccgctaagagttccccagcagcaaagcctggttccaccccctcccgtcctagcagtgccaaaagagcctcctcaagtggctccgcctcaaaatctgataaggatctggagacgcaggtgatccagctcaacgagcaggttcatagcttaaagctggctctggagggagtcgagaaagaacgggatttctactttgggaagttgagagaaatcgaactgctatgccaggagcacggtcaggagaacgacgatttggtgcagaggctcatggatatactgtacgcatcggaggagcacgaggggcatacagaagaacccgaagcagaggagcaggcccatgaacagcaaccgccacagcaggaagaatactag

SEQ ID NO: 230584 - DNA, 948 bp, synthetic construct
  misc_feature 1..948: note = Description of Artificial Sequence: Synthetic coding sequence
  source 1..948: mol_type = other DNA
atgaaacagaaccgggatcagaaatgcccagtgtctcaacgaaattcctctttccaacagccagggaggaagcccggttgtagcagctggggaatggctgtcaacgtctactctacatcaataacccaagaaaccatgagtcgccatgatattattgcatgggtgaacgatatcgtgtccctgaactacactaaggtcgaacagctgtgctctggcgctgcgtactgccaattcatggatatgctattccccggatgcatttccttaaaaaaagtcaaatttcaggcaaagcttgagcacgaatatatccacaattttaagctgttgcaggcatcttttaagcggatgaatgtcgataaggtcatcccggtggaaaagctcgtgaaagggcgtttccaggacaatctggatttcattcagtggtttaaaaaattttatgacgcaaattacgacggcaaggagtacgatcctgtggaggctagacaggggcaggatgctatacctcccccagacccaggtgaacaaatcttcaacctccctaaaaaatctcatcacgcgaatagtccaactgctggggcagctaagtcgtctcctgccgcaaaacctggtagcacaccgtcccgacccagctccgccaagagagcttccagctccggctcagccagcaaatctgacaaggacttagagacccaggttatccagctgaacgaacaggtgcattcattgaaactggccctagagggcgtagagaaagagcgggatttttatttcggtaagcttcgggagattgagctcctgtgtcaggagcacggccaggagaacgacgacttggttcagagattgatggacatcctgtatgccagcgaagagcacgaaggacatacagaggagcccgaagctgaagagcaggcccatgagcaacagcccccacagcaggaggagtactag

SEQ ID NO: 230585 - DNA, 825 bp, synthetic construct
  misc_feature 1..825: note = Description of Artificial Sequence: Synthetic coding sequence
  source 1..825: mol_type = other DNA
atggccagaactacgactacctccagcagaattattaccggacccagcttcctctccggctccacacagtgtgctggtagcgtgcctacgggagccgcttactgtcagttcatggacatgctgtttcccggatgcattagcttaaagaaggtgaagttccaagctaaacttgagcatgagtacatccacaacttcaaactcctgcaagctagctttaagcggatgaacgtggataaagtgattccagtcgagaagctggtgaagggccgattccaggataacctggattttatacagtggtttaaaaagttctacgacgccaattacgacggcaaagaatacgaccccgtcgaggcccgacaggggcaagacgctataccccctcccgaccctggagagcagatatttaatttgcctaaaaagtcccaccacgccaactccccaaccgctggggctgccaaatcaagccctgcggcaaagcccggtagtacaccatcccgtccgtcctctgccaaaagagccagcagttcgggtagtgccagcaaatcagacaaggatctggagactcaagtgatacaactgaatgaacaggtgcatagtctgaaattagcacttgaaggcgtggaaaaagaacgggatttttacttcggaaaactgagggagattgaacttctttgtcaagaacacggtcaggaaaatgatgacttggttcagcgactgatggatattctgtacgcctcggaggaacatgagggccacacagaagaaccagaggctgaggagcaggcccatgagcagcagccgccacagcaggaggagtactag

SEQ ID NO: 230586 - DNA, 1005 bp, synthetic construct
  misc_feature 1..1005: note = Description of Artificial Sequence: Synthetic coding sequence
  source 1..1005: mol_type = other DNA
atgtctgagcccattagggtgctggtgacgggggcagccggtcagatcgcgtattccctgttatactccatcggaaacggatccgtctttggaaaggatcagccgattattctggtactacttgacattacaccaatgatgggggtgctggacggggtcctgatggagctgcaggactgcgctctccctctgctgaaagatgtgatcgcaactgataaagaggacgtcgcctttaaagacttagatgttgccatactggtgggatcaatgcctcggagagaaggaatggagaggaaagacttacttaaagcaaacgtgaaaatatttaagtcccaaggggcagccctggataagtacgccaagaaatctgttaaagtcatcgtggtcggaaatccagctaatacaaactgtttgaccgccagtaagagcgctcctagtatccccaaagagaatttctcctgcctcacccggctggaccataaccgcgctaaggcacagatcgcattaaagttgggggtgacagcaaacgacgtgaagaatgtcattatctggggtaatcatagtagtacccaatacccagatgtcaatcacgccaaggttaagctgcagggcaaggaggtgggggtgtacgaagctctgaaggacgactcctggctgaaaggtgaatttgtgacaactgtgcagcagcggggagccgctgtaataaaggctcgcaagttgtctagcgccatgtccgcagcaaaggccatctgtgatcacgtgcgcgacatatggttcggtacccctgagggcgagtttgtgtcaatgggtgtgatcagtgatggaaactcttatggcgttccagatgatcttctgtactcctttcccgtggtgataaagaataaaacctggaagtttgtggaaggcttgcctattaacgatttcagtcgggaaaagatggatctcactgcaaaggagttgacggaggagaaagagagcgcgttcgaattcttatcctccgcgtag

SEQ ID NO: 230587 - DNA, 801 bp, synthetic construct
  misc_feature 1..801: note = Description of Artificial Sequence: Synthetic coding sequence
  source 1..801: mol_type = other DNA
atggcggtgaacgtgtactcaacaagtgtcacttccgagaatctgagccgccacgacatgctggcgtgggtgaatgatagcctgcatttaaactataccaagattgagcagttgtgtagcggcgctgcttattgccagtttatggatatgctcttccccggatgtgttcatttacgcaaggtgaaattccaggcgaaattggagcacgagtatattcataatttcaaagtacttcaggctgcgtttaaaaagatgggcgtggataaaatcatcccagtggagaaactggtgaagggtaaattccaggacaacttcgagttcattcaatggttcaaaaaattcttcgacgctaattacgacggaaaggattataatcccctcttagcccgacagggacaggatgtggcgccaccccctaaccctgtgccccagcgaactagtccaacgggccctaagaacatgcagacttcaggaagactgagcaacgtggccccaccctgtattttgagaaaaaatccaccatctgcacgcaatgggggtcatgagacagacgcccagatcttggaactgaatcagcaactggtagacttgaagcttactgtcgacggactagaaaaggagcgcgacttctatttcagcaaactgagagacatagagctgatctgtcaggagcacgagagcgaaaacagccctgtgatctcaggcatcataggtatcctgtacgctacggaagaaggatttgcccctcccgaggacgacgaaatcgaagagcatcagcaggaggatcaggacgagtattag

SEQ ID NO: 230588 - DNA, 801 bp, synthetic construct
  misc_feature 1..801: note = Description of Artificial Sequence: Synthetic coding sequence
  source 1..801: mol_type = other DNA
atggccgtaaacgtctattcaacctctgtgacctcagagaatctctctcgccatgacatgctggcatgggtcaacgacagtctccatctaaactatacaaaaatcgagcagctttgctcgggtgctgcttactgccagttcatggacatgctttttccaggatgcgttcatctccgcaaggtcaaatttcaggctaaactcgagcacgaatacatacacaatttcaaagtcttgcaggcagcgttcaagaaaatgggcgtggacaagatcattccagtggagaagcttgtgaaagggaagtttcaagataatttcgaatttattcaatggttcaaaaagttcttcgatgccaattacgacggcaaagattataatcccttactggcacggcagggccaagatgtcgcaccgcctccaaacccagtccctcaaaggactagtccaacaggtcccaaaaatatgcagacgagcggtcgcttgtccaacgtggctcctccttgtatactcagaaagaacccaccttccgctaggaacggcggtcatgagactgatgcccagatcctggaactgaaccaacaactggtggacttaaagctgactgtggacggactcgaaaaggagcgcgacttctattttagcaagctgagagatattgagctgatttgccaggagcatgagtctgaaaattcccctgttatctcaggtatcattggtatactttacgcgacagaggagggattcgcacctccagaggatgatgaaattgaggaacaccagcaagaggaccaggatgagtactag

SEQ ID NO: 230589 - DNA, 657 bp, synthetic construct
  misc_feature 1..657: note = Description of Artificial Sequence: Synthetic coding sequence
  source 1..657: mol_type = other DNA
atggccgtcaacgtttatagcactagtgtgacctcagaaaacctctcccgccacgatatgctggcctgggtgaacgactcccttcatttaaattacactaagattgagcagctgtgctccggagcggcatattgccagttcatggacatgttatttcccggatgtgtgcacttacgaaaagtcaaattccaagccaaattagagcacgagtacattcacaattttaaggtgctccaggcagccttcaagaagatgggcgtagataaaataatcccagtcgagaagcttgtgaaggggaagtttcaggacaattttgagtttatccagtggtttaagaagttttttgacgccaattacgacggaaaggactataaccccctcctagcacggcaggggcaggatgtggcaccccctcccaaccccggagaccaaatttttaacaagtccaagaagctgattggcaccgctgtgccacagcgcaccagccctaccggtccaaagaacatgcagacaagcggtaggttgtccaatgttgcccctccctgtatcttacgaaagaatccccctagcgctaggaacggcggacatgagacagacgcacagatattggaactaaatcagcaactggtcgatctgaagctgaccgttgacggatag

SEQ ID NO: 230590 - DNA, 2004 bp, synthetic construct
  misc_feature 1..2004: note = Description of Artificial Sequence: Synthetic coding sequence
  source 1..2004: mol_type = other DNA
atggaaaccctcgagtctgagctgacatgccctatctgtctggaattgttcgaggacccacttttgctgccttgcgctcacagcctgtgtttcaattgtgcacatcgaattttagtatcccattgtgccaccaatgagagtgtcgaatccataactgccttccagtgcccgacttgcaggcatgtcataacattgtcccagaggggacttgacggactaaagaggaacgtaaccctccaaaatatcatcgaccggtttcaaaaagcatccgtgagtggacctaacagcccaagcgaaacgcgcagagagcgcgctttcgacgctaatacaatgacaagtgccgagaaggtcctttgtcagttctgcgaccaggatcctgcccaggacgccgttaagacatgcgtgacatgtgaagtgtcatattgcgacgagtgcctcaaggctacacatcccaacaagaaaccttttacaggtcataggttgatcgaacccatacctgatagccacattagaggtttaatgtgccttgaacacgaagacgaaaaggtcaacatgtattgcgtaacggacgatcagctcatctgcgcactctgcaaattggtgggtagacacagagatcatcaagtcgctgcgctcagcgagcgatacgacaagctgaaacagaacctggaatctaatctgaccaaccttattaagcgaaacaccgaactggaaacactgttggctaagctgatacagacttgccagcatgtggaggtgaacgcttcccggcaagaggccaagctcacagaagagtgtgacctacttattgagattattcagcagcgcaggcaaatcatagggactaaaatcaaagagggcaaagttatgagactgcggaagctggcacagcagatagccaattgtaaacaatgtattgagcggtctgcctctctcatttctcaggcagagcacagtctcaaagaaaacgaccatgcccgattccttcagacggccaagaatattacagaaagagtgtccatggctaccgcgtcgtctcaggttctcatccctgagatcaatctgaacgacacctttgacacctttgccttggatttcagccgcgagaaaaagctgctcgaatgcttagactacctcaccgctccgaatccccctaccatccgagaggagctgtgcactgcatcatacgacactatcaccgtgcattggacctcagatgatgagttttcagtggtaagctatgagcttcagtacacgatctttactggccaagccaacgttgtgtccctgtgtaacagtgccgatagctggatgatagtgccgaacattaaacagaaccattacacggtgcatgggcttcagtccggcaccaaatatatttttatggtgaaagccatcaatcaagcgggatccaggtcttcagagcctgggaagttaaaaaccaacagtcagccattcaaactggatcctaagtcagcacaccgcaaattgaaggtgtcccatgataatctgacggtcgagagggacgaaagctctagcaagaaatcacatacacctgagagatttacctcccaagggagttatggggtcgcaggaaatgtgttcatcgacagcggacggcactactgggaagtggtgatctccgggtcaacgtggtacgctattggattggcttacaagtcggcccctaaacacgaatggatcggcaaaaactctgctagctgggcgctgtgtagatgcaataacaactgggtggtccgtcacaatagtaaagaaatccccattgaacctgcccctcatttacgtcgagtcggaatactcttagactacgataacggctccatcgccttctacgatgccctgaatagcatccacctgtacacttttgatgtggcgttcgcacagccggtttgccctacctttactgtgtggaacaagtgtctgaccattataaccggtctacctattccggaccaccttgactgcaccgagcagttgccgtag

SEQ ID NO: 230591 - DNA, 2004 bp, synthetic construct
  misc_feature 1..2004: note = Description of Artificial Sequence: Synthetic coding sequence
  source 1..2004: mol_type = other DNA
atggagactctggagtccgagctaacttgtccaatttgcctggaactgttcgaggatcctctgctgctgccgtgcgcacacagtctgtgtttcaactgtgcgcaccggattctcgtgtcccactgcgcgacgaacgaatcggtggaaagcattaccgcctttcagtgtccaacttgccgacacgttattactctcagccagagaggtctagatgggcttaaacgaaacgtaaccctccagaatattattgatcgcttccagaaggcctccgtttccgggccaaacagccccagtgaaactaggagagaacgtgctttcgatgctaacactatgacaagtgctgaaaaggtactctgccagttttgtgaccaggaccccgcacaagacgccgtgaagacgtgcgtcacgtgtgaggtctcctattgcgacgaatgtctcaaagctacacacccaaataagaagcccttcactgggcaccgtttgatcgagcctatccccgactctcacatccgtggcctcatgtgtctcgagcatgaagacgaaaaagtaaacatgtactgcgtaacagacgatcagttgatctgtgcactctgcaaacttgtgggtagacatcgggaccatcaagtggcggcacttagcgaacgctatgataagctgaaacagaatctggaaagcaatcttaccaacttaataaaacgcaatactgagctcgaaactctcctggcaaaactgattcaaacctgccagcacgtagaagtaaacgcatcgagacaggaagcgaaacttacagaagagtgtgatcttctgatcgagataatccagcagaggcggcagatcattggtacaaaaatcaaagaggggaaagtaatgcggctgcgtaagctggcgcagcaaatcgccaactgcaagcaatgtattgaaaggtctgcttccctgatatcgcaagcagagcactctttaaaagagaatgaccacgccagattcctccaaacggctaaaaacattaccgaacgggtgtctatggccacggcttctagtcaggttcttatccccgaaatcaatctaaacgatactttcgatacttttgcgttagacttcagccgggaaaaaaagctgctagaatgtctggactacttaaccgctcctaacccccctacaattcgtgaagaattgtgcactgcctcttatgacaccatcacagtgcattggacaagcgacgacgagttctctgtagtaagctatgagttgcagtacaccatctttactggccaggccaacgttgtgtctttgtgcaattccgccgactcttggatgatagtgcccaacatcaagcagaatcattacactgttcacgggttacagagcggcactaagtatattttcatggtaaaggcaataaatcaggccggttctagatcgtcagagccagggaagctaaagacgaattcacaaccgtttaagctagacccaaaaagcgcccacagaaagctcaaggtgtcacacgacaacctgaccgtcgagcgcgatgagagctcttcaaaaaaatcccatacccctgagcgatttaccagtcaagggtcatatggggtggccggaaatgtgttcatagactctggtcggcattattgggaggtcgtcatctccggatcgacgtggtacgctatcgggctggcctataaatctgcacccaagcatgaatggataggaaaaaattcggcaagttgggcactttgtcgctgcaataacaattgggtggtcagacacaacagcaaggagattcctatcgaacccgctccgcatttaagacgagtgggtatacttctcgactacgacaatggttcaatcgccttttacgacgccctgaactccatccatctgtacaccttcgatgtggcattcgcccagcctgtttgtccaaccttcactgtatggaacaagtgcttgaccataatcacaggactacctattcccgaccatctcgactgtaccgagcaactcccatag

SEQ ID NO: 230592 - DNA, 2004 bp, synthetic construct
  misc_feature 1..2004: note = Description of Artificial Sequence: Synthetic coding sequence
  source 1..2004: mol_type = other DNA
atggaaacgctggagtcagaactcacatgtcctatttgtttggagctgtttgaagaccccctgctattaccttgcgcccactcactttgtttcaattgcgctcaccgaattctggtgtcccactgtgcaacgaacgagtccgtggagtccataaccgccttccagtgccccacctgtcggcatgtcataacattaagccagagaggcctggacggcctcaagcgaaacgttaccctgcagaacataatcgatcgttttcagaaagcctcagtgtctgggccaaattcgccctcagaaactcgccgagaacgcgcattcgatgcaaatactatgaccagcgccgagaaagtcctgtgtcaattctgtgatcaagaccccgctcaggatgccgtcaagacatgtgtgacttgcgaggtaagctactgtgatgaatgtttgaaggctacccaccccaacaagaagccgtttacaggtcacaggctgatagaacctatccctgactctcacattcgcggactcatgtgtctagagcacgaggacgaaaaagtgaacatgtattgcgttacggacgaccagctgatttgtgcattgtgcaaacttgtcggacggcacagggatcaccaagtggccgcactctccgaacgctacgataagctaaagcagaatcttgagagcaatctcacgaacctgataaaacgaaataccgagttagagacgcttttggctaagctgattcaaacttgtcagcatgtggaggtgaacgcctctcgccaagaagccaaactgacagaagagtgtgacctgttaatcgagattatacagcaacggagacagattatagggacaaaaattaaggaaggaaaggttatgagactgagaaaactggctcagcagattgcaaactgtaaacaatgtattgaacggtctgccagtctcatatcccaggcagagcacagccttaaagagaacgaccacgctcggttcttacagacagcaaagaacatcacagagagagtctcaatggctacggcatcgtcccaggttcttataccggagatcaacttaaacgatacatttgatacctttgccttggattttagcagggaaaagaagctgctagagtgtttagactacctgaccgcacctaacccccctacaatccgggaagagttatgcacggcttcttatgacactatcacagtgcactggacaagtgatgatgaatttagcgtagtatcttacgagctgcaatacacaatatttacaggacaggcaaacgtggtgtctctctgtaacagtgcagatagctggatgatcgtcccgaacattaagcagaaccactacacagtacacgggttacagtccggcacaaagtacatctttatggtaaaagccatcaaccaggccggatctagatcgtccgagcctggcaaattgaagacaaattcacagcccttcaaactcgatcccaagagtgcccaccgcaagcttaaagtgtcgcatgacaatctgactgtggagcgcgacgagagctcctccaaaaagtcccatactcccgagcgcttcactagccagggtagctacggcgtcgctgggaatgtgttcatcgacagcggtcgacattactgggaagtggttatctcaggcagcacgtggtacgctatcgggctggcctataaaagcgctccaaaacacgagtggatcggaaagaactccgcttcttgggccctctgtcggtgcaacaataactgggtggttcggcacaactctaaggagattcccatagagccagcccctcatctcagacgggtcggcatcctcctagactacgataatggttccatcgctttctacgacgccctgaactccattcatctctacacctttgacgtagcgtttgcccagcccgtctgtccaacatttaccgtgtggaataagtgtctcaccattattaccggactgccaatcccggatcatctggattgcaccgagcaactgccatag

SEQ ID NO: 230593 - DNA, 1659 bp, synthetic construct
  misc_feature 1..1659: note = Description of Artificial Sequence: Synthetic coding sequence
  source 1..1659: mol_type = other DNA
atggagactctggagtccgaacttacttgccccatctgtttagagctgttcgaagatcctctcctgctgccctgcgcacacagcctgtgcttcaactgcgcacacaggattctggtctcccactgcgccactaacgagagcgtggagtccatcaccgcctttcagtgtcccacatgccgccacgtaattacactttcacagagaggcctggacgggttgaaacgaaacgtgaccctgcagaacattatcgatagattccagaaagcttccgttagtggcccaaatagcccctcagagactcggagggagcgcgcatttgacgcaaacacgatgacaagcgccgagaaggtgctgtgccaattttgcgatcaggaccctgcccaggatgccgtgaagacctgcgtcacatgtgaagtgagctattgcgatgaatgtctaaaagcgactcatcctaacaaaaaaccgtttacaggccatcgcttaatagaacccattcctgattctcacatccgtggcctgatgtgcttagagcacgaggacgagaaggtcaacatgtattgcgttacagatgatcagctgatctgtgccctctgcaaactcgtgggtaggcaccgggaccaccaggtcgctgccctgtcagaaagatacgataagctaaagcaaaacctggagtcaaatttaactaatctcatcaagcgcaacaccgagctcgaaaccctgttggccaagctgatccagacctgccagcatgtcgaggtgaacgcctcacgccaggaggcaaaactgaccgaggaatgtgaccttctgatagaaatcattcaacagcgccgacagattatagggaccaagattaaggagggaaaagtgatgcggcttaggaagttggcccagcagatagccaactgtaaacagtgcatcgagagatcagctagcttgatcagtcaggcagagcactccctaaaggagaatgatcatgctcgattcctccaaaccgcgaagaatattactgaacgggtgtccatggccactgcttctagccaagtgctgatccccgagattaatttgaatgataccttcgacacctttgccctggacttctcaagagaaaagaagcttttagaatgccttgactatctgaccgctcctaatccacccaccatacgcgaagaattatgcactgcttcttatgacaccatcactgtgcactggaccagtgatgatgaattttctgtcgtgtcctatgaactgcagtacactatcttcacaggtcaggctaatgtcgtgtccctgtgcaattctgcagattcatggatgatcgtccccaatataaagcaaaatcactataccgtgcacggtttgcaaagcgggactaaatacatttttatggtcaaagcgatcaatcaggcaggttcaaggtctagtgaacctggcaagcttaagacaaactctcaaccctttaagctagaccccaaatccgcacacagaaaattgaaagtgtcccacgacaatctgaccgtggagcgagatgaatcaagtagcaaaaaatcgcacaccccggaaaggtttactagccaagggtcatatggggtagccggaaacgtgttcatcgactctggtagacactattgggaggtcgtcattagtgggagcacatggtag

SEQ ID NO: 230594 - DNA, 2004 bp, synthetic construct
  misc_feature 1..2004: note = Description of Artificial Sequence: Synthetic coding sequence
  source 1..2004: mol_type = other DNA
atggaaaccttggagtcggaactgacatgcccaatctgccttgaactattcgaagacccactgcttctgccttgcgctcatagcctgtgctttaactgtgcccaccgtatcctggtgagccattgtgccacaaatgagtccgtggaaagtataaccgcctttcagtgccccacctgcagacatgtgattacactttcccagcggggtctagacggcctgaaacgcaatgtgaccctgcagaatatcattgataggttccagaaagcttccgtgagcgggcctaattcaccttccgagacccgcagggagagggcatttgacgctaacaccatgacaagcgccgagaaggtcctttgtcagttttgtgatcaggaccccgctcaggacgccgtgaagacctgcgtgacctgtgaggtgtcatactgcgatgagtgtctgaaagcgactcatcccaataaaaaacctttcaccgggcatcggttgatagagcctatccctgatagtcatataagaggattaatgtgtctcgagcacgaggacgagaaagtcaacatgtattgcgtgaccgacgaccagctcatctgcgctctgtgtaagctggttggcagacaccgagaccatcaggttgccgcactgtccgaaagatacgataaactcaaacagaatcttgagagtaatctgaccaatctgatcaagagaaatactgaactagaaactctcctggccaagctcatacagacctgtcagcacgtggaggtcaacgcaagccgccaggaagctaagttgaccgaagagtgtgatttgttgatcgagattatccagcagaggcggcagatcatcgggaccaagataaaggaaggcaaagtcatgcggttgcgtaagctggcccagcaaattgcgaactgtaaacagtgtatcgaaagatctgcatcactgattagccaggctgaacactctcttaaggagaacgatcatgctagattcctccagactgctaagaatatcaccgagcgggtgtctatggccaccgcatctagccaggtgctcatacccgaaataaatctgaatgacacttttgatacgtttgccctcgatttttctcgagaaaagaagctgttggaatgtctggattatttgacagcccctaatcctccaaccatccgggaagagctgtgcaccgccagctatgataccatcactgtgcactggaccagtgacgacgagttcagcgttgtgagttatgaattgcaatatactattttcacagggcaggctaatgtcgtatccctttgtaactcagccgattcgtggatgatcgtgcctaatatcaagcaaaaccactacaccgtgcacggattgcagtcaggcaccaaatacatttttatggtcaaagccattaaccaggccggatcacgcagctctgagccaggcaaactgaaaacaaactctcagccatttaaactcgacccaaagtcggctcatcgcaagttgaaggtgagccatgacaatctgaccgtggagagagacgaaagttctagtaaaaaaagccacacccccgaacgattcacatctcaggggtcttacggcgtggctggaaatgtcttcatcgatagtggacggcactactgggaggtcgtcatatcgggatccacatggtatgcaatcggccttgcatacaaaagcgccccaaagcacgaatggattggtaagaactcggcctcatgggcactatgtagatgcaataataactgggtagtgagacacaattcaaaagagatccccatcgaaccagcccctcaccttcgaagggtggggatcctcctggattacgacaatggtagcatcgccttttatgacgccttgaatagcattcacctttacacttttgatgtcgcattcgcacaaccagtgtgtccgacctttaccgtgtggaacaaatgcttgaccatcatcacaggtctgccgataccagatcacctagattgtacagagcagctgccttag

SEQ ID NO: 230595 - DNA, 2004 bp, synthetic construct
  misc_feature 1..2004: note = Description of Artificial Sequence: Synthetic coding sequence
  source 1..2004: mol_type = other DNA
atggaaaccttggagtccgaattaacttgtccaatatgcctggaactcttcgaggatccattgctgctcccatgcgcacatagtctctgtttcaactgtgcacaccgcattcttgtaagtcactgcgccaccaacgaatctgtggaatctatcacagcatttcagtgtccaacgtgcagacatgtcattactctgagtcagcgcggtctcgacggcctcaagcgcaatgtgactctgcaaaacattattgacagatttcaaaaagcatcagtgtctggaccgaacagcccttcggagacacggagagagagggcctttgacgccaacaccatgacgtctgccgagaaagtgctttgtcagttttgcgatcaggatcctgcccaggacgcagtcaagacttgtgtgacctgcgaggtgagttactgtgatgaatgtctcaaagccacacatcccaacaaaaagccattcacaggccatagattgatcgaacccatcccagactctcacatcagaggcttgatgtgcctggaacatgaggacgagaaggtgaacatgtactgcgtgaccgacgaccagctgatctgtgctttgtgcaagctggtcggcagacaccgggaccaccaggtggccgcactgtccgagagatacgacaaactgaagcagaatctcgaatctaatctcacaaatctcatcaagcgaaacacagagctggagactctgctggccaaactgatccaaacctgccaacacgttgaagtgaacgcctcgcggcaggaggccaagcttactgaggaatgcgatctgctgatcgaaatcatccaacaaaggaggcagataattggcacaaagattaaggaagggaaagttatgaggctcaggaaattggcccagcaaatagccaactgcaagcagtgtattgaaaggtccgcaagcctgatttctcaggctgagcacagcctgaaggaaaatgaccacgccaggtttctacagaccgctaagaatataactgagagggtctctatggcgacggcttcaagccaagtcctgattccagagattaatctgaatgatacctttgatactttcgcgctggacttttctcgtgagaaaaaacttctggagtgcctcgattaccttactgctcccaatcctcctaccatcagggaagagctctgtacagcctcatatgatactatcaccgtgcactggactagcgacgatgaattctccgtggtctcctacgagctccaatataccatcttcactggacaggccaacgttgtgtcattgtgcaactcagcagactcttggatgatcgtccccaacatcaaacagaatcattatacagtccacgggttacagagcggcacaaagtacatcttcatggtcaaagctattaaccaggcgggatctcgctcaagcgagccaggcaagctgaagaccaactcccaaccatttaagctcgatcctaaatcagcacatagaaagctgaaggtgtctcatgacaacctgaccgtggagagggacgagagctccagcaagaagagccacactcccgaaagattcacatctcagggaagctacggcgtggctgggaacgtttttatagattccgggagacactactgggaagtcgtgatctcaggatccacctggtacgccatcggcttagcatacaaatcagccccaaagcacgagtggattggcaagaacagtgcatcctgggccctttgccggtgtaacaataattgggtggtacgccacaattccaaggagattcctattgaacccgcacctcatctcagacgagtcgggatcctgttagactatgacaatgggtctatcgcattctacgatgcactgaattcaattcatttgtatacgttcgatgtggccttcgcccagcccgtgtgccctaccttcaccgtatggaacaaatgtcttacgataatcacagggctgcccattccagaccacctggactgtacggaacagctgccatag

SEQ ID NO: 230596 - DNA, 1452 bp, synthetic construct
  misc_feature 1..1452: note = Description of Artificial Sequence: Synthetic coding sequence
  source 1..1452: mol_type = other DNA
atggaaactctggagtccgagttaacctgccctatctgtctagagctctttgaagatcctctccttttgccttgcgcccattccctgtgctttaactgtgcccacaggatcctggtgtcccactgcgccacaaacgaatcagttgagagtattacagccttccagtgtcctacttgtagacatgtcattacactcagtcagcggggtctggatgggctgaagcgcaatgtgacccttcagaacattatcgaccgctttcaaaaagccagcgtctccggacctaattccccgtcagagaccagacgtgagcgagcattcgatgcgaacaccatgaccagcgcagagaaagtcctatgtcagttctgtgatcaggaccccgcacaggatgctgtgaaaacctgcgtgacctgcgaagtgagctattgcgacgaatgcctgaaagccacgcatcctaacaagaagccgtttactggacacaggctcatcgagcctattcctgacagccacattcgcggacttatgtgcctggagcacgaagacgagaaggtgaatatgtactgcgtaactgatgaccagctcatctgcgcgttgtgcaaactcgtaggtcgccaccgcgatcatcaggtcgcagctctgagtgaacgatatgataagcttaaacagaatctagaatccaatcttaccaacctgattaagaggaataccgagctggaaactctgctggcaaaattgattcagacatgccagcatgtggaggtgaatgcgtccagacaggaggccaagctgaccgaggaatgcgacctgctgattgagatcatccaacagaggaggcaaatcattggcacaaagattaaagagggcaaggtgatgagactaagaaagttagcccagcagatcgcgaactgtaaacagtgtatagaacgctctgcttccctcatatcacaagccgagcactccctcaaagaaaacgatcacgccaggtttctgcaaaccgcaaaaaacatcaccgaacgagtgtcaatggcgacagcgtcatctcaggtgctgattccggagattaacttgaatgatacttttgacacgttcgcgctcgactttagccgggagaagaaactgctcgaatgtctcgactacttgactgctcccaacccacccactattagagaagaactttgcacagccagctatgacacaattacagtgcactggaccagcgatgacgagttttctgtggttagctacgagcttcaatatacgatcttcacagggcaggccaacgtagtatcactatgtaacagcgccgattcatggatgatcgtgcccaatatcaagcaaaaccactacaccgtgcacgggctgcagagtggaactaaatacatattcatggtcaaagccatcaaccaggccggatctaggtcatcagagccaggcaaattaaagacaaactcctag

SEQ ID NO: 230597 - DNA, 594 bp, synthetic construct
  misc_feature 1..594: note = Description of Artificial Sequence: Synthetic coding sequence
  source 1..594: mol_type = other DNA
atggagacccttgagtccgagctgacatgcccaatctgtcttgagttgttcgaagatccattgttgctaccttgcgcacatagcttgtgcttcaactgcgcccaccgcatcttggtgtctcactgcgcaacgaatgagagtgtcgagtctatcaccgccttccaatgtccaacatgtcggcacgtaataactctctcacagcggggactcgacggccttaaacgcaatgtaaccttgcagaatatcatcgatagattccagaaagcgtccgtcagcggtcccaattctccctctgagacgaggcgtgaacgggcattcgatgccaatactatgacctcggctgagaaggtcctttgtcagttctgcgatcaggaccccgcacaggacgctgtcaagacatgcgttacctgtgaggtgtcatactgtgatgagtgcctaaaagcaacccaccctaacaagaagccgttcacaggtcatcgcctgatagaacccattcccgactcacacattcggggtttaatgtgtcttgaacacgaggatgaaaaagtgaatatgtattgcgtcactgatgatcagttgatttgcgcactgtag

SEQ ID NO: 230598 - DNA, 2004 bp, synthetic construct
  misc_feature 1..2004: note = Description of Artificial Sequence: Synthetic coding sequence
  source 1..2004: mol_type = other DNA
atggagacactcgagtctgagcttacttgtcccatctgtcttgagctgtttgaggatcctttgttgttgccctgtgcccattccctctgcttcaattgtgcccaccggatactggtatctcattgtgccaccaacgaatccgtggagtctattacagcattccagtgccctacctgccggcacgtcattaccctgagccaacgtggtctggacggcctcaagcgaaatgtcaccttacagaatattattgaccgttttcagaaagcttccgtgtccggtccgaacagccctagtgaaacgagaagggaaagggcatttgacgctaatacgatgacgagtgccgagaaggtcctctgccagttctgcgatcaggaccccgcacaggatgctgtgaagacttgcgtaacctgtgaagtttcctattgtgacgagtgcctcaaggcgacacatcccaacaagaagccattcacaggtcaccggctcatcgaacctattccggactcccatatacggggactgatgtgcctggaacacgaggacgagaaggtcaatatgtattgtgttaccgacgaccagctgatctgtgcactgtgtaagctcgtcggacgtcatagggaccatcaggtggccgcactgtctgagcgatatgacaaattaaagcagaatctcgaaagcaatctgacaaatcttataaaaaggaacactgagctcgagactctgctggcgaaactcatccagacatgtcagcatgtggaagtcaacgcttcaagacaggaggcaaagctgaccgaggagtgcgatctgctcatcgagattatccagcagagaagacaaatcatcggcaccaaaatcaaggagggaaaggtgatgcggctcagaaagcttgctcagcaaattgctaactgcaagcagtgcattgaacgcagtgccagcctcatttctcaggccgaacacagtctcaaagagaatgatcatgccagattccttcagactgccaaaaacattacggaaagggtctccatggccactgcttctagtcaggtgctcattccagagatcaatcttaacgatacattcgatacatttgcgctggacttcagccgggagaagaaactgctggagtgtctggattacctcaccgctcctaatcctcctacaatcagagaagagctgtgtaccgcctcctacgacacgatcacagtgcattggacctccgacgatgagtttagcgtggtcagttacgagctgcaatacacaatctttaccgggcaggccaatgtggtgtccctgtgcaacagtgctgattcctggatgattgtgccaaatattaagcagaaccattacacagttcatgggttacagtccggtactaagtatatcttcatggttaaagccataaaccaggctgggtcgcgttcttcggagcccggtaagcttaagacaaattcccaaccgttcaaattggaccccaagagtgctcacagaaaactgaaagtgagccatgacaacctgaccgtagagcgtgacgagtcatcatccaaaaagtcgcacacacctgaacggttcacttcacagggtagttacggagtggctggcaacgtctttatcgactctggacgacattattgggaagtggtgatatccggaagcacatggtacgccatcggattagcctacaaatccgctcctaagcacgagtggattggaaaaaactccgcctcgtgggccctgtgcaggtgtaacaataactgggtcgtgaggcacaactcaaaagaaatccctattgaaccagctccacacctgcgcagagtagggatactcctagattacgacaatggtagcatcgcgttttacgacgccctgaattctatacatctgtatacgttcgacgttgccttcgcacagcctgtgtgtcccacatttacagtctggaacaaatgcctgacgattattacaggcctgcctatacccgaccatctggactgcacagagcagctgccatag

SEQ ID NO: 230599 - DNA, 1854 bp, synthetic construct
  misc_feature 1..1854: note = Description of Artificial Sequence: Synthetic coding sequence
  source 1..1854: mol_type = other DNA
atggagactctagaatcggaactgacatgccctatttgcctagaactgtttgaagatcccctactgttgccatgtgctcacagtctgtgtttcaattgcgcccaccggattctggtttcgcactgcgctactaatgagtccgtcgaaagcattacggccttccaatgtcccacttgtagacacgttattacactgtcacagcgcggactcgacggactgaaaaggaatgtgactctgcagaatatcattgatcgattccaaaaagcttccgtttcagggcctaactcaccaagcgaaacatcagcagagaaggtgctgtgccagttctgtgaccaggatccagcccaggatgcagtgaagacttgcgtaacgtgcgaggtctcatactgtgacgagtgtctgaaagctacgcatcccaacaagaagccctttaccggtcatcgccttattgagccaatcccagatagtcatatcagggggctgatgtgcctggagcatgaagacgagaagcagaacctggaaagcaatctgacaaatcttataaagcggaacacggagttagaaacactcctggccaagctgatccagacgtgccagcacgtagaggtgaacgctagcaggcaggaagctaagctgacggaagagtgtgacctgttgatcgagatcatccagcagcgcagacagattattgggaccaagatcaaggaagggaaggttatgaggctgaggaagctggcacaacagatcgcaaactgcaagcagtgcatcgagcggtccgcctccttgatttcccaggcagaacattcgctcaaggaaaacgatcatgcaagatttttgcaaacggcaaagaacatcaccgagcgggtgtcaatggccacagctagtagccaggtcttgatcccagaaatcaacttgaacgacaccttcgatacatttgcattagatttctcccgagagaaaaaactgctcgagtgcctggactacttgaccgcccctaaccccccaacaattcgtgaggagctgtgtaccgcatcctacgacaccattaccgtacattggacctcagatgacgaattctccgtggtttcttacgaattgcagtacacaatcttcactgggcaggccaacgtcgtgagtttgtgcaactctgccgattcctggatgattgtccctaacattaaacagaaccattataccgtccacggactgcaaagcgggaccaaatacattttcatggtgaaggctatcaaccaagctggcagcagatctagcgagcctgggaagttgaagacaaatagccagcctttcaaacttgacccgaagtctgcacacaggaagctcaaagtgtctcacgataacttaacagtggaacgcgacgaatcaagttctaagaagtcacacacacccgaacgcttcaccagtcaaggatcctatggtgtggctgggaacgtttttattgacagtggccgtcattattgggaagtcgttatttctgggtctacttggtacgcaattgggctggcctacaaatccgccccaaaacacgaatggatcggaaagaacagcgcatcatgggccctgtgtcggtgtaataacaactgggtggttaggcataactctaaggaaattccgatcgagcctgccccacaccttcggagggttggcatcctgctggactatgataacggctccattgcgttttacgacgcactgaatagcattcacctttacacatttgacgtggcttttgcccagcctgtgtgtccaactttcaccgtgtggaacaaatgcttaacgattattaccgggttgccgatcccggatcatttggactgtaccgagcaactcccatag

SEQ ID NO: 230600 - DNA, 2208 bp, synthetic construct
  misc_feature 1..2208: note = Description of Artificial Sequence: Synthetic coding sequence
  source 1..2208: mol_type = other DNA
atgggcgaaagtcccgctagtgtggtgttgaacgcgtctgggggacttttttcactgaagatggagactcttgagtctgagctcacctgccctatttgcctggaactgttcgaggatcctcttttactaccttgcgcacattccctttgctttagttgcgcccaccgtatactggtcagctcgtgcagctccggagaatccattgaacccatcactgcatttcagtgtcctacctgccggtacgttatctccctaaaccatcgaggcctggacggcctgaagcggaacgtgacactccagaatataatcgatcgatttcagaaagccagcgtttccggcccaaacagtcccagtgagagccggcgtgagcgcacataccgccctaccaccgcaatgagctctgaaagaatcgcctgccagttctgcgagcaagatccccctcgggacgcagttaagacatgtataacatgcgaagttagttactgtgaccggtgtctccgggctactcacccaaacaaaaagccatttacctcccaccggttggtagagccagtgcccgacactcacctgaggggcataacctgtctggatcacgagaacgaaaaagtgaatatgtattgtgtgagcgacgaccagctgatttgcgcactctgtaaactggtcggacgtcatagagatcaccaggtcgctagtctgaatgacagatttgagaagcttaaacaaaccctggaaatgaacctgacgaatctggttaagagaaactccgaactggagaatcagatggcaaaactcattcagatttgtcaacaggtggaagtgaacaccgcaatgcatgaggccaagcttatggaggaatgcgacgaactggtggaaataattcagcagcgtaagcagatgattgccgtgaaaataaaagaaaccaaggtcatgaaactaaggaagctggcccaacaagttgctaattgccgccagtgtctcgagcggtcaaccgtgctgatcaaccaggctgagcacatcttgaaagagaacgatcaggctcggttcctgcagagtgccaaaaacattgcagagagggttgccatggccacagcctccagccaggtacttatcccagatattaactttaatgacgcttttgagaactttgccttggacttctcccgagaaaagaagctgctcgagggccttgattatctgaccgcccctaacccgccaagcattcgagaggaactgtgcactgcttctcacgacactattaccgttcactggatcagcgatgacgagttttcaatcagttcctatgagctgcagtacacaattttcacgggccaggccaactttattagcaagtcttggtgtagctggggcctgtggcctgaaatacggaagtgtaaagaagccgtgtcttgctccagacttgctggagctcccaggggcctctacaactcggttgactcctggatgatcgtccctaatatcaagcagaaccactacactgtgcacgggcttcagtctggcacacgctacattttcatcgttaaggccattaatcaagccggttcaagaaactcagagcctacccgtctgaagactaactcccagccctttaaattggatcccaagatgacacataaaaaactcaagattagcaatgacgggttgcagatggaaaaggacgagtccagtctcaaaaaaagccatactccagaaaggttttctggaaccgggtgctacggcgctgcgggaaatatcttcatagactctggctgtcactactgggaggtggtcatgggaagctccacttggtacgccattgggattgcatacaaaagcgctcccaaaaacgagtggattggcaagaacgcctccagttgggtattcagcagatgtaactcaaactttgttgtcaggcacaacaataaggagatgctggtggatgttcctccccatctcaagagactgggggtcttgttggactacgataataacatgttgtcgttctacgacccagctaattcactccacctccacaccttcgatgtgactttcatcctaccagtgtgtcctaccttcactatttggaataagtctttaatgattctcagcggtttacccgctcccgattttatcgactatccggagagacaggaatgtaactgtagaccacaggaatccccttatgtcagtggtatgaagacctgtcattag

SEQ ID NO: 230601 - DNA, 2118 bp, synthetic construct
  misc_feature 1..2118: note = Description of Artificial Sequence: Synthetic coding sequence
  source 1..2118: mol_type = other DNA
atgggggagagccccgcatctgttgtgttaaacgcatcaggcggtctgttctctttaaaaatggagaccttagaaagcgaactgacatgtcccatctgtttagagctatttgaagacccattactgctgccatgtgcacactcattgtgcttttcatgtgctcatcgcatactcgtctctagctgtagtagtggagagagcattgaaccaatcacagcctttcaatgtcctacatgccgctacgtgataagcctgaatcaccggggactggatggccttaaacgcaacgtgactttgcaaaatatcattgaccgcttccagaaggcctcagtgagtggccctaactcacccagtgaatccagacgcgagcggacttatcgccctaccaccgccatgtcctccgagcgcatagcctgtcaattctgcgaacaggatcctcctagagacgccgtaaaaacctgtataacctgcgaagtttcttactgcgaccggtgcttacgcgcaacccatccgaacaagaagccttttacttctcataggctggtggagcctgtcccagacacacatcttcgcggtattacttgtttggatcacgaaaatgagaaggtaaatatgtattgtgtgtcggatgatcagcttatctgtgcgttgtgtaaattagttgggcgtcaccgggatcatcaggtagcctctttgaatgaccggttcgagaagctgaagcagactctcgagatgaatctgactaaccttgtgaagaggaattcagagcttgagaaccagatggccaagctgatacagatctgccagcaggtcgaagtaaacacagccatgcacgaggctaagctgatggaggaatgcgatgagcttgtggaaatcatccagcagagaaagcagatgattgcggtcaaaattaaagagaccaaagtgatgaaacttcgaaagctggctcaacaagtcgctaattgtaggcagtgtttggagcggagtacggtgcttattaaccaagctgagcacatcctgaaggaaaacgaccaagcgaggtttctgcagagcgcgaagaatattgctgaaagagtggccatggctaccgcttccagtcaggtcctgatcccagatattaatttcaacgatgcattcgaaaacttcgcacttgacttttctcgggagaaaaagctcctggaaggacttgactatctcaccgcacctaacccacccagcattagggaggagctgtgcactgccagtcacgataccatcaccgtgcactggatcagcgatgacgaattcagcatcagttcttacgagttgcagtacacgatctttactggacaggcaaattttatctcattatacaacagcgtggatagctggatgatagtgccgaatataaagcagaaccattacactgtccacggcctgcagagtgggaccagatacatttttatcgtgaaggctatcaatcaagccggatccaggaacagcgagccaacaagactgaaaacaaacagtcagcccttcaaactcgacccgaagatgacacacaagaagctgaaaatttctaatgacggcttgcagatggaaaaagatgagtcttcattgaaaaaaagtcacactccagagaggtttagcggcacaggatgctacggggcagcagggaatatttttattgattcaggttgccactattgggaggtggttatggggagctctacgtggtacgccatcggcatcgcctataagtcggctcccaagaacgagtggatcggcaagaatgcctcttcgtgggtgtttagtaggtgtaactcgaattttgtggttagacataacaataaagagatgcttgtcgacgtccctccccacttgaaacgtctgggcgtccttctggattatgacaataatatgctatctttttatgacccagcaaactcacttcacctgcacacttttgacgtgacgtttattctccccgtctgcccaacgtttacgatctggaataaaagtctcatgatactttctgggctacctgccccagattttatcgactaccctgaacgacaggaatgcaactgccgccctcaagaaagcccctacgtctccgggatgaaaacctgtcattag

SEQ ID NO: 230602 - DNA, 660 bp, synthetic construct
  misc_feature 1..660: note = Description of Artificial Sequence: Synthetic coding sequence
  source 1..660: mol_type = other DNA
atggagacactggaatccgaactcacttgccctatttgtctggaactcttcgaggatcccctccttctcccctgcgcccactctctctgctttagctgcgctcatcgaatactggttagctcatgctcttccggcgaatcaattgaaccgattaccgctttccaatgtccaacttgtcggtacgttatcagcctgaaccataggggcctcgatggactgaagcgcaacgttactctgcagaacatcattgatagattccagaaggccagcgttagcgggccaaactccccctccgagtcacgacgggaaagaacctatcggcctacgactgccatgtcctcggaacgaatcgcctgtcaattttgtgaacaggaccctccgagggatgccgttaagacctgcatcacatgcgaagtcagttattgcgacagatgcctaagagccacacacccaaacaagaaaccctttaccagtcaccggttagtcgagcctgtgcccgatacacatctgagagggatcacgtgcctggatcatgagaacgaaaaggtgaatatgtactgcgtaagcgacgaccaactgatctgcgccctgtgcaagctggtcggacggcatcgtgatcatcaagtggccagtttaaatgaccggttcgaaaaactgtag

SEQ ID NO: 230603 - DNA, 1407 bp, synthetic construct
  misc_feature 1..1407: note = Description of Artificial Sequence: Synthetic coding sequence
  source 1..1407: mol_type = other DNA
atggaaccccagccaggcggtgcacgcagctgtcgaagaggcgctccgggaggtgcatgtgagcttggccctgctgccgaagccgctcctatgagcttggccatccatagcacaacgggaacccgatatgacctggctgtgccccctgacgagaccgttgagggccttcggaaacgactttcgcagcggctgaaagttcctaaggagaggctcgccttgctccataaggacacccggttgagcagcggcaagctgcaggagtttggggtgggagacgggtctaagctgaccctcgttccaacggtagaagcgggactgatgtctcaagcctcgcgcccagagcagtccgtgatgcaggccctcgagagtctgacagagacgcaggtatctgatttcttatccgggaggagccccttgactctagccctgagagtcggagaccacatgatgttcgtgcagctgcagctcgccgctcagcacgctcccctccaacatcgacacgtgctcgccgctgctgccgcagccgcagccgcacgaggagatccctctattgcctctcccgtctcctccccatgccgtcccgtctcctcagccgctcgcgtgccaccagtgcccacatcaccttccccggcttcaccatcccccattaccgccggatcatttcgtagccacgccgcaagcacgacttgccctgagcagatggactgttctcctacagcgtcatcatccgcgagccctggcgcttcaacgacctctacccccggtgccagtccggcacccagaagtcggaagccaggcgcagtgatcgaatcatttgtgaatcatgcccctggcgtattcagtgggaccttttctggtacgcttcacccaaattgtcaggatagtagcggacggccacgcagggatattggcaccattctgcagattctgaatgacctactgagcgccactcgccactaccaaggcatgccgcctagcctggcacaactaaggtgtcacgcccaatgctcccccgcttccccagccccagacctggctcccagaacaacatcgtgcgagaagcttaccgccgctccatcagccagcctcctgcagggccagagtcagatccgaatgtgcaagcctccaggagatcggctgcggcagactgaaaatcgagccacacgttgtaaggtggagcgacttcagctcctgctgcagcagaaacgcttgagaagaaaagctagaagagatgcccgagggccttaccattggtccccgtcccggaaggccggacggtctgatagcagcagctcaggtgggggagggagcccttccgaggcatcagggctgggactggactttgaagattctgtgtggaagccagaggttaaccccgacattaaaagcgagtttgtggtggcatag

SEQ ID NO: 230604 - DNA, 771 bp, synthetic construct
  misc_feature 1..771: note = Description of Artificial Sequence: Synthetic coding sequence
  source 1..771: mol_type = other DNA
atgggggagccaagcagagaggaatataagattcaaagcttcgatgccgagacccaacaattgctgaagacagctctgaaggtggcgtgttttgagaccgaggatggagaatatagcgtttgccagcggtcatacagtaactgtagtcggctcatgcccagtcggtgtaatacgcaatatcgagatcccggtgccgtcgatctagaaaaggtggctaacgtgatcgtggatcattccttacaggactgtgtattttcaaaggaagcaggacgaatgtgctatgcaattattcaggccgagagcaaacaggcaggccagagtgtattcaggcgcggtttacttaaccggctccagcaagagtaccaagccagggagcagctacgcgctcgctccctgcagggttgggtctgttacgtgacttttatctgcaatatcttcgactatctgcgcgttaataacatgcccatgatggccctcgtcaaccccgtctatgattgtctcttccgcctggcacagccagacagtttgtctaaggaggaggaggtggactgcctggtgcttcagctccaccgagtcggtgagcagctagaaaagatgaatggtcagaggatggatgagctgtttgtgctgataagagatggattcctgctgcctaccggattgtcctccctggctcagctactacttcttgagattatcgaatttagggccgcaggctggaaaacaacacctgcagcgcataagtactattactcagaggtgagcgactag

SEQ ID NO: 230605 - DNA, 669 bp, synthetic construct
  misc_feature 1..669: note = Description of Artificial Sequence: Synthetic coding sequence
  source 1..669: mol_type = other DNA
atgggcgagccttctcgagaagaatataaaattcagtctttcgacgccgaaacacagcaactcctgaagacagcactcaaggatcctggcgcagttgacctcgagaaagtggctaatgtgatcgtggaccacagcctgcaggactgcgttttttccaaggaagccggtcgtatgtgttatgccattatacaggccgaatccaagcaggcaggacaaagtgtgtttcgccgtggactgcttaatcggctccagcaagagtaccaagcgagagagcaactgagggcccgatcattacagggatgggtctgctacgtgactttcatctgcaatatattcgactatttaagggtgaacaacatgccgatgatggccctggtcaaccccgtatatgactgtctgtttcgtttggcccaacctgatagcctatctaaggaggaggaggttgattgtctggttctgcagttgcacagggtaggggaacagctggagaagatgaatggccaacggatggatgagttatttgttctgatccgtgatggttttttattgccgacagggttatcttcgttggctcagctcctactgctcgagatcatcgagtttagagccgctggatggaagacaacgcctgccgctcataaatactactactccgaagtgagcgactag

SEQ ID NO: 230606 - DNA, 792 bp, synthetic construct
  misc_feature 1..792: note = Description of Artificial Sequence: Synthetic coding sequence
  source 1..792: mol_type = other DNA
atgggtgagccaagccgggaggaatataagattcaatccttcgacgccgaaactcagcagctcctcaagaccgctctcaaggccccttcactcgagtgtacagtggcgtgcttcgaaactgaggacggcgagtactctgtgtgccagcggagctacagcaattgttctcggctgatgccctcacggtgtaacacccagtaccgggacccaggcgctgtggacctagaaaaggtggcaaatgtcattgtggaccactctctgcaggactgtgtgttttcaaaagaggcaggtagaatgtgttatgctattattcaggccgaaagcaagcaagcaggtcaaagcgtttttcggcgtggactcctaaatcgcctgcaacaggagtaccaggctcgcgaacagctgcgggctcggtccttacagggttgggtgtgttacgtcacatttatctgcaacatattcgactacctacgcgtgaataacatgcctatgatggccttagtgaaccccgtgtacgattgcctgttcagactggcacagccggatagccttagtaaggaagaggaggtcgactgtctcgtcctgcagctacaccgagtgggagagcagctggagaagatgaatggccagcggatggacgagctcttcgtcttaatacgggatggcttccttttgccaaccggtttgtcctctctggcccagctgctactcctggagatcattgagtttcgggctgcaggatggaagactacccccgctgctcacaagtactactactctgaggtgagtgactag

SEQ ID NO: 230607 - DNA, 1164 bp, synthetic construct
  misc_feature 1..1164: note = Description of Artificial Sequence: Synthetic coding sequence
  source 1..1164: mol_type = other DNA
atgccgaggccaagattgctggctgcactgtgcggagctctcctctgtgccccttcacttttggttgccctggacatatgctctaaaaatccctgtcacaatgggggactgtgtgaggaaatcagtcaggaagttcggggagatgtctttcctagctacacttgcacctgcctcaagggctatgctggcaatcactgtgaaacgaagtgtgttgagcccctcgggctggaaaatggaaatatcgccaattcccagatcgccgcaagcagcgtgcgagtcacattccttggcttgcagcattgggttcccgagcttgctaggctgaatagagcaggtatggtcaacgcctggacaccatccagcaatgatgataacccctggattcaggttaatctgctgcgacggatgtgggttacaggcgtcgtcacccaaggagcttcacgtttggcctcccatgagtatctcaaggccttcaaggttgcctactcactgaacggccacgagttcgattttattcatgatgtgaacaaaaagcataaggaattcgtggggaactggaataaaaatgctgtccacgtcaaccttttcgagactccagtggaagcgcaatatgtcaggctttatccaactagttgtcatacagcttgcacacttagatttgaacttctcggctgtgagctgaatgggtgcgcgaaccccctcggcttgaaaaacaatagcattccggataagcaaatcacagcctcaagctcctacaagacatggggtctgcatttgttctcttggaatcctagttatgccaggttggataaacaggggaatttcaacgcttgggttgcagggtcctatgggaacgaccaatggctgcaagtcgatctgggtagcagcaaggaggtcaccgggattataacacaaggggcacgcaattttggcagtgtgcagttcgtggcctcatacaaagtcgcatatagtaacgattcagctaactggacggagtaccaagacccacgcacaggtagtagtaagatctttcctgggaactgggataaccatagccataagaaaaacctgtttgaaacccccatcttagctcggtacgtgagaatattgccagtggcatggcacaacagaatcgcactccggctggaattactaggctgctag

SEQ ID NO: 230608 - DNA, 1140 bp, synthetic construct
  misc_feature 1..1140: note = Description of Artificial Sequence: Synthetic coding sequence
  source 1..1140: mol_type = other DNA
atgtggcctttcccagagggcggtaatacgattccgattctgcacactgacatctgcagtaaaaacccctgccataatgggggactctgcgaagagatctcccaggaggttcggggtgacgtgttcccctcctatacctgcacctgtctgaagggctatgccggaaatcactgtgaaactaagtgtgttgaacccctgggactggagaatgggaacattgcgaattctcagatagccgcaagcagcgtgcgtgtgactttccttggccttcagcactgggtccccgagctggccaggctgaaccgagctgggatggtaaacgcctggacaccatcatccaacgacgacaacccctggatacaggtgaatttactgcggaggatgtgggtaaccggcgtagttacacagggggcttccagactggcttctcacgaatatctcaaagcattcaaagtagcgtactctttaaacggccacgaattcgattttatacacgacgtgaacaaaaagcacaaggaatttgttggaaactggaataagaacgctgtacatgtgaatctgtttgagacacctgtagaggcccaatacgtgaggctataccccacgtcatgtcacactgcctgcaccctcagatttgagctcctgggttgtgagctgaacggctgtgcgaatcccctgggcttgaagaataacagcatccccgataagcagatcaccgcctcatcatcttacaagacttggggcctgcacctattctcttggaaccctagttatgcacgcctggataagcagggcaattttaatgcttgggtggctggctcttatggaaatgaccagtggctccaggtggatctggggagcagcaaggaggtcacagggataatcacccagggcgctcgcaattttggatcagtgcaattcgtcgcgtcttataaagtggcttattccaatgactctgcaaactggaccgaataccaagatcccagaactgggagcagtaaaatctttcccggaaattgggataaccactcccacaaaaagaacctgtttgagactcccatcctggcccgatacgtgcgaatcctgccggttgcatggcataaccgaattgcacttcggctggaactgttgggctgttag

SEQ ID NO: 230609 - DNA, 1008 bp, synthetic construct
  misc_feature 1..1008: note = Description of Artificial Sequence: Synthetic coding sequence
  source 1..1008: mol_type = other DNA
atgccacgacctagattactagcagcactatgcggggctctgctgtgcgctccaagcctgctggtggcactcgatatctgtagtaagaacccatgtcataacggcggactatgtgaggagatcagtcaggaagtgcggggagatgtgttcccttcttatacatgcacttgtctcaaaggatacgctggaaaccactgcgagaccaaatgcgtcgagcctttaggtctggagaacggaaatatcgcaaatagccagatcgccgcatccagcgtccgcgtgacctttcttgggctacagcattgggtcccagaactggccaggctgaaccgggcaggtatggtaaacgcgtggactcccagcagcaacgacgacaatccatggatccaagtcaatctgctcagaaggatgtgggtgaccggagtggttacacagggcgcttcacggttggcctcccacgaatatctaaaggccttcaaggtggcttactccctgaatggtcacgaattcgattttattcatgatgtcaacaaaaaacacaaggagttcgtgggaaactggaataagaatgcggtgcacgtgaatcttttcgaaaccccagtggaggcgcagtacgtgcgcctgtacccgacctcctgccataccgcctgcactctccgattcgagctactggggtgcgaactgaatggttgcgccaaccctctcggtctgaaaaacaatagcattcccgataaacagattaccgcctccagctcatacaagacgtggggtttgcatctgttttcttggaatccgtcatacgcccgattggacaaacagggaaattttaatgcttgggtagcaggctcctatggtaatgaccagtggttgcagatatttcctggcaattgggataaccattcccacaaaaagaatctgttcgaaacacctatcctggcaaggtacgtgagaattctgccagtggcatggcacaacagaattgctctgaggcttgaactgctgggctgctag

SEQ ID NO: 230610 - DNA, 1929 bp, synthetic construct
  misc_feature 1..1929: note = Description of Artificial Sequence: Synthetic coding sequence
  source 1..1929: mol_type = other DNA
atgccctgcggagaagactggctgagtcaccccctggggatagtgcagggcttcttcgctcagaacggggtgaaccccgattgggagaagaaggtgattgagtatttcaaggagaaactgaaagagaataacgctccaaagtgggtgcccagtctcaatgaagtgccattgcactacctcaaaccaaatagtttcgttaaattccgctgtatgatacaggatatgttcgatcccgagttctatatgggcgtttatgagaccgttaaccagaacacaaaagcgcatgtcctacactttggcaagtatcgagacgtcgcagaatgcggtcctcagcaggaactggatctcaacagcccccgtaacacaacgctggaacgacagaccttttattgcgtgcctgtgccgggtgagtccacctgggttaaggaggcctacgtgaatgctaaccaggccagagtcagtccgagcacctcctatactccttcacggcataagagaagctacgaagacgacgatgacatggatttgcagcctaacaagcagaaggatcagcatgcaggagccagacaggctgggtcggtggggggtttgcaatggtgtggagagccgaagagactggaaaccgaggcatcgacaggacagcagctgaatagtctaaatctgtctagcccttttgacctcaactttccgttgccaggtgagaaaggacctgcctgtcttgtgaaggtttacgaagattgggactgctttaaagtgaacgatatccttgagctctacggaatcctatctgtcgaccccgtgctcagcatcctcaataacgacgaaagagacgcatcagccctgctggaccccatggaatgcactgatactgcagaagaacagagagtgcactccccacccgcttccctcgtccccagaattcatgtcattctcgcgcaaaagctgcagcacatcaaccctctgctgccggcatgcctgaacaaagaagagtcgaagacatgtaagtttgtttccagcttcatgtccgaattatctcctgtccgggcagaattattgggctttctgacccatgcacttttgggcgactcattagctgccgagtacttaatcctgcacctgatttcaacggtatatactagacgggacgtgctcccactgggcaagtttaccgtgaatctctcaggttgcccacgaaactcaacctttaccgagcacctttacaggattatccagcatcttgtgcctgcgagctttaggctccagatgaccatcgagaacatgaaccacctcaagttcatccctcataaggattatactgctaatcggctcgtgtcaggccttttgcaattgccgtccaataccagtttagttattgatgagacgcttctggaacagggccaacttgacactcctggtgttcacaacgttactgcactctctaatcttattacatggcagaaagttgattatgactttagctaccaccagatggagttcccatgtaatattaatgtgttcattacttccgagggtcgctccctgctgccggcagactgtcagattcacctgcagcctcagctgatacccccaaacatggaagagtatatgaactctttattatcagccgtgctgccgagcgttctaaataaattccgaatttacctgacactgctaaggttcctggagtacagcatttctgacgagatcaccaaagctgtggaggatgattttgtcgagatgaggaaaaacgacccacagagcattacggcagacgacctgcaccagcttttggtcgtcgcccgttgtctgtccttgagcgccggtcagacaaccctgagcagggaacggtggctgcgggcaaagcagctggagagcctcaggaggacgcgtcttcaacagcagaagtgcgtaaacggaaacgagctttag

SEQ ID NO: 230611 - DNA, 1923 bp, synthetic construct
  misc_feature 1..1923: note = Description of Artificial Sequence: Synthetic coding sequence
  source 1..1923: mol_type = other DNA
atgccatgcggggaggattggttgtcccaccctctgggaattgtacaaggtttcttcgcccaaaatggcgttaaccccgactgggaaaagaaagtgatagagtactttaaggaaaagctgaaggagaacaacgcccctaaatgggtgccctcgcttaacgaagttcctctgcattacttaaaaccaaattcatttgtgaagttcagatgtatgattcaagacatgttcgatcccgaattttatatgggagtctatgaaaccgttaaccagaataccaaagcacatgtgctgcacttcggaaaataccgcgatgttgctgagtgtggtcctcaacaggagctggacctgaactctcctcggaacactactttggagcgccagaccttttactgcgtacccgttcccggagagtctacttgggtgaaggaagcttatgtgaatgcaaatcaggctagagtttcaccgtcaacctcatacacgccctccagacacaagcgctcttacgaagacgatgatgatatggatctccagccaaataagcaaaaggatcagcacgcaggtgctcgccaggccggatcagtgggtggattgcagtggtgcggagagccaaagcggctggagacagaagcctcaaccggacagcaattgaattctctcaacctatcttcacccttcgacctcaattttccgctccccggagagaaggggccagcctgccttgtaaaggtgtacgaagattgggattgcttcaaggtgaacgatattctcgaactttacgggatactgagtgtggatcccgttctctccattttgaataatgacgagagggatgcttcagctctattggacccgatggagtgtactgatacagctgaagagcaacgagtccacagcccccctgcctctctggtgccgagaattcatgttatcctcgcccaaaagctccagcatatcaatccactcctgccggcttgcctgaataaggaagagagtaaaacttttgtgtcttcgtttatgagcgaactgtcacctgtccgggcagaactcctggggttccttactcacgcattgcttggagattcactggccgctgaatatcttattctgcacttaatctcaaccgtgtacacacgcagagacgtcctgccactagggaaatttacagttaatctatccgggtgcccacggaactctacatttacagaacatctctatcgaataattcaacatctcgtgccggcatcttttcgactgcagatgactatcgagaacatgaatcatcttaagttcatcccccataaagattacacagcgaaccgactagtgagtggcctgctgcagctgcccagtaacacttccctcgttatagatgagacgcttttagaacaaggacagctggacaccccgggtgtccacaatgtgaccgcactttccaatctgatcacatggcagaaagttgactacgatttctcttaccaccagatggaatttccatgcaacatcaacgtatttataacatctgaaggccgtagcctattgcccgcagactgtcaaatccatttgcagccccagctcattccccctaatatggaagagtacatgaacagtttactctctgctgtgctgccatccgtcttgaacaagttccggatttacctgaccctgctaagatttctcgagtatagcatcagtgacgaaattactaaagccgttgaggacgacttcgtggaaatgaggaagaacgacccacaatctataactgccgacgatttgcatcagttactcgtggtcgctcgatgtctcagtctgtcagcaggccagacaactctgtccagagagagatggttgcgggctaaacagctcgagtctctccgcagaaccagactccagcagcaaaagtgcgtcaatggcaatgagctttag

SEQ ID NO: 230612 - DNA, 2628 bp, synthetic construct
  misc_feature 1..2628: note = Description of Artificial Sequence: Synthetic coding sequence
  source 1..2628: mol_type = other DNA
atggacgaggaggaagacaatctttcattgctcacagccttgctcgaagagaacgagtccgctcttgactgcaatagcgaagaaaacaattttctgacgcgcgagaatggcgagcccgacgcctttgatgaactgttcgatgctgatggggatggagagtcttataccgaggaagcagacgacggagagacaggcgagacaagggacgagaaagaaaacctcgcgaccctcttcggggacatggaggatctgacagacgaggaggaggtgcctgcatcccagagtacagaaaaccgggtcctgcccgctcccgcacccagaagagagaagactaatgaagagctccaggaggaactgagaaacctgcaggagcagatgaaggccttacaagaacaattgaaagtcacgactatcaaacaaactgcctctcccgcacggctccagaaaagcccggtggagaaatcaccaagacctccactgaaagaacgacgggttcagcggatacaggagagcacttgcttttcggccgagttagacgtcccagccctgcccagaacaaaaagggtcgccaggacccccaaagcatcacctccggatccgaaaagtagttcctcccgaatgacctctgccccaagccagcccctccagacaatctccaggaataagccgtctggcatcacaagaggccagatcgtcggcactcccggatcttctggcgaaactacgcagcccatatgcgtggaggctttctcagggcttcggctgagacgtccgagggtgtcctccaccgaaatgaacaaaaaaatgacaggacgcaaactgattagattgtctcagataaaggagaagatggcacgggaaaaattagaggagatcgactgggtgacatttggagtgatcctgaagaaggtgacccctcagtcagtgaactccggaaagacctttagcatatggaagctgaacgatctgagagacctgacccagtgtgtctcactgtttttgttcggagaagtgcacaaggccctgtggaagaccgagcagggaaccgttgtcggtattttgaacgccaacccaatgaagcctaaggatggctcggaagaagtttgtctgtcaattgaccacccccaaaaagtcctcatcatgggtgaggcactcgatttggggacctgcaaggccaaaaagaagaatggagaaccttgcacacagacagtgaacctcagagattgcgaatactgccagtaccatgtccaagcccagtacaagaaactgtccgctaagagagccgacctgcagagcaccttttccggaggtagaataccaaagaaattcgcgcgaagaggtacctcattgaaagagcggctgtgtcaggatgggttctactatggaggggtcagttccgcgtcttacgctgcctctattgctgccgctgtcgccccaaaaaaaaaaatccagacgactcttagtaacctcgtggtcaagggcacaaacctcatcatccaggagactcgccagaagctcggaattcctcagaagagcttgtcctgcagtgaagagttcaaggaactgatggacctaccaacttgcggtgctcggaacttgaaacagcaccttgccaaggctactgcatctggtatcatgggcagccccaaacccgctattaagtctattagtgcatccgccctgctgaagcagcagaagcagagaatgctcgagatgcgaagaagaaagtccgaggaaatccagaaacggttcctccaatctagctcagaggtcgagagccccgcagtcccttccagcagccggcagcctccagcacagccccctaggaccgggagcgagtttcccagactcgagggcgctcccgcaacaatgactccaaaacttgggaggggtgtcctcgaaggcgatgatgtcctgttctacgatgagtctccacctcctcggcctaaattgagcgctcttgccgaggccaaaaaactcgcagctataactaaattgcgggctaaggggcaggtcctgactaagacaaaccccaatagcataaaaaagaaacagaaggacccacaagatattttggaagtaaaggagagggtcgaaaagaatacaatgttcagctcgcaagccgaggacgagcttgagcctgccaggaaaaaaagaagagagcagctggcctacctcgagtccgaggaatttcagaagatactgaaggccaaatctaaacataccggcatcttaaaggaggcggaggcagagatgcaggaaagatacttcgaacccctcgttaagaaggaacagatggaagagaagatgcgaaatattcgtgaggtaaaatgtagagttgtcacttgtaagacctgtgcgtacacacatttcaaactgctggagacctgtgttagtgagcagcacgagtatcactggcacgatggcgttaaaagattcttcaaatgcccctgcggcaaccgtagcatctcccttgatcgactgccaaataaacactgcagtaattgcggactttacaagtgggaaagggatggcatgttgaaagagaaaactggccctaagatcggaggtgaaactctgttacctcggggagaggagcacgccaagttcctgaatagtctgaagtag

SEQ ID NO: 230613 - DNA, 2568 bp, synthetic construct
  misc_feature 1..2568: note = Description of Artificial Sequence: Synthetic coding sequence
  source 1..2568: mol_type = other DNA
atggacgaagaagaagataatctgtctctgctgacggccctactggaggagaacgagtctgcccttgactgcaattctgaagaaaataattttctgactagagaaaacggcgagcctgatgctttcgacgaactgtttgatgccgacggtgacggagagtcgtacaccgaagaggccgacgacggcgagacgggagagactcgcgacgagaaagagaacctggctacgctgttcggcgacatggaggaccttaccgacgaggaggaagtgcccgcaagtcaatcaacggaaaatagggtgctcccagccccagcgcctcggagggagaagacaaacgaggaactgcaggaggagctcagaaatttgcaagaacagatgaaagccctccaagagcagctgaaggtaactactatcaaacagacagcgagccccgctaggttacaaaaaagccctgagaagtcccccaggccgccactgaaagagagaagggtgcaacgcattcaggagtctacatgcttctccgctgagttagacgtgcccgctttgccacggaccaagagagtcgctagaacccctaaggcaagtccacctgacccaaaaagcagcagtagtaggatgacaagtgctccttcccaaccactccaaactatcagccgcaacaagccatccggcattacaaggggccagatcgtcggcactcccggtagcagcggggaaacaacccaacctatctgtgtagaggcattcagtggactgcgactgcggagacccagggttagtagtaccgaaatgaacaagaagatgaccgggaggaagttaatacgtctctcccagattaaggaaaagatggcacgcgagaaattggaggagatcgactgggtcaccttcggggtcatcctgaagaaggtgacaccgcagagcgtcaactccggaaaaacattttccatctggaaacttaatgatctcagggacctgacgcagtgcgtatcattgttcctttttggcgaagttcacaaagcactgtggaagacagaacagggaacagtagtagggattctgaacgcgaacccaatgaagcccaaagacggaagtgaggaagtgtgtctgtctatagaccacccccagaaagtgctgattatgggggaagcactggaccttggcacttgcaaggcaaagaaaaaaaacggagaaccatgcacacagacggtgaacctgcgcgattgtgagtattgtcaataccacgtgcaggcccagtacaagaaactgagcgcaaagcgtgctgacctccagagcactttcagtggcggtcggatccctaaaaaatttgctaggcggggtacctcgcttaaggaacgattatgccaggatggcttttactatggaggtgtatcctcagcctcgtacgcggcaagcatagccgcagccgtcgccccaaagaaaaagatacagactacgctcagcaacctcgtggtgaaggggaccaatttaatcattcaggagacccgtcagaagctgggaatcccccagaagtcgctatcatgttctgaggagtttaaagaactgatggatttgcctacctgcggagcaagaaacctcaagcagcatttggctaaggctacggcttctggaatcatgggctctccgaagcccgcaatcaagagtataagcgctagcgcgctcctgaaacagcaaaagcagcgcatgctggaaatgcgccgaagaaagtccgaagaaattcagaaacggtttctgcagagttcttctgaggttgagagtccagctgtacctagtagctcgcggcagccacccgctcagccacctcgcactggttccgaatttccgaggcttgagggggcaccagctacaatgacacctaaacttggccgaggagtgctggagggcgatgatgtcctgttctacgacgagtcccccccacctcggcctaagctcagcgcactagccgaggccaagaaattggcagccattaccaagctgagagccaaggggcaggtgttgaccaagactaatcctaactcgataaaaaaaaaacagaaggatccacaggatatcctggaggtcaaagagcgcgtcgagaagaacaccatgttttccagtcaagctgaggatgagctggagccagccagaaaaaagaggcgtgagcagctggcttacctcgagtctgaagagttccagaaaatactcaaagcaaaatctaagcacacaggcatcttgaaagaggccgaggcagagatgcaagagcggtattttgagccccttgttaagaaagaacagatggaagagaaaatgcgcaacattagggaggttaagtgcagagtggtaacgtgtaaaacatgtgcctacacgcacttcaagctgctcgaaacatgcgtgagtgagcagcacgagtatcattggcacgatggcgtgaaaagatttttcaaatgtccatgcggcaaccgcagcatatcactggatcggttgcctaataaacattgcagcaactgtggtctctacaagtgggagcgcgatggaatgttgaaggtgtgtcacctgcgtacaaatttctag

SEQ ID NO: 230614 - DNA, 2625 bp, synthetic construct
  misc_feature 1..2625: note = Description of Artificial Sequence: Synthetic coding sequence
  source 1..2625: mol_type = other DNA
atggatgaagaagaggacaatctctccctgctaaccgcgcttctcgaggagaatgagtctgccttggactgcaacagcgaggagaacaattttctgactagagagaatggcgagcctgacgcctttgatgaactgtttgatgctgacggagatggagaatcgtatacggaggaagcggacgatggggagacgggtgaaacccgtgatgagaaggagaacctcgcaacactgtttggggacatggaagatctgacagatgaagaggaggtgcccgctagtcagtcaactgaaaacagagtgctgccagccccagccccacggcgagagaagacaaatgaggagttacaggaagagctcagaaatctgcaggagcagatgaaagccctccaggagcaactaaaggtgaccactatcaagcaaacagcctctccagctcggctgcaaaaaagccccgagaaaagcccacgcccacccctcaaggagcgccgagtccagagaattcaagagtccacctgcttctcggcagagcttgatgtcccggcactccccagaactaagcgggttgccaggacaccgaaggcctcaccaccagaccctaagtcatcgtcctcaaggatgacgtccgctccatcccaacccttgcagacaatcagccggaacaagccttctgggatcactcgcggacaaattgtaggtacacccggttcttcgggagagactacacagcccatctgcgtggaagccttctcgggtttgaggctgcgtcgcccacgggtcagttctaccgagatgaataaaaagatgactgggaggaagcttatccggctgagccaaatcaaggaaaagatggccagggaaaagttggaagagattgattgggtcacatttggggtcatcttaaagaaggtgaccccgcaaagtgtgaattcgggcaaaaccttcagtatttggaaattaaatgacctcagagacttgacacagtgcgtgtctctcttcttatttggtgaggtccacaaggcactctggaaaaccgagcaaggcactgtggtaggcattctcaacgccaaccccatgaagcctaaggacggctccgaggaagtttgcttaagcatcgaccaccctcagaaggtgctcatcatgggggaggccctcgacctgggaacatgcaaggcaaaaaaaaaaaacggtgagccgtgcacccagacagtaaatctgcgagattgcgagtattgccaatatcatgttcaggcccaatataagaagctgagcgccaaacgggctgaccttcagtccaccttctctggaggcagaatccccaagaagtttgctagaaggggaacctctttgaaagaacgcctatgccaagacggattttactacggaggagtgtcatcagcatcttacgccgcatctattgctgccgctgtcgcccctaaaaaaaagatccagacaaccctgtccaatctggtggtgaagggcactaacctcataatccaagagacacggcaaaagctggggattccacagaagtcattatcttgttccgaagagttcaaggagttaatggacctgcccacttgtggagcaaggaaccttaaacagcacttagctaaagcaactgcgagcggaataatggggtcccccaagcctgccataaaaagtatctccgctagcgccctcctgaagcagcagaagcagcgtatgctggaaatgcggagaaggaagtctgaggaaatccagaagaggttccttcagtctagttctgaagttgagtcccctgccgtgccaagctcttcaaggcagcctcccgcacagccaccacgcactggctcggagttccccagactagagggagcaccggctactatgactcccaagctggggcgtggtgtcctggagggagacgacgtgctcttctatgacgaatctcccccacctcgtcctaagctaagtgcactggcagaagccaaaaagttggcagctatcactaagctgagagccaagggtcaggtgctgacaaaaactaacccaaactcaataaaaaaaaaacagaaggacccacaagatattctcgaggtgaaagaacgggtggagaaaaatacaatgtttagctctcaggctgaagacgaactggagcccgcaagaaaaaagaggagagaacagctcgcttacttagaatccgaggagttccagaagattttgaaggccaagtccaagcatactgggatcctgaaagaggcagaggccgaaatgcaggaacgttacttcgaacccctggtgaaaaaagaacagatggaggagaagatgaggaacatcagagaagtcaaatgtcgggtcgtgacctgtaagacctgtgcctacacacactttaagctgctagagacatgtgtgagcgagcagcacgagtatcattggcacgatggcgtgaagcgtttcttcaagtgcccctgtggtaaccggagcataagtctggaccggctgccaaataagcattgtagcaattgcggcttgtacaaatgggagcgagacggaatgctgaaggagaaaaccggtcctaagattggtggcgagaccttgcttccccgtggagaggaacatgccaagtttctgaattccctgaaatag

SEQ ID NO: 230615 - DNA, 2628 bp, synthetic construct
  misc_feature 1..2628: note = Description of Artificial Sequence: Synthetic coding sequence
  source 1..2628: mol_type = other DNA
atggacgaagaggaggacaacctgtctttactgacagccctgcttgaggaaaacgaatctgccctggactgcaactctgaggaaaataactttctgactcgtgagaacggggaacccgacgcttttgacgagctgttcgacgccgacggagatggcgagtcttatacagaagaagccgacgatggtgaaacgggagagactcgggatgaaaaagagaacctggccacattatttggcgatatggaggatctgaccgatgaagaggaggttcctgcgtcacagagcaccgagaacagagtgttacccgcacccgctcccaggagggaaaagacgaacgaagaactgcaggaggagctccggaacctgcaggaacagatgaaggcgttgcaggagcagctgaaggttacgactataaaacagaccgcctctccagcacggctgcagaagtcccctgtcgagaaaagtcccagacctccactcaaagagcgcagggtccagagaatccaagaatctacatgcttctccgccgaactcgacgtgccggcacttcctcgcaccaaaagagtggctaggactccaaaagcttctccgccagaccccaagagctcctcatcgcgaatgacttctgctccttcacagccattgcagaccatctctagaaacaagccatccggcattacccgtggtcagatagtgggcactcccggatcatccggcgagaccacacaacccatctgtgttgaggcattttcgggtctccgactgcggaggcctcgcgtttcaagcaccgagatgaacaagaagatgaccggaaggaaactgattcggctgtctcagatcaaagagaagatggctcgcgagaagctggaagaaatagattgggtgacctttggggtgatcctcaagaaagtgacaccccaatctgtgaattcagggaaaaccttcagcatttggaagctgaatgacctcagagacctgacccaatgtgtgagcctgttcctgtttggcgaggtacacaaggcactctggaagactgagcagggtaccgtggtcggcatcctgaacgctaacccgatgaaacctaaggacggtagcgaggaagtctgtctctctatcgatcatccccagaaagtgctcatcatgggcgaggccctcgatctcggcacctgcaaggccaagaaaaagaacggcgaaccgtgcactcagaccgtgaatttgagagactgtgaatactgtcagtatcacgtgcaggcacagtacaagaaattatccgctaaacgggcagacctccagtcaactttctccgggggacgtatacctaagaagttcgctaggcgcggtacttcattgaaagagcggctgtgtcaggatggtttctattacggaggagtgagtagcgcctcatatgcggctagcattgccgcagcggtggcaccaaaaaagaagatccagacaacgctgtctaacttagtggttaaaggcacaaatttgatcatacaggaaaccaggcaaaagctcgggatccctcagaagtcactctcatgctccgaggaattcaaggagctgatggacttgccgacctgtggcgcacggaatctgaagcagcatctggccaaggcgacagcctccggcataatgggcagcccaaaaccggcaatcaagagtatctccgcctctgcattgctcaagcagcaaaaacaacgcatgctggagatgcgtagaagaaagagcgaggagatccagaaacggtttcttcagtcctcctcagaagtcgaatccccggctgtgccttcctcaagcagacagcctccagcgcagccaccacgcaccgggtctgaatttccgcgacttgagggtgcacccgctaccatgacccctaaacttggcagaggcgtgctagaaggtgacgatgtcttgttctacgatgagtctcccccacccagacccaagttgagcgctcttgccgaagcaaagaagcttgccgctattacgaagttacgggctaagggtcaggtgttgacgaaaacaaaccccaacagcataaagaagaagcagaaagaccctcaggatattctagaagttaaggagagagtggagaagaacactatgttcagctcacaggccgaagatgaacttgagccggcacggaaaaaacgacgagaacagcttgcttatctggaatcagaggagtttcagaaaattctgaaagctaagagtaagcatacgggaatcctgaaagaggccgaggccgaaatgcaagagcggtattttgaacccctggtgaagaaggagcagatggaggagaagatgcgaaacatacgggaagttaaatgccgagttgtgacctgtaagacatgcgcttacacacattttaaattacttgagacctgcgtgtctgagcagcacgaataccattggcatgacggcgtcaagcgtttcttcaagtgtccctgtgggaatcggagtatcagcctcgaccgcttgcctaataaacactgtagcaactgtgggctttataagtgggagcgtgatggcatgcttaaagagaagaccgggcctaagattggtggcgaaacgttgctgcccaggggcgaggagcatgctaaattcctaaactctctgaagtag

SEQ ID NO: 230616 - DNA, 2466 bp, synthetic construct
  misc_feature 1..2466: note = Description of Artificial Sequence: Synthetic coding sequence
  source 1..2466: mol_type = other DNA
atggatctggctgcagcagcagagcccggagcaggctcacaacatctggaggtgcgcgacgaggttgctgaaaagtgtcagaagctctttcttgacttcctggaggagtttcaatcatctgatggagagattaagtaccttcaacttgccgaagagttaatccgaccagagaggaacactctcgtggtttctttcgtcgatctggaacaatttaatcagcagctcagtactaccatacaagaggagttctaccgtgtgtacccatatctgtgccgtgctcttaagactttcgtcaaggataggaaggaaattccccttgcaaaggatttctatgtagctttccaggatttacccactagacacaaaattcgagaactgacaagctctagaatcggcttactaacccgtatctccgggcaggtcgtgcgtactcaccccgtgcatccggaactagtctctggtacatttctttgtctggattgtcagaccgtgatacgcgatgtagagcaacaatttaaatatacacagccaaatatatgtcgcaaccctgtatgtgctaacaggcggcgtttcctgttagatactaacaagtctagatttgtagacttccagaaagtgagaatccaggaaactcaggccgagctaccaagagggtccatacccagaagcttagaggtaattttgcgcgcagaggctgtcgaaagtgcccaagcgggtgataagtgtgactttaccggaactctgatagtcgtgcccgatgtttcaaagttgtccactccaggtgctcgggctgagactaactcccgggtttccggagttgacggctatgaaacggaagggattcggggactacgcgcactgggcgtgcgggacctgagctatcggctcgtgttcctggcttgttgcgtcgctcccacaaatccacgttttggcggaaaggaactgagggacgaggagcagacagccgagtctatcaagaaccaaatgactgttaaagagtgggagaaggtcttcgagatgtcccaggacaagaacttataccacaacctctgtacgtccctgtttccaactatccatgggaatgacgaggtgaagcgaggcgtcctcctgatgctgttcggtggagtcccaaagaccactggagagggaacctccctgaggggggatattaatgtgtgcatcgtgggcgacccatccaccgccaaaagccaattcctcaaacatgtagaggaattctccccgcgagcagtatacactagtggcaaagcaagctcagccgcagggctcactgctgccgtcgtgagggacgaagagagtcatgaattcgttattgaagctggcgcattgatgttggctgacaacggagtttgctgcatcgatgaattcgacaagatggacgttagggatcaggtggctatccacgaagccatggagcagcagacaatctccatcaccaaagcaggcgtgaaggccacgctcaacgcgaggacaagcattcttgccgctgcaaatccaatcagtgggcattatgataggtctaagtcacttaagcagaacatcaatctgagcgctcccatcatgtctcgcttcgatctcttctttatcctcgtggacgagtgtaacgaggtgaccgactatgcaatcgcacggcgtatcgttgatttgcacagtcgaattgaggaatccattgaccgtgtgtactcactggatgacatacgaagataccttctgttcgcgagacagtttaagccaaagatttcaaaagagagcgaagacttcattgtagagcaatacaagcaccttcggcaacgtgacgggagcggcgtgactaagtcgagctggcgcatcaccgtgcgacaattggagagcatgatccgtctaagcgaggctatggctcgcatgcactgctgcgacgaagtgcagcctaagcacgtgaaggaggcgtttaggcttctgaacaagtctatcattagagtcgaaacccccgatgtcaatctggatcaggaggaagaaattcagatggaggtggatgaaggtgctggtggtatcaacggccacgctgatagccctgcacctgttaacgggatcaacggttacaatgaggacataaaccaggaaagcgctcctaaggctagtctcagactcgggttctcagagtactgtcgcatatctaatcttattgtgctccacctccgaaaagtggaagaggaagaggacgagagcgcccttaagcgctccgagctggtgaactggtatctaaaggaaattgagtctgagatcgacagtgaagaagagctgataaacaagaagagaattatagaaaaggtaatccatagactcacgcactacgaccacgttctgatcgagcttacccaggcaggcttgaaagggtctacagaaggaagtgaatcatatgaagaggacccctatctcgtcgttaatccaaactacctgcttgaagactag

SEQ ID NO: 230617 - DNA, 2160 bp, synthetic construct
  misc_feature 1..2160: note = Description of Artificial Sequence: Synthetic coding sequence
  source 1..2160: mol_type = other DNA
atggccctgaaagactatgcactggagaaggaaaaggtgaaaaagttcctgcaggagttctaccaggacgacgaattgggtaagaaacagttcaagtacggcaatcagctggtgagattggcccatcgagaacaggtggccctgtatgtggatctggacgatgtggccgaagatgacccggagctggttgactctatttgcgagaatgctagacgttatgctaaactcttcgctgacgctgtgcaagagcttttgcctcaatacaaagagagggaagtggttaataaggacgtactggacgtgtatatcgagcaccggctcatgatggaacagcggtcaagagaccctgggatggtaaggagtccccagaatcaatatcctgcagagctcatgcgcaggttcgaattatactttcaggggccttccagtaataaaccacgcgttatccgcgaggtgcgagcagattcggtcggaaaactggtgactgtccgcggaattgtgacaagagtgagcgaggtgaagccgaaaatggtcgtcgcgacttatacctgcgatcaatgtggagcagaaacataccagccaatccagtccccaacatttatgcctctgataatgtgtcctagccaggaatgccagacgaaccgcagcggcggtcgcctttacttgcagaccagggggtccaggtttattaagtttcaggaaatgaaaatgcaggaacactctgatcaggtcccagtcggcaacatcccccgatcaattactgtgctcgtggagggcgaaaacactcgaattgcgcagcccggagaccacgtctctgtgaccggtatcttcttaccgattctgaggaccggctttaggcaggtcgtgcaaggactgctgagtgagacttacctcgaagcccaccggatagtgaagatgaataagtctgaagacgatgagtctggagccggagaacttacgagggaagagctgcggcagatagccgaagaggatttctacgagaagctggccgcttcaatcgctccggaaatctacggccacgaggacgtaaagaaagctttactgttgttacttgtggggggtgtggaccagtcccccaggggcatgaagattcgcggaaacattaatatatgtctgatgggcgatcccggagtggccaaatcccagcttttatcatatatcgatcgccttgctccacgatcccagtatacaactggacgaggctcttccggagttggcttgaccgcagcagttttgcgcgattctgtgagcggggagctcacattagaggggggagctctcgttctggccgatcagggcgtgtgctgtatagacgagtttgataagatggccgaagcggaccggaccgcgatccatgaggtgatggagcagcaaacgatctcaatcgcaaaagccggtatacttaccactctcaacgcacgctgtagtatcctggccgctgccaatcccgcttatggaagatataatccaaggagaagcttggagcagaacattcagctaccagctgccctactgtcccggtttgatctcctgtggcttatacaggaccgcccagatcgcgacaacgatctcaggctggcccaacacattacctatgttcatcagcactctagacagcccccaagccaattcgagcctttagacatgaaattgatgcgtagatatattgccatgtgcagggagaaacagcctatggtgccggaatctctcgctgattatataaccgccgcttacgtagaaatgcgtagggaggcatgggcatccaaagatgccacatatacaagtgcgagaactctgttggcaatcctgcggctttcaactgccctcgccagactcagaatggtcgatgtcgtcgagaaggaggacgtgaacgaagccattcgcttgatggagatgtctaaggattcactgctcggagataaaggccagaccgcccgtactcagcggccagcagatgtgatttttgcaacagtgcgagagcttgttagcggaggcaggagcgtgcgcttttcagaagccgaacagcgctgtgtgagcaggggattcacaccagcacagtttcaggccgctctcgatgaatacgaagaattgaatgtctggcaggtgaatgcttctcgaactcgcattacctttgtctag

SEQ ID NO: 230618 - DNA, 1170 bp, synthetic construct
  misc_feature 1..1170: note = Description of Artificial Sequence: Synthetic coding sequence
  source 1..1170: mol_type = other DNA
atggccctgaaggactacgcattggagaaagagaaggtcaagaaatttctgcaagagttttatcaggatgacgagctgggaaagaagcagtttaagtacgggaaccagctggttaggcttgctcacagggagcaggttgccctttatgtagaccttgatgacgttgcagaggacgatcccgaactggtggacagcatttgtgagaatgctagacggtacgctaagctgttcgcagacgccgtgcaggaactcttaccgcaatacaaggagagggaggtggtgaataaggatgtgctggatgtgtatatagagcatcgcctaatgatggaacagcggagccgcgacccgggaatggtccggtcacctcaaaaccagtatcccgcagaattgatgcgtcgctttgagctctattttcagggacctagctcgaacaaacctagggtgattcgggaggtgcgggcagacagtgttgggaagctagtaactgttcggggaatcgtcacaagagtgtccgaagtgaaaccgaaaatggtagtggcaacctacacatgtgaccaatgtggcgctgaaacctaccagccaatccagtcccccacctttatgcctcttatcatgtgccctagccaggagtgccagaccaataggagcggcggacggttgtatctccagacacgaggctcccgatttataaagtttcaggagatgaagatgcaagagcactccgaccaagtacccgtaggtaatatcccaagatcaatcaccgtattggtcgaaggcgaaaacactagaatcgcccagccgggagatcacgtgtccgtgacaggcattttcctccctatcctgcgtactgggttcaggcaagtggtgcagggactgctgtcagagacctacctcgaagcgcaccgtattgtgaagatgaacaaatccgaagacgacgagagtggggcaggtgaactgaccagagaagagcttaggcagattgcggacgttatcttcgctactgtgcgcgagctggttagtggtggccgtagcgttcgattctccgaagcggagcagcgctgcgtgagtcgcggttttacacccgctcagtttcaggctgccctggacgagtatgaggaactcaatgtgtggcaagtgaatgcatccaggacacgtattacctttgtatag

SEQ ID NO: 230619 - DNA, 1632 bp, synthetic construct
  misc_feature 1..1632: note = Description of Artificial Sequence: Synthetic coding sequence
  source 1..1632: mol_type = other DNA
atggtagtggcgacgtacacctgtgatcagtgtggagctgaaacctaccagcctatccagagcccaaccttcatgcctctcatcatgtgcccctcccaggagtgtcaaacaaacagaagcggtgggcgactgtatctccagactcgcggatcccggttcatcaaatttcaagagatgaaaatgcaggagcattcagatcaagttcccgtcggaaatataccaaggagcatcacagtccttgtggagggcgagaacaccagaattgcacaaccaggggatcatgtgtcagttacagggattttcctgcctatactgcggaccgggtttcgtcaggtcgttcagggcctgcttagtgaaacctacctcgaggcacaccggattgtgaagatgaacaagtccgaggacgacgagagtggagcgggagagctcactcgagaagaattgaggcagatcgcagaggaggacttttatgagaagctcgccgcatcaattgcacctgaaatatatggtcatgaggatgtaaagaaggccttgttactgctgttggtgggtggagtcgaccaatctccacgagggatgaagatccggggtaacatcaacatctgtctcatgggggaccctggagtcgccaagtcccaattgctgtcgtatatagatagactggcgcctcggtcacagtataccacggggagaggatctagcggtgttgggctgactgctgctgtgctgagagattctgtctccggtgagttgacactagaaggcggagcactggttctcgccgatcagggcgtctgctgtattgatgaattcgataagatggcagaggcagatcgtactgccattcatgaggttatggaacagcagacgatctccatagcgaaggcagggattctgacaacactgaacgctcgctgctcaattctggccgcagcaaaccctgcgtacgggcgttacaaccccaggagatcattagaacagaacattcagctgccggctgcgctcttgtccagattcgatctgctgtggctcattcaagacaggcccgaccgggacaacgacctacggctggcccagcacattacctacgtccaccagcacagtaggcagccaccctcccagttcgagcctctggacatgaagctaatgcgacggtacatcgcaatgtgcagggagaaacagccgatggtccccgagagcttggcggactacattaccgcggcttacgtggaaatgagaagagaggcttgggcctctaaggatgctacatatacctcggctcggactttactggccatcttaagattgagcaccgctctggccagactgcgcatggtggatgtagtggagaaagaggatgtgaacgaagctattagactcatggagatgtctaaggactccctcctgggggacaagggccaaaccgccaggactcaacggccagccgatgtaatctttgcgaccgttcgcgagcttgtgtctggaggcagaagcgttagattttcagaagccgagcaacgctgcgtctctaggggctttacaccggctcagtttcaagcggctctcgacgagtacgaggagctcaacgtgtggcaagtcaatgcttcaagaactcgtatcaccttcgtgtag

SEQ ID NO: 230620 - DNA, 1839 bp, synthetic construct
  misc_feature 1..1839: note = Description of Artificial Sequence: Synthetic coding sequence
  source 1..1839: mol_type = other DNA
atgatggagcagcgatccagggatccagggatggtgcgctcccctcagaatcagtatcctgccgagctgatgaggcgtttcgagctttacttccagggcccttcctcaaacaagcctcgcgttatacgtgaagtgagggccgattcggtgggcaaactcgtgaccgtaagagggatcgtgactagggtctccgaggttaaacccaaaatggtggtggccacatatacatgcgatcagtgtggcgctgaaacataccagcccatccagtcacccaccttcatgccactgattatgtgcccctcccaagagtgccagacgaaccgttccggtggaagactttacctgcagaccaggggcagcaggttcatcaaattccaggagatgaagatgcaagagcattcagaccaggtgccggtgggaaatattcctagatccattaccgtgctcgttgagggagagaacacacgcattgcccagccaggggaccacgtatctgtgacaggcatctttctaccaatactgaggactggttttcgtcaagtggtgcagggtttgctcagcgaaacctacctggaggcgcacaggatcgtgaaaatgaacaagagtgaggacgacgagtctggcgctggggagctaacccgggaggagctgcggcagattgctgaagaggacttctacgaaaaactggcggcatcaatcgcacccgagatttacggtcatgaggacgtgaaaaaagccctgttactcctgctggtaggcggagtggatcagtccccacgaggtatgaagatccggggaaatatcaatatttgcctcatgggagacccaggagtggcgaaatctcagttattgagttatatcgatagattagcgccaagatcccagtacactacaggaagaggctcttcaggagtcggtctaaccgccgctgtgctccgcgatagcgttagcggcgaactaaccttggagggcggtgctctcgtgttggctgaccaaggagtgtgctgtatcgatgagtttgataaaatggcagaagcagaccgcacagccattcacgaggttatggagcaacagacaatctccatagctaaggcgggtatcctcaccactctgaacgctcggtgttccatcctggccgcagcaaaccccgcttacggcagatacaacccacgcaggtcgctcgagcagaatatccaactcccagctgcactcctttcccgctttgatctcctatggctgatacaggacaggcctgacagggataacgatctacgtcttgcccagcatataacgtacgttcaccagcactctcggcagcctccctctcagtttgagcccctggacatgaaactgatgcgcaggtacattgcaatgtgccgcgagaaacagccaatggtgcctgaatctctagcagattacattactgccgcttacgttgagatgagacgcgaggcatgggcaagtaaagatgccacctacactagcgctaggaccctgctagccatcctgagactctcaaccgccttggccaggctgcgaatggttgatgtcgtggaaaaagaagatgtgaatgaggctatccgcctgatggagatgtcaaaagatagtctcctgggcgataagggccagactgcccgaacacaacgcccagccgacgtgatctttgctactgttagggaattggtgtccggcggacggtccgtcagattctcagaggccgagcagagatgtgtgtcacgaggatttacccctgcccagtttcaggcagccctggacgaatacgaggagctcaacgtttggcaggtgaacgcctctcgcacaaggataacctttgtgtag

SEQ ID NO: 230621 - DNA, 1971 bp, synthetic construct
  misc_feature 1..1971: note = Description of Artificial Sequence: Synthetic coding sequence
  source 1..1971: mol_type = other DNA
atgacacctagttggtggacgcagtttgtccggatgcccggagctacaaggagttcccttctgatgccatactataaggaacgagaggtcgtgaacaaggacgtccttgacgtttacatagagcacaggcttatgatggagcaaaggagcagagatcctggaatggtaagatcacctcagaatcagtaccctgccgagctgatgcggagatttgagttgtactttcagggtccatcctccaataaaccacgggtgatccgggaggtccgagcggatagcgtgggtaaattagttacagtgcgcggaatcgtgacccgagtgagtgaagtcaagccgaagatggtggttgctacgtacacttgtgatcaatgcggggctgagacttaccagccaatccagtccccaacctttatgccactgatcatgtgccctagtcaggaatgccagaccaaccgatcgggtggccgtttatacctgcagacaaggggaagcagattcatcaaatttcaggaaatgaagatgcaggagcattctgaccaggtgcccgtgggcaatattccacgctctatcaccgtgctggttgagggtgagaacacccgcatcgcccaaccaggcgatcatgtctcggttactggaattttccttcccattctgaggacaggttttaggcaggtggtacaaggcctgctaagtgagacctacttggaggctcaccggatcgtcaaaatgaacaagtctgaagacgatgaatctggcgcaggagaacttaccagggaagaattacgtcagatcgccgaagaagatttttatgaaaagctggccgctagtatcgcccctgagatttatgggcacgaggacgtgaagaaggctctcctgctgctgctcgtggggggagtagatcaatctccccgagggatgaaaatcagaggcaacattaacatttgtctaatgggggaccccggagtggctaagagccaactgctgagctatatagatcgcttggctcctcgctcgcagtacaccacaggcagaggttcctccggtgtcgggcttacagctgccgtcctgagggacagcgtcagtggagaactcactctggagggaggggcactagtcctcgcagaccagggtgtctgctgcatcgacgaattcgacaagatggctgaggccgatcggactgcaatacacgaggtcatggaacagcagactatctccattgccaaggcaggaatactgaccactctgaacgctagatgctccatcttggcagccgcaaacccagcatatggcagatacaatcctaggcggagcctcgaacagaacatccagctgccggctgccctgctgtcacgattcgacttgctgtggcttattcaggaccgaccagacagggataatgatttacgactggcacaacacatcacctatgtacatcaacactcccgtcagcccccatcacagttcgaaccgttggacatgaaactgatgcgcaggtatatcgccatgtgcagagagaagcagcccatggtgccggagagcctggctgactatattaccgccgcttatgtggaaatgcgcagggaggcctgggcatccaaagatgccacgtacactagtgctcggacattactggctattctgcgcctcagtacagcactggccaggctgagaatggtagatgttgtggagaaggaggatgtcaatgaggccattcggctgatggaaatgagcaaggacagtttgttgggagacaaggggcaaactgcacgcacccagaggcccgctgacgtgattttcgccacggtgagagagctcgtgagcggaggaaggtccgttcggttctcagaggccgagcagaggtgtgtttctcgcggttttacaccagcccagtttcaagcagcattggatgaatatgaagagcttaacgtttggcaagtcaatgcgtcaaggacccgcattacattcgtttag

SEQ ID NO: 230622 - DNA, 2475 bp, synthetic construct
  misc_feature 1..2475: note = Description of Artificial Sequence: Synthetic coding sequence
  source 1..2475: mol_type = other DNA
atgaacggcgaatatcggggacgcggtttcgggcgtggccgatttcagtcctggaaaagaggccgagggggtggcaactttagcggaaaatggcgcgagagagagcatcgaccagatctgagcaagacaaccggcaagcggacctccgaacagacacctcaatttctcctgtcaacaaagaccccccagtccatgcaatccactctggatcgctttatcccttacaaggggtggaagttatatttctccgaagtttatagtgactcgagcccccttattgagaaaatccaagcctttgaaaagttctttacaaggcacatcgatctgtacgacaaagatgaaattgagcgtaaaggctctattttggtcgacttcaaagagcttaccgaaggcggagaagtgaccaatctcatcccagatattgccacggaacttcgggatgcgcctgagaagaccctggcatgtatgggcctcgccattcatcaagtcctcacaaaggacttggaaagacatgcagcagagctccaggcccaggaaggtctctcaaacgacggcgagaccatggtcaacgtcccccatattcatgcccgagtttataattatgagcctctgacacaactgaagaacgtaagagcaaactattacggcaagtacattgcccttagaggcacagttgtgcgggtcagcaacatcaagccactctgtactaagatggcctttctgtgcgccgcttgcggggagatccagtcatttcccttacctgacgggaaatacagcctgcctacaaagtgccccgtgccagtgtgcagagggcgatccttcaccgccttgaggagctcaccgctgacagttaccatggactggcaatctatcaagatccaggagctgatgagtgatgatcagcgggaagctgggaggataccgagaacaatcgaatgcgaactggtacatgacctcgtggattcatgtgtgcccggtgatacagtgaccatcacaggcattgtgaaggtgtccaatgcagaagaagcgaactctatatccaattcgaagggccagaaaacgaagagttctgaggatggctgtaagcatggcatgctgatggaattttcactgaaggacctttatgcaattcaagaaattcaggctgaagaaaatctctttaaattaattgtcaacagtctctgcccagtgatatttggccatgaactcgtgaaggctggcctagcgctggccctctttggaggctcacagaagtatgcagatgataagaatcggatccccattagaggcgatccccatatcctggtcgtgggagacccaggactgggtaagagccagatgctgcaagccgcatgcaacgtggctcctcgaggggtgtatgtgtgtggtaatactaccacaacttccgggctaaccgtcaccctgtctaaggattcctctagtggcgacttcgccctcgaagcaggtgccctggtactgggagaccaggggatctgcggcatcgacgagttcgacaaaatgggtaatcagcatcaggctctgctggaagcaatggagcaacagagtatctctcttgccaaagccggagttgtgtgcagcctgccagccaggacgtcaatcatagcagctgccaacccagtgggtggccactacaataaggccaaaacggtatccgagaacttgaagatggggtccgccctgctgtccagatttgacctcgtgttcattctgctggacaccccaaatgaacaccatgatcatctgcttagcgaacatgtaattgctattagagctggcaagcagagaaccattagctccgctacagttgctaggatgaatagccaagactctaacacctccgtactggaagtggtcagcgagaagcccctcagcgagcgtctgaaggtggtgcctggcgagacgattgatcccatacctcaccagctgttgaggaagtacattggctatgcccgacagtatgtctatccacggttaagcaccgaggccgcacgtgtgttgcaggacttctacctggagctgagaaagcagagccagagactcaattcttctccaatcacgacgcggcaactggagagcctgattcggttaacagaagcgagggcgagactcgaactacgtgaagaggcgaccaaggaggatgcggaggacatcgtcgagatcatgaaatacagcatgctggggacttacagcgatgagtttggcaacctcgatttcgagcggagtcagcacggtagcgggatgagtaatcggtccacagcaaagaggtttatctccgctttaaataatgtcgcggagcgaacatacaacaatatcttccagtttcaccagctccggcagattgccaaagagttaaatattcaggtcgccgattttgagaacttcattggctccttgaatgaccaaggctaccttctcaagaaaggcccaaaggtctaccagctgcagacaatgtag

SEQ ID NO: 230623 - DNA, 2382 bp, synthetic construct
  misc_feature 1..2382: note = Description of Artificial Sequence: Synthetic coding sequence
  source 1..2382: mol_type = other DNA
atgaacggcgagtaccggggacgtgggttcggaaggggcaggttccagtcatggaaacggggaaggggagggggaaacttctctggcaagtggcgggaaagggagcatagacccgacttgtccaagacaaccggtaagcgcaccagtgagcaaactcctcagttcctgctgagtaccaagactccacagtctatgcagtcaaccttagacagattcattccgtacaagggttggaaactctacttctcggaagtgtatagtgacagcagtcccctgattgaaaagatccaggcctttgaaaagttcttcacccggcacattgatctgtacgacaaggatgaaatagagcgcaaaggcagcatattggtcgattttaaagaattgactgaggggggtgaagtgacgaatctgatcccagatatcgcaacagagttgagagacgcccctgaaaagacactggcctgcatgggcctcgcaattcatcaagtgttaactaaagatcttgagcgtcacgcggctgagttgcaggctcaggagggcctttctaatgatggggagacgatggtgaacgtccctcacatacacgctagggtatacaactacgagcctctcacccagttgaaaaatgtgcgcgcaaattattacggaaagtacattgccctgcggggaaccgtagtacgggttagcaatataaaaccactatgtaccaagatggcattcctttgtgctgcctgtggagagatacagtctttccccttgccagacggaaagtactccctgcctactaaatgtccagtgccagtatgtagggggaggtctttcaccgcactgaggagctcaccgctcactgtgacaatggactggcagtctattaaaatccaggagctgatgtccgatgaccagcgtgaggcaggcagaataccacgaacgatcgagtgcgaactggtccacgatctggttgactcctgtgtgccaggcgacacggtgaccattacaggcatcgtgaaagtttccaatgcagaggaaggaagcagaaataagaacgacaagtgcatgtttctgctttacatcgaggcaaattcaatttccaattcgaagggccagaagacaaagtcgtcagaggacggatgcaaacacgggatgctaatggaattcagcttgaaggatctgtatgccatacaggaaatccaggccgaagagaaccttttcaaactaatcgtgaacagcctgtgcccagttatatttgggcatgaggccgcatgtaatgtcgccccacggggagtgtacgtgtgtgggaacaccacaacaacctctggcctgaccgtgaccctgtcgaaagacagctctagcggcgattttgccctggaggccggtgctctggtcctaggggatcaaggcatttgcggcattgatgagttcgacaaaatgggaaaccagcaccaggcactcctagaggctatggagcagcagtctatctccctagctaaggccggagtcgtatgcagtctgcctgctcggacttctattatcgccgcagcaaatccagtcggaggccattacaataaggcaaaaactgtgagcgaaaatctgaaaatggggtctgctttactgagtaggtttgatttagtctttatactgctggacacacccaatgagcaccatgaccaccttctgagtgagcacgttatcgccatccgcgcaggcaagcagcgcacaattagttcggccactgtggccagaatgaatagtcaggattcaaatacaagtgttttagaggtcgtctccgaaaagcccctgagcgagaggctcaaggtggttcctggtgaaaccattgatcccattccccatcagctgctgcggaaatatatcggctatgccaggcagtacgtgtaccccagactttccacggaggcggcacgcgtgctccaggatttttatttagaactccgtaaacagagccagcggcttaactcttcacctatcacgacgcgtcaactggagagcctgattaggctgaccgaggctcgggctagactagagctccgagaggaagcaacaaaggaagatgctgaagacatcgtcgaaattatgaaatacagtatgcttggcacatatagcgatgagttcggcaacctcgacttcgaaagatcacagcatggttcaggtatgtccaatagatccaccgccaagcgctttatatcggctctaaacaatgtagctgagcgcacctacaataatatctttcagtttcaccagttgcgccaaatagccaaggaactgaatattcaggtggctgactttgaaaattttattggcagtttaaatgatcagggatacctacttaaaaagggtccgaaggtgtaccagctgcagactatgtag

SEQ ID NO: 230624 - DNA, 2643 bp, synthetic construct
  misc_feature 1..2643: note = Description of Artificial Sequence: Synthetic coding sequence
  source 1..2643: mol_type = other DNA
atgaacggtgaatataggggacgtgggtttggcagaggacggttccaatcctggaagcggggtcggggaggaggaaatttcagcggaaagtggagggagcgggagcaccggccagatctgtcaaagaccactggcaaaaggacctcggaacagacgccccagttcctgctgtccaccaagactcctcaaagcatgcagtcaactctcgaccgctttattccatacaagggttggaagctgtacttcagtgaggtgtattctgattcaagcccactcatcgagaaaattcaggccttcgaaaaattcttcacgcggcacatcgacctatacgacaaagatgagattgagcgaaaggggagtatcctggtggattttaaagagctgaccgaaggcggagaggtgacaaacctgattccagacattgctacggagctgcgcgatgctccagaaaagacgctggcttgcatgggcctggctattcaccaggttctgacaaaggacctagagaggcacgccgcagagcttcaggcccaggagggcttgtccaatgacggcgagactatggttaatgtaccccacatccacgccagggtgtacaattatgagcccctgacccagctcaagaatgtgagggctaattattatggaaaatatatcgcacttcggggtaccgtggtgagggtgtctaacatcaagcccctgtgtacaaaaatggcctttctgtgtgccgcatgcggcgagatccagtcctttcctctgcccgacggtaaatattccttaccgaccaagtgccctgtccctgtgtgccggggaaggtcttttacagctctccgctcaagccccttaacggtcaccatggactggcagtcaattaaaatacaagagttaatgtccgatgaccagagggaggccggtcgcatacccagaacaatcgagtgtgagctcgtgcacgacctcgtggactcctgtgtgcctggagatacagtgactattacagggatcgtgaaggtttcaaacgccgaggagggaagcaggaataaaaacgacaaatgcatgttcctgctctacattgaggccaactctatctcgaactcaaaaggccagaagactaaatcttcagaagatgggtgcaagcatgggatgcttatggaatttagtctcaaagatctctacgccatccaggagattcaagctgaggagaacctcttcaagttgatcgtcaaatggtcacttgccctttcccctcggctcgagtattcaggggctatatccgcccattgtaacctgcacctgccatcgtcaaactcctcgcccaccagcgcctgccgcgtcgccggtactactggcatgcgccatcaaacccagctcttactgcttgtgaaagctggactcgcacttgccctttttggaggtagtcaaaaatacgctgacgacaagaaccgcattcctatccgaggggacccacatattctggtcgtgggcgatcccggactcggaaagagccaaatgctacaggccgcttgcaatgtcgccccaaggggcgtgtacgtatgcggaaatacaactaccaccagtggactcaccgttaccttgagcaaagatagcagctcaggcgatttcgccctggaggcaggagccctcgtgctgggtgaccagggaatttgcggaatagacgaatttgacaaaatgggaaaccagcaccaggcactgctcgaggcgatggaacagcagtcgatctctctggccaaggccggagtagtgtgttctttacccgctcgcactagcatcattgccgcagctaaccctgttggaggccattacaacaaggctaaaacggtgtcagaaaaccttaaaatgggctccgcacttttaagtcgcttcgacctggtgttcatcttgctggacactcccaacgagcatcacgaccacctcttgtctgagcacgtgatcgccatccgggcaggcaagcagagaacaattagctcagcaactgtggcaagaatgaactctcaggattctaacacatccgtgcttgaggttgtgtcagaaaagcccctgagcgaaagactcaaggtggtgcccggagagaccattgatccaattcctcaccagttgctacgaaagtatatagggtacgcccgacagtatgtttatcccaggctgtctaccgaggcagctcgcgtactccaggacttttaccttgaactgcggaaacaatcgcaacgcctgaactcatctcccattaccacccggcagctagaatcgctgataaggctgaccgaagccagggccaggcttgaattacgggaggaagcaacaaaggaagatgctgaggatattgtggaaattatgaagtacagtatgctggggacatactcagacgagttcggcaaccttgactttgagcgtagccaacacggatcagggatgtctaacaggtccacagcaaaacgctttatcagcgccctgaacaatgttgccgaacgtacctacaacaatatttttcaattccaccagctgcgccagatcgccaaggagctcaacattcaagttgcagactttgaaaacttcataggtagcctgaacgaccaaggttatctgctcaagaaaggcccaaaagtctaccagcttcaaaccatgtag

SEQ ID NO: 230625 - DNA, 2523 bp, synthetic construct
  misc_feature 1..2523: note = Description of Artificial Sequence: Synthetic coding sequence
  source 1..2523: mol_type = other DNA
atgaacggagaatacagggggaggggttttggaaggggacgtttccagtcctggaagcgaggacggggaggcggtaatttctcaggcaaatggagagaaagggagcatcggccagatctcagcaagacaaccggaaagcgcacatcagaacagactccccagttccttctcagcactaaaactcctcaatccatgcagtctacacttgatagattcattccctacaaggggtggaagctgtactttagcgaagtgtatagtgacagcagccccctgatcgagaaaatacaagcgtttgagaaattttttacgcggcacatcgacctgtatgacaaagacgagattgaaaggaagggcagcattttggtagatttcaaagagctaacagaggggggagaagtcacgaatttgatccccgacatcgcaacagaactcagagacgcccctgagaaaaccttagcttgcatggggctggcaatccaccaggtcctgacaaaagacctagagcggcacgccgctgaactgcaggcccaggagggcctgtcaaatgacggggagaccatggtgaatgtgcctcacattcacgcacgagtgtacaattacgaaccgctcacgcagctgaagaacgttcgggctaactactacggcaagtatatagccctgcgcggaaccgtagtccgcgtctccaatataaaacccttatgcacgaagatggctttcctgtgcgcagcctgtggggaaatccagtcatttccactgcctgacgggaagtattccctaccaaccaagtgccccgttccagtgtgtaggggacgcagctttactgcgctgcgatcgtcacccctcaccgtaacaatggattggcaaagcattaagatccaagagctgatgtccgacgatcagcgtgaggccggaagaattccaaggaccatcgagtgtgagctggtccatgaccttgttgattcttgtgtgcccggtgacacagtgaccatcactgggattgtcaaagtatccaatgcagaggagggctcgcggaataaaaatgacaaatgtatgttcttgctgtacatcgaagcaaatagtataagcaactcgaaaggacaaaaaactaaatcctccgaggacgggtgtaaacatggaatgctcatggaattcagcctaaaagacctttacgcaatccaggaaatccaggccgaagaaaacttatttaaattaatagtgaactccttgtgccctgtgatatttgggcacgaattggtgaaagccggactcgccttagcactctttgggggatcacagaagtacgctgatgataaaaataggattcctatacggggagatcctcatatcctagttgttggggaccctgggctcggcaagtctcagatgctgcaggccgcttgcaacgtcgcgcctcgcggagtatacgtttgtggcaatacgaccaccacaagtggcctcacagttactctgtctaaggactcctcctcgggcgatttcgctctagaagcgggtgcactcgtgctgggcgaccagggcatctgcggcattgatgagttcgataagatgggcaatcagcaccaggccttgcttgaagctatggagcagcaaagtatctccctggccaaggcaggagtcgtctgttccctgcctgcgcgaacctctattattgctgccgcaaatcctgtagggggacactataacaaagccaaaacagtgtcagaaaatttaaagatgggctccgcgctgctgtctcggtttgatttagtcttcatcctcctagacactcctaacgaacatcatgatcatctgctctcagagcatgtaatcgccataagggcaggcaagcaaagaacaattagttcagccacagttgccagaatgaatagccaggattcgaatacatcagtgttggaggtggtgagtgagaagccactcagcgagagactcaaggtggtccccggagagactattgacccgatccctcaccagttattacgaaagtacatcggctatgcgcgacagtatgtctacccacgcctctccacagaagccgcacgagtgttacaggacttttatctcgagctgcggaagcaaagccaaaggttgaatagtagtcctatcaccactagacagctcgaatctctgatccggctgaccgaagcacgtgcccgactggaacttagagaggaggctaccaaagaggacgccgaggatatagtggagatcatgaaatattcgatgcttggcacatattccgacgagtttggcaatctagactttgaaaggtcccagcatggtagcggtatgagtaatcggtccacagcgaagcgattcatcagtgcacttaataacgtggctgagaggacctacaataatatcttccagttccatcaactcagacagatcgccaaagaactgaatatccaggtggcggatttcgaaaatttcataggctcccttaatgatcagggatacctgctgaagaagggccctaaagtatatcaattgcagactatgtag

SEQ ID NO: 230626 - DNA, 612 bp, synthetic construct
  misc_feature 1..612: note = Description of Artificial Sequence: Synthetic coding sequence
  source 1..612: mol_type = other DNA
atgaatggggaataccgcggacggggattcggcagagggaggtttcagtcttggaaacgaggacggggaggtgggaatttctcaggtaagtggagagaaagggaacatcggcctgatctgagtaaaaccaccggtaaaagaacgtctgagcagaccccacagtttctcttaagtactaaaaccccacagtctatgcagtcaaccctcgaccggtttattccctataagggctggaaattgtacttttcggaggtgtactcagatagtagcccgttaattgaaaagatacaggcattcgagaaattcttcactaggcatatcgatctctatgataaggatgaaatcgaacgtaaggggagcattctcgttgacttcaaagagcttactgagggcggagaggttacaaatttgattcctgatatcgccaccgagctgcgagatgcgcctgaaaagactctggcctgtatgggactggctattcaccaggttctcacaaaggacctggaacgtcacgcggctgaacttcaggctcaggagggactgtccaatgatggcgagacaatggtcaacgtgcctcatatacatttcttgaagaagaagaagaagatctag

SEQ ID NO: 230627 - DNA, 1329 bp, synthetic construct
  misc_feature 1..1329: note = Description of Artificial Sequence: Synthetic coding sequence
  source 1..1329: mol_type = other DNA
atggagaattggtccaaggacattacgcattcttatctggaacaggaaactacgggcattaacaagtctactcaacctgatgagcagctcactatgaactcagagaagtccatgcatcgcaagagtacagaactggtcaacgagatcacatgcgaaaacaccgagtggcccggacagcggtctactaatttccagattatctccagttaccctgatgatgagtccgtgtattgtaccacagaaaagtacaatgtgatggaacaccggcacaacgacatgcactatgagtgcatgaccccctgtcaagtgaccagtgactctgataaggagaaaacaattgcgtttctcctgaaggagttggatatcctccggacctccaacaaaaagctgcagcaaaaactggctaaagaggataaagagcagcgaaagctgaaattcaagttggaactgcaagaaaaagagacggaggctaagattgccgagaagaccgccgctctcgtcgaggaggtgtactttgcccagaaggaaagagatgaggccgtgatgtctcgcctccagctggcgatcgaggagagggatgaagcaattgcaagggcgaagcatatggagatgagcctgaaagtactggagaacattaatcctgaagagaacgatatgaccttacaggaactgctaaatcgcatcaacaatgcagacacaggaatagcgatccaaaagaacggagcaatcatagtcgacagaatctataagacaaaagaatgcaaaatgcgtattaccgccgaggagatgtcggcgttgatcgaagagcgcgatgccgcattgtccaagtgtaaaagattggagcaggagctgcaccacgtgaaggagcagaatcagacatcagccaataacatgaggcacttaaccgcagagaataatcaagaacgtgctctaaaggctaagctcctgagtatgcagcaggccagagaaaccgcagtgcagcagtataaaaagctggaggaagagatccagacccttagggtgtattactcgctccataaatcactttcgcaagaggagaacttgaaggaccaatttaattacacactctctacctacgaagaagctctgaaaaaccgggaaaatatcgtgtccattacacagcaacagaacgaagaactggcgacccagctgcagcaggccctcacagaacgcgctaacatggaacttcaactccagcacgcacgagaagccagtcaggtcgccaatgagaaagtccaaaagctggagcggctggtcgacgtactacggaagaaagtcgggacaggcactatgagaaccgtgatctag

SEQ ID NO: 230628 - DNA, 1329 bp, synthetic construct
  misc_feature 1..1329: note = Description of Artificial Sequence: Synthetic coding sequence
  source 1..1329: mol_type = other DNA
atggagaactggagtaaggatattacacatagctatctggagcaggagacaaccggcatcaataagagtacacagccggacgaacagctgactatgaatagcgaaaaaagcatgcataggaaatctacggaattagtaaatgaaataacatgtgagaatactgagtggccgggtcaacggtccaccaatttccagatcatctcatcctaccccgacgacgaatcggtttactgtacaactgaaaaatacaacgtaatggaacaccgccataatgatatgcactatgagtgcatgacgccatgtcaggtaacaagcgattccgacaaagagaagaccattgcattcctgcttaaagagcttgacatacttcggacatcgaacaaaaagctgcagcagaagttagccaaggaggataaagagcagagaaagctgaagttcaaactagaactgcaggaaaaggaaaccgaagcaaagatcgcggaaaagaccgctgctctggtggaggaggtgtatttcgctcagaaggagcgggatgaagcggtcatgagccgtctgcagcttgcaattgaagagcgcgacgaagccatagccagggccaagcatatggaaatgagcctgaaggtgctggaaaatattaaccccgaagagaacgacatgacactgcaggaactgcttaatcgaatcaacaatgcagataccggcattgccatccagaagaatggggctattatcgtcgaccgcatttacaagacaaaggagtgtaaaatgcggatcacagcagaggaaatgtctgcgctgatcgaagaaagagacgctgcattgtctaaatgcaaacgactggaacaggaactccaccatgtgaaggagcagaaccagaccagtgctaataacatgaggcatcttactgctgagaacaaccaggagagggcactgaaagccaagctgctgtctatgcagcaagctagggaaacagctgttcagcagtataagaaactcgaggaggagattcagactctccgtgtgtattatagtctccacaaaagcctgtctcaggaggaaaacctgaaggatcagttcaactacacactgtccacatacgaggaagcgctgaagaacagagaaaacattgtgagcattacccaacagcagaatgaggaactcgcgactcaactgcagcaggctcttactgagagagcaaacatggaattacaactgcaacacgctagagaggcttcccaagtggcaaatgaaaaggtgcagaagctggaacggctagttgatgtgctgagaaagaaggtgggcaccgggaccatgcgaaccgtaatttag

SEQ ID NO: 230629 - DNA, 786 bp, synthetic construct
  misc_feature 1..786: note = Description of Artificial Sequence: Synthetic coding sequence
  source 1..786: mol_type = other DNA
atgagcagactgcagctcgccattgaggagcgggatgaggccatcgccagggccaaacacatggagatgagtctgaaggtcttggaaaatattaatcccgaagagaacgacatgactcttcaggaacttttgaacaggatcaacaacgccgataccggaatcgcaatccagaaaaacggcgctatcatcgtggaccgcatttacaaaacaaaggaatgcaagatgcgcatcaccgcagaagaaatgtctgcccttatcgaagagcgggacgccgcattgtctaaatgtaaaaggctcgaacaggaattacaccatgtcaaggaacaaaaccagacgtccgctaataacatgcggcaccttacagctgagaataaccaggagagggccctaaaggcaaagctcctatctatgcagcaggccagggagacagccgtccagcagtataaaaaactggaagaagaaattcagactctacgagtgtattactccctgcacaaaagtctgtctcaggaggagaacctcaaggatcaattcaattacaccctaagtacctatgaagaggctctcaagaatcgcgaaaatatcgtatctattacacagcagcaaaacgaggagctcgcgacccagcttcagcaggccttgacagagcgcgcaaatatggaactgcagttgcagcacgcacgggaagctagtcaggtagcaaatgaaaaggtccagaagttggagcgactggttgacgtgctcagaaagaaagtcggcacaggcacgatgcgaaccgtcatttag

SEQ ID NO: 230630 - DNA, 1329 bp, synthetic construct
  misc_feature 1..1329: note = Description of Artificial Sequence: Synthetic coding sequence
  source 1..1329: mol_type = other DNA
atggagaattggagtaaagacatcacccactcctacctcgagcaggagactaccggaataaacaaaagcacgcagccagatgaacagctcacaatgaattctgagaagagcatgcatcgcaagtccacagagctggttaacgagataacttgcgagaatactgaatggcccggacaaaggagtaccaattttcagatcatctcttcctaccccgacgatgaaagcgtctactgtactactgaaaagtacaatgtgatggagcatcggcataacgatatgcattacgagtgcatgactccctgccaggtcacctctgactcagataaagagaagacgatcgctttccttttgaaagagctcgatattcttcggacctccaataagaagcttcaacaaaagctggccaaggaagacaaggagcagaggaaactcaagtttaaattagagctgcaggaaaaagaaaccgaagccaagatcgccgaaaagactgcagccttggtggaggaagtgtatttcgcccagaaggagcgcgatgaggcagtgatgagcagacttcagcttgccatcgaggaacgggatgaggccattgcgagggctaagcacatggaaatgtcgctgaaagtgttggaaaacattaacccagaagagaacgacatgactctgcaggagctgctgaaccggattaacaatgctgacaccggaattgccatacagaagaacggggcaattattgttgacagaatttataagactaaggagtgtaagatgagaattaccgcagaggaaatgtctgccttgatagaggaaagggatgccgctttgtctaaatgtaaacggcttgaacaggagctgcaccacgtgaaagaacagaaccagacctccgcaaacaacatgaggcacctcactgccgaaaataatcaggagcgtgcactgaaggctaagttgttaagtatgcagcaagccagggagacagcggtgcagcagtataaaaagctcgaggaagagatccagacactccgcgtatactatagcctacacaagtctttaagccaagaagagaacctgaaggatcagtttaactatactctctcaacctacgaggaagctttgaaaaatagggagaatatagtttcaattacccagcagcagaatgaagagctggcaacacagctgcaacaggcgttaaccgaacgggctaatatggagttacaactgcagcacgccagagaggctagccaggtggccaatgagaaagtgcagaagctggaacgcctggtcgatgtgctgcggaagaaagtaggaacaggaactatgcgaactgtgatttag

SEQ ID NO: 230631 - DNA, 1275 bp, synthetic construct
  misc_feature 1..1275: note = Description of Artificial Sequence: Synthetic coding sequence
  source 1..1275: mol_type = other DNA
atgaacagtgagaaatctatgcacagaaaatccacagagttggtgaatgagattacgtgcgagaacaccgaatggccagggcagaggtctaccaacttccagatcatctcctcatatcccgatgacgaatccgtttactgcaccacagagaagtataatgtcatggagcatagacacaacgacatgcattatgaatgtatgaccccatgccaggtaaccagtgacagtgacaaggagaagaccattgctttcctcctgaaggagctcgatatcctgcgaacctccaataaaaaactccaacagaagctggccaaggaagacaaagagcagaggaaactgaaattcaagttggaattgcaggaaaaagaaaccgaagccaaaatcgccgagaagacggccgcactggtggaagaagtctacttcgctcagaaggaacgggatgaagctgtgatgtcacggctccagcttgctatagaggagcgggatgaggccatcgccagagcgaaacatatggaaatgtcactgaaagtgttagagaacatcaatcccgaggagaacgatatgaccctacaggaattgcttaatcggattaataatgcagataccggcattgccatacaaaaaaacggggctattatcgttgataggatctacaaaaccaaggagtgcaagatgcgtatcaccgcggaagaaatgtctgcgcttatcgaggaacgggatgctgccctctcgaagtgtaagagattggagcaagagctccaccacgtcaaggaacagaatcagacctcggcaaacaacatgcgccacctcacagccgagaataaccaggagagagccttgaaagctaagttgcttagcatgcagcaagccagggagacagccgtccagcaatataagaaacttgaagaggagatacagacattgagagtgtactattcgctgcacaaatccctgtctcaggaagagaacttaaaggatcagtttaattatactttaagcacatacgaagaagcgctgaagaaccgggaaaacattgtgtctataactcagcaacagaacgaagagctggccacacagctgcagcaggccctgaccgagagggcaaatatggagctgcaacttcagcatgcacgcgaagcttctcaggtggccaatgaaaaagtgcaaaaatctcagattcagatttattttatccccaataaaaaggatgagcgagagaagtttctgatggacaaaaggcgcaaaattgtggctcactcaaagcagaacagttag

SEQ ID NO: 230632 - DNA, 315 bp, synthetic construct
  misc_feature 1..315: note = Description of Artificial Sequence: Synthetic coding sequence
  source 1..315: mol_type = other DNA
atggagaattggtcaaaagatattacccacagttatctggaacaagagactactggaataaataaatcaactcagcctgacgaacagttgaccatgaattcagaaaaatctatgcatcgaaagtccactgagctggtgaacgagataacgtgcgaaaatactgagtggcccggacagcgatcaaccaatttccaaatcatatccagctaccccgatgacgagagcgtctattgcaccaccgagaaatataatgtgatggagcaccgccacaatgacatgcattacgagtgcatgacaccatgccaagtcacatag

SEQ ID NO: 230633 - DNA, 387 bp, synthetic construct
  misc_feature 1..387: note = Description of Artificial Sequence: Synthetic coding sequence
  source 1..387: mol_type = other DNA
atggaaaactggtccaaagatatcacacactcttatctagagcaggagactactgggataaacaagagcacacaaccagatgagcagctgacaatgaactccgaaaagtcaatgcataggaaatccaccgaactggtgaatgaaattacatgcgagaacactgaatggccaggacaaagaagtaccaatttccagattatttccagctaccccgacgacgaaagcgtttattgcactactgagaaatacaatgtgatggaacatcgacacaatgacatgcattacgagtgcatgacgccctgtcaggtgacttctgactctgacaaggaaaaaactatcgccttcttactgaaagagctggacatactcagaacatccaataaatag

SEQ ID NO: 230634 - DNA, 3912 bp, synthetic construct
  misc_feature 1..3912: note = Description of Artificial Sequence: Synthetic coding sequence
  source 1..3912: mol_type = other DNA
atgggcgatcctgcacctgctcgtagtttagacgatatcgatctgagtgccctgagggatccggctggtattttcgaacttgttgaggtggttggcaacggcacatacgggcaagtttataaaggcaggcatgtgaagacgggccagctcgccgcaattaaggtgatggacgtgactgaagacgaagaagaggaaattaagcaggaaatcaatatgttgaaaaagtatagccatcaccggaatatcgcaacctactatggagcctttatcaaaaaatccccaccaggaaatgatgaccagctgtggctagtgatggagttttgcggggctggaagcgtgaccgatttagtcaagaacacaaaaggaaacgcactgaaagaagactgcatcgcttacatttgtcgcgaaattttgaggggcttggcccatctccacgcacataaggtcatacacagggacattaagggtcagaatgtgctgctcaccgagaatgcggaggtgaagctagttgattttggggtttcagcacagctggatagaaccgtgggcaggcgcaatacatttataggcaccccttattggatggctccggaggttattgcttgcgacgaaaatcccgatgccacatatgactatcggtctgacatttggtccctcggtatcacagcaatcgagatggccgagggtgcccctcctctgtgcgacatgcaccctatgcgagcactgttcctgatcccacggaacccgccaccaaggctaaagtccaaaaaatggtccaaaaagttcattgactttatagacacctgcctgattaagacttacttgtcccgcccacccactgagcagctgctgaagtttccctttattcgcgaccagccaaccgaacgccaggtgcggatccagctcaaggatcatatcgaccgcagtcggaagaaacgtggtgagaaggaggaaactgagtatgagtactccggatccgaagaagaagatgattcacacggagaggaaggcgaaccgtcttccatcatgaacgttcctggggagagcaccctaagacgcgaattcctgcggttacagcaggaaaacaaatctaactccgaagcactcaagcagcagcaacagctacagcagcaacaacagagagatccggaggctcatatcaaacatttgttgcaccagcgccagcgcaggattgaagagcagaaagaggaacgtcggagggtagaagagcagcagcgcagagaaagagaacaacggaagcttcaggaaaaggagcagcagaggaggctggaggacatgcaggctctgcggcgtgaagaggagaggagacaggcggagcgtgaacaggaatacaagcgcaagcagttggaagaacagaggcagtcggagaggctgcagcgacagctgcaacaagagcacgcctacctcaagtcgctgcaacagcagcagcagcagcaacagttgcagaaacagcagcagcaacagctattgcctggtgataggaagcctttgtatcattacggaagaggaatgaatcccgctgacaaaccagcatgggctagggaggtagaggagagaacaaggatgaataaacaacagaattctccacttgctaaatcaaaacctgggtcgacaggtcccgaaccgcctatcccccaagcatccccaggccctcccggaccactaagccagactccccctatgcagcgcccagtcgagccacaggaaggcccacacaaaagtcttgtggcccatcgtgtacctctgaagccgtatgctgccccagttccacgtagccagtccctgcaggaccagcctacccgcaacctcgcggcatttccagcctcacacgaccctgaccccgctatccccgctccaactgcaacaccctctgcccgtggcgcagtgatcaggcagaatagcgatccaacatcagaagggccaggcccttctcctaatcctccagcctgggtgcgacctgacaacgaggcccctcctaaggtgccgcagcgcacttccagcatcgcaacagccctgaatacgagtggcgcaggagggagtaggccagcacaggctgttagagctagcaaccctgatctaagacggagcgacccaggctgggaacggtcagattccgttctccccgcttcacatgggcatttaccccaggccggatcgctcgagaggaaccgcgtcggagtttcatctaaacccgactccagtcctgtgctttctccgggaaacaaggctaaaccagatgaccatagatctcgacccggacgccctgccagctataaacgggcaattggtgaggattttgtgttgctcaaggagagaacactggatgaggcaccacgacctcctaagaaggctatggattacagttcaagctccgaagaggtggagtcctcagaagatgacgaagaggagggcgagggaggacctgcagaaggatcccgcgacacaccgggaggcagatcagatggcgacaccgactcagtgtccacgatggtggttcatgacgtcgaagaaataacagggacacagcccccttacggtgggggtacaatggtagtgcagaggaccccagaggaagaaagaaatctgcttcatgctgatagcaatggctacaccaatctccctgacgtggtccaaccaagtcactcccccacagagaacagcaagggtcaaagccctccttccaaagatggaagcggcgattatcaatcgagaggactggtaaaggctcctgggaagagcagttttacaatgttcgtggacctaggcatctaccagcccggtggatctggcgattctatccctattacagccctcgtgggtggggagggcacccgtttagaccaattgcaatacgacgtgaggaaaggaagtgtagttaacgtcaatccaacaaacacccgggcacatagtgagaccccagaaattcgcaaatacaagaagcggtttaacagtgaaattttgtgtgcggcactttggggagtcaacctgctagtcggaactgagaatgggctgatgttactcgaccgctctgggcaggggaaggtttatggcctgatcggtaggcgaaggtttcagcaaatggatgtgctcgaagggttgaacctactgattaccatctctggtaaaaggaacaaactgcgggtctactacttgtcctggctgcgaaataagatactgcataacgatccagaagtcgaaaaaaagcaagggtggaccaccgtgggggacatggaaggatgtggacattatcgcgtcgtaaagtacgagagaattaaattcttggttatcgcactgaagagttccgtggaagtatacgcctgggctccaaaaccataccacaaatttatggcgttcaagtcatttgcggacttgcctcaccggccattacttgttgatttaacagtggaggagggacagcgcctgaaagtcatctacggctccagcgcgggtttccacgccgttgacgtcgactcaggcaattcttatgacatctacatacctgtgcacattcagagtcagatcacacctcacgccatcatctttctccccaacactgacgggatggagatgttgctctgctacgaggacgaaggcgtctatgtgaatacgtatggccgtattattaaggatgtggtgctccagtggggcgaaatgccgactagcgttgcgtacatctgttccaaccagatcatgggatggggagagaaggcgatcgaaattcggagtgtcgaaactggccaccttgatggtgtcttcatgcacaaaagagcccagcggctcaaattcctgtgtgagcgtaatgacaaagtcttctttgcctcggtacgaagcggagggtcttcacaggtttacttcatgacattgaaccgcaattgcattatgaactggtag

SEQ ID NO: 230635 - DNA, 3999 bp, synthetic construct
  misc_feature 1..3999: note = Description of Artificial Sequence: Synthetic coding sequence
  source 1..3999: mol_type = other DNA
atgggcgacccggctcccgctcgctcactggacgatatcgacttgagtgcactacgcgatcccgctggaatctttgagctggtggaggtggtggggaacggaacatacggccaggtctacaaaggacgacacgtgaagacggggcagcttgccgctataaaggtgatggatgtgacagaggacgaggaggaagagatcaaacaagaaatcaatatgcttaaaaaatatagccatcaccgaaacattgccacatattacggggcatttatcaagaaaagccctccaggcaatgacgaccaactctggctcgtgatggaattttgtggtgcgggtagcgtcaccgacctggtgaaaaacactaaaggaaacgctctgaaagaggactgcattgcatatatttgtcgcgagatcctgcggggtctcgcacatttgcatgcccacaaagtcatccatagggacattaagggccagaatgtcctattgacagagaatgccgaagtaaagcttgtcgatttcggcgtttccgcacagctggacaggacagttggtcggagaaacacttttatcggaacaccttattggatggctcccgaggtgatcgcatgtgatgaaaacccagatgcgacctatgactaccggtctgacatctggtcactgggaatcaccgctatcgagatggctgagggtgccccacctctctgcgatatgcatccaatgagggctctgtttctcatacctcgcaatcccccacctcggctgaagagcaagaaatggagtaaaaagtttatcgacttcatcgacacctgtctgataaaaacttacttgtctcggccacctactgagcagctcctgaaattcccctttatccgggaccaacctactgaacgtcaggttaggatccagctgaaagaccacattgaccgctcacggaagaaacggggagaaaaagaggagaccgagtacgaatacagcgggagtgaagaggaagatgattcgcatggcgaggagggggaaccttcctctatcatgaatgtccctggcgagagtaccctgcggagagaatttctccggctccagcaggagaacaaatccaacagcgaagcactgaagcagcagcagcaacttcagcagcagcaacagcgggaccctgaggcgcacatcaaacacttgcttcatcagcggcaacgacggatcgaggagcagaaagaggagcggcgaagagtcgaagagcaacagagacgcgagagggagcagagaaagctgcaggagaaggagcagcagcggagattggaagacatgcaagcactgcggagagaggaagagaggagacaggcagaacgggagcaggagtacaagaggaagcagctagaggaacagcgccagtcggaacgcctccagaggcagctccagcaggagcacgcctacctgaaatcactgcaacaacagcaacagcagcagcagctgcagaagcagcagcagcaacagttgctacctggcgaccgcaaaccgctttaccactatggccgaggaatgaatccggcagataagccagcctgggcaagggaggtggaggagcgcaccaggatgaataagcagcagaattctcccttggctaagtctaagcccggttcgaccggcccagagccccctattccccaggcgagtcccggaccacccggacctctatctcagacaccaccgatgcagagaccagtcgagccccaagagggaccacacaagtctctggttgcccaccgcgttccattaaaaccctatgcagccccagtgccccgatctcaatctctccaagaccagccgactagaaatcttgccgcattcccagcctcccacgatcctgatcccgctatcccagcacccaccgcaactccgtctgctaggggagctgtgatcagacagaattcggaccctacaagcgagggtccgggtccaagtcccaatccaccggcttgggttagaccagacaatgaggctccaccgaaggttccccaacggacctcctctattgcaaccgccttaaacacctccggcgcaggaggctcccgacctgcccaggccgtgcgggcaagacctaggagtaacagtgcatggcagatctatctgcagcgccgagctgagcggggtaccccaaagcctcccggtcctccagctcagcccccaggacccccaaatgcatcctctaaccccgatctgagacgctcagaccctggctgggagagatccgactctgtgctgcccgcttcccatggacatttacctcaggccggtagcctggaaagaaatcgggtaggcgtgtcatctaaacctgactcatccccagtgctatcacctggcaacaaagcaaagcccgatgatcacagatcacggcctggaagacccgcagacttcgtcctgctaaaggagagaacactcgacgaggctcccagacccccaaaaaaagccatggactattcctccagcagtgaagaggtagagagcagtgaagatgatgaagaagagggggagggtggtcctgctgagggcagccgcgacaccccagggggaagatcagacggcgacactgacagtgtgtcgaccatggtggtacatgacgtggaggagataacaggcacacaaccaccctatggaggcggaactatggtggttcaacgcaccccggaggaagaacggaacttactccacgcagattctaacggctacaccaaccttcccgacgtcgtgcagccaagtcactcacctactgagaacagtaagggtcagtctcctcccagtaaagatggaagcggcgactatcaatctcggggtttggtaaaggcacctgggaagtccagcttcaccatgtttgtcgacctaggaatttatcagcctggaggctctggcgactccatccctatcacagccctggtgggtggtgaaggcaccagactcgaccagctgcaatacgacgttcggaagggcagcgtcgtcaacgtgaaccctactaatacacgcgcacatagcgaaacgcctgaaataagaaaatataagaaacggtttaactctgagatcctgtgtgcagccttatggggagtgaaccttctcgtcggaacggagaacggcttgatgctactggaccggtctggtcaaggaaaagtgtacggcctgattgggagaagacggtttcagcagatggatgtccttgagggactaaatcttctgattactattagtggaaagcggaataagctgcgggtgtactatctcagttggcttagaaataaaatcctacacaatgaccccgaggtagaaaagaagcagggctggactacagtcggcgatatggagggatgcgggcattacagggtggtcaaatatgagcggattaagttcctcgtcatcgctctcaaatctagcgtggaagtgtatgcctgggctcccaagccttatcataaatttatggcctttaaaagtttcgccgatcttcctcatagacctttactggtcgatctgaccgtggaagagggtcaacggctcaaagtgatttacggctcatctgccggatttcatgccgttgatgtagactctgggaactcttatgatatatatattcctgtgcatattcagagtcagatcacaccacacgccattatcttcctgcctaacacagatggaatggaaatgctgttatgctatgaagatgagggtgtctacgtgaacacctacggaagaatcataaaggatgtggtcctgcagtggggagaaatgcccactagcgtggcctacatctgctctaaccagattatgggatggggtgagaaggctatcgaaatccgcagcgtggaaacgggacacctagatggggtctttatgcacaaacgtgctcagaggttaaaattcctctgcgagagaaacgacaaggtcttttttgcctccgtcaggtccggagggtcttcccaggtttattttatgacactgaaccgaaactgtattatgaactggtag

SEQ ID NO: 230636 - DNA, 3939 bp, synthetic construct
  misc_feature 1..3939: note = Description of Artificial Sequence: Synthetic coding sequence
  source 1..3939: mol_type = other DNA
atgggggatcccgctcctgccagatcactggatgacattgatctctctgccctgagggatcccgcagggatctttgagctagttgaagttgtgggaaatggcacgtacggacaggtatataaaggcaggcacgtgaagaccggccagttggccgcaatcaaggtgatggacgtaacggaggatgaagaggaggaaatcaagcaggaaatcaacatgctcaaaaagtacagccaccacagaaacattgccacctactatggcgctttcatcaagaagtccccaccgggaaacgacgaccagctgtggctggttatggaattttgtggggctgggtctgttacagatctcgtcaaaaacaccaaaggcaacgccttaaaggaagactgcatcgcctacatatgccgagagatcttgagaggactggcccatctgcatgcacacaaggtgatccatcgcgacatcaagggccagaatgttctactaaccgaaaacgctgaagtgaagctggtcgattttggggtaagtgcccagctcgatcgcacggtcggtcgtcgcaacaccttcataggcacaccttactggatggcacccgaggtcatcgcctgtgatgagaaccccgatgccacctacgattatcggtctgatatctggagtctaggaatcactgccattgaaatggccgaaggagcacctcctctatgcgatatgcacccaatgcgagccctgtttctgatcccccgtaaccccccaccacgtttgaagagcaagaagtggtctaaaaaatttatcgacttcattgatacgtgtctgatcaagacctatctcagcagaccccctacggagcagctcctgaagtttccttttatccgggaccagcctacggaacgccaggttcgaatccaacttaaggatcatatagacagatcacgtaagaagagaggggagaaagaggagacggaatatgagtactctggctccgaggaggaagacgactcccatggtgaggaaggtgagcctagctctatcatgaatgttcccggtgaatcaacactgaggcgcgaattcctgagactccagcaggagaacaaatcaaatagcgaagccctaaagcagcagcaacagcttcagcagcagcagcagagagatccagaggcacacatcaaacacctcttgcaccagcggcaacgaaggatagaagaacaaaaggaagagcggagaagggttgaggagcagcagcggagagagagggaacaaaggaagctgcaggaaaaagagcagcagagacgccttgaagatatgcaagcactgcggcgtgaagaagaaaggcggcaggctgaaagagaacaagaatataagagaaaacagctggaggaacagagacagagcgagcggctacagagacagctgcaacaggagcatgcatacctgaagtctctgcaacagcaacagcagcagcaacagctgcagaagcaacaacagcagcaattactgcccggagacaggaagccactgtaccattatggcagaggcatgaaccctgcggacaagcctgcctgggcccgtgaggttgaggaacgaacccggatgaacaagcagcaaaactcacctttagctaaatccaagccagggagcacaggacccgaacccccaattcctcaggcttcccccggtccccctggacctctgtcacaaactccacccatgcaacgccctgtggaacctcaggaaggccctcacaagagtcttcaggaccagcctactcgcaacctggctgcatttcccgcttcccatgaccctgatccagccataccggcaccaaccgctactccgagcgcacgtggggcagttatacgtcagaactcagatcctacgtctgagggcccagggccttccccaaacccaccagcttgggttagaccagacaacgaggcgcctcccaaggtaccacaacggacctcctcaatcgcgacagcactgaatactagtggtgctgggggatctaggcccgctcaagctgttcgcgcacgcccaaggtctaatagcgcttggcaaatatatctgcagaggcgggcagaaaggggtacaccaaaaccgcctgggccacctgcacagcctcctggccctcccaacgcatcctctaatcccgacctgcggagaagcgaccccggttgggaacgaagtgatagtgtattgccggcttctcatggtcatctgccacaggccggatctctcgagcggaaccgcgtcggtgtttcaagcaagccagactcttcacctgtactttctccgggtaataaagcgaagcccgacgatcaccggagccgccctggtcgccctgctgactttgttctgctgaaggagaggacactggacgaagcaccaaggccgcctaaaaaagccatggattatagctcaagctctgaggaagtagagtcttctgaggacgatgaagaggaaggtgagggcggacctgcagagggaagccgagacactcctggcggacgcagcgacggtgacaccgattcagtgagcacaatggtggttcacgacgtggaagagatcacaggcacccagccaccctacggcggtggaaccatggtggtacagcgtaccccagaggaggagaggaacctgttacacgccgactctaatggatatactaacttaccagacgtggtccaaccgtcacacagcccgaccgagaactccaaagggcagtccccccctagcaaagacgggagtggagactatcagtcccggggactcgtcaaagcaccagggaagtcctcttttacaatgttcgtggatctcggaatctaccagccaggtggctctggagacagcatccctattacagccttagtcggcggagagggcactaggctggaccagctgcagtacgatgttcgaaaaggatcagtggttaatgtgaatcccacaaataccagggcacacagcgagacaccggagatcaggaaatataaaaagaggtttaactctgaaattctatgcgcagctctctggggtgtgaatctcctggtggggaccgagaatggactgatgctcctggacagaagtggccagggcaaagtgtacggccttatagggcgtagaaggtttcagcagatggatgtgctggaaggactcaacctccttattaccatttcaggcaagcgcaacaagctgagggtgtactatctctcctggctgagaaacaagatcctgcataatgatcccgaagtcgagaaaaagcagggctggacgacagtgggtgatatggagggctgcggccattatcgggtggtgaagtatgagcgcatcaagtttttggtgatcgcactgaagtcctctgtcgaggtttatgcatgggcacccaagccctatcacaaattcatggcattcaaatccttcgcagatctgcctcatcggcctctgctagttgacttgacagttgaagaggggcagcggctcaaagtcatctacggcagttcagccggttttcatgcagttgacgtagatagcggtaactcctatgatatatacatcccagtgcatatccaaagccagataaccccccatgcaattatattcttgcctaatacagatggaatggaaatgctgctgtgttatgaggacgagggcgtatacgttaacacctacggcagaataatcaaagatgtggtgctgcagtggggtgaaatgcctacatctgtcgcatacatctgctcaaatcagatcatgggctggggagagaaagcgatcgagatccgctcagttgagactgggcacctcgatggggtttttatgcacaagcgcgcacagaggttgaaatttctgtgtgagcggaatgacaaggtcttcttcgcctccgtgcggtccggaggatcatctcaggtctattttatgaccctgaatagaaattgtattatgaactggtag

SEQ ID NO: 230637 - DNA, 879 bp, synthetic construct
  misc_feature 1..879: note = Description of Artificial Sequence: Synthetic coding sequence
  source 1..879: mol_type = other DNA
atgttgctcgaccggagtgggcagggaaaagtctacggactgatcggtcggcgtagatttcagcagatggacgtgcttgaggggctcaacctactgatcaccatatctggaaagcgtaataagttgcgtgtgtactatttgagttggctacgcaataaaattctgcataatgatcctgaagtggaaaaaaagcagggctggactactgtgggcgatatggaaggctgcgggcactacagagtcgtaaagtacgaaagaatcaagtttttggtgattgcgctgaagtcatcagtggaagtatatgcttgggcgccaaagccctatcacaaattcatggcattcaagtcctttgccgatctgccccacaggcccttactggtggacctcacagtggaggaaggccagagactgaaagtgatctatgggagtagcgcagggtttcacgccgtcgacgttgacagcggaaactcttatgacatctatatcccagtgcatatccaaagtcaaatcacaccccacgctattattttcctgcctaatacagatggcatggaaatgctcctatgctatgaggatgagggtgtctatgtgaacacatatggacgtataatcaaggatgtcgtgctgcagtggggggagatgcccacgtccgtggcttacatttgttctaaccagattatgggctggggagagaaggccatcgagattcggtctgtggagactggacaccttgacggcgtgttcatgcacaaaagggcccagaggctaaaattcctgtgtgaacggaacgacaaggtcttctttgccagtgtgaggtctggtggctccagtcaagtgtattttatgacactgaacagaaactgtatcatgaattggtag

SEQ ID NO: 230638 - DNA, 336 bp, synthetic construct
  misc_feature 1..336: note = Description of Artificial Sequence: Synthetic coding sequence
  source 1..336: mol_type = other DNA
atgggggaccccgctccagcacgctccctggacgacatcgacctcagtgctttgcgagcactgtggttccagtttttttatcactctggttcttctctggaatcgcccggtatgctgaatggtcctttccagcatcggaatagtcggatcatgactcaccgctccgcggagaagaccctgctaggcagtctgtctttgtggcggtggagcgcaatggagccgacagaccggtgtacgagagtcgggatgagtcgaagaggcagttggctgccaagcagaagttggatgagcagacggacacgtagaaagcgtagtaaccggagatctacgtgctag

SEQ ID NO: 230639 - DNA, 1014 bp, synthetic construct
  misc_feature 1..1014: note = Description of Artificial Sequence: Synthetic coding sequence
  source 1..1014: mol_type = other DNA
atgggcgctgccggatcttcggccctcgcgaggttcgtgctattggctcagagcaggcccggttggctcggcgttgcagcgctgggtctcacagccgtggcccttggggctgtggcatggcggagagcatggcctactaggcgcaggagactcctccagcaggttggtactgtcgcacaattatggatttatcctgtaaaatcctgcaagggcgttcccgtctcagaagctgaatgtacagcgatgggcttgagatcaggaaacttaagggaccgtttttggctggtgataaatcaggagggaaatatggtaacggcaagacaggagccaagactcgtgctaatctcattaacctgtgacggagacactctaacgttgagtgcagcctacaccaaggacctgctactgccaatcaaaactccaacaacgaacgcagtacataagtgcagagtgcacggattagagattgaaggcagagattgcggagaagcgacagctcagtggattacatcttttttaaagagtcagccatatcgcctcgttcactttgaaccccatatgcgccctaggcgccctcaccagattgcagatctatttagaccaaaagaccagattgcatatagtgacacatcccctttcctcatattgtcagaagcttctttggcagatttgaacagtcgtctggagaaaaaggtgaaagccacgaatttcaggcctaacatcgttatcagtggctgcgacgtctatgcagaggacagctgggacgaactgctcataggcgatgtagagttgaagagggtgatggcttgctcccgttgcatactcacaacagttgatcccgatacgggggtgatgtccagaaaggaaccactggagacactcaagtcctatcgccagtgcgatcctagtgaacgaaagctctatggtaagtcccctctgttcgggcagtatttcgtgcttgagaacccgggtacaatcaaagtaggtgacccggtgtacctgctaggacagtag

SEQ ID NO: 230640 - DNA, 774 bp, synthetic construct
  misc_feature 1..774: note = Description of Artificial Sequence: Synthetic coding sequence
  source 1..774: mol_type = other DNA
atgggagcctccagcagcagcgccttagcgagacttgggctgccggcaaggccatggccacgttggctgggcgtcgcggcattgggtctggccgctgtggctctggggacagtcgcttggaggcgggcatggcccagaaggcgcaggagactgcagcaagtgggaacagtggccaagttgtggatctacccagtgaagtcatgcaagggcgtgcctgtttctgaagcagaatgcaccgccatgggtctgcgctctggcaacctgagggacaggttttggctggtgatcaaggaggatgggcatatggtaactgccaggcaggaacctcggcttgttttgatctctattatctatgagaacaattgcttgatatttagagcccctgatatggaccagctggtgttaccctcaaagcagccatctagcaacaaactgcataattgtcgcatcttcggcctcgacattaagggcagggactgcggcaatgaggctgccaaatggttcacgaactttctgaagaccgaggcttacagattagttcagtttgaaaccaacatgaaagggaggaccagcaggaagctgctgccaactctcgaccaaaacttccaagttgcctatcccgactattgtccactcctcattatgactgatgcctctctggtcgacctgaataccagaatggaaaaaaagatgaagatggaaaatttccgaccgaacatcgtcgtgacaggttgcgacgcgttcgaagaggcttctgccacccggcgagactag

SEQ ID NO: 230641 - DNA, 1008 bp, synthetic construct
  misc_feature 1..1008: note = Description of Artificial Sequence: Synthetic coding sequence
  source 1..1008: mol_type = other DNA
atgggtgcttcctccagtagtgcactggctcggttaggattgccggcaagaccttggccaagatggctgggcgtcgcagctctcggcttagccgcagtagcattgggcacagtagcctggaggagggcttggcctcgacggcgaaggcggcttcaacaggtcggtacagtggccaagctttggatttaccccgtaaagtcctgcaagggggtgccagtgtccgaagctgagtgtaccgcgatggggttacgctcagggaatctccgtgacaggttctggctggttattaaagaagacgggcacatggtgaccgcccgtcaggagccgcgactggtgctgatatccatcatctatgaaaataactgcttgatttttagggcacctgacatggatcagctggttctcccatccaagcaaccctctagtaataagctgcacaactgtcggatttttgggttggatatcaaaggcagggattgtgggaatgaagctgccaagtggtttaccaattttctcaagacagaggcgtacaggctcgtgcaatttgagaccaatatgaagggtcgcacctcaagaaagcttctccctacacttgaccaaaacttccaagtggcctaccctgactattgcccactgttaatcatgacagacgcctctctggtagatttgaacacccgtatggaaaagaaaatgaaaatggagaacttccggcctaatatcgtggtcaccggatgtgacgcttttgaagaagacacttgggacgaactgttgataggctctgttgaagtgaaaaaagtgatggcttgtcctcggtgcatcctaactacagtggaccccgataccggagtcatcgatagaaagcagccactggacactctgaagagctacaggctgtgtgatcccagcgagcgagagttgtacaaactgtcacccttattcggcatttactactccgtggaaaagataggatcactgagggtgggtgaccctgtgtatcggatggtctag

SEQ ID NO: 230642 - DNA, 519 bp, synthetic construct
  misc_feature 1..519: note = Description of Artificial Sequence: Synthetic coding sequence
  source 1..519: mol_type = other DNA
ggacacatggtgactgcgagacaagagcccaggttggtactcatctccatcatttacgaaaataactgcctaatcttccgggcaccagatatggatcagctggtgctgccctccaagcagccctcgagtaacaagctgcacaattgccgcattttcggattggatataaaaggtagggactgcggcaatgaggccgctaaatggttcacaaatttcctgaaaaccgaggcttatcgacttgtccagtttgagactaacatgaagggcaggactagtcgtaagctcttgcctaccttagaccagaatttccaagtggcttatcccgactattgccctctcttgatcatgacggatgcctcgctggtagatctgaatacccgtatggagaagaaaatgaagatggagaattttaggcccaatattgtggttacaggatgcgatgctttcgaggaggatacctgggacgagctcctgatcggcagtgttgaggtgaagaaggtcatggcgtgcccgaggtag

SEQ ID NO: 230643 - DNA, 447 bp, synthetic construct
  misc_feature 1..447: note = Description of Artificial Sequence: Synthetic coding sequence
  source 1..447: mol_type = other DNA
atgcccttcgccgaggacaaaacctataagtacatctgtagaaacttcagcaacttttgtaatgtggacgtcgtggaaatcctgccctatctgccttgccttactgctagagaccaggacaggctgagggcaacttgtacactctccgggaacagagatactctttggcatttgtttaatactctgcagctcccaacttgggcaggcgaggaaacccccggaggacagtcctccggcagagggctggatttctccagtctcacttccggagcagtttggctgtggcagatgtctgacttctggagctgtttctccacttggacagtttcgatctggttaattctgcactgggtgttactgagattaaacttacaagtgttcgctaaatgtctggcccagagcaagtggccactgctactgccatccctctcatgcccaacgtggtag

SEQ ID NO: 230644 - DNA, 375 bp, synthetic construct
  misc_feature 1..375: note = Description of Artificial Sequence: Synthetic coding sequence
  source 1..375: mol_type = other DNA
atgccttttgccgaggataagacgtacaagtatatatgtcgcaatttctcaaatttttgcaatgttgatgtcgtcgagatcttaccgtacctgccttgtctgactgcacgcgaccaagacagactgcgggcaacatgtaccttgagtgggaacagagacacactctggcacctgttcaacaccctgcagcggaggcccggatgggtagaatattttatcgcagcgctgcgaggctgcgaattagtggatctcgccgacgaggttgccagcgtgtatcagagctatcagccacagttcagagcctctccagctgatgcccagccacaatctcacccaaaagagtcaagatggtggccgcctggtgtattactatag

SEQ ID NO: 230645 - DNA, 1200 bp, synthetic construct
  misc_feature 1..1200: note = Description of Artificial Sequence: Synthetic coding sequence
  source 1..1200: mol_type = other DNA
atgcctgttcaggagacccaggctcctgaatcccccggtgagaactctgaacaggccctgcagaccctgtccccacgtgctattccacggaatcccgacggcggtccgctggaatcctcgagcgatctcgcggctctctctcctctcactagctcaggacaccaggagcaggacaccgaactgggctctacccacacagccggtgcgactagtagtctcacgccgtctagaggcccagtttcccctagcgtgtcttttcaacccttggcacgatcgactcccagagcctcccggctgcctggtcctactgggagcgtcgtgtcaacaggaactagcttctcttcaagctctcccggtctagcctctgccggagcagctgagggtaaacagggtgcagaatccgaccaggctgaaccaattatctgctcttcaggggctgaagcccctgctaactcgctgccttctaaggtcccgaccacattaatgcctgtgaatacagtagctcttaaggtcccggcaaatccagccagcgtctcaactgttccctctaagcttcctacctcttcaaagccaccaggagccgtaccttcgaatgctctgacaaacccagccccttccaaacttcctatcaatagtacaagagctggtatggttccaagtaaagtgcctacctctatggttctcaccaaggtgtcagcttcaaccgtgcctaccgacggtagcagcaggaatgaggagactcctgcggctccgacccctgctggcgcaacaggaggctcgtccgcatggttagactcaagctctgaaaaccgtggtctgggcagtgagctgtctaagcccggtgtcttggcctctcaggttgactccccgttttcaggttgctttgaggacctggcaatttccgctagcacctcccttggaatgggcccatgtcatggtccggaagaaaatgagtacaaaagtgagggaacattcggaattcacgtggctgagaacccaagcatccagctgctggagggcaatcctgggcctcctgctgaccccgatggcggacccagaccccaggctgatagaaagttccaagaaagggaagtgccctgccacaggccaagccctggcgctttgtggctccaggtggccgtgacaggagtgctagttgtcacgcttttggtcgttctctacagacgaaggttgcactag

SEQ ID NO: 230646 - DNA, 1623 bp, synthetic construct
  misc_feature 1..1623: note = Description of Artificial Sequence: Synthetic coding sequence
  source 1..1623: mol_type = other DNA
atgccattcgccgaggataagacctataagtatatctgccgtaatttctcaaatttctgtaacgtggatgtggtggagattctaccctatctgccctgtctgacagccagagatcaggatcgccttagagctacctgcaccctcagtgggaacagggatactctttggcatcttttcaatacattgcaaagaagacccggatgggttgaatatttcattgctgccctgagaggctgcgagttagtggacctggcggacgaggtggcaagcgtttatcagtcctaccaacccagaacatctgatagaccacctgatccactggaaccacccagtctgccagctgaacgaccagggccaccaacccccgcagctgctcactccattccgtacaactcttgccgagaaaaggagccttcgtaccctatgccggtgcaggaaacacaagcgccagaatcacccggagagaattctgagcaggcactgcaaactctcagcccaagggctatccctcgcaacccagatggaggacctttagagagctcaagtgacttggccgcactgagtcctctcacatcaagtggccaccaagagcaggatacggagctgggctccacccatacggccggtgctacgtcatccctcactcctagcagggggccagtttccccaagcgtttcctttcagccgctcgctagatctacacctcgtgccagccgactgcctggtcctacagggtccgtcgtgtctactggtaccagcttctctagttcaagtcctggccttgcttccgccggtgcagctgaggggaagcagggagctgaatccgaccaggcagagcctataatttgcagcagcggcgctgaagcacccgctaactccctcccttctaaggtcccaactactttaatgcccgtaaatacagtcgcattgaaggttccagctaatcccgcttccgtgtcaacagtgcccagtaaattgcccacctcttcaaaacccccaggcgctgtgccatctaatgctctgaccaaccctgcacctagcaagttgcccatcaactctactcgggctggaatggtcccctcaaaggtgccaactagcatggtgctgaccaaagtctcagcttccacggtaccaacggacggctcctctaggaatgaggagacacctgcggcacccacaccagccggagccacaggtgggtcatccgcctggcttgacagctcttccgaaaaccggggtcttgggtccgagctaagtaagccaggtgtcttggcttcccaggtcgactccccatttagcggttgttttgaagacttagccattagcgcctccactagcctcggaatgggcccatgtcatgggccagaggaaaatgagtacaaatcagaagggaccttcggaatccacgtggcagagaaccccagtatccaattgcttgagggtaatccgggaccccctgccgatcccgatggaggaccgcgtccacaggcggaccggaagtttcaggagcgggaagtgccatgccaccgtccctctcctggtgctttgtggctccaggtggctgtaactggggttctagtagtgacactattagtggtgctgtaccggagacgcctgcattag

SEQ ID NO: 230647 - DNA, 993 bp, synthetic construct
  misc_feature 1..993: note = Description of Artificial Sequence: Synthetic coding sequence
  source 1..993: mol_type = other DNA
atggccgcagccgcaggtcggagtctgctgttactgcttagctctcgcggaggtgggggtggcggtgccggtggctgtggcgctttaaccgcgggttgtttccctggcctgggtgtgagccggcacagacagcagcagcaccaccggaccgtgcaccagcgtatagcctcgtggcagaatctaggtgctgtctactgctcaacagtcgtcccatcagacgatgtaacagtggtgtaccagaacgggctaccggttatcagtgttaggctacccagcaggcgggaaagatgccagttcactctaaagccaatttccgactctgtgggcgtgttcctacggcaactgcaggaagaagatcggggtattgatcgtgttgccatctactctccggatggcgtacgggtcgccgcttccaccgggatagatttattgctgctggatgatttcaagctcgtcatcaatgacctgacatatcacgtgcggccaccaaaaagagtcgagatgggtttttgtcatgtggggcagaacggtttcgaacttctgacaagttcttaccttcctgcaagtgctagccagtctgccgagatcatcgcagtacggattgagatctcccgcaaggccgaaaagaggactacactggtactctggggtgggcttgcgtatatggctactcaattcggtatactggctcgtttgacctggtgggagtactcttgggacatcatggagcctgtcacttatttcataacctacggctcagcaatggctatgtatgcatactttgtcatgaccagacaagagtacgtttacccagaagccagggatcgtcagtacctcctttttttccacaaaggagcaaagaaatctcgttttgacctcgagaagtataaccagctgaaagatgctatagcccaggcagaaatggatctcaaacgtctcagggacccacttcaggtgcacctcccactgagacagatcggcgaaaaggattag

SEQ ID NO: 230648 - DNA, 1056 bp, synthetic construct
  misc_feature 1..1056: note = Description of Artificial Sequence: Synthetic coding sequence
  source 1..1056: mol_type = other DNA
atggccgctgctgcaggacggtcgctgctcctgttgctgagttcacgcggaggcggtggcggaggagccggaggttgtggcgcacttaccgcgggatgtttcccaggtctcggcgtctcacgtcacaggcaacaacagcaccatcgaaccgttcaccagcggatcgcctcttggcaaaacctgggcgctgtctactgttccaccgttgtgccgtctgacgacgtcacggtggtttatcagaatggcctgcctgtgatctccgtcagactgcctagtcggcgagaacggtgccagtttacgctgaagcccatcagtgattccgtgggggtgtttctgagacaactccaggaggaggaccggggaatcgatcgggtcgctatttattctcctgatggagtgcgtgtggctgcctccactggtatcgatttgctgttgctcgatgacttcaaattagtgattaatgatctgacgtaccacgttaggccacctaaaagggatctcctctctcatgaaaacgctgctactctgaatgatgtgaagacactggtccagcaattgtataccactttgtgcattgagcagcaccagctgaacaaagaacgcgaactgatcgaaaggctcgaggacctcaaagagcagctcgcacccctagaaaaggtgagaatcgaaatctctcgtaaggcagaaaagagaacaacgctggtgctgtggggaggcctggcttacatggccacccagtttgggatcctggcaaggctcacttggtgggaatatagttgggacataatggaacccgtcacctactttataacctatggatcggctatggcaatgtacgcctactttgtgatgactcgccaggagtacgtttatcccgaagcccgagatcgacaatatcttttgtttttccacaaaggtgcaaagaaatctcggttcgatctcgaaaaatacaatcagctgaaggacgctattgcccaggctgaaatggacctgaagcgcttgagagaccctctgcaggtccatctgccactgaggcagatcggagagaaggactag

SEQ ID NO: 230649 - DNA, 909 bp, synthetic construct
  misc_feature 1..909: note = Description of Artificial Sequence: Synthetic coding sequence
  source 1..909: mol_type = other DNA
atggtgcatcagagaattgctagctggcagaatctgggtgctgtctactgttcgacggtcgtgccttccgacgatgtcaccgtcgtgtaccagaatggtctccctgtgatttctgtcagactgcctagccgtcgcgagcgatgtcagttcacattgaaacctataagcgacagtgtgggcgtgttcctgaggcaactgcaggaagaggacagaggtattgatcgggtggccatctacagccccgacggtgtcagggtcgcagcttccaccgggatcgacctgctgctattggacgatttcaagcttgtcataaacgacttaacctaccacgttcgaccccctaagagagacctgttaagtcacgagaacgcagctaccctcaatgacgtgaagaccttggtccaacaactgtacacaaccctctgcattgagcaacatcaactgaataaggaaagagaacttatagagaggctggaagacttaaaagagcagttggctcccctagagaaagtgagaattgagatttcaagaaaagcagagaaaagaactactctggttctctggggaggtctggcgtatatggcaacacagtttggcatattggctaggctgacctggtgggagtactcttgggacattatggagccagtgacatacttcataacttatgggtcagcgatggcaatgtacgcttatttcgtgatgacccggcaggaatacgtgtatcccgaggcacgggatcgccagtatcttctgtttttccataagggggctaagaaaagcagattcgacctcgaaaaatacaatcagcttaaggacgcaatcgcacaggccgagatggatcttaagcgcctaagggatcctctgcaagttcacttgccgctgcggcagatcggcgaaaaagactag

SEQ ID NO: 230650 - DNA, 912 bp, synthetic construct
  misc_feature 1..912: note = Description of Artificial Sequence: Synthetic coding sequence
  source 1..912: mol_type = other DNA
atggcggacgctgcaagccaggtcctgctgggatcagggttgactattctgtcccagccgttgatgtatgttaaagttcttatccaagtgggatatgaaccacttcctcccaccatcgggcgaaatatctttggccgacaggtgtgccagctcccgggattgtttagctatgcccagcacatagctagcatcgacgggagacgcggactttttaccggactgacccccaggctgtgcagtggagtgctcggcacggttgttcatggcaaagtccttcagcattatcaggaatccgataaaggtgaagagctgggcccaggtaatgtccaaaaggaggtgtcctcctcatttgatcacgtgattaaggagaccacgcgcgagatgattgctcgaagcgccgctacactgataactcaccccttccatgtgattacgctgagatccatggtgcagttcattggtcgagaaagcaagtattgtggactgtgcgactcaatcattactatttatcgcgaggaggggattttgggcttttttgccggtctggtgccgagattgcttggcgacatactgagtctctggctgtgcaatagtctcgcttatctggtaaatacatatgcccttgattctggagtgtcgactatgaacgaaatgaaatcctatagccaggccgttaccggatttttcgcctctatgctgacatacccgttcgtgctcgtttcaaacctgatggcggttaacaactgcgggctagccggtgggtgtccaccctatagcccaatatatacctcctggatagactgctggtgtatgctgcagaaagaaggcaatatgagcagggggaactccctctttttcaggaaggttcccttcggtaagacctactgctgtgatcttaagatgctcatctag

SEQ ID NO: 230651 - DNA, 468 bp, synthetic construct
  misc_feature 1..468: note = Description of Artificial Sequence: Synthetic coding sequence
  source 1..468: mol_type = other DNA
atggttcagttcatcggcagagagagtaaatattgcggcctatgtgacagcattattacaatctatcgtgaggagggaatactgggctttttcgccggactggtcccacgcctcctaggggacatcctttccttgtggctgtgcaattctctcgcttacctggtgaatacctatgccctggactccggcgttagtaccatgaatgagatgaaaagctacagtcaggccgtaactggctttttcgcttctatgctgacgtatcctttcgtgctggtttcaaacctgatggcggttaataactgtggattggcgggaggctgtcctccatactcccctatttatacctcttggatcgactgctggtgtatgcttcaaaaagagggcaatatgagtcggggtaattccttattcttcagaaaagtcccattcggaaaaacgtactgctgcgacctgaaaatgttgatctag

SEQ ID NO: 230652 - DNA, 360 bp, synthetic construct
  misc_feature 1..360: note = Description of Artificial Sequence: Synthetic coding sequence
  source 1..360: mol_type = other DNA
atggtgttacccctgccctggctgagtagataccacttcctacgactattgctcccatcttggagcctggccccacaaggctctcatggttgttgctcacagaacccaaaagcatctatggaggaacagacctcttccagaggtaatggcaagatgactagcccaccgagagggcctggtacgcatcgtacagcagagttggcacgcgcagaagaattgttggagcagcaactagagctgtaccaggcgctgttggagggtcaggagggggcttgggaggcacaagccctggtgctgaaaatacagaaacttaaagagcagatgcgcagacaccaggagtctttaggtgggggagcctag

SEQ ID NO: 230653 - DNA, 360 bp, synthetic construct
  misc_feature 1..360: note = Description of Artificial Sequence: Synthetic coding sequence
  source 1..360: mol_type = other DNA
atggtgctgcccctgccctggttatctcggtatcatttcctacggctgctcctgcccagctggtcactggcgccacagggatcacacggctgttgctcccagaacccaaaggcaagtatggaagagcagactaactcaagaggaaatggcaaaatgaccagtcctcctcggggacctggtacacacagaactgctgagctcgccagggcagaagaactccttgaacagcagctggaattatatcaagccttattagaggggcaggagggtgcttgggaagctcaggctctggtcttaaagattcagaagctcaaagagcaaatgcgaagacaccaggaaagcctcggagggggtgcctag

SEQ ID NO: 230654 - DNA, 360 bp, synthetic construct
  misc_feature 1..360: note = Description of Artificial Sequence: Synthetic coding sequence
  source 1..360: mol_type = other DNA
atggtactccccttaccatggctgtccagataccatttcctccgattgctcctgcccagttggagcttggctccacaggggagccacggctgctgcagccaaaaccccaaagcgtccatggaggagcaaactaatagcaggggcaatggcaagatgacatcgccgcctagaggtccaggtacccaccgtacagcggagcttgccagagctgaggagctactggagcagcaacttgagctgtaccaagccttgctggaggggcaagagggcgcatgggaggcccaagccttggttcttaagattcagaaactaaaagagcagatgcggcgacaccaggaatccctgggaggaggagcgtag

SEQ ID NO: 230655 - DNA, 360 bp, synthetic construct
  misc_feature 1..360: note = Description of Artificial Sequence: Synthetic coding sequence
  source 1..360: mol_type = other DNA
atggtcttgccactgccctggctctccaggtatcactttttaagacttcttcttccgtcctggagtctcgctccccagggaagccacgggtgttgctctcagaaccctaaagcgtccatggaggagcaaacgtcatccaggggaaacggaaaaatgaccagcccaccacgtggaccaggaacgcaccgcacggccgagcttgccagggctgaggaattactagaacagcagctggaactctatcaggccctccttgagggacaggagggcgcttgggaggctcaggccctggtgttgaaaattcaaaagcttaaggagcagatgcgacgccaccaagagagtctgggcggtggtgcatag

SEQ ID NO: 230656 - DNA, 360 bp, synthetic construct
  misc_feature 1..360: note = Description of Artificial Sequence: Synthetic coding sequence
  source 1..360: mol_type = other DNA
atggtattgccactcccatggctttctcgttaccacttcctgaggcttttgctgccttcctggagtcttgcccctcaggggagtcacggatgttgctcccagaaccccaaagcaagcatggaagaacaaacgagtagccggggaaacggaaaaatgacttccccacccaggggcccaggcacacatcgcacggcagaactcgcacgtgccgaggagctgctcgagcaacagctggaactttaccaggccctcctggagggacaggaaggcgcttgggaggctcaggcactcgtgcttaagatccagaagctcaaggagcagatgagaagacaccaagagtcgttagggggaggggcatag

SEQ ID NO: 230657 - DNA, 360 bp, synthetic construct
  misc_feature 1..360: note = Description of Artificial Sequence: Synthetic coding sequence
  source 1..360: mol_type = other DNA
atggtgctccccctgccgtggctgtcacggtaccattttttaaggctcctgctgccctcttggtccttagctccccagggatcacatggctgttgctcccagaatccaaaggcttctatggaaaagcaaacaaactctcggggaaacggcaagatgacgagtccccctcgagggcctgggactcacaggaccgccgaacttgccagggctgaggagctcctggaacaacaacttgagctctatcaagctttactggagggccaagaaggcgcttgggaggcgcaggccttggtcctgaaaattcagaagttgaaagaacagatgcggagacaccaggagtcccttgggggtggtgcctag

SEQ ID NO: 230658 - DNA, 360 bp, synthetic construct
  misc_feature 1..360: note = Description of Artificial Sequence: Synthetic coding sequence
  source 1..360: mol_type = other DNA
atggtgctacccctgccttggctgagtcgttaccatttcttgagactcttgctgccctcatggagtcttgctccacaaggatctcacggatgctgctctcagaaccccaaggcttcaatggaagaacagacaaatagtcgcggtaacggcaagatgacaagccccccacggggacctggtacccatcgaacagcagagttagccagggctgaagaattgctagagcagcagctagaattgtatcaggcccttcttgaggggcaggagggcgcttgggaggcgcaggctctcgtcctgaagattcagaagctgaaggagcaaatgcggcgacatcaggagtcgcttggcggaggcgcatag

SEQ ID NO: 230659 - DNA, 360 bp, synthetic construct
  misc_feature 1..360: note = Description of Artificial Sequence: Synthetic coding sequence
  source 1..360: mol_type = other DNA
atggtgctcccccttccctggctgtctaggtaccattttctgcggctgttactgcccagctggagcctagcaccacagggctcccacggttgttgtagccagaaccccaaagcaagcatggaggagcagactaacagtcgagggaacgggaaaatgacctccccgcctcgcggtccaggcacccaccgcacagccgagctggcgagggcggaggaactgctcgagcagcaactggagctgtaccaggctctgttggaaggacaggaaggggcatgggaagcgcaggcccttgttctgaagattcagaagttgaaggagcagatgaggcgtcaccaggagagcctggggggtggggcttag

SEQ ID NO: 230660 - DNA, 1059 bp, synthetic construct
  misc_feature 1..1059: note = Description of Artificial Sequence: Synthetic coding sequence
  source 1..1059: mol_type = other DNA
atggagagcggcggaaggccatccctctgtcagtttattcttctgggtaccacatcagtcgtaaccgctgctctctattctgtctacagacagaaagctcgagtgtctcaagaacttaagggcgctaagaaagtacaccttggggaggatttaaaaagcattttaagcgaggctccaggaaaatgcgtgccctacgccgtgatagaaggcgctgttcggagtgttaaagagacccttaattctcagttcgttgagaattgtaagggggtgatacagagactcacacttcaggaacataagatggtgtggaacagaacaacccatttgtggaatgattgtagtaaaataatacaccagagaacaaatacagttccattcgatctggtgcctcatgaagatggagtggatgtggctgtgcgtgtgttgaaaccactggacagtgtcgacctgggtctggagaccgtctatgagaaattccatccctcaatccagtcttttacagatgttattggacactacataagcggtgaacgccctaaaggaatccaggagaccgaggagatgcttaaggttggcgcaaccctcaccggagtaggcgaacttgtactggataacaactccgtcagattgcagccaccgaaacaaggaatgcaatactacctgtcgtctcaggattttgacagtctgttgcagaggcaggaatcgtccgtgcgcctgtggaaagtcttggcacttgtgttcggattcgctacctgcgcaacattgttttttattctcagaaagcagtacctgcagcgtcaagagagactcaggctcaagcaaatgcaggaggagttccaggagcatgaagcacaactgctgagcagggcaaaaccggaggatagagagtccctaaagtccgcttgcgtcgtatgtctgagctcctttaagagttgtgttttcctggagtgtggccacgtttgttcctgtaccgagtgttaccgcgcactgcctgagcctaagaagtgccctatctgccgacaggcaataacccgggtcatccccttgtacaattcctag

SEQ ID NO: 230661 - DNA, 2142 bp, synthetic construct
  misc_feature 1..2142: note = Description of Artificial Sequence: Synthetic coding sequence
  source 1..2142: mol_type = other DNA
atgctgtgtgtgggacgccttggagggcttggcgcaagggcagctgctctgccaccacgcagggctggccgaggcagccttgaagccggtattagggcacggagagtgtcaactagctggtccccagttggggcagccttcaacgtaaaaccgcagggatctcggcttgatctgttcggtgagcgaaggggtctattcggggttcctgagctctcggctccagaggggtttcacattgcccaggaaaaggccctccggaagaccgaactcctggtggacagagcctgttcaacacccccaggcccacagaccgttctgattttcgacgaactctcagattccttgtgtcgcgtagcagacctagctgacttcgtgaaaatcgcgcatcctgagcccgcattccgcgaggccgcagaagaggcatgccgctcgattgggaccatggtggagaaacttaataccaatgtcgatctgtatcagagtcttcaaaagctactggccgacaagaagcttgttgatagcctggatcccgaaaccagacgagtggccgagctcttcatgttcgacttcgagattagcgggatccatctggataaggaaaaaagaaagagggcagtcgatctcaacgtcaaaatcctggacctgagttccacattccttatgggaacgaattttcccaacaagatagaaaagcacctgttacccgagcatattaggaggaacttcacaagcgccggagatcatattataatagatgggctgcatgccgagagtccggacgatctcgttagggaagcggcatataaaatttttctataccctaatgctggacagctgaagtgtcttgaggagctgctgtcctcacgtgatctgctcgccaagctggtcgggtattcaaccttctctcaccgcgctctgcagggtactattgccaaaaatcccgaaaccgtcatgcagttcctggaaaagttgagtgataagctgagcgaacggaccctcaaggattttgaaatgattcgcggtatgaaaatgaaactcaacccacagaatagtgaagtcatgccgtgggatcctccttactacagcggagtcattagggcagaaagatacaatattgaaccgtccctctactgcccattctttagcctgggagcctgtatggagggtctcaacatcctgttgaacagactcttgggtatctcactatatgctgagcaaccggctaaaggtgaggtatggtctgaagacgtccgcaagctggccgttgttcatgagtccgagggactactggggtatatctactgtgatttctttcagagggccgataagccccaccaagactgccactttacaatccggggaggcagactaaaagaggacggagactaccagttgcccgtggtggtactgatgctgaatctgcctcgaagcagcaggtccagcccgacactgctgactcccagtatgatggaaaacctcttccacgagatgggacacgctatgcattcaatgttgggacgtaccaggtatcagcacgttactggaactaggtgtcctaccgacttcgcagaggtgccctccattctgatggaatacttcgctaatgattacagggttgtgaaccagtttgctagacactaccagacaggacaaccactaccaaagaacatggtctctcggttgtgcgaaagcaaaaaagtgtgtgccgctgcagatatgcagttgcaggtgttctacgctaccttggaccaaatataccacgggaaacaccccttaagaaattctacaaccgacatcttgaaggagactcaggagaagttttacgggctgccttacgttcccaatacagcgtggcagttacgctttagtcacctagtaggatatggagctcgttactacagttaccttatgtctcgagcagtggcttcaatggtttggaaggaatgtttcctacaggatccttttaaccgtgccgcaggcgagcggtaccgcagggaaatgctggctcacgggggtggtagagagcccatgttgatggtggaaggcatgctccagaagtgtccatctgtggacgattttgtgtctgctcttgtgagcgacttggatcttgatttcgagactttcctgatggatagtgaatag
